(19) United States
(12) Patent Application Publication
(10) Pub. No.: US 2024/0254512 A1
(43) Pub. Date: Aug. 1, 2024

(54) ANELLOVECTORS AND METHODS OF USE

(71) Applicant: FLAGSHIP PIONEERING INNOVATIONS V, INC., Cambridge, MA (US)

(72) Inventors: Nathan Lawrence Yozwiak, Newton, MA (US); Simeon Ungerleider Springer, Lexington, MA (US); Cesar A. Arze, Boston, MA (US); Kristian Graugaard Andersen, Cambridge, MA (US)

(21) Appl. No.: 18/559,921

(22) PCT Filed: May 11, 2022
(86) PCT No.: PCT/US22/28805

§ 371 Date: Nov. 9, 2023

Related U.S. Application Data
(60) Provisional application No. 63/187,877, filed on May 12, 2021.

(51) Int. Cl. C12N 15/86; C07K 14/005

(52) U.S. Cl. CPC C12N 15/86; C07K 14/005; C12N 2750/00022; C12N 2750/00043; C12N 2750/00051

(57) ABSTRACT

This invention relates generally to anellovectors and compositions and uses thereof.

### SEQUENCE LISTING

[0001] The instant application contains a Sequence Listing which has been submitted electronically in ASCII format and is hereby incorporated by reference in its entirety. Said ASCII copy, created on May 10, 2022, is named V2057-7019WO_SL.txt and is 16,689,317 bytes in size.

### BACKGROUND

[0002] There is an ongoing need to develop suitable vectors to deliver therapeutic genetic material to patients.

### SUMMARY

[0003] The present disclosure provides an anellovector, e.g., a synthetic anellovector, that can be used as a delivery vehicle, e.g., for delivering genetic material, for delivering an effector, e.g., a payload, or for delivering a therapeutic agent or a therapeutic effector to a eukaryotic cell (e.g., a human cell or a human tissue). In some embodiments, an anellovector (e.g., particle, e.g., a viral particle, e.g., an Anellovirus particle) comprises a genetic element (e.g., a genetic element comprising a therapeutic DNA sequence) encapsulated in a proteinaceous exterior (e.g., a proteinaceous exterior comprising an Anellovirus capsid protein, e.g., an Anellovirus ORF1 protein or a polypeptide encoded by an Anellovirus ORF1 nucleic acid, e.g., as described herein), which is capable of introducing the genetic element into a cell (e.g., a mammalian cell, e.g., a human cell). In some embodiments, the anellovector is a particle comprising a proteinaceous exterior comprising a polypeptide encoded by an Anellovirus ORF1 nucleic acid (e.g., an ORF1 nucleic acid of Alphatorquevirus. Betatorquevirus. or Gammatorquevirus, e.g., an ORF1 of Alphatorquevirus clade 1, Alphatorquevirus clade 2, Alphatorquevirus clade 3, Alphatorquevirus clade 4, Alphatorquevirus clade 5, Alphatorquevirus clade 6, or Alphatorquevirus clade 7, e.g., as described herein). The genetic element of an anellovector of the present disclosure is typically a circular and/or single-stranded DNA molecule (e.g., circular and single stranded), and generally includes a protein binding sequence that binds to the proteinaceous exterior enclosing it, or a polypeptide attached thereto, which may facilitate enclosure of the genetic element within the proteinaceous exterior and/or enrichment of the genetic element, relative to other nucleic acids, within the proteinaceous exterior. In some instances, the genetic element is circular or linear. In some instances, the genetic element comprises or encodes an effector (e.g., a nucleic acid effector, such as a non-coding RNA, or a polypeptide effector, e.g., a protein), e.g., which can be expressed in the cell. In some embodiments, the effector is a therapeutic agent or a therapeutic effector, e.g., as described herein. In some instances, the effector is an endogenous effector or an exogenous effector, e.g., to a wild-type Anellovirus or a target cell. In some embodiments, the effector is exogenous to a wild-type Anellovirus or a target cell. In some embodiments, the anellovector can deliver an effector into a cell by contacting the cell and introducing a genetic element encoding the effector into the cell, such that the effector is made or expressed by the cell. In certain instances, the effector is an endogenous effector (e.g., endogenous to the target cell but, e.g., provided in increased amounts by the anellovector). In other instances, the effector is an exogenous effector. The effector can, in some instances, modulate a function of the cell or modulate an activity or level of a target molecule in the cell. For example, the effector can decrease levels of a target protein in the cell (e.g., as described in Examples 3 and 4). In another example, the anellovector can deliver and express an effector, e.g., an exogenous protein, in vivo (e.g., as described in Examples 19 and 28). Anellovectors can be used, for example, to deliver genetic material to a target cell, tissue or subject; to deliver an effector to a target cell, tissue or subject; or for treatment of diseases and disorders, e.g., by delivering an effector that can operate as a therapeutic agent to a desired cell, tissue, or subject.

[0004] The invention further provides synthetic anellovectors. A synthetic anellovector has at least one structural difference compared to a wild-type virus (e.g., a wild-type Anellovirus, e.g., a described herein), e.g., a deletion, insertion, substitution, modification (e.g., enzymatic modification), relative to the wild-type virus. Generally, synthetic anellovectors include an exogenous genetic element enclosed within a proteinaceous exterior, which can be used for delivering the genetic element, or an effector (e.g., an exogenous effector or an endogenous effector) encoded therein (e.g., a polypeptide or nucleic acid effector), into eukaryotic (e.g., human) cells. In some embodiments, the anellovector does not cause a detectable and/or an unwanted immune or inflammarory response, e.g., does not cause more than a 1%, 5%, 10%, 15% increase in a molecular marker(s) of inflammation, e.g., TNF-alpha, IL-6, IL-12, IFN, as well as B-cell response e.g. reactive or neutralizing antibodies, e.g., the anellovector may be substantially non-immunogenic to the target cell, tissue or subject.

[0005] In an aspect, the invention features an anellovector comprising: (i) a genetic element comprising a promoter element and a sequence encoding an effector (e.g., an endogenous or exogenous effector), and a protein binding sequence (e.g., an exterior protein binding sequence, e.g., a packaging signal); and (ii) a proteinaceous exterior; wherein the genetic element is enclosed within the proteinaceous exterior (e.g., a capsid); and wherein the anellovector is capable of delivering the genetic element into a eukaryotic (e.g., mammalian, e.g., human) cell. In some embodiments, the genetic element is a single-stranded and/or circular DNA. Alternatively or in combination, the genetic element has one, two, three, or all of the following properties: is circular, is single-stranded, it integrates into the genome of a cell at a frequency of less than about 0.0001%, 0.001%, 0.005%, 0.01%, 0.05%, 0.1%, 0.5%, 1%, 1.5%, or 2% of the genetic element that enters the cell, and/or it integrates into the genome of a target cell at less than 1, 2, 3, 4, 5, 6, 7, 8, 9, 10, 15, 20, 25, or 30 copies per genome. In some embodiments, integration frequency is determined as described in Wang et al. (2004, Gene Therapy 11: 711-721, incorporated herein by reference in its entirety). In some embodiments, the genetic element is enclosed within the proteinaccous exterior. In some embodiments, the anellovector is capable of delivering the genetic element into a eukaryotic cell. In some embodiments, the genetic element comprises a nucleic acid sequence (e.g., a nucleic acid sequence of between 300-4000 nucleotides, e.g., between 300-3500 nucleotides, between 300-3000 nucleotides, between 300-2500 nucleotides, between 300-2000 nucleotides, between 300-1500 nucleotides) having at least 75% (e.g., at least 75, 76, 77, 78, 79, 80, 90, 91, 92, 93, 94, 95, 96, 97, 98, 99, or 100%) sequence identity to a sequence of a wild-type Anellovirus (e.g., a wild-type Torque Teno virus (TTV), Torque Teno mini virus (TTMV), or TTMDV sequence, e.g., a wild-type Anellovirus sequence as listed in any of Tables A1-A1417 or N1-N1417). In some embodiments, the genetic element comprises a nucleic acid sequence (e.g., a nucleic acid sequence of at least 300 nucleotides, 500 nucleotides, 1000 nucleotides, 1500 nucleotides, 2000 nucleotides, 2500 nucleotides, 3000 nucleotides or more) having at least 75% (e.g., at least 75, 76, 77, 78, 79, 80, 90, 91, 92, 93, 94, 95, 96, 97, 98, 99, or 100%) sequence identity to a sequence of a wild-type Anellovirus (e.g., a wild-type Anellovirus sequence as described herein, e.g., as listed in any of Tables A1-A1417 or N1-N1417). In some embodiments, the nucleic acid sequence is codon-optimized, e.g., for expression in a mammalian (e.g., human) cell. In some embodiments, at least 50%, 60%, 70%, 80%, 90%, 95%, 96%, 97%, 98%, 99%, or 100% of the codons in the nucleic acid sequence are codon-optimized, e.g., for expression in a mammalian (e.g., human) cell.

[0006] In an aspect, the invention features an infectious (to a human cell) particle comprising an Anellovirus capsid (e.g., a capsid comprising an Anellovirus ORF, e.g., ORF1, polypeptide) encapsulating a genetic element comprising a protein binding sequence that binds to the capsid and a heterologous (to the Anellovirus) sequence encoding a therapeutic effector. In some embodiments, the particle is capable of delivering the genetic element into a mammalian, e.g., human, cell. In some embodiments, the genetic element has less than about 6% (e.g., less than 6%, 5.5%, 5%, 4.5%, 4%, 3.5%, 3%, 2.5%, 2%, 1.5%, or less) identity to a wild type Anellovirus. In some embodiments, the genetic element has no more than 1.5%, 2%, 2.5%, 3%, 3.5%, 4%, 4.5%, 5%, 5.5% or 6% identity to a wild type Anellovirus. In some embodiments, the genetic element has at least about 2% to at least about 5.5% (e.g., 2 to 5%, 3% to 5%, 4% to 5%) identity to a wild type Anellovirus. In some embodiments, the genetic element has greater than about 2000, 3000, 4000, 4500, or 5000 nucleotides of non-viral sequence (e.g., non Anellovirus genome sequence). In some embodiments, the genetic element has greater than about 2000 to 5000, 2500 to 4500, 3000 to 4500, 2500 to 4500, 3500, or 4000, 4500 (e.g., between about 3000 to 4500) nucleotides of non-viral sequence (e.g., non Anellovirus genome sequence). In some embodiments, the genetic element is a single-stranded, circular DNA. Alternatively or in combination, the genetic element has one, two or 3 of the following properties: is circular, is single stranded, it integrates into the genome of a cell at a frequency of less than about 0.001%, 0.005%, 0.01%, 0.05%, 0.1%, 0.5%, 1%, 1.5%, or 2% of the genetic element that enters the cell, it integrates into the genome of a target cell at less than 1, 2, 3, 4, 5, 6, 7, 8, 9, 10, 15, 20, 25, or 30 copies per genome or integrates at a frequency of less than about 0.0001%, 0.001%, 0.005%, 0.01%, 0.05%, 0.1%, 0.5%, 1%, 1.5%, or 2% of the genetic element that enters the cell. In some embodiments, integration frequency is determined as described in Wang et al. (2004, Gene Therapy 11: 711-721, incorporated herein by reference in its entirety).

[0007] Also described herein are viral vectors and viral particles based on Anelloviruses, which can be used to deliver an agent (e.g., an exogenous effector or an endogenous effector, e.g., a therapeutic effector) to a cell (e.g., a cell in a subject to be treated therapeutically). In some embodiments, Anelloviruses can be used as effective delivery vehicles for introducing an agent, such as an effector described herein, to a target cell, e.g., a target cell in a subject to be treated therapeutically or prophylactically.

[0008] In an aspect, the invention features a polypeptide (e.g., a synthetic polypeptide, e.g., an ORF1 molecule) comprising (e.g., in series):
[0009] (i) a first region comprising an arginine-rich region, e.g., amino acid sequence having at least 70% (e.g., at least about 70, 80, 90, 95, 96, 97, 98, 99, or 100%) sequence identity to an arginine-rich region sequence described herein or a sequence of at least about 40 amino acids comprising at least 60%, 70%, or 80% basic residues (e.g., arginine, lysine, or a combination thereof),
[0010] (ii) a second region comprising a jelly-roll domain, e.g., an amino acid sequence having at least 30% (e.g., at least about 30, 35, 40, 50, 60, 70, 80, 90, 95, 96, 97, 98, 99, or 100%) sequence identity to a jelly-roll region sequence described herein or a sequence comprising at least 6 beta strands,
[0011] (iii) a third region comprising an amino acid sequence having at least 30% (e.g., at least about 30, 35, 40, 50, 60, 70, 80, 90, 95, 96, 97, 98, 99, or 100%) sequence identity to an N22 domain sequence described herein,
[0012] (iv) a fourth region comprising an amino acid sequence having at least 70% (e.g., at least about 70, 80, 90, 95, 96, 97, 98, 99, or 100%) sequence identity to an Anellovirus ORF1 C-terminal domain (CTD) sequence described herein, and
[0013] (v) optionally wherein the polypeptide has an amino acid sequence having less than 100%, 99%, 98%, 95%, 90%, 85%, 80% sequence identity to a wild type Anellovirus ORF1 protein described herein.

[0014] In some embodiments, the polypeptide comprises at least about 70, 80, 90, 95, 96, 97, 98, 99, or 100% sequence identity to an Anellovirus ORF1 molecule as described herein (e.g., as listed in any of Tables A1-A1417). In some embodiments, the polypeptide comprises at least about 70, 80, 90, 95, 96, 97, 98, 99, or 100% sequence identity to a subsequence (e.g., an arginine (Arg)-rich domain, a jelly-roll domain, a hypervariable region (HVR), an N22 domain, or a C-terminal domain (CTD)) of an Anellovirus ORF1 molecule as described herein (e.g., as listed in any of Tables A1-A1417). In one embodiment, the amino acid sequences of the (i), (ii), (iii), and (iv) region have at least 90% sequence identity to their respective references and wherein the polypeptide has an amino acid sequence having less than 100%, 99%, 98%, 95%, 90%, 85%, 80% sequence identity to a wild type Anellovirus ORF1 protein described herein.

[0015] In an aspect, the invention features a complex comprising a polypeptide as described herein (e.g., an Anellovirus ORF1 molecule as described herein) and a genetic element comprising a promoter element and a nucleic acid sequence (e.g., a DNA sequence) encoding an effector (e.g., an exogenous effector or an endogenous effector), and a protein binding sequence.

[0016] The present disclosure further provides nucleic acid molecules (e.g., a nucleic acid molecule that includes a genetic element as described herein, or a nucleic acid molecule that includes a sequence encoding a proteinaceous exterior protein as described herein). A nucleic acid molecule of the invention may include one or both of (a) a genetic element as described herein, and (b) a nucleic acid sequence encoding a proteinaceous exterior protein as described herein.

[0017] In an aspect, the invention features an isolated nucleic acid molecule comprising a genetic element comprising a promoter element operably linked to a sequence encoding an effector, e.g., a payload, and an exterior protein binding sequence. In some embodiments, the exterior protein binding sequence includes a sequence at least 75% (at least 80%, 85%, 90%, 95%, 97%, 100%) identical to a 5′UTR sequence of an Anellovirus, as disclosed herein. In some embodiments, the genetic element is a single-stranded DNA, is circular, integrates at a frequency of less than about 0.001%, 0.005%, 0.01%, 0.05%, 0.1%, 0.5%, 1%, 1.5%, or 2% of the genetic element that enters the cell, and/or integrates into the genome of a target cell at less than 1, 2, 3, 4, 5, 6, 7, 8, 9, 10, 15, 20, 25, or 30 copies per genome or integrates at a frequency of less than about 0.001%, 0.005%, 0.01%, 0.05%, 0.1%, 0.5%, 1%, 1.5%, or 2% of the genetic element that enters the cell. In some embodiments, integration frequency is determined as described in Wang et al. (2004, Gene Therapy 11: 711-721, incorporated herein by reference in its entirety). In embodiments, the effector does not originate from TTV and is not an SV40-miR-S1. In embodiments, the nucleic acid molecule does not comprise the polynucleotide sequence of TTMV-LY2. In embodiments, the promoter element is capable of directing expression of the effector in a eukaryotic (e.g., mammalian, e.g., human) cell.

[0018] In some embodiments, the nucleic acid molecule is circular. In some embodiments, the nucleic acid molecule is linear. In some embodiments, a nucleic acid molecule described herein comprises one or more modified nucleotides (e.g., a base modification, sugar modification, or backbone modification).

[0019] In some embodiments, the nucleic acid molecule comprises a sequence encoding an ORF1 molecule (e.g., an Anellovirus ORF1 protein, e.g., as described herein). In some embodiments, the nucleic acid molecule comprises a sequence encoding an ORF2 molecule (e.g., an Anellovirus ORF2 protein, e.g., as described herein). In some embodiments, the nucleic acid molecule comprises a sequence encoding an ORF3 molecule (e.g., an Anellovirus ORF3 protein, e.g., as described herein). In an aspect, the invention features a genetic element comprising one, two, or three of: (i) a promoter element and a sequence encoding an effector, e.g., an exogenous or endogenous effector; (ii) at least 72 contiguous nucleotides (e.g., at least 72, 73, 74, 75, 76, 77, 78, 79, 80, 90, 100, or 150 nucleotides) having at least 75% (e.g., at least 75, 76, 77, 78, 79, 80, 90, 91, 92, 93, 94, 95, 96, 97, 98, 99, or 100%) sequence identity to a wild-type Anellovirus sequence; or at least 100 (e.g., at least 300, 500, 1000, 1500) contiguous nucleotides having at least 72% (e.g., at least 72, 73, 74, 75, 76, 77, 78, 79, 80, 90, 91, 92, 93, 94, 95, 96, 97, 98, 99, or 100%) sequence identity to a wild-type Anellovirus sequence; and (iii) a protein binding sequence, e.g., an exterior protein binding sequence, and wherein the nucleic acid construct is a single-stranded DNA; and wherein the nucleic acid construct is circular, integrates at a frequency of less than about 0.001%, 0.005%, 0.01%, 0.05%, 0.1%, 0.5%, 1%, 1.5%, or 2% of the genetic element that enters the cell, and/or integrates into the genome of a target cell at less than 1, 2, 3, 4, 5, 6, 7, 8, 9, 10, 15, 20, 25, or 30 copies per genome In some embodiments, a genetic element encoding an effector (e.g., an exogenous or endogenous effector, e.g., as described herein) is codon optimized. In some embodiments, the genetic element is circular. In some embodiments, the genetic element is linear. In some embodiments, the genetic element comprises an anellovector, e.g., as described herein. In some embodiments, a genetic element described herein comprises one or more modified nucleotides (e.g., a base modification, sugar modification, or backbone modification). In some embodiments, the genetic element comprises a sequence encoding an ORF1 molecule (e.g., an Anellovirus ORF1 protein, e.g., as described herein). In some embodiments, the genetic element comprises a sequence encoding an ORF2 molecule (e.g., an Anellovirus ORF2 protein, e.g., as described herein). In some embodiments, the genetic element comprises a sequence encoding an ORF3 molecule (e.g., an Anellovirus ORF3 protein, e.g., as described herein).

[0020] In an aspect, the invention features a host cell or helper cell comprising: (a) a nucleic acid comprising a sequence encoding one or more of an ORF1 molecule, an ORF2 molecule, or an ORF3 molecule (e.g. a sequence encoding an Anellovirus ORF1 polypeptide described herein), wherein the nucleic acid is a plasmid, is a viral nucleic acid, or is integrated into a helper cell chromosome; and (b) a genetic element, wherein the genetic element comprises (i) a promoter element operably linked to a nucleic acid sequence (e.g., a DNA sequence) encoding an effector (e.g., an exogenous effector or an endogenous effector) and (ii) a protein binding sequence that binds the polypeptide of (a), wherein optionally the genetic element does not encode an ORF1 polypeptide (e.g., an ORF1 protein). For example, the host cell or helper cell comprises (a) and (b) either in cis (both part of the same nucleic acid molecule) or in trans (each part of a different nucleic acid molecule). In embodiments, the genetic element of (b) is circular, single-stranded DNA. In some embodiments, the host cell is a manufacturing cell line. In some embodiments, the host cell or helper cell is adherent or in suspension, or both. In some embodiments, the host cell or helper cell is grown in a microcarrier. In some embodiments, the host cell or helper cell is compatible with cGMP manufacturing practices. In some embodiments, the host cell or helper cell is grown in a medium suitable for promoting cell growth. In certain embodiments, once the host cell or helper cell has grown sufficiently (e.g., to an appropriate cell density), the medium may be exchanged with a medium suitable for production of anellovectors by the host cell or helper cell.

[0021] In an aspect, the invention features a pharmaceutical composition comprising an anellovector (e.g., a synthetic anellovector) as described herein. In embodiments, the pharmaceutical composition further comprises a pharmaceutically acceptable carrier or excipient. In embodiments, the pharmaceutical composition comprises a unit dose comprising about 10⁵-10¹⁴ genome equivalents of the anellovector per kilogram of a target subject. In some embodiments, the pharmaceutical composition comprising the preparation will be stable over an acceptable period of time and temperature, and/or be compatible with the desired route of administration and/or any devices this route of administration will require, e.g., needles or syringes. In some embodiments, the pharmaceutical composition is formulated for administration as a single dose or multiple doses. In some embodiments, the pharmaceutical composition is formulated at the site of administration, e.g., by a healthcare professional. In some embodiments, the pharmaceutical composition comprises a desired concentration of anellovector genomes or genomic equivalents (e.g., as defined by number of genomes per volume).

[0022] In an aspect, the invention features a method of treating a disease or disorder in a subject, the method comprising administering to the subject an anellovector, e.g., a synthetic anellovector, e.g., as described herein.

[0023] In an aspect, the invention features a method of delivering an effector or payload (e.g., an endogenous or exogenous effector) to a cell, tissue or subject, the method comprising administering to the subject an anellovector, e.g., a synthetic anellovector, e.g., as described herein, wherein the anellovector comprises a nucleic acid sequence encoding the effector. In embodiments, the payload is a nucleic acid. In embodiments, the payload is a polypeptide.

[0024] In an aspect, the invention features a method of delivering an anellovector to a cell, comprising contacting the anellovector, e.g., a synthetic anellovector, e.g., as described herein, with a cell, e.g., a eukaryotic cell, e.g., a mammalian cell, e.g., in vivo or ex vivo.

[0025] In an aspect, the invention features a method of making an anellovector, e.g., a synthetic anellovector. The method includes:
[0026] a) providing a host cell comprising:
[0027] (i) a first nucleic acid molecule comprising the nucleic acid sequence of a genetic element of an anellovector, e.g., a synthetic anellovector, as described herein, and
[0028] (ii) the first nucleic acid or a second nucleic acid molecule encoding one or more of an amino acid sequence chosen from ORF1, ORF2, ORF2/2, ORF2/3, ORF1/1, or ORF1/2, e.g., as listed in any of Tables A1-A1417, or an amino acid sequence having at least 70% (e.g., at least 70%, 75%, 80%, 85%, 90%, 95%, 96%, 97%, 98%, 99%, or 100%) sequence identity thereto; and
[0029] b) incubating the host cell under conditions suitable to make the anellovector.

[0030] In some embodiments, the method further includes, prior to step (a), introducing the first nucleic acid molecule and/or the second nucleic acid molecule into the host cell. In some embodiments, the second nucleic acid molecule is introduced into the host cell prior to, concurrently with, or after the first nucleic acid molecule. In other embodiments, the second nucleic acid molecule is integrated into the genome of the host cell. In some embodiments, the second nucleic acid molecule is a helper (e.g., a helper plasmid or the genome of a helper virus).

[0031] In another aspect, the invention features a method of manufacturing an anellovector composition, comprising:
[0032] a) providing a host cell comprising, e.g., expressing one or more components (e.g., all of the components) of an anellovector, e.g., a synthetic anellovector, e.g., as described herein. For example, the host cell comprises (a) a nucleic acid comprising a sequence encoding an Anellovirus ORF1 polypeptide described herein, wherein the nucleic acid is a plasmid, is a viral nucleic acid, or is integrated into a helper cell chromosome; and (b) a genetic element, wherein the genetic element comprises (i) a promoter element operably linked to a nucleic acid sequence (e.g., a DNA sequence) encoding an effector (e.g., an exogenous effector or an endogenous effector) and (i) a protein binding sequence (e.g, packaging sequence) that binds the polypeptide of (a), wherein the host cell or helper cell comprises (a) and (b) either in cis or in trans. In embodiments, the genetic element of (b) is circular, single-stranded DNA. In some embodiments, the host cell is a manufacturing cell line:
[0033] b) culturing the host cell under conditions suitable for producing a preparation of anellovectors from the host cell, wherein the anellovectors of the preparation comprise a proteinaceous exterior (e.g., comprising an ORF1 molecule) encapsulating the genetic element (e.g., as described herein), thereby making a preparation of anellovectors; and
[0034] optionally, c) formulating the preparation of anellovectors, e.g., as a pharmaceutical composition suitable for administration to a subject.

[0035] In some embodiments, the components of the anellovector are introduced into the host cell at the time of production (e.g., by transient transfection). In some embodiments, the host cell stably expresses the components of the anellovector (e.g., wherein one or more nucleic acids encoding the components of the anellovector are introduced into the host cell, or a progenitor thereof, e.g., by stable transfection).

[0036] In some embodiments, the method further comprises one or more purification steps (e.g., purification by sedimentation, chromatography, and/or ultrafiltration). In some embodiments, the purification steps comprise removing one or more of serum, host cell DNA, host cell proteins, particles lacking the genetic element, and/or phenol red from the preparation. In some embodiments, the resultant preparation or a pharmaceutical composition comprising the preparation will be stable over an acceptable period of time and temperature, and/or be compatible with the desired route of administration and/or any devices this route of administration will require, e.g., needles or syringes.

[0037] In an aspect, the invention features a method of manufacturing an anellovector composition, comprising: a) providing a plurality of anellovectors described herein, or a preparation of anellovectors described herein; and b) formulating the anellovectors or preparation thereof, e.g., as a pharmaceutical composition suitable for administration to a subject.

[0038] In an aspect, the invention features a method of making a host cell, e.g., a first host cell or a producer cell (e.g., as shown in FIG. 12), e.g., a population of first host cells, comprising an anellovector, the method comprising introducing a genetic element, e.g., as described herein, to a host cell and culturing the host cell under conditions suitable for production of the anellovector. In some embodiments, the method further comprises introducing a helper, e.g., a helper virus, to the host cell. In some embodiments, the introducing comprises transfection (e.g., chemical transfection) or electroporation of the host cell with the anellovector.

[0039] In an aspect, the invention features a method of making an anellovector, comprising providing a host cell, e.g., a first host cell or producer cell (e.g., as shown in FIG. 12), comprising an anellovector, e.g., as described herein, and purifying the anellovector from the host cell. In some embodiments, the method further comprises, prior to the providing step, contacting the host cell with an anellovector, e.g., as described herein, and incubating the host cell under conditions suitable for production of the anellovector. In some embodiments, the host cell is the first host cell or producer cell described in the above method of making a host cell. In some embodiments, purifying the anellovector from the host cell comprises lysing the host cell.

[0040] In some embodiments, the method further comprises a second step of contacting the anellovector produced by the first host cell or producer cell with a second host cell, e.g., a permissive cell (e.g., as shown in FIG. 12), e.g., a population of second host cells. In some embodiments, the method further comprises incubating the second host cell inder conditions suitable for production of the anellovector. In some embodiments, the method further comprises purifying an anellovector from the second host cell, e.g., thereby producing an anellovector seed population. In some embodiments, at least about 2-100-fold more of the anellovector is produced from the population of second host cells than from the population of first host cells. In some embodiments, purifying the anellovector from the second host cell comprises lysing the second host cell. In some embodiments, the method further comprises a second step of contacting the anellovector produced by the second host cell with a third host cell, e.g., permissive cells (e.g., as shown in FIG. 12), e.g., a population of third host cells. In some embodiments, the method further comprises incubating the third host cell inder conditions suitable for production of the anellovector. In some embodiments, the method further comprises purifying an anellovector from the third host cell, e.g., thereby producing an anellovector stock population. In some embodiments, purifying the anellovector from the third host cell comprises lysing the third host cell. In some embodiments, at least about 2-100-fold more of the anellovector is produced from the population of third host cells than from the population of second host cells.

[0041] In some embodiments, the host cell is grown in a medium suitable for promoting cell growth. In certain embodiments, once the host cell has grown sufficiently (e.g., to an appropriate cell density), the medium may be exchanged with a medium suitable for production of anellovectors by the host cell. In some embodiments, anellovectors produced by a host cell separated from the host cell (e.g., by lysing the host cell) prior to contact with a second host cell. In some embodiments, anellovectors produced by a host cell are contacted with a second host cell without an intervening purification step.

[0042] In an aspect, the invention features a method of making a pharmaceutical anellovector preparation. The method comprises (a) making an anellovector preparation as described herein, (b) evaluating the preparation (e.g., a pharmaceutical anellovector preparation, anellovector seed population or the anellovector stock population) for one or more pharmaceutical quality control parameters, e.g., identity, purity, titer, potency (e.g., in genomic equivalents per anellovector particle), and/or the nucleic acid sequence, e.g., from the genetic element comprised by the anellovector, and (c) formulating the preparation for pharmaceutical use of the evaluation meets a predetermined criterion, e.g, meets a pharmaceutical specification. In some embodiments, evaluating identity comprises evaluating (e.g., confirming) the sequence of the genetic element of the anellovector, e.g., the sequence encoding the effector. In some embodiments, evaluating purity comprises evaluating the amount of an impurity, e.g., mycoplasma, endotoxin, host cell nucleic acids (e.g., host cell DNA and/or host cell RNA), animal-derived process impurities (e.g., serum albumin or trypsin), replication-competent agents (RCA), e.g., replication-competent virus or unwanted anellovectors (e.g., an anellovector other than the desired anellovector, e.g., a synthetic anellovector as described herein), free viral capsid protein, adventitious agents, and aggregates. In some embodiments, evalating titer comprises evaluating the ratio of functional versus non-functional (e.g., infectious vs non-infectious) anellovectors in the preparation (e.g., as evaluated by HPLC). In some embodiments, evaluating potency comprises evaluating the level of anellovector function (e.g., expression and/or function of an effector encoded therein or genomic equivalents) detectable in the preparation.

[0043] In some embodiments, the formulated preparation is substantially free of pathogens, host cell contaminants or impurities; has a predetermined level of non-infectious particles or a predetermined ratio of particles; infectious units (e.g., <300:1, <200:1, <100:1, or <50:1). In some embodiments, multiple anellovectors can be produced in a single batch. In some embodiments, the levels of the anellovectors produced in the batch can be evaluated (e.g., individually or together).

[0044] In an aspect, the invention features a host cell comprising:
[0045] (i) a first nucleic acid molecule comprising the nucleic acid sequence of a genetic element of an anellovector as described herein, and
[0046] (ii) optionally, a second nucleic acid molecule encoding one or more of an amino acid sequence chosen from ORF1, ORF2, ORF2/2, ORF2/3, ORF1/1, or ORF1/2 as listed in any of Tables A1-A1417, or an amino acid sequence having at least about 70% (e.g., at least about 70, 80, 90, 95, 96, 97, 98, 99, or 100%) sequence identity thereto.

[0047] In an aspect, the invention features a reaction mixture comprising an anellovector described herein and a helper virus, wherein the helper virus comprises a polynucleotide, e.g., a polynucleotide encoding an exterior protein, (e.g., an exterior protein capable of binding to the exterior protein binding sequence and, optionally, a lipid envelope), a polynucleotide encoding a replication protein (e.g., a polymerase), or any combination thereof.

[0048] In some embodiments, an anellovector (e.g., a synthetic anellovector) is isolated, e.g., isolated from a host cell and/or isolated from other constituents in a solution (e.g., a supernatant). In some embodiments, an anellovector (e.g., a synthetic anellovector) is purified, e.g., from a solution (e.g., a supernatant). In some embodiments, an anellovector is enriched in a solution relative to other constituents in the solution.

[0049] In some embodiments of any of the aforesaid anellovectors, compositions or methods, providing an anellovector comprises separating (e.g., harvesting) an anellovector from a composition comprising an anellovector-producing cell, e.g., as described herein. In other embodiments, providing an anellovector comprises obtaining an anellovector or a preparation thereof, e.g., from a third party.

[0050] In some embodiments of any of the aforesaid anellovectors, anellovectors, compositions or methods, the genetic element comprises an anellovector genome, e.g., as identified according to the method described in Example 9. In embodiments, the anellovector genome is an anellovector genome capable of self-replication and/or self-amplification. In some embodiments, the anellovector genome is not capable of self-replication and/or self-amplification. In some embodiments, the anellovector genome is capable of replicating and/or being amplified in trans. e.g., in the presence of a helper, e.g., a helper virus.

[0051] Additional features of any of the aforesaid anellovectors, anellovectors, compositions or methods include one or more of the following enumerated embodiments.

[0052] Those skilled in the art will recognize, or be able to ascertain using no more than routine experimentation, many equivalents to the specific embodiments of the invention described herein. Such equivalents are intended to be encompassed by the following enumerated embodiments.

### Enumerated Embodiments

[0053] 1. An anellovector comprising:
[0054] (i) a proteinaceous exterior comprising an Anellovirus ORF1 protein as listed in any of Tables A1-A1417, or a polypeptide comprising an amino acid sequence having at least about 70%, 75%, 80%, 85%, 90%, 95%, 96%, 97%, 98%, or 99% sequence identity thereto, and
[0055] (ii) a genetic element enclosed by the proteinaceous exterior, wherein the genetic element comprises a promoter element operably linked to a nucleic acid sequence (e.g., a DNA sequence) encoding an exogenous effector.

[0056] 2. An anellovector comprising:
[0057] (i) a proteinaceous exterior comprising an Anellovirus ORF1 protein as listed in any of Tables A1-A1417, or a polypeptide comprising an amino acid sequence having at least about 70%, 75%, 80%, 85%, 90%, 95%, 96%, 97%, 98%, or 99% sequence identity thereto, and
[0058] (ii) a genetic element enclosed by the proteinaceous exterior, wherein the genetic element comprises a promoter element operably linked to a nucleic acid sequence (e.g., a DNA sequence) encoding an effector (e.g., an exogenous effector or an endogenous effector);
[0059] wherein the proteinaceous exterior and/or the genetic element comprises at least one difference (e.g., a mutation, chemical modification, or epigenetic alteration) relative to a wild-type Anellovirus ORF1 protein and/or wild-type Anellovirus genome, respectively (e.g., as described herein), e.g., an insertion, substitution, chemical or enzymatic modification, and/or deletion, e.g., a deletion of a domain (e.g., one or more of an arginine-rich region, jelly-roll domain, HVR, N22, or CTD, e.g., as described herein) or genomic region (e.g., one or more of a TATA box, cap site, transcriptional start site, 5′ UTR, open reading frame (ORF), poly(A) signal, or GC-rich region, e.g., as described herein).

[0060] 3. An anellovector comprising:
[0061] (i) a proteinaceous exterior comprising a polypeptide encoded by an Anellovirus ORF1 nucleic acid sequence as listed in any of Tables N1-N1417, or a polypeptide encoded by a nucleic acid sequence having at least about 70%, 75%, 80%, 85%, 90%, 95%, 96%, 97%, 98%, or 99% sequence identity to the Anellovirus ORF1 nucleic acid sequence, and
[0062] (ii) a genetic element enclosed by the proteinaceous exterior, wherein the genetic element comprises a promoter element operably linked to a nucleic acid sequence (e.g., a DNA sequence) encoding an exogenous effector.

[0063] 4. An anellovector comprising:
[0064] (i) a proteinaceous exterior comprising a polypeptide encoded by an Anellovirus ORF1 nucleic acid sequence as listed in any of Tables N1-N1417, or a polypeptide encoded by a nucleic acid sequence having at least about 70%, 75%, 80%, 85%, 90%, 95%, 96%, 97%, 98%, or 99% sequence identity to the Anellovirus ORF1 nucleic acid sequence, and
[0065] (ii) a genetic element enclosed by the proteinaceous exterior, wherein the genetic element comprises a promoter element operably linked to a nucleic acid sequence (e.g., a DNA sequence) encoding an effector (e.g., an exogenous effector or an endogenous effector);
[0066] wherein the proteinaceous exterior and/or the genetic element comprises at least one difference (e.g., a mutation, chemical modification, or epigenetic alteration) relative to a wild-type Anellovirus ORF1 protein and/or wild-type Anellovirus genome, respectively (e.g., as described herein), e.g., an insertion, substitution, chemical or enzymatic modification, and/or deletion, e.g., a deletion of a domain (e.g., one or more of an arginine-rich region, jelly-roll domain, HVR, N22, or CTD, e.g., as described herein) or genomic region (e.g., one or more of a TATA box, cap site, transcriptional start site, 5′ UTR, open reading frame (ORF), poly(A) signal, or GC-rich region, e.g., as described herein).

[0067] 5. An anellovector comprising:
[0068] (i) a proteinaceous exterior (e.g., comprising an Anellovirus ORF1 molecule as described herein, or a polypeptide comprising an amino acid sequence having at least about 70%, 75%, 80%, 85%, 90%, 95%, 96%, 97%, 98%, or 99% sequence identity thereto), and
[0069] (ii) a genetic element enclosed by the proteinaceous exterior, wherein the genetic element comprises: (a) a 5′ UTR conserved domain as listed in any of Tables N1-N1417, or a nucleic acid sequence having at least 70%, 75%, 80%, 85%, 90%, 95%, 96%, 97%, 98%, 99%, or 100% sequence identity thereto, and (b) a promoter element operably linked to a nucleic acid sequence (e.g., a DNA sequence) encoding an exogenous effector.

[0070] 6. An anellovector comprising:
[0071] (i) a proteinaceous exterior (e.g., comprising an Anellovirus ORF1 molecule as described herein, or a polypeptide comprising an amino acid sequence having at least about 70%, 75%, 80%, 85%, 90%, 95%, 96%, 97%, 98%, or 99% sequence identity thereto), and
[0072] (ii) a genetic element enclosed by the proteinaceous exterior, wherein the genetic element comprises: (a) a 5′ UTR conserved domain as listed in any of Tables N1-N1417, or a nucleic acid sequence having at least 70%, 75%, 80%, 85%, 90%, 95%, 96%, 97%, 98%, 99%, or 100% sequence identity thereto, and (b) a promoter element operably linked to a nucleic acid sequence (e.g., a DNA sequence) encoding an effector (e.g., an exogenous effector or an endogenous effector);
[0073] wherein the proteinaceous exterior and/or the genetic element comprises at least one difference (e.g., a mutation, chemical modification, or epigenetic alteration) relative to a wild-type Anellovirus ORF1 protein and/or wild-type Anellovirus genome, respectively (e.g., as described herein), e.g., an insertion, substitution, chemical or enzymatic modification, and/or deletion, e.g., a deletion of a domain (e.g., one or more of an arginine-rich region, jelly-roll domain, HVR, N22, or CTD, e.g., as described herein) or genomic region (e.g., one or more of a TATA box, cap site, transcriptional start site, 5′ UTR, open reading frame (ORF), poly(A) signal, or GC-rich region, e.g., as described herein).

[0074] 7. An anellovector comprising:
[0075] (i) a proteinaceous exterior (e.g., comprising an Anellovirus ORF1 molecule as described herein, or a polypeptide comprising an amino acid sequence having at least about 70%, 75%, 80%, 85%, 90%, 95%, 96%, 97%, 98%, or 99% sequence identity thereto), and
[0076] (ii) a genetic element enclosed by the proteinaceous exterior, wherein the genetic element comprises a promoter element operably linked to a nucleic acid sequence (e.g., a DNA sequence) encoding an exogenous effector, and wherein the genetic element has at least about 70%, 75%, 80%, 85%, 90%, 95%, 96%, 97%, 98%, 99%, or 100% sequence identity to an Anellovirus genome sequence as listed in any of Tables N1-N1417.

[0077] 8. An anellovector comprising:
[0078] (i) a proteinaceous exterior (e.g., comprising an Anellovirus ORF1 molecule as described herein, or a polypeptide comprising an amino acid sequence having at least about 70%, 75%, 80%, 85%, 90%, 95%, 96%, 97%, 98%, or 99% sequence identity thereto), and
[0079] (ii) a genetic element enclosed by the proteinaceous exterior, wherein the genetic element comprises a promoter element operably linked to a nucleic acid sequence (e.g., a DNA sequence) encoding an effector (e.g., an exogenous effector or an endogenous effector), and wherein the genetic element has at least about 70%, 75%, 80%, 85%, 90%, 95%, 96%, 97%, 98%, 99%, or 100% sequence identity to an Anellovirus genome sequence as listed in any of Tables N1-N1417;
[0080] wherein the proteinaceous exterior and/or the genetic element comprises at least one difference (e.g., a mutation, chemical modification, or epigenetic alteration) relative to a wild-type Anellovirus ORF 1 protein and/or wild-type Anellovirus genome, respectively (e.g., as described herein), e.g., an insertion, substitution, chemical or enzymatic modification, and/or deletion, e.g., a deletion of a domain (e.g., one or more of an arginine-rich region, jelly-roll domain, HVR, N22, or CTD, e.g., as described herein) or genomic region (e.g., one or more of a TATA box, cap site, transcriptional start site, 5′ UTR, open reading frame (ORF), poly(A) signal, or GC-rich region, e.g., as described herein).

[0081] 9. The anellovector of any of the preceding embodiments, wherein the at least one difference relative to a wild-type Anellovirus ORF1 protein and/or wild-type Anellovirus genome comprises encoding an exogenous effector.

[0082] 10. The anellovector of any of the preceding embodiments, wherein the proteinaceous exterior comprises the amino acid sequence YNPX²DXGX²N (SEQ ID NO: 5202), wherein Xⁿ is a contiguous sequence of any n amino acids.

[0083] 11. An isolated ORF1 molecule comprising the amino acid sequence of an ORF1 as listed in any of Tables A1-A1417, or an amino acid sequence having at least about 70%, 75%, 80%, 85%, 90%, 95%, 96%, 97%, 98%, 99%, or 100% sequence identity thereto:
[0084] wherein the ORF1 molecule comprises at least one difference (e.g., a mutation, chemical modification, or epigenetic alteration) relative to a wild-type ORF1 protein (e.g., as described herein), e.g., an insertion, substitution, chemical or enzymatic modification, and/or deletion, e.g., a deletion of a domain (e.g., one or more of an arginine-rich region, jelly-roll domain, HVR, N22, or CTD, e.g., as described herein).

[0085] 12. An isolated ORF1 molecule comprising the amino acid sequence of the jelly-roll domain of an ORF1 as listed in any of Tables A1-A1417, or an amino acid sequence having at least about 70%, 75%, 80%, 85%, 90%, 95%, 96%, 97%, 98%, 99%, or 100% sequence identity thereto:
[0086] wherein the ORF1 molecule comprises at least one difference (e.g., a mutation, chemical modification, or epigenetic alteration) relative to a wild-type ORF1 protein (e.g., as described herein), e.g., an insertion, substitution, chemical or enzymatic modification, and/or deletion, e.g., a deletion of a domain (e.g., one or more of an arginine-rich region, jelly-roll domain, HVR, N22, or CTD, e.g., as described herein).

[0087] 13. The ORF1 molecule of any one of embodiments 11-12, wherein the ORF1 molecule comprises the amino acid sequence YNPX²DXGX²N (SEQ ID NO: 5202), wherein Xⁿ is a contiguous sequence of any n amino acids.

[0088] 14. The ORF1 molecule of embodiment 13, wherein the amino acid sequence YNPX²DXGX²N (SEQ ID NO: 5202) is comprised in an N22 domain of the ORF1 molecule.

[0089] 15. The ORF1 molecule of any one of embodiments 11-14, wherein the ORF1 molecule comprises one or more (e.g., 1, 2, 3, 4, or all 5) of the following Anellovirus ORF1 subdomains: an arginine-rich region, a jelly-roll region, a hypervariable region, an N22 domain, a C-terminal domain (CTD) (e.g., as described herein), e.g., of an Anellovirus ORF1 protein as listed in any of Tables A1-A1417 (or a sequence having at least about 70%, 75%, 80%, 85%, 90%, 95%, 96%, 97%, 98%, 99%, or 100% sequence identity thereto).

[0090] 16. An isolated ORF2 molecule comprising the amino acid sequence of an ORF2 as listed in any of Tables A1-A1417, or an amino acid sequence having at least about 70%, 75%, 80%, 85%, 90%, 95%, 96%, 97%, 98%, 99%, or 100% sequence identity thereto;
[0091] wherein the ORF2 molecule comprises at least one difference (e.g., a mutation, chemical modification, or epigenetic alteration) relative to a wild-type ORF2 protein (e.g., as described herein), e.g., an insertion, substitution, chemical or enzymatic modification, and/or deletion, e.g., a deletion of a domain.

[0092] 17. The ORF2 molecule of embodiment 16, wherein the ORF2 molecule comprises the amino acid sequence [W/F]X⁷HX³CX¹CX⁵H (SEQ ID NO: 5203), wherein Xⁿ is a contiguous sequence of any n amino acids.

[0093] 18. An isolated nucleic acid molecule (e.g., a genetic element construct or a genetic element) comprising the nucleic acid sequence of a 5′ UTR conserved domain as listed in any of Tables N1-N1417, or a nucleic acid sequence having at least 70%, 75%, 80%, 85%, 90%, 95%, 96%, 97%, 98%, or 99% sequence identity thereto.

[0094] 19. An isolated nucleic acid molecule (e.g., a genetic element construct or a construct for providing an ORF1 molecule in trans. e.g., as described herein) comprising the nucleic acid sequence of an ORF1 gene as listed in any of Tables N1-N1417, or a nucleic acid sequence having at least 70%, 75%, 80%, 85%, 90%, 95%, 96%, 97%, 98%, or 99% sequence identity thereto.

[0095] 20. An isolated nucleic acid molecule (e.g., a genetic element construct or a construct for providing an ORF2 molecule in trans. e.g., as described herein) comprising the nucleic acid sequence of an ORF2 gene as listed in any of Tables N1-N1417, or a nucleic acid sequence having at least 70%, 75%, 80%, 85%, 90%, 95%, 96%, 97%, 98%, or 99% sequence identity thereto.

[0096] 21. An isolated nucleic acid molecule (e.g., a genetic element construct, a genetic element, or a construct for providing an ORF1 or ORF2 molecule in trans. e.g., as described herein) comprising an Anellovirus genome sequence as listed in any of Tables N1-N1417, or a nucleic acid sequence having at least 50%, 60%, 70%, 75%, 80%, 85%, 90%, 95%, 96%, 97%, 98%, or 99% sequence identity thereto.

[0097] 22. The isolated nucleic acid molecule of any of embodiments 18-21, wherein the isolated nucleic acid molecule comprises at least one difference (e.g., a mutation, chemical modification, or epigenetic alteration) relative to a wild-type Anellovirus genome sequence (e.g., as described herein) 23. The isolated nucleic acid molecule of embodiment 22, wherein the at least one difference comprises a deletion (e.g., lacks one or more of: a 5′ UTR conserved domain, an ORF1 gene, an ORF2 gene, a GC-rich region, an ORF3 gene, or a functional fragment thereof).

[0098] 24. The isolated nucleic acid molecule of any of embodiments 18-23, wherein the isolated nucleic acid molecule is substantially unable to be enclosed in an Anellovirus capsid (e.g., a proteinaceous exterior of an anellovector as described herein).

[0099] 25. The isolated nucleic acid molecule of embodiment 18 or 21, wherein the isolated nucleic acid molecule encodes an effector (e.g., an exogenous effector or an endogenous effector).

[0100] 26. A genetic element comprising:
[0101] (a) a 5′ UTR conserved domain as listed in any of Tables N1-N1417, or a nucleic acid sequence having at least 70%, 75%, 80%, 85%, 90%, 95%, 96%, 97%, 98%, 99%, or 100% sequence identity thereto, and
[0102] (b) a promoter element operably linked to a nucleic acid sequence (e.g., a DNA sequence) encoding an exogenous effector.

[0103] 27. A pharmaceutical composition comprising the anellovector, ORF1 molecule, ORF2 molecule, or nucleic acid molecule of any of the preceding embodiments, and a pharmaceutically acceptable carrier and/or excipient.

[0104] 28. The pharmaceutical composition of embodiment 27, wherein the pharmaceutical composition has one or more of the following characteristics:
[0105] a) the pharmaceutical composition meets a pharmaceutical or good manufacturing practices (GMP) standard;
[0106] b) the pharmaceutical composition was made according to good manufacturing practices (GMP);
[0107] c) the pharmaceutical composition has a pathogen level below a predetermined reference value, e.g., is substantially free of pathogens;
[0108] d) the pharmaceutical composition has a contaminant level below a predetermined reference value, e.g., is substantially free of contaminants;
[0109] e) the pharmaceutical composition has a predetermined level of non-infectious particles or a predetermined ratio of particles:infectious units (e.g., <300:1, <200:1, <100:1, or <50:1), or
[0110] f) the pharmaceutical composition has low immunogenicity or is substantially non-immunogenic, e.g., as described herein.

[0111] 29. The pharmaceutical composition of any one of embodiments 27-28, wherein the pharmaceutical composition has a contaminant level below a predetermined reference value, e.g., is substantially free of contaminants.

[0112] 30. The pharmaceutical composition of embodiment 29, wherein the contaminant is selected from the group consisting of: mycoplasma, endotoxin, host cell nucleic acids (e.g., host cell DNA and/or host cell RNA), animal-derived process impurities (e.g., serum albumin or trypsin), replication-competent agents (RCA), e.g., replication-competent virus or unwanted anellovectors (e.g., an anellovector other than the desired anellovector, e.g., a synthetic anellovector as described herein), free viral capsid protein, adventitious agents, and aggregates.

[0113] 31. The pharmaceutical composition of embodiment 29, wherein the contaminant is host cell DNA and the threshold amount is about 10 ng of host cell DNA per dose of the pharmaceutical composition.

[0114] 32. The pharmaceutical composition of any one of embodiments 27-31, wherein the pharmaceutical composition comprises less than 10% (e.g., less than about 10%, 5%, 4%, 3%, 2%, 1%, 0.5%, or 0.1%) contaminant by weight.

[0115] 33. An isolated cell, e.g., a host cell, comprising:
[0116] (a) a nucleic acid molecule encoding an ORF1 polypeptide and/or an ORF2 polypeptide of any of the preceding embodiments, wherein the nucleic acid is a plasmid, is a viral nucleic acid, or is integrated into a cell chromosome, and
[0117] (b) a genetic element construct comprising a promoter element and a nucleic acid sequence (e.g., a DNA sequence) encoding an effector (e.g., an exogenous effector or an endogenous effector), and a protein binding sequence, wherein optionally the genetic element does not encode an ORF1 polypeptide (e.g., an ORF1 protein).

[0118] 34. An isolated cell, e.g., a host cell, comprising:
[0119] (i) a first nucleic acid molecule comprising the nucleic acid sequence of a genetic element of an anellovector of any of the preceding embodiments (optionally wherein the genetic element does not encode an ORF1 molecule), and
[0120] (ii) a second nucleic acid molecule, encoding an amino acid sequence of an ORF1 or ORF2 as listed in any of Tables A1-A1417, or an amino acid sequence having at least 70% (e.g., at least 70%, 75%, 80%, 85%, 90%, 95%, 96%, 97%, 98%, 99%, or 100%) sequence identity thereto.

[0121] 35. A method of manufacturing an anellovector composition, the method comprising:
[0122] (a) providing a cell, e.g., a host cell as described herein;
[0123] (b) introducing a genetic element construct encoding the genetic element of an anellovector of any of the preceding embodiments into the cell;
[0124] (c) incubating the cell under conditions that allow the cell to produce anellovector, and
[0125] (d) formulating the anellovectors, e.g., as a pharmaceutical composition suitable for administration to a subject, thereby making the anellovector composition.

[0126] 36. A method of manufacturing an anellovector composition, the method comprising:
[0127] (a) providing a cell, e.g., a host cell as described herein;
[0128] (b) introducing a nucleic acid molecule encoding an ORF1 or ORF2 polypeptide as listed in any of Tables A1-A1417 (or an amino acid sequence having at least about 70%, 75%, 80%, 85%, 90%, 95%, 96%, 97%, 98%, or 99% sequence identity thereto) into the cell;
[0129] (c) introducing a genetic element construct into the cell (e.g., before, after, or simultaneously with (b)),
[0130] (d) incubating the cell under conditions that allow the cell to produce anellovector; and
[0131] (e) formulating the anellovectors, e.g., as a pharmaceutical composition suitable for administration to a subject, thereby making the anellovector composition.

[0132] 37. A method of manufacturing an anellovector composition, the method comprising:
[0133] (a) providing a cell, e.g., a host cell as described herein;
[0134] (b) introducing a nucleic acid molecule encoding an ORF1 or ORF2 polypeptide into the cell;
[0135] (c) introducing a genetic element construct into the cell as listed in any of Tables N1-N1417 (or a nucleic acid sequence having at least about 70%, 75%, 80%, 85%, 90%, 95%, 96%, 97%, 98%, or 99% sequence identity thereto) (e.g., before, after, or simultaneously with (b)),
[0136] (d) incubating the cell under conditions that allow the cell to produce anellovector; and
[0137] (e) formulating the anellovectors, e.g., as a pharmaceutical composition suitable for administration to a subject,
   thereby making the anellovector composition.

[0138] 38. A method of making an anellovector, e.g., a synthetic anellovector, comprising:
[0139] (a) providing a host cell comprising:
   [0140] (i) a nucleic acid molecule, e.g., a first nucleic acid molecule, comprising the nucleic acid sequence of a Anellovirus genome as listed in any of Tables N1-N1417 (or a nucleic acid sequence having at least 70%, 75%, 80%, 85%, 90%, 95%, 96%, 97%, 98%, or 99% sequence identity thereto), and
   [0141] (ii) a nucleic acid molecule, e.g., a second nucleic acid molecule, encoding one or more of an amino acid sequence chosen from ORF1, ORF2, ORF2/2, ORF2/3, ORF1/1, or ORF1/2, e.g., as listed in any of Tables A1-A1417, or an amino acid sequence having at least 70% 75%, 80%, 85%, 90%, 95%, 96%, 97%, 98%, or 99% sequence identity thereto; and
[0142] (b) culturing the host cell under conditions suitable to make the anellovector.

[0143] 39. The method of embodiment 38, further comprising, prior to step (a), introducing the first nucleic acid molecule and/or the second nucleic acid molecule into the host cell.

[0144] 40. The method of embodiment 38 or 39, wherein the second nucleic acid molecule is introduced into the host cell prior to, concurrently with, or after the first nucleic acid molecule.

[0145] 41. The method of any of embodiments 35-40, further comprising separating the anellovectors from the cell.

[0146] 42. A method of manufacturing an ORF1 molecule, the method comprising:
[0147] (a) providing a host cell (e.g., a host cell described herein) comprising a nucleic acid encoding the ORF1 polypeptide of any of the preceding embodiments, and
[0148] (b) maintaining the host cell under conditions that allow the cell to produce the polypeptide;
[0149] thereby manufacturing the ORF1 molecule.

[0150] 43. A method of delivering an effector (e.g., an exogenous effector or an endogenous effector, e.g., overexpressing an endogenous effector) to a subject, the method comprising administering to the subject an anellovector or pharmaceutical composition of any of the preceding embodiments.

[0151] 44. A method of delivering an effector (e.g., an exogenous effector or an endogenous effector, e.g., overexpressing an endogenous effector) to a target cell, the method comprising contacting the target cell with an anellovector of any of the preceding embodiments.

[0152] 45. A method of delivering an effector (e.g., an exogenous effector or an endogenous effector, e.g., overexpressing an endogenous effector) to a target cell ex vivo (e.g., a target cell isolated from a subject, e.g., a patient), the method comprising contacting the target cell with an anellovector of any of the preceding embodiments.

[0153] 46. A method of modulating, e.g., enhancing or inhibiting, a biological function (e.g., as described herein) in a subject, the method comprising administering the anellovector or the pharmaceutical composition of any of the preceding embodiments to the subject.

[0154] 47. A method of treating a disease or disorder in a subject in need thereof, the method comprising administering to the subject an anellovector or pharmaceutical composition of any of the preceding embodiments.

[0155] 48. Use of the anellovector of any one of embodiments 1-10 or pharmaceutical composition of any one of embodiments 27-32 for treating a disease or disorder (e.g., as described herein) in a subject.

[0156] 49. The anellovector of any one of embodiments 1-10 or pharmaceutical composition of any one of embodiments 27-32 for use in treating a disease or disorder (e.g., as described herein) in a subject.

[0157] 50. Use of the anellovector of any one of embodiments 1-10 or pharmaceutical composition of any one of embodiments 27-32 in the manufacture of a medicament for treating a disease or disorder (e.g., as described herein) in a subject.

[0158] 51. The anellovector, ORF1 molecule, ORF2 molecule, nucleic acid molecule, or method of any of the preceding embodiments, wherein the genetic element is single-stranded.

[0159] 52. The anellovector, ORF1 molecule, ORF2 molecule, nucleic acid molecule, or method of any of the preceding embodiments, wherein the genetic element is circular.

[0160] 53. The anellovector, ORF1 molecule, ORF2 molecule, nucleic acid molecule, or method of any of the preceding embodiments, wherein the genetic element comprises DNA.

[0161] 54. The anellovector, ORF1 molecule, ORF2 molecule, nucleic acid molecule, or method of any of the preceding embodiments, wherein the genetic element is double-stranded.

[0162] 55. The anellovector, ORF1 molecule, ORF2 molecule, nucleic acid molecule, or method of any of embodiments A1-L1 or L3-L4, wherein the genetic element is linear.

[0163] 56. The anellovector, ORF1 molecule, ORF2 molecule, nucleic acid molecule, or method of any of the preceding embodiments, wherein the genetic element comprises RNA.

[0164] 57. The anellovector, ORF1 molecule, ORF2 molecule, nucleic acid molecule, or method of any of the preceding embodiments, wherein the genetic element comprises a nucleic acid sequence encoding an Anellovirus ORF1 molecule (e.g., an ORF1 protein as listed in any of Tables A1-A1417 or an amino acid sequence having at least 70%, 75%, 80%, 85%, 90%, 95%, 96%, 97%, 98%, or 99% sequence identity thereto).

[0165] 58. The anellovector, ORF1 molecule, ORF2 molecule, nucleic acid molecule, or method of any of the preceding embodiments, wherein the genetic element does not comprise a nucleic acid sequence encoding an Anellovirus ORF1 molecule (e.g., an ORF1 protein as listed in any of Tables A1-A1417 or an amino acid sequence having at least 70%, 75%, 80%, 85%, 90%, 95%, 96%, 97%, 98%, or 99% sequence identity thereto).

[0166] 59. The anellovector, ORF1 molecule, ORF2 molecule, nucleic acid molecule, or method of any of the preceding embodiments, wherein the genetic element comprises a nucleic acid sequence encoding an Anellovirus ORF2 molecule (e.g., an ORF2 protein as listed in any of Tables A1-A1417 or an amino acid sequence having at least 70%, 75%, 80%, 85%, 90%, 95%, 96%, 97%, 98%, or 99% sequence identity thereto).

[0167] 60. The anellovector, ORF1 molecule, ORF2 molecule, nucleic acid molecule, or method of any of the preceding embodiments, wherein the genetic element does not comprise a nucleic acid sequence encoding an Anellovirus ORF2 molecule (e.g., an ORF2 protein as listed in any of Tables A1-A1417 or an amino acid sequence having at least 70%, 75%, 80%, 85%, 90%, 95%, 96%, 97%, 98%, or 99% sequence identity thereto).

[0168] 61. The anellovector, ORF1 molecule, ORF2 molecule, nucleic acid molecule, or method of any of the preceding embodiments, wherein the genetic element comprises at least 20, 25, 30, 31, 32, 33, 34, 35, 36, 37, 38, 39, or 40 consecutive nucleotides having a GC content of at least 70%, 75%, 80%, 85%, 90%, 95%, or 99%.

[0169] 62. The anellovector, ORF1 molecule, ORF2 molecule, nucleic acid molecule, or method of any of the preceding embodiments, wherein the proteinaceous exterior comprises the amino acid sequence YNPX²DXGX²N (SEQ ID NO: 5202), wherein Xⁿ is a contiguous sequence of any n amino acids.

[0170] 63. The anellovector, ORF1 molecule, ORF2 molecule, nucleic acid molecule, or method of embodiment 62, wherein the amino acid sequence YNPX²DXGX²N (SEQ ID NO: 5202) is comprised in an N22 domain.

[0171] 64. The anellovector, ORF1 molecule, ORF2 molecule, nucleic acid molecule, or method of any of the preceding embodiments, wherein the ORF1 molecule comprises an arginine-rich region (e.g., having at least 70%, 80%, 85%, 90%, 95%, 96%, 97%, 98%, 99%, or 100% identity to an arginine-rich region sequence of an ORF1 protein listed in any of Tables A1-A1417).

[0172] 65. The anellovector, ORF1 molecule, ORF2 molecule, nucleic acid molecule, or method of any of the preceding embodiments, wherein the proteinaceous exterior comprises an amino acid sequence of at least 15, 20, 25, 26, 27, 28, 29, 30, 31, 32, 33, 34, 35, 36, 37, 38, 39, 40, 45, or 50 consecutive nucleotides comprising at least 40% (e.g., at least 40%, 41%, 42%, 43%, 44%, 45%, 46%, 47%, 48%, 49%, 50%, 55%, 60%, 65%, 66%, 67%, 68%, 69%, 70%, 75%, 80%, 85%, 90%, or 95%) arginine residues.

[0173] 66. The anellovector, ORF1 molecule, ORF2 molecule, nucleic acid molecule, or method of embodiment 64 or 65, wherein the arginine-rich region is located at the N-terminal or C-terminal end of the ORF1 molecule.

[0174] 67. The anellovector, ORF1 molecule, ORF2 molecule, nucleic acid molecule, or method of any of the preceding embodiments, wherein the ORF1 molecule comprises a jelly-roll domain having at least 70%, 80%, 85%, 90%, 95%, 96%, 97%, 98%, 99%, or 100% identity to a jelly-roll domain sequence of an ORF1 protein listed in any of Tables A1-A1417.

[0175] 68. The anellovector, ORF1 molecule, ORF2 molecule, nucleic acid molecule, or method of any of the preceding embodiments, wherein the ORF1 molecule comprises an N22 domain having at least 70%, 80%, 85%, 90%, 95%, 96%, 97%, 98%, 99%, or 100% identity to an N22 domain sequence of an ORF1 protein listed in any of Tables A1-A1417.

[0176] 69. The anellovector, ORF1 molecule, ORF2 molecule, nucleic acid molecule, or method of any of the preceding embodiments, wherein the ORF1 molecule comprises a C-terminal domain (CTD) having at least 70%, 80%, 85%, 90%, 95%, 96%, 97%, 98%, 99%, or 100% identity to a CTD domain sequence of an ORF1 protein listed in any of Tables A1-A1417.

[0177] 70. The anellovector, ORF1 molecule, ORF2 molecule, nucleic acid molecule, or method of any of the preceding embodiments, wherein the genetic element comprises one or more of: a TATA box, an initiator element, a cap site, a transcriptional start site, an ORF1/1-encoding sequence, an ORF1/2-encoding sequence, an ORF2/2-encoding sequence, an ORF2/3-encoding sequence, an ORF2/3t-encoding sequence, a three open-reading frame region, a poly(A) signal, and/or a GC-rich region from an Anellovirus described herein (e.g., as listed in any of Tables N1-N1417), or a sequence having at least 70%, 75%, 80%, 85%, 90%, 95%, 96%, 97%, 98%, 99%, or 100% sequence identity thereto.

[0178] 71. The anellovector, ORF1 molecule, ORF2 molecule, nucleic acid molecule, or method of any of the preceding embodiments, wherein the genetic element comprises at least 75% (e.g., at least 75, 76, 77, 78, 79, 80, 85, 90, 91, 92, 93, 94, 95, 96, 97, 98, 99, or 100%) sequence identity to a 5′ UTR conserved domain sequence as listed in any of Tables N1-N1417.

[0179] 72. The anellovector, ORF1 molecule, ORF2 molecule, nucleic acid molecule, or method of any of the preceding embodiments, wherein the proteinaceous exterior comprises one or more of the following: one or more glycosylated proteins, a hydrophilic DNA-binding region, an arginine-rich region, a threonine-rich region, a glutamine-rich region, a N-terminal polyarginine sequence, a variable region, a C-terminal polyglutamine/glutamate sequence, and one or more disulfide bridges.

[0180] 73. The anellovector, ORF1 molecule, ORF2 molecule, nucleic acid molecule, or method of any of the preceding embodiments, wherein the proteinaceous exterior comprises one or more of the following characteristics: an icosahedral symmetry, recognizes and/or binds a molecule that interacts with one or more host cell molecules to mediate entry into the host cell, lacks lipid molecules, lacks carbohydrates, comprises one or more desired carbohydrates (e.g., glycosylations), is pH and temperature stable, is detergent resistant, and is non-immunogenic or non-pathogenic in a host.

[0181] 74. The anellovector, ORF1 molecule, ORF2 molecule, nucleic acid molecule, or method of any of the preceding embodiments, wherein the promoter comprises an RNA polymerase II-dependent promoter, an RNA polymerase III-dependent promoter, a PGK promoter, a CMV promoter, an EF-1α promoter, an SV40 promoter, a CAGG promoter, or a UBC promoter, TTV viral promoters, Tissue specific, U6 (pollIII), minimal CMV promoter with upstream DNA binding sites for activator proteins (TetR-VP16, Gal4-VP16, dCas9-VP16, etc).

[0182] 75. The anellovector, ORF1 molecule, ORF2 molecule, nucleic acid molecule, or method of any of the preceding embodiments, wherein the effector encodes a therapeutic agent, e.g., a therapeutic peptide or polypeptide or a therapeutic nucleic acid.

[0183] 76. The anellovector, ORF1 molecule, ORF2 molecule, nucleic acid molecule, or method of any of the preceding embodiments, wherein the effector is an exogenous effector.

[0184] 77. The anellovector, ORF1 molecule, ORF2 molecule, nucleic acid molecule, or method of any of the preceding embodiments, wherein the effector is an endogenous effector (e.g., wherein the anellovector overexpresses the endogenous effector in a target cell).

[0185] 78. The anellovector, ORF1 molecule, ORF2 molecule, nucleic acid molecule, or method of any of the preceding embodiments, wherein the effector comprises a regulatory nucleic acid, e.g., an miRNA, siRNA, mRNA, lncRNA, RNA, DNA, an antisense RNA, gRNA; a fluorescent tag or marker, an antigen, a peptide, a synthetic or analog peptide from a naturally-bioactive peptide, an agonist or antagonist peptide, an anti-microbial peptide, a pore-forming peptide, a bicyclic peptide, a targeting or cytotoxic peptide, a degradation or self-destruction peptide, a small molecule, an immune effector (e.g., influences susceptibility to an immune response/signal), a death protein (e.g., an inducer of apoptosis or necrosis), a non-lytic inhibitor of a tumor (e.g., an inhibitor of an oncoprotein), an epigenetic modifying agent, an epigenetic enzyme, a transcription factor, a DNA or protein modification enzyme, a DNA-intercalating agent, an efflux pump inhibitor, a nuclear receptor activator or inhibitor, a proteasome inhibitor, a competitive inhibitor for an enzyme, a protein synthesis effector or inhibitor, a nuclease, a protein fragment or domain, a ligand, an antibody, a receptor, or a CRISPR system or component.

[0186] 79. The anellovector, ORF1 molecule, ORF2 molecule, nucleic acid molecule, or method of any of the preceding embodiments, wherein the effector comprises a miRNA, e.g., wherein the miRNA decreases expression of a target gene.

[0187] 80. The anellovector, ORF1 molecule, ORF2 molecule, nucleic acid molecule, or method of any of the preceding embodiments, wherein the effector modulates expression or activity of a gene or protein, e.g., increases or decreases expression or activity of the gene or protein.

[0188] 81. The anellovector, ORF1 molecule, ORF2 molecule, nucleic acid molecule, or method of any of the preceding embodiments, wherein the anellovector is capable of replicating autonomously 82. The anellovector, ORF1 molecule, ORF2 molecule, nucleic acid molecule, or method of any of the preceding embodiments, wherein the anellovector is replication-deficient (e.g., incapable of replicating autonomously).

[0189] 83. The anellovector, ORF1 molecule, ORF2 molecule, nucleic acid molecule, or method of any of the preceding embodiments, wherein the genetic element integrates into the genome of a eukaryotic cell at a frequency of less than about 0.001%, 0.005%, 0.01%, 0.05%, 0.1%, 0.5%, 1%, 1.5%, or 2% of the genetic element that enters the cell.

[0190] 84. The anellovector, ORF1 molecule, ORF2 molecule, nucleic acid molecule, or method of any of the preceding embodiments, wherein the anellovector is substantially non-pathogenic, e.g., does not induce a detectable deleterious symptom in a subject (e.g., elevated cell death or toxicity, e.g., relative to a subject not exposed to the anellovector).

[0191] 85. The anellovector, ORF1 molecule, ORF2 molecule, nucleic acid molecule, or method of any of the preceding embodiments, wherein the anellovector is substantially non-immnuogenic, e.g., does not induce a detectable and/or unwanted immune response.

[0192] 86. The anellovector, ORF1 molecule, ORF2 molecule, nucleic acid molecule, or method of any of the preceding embodiments, wherein a population of at least 1000 of the anellovectors is capable of delivering at least about 100 copies (e.g., at least 1, 2, 3, 4, 5, 10, 20, 30, 40, 50, 100, 200, 300, 400, 500, 600, 700, 800, 900, or 1000 copies) of the genetic element into one or more eukaryotic cells (e.g., mammalian cells, e.g., human cells).

[0193] 87. The anellovector, ORF1 molecule, ORF2 molecule, nucleic acid molecule, or method of any of the preceding embodiments, wherein a population of the anellovectors (e.g., at least 1, 2, 3, 4, 5, 10, 20, 30, 40, 50, 100, 200, 300, 400, 500, 600, 700, 800, 900, or 1000 genome equivalents of the genetic element per cell) is capable of delivering the genetic element into at least 10%, 20%, 30%, 40%, 50%, 60%, 70%, 80%, 90%, 95%, 99%, or more of a population of eukaryotic cells (e.g., mammalian cells, e.g., human cells).

[0194] 88. The anellovector, ORF1 molecule, ORF2 molecule, nucleic acid molecule, or method of any of the preceding embodiments, wherein a population of the anellovectors (e.g., at least 1, 2, 3, 4, 5, 10, 20, 30, 40, 50, 100, 200, 300, 400, 500, 600, 700, 800, 900, or 1000 genome equivalents of the genetic element per cell) is capable of delivering at least 1, 2, 3, 4, 5, 6, 7, 8, 9, 10, 20, 50, 100, 200, 500, 1000, 2000, 5000, 8,000, 1×10⁴, 1×10⁵, 1×10⁶, 1×10⁷ or greater copies of the genetic element per cell to a population of eukaryotic cells (e.g., mammalian cells, e.g., human cells).

[0195] 89. The anellovector, ORF1 molecule, ORF2 molecule, nucleic acid molecule, or method of any of the preceding embodiments, wherein a population of the anellovectors (e.g., at least 1, 2, 3, 4, 5, 10, 20, 30, 40, 50, 100, 200, 300, 400, 500, 600, 700, 800, 900, or 1000 genome equivalents of the genetic element per cell) is capable of delivering 1-3, 1-4, 1-5, 1-6, 1-7, 1-8, 1-9, 1-10, 5-10, 10-20, 20-50, 50-100, 100-1000, 1000-10⁴, 1×10⁴-1×10⁵, 1×10⁴-1×10⁶, 1×10⁴-1×10⁷, 1×10⁵-1×10⁶, 1×10⁵-1×10⁷, or 1×10⁶-1×10⁷ copies of the genetic element per cell to a population of eukaryotic cells (e.g., mammalian cells, e.g., human cells).

[0196] 90. The anellovector, ORF1 molecule, ORF2 molecule, nucleic acid molecule, or method of any of the preceding embodiments, wherein the target cells into which the genetic element is delivered each receive at least 10, 50, 100, 500, 1000, 10,000, 50,000, 100,000, or more copies of the genetic element.

[0197] 91. The anellovector, ORF1 molecule, ORF2 molecule, nucleic acid molecule, or method of any of the preceding embodiments, wherein the anellovector is resistant to degradation by a detergent (e.g., a mild detergent, e.g., a biliary salt, e.g., sodium deoxycholate) relative to a viral particle comprising an external lipid bilayer, e.g., a retrovirus.

[0198] 92. The anellovector, ORF1 molecule, ORF2 molecule, nucleic acid molecule, or method of any of the preceding embodiments, wherein the genetic element enclosed by the proteinaceous exterior is resistant to degradation by a nuclease enzyme (e.g., a DNase).

[0199] 93. The anellovector, ORF1 molecule, ORF2 molecule, nucleic acid molecule, or method of any of the preceding embodiments, wherein the anellovector is capable of infecting mammalian cells, e.g., human cells, e.g., in vitro, in vivo, or ex vivo.

[0200] 94. The anellovector, ORF1 molecule, ORF2 molecule, nucleic acid molecule, or method of any of the preceding embodiments, wherein the anellovector selectively delivers the effector to, or is present at higher levels in (e.g., preferentially accumulates in), a desired cell type, tissue, or organ (e.g., bone marrow, blood, heart, GI, skin, photoreceptors in the retina, epithelial linings, or pancreas).

[0201] 95. The anellovector, ORF1 molecule, ORF2 molecule, nucleic acid molecule, or method of any of the preceding embodiments, wherein genetic element or genetic element construct is capable of replicating (e.g., by rolling circle replication), e.g., capable of generating at least 1, 2, 3, 4, 5, 6, 7, 8, 9, 10, 20, 30, 40, 50, 60, 70, 80, 90, 102, 2×10², 5×10², 10³, 2×10³, 5×10³, or 10⁴ genomic equivalents of the genetic element per cell, e.g., as measured by a quantitative PCR assay.

[0202] 96. The anellovector, ORF1 molecule, ORF2 molecule, nucleic acid molecule, or method of any of the preceding embodiments, wherein the proteinaceous exterior is provided in cis relative to the genetic element.

[0203] 97. The anellovector, ORF1 molecule, ORF2 molecule, nucleic acid molecule, or method of any of the preceding embodiments, wherein the proteinaceous exterior is provided in trans relative to the genetic element.

[0204] Other features, objects, and advantages of the invention will be apparent from the description and drawings, and from the claims.

[0205] Unless otherwise defined, all technical and scientific terms used herein have the same meaning as commonly understood by one of ordinary skill in the art to which this invention belongs. All publications, patent applications, patents, and other references mentioned herein are incorporated by reference in their entirety. In addition, the materials, methods, and examples are illustrative only and not intended to be limiting.

### BRIEF DESCRIPTION OF THE DRAWINGS

[0206] The following detailed description of the embodiments of the invention will be better understood when read in conjunction with the appended drawings. For the purpose of illustrating the invention, there are shown in the drawings embodiments that are presently exemplified. It should be understood, however, that the invention is not limited to the precise arrangement and instrumentalities of the embodiments shown in the drawings.

[0207] FIG. 1A is an illustration showing percent sequence similarity of amino acid regions of capsid protein sequences.

[0208] FIG. 1B is an illustration showing percent sequence similarity of capsid protein sequences.

[0209] FIG. 2 is an illustration showing one embodiment of an anellovector.

[0210] FIG. 3 depicts a schematic of a kanamycin vector encoding the LY1 strain of TTMiniV (“Anellovector 1”).

[0211] FIG. 4 depicts a schematic of a kanamycin vector encoding the LY2 strain of TTMiniV (“Anellovector 2”).

[0212] FIG. 5 depicts transfection efficiency of synthetic anellovectors in 293T and A549 cells.

[0213] FIGS. 6A and 6B depict quantitative PCR results that illustrate successful infection of 293T cells by synthetic anellovectors.

[0214] FIGS. 7A and 7B depict quantitative PCR results that illustrate successful infection of A549 cells by synthetic anellovectors.

[0215] FIGS. 8A and 8B depict quantitative PCR results that illustrate successful infection of Raji cells by synthetic anellovectors.

[0216] FIGS. 9A and 9B depict quantitative PCR results that illustrate successful infection of Jurkat cells by synthetic anellovectors.

[0217] FIGS. 10A and 10B depict quantitative PCR results that illustrate successful infection of Chang cells by synthetic anellovectors.

[0218] FIGS. 11A-11B are a series of graphs showing luciferase expression from cells transfected or infected with TTMV-LY21574-1371, 11432-2210,2610::nLuc. Luminescence was observed in infected cells, indicating successful replication and packaging.

[0219] FIG. 11C is a diagram depicting the phylogenetic tree of Alphatorquevirus (Torque Teno Virus; TTV), with clades highlighted. At least 100 Anellovirus strains are represented. Exemplary sequences from several clades is provided herein.

[0220] FIG. 12 is a schematic showing an exemplary workflow for production of anellovectors (e.g., replication-competent or replication-deficient anellovectors as described herein).

[0221] FIG. 13 is a graph showing primer specificity for primer sets designed for quantification of TTV and TTMV genomic equivalents. Quantitative PCR based on SYBR green chemistry shows one distinct peak for each of the amplification products using TTMV or TTV specific primer sets, as indicated, on plasmids encoding the respective genomes.

[0222] FIG. 14 is a series of graphs showing PCR efficiencies in the quantification of TTV genome equivalents by qPCR. Increasing concentrations of primers and a fixed concentration of hydrolysis probe (250 nM) were used with two different commercial qPCR master mixes. Efficiencies of 90-110% resulted in minimal error propagation during quantification.

[0223] FIG. 15 is a graph showing an exemplary amplification plot for linear amplification of TTMV (Target 1) or TTV (Target 2) over a 7 log 10 of genome equivalent concentrations. Genome equivalents were quantified over 7 10-fold dilutions with high PCR efficiencies and linearity (R² TTMV: 0.996; R² TTV: 0.997).

[0224] FIGS. 16A-16B are a series of graphs showing quantification of TTMV genome equivalents in an anellovector stock. (A) Amplification plot of two stocks, each diluted 1:10 and run in duplicate. (B) The same two samples as shown in panel A, here shown in the context of the linear range. Shown are the upper and lower limits in the two representative samples. PCR Efficiency: 99.58%, R²: 0988.

[0225] FIG. 17 is a graph showing fold change in miR-625 expression in HEK293T cells transfected with the indicated plasmid.

[0226] FIG. 18 is a diagram showing pairwise identity for alignments of representative sequences from each Alphatorquevirus clade. DNA sequences for TTV-CT30F, TTV-P13-1, TTV-tth8, TTV-HD20a, TTV-16, TTV-TJN02, and TTV-HD16d were aligned. Pairwise percent identity across a 50-bp sliding window is shown along the length of the alignment. Brackets above indicate non-coding and coding regions with pairwise identities are indicated. Brackets below indicate regions of high or low sequence conservation.

[0227] FIG. 19 is a diagram showing pairwise identity for amino acid alignments for putative proteins across the seven Alphatorquevirus clades. Amino acid sequences for putative proteins from TTV-CT30F, TTV-P13-1, TTV-tth8, TTV-HD20a, TTV-16, TTV-TJN02, and TTV-HD16d were aligned. Pairwise percent identity across a 15-aa sliding window is shown along the length of each alignment. Pairwise identity for both open reading frame DNA sequence and protein amino acid sequence is indicated. (*) Putative ORF2t/3 amino acid sequences were aligned for TTV-CT30F, TTV-tth8, TTV-16, and TTV-TJN02.

[0228] FIG. 20 is a diagram showing that a domain within the 5′ UTR is highly conserved across the seven Alphatorquevirus clades (SEQ ID NOS 5205, 5114, 5121, 5118, 5123-5124, 5117 and 5126, respectively, in order of appearance). The 71-bp 5′UTR conserved domain sequences for each representative Alphatorquevirus were aligned. The sequence has 95.2% pairwise identity between the seven clades.

[0229] FIG. 21 is a diagram showing an alignment of the GC-rich domains from the seven Alphatorquevirus clades. Each Anellovirus has a region downstream of the ORFs with greater than 70% GC content. Shown is an alignment of the GC-rich regions from TTV-CT30F, TTV-P13-1, TTV-tth8, TTV-HD20a, TTV-16, TTV-TJN02, and TTV-HD16d. The regions vary in length, but where they do align they have 75.4% pairwise identity.

[0230] FIG. 22 is a diagram showing infection of Raji B cells with anellovectors encoding a miRNA targeting n-myc interacting protein (NMI). Shown is quantification of genome equivalents of anellovectors detected after infection of Raji B cells (arrow) or control cells with NMI miRNA-encoding anellovectors.

[0231] FIG. 23 is a diagram showing infection of Raji B cells with anellovectors encoding a miRNA targeting n-myc interacting protein (NMI). The Western blot shows that anellovectors encoding the miRNA against NMI reduced NMI protein expression in Raji B cells, whereas Raji B cells infected with anellovectors lacking the miRNA showed comparable NMI protein expression to controls.

[0232] FIG. 24 is a series of graphs showing quantification of anellovector particles generated in host cells after infection with an anellovector comprising an endogenous miRNA-encoding sequence and a corresponding anellovector in which the endogenous miRNA-encoding sequence was deleted.

[0233] FIGS. 25A-25C are a series of diagrams showing intracellular localization of ORFs from TTMV-LY2 fused to nano-luciferase. (A) In Vero cells, ORF2 (top row) appeared to localize to the cytoplasm while ORF1/1 (bottom row) appeared to localize to the nucleus. (B) In HEK293 cells, ORF2 (top row) appeared to localize to the cytoplasm while ORF1/1 (bottom row) appeared to localize to the nucleus. (C) Localization patterns for ORF1/2 and ORF2/2 in cells.

[0234] FIG. 26 is a series of diagrams showing sequential deletion controls in the 3′ non-coding region (NCR) of TTV-tth8. The top row shows the structure of the wild-type TTV-tth8 Anellovirus. The second row shows TTV-tth8 with a deletion of 36 nucleotides in the GC-rich region of the 3′ NCR (Δ36nt (GC)). The third row shows TTV-tth8 with the 36 nucleotide deletion and an additional deletion of the miRNA sequence, resulting in a total deletion of 78 nucleotides (Δ36nt (GC) ΔmiR). The fourth row shows TTV-tth8 with a deletion of 171 nucleotides from the 3′ NCR, which includes both the 36 nucleotide deletion region and the miRNA sequence (43′ NCR).

[0235] FIGS. 27A-27D are a series of diagrams showing that sequential deletions in the 3′ NCR of TTV-tth8 have significant effects on Anellovirus ORF transcript levels. Shown are expression of ORF1 and ORF2 at day 2 (A), ORF1/1 and ORF2/2 at day 2 (B), ORF1/2 and ORF2/3 at day 2 (C), and ORF2t3 at day 2 (D).

[0236] FIGS. 28A-28B are a series of diagrams showing constructs used to produce anellovectors expressing nano-luciferase (A) and a series of anellovector/plasmid combinations used to transfect cells (B).

[0237] FIGS. 29A-29C are a series of diagrams showing nano-luciferase expression in mice injected with anellovectors. (A) Nano-luciferase expression in mice at days 0-9 after injection. (B) Nano-luciferase expression in mice injected with various anellovector/plasmid construct combinations, as indicated. (C) Quantification of nano-luciferase luminescence detected in mice after injection. Group A received a TTMV-LY2 vector±nano-luciferase. Group B received a nano-luciferase protein and TTMV-LY2 ORFs.

[0238] FIGS. 29D-1 to 29D-2 are a schematic of the genomic organization of representative anellos from seven different Alphatorquevirus clades. Sequences for TTV-CT30F, TTV-P13-1, TTV-tth8, TTV-HD20a, TTV-16, TTV-TJN02, and TTV-HD16d were aligned, with key regions annotated. Putative open reading frames (ORFs) are represented in light gray, TATA boxes are represented in dark gray, and key putative regulatory regions are represented in medium gray, including the initiator element, the 5′UTR conserved domain, and the GC-rich region (e.g., as indicated).

[0239] FIG. 30 is a schematic showing an exemplary workflow for determining the endogenous target of Anellovirus pre-miRNAs.

[0240] FIGS. 31A-31B are a series of diagrams showing that a tandem Anellovirus plasmid can increase anellovirus or anellovector production. (A) Plasmid map for an exemplary tandem Anellovirus plasmid. (B) Transfection of HEK293T cells with a tandem Anellovirus plasmid resulted in production of four times the number of viral genomes compared to single-copy harboring plasmids.

[0241] FIG. 31C is a gel electrophoresis image showing circularization of TTMV-LY2 plasmids pVL46-063 and pVL46-240.

[0242] FIG. 31D is a chromatogram showing copy numbers for linear and circular TTMV-LY2 constructs, as determined by size exclusion chromatography (SEC).

[0243] FIG. 32 is a diagram showing an alignment of 36-nucleotide GC-rich regions from nine Anellovirus genome sequences, and a consensus sequence based thereon (SEQ ID NOS 5206, 5172-5176 and 5176-5179, respectively, in order of appearance).

[0244] FIG. 33 is a series of diagrams showing ORF1 structures from Anellovirus strains LY2 and CBD203. Putative domains are labeled: arginine-rich region (arg-rich), core region comprising a jelly-roll domain, hypervariable region (HVR), N22 region, and C-terminal domain (CTD), as indicated.

[0245] FIG. 34 is a diagram showing an ORF1 structure from Betatorquevirus strain CBS203. Residues showing high similarity among a set of 110 betatorqueviruses are indicated. Indicated are residues of 60-79.9% similarity, residues of 80-99.9% similarity, and residues of 100% similarity among all strains evaluated.

[0246] FIG. 35 is a diagram showing the consensus sequence (SEQ ID NO: 5207) from alignment of 258 sequences of Alphatorqueviruses with residues with high similarity scores highlighted dark gray (100%), medium gray (80-99.9%), light gray (60-80%). Putative domains are indicated in boxes. Percent identity is also indicated by the box graph below the consensus sequence, with medium-gray boxes indicating 100% identity, light gray boxes indicating 30-99% identity, and dark gray boxes indicating below 30% identity.

[0247] FIG. 36 is a schematic showing the domains of an Anellovirus ORF1 molecule and the hypervariable region to be replaced with a hypervariable domain from a different Anellovirus.

[0248] FIG. 37 is a schematic showing the domains of ORF1 and the hypervariable region that will be replaced with a protein or peptide of interest (POI) from a non-anellovirus source.

[0249] FIG. 38 is a series of diagrams showing the design of an exemplary anellovector genetic element based on an Anellovirus genome. The protein-coding region was deleted from the anellovirus genome (left), leaving the anelloviral non-coding region (NCR), including the viral promoter, 5′UTR conserved domain (5CD), and GC-rich region. Payload DNA was inserted into the non-coding region at the protein-coding locus (right). The resulting anellovector harbored the payload DNA (including open reading frames, genes, non-coding RNAs, etc.) and the essential anellovirus cis replication and packaging elements, but lacked the essential protein elements for replication and packaging.

[0250] FIG. 39 is a bar graph showing that anellovectors comprising a genetic element encoding an exogenous human immunoadhesin successfully transduced the human lung-derived cell line EKVX.

[0251] FIG. 40 is a graph showing that anellovectors based on tth8 or LY2, engineered to contain a sequence encoding human erythropoietin (hEpo), could deliver a functional transgene to mammalian cells.

[0252] FIGS. 41A and 41B are a series of graphs showing that engineered anellovectors administered to mice were detectable seven days after intravenous injection.

[0253] FIG. 42 is a graph showing that hGH mRNA was detected in the cellular fraction of whole blood seven days after intravenous administration of an engineered anellovector encoding hGH.

[0254] FIGS. 43A-43D are a series of diagrams illustrating a highly conserved motif in Anellovirus ORF2. FIG. 43 discloses SEQ ID NO: 5203.

[0255] FIGS. 44A and 44B are a series of diagrams showing evidence of full-length ORF1 mRNA expression in human tissues.

[0256] FIG. 45 is a graph showing the ability of an in vitro circularized (IVC) TTV-tth8 genome (IVC TTV-tth8) compared to a TTV-tth8 genome in a plasmid to yield TTV-tth8 genome copies at the expected density in HEK293T cells.

[0257] FIG. 46 is a series of graphs showing the ability of an in vitro circularized (IVC) LY2 genome (WT LY2 IVC) and a wild-type LY2 genome in plasmid (WT LY2 Plasmid) to yield LY2 genome copies at the expected density in Jurkat cells.

[0258] FIG. 47 is a diagram showing an alignment of secondary structure of the jelly roll domain of Anellovirus ORF1 proteins from Alphatorquevirus, Betatorquevirus, and Gammatorquevirus (SEQ ID NOs: 5235-5260, respectively, in order of appearance). These secondary structural elements are highly conserved.

[0259] FIG. 48 is a diagram showing the conserved sequence and secondary structure of the ORF1 motif located in the N22 domain (SEQ ID NOS 5208-5234, respectively, in order of appearance). The conserved YNPXXDXGXXN (SEQ ID NO: 5202) motif of human TTV ORF1 has a conserved secondary structure. In particular, the tyrosine in the motif breaks a beta strand, and a second beta strand starts on the terminal asparagine of the motif.

### DETAILED DESCRIPTION OF CERTAIN EMBODIMENTS

### Definitions

[0260] The present invention will be described with respect to particular embodiments and with reference to certain figures, but the invention is not limited thereto but only by the claims. Terms as set forth hereinafter are generally to be understood in their common sense unless indicated otherwise.

[0261] Where the term “comprising” is used in the present description and claims, it does not exclude other elements. For the purposes of the present invention, the term “consisting of” is considered to be a preferred embodiment of the term “comprising of”. If hereinafter a group is defined to comprise at least a certain number of embodiments, this is to be understood to preferably also disclose a group which consists only of these embodiments.

[0262] Where an indefinite or definite article is used when referring to a singular noun, e.g. “a”, “an” or “the”, this includes a plural of that noun unless something else is specifically stated.

[0263] The wording “compound, composition, product, etc. for treating, modulating, etc.” is to be understood to refer a compound, composition, product, etc. per se which is suitable for the indicated purposes of treating, modulating, etc. The wording “compound, composition, product, etc. for treating, modulating, etc.” additionally discloses that, as an embodiment, such compound, composition, product, etc. is for use in treating, modulating, etc.

[0264] The wording “compound, composition, product, etc. for use in . . . ”, “use of a compound, composition, product, etc in the manufacture of a medicament, pharmaceutical composition, veterinary composition, diagnostic composition, etc. for . . . ”, or “compound, composition, product, etc. for use as a medicament . . . ” indicates that such compounds, compositions, products, etc. are to be used in therapeutic methods which may be practiced on the human or animal body. They are considered as an equivalent disclosure of embodiments and claims pertaining to methods of treatment, etc. If an embodiment or a claim thus refers to “a compound for use in treating a human or animal being suspected to suffer from a disease”, this is considered to be also a disclosure of a “use of a compound in the manufacture of a medicament for treating a human or animal being suspected to suffer from a disease” or a “method of treatment by administering a compound to a human or animal being suspected to suffer from a disease”. The wording “compound, composition, product, etc. for treating, modulating, etc.” is to be understood to refer a compound, composition, product, etc. per se which is suitable for the indicated purposes of treating, modulating, etc.

[0265] If hereinafter examples of a term, value, number, etc. are provided in parentheses, this is to be understood as an indication that the examples mentioned in the parentheses can constitute an embodiment. For example, if it is stated that “in embodiments, the nucleic acid molecule comprises a nucleic acid sequence having at least about 70%, 75%, 80%, 85%, 90%, 95%, 96%, 97%, 98%, 99%, or 100% sequence identity to the Anellovirus ORF1-encoding nucleotide sequence of Table 1 (e.g., nucleotides 571-2613 of the nucleic acid sequence of Table 1)”, then some embodiments relate to nucleic acid molecules comprising a nucleic acid sequence having at least about 70%, 75%, 80%, 85%, 90%, 95%, 96%, 97%, 98%, 99%, or 100% sequence identity to nucleotides 571-2613 of the nucleic acid sequence of Table 1.

[0266] As used herein, the term “anellovector” refers to a vehicle comprising a genetic element, e.g., an episome, e.g., circular DNA, enclosed in a proteinaceous exterior. A “synthetic anellovector,” as used herein, generally refers to an anellovector that is not naturally occurring, e.g., has a sequence that is different relative to a wild-type virus (e.g., a wild-type Anellovirus as described herein). In some embodiments, the synthetic anellovector is engineered or recombinant, e.g., comprises a genetic element that comprises a difference or modification relative to a wild-type viral genome (e.g., a wild-type Anellovirus genome as described herein). In some embodiments, enclosed within a proteinaceous exterior encompasses 100% coverage by a proteinaceous exterior, as well as less than 100% coverage, e.g., 95%, 90%, 85%, 80%, 70%, 60%, 50% or less. For example, gaps or discontinuities (e.g., that render the proteinaceous exterior permeable to water, ions, peptides, or small molecules) may be present in the proteinaceous exterior, so long as the genetic element is retained in the proteinaceous exterior, e.g., prior to entry into a host cell. In some embodiments, the anellovector is purified, e.g., it is separated from its original source and/or substantially free (>50%, >60%, >70%, >80%, >90%) of other components.

[0267] As used herein, the term “anellovector” refers to a vector that comprises sufficient nucleic acid sequence derived from or highly similar to (e.g., at least 85%, 90%, 95%, 96%, 97%, 98%, 99%, or 100% identical to) an Anellovirus genome sequence or a contiguous portion thereof to allow packaging into a proteinaceous exterior (e.g., a capsid), and further comprises a heterologous sequence. In some embodiments, the anellovector is a viral vector or a naked nucleic acid. In some embodiments, the anellovector comprises at least about 50, 60, 70, 71, 72, 73, 74, 75, 80, 90, 100, 150, 200, 300, 400, 500, 600, 700, 800, 900, 1000, 1100, 1200, 1300, 1400, 1500, 1600, 1700, 1800, 1900, 2000, 2500, 3000, or 3500 consecutive nucleotides of a native Anellovirus sequence or a sequence highly similar (e.g., at least 85%, 90%, 95%, 96%, 97%, 98%, 99%, or 100% identical) thereto. In some embodiments, the anellovector further comprises one or more of an Anellovirus ORF1, ORF2, or ORF3. In some embodiments, the heterologous sequence comprises a multiple cloning site, comprises a heterologous promoter, comprises a coding region for a therapeutic protein, or encodes a therapeutic nucleic acid. In some embodiments, the capsid is a wild-type Anellovirus capsid. In embodiments, an anellovector comprises a genetic element described herein, e.g., comprises a genetic element comprising a promoter, a sequence encoding a therapeutic effector, and a capsid binding sequence.

[0268] As used herein, the term “antibody molecule” refers to a protein, e.g., an immunoglobulin chain or fragment thereof, comprising at least one immunoglobulin variable domain sequence. The term “antibody molecule” encompasses full-length antibodies and antibody fragments (e.g., scFvs). In some embodiments, an antibody molecule is a multispecific antibody molecule, e.g., the antibody molecule comprises a plurality of immunoglobulin variable domain sequences, wherein a first immunoglobulin variable domain sequence of the plurality has binding specificity for a first epitope and a second immunoglobulin variable domain sequence of the plurality has binding specificity for a second epitope. In embodiments, the multispecific antibody molecule is a bispecific antibody molecule. A bispecific antibody molecule is generally characterized by a first immunoglobulin variable domain sequence which has binding specificity for a first epitope and a second immunoglobulin variable domain sequence that has binding specificity for a second epitope.

[0269] As used herein, a nucleic acid “encoding” refers to a nucleic acid sequence encoding an amino acid sequence or a functional polynucleotide (e.g., a non-coding RNA, e.g., an siRNA or miRNA).

[0270] An “exogenous” agent (e.g., an effector, a nucleic acid (e.g., RNA), a gene, payload, protein) as used herein refers to an agent that is either not comprised by, or not encoded by, a corresponding wild-type virus, e.g., an Anellovirus as described herein. In some embodiments, the exogenous agent does not naturally exist, such as a protein or nucleic acid that has a sequence that is altered (e.g., by insertion, deletion, or substitution) relative to a naturally occurring protein or nucleic acid. In some embodiments, the exogenous agent does not naturally exist in the host cell. In some embodiments, the exogenous agent exists naturally in the host cell but is exogenous to the virus. In some embodiments, the exogenous agent exists naturally in the host cell, but is not present at a desired level or at a desired time.

[0271] A “heterologous” agent or element (e.g., an effector, a nucleic acid sequence, an amino acid sequence), as used herein with respect to another agent or element (e.g., an effector, a nucleic acid sequence, an amino acid sequence), refers to agents or elements that are not naturally found together, e.g., in a wild-type virus, e.g., an Anellovirus. In some embodiments, a heterologous nucleic acid sequence may be present in the same nucleic acid as a naturally occurring nucleic acid sequence (e.g., a sequence that is naturally occurring in the Anellovirus). In some embodiments, a heterologous agent or element is exogenous relative to an Anellovirus from which other (e.g., the remainder of) elements of the anellovector are based.

[0272] As used herein, the term “genetic element” refers to a nucleic acid sequence, generally in an anellovector. It is understood that the genetic element can be produced as naked DNA and optionally further assembled into a proteinaceous exterior. It is also understood that an anellovector can insert its genetic element into a cell, resulting in the genetic element being present in the cell and the proteinaceous exterior not necessarily entering the cell.

[0273] As used herein, the term “ORF1 molecule” refers to a polypeptide having an activity and/or a structural feature of an Anellovirus ORF1 protein (e.g., an Anellovirus ORF1 protein as described herein, e.g., as listed in any of Tables A1-A1417), or a functional fragment thereof. An ORF1 molecule may, in some instances, comprise one or more of (e.g., 1, 2, 3 or 4 of): a first region comprising at least 60% basic residues (e.g., at least 60% arginine residues), a second region comprising at least about six beta strands (e.g., at least 4, 5, 6, 7, 8, 9, 10, 11, or 12 beta strands), a third region comprising a structure or an activity of an Anellovirus N22 domain (e.g., as described herein, e.g., an N22 domain from an Anellovirus ORF1 protein as described herein), and/or a fourth region comprising a structure or an activity of an Anellovirus C-terminal domain (CTD) (e.g., as described herein, e.g., a CTD from an Anellovirus ORF1 protein as described herein). In some instances, the ORF1 molecule comprises, in N-terminal to C-terminal order, the first, second, third, and fourth regions. In some instances, an anellovector comprises an ORF1 molecule comprising, in N-terminal to C-terminal order, the first, second, third, and fourth regions. An ORF1 molecule may, in some instances, comprise a polypeptide encoded by an Anellovirus ORF1 nucleic acid (e.g., as listed in any of Tables N1-N1417). An ORF1 molecule may, in some instances, further comprise a heterologous sequence, e.g., a hypervariable region (HVR), e.g., an HVR from an Anellovirus ORF1 protein, e.g., as described herein. An “Anellovirus ORF1 protein,” as used herein, refers to an ORF1 protein encoded by an Anellovirus genome (e.g., a wild-type Anellovirus genome, e.g., as described herein), e.g., an ORF1 protein having the amino acid sequence as listed in any of Tables A1-A1417, or as encoded by the ORF1 gene as listed in any of Tables Tables N1-N1417.

[0274] As used herein, the term “ORF2 molecule” refers to a polypeptide having an activity and/or a structural feature of an Anellovirus ORF2 protein (e.g., an Anellovirus ORF2 protein as described herein, e.g., as listed in any of Tables A1-A1417), or a functional fragment thereof. An “Anellovirus ORF2 protein,” as used herein, refers to an ORF2 protein encoded by an Anellovirus genome (e.g., a wild-type Anellovirus genome, e.g., as described herein), e.g., an ORF2 protein having the amino acid sequence as listed in any of Tables A1-A1417, or as encoded by the ORF2 gene as listed in any of Tables N1-N1417.

[0275] As used herein, the term “proteinaceous exterior” refers to an exterior component that is predominantly (e.g., >50%, >60%, >70%, >80%, >90%) protein.

[0276] As used herein, the term “regulatory nucleic acid” refers to a nucleic acid sequence that modifies expression, e.g., transcription and/or translation, of a DNA sequence that encodes an expression product. In embodiments, the expression product comprises RNA or protein.

[0277] As used herein, the term “regulatory sequence” refers to a nucleic acid sequence that modifies transcription of a target gene product. In some embodiments, the regulatory sequence is a promoter or an enhancer.

[0278] As used herein, the term “replication protein” refers to a protein, e.g., a viral protein, that is utilized during infection, viral genome replication/expression, viral protein synthesis, and/or assembly of the viral components.

[0279] As used herein, a “substantially non-pathogenic” organism, particle, or component, refers to an organism, particle (e.g., a virus or an anellovector, e.g., as described herein), or component thereof that does not cause or induce a detectable disease or pathogenic condition, e.g., in a host organism, e.g., a mammal, e.g., a human. In some embodiments, administration of an anellovector to a subject can result in minor reactions or side effects that are acceptable as part of standard of care.

[0280] As used herein, the term “non-pathogenic” refers to an organism or component thereof that does not cause or induce a detectable disease or pathogenic condition, e.g., in a host organism, e.g., a mammal, e.g., a human.

[0281] As used herein, a “substantially non-integrating” genetic element refers to a genetic element, e.g., a genetic element in a virus or anellovector, e.g., as described herein, wherein less than about 0.01%, 0.05%, 0.1%, 0.5%, or 1% of the genetic element that enter into a host cell (e.g., a eukaryotic cell) or organism (e.g., a mammal, e.g., a human) integrate into the genome. In some embodiments the genetic element does not detectably integrate into the genome of, e.g., a host cell. In some embodiments, integration of the genetic element into the genome can be detected using techniques as described herein, e.g., nucleic acid sequencing, PCR detection and/or nucleic acid hybridization.

[0282] As used herein, a “substantially non-immunogenic” organism, particle, or component, refers to an organism, particle (e.g., a virus or anellovector, e.g., as described herein), or component thereof, that does not cause or induce an undesired or untargeted immune response, e.g., in a host tissue or organism (e.g., a mammal, e.g., a human). In some embodiments, the substantially non-immunogenic organism, particle, or component does not produce a detectable immune response. In some embodiments, the substantially non-immunogenic anellovector does not produce a detectable immune response against a protein comprising an amino acid sequence or encoded by a nucleic acid sequence shown in any of Tables N1-N1417. In some embodiments, an immune response (e.g., an undesired or untargeted immune response) is detected by assaying antibody presence or level (e.g., presence or level of an anti-anellovector antibody, e.g., presence or level of an antibody against an anellovector as described herein) in a subject, e.g., according to the anti-TTV antibody detection method described in Tsuda et al. (1999; J. Virol. Methods 77: 199-206; incorporated herein by reference) and/or the method for determining anti-TTV IgG levels described in Kakkola et al. (2008; Virology 382: 182-189; incorporated herein by reference). Antibodies against an Anellovirus or an anellovector based thereon can also be detected by methods in the art for detecting anti-viral antibodies, e.g., methods of detecting anti-AAV antibodies, e.g., as described in Calcedo et al. (2013; Front. Immunol. 4(341): 1-7; incorporated herein by reference).

[0283] A “subsequence” as used herein refers to a nucleic acid sequence or an amino acid sequence that is comprised in a larger nucleic acid sequence or amino acid sequence, respectively. In some instances, a subsequence may comprise a domain or functional fragment of the larger sequence. In some instances, the subsequence may comprise a fragment of the larger sequence capable of forming secondary and/or tertiary structures when isolated from the larger sequence similar to the secondary and/or tertiary structures formed by the subsequence when present with the remainder of the larger sequence. In some instances, a subsequence can be replaced by another sequence (e.g., a subseqence comprising an exogenous sequence or a sequence heterologous to the remainder of the larger sequence, e.g., a corresponding subsequence from a different Anellovirus).

[0284] As used herein, “treatment”, “treating” and cognates thereof refer to the medical management of a subject with the intent to improve, ameliorate, stabilize, prevent or cure a disease, pathological condition, or disorder. This term includes active treatment (treatment directed to improve the disease, pathological condition, or disorder), causal treatment (treatment directed to the cause of the associated disease, pathological condition, or disorder), palliative treatment (treatment designed for the relief of symptoms), preventative treatment (treatment directed to preventing, minimizing or partially or completely inhibiting the development of the associated disease, pathological condition, or disorder); and supportive treatment (treatment employed to supplement another therapy).

[0285] As used herein, the term “virome” refers to viruses in a particular environment, e.g., a part of a body, e.g., in an organism, e.g. in a cell, e.g. in a tissue.

[0286] This invention relates generally to anellovectors, e.g., synthetic anellovectors, and uses thereof. The present disclosure provides anellovectors, compositions comprising anellovectors, and methods of making or using anellovectors. Anellovectors are generally useful as delivery vehicles, e.g., for delivering a therapeutic agent to a eukaryotic cell. Generally, an anellovector will include a genetic element comprising a nucleic acid sequence (e.g., encoding an effector, e.g., an exogenous effector or an endogenous effector) enclosed within a proteinaceous exterior. An anellovector may include one or more deletions of sequences (e.g., regions or domains as described herein) relative to an Anellovirus sequence (e.g., as described herein). Anellovectors can be used as a substantially non-immunogenic vehicle for delivering the genetic element, or an effector encoded therein (e.g., a polypeptide or nucleic acid effector, e.g., as described herein), into eukaryotic cells, e.g., to treat a disease or disorder in a subject comprising the cells.

### TABLE OF CONTENTS

[0287] I. Anellovectors
   [0288] A. Anelloviruses
   [0289] B. ORF1 molecules
   [0290] C. ORF2 molecules
   [0291] D. Genetic elements
   [0292] E. Protein binding sequences
   [0293] F. 5′ UTR Regions
   [0294] G. GC-rich regions
   [0295] H. Effectors
   [0296] I. Proteinaceous exterior
[0297] II. Compositions and Methods for Making Anellovectors
   [0298] A. Components and Assembly of Anellovectors
      [0299] i. ORF1 molecules for assembly of anellovectors
      [0300] ii. ORF2 molecules for assembly of anellovectors
      [0301] iii. Production of protein components
   [0302] B. Genetic Element Constructs
      [0303] i. Plasmids
      [0304] ii. Circular nucleic acid constructs
      [0305] iii. In vitro circularization
      [0306] iv. Tandem constructs
      [0307] v. Cis/trans constructs
      [0308] vi. Expression cassettes
      [0309] vii. Design and production of a genetic element construct
   [0310] C. Effectors
   [0311] D. Host Cells
      [0312] i. Introduction of genetic elements into host cells
      [0313] ii. Methods for providing protein(s) in cis or trans
      [0314] iii. Exemplary cell types
   [0315] E. Culture Conditions
   [0316] F. Harvest
   [0317] G. In vitro assembly methods
   [0318] H. Enrichment and Purification
[0319] III. Vectors
[0320] IV. Compositions
[0321] V. Host cells
[0322] VI. Methods of use
[0323] VII. Methods of production
[0324] VIII. Administration/Delivery

### I. Anellovectors

[0325] In some aspects, the invention described herein comprises compositions and methods of using and making an anellovector, anellovector preparations, and therapeutic compositions. In some embodiments, the anellovector has a sequence, structure, and/or function that is based on an Anellovirus (e.g., an Anellovirus as described herein, e.g., an Anellovirus comprising a nucleic acid or polypeptide comprising a sequence as shown in any of Tables A1-A1417 or N1-N1417), or fragments or portions thereof, or other substantially non-pathogenic virus, e.g., a symbiotic virus, commensal virus, native virus. In some embodiments, an Anellovirus-based anellovector comprises at least one element exogenous to that Anellovirus, e.g., an exogenous effector or a nucleic acid sequence encoding an exogenous effector disposed within a genetic element of the anellovector. In some embodiments, an Anellovirus-based anellovector comprises at least one element heterologous to another element from that Anellovirus, e.g., an effector-encoding nucleic acid sequence that is heterologous to another linked nucleic acid sequence, such as a promoter element. In some embodiments, an anellovector comprises a genetic element (e.g., circular DNA, e.g., single stranded DNA), which comprise at least one element that is heterologous relative to the remainder of the genetic element and/or the proteinaceous exterior (e.g., an exogenous element encoding an effector, e.g., as described herein). An anellovector may be a delivery vehicle (e.g., a substantially non-pathogenic delivery vehicle) for a payload into a host, e.g., a human. In some embodiments, the anellovector is capable of replicating in a eukaryotic cell, e.g., a mammalian cell, e.g., a human cell. In some embodiments, the anellovector is substantially non-pathogenic and/or substantially non-integrating in the mammalian (e.g., human) cell. In some embodiments, the anellovector is substantially non-immunogenic in a mammal, e.g., a human. In some embodiments, the anellovector is replication-deficient. In some embodiments, the anellovector is replication-competent.

[0326] In some embodiments the anellovector comprises a curon, or a component thereof (e.g., a genetic element, e.g., comprising a sequence encoding an effector, and/or a proteinaceous exterior), e.g., as described in PCT Application No. PCT/US2018/037379, which is incorporated herein by reference in its entirety.

[0327] In an aspect, the invention includes an anellovector comprising (i) a genetic element comprising a promoter element, a sequence encoding an effector, (e.g., an endogenous effector or an exogenous effector, e.g., a payload), and a protein binding sequence (e.g., an exterior protein binding sequence, e.g., a packaging signal), wherein the genetic element is a single-stranded DNA, and has one or both of the following properties: is circular and/or integrates into the genome of a eukaryotic cell at a frequency of less than about 0.001%, 0.005%, 0.01%, 0.05%, 0.1%, 0.5%, 1%, 1.5%, or 2% of the genetic element that enters the cell; and (ii) a proteinaceous exterior; wherein the genetic element is enclosed within the proteinaceous exterior; and wherein the anellovector is capable of delivering the genetic element into a eukaryotic cell.

[0328] In some embodiments of the anellovector described herein, the genetic element integrates at a frequency of less than about 0.001%, 0.005%, 0.01%, 0.05%, 0.1%, 0.5%, 1%, 1.5%, or 2% of the genetic element that enters a cell. In some embodiments, less than about 0.01%, 0.05%, 0.1%, 0.5%, 1%, 2%, 3%, 4%, or 5% of the genetic elements from a plurality of the anellovectors administered to a subject will integrate into the genome of one or more host cells in the subject. In some embodiments, the genetic elements of a population of anellovectors, e.g., as described herein, integrate into the genome of a host cell at a frequency less than that of a comparable population of AAV viruses, e.g., at about a 50%, 60%, 70%, 75%, 80%, 85%, 90%, 95%, 100%, or more lower frequency than the comparable population of AAV viruses.

[0329] In an aspect, the invention includes an anellovector comprising: (i) a genetic element comprising a promoter element and a sequence encoding an effector (e.g., an endogenous effector or an exogenous effector, e.g., a payload), and a protein binding sequence (e.g., an exterior protein binding sequence), wherein the genetic element has at least 75% (e.g., at least 75, 76, 77, 78, 79, 80, 90, 91, 92, 93, 94, 95, 96, 97, 98, 99, or 100%) sequence identity to a wild-type Anellovirus sequence (e.g., a wild-type Torque Teno virus (TTV), Torque Teno mini virus (TTMV), or TTMDV sequence, e.g., a wild-type Anellovirus sequence as listed in any of Tables N1-N1417); and (ii) a proteinaceous exterior; wherein the genetic element is enclosed within the proteinaceous exterior; and wherein the anellovector is capable of delivering the genetic element into a eukaryotic cell.

[0330] In one aspect, the invention includes an anellovector comprising:
[0331] a) a genetic element comprising (i) a sequence encoding an exterior protein (e.g., a non-pathogenic exterior protein), (ii) an exterior protein binding sequence that binds the genetic element to the non-pathogenic exterior protein, and (iii) a sequence encoding an effector (e.g., an endogenous or exogenous effector); and
[0332] b) a proteinaceous exterior that is associated with, e.g., envelops or encloses, the genetic element.

[0333] In some embodiments, the anellovector includes sequences or expression products from (or having >70%, 75%, 80%, 85%, 90%, 95%, 97%, 98%, 99%, 100% homology to) a non-enveloped, circular, single-stranded DNA virus. Animal circular single-stranded DNA viruses generally refer to a subgroup of single strand DNA (ssDNA) viruses, which infect eukaryotic non-plant hosts, and have a circular genome. Thus, animal circular ssDNA viruses are distinguishable from ssDNA viruses that infect prokaryotes (i.e. Microviridae and Inoviridae) and from ssDNA viruses that infect plants (i.e. Geminiviridae and Nanoviridae). They are also distinguishable from linear ssDNA viruses that infect non-plant eukaryotes (i.e. Parvoviridiae).

[0334] In some embodiments, the anellovector modulates a host cellular function, e.g., transiently or long term. In certain embodiments, the cellular function is stably altered, such as a modulation that persists for at least about 1 hr to about 30 days, or at least about 2 hrs, 6 hrs, 12 hrs, 18 hrs, 24 hrs, 2 days, 3, days, 4 days, 5 days, 6 days, 7 days, 8 days, 9 days, 10 days, 11 days, 12 days, 13 days, 14 days, 15 days, 16 days, 17 days, 18 days, 19 days, 20 days, 21 days, 22 days, 23 days, 24 days, 25 days, 26 days, 27 days, 28 days, 29 days, 30 days, 60 days, or longer or any time therebetween. In certain embodiments, the cellular function is transiently altered, e.g., such as a modulation that persists for no more than about 30 mins to about 7 days, or no more than about 1 hr, 2 hrs, 3 hrs, 4 hrs, 5 hrs, 6 hrs, 7 hrs, 8 hrs, 9 hrs, 10 hrs, 11 hrs, 12 hrs, 13 hrs, 14 hrs, 15 hrs, 16 hrs, 17 hrs, 18 hrs, 19 hrs, 20 hrs, 21 hrs, 22 hrs, 24 hrs, 36 hrs, 48 hrs, 60 hrs, 72 hrs, 4 days, 5 days, 6 days, 7 days, or any time therebetween.

[0335] In some embodiments, the genetic element comprises a promoter element. In some embodiments, the promoter element is selected from an RNA polymerase II-dependent promoter, an RNA polymerase III-dependent promoter, a PGK promoter, a CMV promoter, an EF-1α promoter, an SV40 promoter, a CAGG promoter, or a UBC promoter, TTV viral promoters, Tissue specific, U6 (pollIII), minimal CMV promoter with upstream DNA binding sites for activator proteins (TetR-VP16, Gal4-VP16, dCas9-VP16, etc). In some embodiments, the promoter element comprises a TATA box. In some embodiments, the promoter element is endogenous to a wild-type Anellovirus, e.g., as described herein.

[0336] In some embodiments, the genetic element comprises one or more of the following characteristics: single-stranded, circular, negative strand, and/or DNA. In some embodiments, the genetic element comprises an episome. In some embodiments, the portions of the genetic element excluding the effector have a combined size of about 2.5-5 kb (e.g., about 2.8-4 kb, about 2.8-3.2 kb, about 3.6-3.9 kb, or about 2.8-2.9 kb), less than about 5 kb (e.g., less than about 2.9 kb, 3.2 kb, 3.6 kb, 3.9 kb, or 4 kb), or at least 100 nucleotides (e.g., at least 1 kb).

[0337] The anellovectors, compositions comprising anellovectors, methods using such anellovectors, etc., as described herein are, in some instances, based in part on the examples which illustrate how different effectors, for example miRNAs (e.g. against IFN or miR-625), shRNA, etc and protein binding sequences, for example DNA sequences that bind to capsid protein such as Q99153, are combined with proteinaccious exteriors, for example a capsid disclosed in Arch Virol (2007) 152: 1961-1975, to produce anellovectors which can then be used to deliver an effector to cells (e.g., animal cells, e.g., human cells or non-human animal cells such as pig or mouse cells). In embodiments, the effector can silence expression of a factor such as an interferon. The examples further describe how anellovectors can be made by inserting effectors into sequences derived, e.g., from an Anellovirus. It is on the basis of these examples that the description hereinafter contemplates various variations of the specific findings and combinations considered in the examples. For example, the skilled person will understand from the examples that the specific miRNAs are used just as an example of an effector and that other effectors may be, e.g., other regulatory nucleic acids or therapeutic peptides. Similarly, the specific capsids used in the examples may be replaced by substantially non-pathogenic proteins described hereinafter. The specifc Anellovirus sequences described in the examples may also be replaced by the Anellovirus sequences described hereinafter. These considerations similarly apply to protein binding sequences, regulatory sequences such as promoters, and the like. Independent thereof, the person skilled in the art will in particular consider such embodiments which are closely related to the examples.

[0338] In some embodiments, an anellovector, or the genetic element comprised in the anellovector, is introduced into a cell (e.g., a human cell). In some embodiments, the effector (e.g., an RNA, e.g., an miRNA), e.g., encoded by the genetic element of an anellovector, is expressed in a cell (e.g., a human cell), e.g., once the anellovector or the genetic element has been introduced into the cell. In some embodiments, introduction of the anellovector, or genetic element comprised therein, into a cell modulates (e.g., increases or decreases) the level of a target molecule (e.g., a target nucleic acid, e.g., RNA, or a target polypeptide) in the cell, e.g., by altering the expression level of the target molecule by the cell. In some embodiments, introduction of the anellovector, or genetic element comprised therein, decreases level of interferon produced by the cell. In some embodiments, introduction of the anellovector, or genetic element comprised therein, into a cell modulates (e.g., increases or decreases) a function of the cell. In some embodiments, introduction of the anellovector, or genetic element comprised therein, into a cell modulates (e.g., increases or decreases) the viability of the cell. In some embodiments, introduction of the anellovector, or genetic element comprised therein, into a cell decreases viability of a cell (e.g., a cancer cell).

[0339] In some embodiments, an anellovector (e.g., a synthetic anellovector) described herein induces an antibody prevalence of less than 70% (e.g., less than about 60%, 50%, 40%, 30%, 20%, or 10% antibody prevalence). In some embodiments, antibody prevalence is determined according to methods known in the art. In some embodiments, antibody prevalence is determined by detecting antibodies against an Anellovirus (e.g., as described herein), or an anellovector based thereon, in a biological sample, e.g., according to the anti-TTV antibody detection method described in Tsuda et al. (1999; J. Virol. Methods 77: 199-206; incorporated herein by reference) and/or the method for determining anti-TTV lgG seroprevalence described in Kakkola et al. (2008; Virology 382: 182-189; incorporated herein by reference). Antibodies against an Anellovirus or an anellovector based thereon can also be detected by methods in the art for detecting anti-viral antibodies, e.g., methods of detecting anti-AAV antibodies. e.g., as described in Calcedo et al. (2013; Front. Immunol. 4(341): 1-7; incorporated herein by reference).

[0340] In some embodiments, a replication deficient, replication defective, or replication incompetent genetic element does not encode all of the necessary machinery or components required for replication of the genetic element. In some embodiments, a replication defective genetic element does not encode a replication factor. In some embodiments, a replication defective genetic element does not encode one or more ORFs (e.g., ORF1, ORF1/1, ORF1/2, ORF2, ORF2/2, ORF2/3, and/or ORF2t/3, e.g., as described herein). In some embodiments, the machinery or components not encoded by the genetic element may be provided in trans (e.g., using a helper, e.g., a helper virus or helper plasmid, or encoded in a nucleic acid comprised by the host cell, e.g., integrated into the genome of the host cell), e.g., such that the genetic element can undergo replication in the presence of the machinery or components provided in trans.

[0341] In some embodiments, a packaging deficient, packaging defective, or packaging incompetent genetic element cannot be packaged into a proteinaceous exterior (e.g., wherein the proteinaccous exterior comprises a capsid or a portion thereof, e.g., comprising a polypeptide encoded by an ORF1 nucleic acid, e.g., as described herein). In some embodiments, a packaging deficient genetic element is packaged into a proteinaccous exterior at an efficiency less than 10% (e.g., less than 10%, 9%, 8%, 7%, 6%, 5%, 4%, 3%, 2%, 1%, 0.5%, 0.1%, 0.01%, or 0.001%) compared to a wild-type Anellovirus (e.g., as described herein). In some embodiments, the packaging defective genetic element cannot be packaged into a proteinaceous exterior even in the presence of factors (e.g., ORF1, ORF1/1, ORF1/2, ORF2, ORF2/2. ORF2/3, or ORF2t/3) that would permit packaging of the genetic element of a wild-type Anellovirus (e.g., as described herein). In some embodiments, a packaging deficient genetic element is packaged into a proteinaceous exterior at an efficiency less than 10% (e.g., less than 10%, 9%, 8%, 7%, 6%, 5%, 4%, 3%, 2%, 1%, 0.5%, 0.1%, 0.01%, or 0.001%) compared to a wild-type Anellovirus (e.g., as described herein), even in the presence of factors (e.g., ORF1, ORF1/1, ORF1/2, ORF2, ORF2/2, ORF2/3, or ORF2t/3) that would permit packaging of the genetic element of a wild-type Anellovirus (e.g., as described herein).

[0342] In some embodiments, a packaging competent genetic element can be packaged into a proteinaccous exterior (e.g., wherein the proteinaceous exterior comprises a capsid or a portion thereof, e.g., comprising a polypeptide encoded by an ORF1 nucleic acid, e.g., as described herein). In some embodiments, a packaging competent genetic element is packaged into a proteinaceous exterior at an efficiency of at least 20% (e.g., at least 20%, 30%, 40%, 50%, 60%, 70%, 80%, 85%, 90%, 95%, 96%, 97%, 98%, 99%, 100%, or higher) compared to a wild-type Anellovirus (e.g., as described herein). In some embodiments, the packaging competent genetic element can be packaged into a proteinaceous exterior in the presence of factors (e.g., ORF1, ORF1/1, ORF1/2, ORF2, ORF2/2, ORF2/3, or ORF2t/3) that would permit packaging of the genetic element of a wild-type Anellovirus (e.g., as described herein). In some embodiments, a packaging competent genetic element is packaged into a proteinaceous exterior at an efficiency of at least 20% (e.g., at least 20%, 30%, 40%, 50%, 60%, 70%, 80%, 85%, 90%, 95%, 96%, 97%, 98%, 99%, 100%, or higher) compared to a wild-type Anellovirus (e.g., as described herein) in the presence of factors (e.g., ORF1, ORF1/1, ORF1/2, ORF2, ORF2/2, ORF2/3, or ORF2t/3) that would permit packaging of the genetic element of a wild-type Anellovirus (e.g., as described herein).

### Anelloviruses

[0343] In some embodiments, an anellovector, e.g., as described herein, comprises sequences or expression products derived from an Anellovirus. In some embodiments, an anellovector includes one or more sequences or expression products that are exogenous relative to the Anellovirus. In some embodiments, an anellovector includes one or more sequences or expression products that are endogenous relative to the Anellovirus. In some embodiments, an anellovector includes one or more sequences or expression products that are heterologous relative to one or more other sequences or expression products in the anellovector. Anelloviruses generally have single-stranded circular DNA genomes with negative polarity. Anelloviruses have not generally been linked to any human disease. However, attempts to link Anellovirus infection with human disease are confounded by the high incidence of asymptomatic Anellovirus viremia in control cohort population(s), the remarkable genomic diversity within the anellovirus viral family, the historical inability to propagate the agent in vitro, and the lack of animal model(s) of Anellovirus disease (Yzebe et al., Panminerva Med. (2002) 44:167-177; Biagini, P., Vet. Microbiol. (2004) 98:95-101).

[0344] Anelloviruses are generally transmitted by oronasal or fecal-oral infection, mother-to-infant and/or in utero transmission (Gerner et al., Ped. Infect. Dis. J. (2000) 19:1074-1077). Infected persons can, in some instances, be characterized by a prolonged (months to years) Anellovirus viremia. Humans may be co-infected with more than one genogroup or strain (Saback, et al., Scad. J. Infect. Dis. (2001) 33:121-125). There is a suggestion that these genogroups can recombine within infected humans (Rey et al., Infect. (2003) 31:226-233). The double stranded isoform (replicative) intermediates have been found in several tissues, such as liver, peripheral blood mononuclear cells and bone marrow (Kikuchi et al., J. Med. Virol. (2000) 61:165-170; Okamoto et al., Biochem. Biophys. Res. Commun. (2002) 270:657-662; Rodriguez-Inigo et al., Am. J. Pathol. (2000) 156:1227-1234).

[0345] In some embodiments, the genetic element comprises a nucleotide sequence encoding an amino acid sequence or a functional fragment thereof or a sequence having at least about 60%, 70% 80%, 85%, 90% 95%, 96%, 97%, 98%, 99%, or 100% sequence identity to any one of the amino acid sequences described herein, e.g., an Anellovirus amino acid sequence.

[0346] In some embodiments, an anellovector as described herein comprises one or more nucleic acid molecules (e.g., a genetic element as described herein) comprising a sequence having at least about 70%, 75%, 80%, 85%, 90%, 95%, 96%, 97%, 98%, 99%, or 100% sequence identity to an Anellovirus sequence, e.g., as described herein, or a fragment thereof. In embodiments, the anellovector comprises a nucleic acid sequence selected from a sequence as shown in any of Tables N1-N1417, or a sequence having at least 70%, 75%, 80%, 85%, 90%, 95%, 96%, 97%, 98%, 99%, or 100% sequence identity thereto. In embodiments, the anellovector comprises a polypeptide comprising a sequence as shown in any of Tables A1-A1417, or a sequence having at least 70%, 75%, 80%, 85%, 90%, 95%, 96%, 97%, 98%, 99%, or 100% sequence identity thereto.

[0347] In some embodiments, an anellovector as described herein comprises one or more nucleic acid molecules (e.g., a genetic element as described herein) comprising a sequence having at least about 70%, 75%, 80%, 85%, 90%, 95%, 96%, 97%, 98%, 99%, or 100% sequence identity to one or more of a TATA box, cap site, initiator element, transcriptional start site, 5′ UTR conserved domain, ORF1, ORF1/1, ORF1/2, ORF2, ORF2/2, ORF2/3, ORF2t/3, three open-reading frame region, poly(A) signal, GC-rich region, or any combination thereof, of any of the Anelloviruses described herein (e.g., an Anellovirus sequence as annotated, or as encoded by a sequence listed, in any of Tables N1-N1417. In some embodiments, the nucleic acid molecule comprises a sequence encoding a capsid protein, e.g., an ORF1, ORF1/1, ORF1/2, ORF2, ORF2/2, ORF2/3, ORF2t/3 sequence of any of the Anelloviruses described herein (e.g., an Anellovirus sequence as annotated, or as encoded by a sequence listed, in any of Tables N1-N1417). In some embodiments, the nucleic acid molecule comprises a sequence encoding a capsid protein comprising an amino acid sequence having at least about 70%, 75%, 80%, 85%, 90%, 95%, 96%, 97%, 98%, 99%, or 100% sequence identity to an Anellovirus ORF1 or ORF2 protein (e.g., an ORF1 or ORF2 amino acid sequence as shown in any of Tables A1-A1417, or an ORF1 or ORF2 amino acid sequence encoded by a nucleic acid sequence as shown in any of Tables N1-N1417). In embodiments, the nucleic acid molecule comprises a sequence encoding a capsid protein comprising an amino acid sequence having at least about 70%, 75%, 80%, 85%, 90%, 95%, 96%, 97%, 98%, 99%, or 100% sequence identity to an Anellovirus ORF1 protein (e.g., an ORF1 amino acid sequence as shown in any of Tables A1-A1417, or an ORF1 amino acid sequence encoded by a nucleic acid sequence as shown in any of Tables N1-N1417).

### Nucleic Acid Sequences

[0348] In some embodiments, the nucleic acid molecule comprises a nucleic acid sequence having at least about 70%, 75%, 80%, 85%, 90%, 95%, 96%, 97%, 98%, 99%, or 100% sequence identity to the Anellovirus ORF1 nucleotide sequence of any of Tables N1-N1417. In some embodiments, the nucleic acid molecule comprises a nucleic acid sequence having at least about 70%, 75%, 80%, 85%, 90%, 95%, 96%, 97%, 98%, 99%, or 100% sequence identity to the Anellovirus ORF2 nucleotide sequence of any of Tables N1-N1417. In some embodiments, the nucleic acid molecule comprises a nucleic acid sequence having at least about 70%, 75%, 80%, 85%, 90%, 95%, 96%, 97%, 98%, 99%, or 100% sequence identity to the Anellovirus 5′ UTR conserved domain nucleotide sequence of any of Tables N1-N1417.

### Amino Acid Sequences Encoded by Nucleic Acid Sequences

[0349] In embodiments, the nucleic acid molecule comprises a nucleic acid sequence encoding an amino acid sequence having at least about 70%, 75%, 80%, 85%, 90%, 95%, 96%, 97%, 98%, 99%, or 100% sequence identity to the Anellovirus ORF1 amino acid sequence of any of Tables A1-A1417. In embodiments, the nucleic acid molecule comprises a nucleic acid sequence encoding an amino acid sequence having at least about 70%, 75%, 80%, 85%, 90%, 95%, 96%, 97%, 98%, 99%, or 100% sequence identity to the Anellovirus ORF2 amino acid sequence of any of Tables A1-A1417.

### Proteins Comprising Amino Acid Sequences

[0350] In embodiments, the anellovector described herein comprises a protein having an amino acid sequence having at least about 70%, 75%, 80%, 85%, 90%, 95%, 96%, 97%, 98%, 99%, or 100% sequence identity to the Anellovirus ORF1 amino acid sequence of any of Tables A1-A1417. In embodiments, the anellovector described herein comprises a protein having an amino acid sequence having at least about 70%, 75%, 80%, 85%, 90%, 95%, 96%, 97%, 98%, 99%, or 100% sequence identity to the Anellovirus ORF2 amino acid sequence of any of Tables A1-A1417. In some embodiments, an ORF1 molecule (e.g., comprised in the anellovector) comprises a polypeptide encoded by the Anellovirus ORF1 nucleic acid sequence of nucleotides 287-2038 of the nucleic acid sequence of any of Tables N1-N1417. In some embodiments, the ORF1 molecule (e.g., comprised in the anellovector) comprises an Anellovirus ORF1 protein of any of Tables A1-A1417 or a splice variant or post-translationally processed (e.g., proteolytically processed) variant thereof. In some embodiments, an ORF2 molecule (e.g., comprised in the anellovector) comprises a polypeptide encoded by the Anellovirus ORF2 nucleic acid sequence of nucleotides 105-431 of the nucleic acid sequence of any of Tables N1-N1417. In some embodiments, the ORF1 molecule (e.g., comprised in the anellovector) comprises an Anellovirus ORF1 protein of any of Tables A1-A1417 or a splice variant or post-translationally processed (e.g., proteolytically processed) variant thereof.

### Polypeptides Comprising Amino Acid Sequences

[0351] In some embodiments, the polypeptide described herein comprises an amino acid sequence having at least about 70%, 75%, 80%, 85%, 90%, 95%, 96%, 97%, 98%, 99%, or 100% sequence identity to an Anellovirus ORF1 amino acid sequence described herein. In embodiments, the polypeptide described herein comprises an amino acid sequence having at least about 70%, 75%, 80%, 85%, 90%, 95%, 96%, 97%, 98%, 99%, or 100% sequence identity to the Anellovirus ORF1 amino acid sequence of any of Tables A1-A1417.

[0352] In some embodiments, the polypeptide described herein comprises an amino acid sequence having at least about 70%, 75%, 80%, 85%, 90%, 95%, 96%, 97%, 98%, 99%, or 100% sequence identity to an ORF1 molecule encoded by an Anellovirus ORF1 nucleic acid described herein. In some embodiments, the polypeptide described herein comprises an amino acid sequence having at least about 70%, 75%, 80%, 85%, 90%, 95%, 96%, 97%, 98%, 99%, or 100% sequence identity to an ORF1 molecule encoded by an Anellovirus ORF1 nucleic acid as listed in any of Tables A1-A1417.

[0353] In some embodiments, the polypeptide comprises an amino acid sequence (e.g., an ORF1, ORF1/1, ORF1/2, ORF2, ORF2/2, ORF2/3, or ORF2t/3 sequence) as shown in any of Tables A1-A1417, or a sequence having at least 70%, 75%, 80%, 85%, 90%, 95%, 96%, 97%, 98%, 99%, or 100% sequence identity thereto.

Lengthy table referenced here
US20240254512A1-20240801-T00001
Please refer to the end of the specification for access instructions.

Lengthy table referenced here
US20240254512A1-20240801-T00002
Please refer to the end of the specification for access instructions.

Lengthy table referenced here
US20240254512A1-20240801-T00003
Please refer to the end of the specification for access instructions.

Lengthy table referenced here
US20240254512A1-20240801-T00004
Please refer to the end of the specification for access instructions.

Lengthy table referenced here
US20240254512A1-20240801-T00005
Please refer to the end of the specification for access instructions.

Lengthy table referenced here
US20240254512A1-20240801-T00006
Please refer to the end of the specification for access instructions.

Lengthy table referenced here
US20240254512A1-20240801-T00007
Please refer to the end of the specification for access instructions.

Lengthy table referenced here
US20240254512A1-20240801-T00008
Please refer to the end of the specification for access instructions.

Lengthy table referenced here
US20240254512A1-20240801-T00009
Please refer to the end of the specification for access instructions.

Lengthy table referenced here
US20240254512A1-20240801-T00010
Please refer to the end of the specification for access instructions.

Lengthy table referenced here
US20240254512A1-20240801-T00011
Please refer to the end of the specification for access instructions.

Lengthy table referenced here
US20240254512A1-20240801-T00012
Please refer to the end of the specification for access instructions.

Lengthy table referenced here
US20240254512A1-20240801-T00013
Please refer to the end of the specification for access instructions.

Lengthy table referenced here
US20240254512A1-20240801-T00014
Please refer to the end of the specification for access instructions.

Lengthy table referenced here
US20240254512A1-20240801-T00015
Please refer to the end of the specification for access instructions.

Lengthy table referenced here
US20240254512A1-20240801-T00016
Please refer to the end of the specification for access instructions.

Lengthy table referenced here
US20240254512A1-20240801-T00017
Please refer to the end of the specification for access instructions.

Lengthy table referenced here
US20240254512A1-20240801-T00018
Please refer to the end of the specification for access instructions.

Lengthy table referenced here
US20240254512A1-20240801-T00019
Please refer to the end of the specification for access instructions.

Lengthy table referenced here
US20240254512A1-20240801-T00020
Please refer to the end of the specification for access instructions.

Lengthy table referenced here
US20240254512A1-20240801-T00021
Please refer to the end of the specification for access instructions.

Lengthy table referenced here
US20240254512A1-20240801-T00022
Please refer to the end of the specification for access instructions.

Lengthy table referenced here
US20240254512A1-20240801-T00023
Please refer to the end of the specification for access instructions.

Lengthy table referenced here
US20240254512A1-20240801-T00024
Please refer to the end of the specification for access instructions.

Lengthy table referenced here
US20240254512A1-20240801-T00025
Please refer to the end of the specification for access instructions.

Lengthy table referenced here
US20240254512A1-20240801-T00026
Please refer to the end of the specification for access instructions.

Lengthy table referenced here
US20240254512A1-20240801-T00027
Please refer to the end of the specification for access instructions.

Lengthy table referenced here
US20240254512A1-20240801-T00028
Please refer to the end of the specification for access instructions.

Lengthy table referenced here
US20240254512A1-20240801-T00029
Please refer to the end of the specification for access instructions.

Lengthy table referenced here
US20240254512A1-20240801-T00030
Please refer to the end of the specification for access instructions.

Lengthy table referenced here
US20240254512A1-20240801-T00031
Please refer to the end of the specification for access instructions.

Lengthy table referenced here
US20240254512A1-20240801-T00032
Please refer to the end of the specification for access instructions.

Lengthy table referenced here
US20240254512A1-20240801-T00033
Please refer to the end of the specification for access instructions.

Lengthy table referenced here
US20240254512A1-20240801-T00034
Please refer to the end of the specification for access instructions.

Lengthy table referenced here
US20240254512A1-20240801-T00035
Please refer to the end of the specification for access instructions.

Lengthy table referenced here
US20240254512A1-20240801-T00036
Please refer to the end of the specification for access instructions.

Lengthy table referenced here
US20240254512A1-20240801-T00037
Please refer to the end of the specification for access instructions.

Lengthy table referenced here
US20240254512A1-20240801-T00038
Please refer to the end of the specification for access instructions.

Lengthy table referenced here
US20240254512A1-20240801-T00039
Please refer to the end of the specification for access instructions.

Lengthy table referenced here
US20240254512A1-20240801-T00040
Please refer to the end of the specification for access instructions.

Lengthy table referenced here
US20240254512A1-20240801-T00041
Please refer to the end of the specification for access instructions.

Lengthy table referenced here
US20240254512A1-20240801-T00042
Please refer to the end of the specification for access instructions.

Lengthy table referenced here
US20240254512A1-20240801-T00043
Please refer to the end of the specification for access instructions.

Lengthy table referenced here
US20240254512A1-20240801-T00044
Please refer to the end of the specification for access instructions.

Lengthy table referenced here
US20240254512A1-20240801-T00045
Please refer to the end of the specification for access instructions.

Lengthy table referenced here
US20240254512A1-20240801-T00046
Please refer to the end of the specification for access instructions.

Lengthy table referenced here
US20240254512A1-20240801-T00047
Please refer to the end of the specification for access instructions.

Lengthy table referenced here
US20240254512A1-20240801-T00048
Please refer to the end of the specification for access instructions.

Lengthy table referenced here
US20240254512A1-20240801-T00049
Please refer to the end of the specification for access instructions.

Lengthy table referenced here
US20240254512A1-20240801-T00050
Please refer to the end of the specification for access instructions.

Lengthy table referenced here
US20240254512A1-20240801-T00051
Please refer to the end of the specification for access instructions.

Lengthy table referenced here
US20240254512A1-20240801-T00052
Please refer to the end of the specification for access instructions.

Lengthy table referenced here
US20240254512A1-20240801-T00053
Please refer to the end of the specification for access instructions.

Lengthy table referenced here
US20240254512A1-20240801-T00054
Please refer to the end of the specification for access instructions.

Lengthy table referenced here
US20240254512A1-20240801-T00055
Please refer to the end of the specification for access instructions.

Lengthy table referenced here
US20240254512A1-20240801-T00056
Please refer to the end of the specification for access instructions.

Lengthy table referenced here
US20240254512A1-20240801-T00057
Please refer to the end of the specification for access instructions.

Lengthy table referenced here
US20240254512A1-20240801-T00058
Please refer to the end of the specification for access instructions.

Lengthy table referenced here
US20240254512A1-20240801-T00059
Please refer to the end of the specification for access instructions.

Lengthy table referenced here
US20240254512A1-20240801-T00060
Please refer to the end of the specification for access instructions.

Lengthy table referenced here
US20240254512A1-20240801-T00061
Please refer to the end of the specification for access instructions.

Lengthy table referenced here
US20240254512A1-20240801-T00062
Please refer to the end of the specification for access instructions.

Lengthy table referenced here
US20240254512A1-20240801-T00063
Please refer to the end of the specification for access instructions.

Lengthy table referenced here
US20240254512A1-20240801-T00064
Please refer to the end of the specification for access instructions.

Lengthy table referenced here
US20240254512A1-20240801-T00065
Please refer to the end of the specification for access instructions.

Lengthy table referenced here
US20240254512A1-20240801-T00066
Please refer to the end of the specification for access instructions.

Lengthy table referenced here
US20240254512A1-20240801-T00067
Please refer to the end of the specification for access instructions.

Lengthy table referenced here
US20240254512A1-20240801-T00068
Please refer to the end of the specification for access instructions.

Lengthy table referenced here
US20240254512A1-20240801-T00069
Please refer to the end of the specification for access instructions.

Lengthy table referenced here
US20240254512A1-20240801-T00070
Please refer to the end of the specification for access instructions.

Lengthy table referenced here
US20240254512A1-20240801-T00071
Please refer to the end of the specification for access instructions.

Lengthy table referenced here
US20240254512A1-20240801-T00072
Please refer to the end of the specification for access instructions.

Lengthy table referenced here
US20240254512A1-20240801-T00073
Please refer to the end of the specification for access instructions.

Lengthy table referenced here
US20240254512A1-20240801-T00074
Please refer to the end of the specification for access instructions.

Lengthy table referenced here
US20240254512A1-20240801-T00075
Please refer to the end of the specification for access instructions.

Lengthy table referenced here
US20240254512A1-20240801-T00076
Please refer to the end of the specification for access instructions.

Lengthy table referenced here
US20240254512A1-20240801-T00077
Please refer to the end of the specification for access instructions.

Lengthy table referenced here
US20240254512A1-20240801-T00078
Please refer to the end of the specification for access instructions.

Lengthy table referenced here
US20240254512A1-20240801-T00079
Please refer to the end of the specification for access instructions.

Lengthy table referenced here
US20240254512A1-20240801-T00080
Please refer to the end of the specification for access instructions.

Lengthy table referenced here
US20240254512A1-20240801-T00081
Please refer to the end of the specification for access instructions.

Lengthy table referenced here
US20240254512A1-20240801-T00082
Please refer to the end of the specification for access instructions.

Lengthy table referenced here
US20240254512A1-20240801-T00083
Please refer to the end of the specification for access instructions.

Lengthy table referenced here
US20240254512A1-20240801-T00084
Please refer to the end of the specification for access instructions.

Lengthy table referenced here
US20240254512A1-20240801-T00085
Please refer to the end of the specification for access instructions.

Lengthy table referenced here
US20240254512A1-20240801-T00086
Please refer to the end of the specification for access instructions.

Lengthy table referenced here
US20240254512A1-20240801-T00087
Please refer to the end of the specification for access instructions.

Lengthy table referenced here
US20240254512A1-20240801-T00088
Please refer to the end of the specification for access instructions.

Lengthy table referenced here
US20240254512A1-20240801-T00089
Please refer to the end of the specification for access instructions.

Lengthy table referenced here
US20240254512A1-20240801-T00090
Please refer to the end of the specification for access instructions.

Lengthy table referenced here
US20240254512A1-20240801-T00091
Please refer to the end of the specification for access instructions.

Lengthy table referenced here
US20240254512A1-20240801-T00092
Please refer to the end of the specification for access instructions.

Lengthy table referenced here
US20240254512A1-20240801-T00093
Please refer to the end of the specification for access instructions.

Lengthy table referenced here
US20240254512A1-20240801-T00094
Please refer to the end of the specification for access instructions.

Lengthy table referenced here
US20240254512A1-20240801-T00095
Please refer to the end of the specification for access instructions.

Lengthy table referenced here
US20240254512A1-20240801-T00096
Please refer to the end of the specification for access instructions.

Lengthy table referenced here
US20240254512A1-20240801-T00097
Please refer to the end of the specification for access instructions.

Lengthy table referenced here
US20240254512A1-20240801-T00098
Please refer to the end of the specification for access instructions.

Lengthy table referenced here
US20240254512A1-20240801-T00099
Please refer to the end of the specification for access instructions.

Lengthy table referenced here
US20240254512A1-20240801-T00100
Please refer to the end of the specification for access instructions.

Lengthy table referenced here
US20240254512A1-20240801-T00101
Please refer to the end of the specification for access instructions.

Lengthy table referenced here
US20240254512A1-20240801-T00102
Please refer to the end of the specification for access instructions.

Lengthy table referenced here
US20240254512A1-20240801-T00103
Please refer to the end of the specification for access instructions.

Lengthy table referenced here
US20240254512A1-20240801-T00104
Please refer to the end of the specification for access instructions.

Lengthy table referenced here
US20240254512A1-20240801-T00105
Please refer to the end of the specification for access instructions.

Lengthy table referenced here
US20240254512A1-20240801-T00106
Please refer to the end of the specification for access instructions.

Lengthy table referenced here
US20240254512A1-20240801-T00107
Please refer to the end of the specification for access instructions.

Lengthy table referenced here
US20240254512A1-20240801-T00108
Please refer to the end of the specification for access instructions.

Lengthy table referenced here
US20240254512A1-20240801-T00109
Please refer to the end of the specification for access instructions.

Lengthy table referenced here
US20240254512A1-20240801-T00110
Please refer to the end of the specification for access instructions.

Lengthy table referenced here
US20240254512A1-20240801-T00111
Please refer to the end of the specification for access instructions.

Lengthy table referenced here
US20240254512A1-20240801-T00112
Please refer to the end of the specification for access instructions.

Lengthy table referenced here
US20240254512A1-20240801-T00113
Please refer to the end of the specification for access instructions.

Lengthy table referenced here
US20240254512A1-20240801-T00114
Please refer to the end of the specification for access instructions.

Lengthy table referenced here
US20240254512A1-20240801-T00115
Please refer to the end of the specification for access instructions.

Lengthy table referenced here
US20240254512A1-20240801-T00116
Please refer to the end of the specification for access instructions.

Lengthy table referenced here
US20240254512A1-20240801-T00117
Please refer to the end of the specification for access instructions.

Lengthy table referenced here
US20240254512A1-20240801-T00118
Please refer to the end of the specification for access instructions.

Lengthy table referenced here
US20240254512A1-20240801-T00119
Please refer to the end of the specification for access instructions.

Lengthy table referenced here
US20240254512A1-20240801-T00120
Please refer to the end of the specification for access instructions.

Lengthy table referenced here
US20240254512A1-20240801-T00121
Please refer to the end of the specification for access instructions.

Lengthy table referenced here
US20240254512A1-20240801-T00122
Please refer to the end of the specification for access instructions.

Lengthy table referenced here
US20240254512A1-20240801-T00123
Please refer to the end of the specification for access instructions.

Lengthy table referenced here
US20240254512A1-20240801-T00124
Please refer to the end of the specification for access instructions.

Lengthy table referenced here
US20240254512A1-20240801-T00125
Please refer to the end of the specification for access instructions.

Lengthy table referenced here
US20240254512A1-20240801-T00126
Please refer to the end of the specification for access instructions.

Lengthy table referenced here
US20240254512A1-20240801-T00127
Please refer to the end of the specification for access instructions.

Lengthy table referenced here
US20240254512A1-20240801-T00128
Please refer to the end of the specification for access instructions.

Lengthy table referenced here
US20240254512A1-20240801-T00129
Please refer to the end of the specification for access instructions.

Lengthy table referenced here
US20240254512A1-20240801-T00130
Please refer to the end of the specification for access instructions.

Lengthy table referenced here
US20240254512A1-20240801-T00131
Please refer to the end of the specification for access instructions.

Lengthy table referenced here
US20240254512A1-20240801-T00132
Please refer to the end of the specification for access instructions.

Lengthy table referenced here
US20240254512A1-20240801-T00133
Please refer to the end of the specification for access instructions.

Lengthy table referenced here
US20240254512A1-20240801-T00134
Please refer to the end of the specification for access instructions.

Lengthy table referenced here
US20240254512A1-20240801-T00135
Please refer to the end of the specification for access instructions.

Lengthy table referenced here
US20240254512A1-20240801-T00136
Please refer to the end of the specification for access instructions.

Lengthy table referenced here
US20240254512A1-20240801-T00137
Please refer to the end of the specification for access instructions.

Lengthy table referenced here
US20240254512A1-20240801-T00138
Please refer to the end of the specification for access instructions.

Lengthy table referenced here
US20240254512A1-20240801-T00139
Please refer to the end of the specification for access instructions.

Lengthy table referenced here
US20240254512A1-20240801-T00140
Please refer to the end of the specification for access instructions.

Lengthy table referenced here
US20240254512A1-20240801-T00141
Please refer to the end of the specification for access instructions.

Lengthy table referenced here
US20240254512A1-20240801-T00142
Please refer to the end of the specification for access instructions.

Lengthy table referenced here
US20240254512A1-20240801-T00143
Please refer to the end of the specification for access instructions.

Lengthy table referenced here
US20240254512A1-20240801-T00144
Please refer to the end of the specification for access instructions.

Lengthy table referenced here
US20240254512A1-20240801-T00145
Please refer to the end of the specification for access instructions.

Lengthy table referenced here
US20240254512A1-20240801-T00146
Please refer to the end of the specification for access instructions.

Lengthy table referenced here
US20240254512A1-20240801-T00147
Please refer to the end of the specification for access instructions.

Lengthy table referenced here
US20240254512A1-20240801-T00148
Please refer to the end of the specification for access instructions.

Lengthy table referenced here
US20240254512A1-20240801-T00149
Please refer to the end of the specification for access instructions.

Lengthy table referenced here
US20240254512A1-20240801-T00150
Please refer to the end of the specification for access instructions.

Lengthy table referenced here
US20240254512A1-20240801-T00151
Please refer to the end of the specification for access instructions.

Lengthy table referenced here
US20240254512A1-20240801-T00152
Please refer to the end of the specification for access instructions.

Lengthy table referenced here
US20240254512A1-20240801-T00153
Please refer to the end of the specification for access instructions.

Lengthy table referenced here
US20240254512A1-20240801-T00154
Please refer to the end of the specification for access instructions.

Lengthy table referenced here
US20240254512A1-20240801-T00155
Please refer to the end of the specification for access instructions.

Lengthy table referenced here
US20240254512A1-20240801-T00156
Please refer to the end of the specification for access instructions.

Lengthy table referenced here
US20240254512A1-20240801-T00157
Please refer to the end of the specification for access instructions.

Lengthy table referenced here
US20240254512A1-20240801-T00158
Please refer to the end of the specification for access instructions.

Lengthy table referenced here
US20240254512A1-20240801-T00159
Please refer to the end of the specification for access instructions.

Lengthy table referenced here
US20240254512A1-20240801-T00160
Please refer to the end of the specification for access instructions.

Lengthy table referenced here
US20240254512A1-20240801-T00161
Please refer to the end of the specification for access instructions.

Lengthy table referenced here
US20240254512A1-20240801-T00162
Please refer to the end of the specification for access instructions.

Lengthy table referenced here
US20240254512A1-20240801-T00163
Please refer to the end of the specification for access instructions.

Lengthy table referenced here
US20240254512A1-20240801-T00164
Please refer to the end of the specification for access instructions.

Lengthy table referenced here
US20240254512A1-20240801-T00165
Please refer to the end of the specification for access instructions.

Lengthy table referenced here
US20240254512A1-20240801-T00166
Please refer to the end of the specification for access instructions.

Lengthy table referenced here
US20240254512A1-20240801-T00167
Please refer to the end of the specification for access instructions.

Lengthy table referenced here
US20240254512A1-20240801-T00168
Please refer to the end of the specification for access instructions.

Lengthy table referenced here
US20240254512A1-20240801-T00169
Please refer to the end of the specification for access instructions.

Lengthy table referenced here
US20240254512A1-20240801-T00170
Please refer to the end of the specification for access instructions.

Lengthy table referenced here
US20240254512A1-20240801-T00171
Please refer to the end of the specification for access instructions.

Lengthy table referenced here
US20240254512A1-20240801-T00172
Please refer to the end of the specification for access instructions.

Lengthy table referenced here
US20240254512A1-20240801-T00173
Please refer to the end of the specification for access instructions.

Lengthy table referenced here
US20240254512A1-20240801-T00174
Please refer to the end of the specification for access instructions.

Lengthy table referenced here
US20240254512A1-20240801-T00175
Please refer to the end of the specification for access instructions.

Lengthy table referenced here
US20240254512A1-20240801-T00176
Please refer to the end of the specification for access instructions.

Lengthy table referenced here
US20240254512A1-20240801-T00177
Please refer to the end of the specification for access instructions.

Lengthy table referenced here
US20240254512A1-20240801-T00178
Please refer to the end of the specification for access instructions.

Lengthy table referenced here
US20240254512A1-20240801-T00179
Please refer to the end of the specification for access instructions.

Lengthy table referenced here
US20240254512A1-20240801-T00180
Please refer to the end of the specification for access instructions.

Lengthy table referenced here
US20240254512A1-20240801-T00181
Please refer to the end of the specification for access instructions.

Lengthy table referenced here
US20240254512A1-20240801-T00182
Please refer to the end of the specification for access instructions.

Lengthy table referenced here
US20240254512A1-20240801-T00183
Please refer to the end of the specification for access instructions.

Lengthy table referenced here
US20240254512A1-20240801-T00184
Please refer to the end of the specification for access instructions.

Lengthy table referenced here
US20240254512A1-20240801-T00185
Please refer to the end of the specification for access instructions.

Lengthy table referenced here
US20240254512A1-20240801-T00186
Please refer to the end of the specification for access instructions.

Lengthy table referenced here
US20240254512A1-20240801-T00187
Please refer to the end of the specification for access instructions.

Lengthy table referenced here
US20240254512A1-20240801-T00188
Please refer to the end of the specification for access instructions.

Lengthy table referenced here
US20240254512A1-20240801-T00189
Please refer to the end of the specification for access instructions.

Lengthy table referenced here
US20240254512A1-20240801-T00190
Please refer to the end of the specification for access instructions.

Lengthy table referenced here
US20240254512A1-20240801-T00191
Please refer to the end of the specification for access instructions.

Lengthy table referenced here
US20240254512A1-20240801-T00192
Please refer to the end of the specification for access instructions.

Lengthy table referenced here
US20240254512A1-20240801-T00193
Please refer to the end of the specification for access instructions.

Lengthy table referenced here
US20240254512A1-20240801-T00194
Please refer to the end of the specification for access instructions.

Lengthy table referenced here
US20240254512A1-20240801-T00195
Please refer to the end of the specification for access instructions.

Lengthy table referenced here
US20240254512A1-20240801-T00196
Please refer to the end of the specification for access instructions.

Lengthy table referenced here
US20240254512A1-20240801-T00197
Please refer to the end of the specification for access instructions.

Lengthy table referenced here
US20240254512A1-20240801-T00198
Please refer to the end of the specification for access instructions.

Lengthy table referenced here
US20240254512A1-20240801-T00199
Please refer to the end of the specification for access instructions.

Lengthy table referenced here
US20240254512A1-20240801-T00200
Please refer to the end of the specification for access instructions.

Lengthy table referenced here
US20240254512A1-20240801-T00201
Please refer to the end of the specification for access instructions.

Lengthy table referenced here
US20240254512A1-20240801-T00202
Please refer to the end of the specification for access instructions.

Lengthy table referenced here
US20240254512A1-20240801-T00203
Please refer to the end of the specification for access instructions.

Lengthy table referenced here
US20240254512A1-20240801-T00204
Please refer to the end of the specification for access instructions.

Lengthy table referenced here
US20240254512A1-20240801-T00205
Please refer to the end of the specification for access instructions.

Lengthy table referenced here
US20240254512A1-20240801-T00206
Please refer to the end of the specification for access instructions.

Lengthy table referenced here
US20240254512A1-20240801-T00207
Please refer to the end of the specification for access instructions.

Lengthy table referenced here
US20240254512A1-20240801-T00208
Please refer to the end of the specification for access instructions.

Lengthy table referenced here
US20240254512A1-20240801-T00209
Please refer to the end of the specification for access instructions.

Lengthy table referenced here
US20240254512A1-20240801-T00210
Please refer to the end of the specification for access instructions.

Lengthy table referenced here
US20240254512A1-20240801-T00211
Please refer to the end of the specification for access instructions.

Lengthy table referenced here
US20240254512A1-20240801-T00212
Please refer to the end of the specification for access instructions.

Lengthy table referenced here
US20240254512A1-20240801-T00213
Please refer to the end of the specification for access instructions.

Lengthy table referenced here
US20240254512A1-20240801-T00214
Please refer to the end of the specification for access instructions.

Lengthy table referenced here
US20240254512A1-20240801-T00215
Please refer to the end of the specification for access instructions.

Lengthy table referenced here
US20240254512A1-20240801-T00216
Please refer to the end of the specification for access instructions.

Lengthy table referenced here
US20240254512A1-20240801-T00217
Please refer to the end of the specification for access instructions.

Lengthy table referenced here
US20240254512A1-20240801-T00218
Please refer to the end of the specification for access instructions.

Lengthy table referenced here
US20240254512A1-20240801-T00219
Please refer to the end of the specification for access instructions.

Lengthy table referenced here
US20240254512A1-20240801-T00220
Please refer to the end of the specification for access instructions.

Lengthy table referenced here
US20240254512A1-20240801-T00221
Please refer to the end of the specification for access instructions.

Lengthy table referenced here
US20240254512A1-20240801-T00222
Please refer to the end of the specification for access instructions.

Lengthy table referenced here
US20240254512A1-20240801-T00223
Please refer to the end of the specification for access instructions.

Lengthy table referenced here
US20240254512A1-20240801-T00224
Please refer to the end of the specification for access instructions.

Lengthy table referenced here
US20240254512A1-20240801-T00225
Please refer to the end of the specification for access instructions.

Lengthy table referenced here
US20240254512A1-20240801-T00226
Please refer to the end of the specification for access instructions.

Lengthy table referenced here
US20240254512A1-20240801-T00227
Please refer to the end of the specification for access instructions.

Lengthy table referenced here
US20240254512A1-20240801-T00228
Please refer to the end of the specification for access instructions.

Lengthy table referenced here
US20240254512A1-20240801-T00229
Please refer to the end of the specification for access instructions.

Lengthy table referenced here
US20240254512A1-20240801-T00230
Please refer to the end of the specification for access instructions.

Lengthy table referenced here
US20240254512A1-20240801-T00231
Please refer to the end of the specification for access instructions.

Lengthy table referenced here
US20240254512A1-20240801-T00232
Please refer to the end of the specification for access instructions.

Lengthy table referenced here
US20240254512A1-20240801-T00233
Please refer to the end of the specification for access instructions.

Lengthy table referenced here
US20240254512A1-20240801-T00234
Please refer to the end of the specification for access instructions.

Lengthy table referenced here
US20240254512A1-20240801-T00235
Please refer to the end of the specification for access instructions.

Lengthy table referenced here
US20240254512A1-20240801-T00236
Please refer to the end of the specification for access instructions.

Lengthy table referenced here
US20240254512A1-20240801-T00237
Please refer to the end of the specification for access instructions.

Lengthy table referenced here
US20240254512A1-20240801-T00238
Please refer to the end of the specification for access instructions.

Lengthy table referenced here
US20240254512A1-20240801-T00239
Please refer to the end of the specification for access instructions.

Lengthy table referenced here
US20240254512A1-20240801-T00240
Please refer to the end of the specification for access instructions.

Lengthy table referenced here
US20240254512A1-20240801-T00241
Please refer to the end of the specification for access instructions.

Lengthy table referenced here
US20240254512A1-20240801-T00242
Please refer to the end of the specification for access instructions.

Lengthy table referenced here
US20240254512A1-20240801-T00243
Please refer to the end of the specification for access instructions.

Lengthy table referenced here
US20240254512A1-20240801-T00244
Please refer to the end of the specification for access instructions.

Lengthy table referenced here
US20240254512A1-20240801-T00245
Please refer to the end of the specification for access instructions.

Lengthy table referenced here
US20240254512A1-20240801-T00246
Please refer to the end of the specification for access instructions.

Lengthy table referenced here
US20240254512A1-20240801-T00247
Please refer to the end of the specification for access instructions.

Lengthy table referenced here
US20240254512A1-20240801-T00248
Please refer to the end of the specification for access instructions.

Lengthy table referenced here
US20240254512A1-20240801-T00249
Please refer to the end of the specification for access instructions.

Lengthy table referenced here
US20240254512A1-20240801-T00250
Please refer to the end of the specification for access instructions.

Lengthy table referenced here
US20240254512A1-20240801-T00251
Please refer to the end of the specification for access instructions.

Lengthy table referenced here
US20240254512A1-20240801-T00252
Please refer to the end of the specification for access instructions.

Lengthy table referenced here
US20240254512A1-20240801-T00253
Please refer to the end of the specification for access instructions.

Lengthy table referenced here
US20240254512A1-20240801-T00254
Please refer to the end of the specification for access instructions.

Lengthy table referenced here
US20240254512A1-20240801-T00255
Please refer to the end of the specification for access instructions.

Lengthy table referenced here
US20240254512A1-20240801-T00256
Please refer to the end of the specification for access instructions.

Lengthy table referenced here
US20240254512A1-20240801-T00257
Please refer to the end of the specification for access instructions.

Lengthy table referenced here
US20240254512A1-20240801-T00258
Please refer to the end of the specification for access instructions.

Lengthy table referenced here
US20240254512A1-20240801-T00259
Please refer to the end of the specification for access instructions.

Lengthy table referenced here
US20240254512A1-20240801-T00260
Please refer to the end of the specification for access instructions.

Lengthy table referenced here
US20240254512A1-20240801-T00261
Please refer to the end of the specification for access instructions.

Lengthy table referenced here
US20240254512A1-20240801-T00262
Please refer to the end of the specification for access instructions.

Lengthy table referenced here
US20240254512A1-20240801-T00263
Please refer to the end of the specification for access instructions.

Lengthy table referenced here
US20240254512A1-20240801-T00264
Please refer to the end of the specification for access instructions.

Lengthy table referenced here
US20240254512A1-20240801-T00265
Please refer to the end of the specification for access instructions.

Lengthy table referenced here
US20240254512A1-20240801-T00266
Please refer to the end of the specification for access instructions.

Lengthy table referenced here
US20240254512A1-20240801-T00267
Please refer to the end of the specification for access instructions.

Lengthy table referenced here
US20240254512A1-20240801-T00268
Please refer to the end of the specification for access instructions.

Lengthy table referenced here
US20240254512A1-20240801-T00269
Please refer to the end of the specification for access instructions.

Lengthy table referenced here
US20240254512A1-20240801-T00270
Please refer to the end of the specification for access instructions.

Lengthy table referenced here
US20240254512A1-20240801-T00271
Please refer to the end of the specification for access instructions.

Lengthy table referenced here
US20240254512A1-20240801-T00272
Please refer to the end of the specification for access instructions.

Lengthy table referenced here
US20240254512A1-20240801-T00273
Please refer to the end of the specification for access instructions.

Lengthy table referenced here
US20240254512A1-20240801-T00274
Please refer to the end of the specification for access instructions.

Lengthy table referenced here
US20240254512A1-20240801-T00275
Please refer to the end of the specification for access instructions.

Lengthy table referenced here
US20240254512A1-20240801-T00276
Please refer to the end of the specification for access instructions.

Lengthy table referenced here
US20240254512A1-20240801-T00277
Please refer to the end of the specification for access instructions.

Lengthy table referenced here
US20240254512A1-20240801-T00278
Please refer to the end of the specification for access instructions.

Lengthy table referenced here
US20240254512A1-20240801-T00279
Please refer to the end of the specification for access instructions.

Lengthy table referenced here
US20240254512A1-20240801-T00280
Please refer to the end of the specification for access instructions.

Lengthy table referenced here
US20240254512A1-20240801-T00281
Please refer to the end of the specification for access instructions.

Lengthy table referenced here
US20240254512A1-20240801-T00282
Please refer to the end of the specification for access instructions.

Lengthy table referenced here
US20240254512A1-20240801-T00283
Please refer to the end of the specification for access instructions.

Lengthy table referenced here
US20240254512A1-20240801-T00284
Please refer to the end of the specification for access instructions.

Lengthy table referenced here
US20240254512A1-20240801-T00285
Please refer to the end of the specification for access instructions.

Lengthy table referenced here
US20240254512A1-20240801-T00286
Please refer to the end of the specification for access instructions.

Lengthy table referenced here
US20240254512A1-20240801-T00287
Please refer to the end of the specification for access instructions.

Lengthy table referenced here
US20240254512A1-20240801-T00288
Please refer to the end of the specification for access instructions.

Lengthy table referenced here
US20240254512A1-20240801-T00289
Please refer to the end of the specification for access instructions.

Lengthy table referenced here
US20240254512A1-20240801-T00290
Please refer to the end of the specification for access instructions.

Lengthy table referenced here
US20240254512A1-20240801-T00291
Please refer to the end of the specification for access instructions.

Lengthy table referenced here
US20240254512A1-20240801-T00292
Please refer to the end of the specification for access instructions.

Lengthy table referenced here
US20240254512A1-20240801-T00293
Please refer to the end of the specification for access instructions.

Lengthy table referenced here
US20240254512A1-20240801-T00294
Please refer to the end of the specification for access instructions.

Lengthy table referenced here
US20240254512A1-20240801-T00295
Please refer to the end of the specification for access instructions.

Lengthy table referenced here
US20240254512A1-20240801-T00296
Please refer to the end of the specification for access instructions.

Lengthy table referenced here
US20240254512A1-20240801-T00297
Please refer to the end of the specification for access instructions.

Lengthy table referenced here
US20240254512A1-20240801-T00298
Please refer to the end of the specification for access instructions.

Lengthy table referenced here
US20240254512A1-20240801-T00299
Please refer to the end of the specification for access instructions.

Lengthy table referenced here
US20240254512A1-20240801-T00300
Please refer to the end of the specification for access instructions.

Lengthy table referenced here
US20240254512A1-20240801-T00301
Please refer to the end of the specification for access instructions.

Lengthy table referenced here
US20240254512A1-20240801-T00302
Please refer to the end of the specification for access instructions.

Lengthy table referenced here
US20240254512A1-20240801-T00303
Please refer to the end of the specification for access instructions.

Lengthy table referenced here
US20240254512A1-20240801-T00304
Please refer to the end of the specification for access instructions.

Lengthy table referenced here
US20240254512A1-20240801-T00305
Please refer to the end of the specification for access instructions.

Lengthy table referenced here
US20240254512A1-20240801-T00306
Please refer to the end of the specification for access instructions.

Lengthy table referenced here
US20240254512A1-20240801-T00307
Please refer to the end of the specification for access instructions.

Lengthy table referenced here
US20240254512A1-20240801-T00308
Please refer to the end of the specification for access instructions.

Lengthy table referenced here
US20240254512A1-20240801-T00309
Please refer to the end of the specification for access instructions.

Lengthy table referenced here
US20240254512A1-20240801-T00310
Please refer to the end of the specification for access instructions.

Lengthy table referenced here
US20240254512A1-20240801-T00311
Please refer to the end of the specification for access instructions.

Lengthy table referenced here
US20240254512A1-20240801-T00312
Please refer to the end of the specification for access instructions.

Lengthy table referenced here
US20240254512A1-20240801-T00313
Please refer to the end of the specification for access instructions.

Lengthy table referenced here
US20240254512A1-20240801-T00314
Please refer to the end of the specification for access instructions.

Lengthy table referenced here
US20240254512A1-20240801-T00315
Please refer to the end of the specification for access instructions.

Lengthy table referenced here
US20240254512A1-20240801-T00316
Please refer to the end of the specification for access instructions.

Lengthy table referenced here
US20240254512A1-20240801-T00317
Please refer to the end of the specification for access instructions.

Lengthy table referenced here
US20240254512A1-20240801-T00318
Please refer to the end of the specification for access instructions.

Lengthy table referenced here
US20240254512A1-20240801-T00319
Please refer to the end of the specification for access instructions.

Lengthy table referenced here
US20240254512A1-20240801-T00320
Please refer to the end of the specification for access instructions.

Lengthy table referenced here
US20240254512A1-20240801-T00321
Please refer to the end of the specification for access instructions.

Lengthy table referenced here
US20240254512A1-20240801-T00322
Please refer to the end of the specification for access instructions.

Lengthy table referenced here
US20240254512A1-20240801-T00323
Please refer to the end of the specification for access instructions.

Lengthy table referenced here
US20240254512A1-20240801-T00324
Please refer to the end of the specification for access instructions.

Lengthy table referenced here
US20240254512A1-20240801-T00325
Please refer to the end of the specification for access instructions.

Lengthy table referenced here
US20240254512A1-20240801-T00326
Please refer to the end of the specification for access instructions.

Lengthy table referenced here
US20240254512A1-20240801-T00327
Please refer to the end of the specification for access instructions.

Lengthy table referenced here
US20240254512A1-20240801-T00328
Please refer to the end of the specification for access instructions.

Lengthy table referenced here
US20240254512A1-20240801-T00329
Please refer to the end of the specification for access instructions.

Lengthy table referenced here
US20240254512A1-20240801-T00330
Please refer to the end of the specification for access instructions.

Lengthy table referenced here
US20240254512A1-20240801-T00331
Please refer to the end of the specification for access instructions.

Lengthy table referenced here
US20240254512A1-20240801-T00332
Please refer to the end of the specification for access instructions.

Lengthy table referenced here
US20240254512A1-20240801-T00333
Please refer to the end of the specification for access instructions.

Lengthy table referenced here
US20240254512A1-20240801-T00334
Please refer to the end of the specification for access instructions.

Lengthy table referenced here
US20240254512A1-20240801-T00335
Please refer to the end of the specification for access instructions.

Lengthy table referenced here
US20240254512A1-20240801-T00336
Please refer to the end of the specification for access instructions.

Lengthy table referenced here
US20240254512A1-20240801-T00337
Please refer to the end of the specification for access instructions.

Lengthy table referenced here
US20240254512A1-20240801-T00338
Please refer to the end of the specification for access instructions.

Lengthy table referenced here
US20240254512A1-20240801-T00339
Please refer to the end of the specification for access instructions.

Lengthy table referenced here
US20240254512A1-20240801-T00340
Please refer to the end of the specification for access instructions.

Lengthy table referenced here
US20240254512A1-20240801-T00341
Please refer to the end of the specification for access instructions.

Lengthy table referenced here
US20240254512A1-20240801-T00342
Please refer to the end of the specification for access instructions.

Lengthy table referenced here
US20240254512A1-20240801-T00343
Please refer to the end of the specification for access instructions.

Lengthy table referenced here
US20240254512A1-20240801-T00344
Please refer to the end of the specification for access instructions.

Lengthy table referenced here
US20240254512A1-20240801-T00345
Please refer to the end of the specification for access instructions.

Lengthy table referenced here
US20240254512A1-20240801-T00346
Please refer to the end of the specification for access instructions.

Lengthy table referenced here
US20240254512A1-20240801-T00347
Please refer to the end of the specification for access instructions.

Lengthy table referenced here
US20240254512A1-20240801-T00348
Please refer to the end of the specification for access instructions.

Lengthy table referenced here
US20240254512A1-20240801-T00349
Please refer to the end of the specification for access instructions.

Lengthy table referenced here
US20240254512A1-20240801-T00350
Please refer to the end of the specification for access instructions.

Lengthy table referenced here
US20240254512A1-20240801-T00351
Please refer to the end of the specification for access instructions.

Lengthy table referenced here
US20240254512A1-20240801-T00352
Please refer to the end of the specification for access instructions.

Lengthy table referenced here
US20240254512A1-20240801-T00353
Please refer to the end of the specification for access instructions.

Lengthy table referenced here
US20240254512A1-20240801-T00354
Please refer to the end of the specification for access instructions.

Lengthy table referenced here
US20240254512A1-20240801-T00355
Please refer to the end of the specification for access instructions.

Lengthy table referenced here
US20240254512A1-20240801-T00356
Please refer to the end of the specification for access instructions.

Lengthy table referenced here
US20240254512A1-20240801-T00357
Please refer to the end of the specification for access instructions.

Lengthy table referenced here
US20240254512A1-20240801-T00358
Please refer to the end of the specification for access instructions.

Lengthy table referenced here
US20240254512A1-20240801-T00359
Please refer to the end of the specification for access instructions.

Lengthy table referenced here
US20240254512A1-20240801-T00360
Please refer to the end of the specification for access instructions.

Lengthy table referenced here
US20240254512A1-20240801-T00361
Please refer to the end of the specification for access instructions.

Lengthy table referenced here
US20240254512A1-20240801-T00362
Please refer to the end of the specification for access instructions.

Lengthy table referenced here
US20240254512A1-20240801-T00363
Please refer to the end of the specification for access instructions.

Lengthy table referenced here
US20240254512A1-20240801-T00364
Please refer to the end of the specification for access instructions.

Lengthy table referenced here
US20240254512A1-20240801-T00365
Please refer to the end of the specification for access instructions.

Lengthy table referenced here
US20240254512A1-20240801-T00366
Please refer to the end of the specification for access instructions.

Lengthy table referenced here
US20240254512A1-20240801-T00367
Please refer to the end of the specification for access instructions.

Lengthy table referenced here
US20240254512A1-20240801-T00368
Please refer to the end of the specification for access instructions.

Lengthy table referenced here
US20240254512A1-20240801-T00369
Please refer to the end of the specification for access instructions.

Lengthy table referenced here
US20240254512A1-20240801-T00370
Please refer to the end of the specification for access instructions.

Lengthy table referenced here
US20240254512A1-20240801-T00371
Please refer to the end of the specification for access instructions.

Lengthy table referenced here
US20240254512A1-20240801-T00372
Please refer to the end of the specification for access instructions.

Lengthy table referenced here
US20240254512A1-20240801-T00373
Please refer to the end of the specification for access instructions.

Lengthy table referenced here
US20240254512A1-20240801-T00374
Please refer to the end of the specification for access instructions.

Lengthy table referenced here
US20240254512A1-20240801-T00375
Please refer to the end of the specification for access instructions.

Lengthy table referenced here
US20240254512A1-20240801-T00376
Please refer to the end of the specification for access instructions.

Lengthy table referenced here
US20240254512A1-20240801-T00377
Please refer to the end of the specification for access instructions.

Lengthy table referenced here
US20240254512A1-20240801-T00378
Please refer to the end of the specification for access instructions.

Lengthy table referenced here
US20240254512A1-20240801-T00379
Please refer to the end of the specification for access instructions.

Lengthy table referenced here
US20240254512A1-20240801-T00380
Please refer to the end of the specification for access instructions.

Lengthy table referenced here
US20240254512A1-20240801-T00381
Please refer to the end of the specification for access instructions.

Lengthy table referenced here
US20240254512A1-20240801-T00382
Please refer to the end of the specification for access instructions.

Lengthy table referenced here
US20240254512A1-20240801-T00383
Please refer to the end of the specification for access instructions.

Lengthy table referenced here
US20240254512A1-20240801-T00384
Please refer to the end of the specification for access instructions.

Lengthy table referenced here
US20240254512A1-20240801-T00385
Please refer to the end of the specification for access instructions.

Lengthy table referenced here
US20240254512A1-20240801-T00386
Please refer to the end of the specification for access instructions.

Lengthy table referenced here
US20240254512A1-20240801-T00387
Please refer to the end of the specification for access instructions.

Lengthy table referenced here
US20240254512A1-20240801-T00388
Please refer to the end of the specification for access instructions.

Lengthy table referenced here
US20240254512A1-20240801-T00389
Please refer to the end of the specification for access instructions.

Lengthy table referenced here
US20240254512A1-20240801-T00390
Please refer to the end of the specification for access instructions.

Lengthy table referenced here
US20240254512A1-20240801-T00391
Please refer to the end of the specification for access instructions.

Lengthy table referenced here
US20240254512A1-20240801-T00392
Please refer to the end of the specification for access instructions.

Lengthy table referenced here
US20240254512A1-20240801-T00393
Please refer to the end of the specification for access instructions.

Lengthy table referenced here
US20240254512A1-20240801-T00394
Please refer to the end of the specification for access instructions.

Lengthy table referenced here
US20240254512A1-20240801-T00395
Please refer to the end of the specification for access instructions.

Lengthy table referenced here
US20240254512A1-20240801-T00396
Please refer to the end of the specification for access instructions.

Lengthy table referenced here
US20240254512A1-20240801-T00397
Please refer to the end of the specification for access instructions.

Lengthy table referenced here
US20240254512A1-20240801-T00398
Please refer to the end of the specification for access instructions.

Lengthy table referenced here
US20240254512A1-20240801-T00399
Please refer to the end of the specification for access instructions.

Lengthy table referenced here
US20240254512A1-20240801-T00400
Please refer to the end of the specification for access instructions.

Lengthy table referenced here
US20240254512A1-20240801-T00401
Please refer to the end of the specification for access instructions.

Lengthy table referenced here
US20240254512A1-20240801-T00402
Please refer to the end of the specification for access instructions.

Lengthy table referenced here
US20240254512A1-20240801-T00403
Please refer to the end of the specification for access instructions.

Lengthy table referenced here
US20240254512A1-20240801-T00404
Please refer to the end of the specification for access instructions.

Lengthy table referenced here
US20240254512A1-20240801-T00405
Please refer to the end of the specification for access instructions.

Lengthy table referenced here
US20240254512A1-20240801-T00406
Please refer to the end of the specification for access instructions.

Lengthy table referenced here
US20240254512A1-20240801-T00407
Please refer to the end of the specification for access instructions.

Lengthy table referenced here
US20240254512A1-20240801-T00408
Please refer to the end of the specification for access instructions.

Lengthy table referenced here
US20240254512A1-20240801-T00409
Please refer to the end of the specification for access instructions.

Lengthy table referenced here
US20240254512A1-20240801-T00410
Please refer to the end of the specification for access instructions.

Lengthy table referenced here
US20240254512A1-20240801-T00411
Please refer to the end of the specification for access instructions.

Lengthy table referenced here
US20240254512A1-20240801-T00412
Please refer to the end of the specification for access instructions.

Lengthy table referenced here
US20240254512A1-20240801-T00413
Please refer to the end of the specification for access instructions.

Lengthy table referenced here
US20240254512A1-20240801-T00414
Please refer to the end of the specification for access instructions.

Lengthy table referenced here
US20240254512A1-20240801-T00415
Please refer to the end of the specification for access instructions.

Lengthy table referenced here
US20240254512A1-20240801-T00416
Please refer to the end of the specification for access instructions.

Lengthy table referenced here
US20240254512A1-20240801-T00417
Please refer to the end of the specification for access instructions.

Lengthy table referenced here
US20240254512A1-20240801-T00418
Please refer to the end of the specification for access instructions.

Lengthy table referenced here
US20240254512A1-20240801-T00419
Please refer to the end of the specification for access instructions.

Lengthy table referenced here
US20240254512A1-20240801-T00420
Please refer to the end of the specification for access instructions.

Lengthy table referenced here
US20240254512A1-20240801-T00421
Please refer to the end of the specification for access instructions.

Lengthy table referenced here
US20240254512A1-20240801-T00422
Please refer to the end of the specification for access instructions.

Lengthy table referenced here
US20240254512A1-20240801-T00423
Please refer to the end of the specification for access instructions.

Lengthy table referenced here
US20240254512A1-20240801-T00424
Please refer to the end of the specification for access instructions.

Lengthy table referenced here
US20240254512A1-20240801-T00425
Please refer to the end of the specification for access instructions.

Lengthy table referenced here
US20240254512A1-20240801-T00426
Please refer to the end of the specification for access instructions.

Lengthy table referenced here
US20240254512A1-20240801-T00427
Please refer to the end of the specification for access instructions.

Lengthy table referenced here
US20240254512A1-20240801-T00428
Please refer to the end of the specification for access instructions.

Lengthy table referenced here
US20240254512A1-20240801-T00429
Please refer to the end of the specification for access instructions.

Lengthy table referenced here
US20240254512A1-20240801-T00430
Please refer to the end of the specification for access instructions.

Lengthy table referenced here
US20240254512A1-20240801-T00431
Please refer to the end of the specification for access instructions.

Lengthy table referenced here
US20240254512A1-20240801-T00432
Please refer to the end of the specification for access instructions.

Lengthy table referenced here
US20240254512A1-20240801-T00433
Please refer to the end of the specification for access instructions.

Lengthy table referenced here
US20240254512A1-20240801-T00434
Please refer to the end of the specification for access instructions.

Lengthy table referenced here
US20240254512A1-20240801-T00435
Please refer to the end of the specification for access instructions.

Lengthy table referenced here
US20240254512A1-20240801-T00436
Please refer to the end of the specification for access instructions.

Lengthy table referenced here
US20240254512A1-20240801-T00437
Please refer to the end of the specification for access instructions.

Lengthy table referenced here
US20240254512A1-20240801-T00438
Please refer to the end of the specification for access instructions.

Lengthy table referenced here
US20240254512A1-20240801-T00439
Please refer to the end of the specification for access instructions.

Lengthy table referenced here
US20240254512A1-20240801-T00440
Please refer to the end of the specification for access instructions.

Lengthy table referenced here
US20240254512A1-20240801-T00441
Please refer to the end of the specification for access instructions.

Lengthy table referenced here
US20240254512A1-20240801-T00442
Please refer to the end of the specification for access instructions.

Lengthy table referenced here
US20240254512A1-20240801-T00443
Please refer to the end of the specification for access instructions.

Lengthy table referenced here
US20240254512A1-20240801-T00444
Please refer to the end of the specification for access instructions.

Lengthy table referenced here
US20240254512A1-20240801-T00445
Please refer to the end of the specification for access instructions.

Lengthy table referenced here
US20240254512A1-20240801-T00446
Please refer to the end of the specification for access instructions.

Lengthy table referenced here
US20240254512A1-20240801-T00447
Please refer to the end of the specification for access instructions.

Lengthy table referenced here
US20240254512A1-20240801-T00448
Please refer to the end of the specification for access instructions.

Lengthy table referenced here
US20240254512A1-20240801-T00449
Please refer to the end of the specification for access instructions.

Lengthy table referenced here
US20240254512A1-20240801-T00450
Please refer to the end of the specification for access instructions.

Lengthy table referenced here
US20240254512A1-20240801-T00451
Please refer to the end of the specification for access instructions.

Lengthy table referenced here
US20240254512A1-20240801-T00452
Please refer to the end of the specification for access instructions.

Lengthy table referenced here
US20240254512A1-20240801-T00453
Please refer to the end of the specification for access instructions.

Lengthy table referenced here
US20240254512A1-20240801-T00454
Please refer to the end of the specification for access instructions.

Lengthy table referenced here
US20240254512A1-20240801-T00455
Please refer to the end of the specification for access instructions.

Lengthy table referenced here
US20240254512A1-20240801-T00456
Please refer to the end of the specification for access instructions.

Lengthy table referenced here
US20240254512A1-20240801-T00457
Please refer to the end of the specification for access instructions.

Lengthy table referenced here
US20240254512A1-20240801-T00458
Please refer to the end of the specification for access instructions.

Lengthy table referenced here
US20240254512A1-20240801-T00459
Please refer to the end of the specification for access instructions.

Lengthy table referenced here
US20240254512A1-20240801-T00460
Please refer to the end of the specification for access instructions.

Lengthy table referenced here
US20240254512A1-20240801-T00461
Please refer to the end of the specification for access instructions.

Lengthy table referenced here
US20240254512A1-20240801-T00462
Please refer to the end of the specification for access instructions.

Lengthy table referenced here
US20240254512A1-20240801-T00463
Please refer to the end of the specification for access instructions.

Lengthy table referenced here
US20240254512A1-20240801-T00464
Please refer to the end of the specification for access instructions.

Lengthy table referenced here
US20240254512A1-20240801-T00465
Please refer to the end of the specification for access instructions.

Lengthy table referenced here
US20240254512A1-20240801-T00466
Please refer to the end of the specification for access instructions.

Lengthy table referenced here
US20240254512A1-20240801-T00467
Please refer to the end of the specification for access instructions.

Lengthy table referenced here
US20240254512A1-20240801-T00468
Please refer to the end of the specification for access instructions.

Lengthy table referenced here
US20240254512A1-20240801-T00469
Please refer to the end of the specification for access instructions.

Lengthy table referenced here
US20240254512A1-20240801-T00470
Please refer to the end of the specification for access instructions.

Lengthy table referenced here
US20240254512A1-20240801-T00471
Please refer to the end of the specification for access instructions.

Lengthy table referenced here
US20240254512A1-20240801-T00472
Please refer to the end of the specification for access instructions.

Lengthy table referenced here
US20240254512A1-20240801-T00473
Please refer to the end of the specification for access instructions.

Lengthy table referenced here
US20240254512A1-20240801-T00474
Please refer to the end of the specification for access instructions.

Lengthy table referenced here
US20240254512A1-20240801-T00475
Please refer to the end of the specification for access instructions.

Lengthy table referenced here
US20240254512A1-20240801-T00476
Please refer to the end of the specification for access instructions.

Lengthy table referenced here
US20240254512A1-20240801-T00477
Please refer to the end of the specification for access instructions.

Lengthy table referenced here
US20240254512A1-20240801-T00478
Please refer to the end of the specification for access instructions.

Lengthy table referenced here
US20240254512A1-20240801-T00479
Please refer to the end of the specification for access instructions.

Lengthy table referenced here
US20240254512A1-20240801-T00480
Please refer to the end of the specification for access instructions.

Lengthy table referenced here
US20240254512A1-20240801-T00481
Please refer to the end of the specification for access instructions.

Lengthy table referenced here
US20240254512A1-20240801-T00482
Please refer to the end of the specification for access instructions.

Lengthy table referenced here
US20240254512A1-20240801-T00483
Please refer to the end of the specification for access instructions.

Lengthy table referenced here
US20240254512A1-20240801-T00484
Please refer to the end of the specification for access instructions.

Lengthy table referenced here
US20240254512A1-20240801-T00485
Please refer to the end of the specification for access instructions.

Lengthy table referenced here
US20240254512A1-20240801-T00486
Please refer to the end of the specification for access instructions.

Lengthy table referenced here
US20240254512A1-20240801-T00487
Please refer to the end of the specification for access instructions.

Lengthy table referenced here
US20240254512A1-20240801-T00488
Please refer to the end of the specification for access instructions.

Lengthy table referenced here
US20240254512A1-20240801-T00489
Please refer to the end of the specification for access instructions.

Lengthy table referenced here
US20240254512A1-20240801-T00490
Please refer to the end of the specification for access instructions.

Lengthy table referenced here
US20240254512A1-20240801-T00491
Please refer to the end of the specification for access instructions.

Lengthy table referenced here
US20240254512A1-20240801-T00492
Please refer to the end of the specification for access instructions.

Lengthy table referenced here
US20240254512A1-20240801-T00493
Please refer to the end of the specification for access instructions.

Lengthy table referenced here
US20240254512A1-20240801-T00494
Please refer to the end of the specification for access instructions.

Lengthy table referenced here
US20240254512A1-20240801-T00495
Please refer to the end of the specification for access instructions.

Lengthy table referenced here
US20240254512A1-20240801-T00496
Please refer to the end of the specification for access instructions.

Lengthy table referenced here
US20240254512A1-20240801-T00497
Please refer to the end of the specification for access instructions.

Lengthy table referenced here
US20240254512A1-20240801-T00498
Please refer to the end of the specification for access instructions.

Lengthy table referenced here
US20240254512A1-20240801-T00499
Please refer to the end of the specification for access instructions.

Lengthy table referenced here
US20240254512A1-20240801-T00500
Please refer to the end of the specification for access instructions.

Lengthy table referenced here
US20240254512A1-20240801-T00501
Please refer to the end of the specification for access instructions.

Lengthy table referenced here
US20240254512A1-20240801-T00502
Please refer to the end of the specification for access instructions.

Lengthy table referenced here
US20240254512A1-20240801-T00503
Please refer to the end of the specification for access instructions.

Lengthy table referenced here
US20240254512A1-20240801-T00504
Please refer to the end of the specification for access instructions.

Lengthy table referenced here
US20240254512A1-20240801-T00505
Please refer to the end of the specification for access instructions.

Lengthy table referenced here
US20240254512A1-20240801-T00506
Please refer to the end of the specification for access instructions.

Lengthy table referenced here
US20240254512A1-20240801-T00507
Please refer to the end of the specification for access instructions.

Lengthy table referenced here
US20240254512A1-20240801-T00508
Please refer to the end of the specification for access instructions.

Lengthy table referenced here
US20240254512A1-20240801-T00509
Please refer to the end of the specification for access instructions.

Lengthy table referenced here
US20240254512A1-20240801-T00510
Please refer to the end of the specification for access instructions.

Lengthy table referenced here
US20240254512A1-20240801-T00511
Please refer to the end of the specification for access instructions.

Lengthy table referenced here
US20240254512A1-20240801-T00512
Please refer to the end of the specification for access instructions.

Lengthy table referenced here
US20240254512A1-20240801-T00513
Please refer to the end of the specification for access instructions.

Lengthy table referenced here
US20240254512A1-20240801-T00514
Please refer to the end of the specification for access instructions.

Lengthy table referenced here
US20240254512A1-20240801-T00515
Please refer to the end of the specification for access instructions.

Lengthy table referenced here
US20240254512A1-20240801-T00516
Please refer to the end of the specification for access instructions.

Lengthy table referenced here
US20240254512A1-20240801-T00517
Please refer to the end of the specification for access instructions.

Lengthy table referenced here
US20240254512A1-20240801-T00518
Please refer to the end of the specification for access instructions.

Lengthy table referenced here
US20240254512A1-20240801-T00519
Please refer to the end of the specification for access instructions.

Lengthy table referenced here
US20240254512A1-20240801-T00520
Please refer to the end of the specification for access instructions.

Lengthy table referenced here
US20240254512A1-20240801-T00521
Please refer to the end of the specification for access instructions.

Lengthy table referenced here
US20240254512A1-20240801-T00522
Please refer to the end of the specification for access instructions.

Lengthy table referenced here
US20240254512A1-20240801-T00523
Please refer to the end of the specification for access instructions.

Lengthy table referenced here
US20240254512A1-20240801-T00524
Please refer to the end of the specification for access instructions.

Lengthy table referenced here
US20240254512A1-20240801-T00525
Please refer to the end of the specification for access instructions.

Lengthy table referenced here
US20240254512A1-20240801-T00526
Please refer to the end of the specification for access instructions.

Lengthy table referenced here
US20240254512A1-20240801-T00527
Please refer to the end of the specification for access instructions.

Lengthy table referenced here
US20240254512A1-20240801-T00528
Please refer to the end of the specification for access instructions.

Lengthy table referenced here
US20240254512A1-20240801-T00529
Please refer to the end of the specification for access instructions.

Lengthy table referenced here
US20240254512A1-20240801-T00530
Please refer to the end of the specification for access instructions.

Lengthy table referenced here
US20240254512A1-20240801-T00531
Please refer to the end of the specification for access instructions.

Lengthy table referenced here
US20240254512A1-20240801-T00532
Please refer to the end of the specification for access instructions.

Lengthy table referenced here
US20240254512A1-20240801-T00533
Please refer to the end of the specification for access instructions.

Lengthy table referenced here
US20240254512A1-20240801-T00534
Please refer to the end of the specification for access instructions.

Lengthy table referenced here
US20240254512A1-20240801-T00535
Please refer to the end of the specification for access instructions.

Lengthy table referenced here
US20240254512A1-20240801-T00536
Please refer to the end of the specification for access instructions.

Lengthy table referenced here
US20240254512A1-20240801-T00537
Please refer to the end of the specification for access instructions.

Lengthy table referenced here
US20240254512A1-20240801-T00538
Please refer to the end of the specification for access instructions.

Lengthy table referenced here
US20240254512A1-20240801-T00539
Please refer to the end of the specification for access instructions.

Lengthy table referenced here
US20240254512A1-20240801-T00540
Please refer to the end of the specification for access instructions.

Lengthy table referenced here
US20240254512A1-20240801-T00541
Please refer to the end of the specification for access instructions.

Lengthy table referenced here
US20240254512A1-20240801-T00542
Please refer to the end of the specification for access instructions.

Lengthy table referenced here
US20240254512A1-20240801-T00543
Please refer to the end of the specification for access instructions.

Lengthy table referenced here
US20240254512A1-20240801-T00544
Please refer to the end of the specification for access instructions.

Lengthy table referenced here
US20240254512A1-20240801-T00545
Please refer to the end of the specification for access instructions.

Lengthy table referenced here
US20240254512A1-20240801-T00546
Please refer to the end of the specification for access instructions.

Lengthy table referenced here
US20240254512A1-20240801-T00547
Please refer to the end of the specification for access instructions.

Lengthy table referenced here
US20240254512A1-20240801-T00548
Please refer to the end of the specification for access instructions.

Lengthy table referenced here
US20240254512A1-20240801-T00549
Please refer to the end of the specification for access instructions.

Lengthy table referenced here
US20240254512A1-20240801-T00550
Please refer to the end of the specification for access instructions.

Lengthy table referenced here
US20240254512A1-20240801-T00551
Please refer to the end of the specification for access instructions.

Lengthy table referenced here
US20240254512A1-20240801-T00552
Please refer to the end of the specification for access instructions.

Lengthy table referenced here
US20240254512A1-20240801-T00553
Please refer to the end of the specification for access instructions.

Lengthy table referenced here
US20240254512A1-20240801-T00554
Please refer to the end of the specification for access instructions.

Lengthy table referenced here
US20240254512A1-20240801-T00555
Please refer to the end of the specification for access instructions.

Lengthy table referenced here
US20240254512A1-20240801-T00556
Please refer to the end of the specification for access instructions.

Lengthy table referenced here
US20240254512A1-20240801-T00557
Please refer to the end of the specification for access instructions.

Lengthy table referenced here
US20240254512A1-20240801-T00558
Please refer to the end of the specification for access instructions.

Lengthy table referenced here
US20240254512A1-20240801-T00559
Please refer to the end of the specification for access instructions.

Lengthy table referenced here
US20240254512A1-20240801-T00560
Please refer to the end of the specification for access instructions.

Lengthy table referenced here
US20240254512A1-20240801-T00561
Please refer to the end of the specification for access instructions.

Lengthy table referenced here
US20240254512A1-20240801-T00562
Please refer to the end of the specification for access instructions.

Lengthy table referenced here
US20240254512A1-20240801-T00563
Please refer to the end of the specification for access instructions.

Lengthy table referenced here
US20240254512A1-20240801-T00564
Please refer to the end of the specification for access instructions.

Lengthy table referenced here
US20240254512A1-20240801-T00565
Please refer to the end of the specification for access instructions.

Lengthy table referenced here
US20240254512A1-20240801-T00566
Please refer to the end of the specification for access instructions.

Lengthy table referenced here
US20240254512A1-20240801-T00567
Please refer to the end of the specification for access instructions.

Lengthy table referenced here
US20240254512A1-20240801-T00568
Please refer to the end of the specification for access instructions.

Lengthy table referenced here
US20240254512A1-20240801-T00569
Please refer to the end of the specification for access instructions.

Lengthy table referenced here
US20240254512A1-20240801-T00570
Please refer to the end of the specification for access instructions.

Lengthy table referenced here
US20240254512A1-20240801-T00571
Please refer to the end of the specification for access instructions.

Lengthy table referenced here
US20240254512A1-20240801-T00572
Please refer to the end of the specification for access instructions.

Lengthy table referenced here
US20240254512A1-20240801-T00573
Please refer to the end of the specification for access instructions.

Lengthy table referenced here
US20240254512A1-20240801-T00574
Please refer to the end of the specification for access instructions.

Lengthy table referenced here
US20240254512A1-20240801-T00575
Please refer to the end of the specification for access instructions.

Lengthy table referenced here
US20240254512A1-20240801-T00576
Please refer to the end of the specification for access instructions.

Lengthy table referenced here
US20240254512A1-20240801-T00577
Please refer to the end of the specification for access instructions.

Lengthy table referenced here
US20240254512A1-20240801-T00578
Please refer to the end of the specification for access instructions.

Lengthy table referenced here
US20240254512A1-20240801-T00579
Please refer to the end of the specification for access instructions.

Lengthy table referenced here
US20240254512A1-20240801-T00580
Please refer to the end of the specification for access instructions.

Lengthy table referenced here
US20240254512A1-20240801-T00581
Please refer to the end of the specification for access instructions.

Lengthy table referenced here
US20240254512A1-20240801-T00582
Please refer to the end of the specification for access instructions.

Lengthy table referenced here
US20240254512A1-20240801-T00583
Please refer to the end of the specification for access instructions.

Lengthy table referenced here
US20240254512A1-20240801-T00584
Please refer to the end of the specification for access instructions.

Lengthy table referenced here
US20240254512A1-20240801-T00585
Please refer to the end of the specification for access instructions.

Lengthy table referenced here
US20240254512A1-20240801-T00586
Please refer to the end of the specification for access instructions.

Lengthy table referenced here
US20240254512A1-20240801-T00587
Please refer to the end of the specification for access instructions.

Lengthy table referenced here
US20240254512A1-20240801-T00588
Please refer to the end of the specification for access instructions.

Lengthy table referenced here
US20240254512A1-20240801-T00589
Please refer to the end of the specification for access instructions.

Lengthy table referenced here
US20240254512A1-20240801-T00590
Please refer to the end of the specification for access instructions.

Lengthy table referenced here
US20240254512A1-20240801-T00591
Please refer to the end of the specification for access instructions.

Lengthy table referenced here
US20240254512A1-20240801-T00592
Please refer to the end of the specification for access instructions.

Lengthy table referenced here
US20240254512A1-20240801-T00593
Please refer to the end of the specification for access instructions.

Lengthy table referenced here
US20240254512A1-20240801-T00594
Please refer to the end of the specification for access instructions.

Lengthy table referenced here
US20240254512A1-20240801-T00595
Please refer to the end of the specification for access instructions.

Lengthy table referenced here
US20240254512A1-20240801-T00596
Please refer to the end of the specification for access instructions.

Lengthy table referenced here
US20240254512A1-20240801-T00597
Please refer to the end of the specification for access instructions.

Lengthy table referenced here
US20240254512A1-20240801-T00598
Please refer to the end of the specification for access instructions.

Lengthy table referenced here
US20240254512A1-20240801-T00599
Please refer to the end of the specification for access instructions.

Lengthy table referenced here
US20240254512A1-20240801-T00600
Please refer to the end of the specification for access instructions.

Lengthy table referenced here
US20240254512A1-20240801-T00601
Please refer to the end of the specification for access instructions.

Lengthy table referenced here
US20240254512A1-20240801-T00602
Please refer to the end of the specification for access instructions.

Lengthy table referenced here
US20240254512A1-20240801-T00603
Please refer to the end of the specification for access instructions.

Lengthy table referenced here
US20240254512A1-20240801-T00604
Please refer to the end of the specification for access instructions.

Lengthy table referenced here
US20240254512A1-20240801-T00605
Please refer to the end of the specification for access instructions.

Lengthy table referenced here
US20240254512A1-20240801-T00606
Please refer to the end of the specification for access instructions.

Lengthy table referenced here
US20240254512A1-20240801-T00607
Please refer to the end of the specification for access instructions.

Lengthy table referenced here
US20240254512A1-20240801-T00608
Please refer to the end of the specification for access instructions.

Lengthy table referenced here
US20240254512A1-20240801-T00609
Please refer to the end of the specification for access instructions.

Lengthy table referenced here
US20240254512A1-20240801-T00610
Please refer to the end of the specification for access instructions.

Lengthy table referenced here
US20240254512A1-20240801-T00611
Please refer to the end of the specification for access instructions.

Lengthy table referenced here
US20240254512A1-20240801-T00612
Please refer to the end of the specification for access instructions.

Lengthy table referenced here
US20240254512A1-20240801-T00613
Please refer to the end of the specification for access instructions.

Lengthy table referenced here
US20240254512A1-20240801-T00614
Please refer to the end of the specification for access instructions.

Lengthy table referenced here
US20240254512A1-20240801-T00615
Please refer to the end of the specification for access instructions.

Lengthy table referenced here
US20240254512A1-20240801-T00616
Please refer to the end of the specification for access instructions.

Lengthy table referenced here
US20240254512A1-20240801-T00617
Please refer to the end of the specification for access instructions.

Lengthy table referenced here
US20240254512A1-20240801-T00618
Please refer to the end of the specification for access instructions.

Lengthy table referenced here
US20240254512A1-20240801-T00619
Please refer to the end of the specification for access instructions.

Lengthy table referenced here
US20240254512A1-20240801-T00620
Please refer to the end of the specification for access instructions.

Lengthy table referenced here
US20240254512A1-20240801-T00621
Please refer to the end of the specification for access instructions.

Lengthy table referenced here
US20240254512A1-20240801-T00622
Please refer to the end of the specification for access instructions.

Lengthy table referenced here
US20240254512A1-20240801-T00623
Please refer to the end of the specification for access instructions.

Lengthy table referenced here
US20240254512A1-20240801-T00624
Please refer to the end of the specification for access instructions.

Lengthy table referenced here
US20240254512A1-20240801-T00625
Please refer to the end of the specification for access instructions.

Lengthy table referenced here
US20240254512A1-20240801-T00626
Please refer to the end of the specification for access instructions.

Lengthy table referenced here
US20240254512A1-20240801-T00627
Please refer to the end of the specification for access instructions.

Lengthy table referenced here
US20240254512A1-20240801-T00628
Please refer to the end of the specification for access instructions.

Lengthy table referenced here
US20240254512A1-20240801-T00629
Please refer to the end of the specification for access instructions.

Lengthy table referenced here
US20240254512A1-20240801-T00630
Please refer to the end of the specification for access instructions.

Lengthy table referenced here
US20240254512A1-20240801-T00631
Please refer to the end of the specification for access instructions.

Lengthy table referenced here
US20240254512A1-20240801-T00632
Please refer to the end of the specification for access instructions.

Lengthy table referenced here
US20240254512A1-20240801-T00633
Please refer to the end of the specification for access instructions.

Lengthy table referenced here
US20240254512A1-20240801-T00634
Please refer to the end of the specification for access instructions.

Lengthy table referenced here
US20240254512A1-20240801-T00635
Please refer to the end of the specification for access instructions.

Lengthy table referenced here
US20240254512A1-20240801-T00636
Please refer to the end of the specification for access instructions.

Lengthy table referenced here
US20240254512A1-20240801-T00637
Please refer to the end of the specification for access instructions.

Lengthy table referenced here
US20240254512A1-20240801-T00638
Please refer to the end of the specification for access instructions.

Lengthy table referenced here
US20240254512A1-20240801-T00639
Please refer to the end of the specification for access instructions.

Lengthy table referenced here
US20240254512A1-20240801-T00640
Please refer to the end of the specification for access instructions.

Lengthy table referenced here
US20240254512A1-20240801-T00641
Please refer to the end of the specification for access instructions.

Lengthy table referenced here
US20240254512A1-20240801-T00642
Please refer to the end of the specification for access instructions.

Lengthy table referenced here
US20240254512A1-20240801-T00643
Please refer to the end of the specification for access instructions.

Lengthy table referenced here
US20240254512A1-20240801-T00644
Please refer to the end of the specification for access instructions.

Lengthy table referenced here
US20240254512A1-20240801-T00645
Please refer to the end of the specification for access instructions.

Lengthy table referenced here
US20240254512A1-20240801-T00646
Please refer to the end of the specification for access instructions.

Lengthy table referenced here
US20240254512A1-20240801-T00647
Please refer to the end of the specification for access instructions.

Lengthy table referenced here
US20240254512A1-20240801-T00648
Please refer to the end of the specification for access instructions.

Lengthy table referenced here
US20240254512A1-20240801-T00649
Please refer to the end of the specification for access instructions.

Lengthy table referenced here
US20240254512A1-20240801-T00650
Please refer to the end of the specification for access instructions.

Lengthy table referenced here
US20240254512A1-20240801-T00651
Please refer to the end of the specification for access instructions.

Lengthy table referenced here
US20240254512A1-20240801-T00652
Please refer to the end of the specification for access instructions.

Lengthy table referenced here
US20240254512A1-20240801-T00653
Please refer to the end of the specification for access instructions.

Lengthy table referenced here
US20240254512A1-20240801-T00654
Please refer to the end of the specification for access instructions.

Lengthy table referenced here
US20240254512A1-20240801-T00655
Please refer to the end of the specification for access instructions.

Lengthy table referenced here
US20240254512A1-20240801-T00656
Please refer to the end of the specification for access instructions.

Lengthy table referenced here
US20240254512A1-20240801-T00657
Please refer to the end of the specification for access instructions.

Lengthy table referenced here
US20240254512A1-20240801-T00658
Please refer to the end of the specification for access instructions.

Lengthy table referenced here
US20240254512A1-20240801-T00659
Please refer to the end of the specification for access instructions.

Lengthy table referenced here
US20240254512A1-20240801-T00660
Please refer to the end of the specification for access instructions.

Lengthy table referenced here
US20240254512A1-20240801-T00661
Please refer to the end of the specification for access instructions.

Lengthy table referenced here
US20240254512A1-20240801-T00662
Please refer to the end of the specification for access instructions.

Lengthy table referenced here
US20240254512A1-20240801-T00663
Please refer to the end of the specification for access instructions.

Lengthy table referenced here
US20240254512A1-20240801-T00664
Please refer to the end of the specification for access instructions.

Lengthy table referenced here
US20240254512A1-20240801-T00665
Please refer to the end of the specification for access instructions.

Lengthy table referenced here
US20240254512A1-20240801-T00666
Please refer to the end of the specification for access instructions.

Lengthy table referenced here
US20240254512A1-20240801-T00667
Please refer to the end of the specification for access instructions.

Lengthy table referenced here
US20240254512A1-20240801-T00668
Please refer to the end of the specification for access instructions.

Lengthy table referenced here
US20240254512A1-20240801-T00669
Please refer to the end of the specification for access instructions.

Lengthy table referenced here
US20240254512A1-20240801-T00670
Please refer to the end of the specification for access instructions.

Lengthy table referenced here
US20240254512A1-20240801-T00671
Please refer to the end of the specification for access instructions.

Lengthy table referenced here
US20240254512A1-20240801-T00672
Please refer to the end of the specification for access instructions.

Lengthy table referenced here
US20240254512A1-20240801-T00673
Please refer to the end of the specification for access instructions.

Lengthy table referenced here
US20240254512A1-20240801-T00674
Please refer to the end of the specification for access instructions.

Lengthy table referenced here
US20240254512A1-20240801-T00675
Please refer to the end of the specification for access instructions.

Lengthy table referenced here
US20240254512A1-20240801-T00676
Please refer to the end of the specification for access instructions.

Lengthy table referenced here
US20240254512A1-20240801-T00677
Please refer to the end of the specification for access instructions.

Lengthy table referenced here
US20240254512A1-20240801-T00678
Please refer to the end of the specification for access instructions.

Lengthy table referenced here
US20240254512A1-20240801-T00679
Please refer to the end of the specification for access instructions.

Lengthy table referenced here
US20240254512A1-20240801-T00680
Please refer to the end of the specification for access instructions.

Lengthy table referenced here
US20240254512A1-20240801-T00681
Please refer to the end of the specification for access instructions.

Lengthy table referenced here
US20240254512A1-20240801-T00682
Please refer to the end of the specification for access instructions.

Lengthy table referenced here
US20240254512A1-20240801-T00683
Please refer to the end of the specification for access instructions.

Lengthy table referenced here
US20240254512A1-20240801-T00684
Please refer to the end of the specification for access instructions.

Lengthy table referenced here
US20240254512A1-20240801-T00685
Please refer to the end of the specification for access instructions.

Lengthy table referenced here
US20240254512A1-20240801-T00686
Please refer to the end of the specification for access instructions.

Lengthy table referenced here
US20240254512A1-20240801-T00687
Please refer to the end of the specification for access instructions.

Lengthy table referenced here
US20240254512A1-20240801-T00688
Please refer to the end of the specification for access instructions.

Lengthy table referenced here
US20240254512A1-20240801-T00689
Please refer to the end of the specification for access instructions.

Lengthy table referenced here
US20240254512A1-20240801-T00690
Please refer to the end of the specification for access instructions.

Lengthy table referenced here
US20240254512A1-20240801-T00691
Please refer to the end of the specification for access instructions.

Lengthy table referenced here
US20240254512A1-20240801-T00692
Please refer to the end of the specification for access instructions.

Lengthy table referenced here
US20240254512A1-20240801-T00693
Please refer to the end of the specification for access instructions.

Lengthy table referenced here
US20240254512A1-20240801-T00694
Please refer to the end of the specification for access instructions.

Lengthy table referenced here
US20240254512A1-20240801-T00695
Please refer to the end of the specification for access instructions.

Lengthy table referenced here
US20240254512A1-20240801-T00696
Please refer to the end of the specification for access instructions.

Lengthy table referenced here
US20240254512A1-20240801-T00697
Please refer to the end of the specification for access instructions.

Lengthy table referenced here
US20240254512A1-20240801-T00698
Please refer to the end of the specification for access instructions.

Lengthy table referenced here
US20240254512A1-20240801-T00699
Please refer to the end of the specification for access instructions.

Lengthy table referenced here
US20240254512A1-20240801-T00700
Please refer to the end of the specification for access instructions.

Lengthy table referenced here
US20240254512A1-20240801-T00701
Please refer to the end of the specification for access instructions.

Lengthy table referenced here
US20240254512A1-20240801-T00702
Please refer to the end of the specification for access instructions.

Lengthy table referenced here
US20240254512A1-20240801-T00703
Please refer to the end of the specification for access instructions.

Lengthy table referenced here
US20240254512A1-20240801-T00704
Please refer to the end of the specification for access instructions.

Lengthy table referenced here
US20240254512A1-20240801-T00705
Please refer to the end of the specification for access instructions.

Lengthy table referenced here
US20240254512A1-20240801-T00706
Please refer to the end of the specification for access instructions.

Lengthy table referenced here
US20240254512A1-20240801-T00707
Please refer to the end of the specification for access instructions.

Lengthy table referenced here
US20240254512A1-20240801-T00708
Please refer to the end of the specification for access instructions.

Lengthy table referenced here
US20240254512A1-20240801-T00709
Please refer to the end of the specification for access instructions.

Lengthy table referenced here
US20240254512A1-20240801-T00710
Please refer to the end of the specification for access instructions.

Lengthy table referenced here
US20240254512A1-20240801-T00711
Please refer to the end of the specification for access instructions.

Lengthy table referenced here
US20240254512A1-20240801-T00712
Please refer to the end of the specification for access instructions.

Lengthy table referenced here
US20240254512A1-20240801-T00713
Please refer to the end of the specification for access instructions.

[0354] In some embodiments, an anellovector as described herein is a chimeric anellovector. In some embodiments, a chimeric anellovector further comprises one or more elements, polypeptides, or nucleic acids from a virus other than an Anellovirus.

[0355] In some embodiments, the chimeric anellovector comprises a plurality of polypeptides (e.g., Anellovirus ORF1, ORF1/1, ORF1/2, ORF2, ORF2/2, ORF2/3, and/or ORF2t/3) comprising sequences from a plurality of different Anelloviruses (e.g., as described herein).

[0356] In some embodiments, the anellovector comprises a chimeric polypeptide (e.g., Anellovirus ORF1, ORF1/1, ORF1/2, ORF2, ORF2/2, ORF2/3, and/or ORF2t/3), e.g., comprising at least one portion from an Anellovirus (e.g., as described herein) and at least one portion from a different virus (e.g., as described herein).

[0357] In some embodiments, the anellovector comprises a chimeric polypeptide (e.g., Anellovirus ORF1, ORF1/1, ORF1/2, ORF2, ORF2/2, ORF2/3, and/or ORF2t/3), e.g., comprising at least one portion from one Anellovirus (e.g., as described herein) and at least one portion from a different Anellovirus (e.g., as described herein). In some embodiments, the anellovector comprises a chimeric ORF1 molecule comprising at least one portion of an ORF1 molecule from one Anellovirus (e.g., as described herein), or an ORF1 molecule having at least 75%, 80%, 85%, 90%, 95%, 96%, 97%, 98%, or 99% amino acid sequence identity thereto, and at least one portion of an ORF1 molecule from a different Anellovirus (e.g., as described herein), or an ORF1 molecule having at least 75%, 80%, 85%, 90%, 95%, 96%, 97%, 98%, or 99% amino acid sequence identity thereto. In some embodiments, the chimeric ORF1 molecule comprises an ORF1 jelly-roll domain from one Anellovirus, or a sequence having at least 75%, 80%, 85%, 90%, 95%, 96%, 97%, 98%, or 99% sequence identity thereto, and an ORF1 amino acid subsequence (e.g., as described herein) from a different Anellovirus, or a sequence having at least 75%, 80%, 85%, 90%, 95%, 96%, 97%, 98%, or 99% sequence identity thereto. In some embodiments, the chimeric ORF1 molecule comprises an ORF1 arginine-rich region from one Anellovirus, or a sequence having at least 75%, 80%, 85%, 90%, 95%, 96%, 97%, 98%, or 99% sequence identity thereto, and an ORF1 amino acid subsequence (e.g., as described herein) from a different Anellovirus, or a sequence having at least 75%, 80%, 85%, 90%, 95%, 96%, 97%, 98%, or 99% sequence identity thereto. In some embodiments, the chimeric ORF1 molecule comprises an ORF1 hypervariable domain from one Anellovirus, or a sequence having at least 75%, 80%, 85%, 90%, 95%, 96%, 97%, 98%, or 99% sequence identity thereto, and an ORF1 amino acid subsequence (e.g., as described herein) from a different Anellovirus, or a sequence having at least 75%, 80%, 85%, 90%, 95%, 96%, 97%, 98%, or 99% sequence identity thereto. In some embodiments, the chimeric ORF1 molecule comprises an ORF1 N22 domain from one Anellovirus, or a sequence having at least 75%, 80%, 85%, 90%, 95%, 96%, 97%, 98%, or 99% sequence identity thereto, and an ORF1 amino acid subsequence (e.g., as described herein) from a different Anellovirus, or a sequence having at least 75%, 80%, 85%, 90%, 95%, 96%, 97%, 98%, or 99% sequence identity thereto. In some embodiments, the chimeric ORF1 molecule comprises an ORF1 C-terminal domain from one Anellovirus, or a sequence having at least 75%, 80%, 85%, 90%, 95%, 96%, 97%, 98%, or 99% sequence identity thereto, and an ORF1 amino acid subsequence (e.g., as described herein) from a different Anellovirus, or a sequence having at least 75%, 80%, 85%, 90%, 95%, 96%, 97%, 98%, or 99% sequence identity thereto.

[0358] In some embodiments, the anellovector comprises a chimeric ORF1/1 molecule comprising at least one portion of an ORF1/1 molecule from one Anellovirus (e.g., as described herein), or an ORF1/1 molecule having at least 75%, 80%, 85%, 90%, 95%, 96%, 97%, 98%, or 99% amino acid sequence identity thereto, and at least one portion of an ORF1/1 molecule from a different Anellovirus (e.g., as described herein), or an ORF1/1 molecule having at least 75%, 80%, 85%, 90%, 95%, 96%, 97%, 98%, or 99% amino acid sequence identity thereto. In some embodiments, the anellovector comprises a chimeric ORF1/2 molecule comprising at least one portion of an ORF1/2 molecule from one Anellovirus (e.g., as described herein), or an ORF1/2 molecule having at least 75%, 80%, 85%, 90%, 95%, 96%, 97%, 98%, or 99% amino acid sequence identity thereto, and at least one portion of an ORF1/2 molecule from a different Anellovirus (e.g., as described herein), or an ORF1/2 molecule having at least 75%, 80%, 85%, 90%, 95%, 96%, 97%, 98%, or 99% amino acid sequence identity thereto. In some embodiments, the anellovector comprises a chimeric ORF2 molecule comprising at least one portion of an ORF2 molecule from one Anellovirus (e.g., as described herein), or an ORF2 molecule having at least 75%, 80%, 85%, 90%, 95%, 96%, 97%, 98%, or 99% amino acid sequence identity thereto, and at least one portion of an ORF2 molecule from a different Anellovirus (e.g., as described herein), or an ORF2 molecule having at least 75%, 80%, 85%, 90%, 95%, 96%, 97%, 98%, or 99% amino acid sequence identity thereto. In some embodiments, the anellovector comprises a chimeric ORF2/2 molecule comprising at least one portion of an ORF2/2 molecule from one Anellovirus (e.g., as described herein), or an ORF2/2 molecule having at least 75%, 80%, 85%, 90%, 95%, 96%, 97%, 98%, or 99% amino acid sequence identity thereto, and at least one portion of an ORF2/2 molecule from a different Anellovirus (e.g., as described herein), or an ORF2/2 molecule having at least 75%, 80%, 85%, 90%, 95%, 96%, 97%, 98%, or 99% amino acid sequence identity thereto. In some embodiments, the anellovector comprises a chimeric ORF2/3 molecule comprising at least one portion of an ORF2/3 molecule from one Anellovirus (e.g., as described herein), or an ORF2/3 molecule having at least 75%, 80%, 85%, 90%, 95%, 96%, 97%, 98%, or 99% amino acid sequence identity thereto, and at least one portion of an ORF2/3 molecule from a different Anellovirus (e.g., as described herein), or an ORF2/3 molecule having at least 75%, 80%, 85%, 90%, 95%, 96%, 97%, 98%, or 99% amino acid sequence identity thereto. In some embodiments, the anellovector comprises a chimeric ORF2T/3 molecule comprising at least one portion of an ORF2T/3 molecule from one Anellovirus (e.g., as described herein), or an ORF2T/3 molecule having at least 75%, 80%, 85%, 90%, 95%, 96%, 97%, 98%, or 99% amino acid sequence identity thereto, and at least one portion of an ORF2T/3 molecule from a different Anellovirus (e.g., as described herein), or an ORF2T/3 molecule having at least 75%, 80%, 85%, 90%, 95%, 96%, 97%, 98%, or 99% amino acid sequence identity thereto.

[0359] In some embodiments, an anellovector comprises a nucleic acid comprising a sequence listed in PCT Application No. PCT/US2018/037379, incorporated herein by reference in its entirety. In some embodiments, an anellovector comprises a polypeptide comprising a sequence listed in PCT Application No. PCT/US2018/037379, incorporated herein by reference in its entirety.

[0360] In some embodiments, an anellovector comprises an Anellovirus genome, e.g., as identified according to the method described in Example 9. In some embodiments, an anellovector comprises an Anellovirus sequence, or a portion thereof, as described in Example 13.

[0361] In some embodiments, an anellovector comprises a genetic element comprising a consensus Anellovirus motif, e.g., as shown in Table 19. In some embodiments, an anellovector comprises a genetic element comprising a consensus Anellovirus ORF1 motif, e.g., as shown in Table 19. In some embodiments, an anellovector comprises a genetic element comprising a consensus Anellovirus ORF1/1 motif, e.g., as shown in Table 19. In some embodiments, an anellovector comprises a genetic element comprising a consensus Anellovirus ORF1/2 motif, e.g., as shown in Table 19. In some embodiments, an anellovector comprises a genetic element comprising a consensus Anellovirus ORF2/2 motif, e.g., as shown in Table 19. In some embodiments, an anellovector comprises a genetic element comprising a consensus Anellovirus ORF2/3 motif, e.g., as shown in Table 19. In some embodiments, an anellovector comprises a genetic element comprising a consensus Anellovirus ORF2t/3 motif, e.g., as shown in Table 19. In some embodiments, X, as shown in Table 19, indicates any amino acid. In some embodiments, Z, as shown in Table 19, indicates glutamic acid or glutamine. In some embodiments, B, as shown in Table 19, indicates aspartic acid or asparagine. In some embodiments, J, as shown in Table 19, indicates leucine or isoleucine.

TABLE 19
Consensus motifs in open reading frames (ORFs) of Anelloviruses

| Consensus | Open | | | |
|---|---|---|---|---|
| Threshold | Reading Frame | Position | Motif | SEQ ID NO: |
| 50 | ORF1 | 79 | LIJRQWQPXXIRRCXIXGYXPLIXC | 5075 |
| 50 | ORF1 | 111 | NYXXHXD | 5076 |
| 50 | ORF1 | 135 | FSLXXLYDZ | 5077 |
| 50 | ORF1 | 149 | NXWTXSNXDLDLCRYXGC | 5078 |
| 50 | ORF1 | 194 | TXPSXHPGXMXLXKHK | 5079 |
| 50 | ORF1 | 212 | IPSLXTRPXG | 5080 |
| 50 | ORF1 | 228 | RIXPPXLFXDKWYFQXDL | 5081 |
| 50 | ORF1 | 250 | LLXIXATA | 5082 |
| 50 | ORF1 | 260 | LXXPFXSPXTD | 5083 |
| 50 | ORF1 | 448 | YNPXXDKGXGNXIW | 5084 |
| 50 | ORF1 | 519 | CPYTZPXL | 5085 |
| 50 | ORF1 | 542 | XFGXGXMP | 5086 |
| 50 | ORF1 | 569 | HQXEVXEX | 5087 |
| 50 | ORF1 | 600 | KYXFXFXWGGNP | 5088 |
| 50 | ORF1 | 653 | HSWDXRRG | 5089 |
| 50 | ORF1 | 666 | AIKRXQQ | 5090 |
| 50 | ORF1 | 750 | XQZQXXLR | 5091 |
| 50 | ORF1/1 | 73 | PRXJQXXDP | 5092 |
| 50 | ORF1/1 | 91 | HSWDXRRG | 5093 |
| 50 | ORF1/1 | 105 | AIKRXQQ | 5094 |
| 50 | ORF1/1 | 187 | QZQXXLR | 5095 |
| 50 | ORF1/2 | 97 | KXKRRRR | 5096 |
| 50 | ORF2/2 | 158 | PIXSLXXYKXXTR | 5097 |
| 50 | ORF2/2 | 189 | LAXQLLKECXKN | 5098 |
| 50 | ORF2/3 | 39 | HLNXLA | 5099 |
| 50 | ORF2/3 | 272 | DRPPR | 5100 |
| 50 | ORF2/3 | 281 | DXPFYPWXP | 5101 |
| 50 | ORF2/3 | 300 | VXFKLXF | 5102 |
| 50 | ORF2t/3 | 4 | WXPPVHBVXGIERXW | 5103 |
| 50 | ORF2t/3 | 37 | AKRKLX | 5104 |
| 50 | ORF2t/3 | 140 | PSSXDWXXEY | 5105 |
| 50 | ORF2t/3 | 156 | DRPPR | 5106 |
| 50 | ORF2t/3 | 167 | PFYPW | 5107 |
| 50 | ORF2t/3 | 183 | NVXFKLXF | 5108 |
| 50 | ORF1 | 84 | JXXXXWQPXXXXXCXIXGXXXJWQP | 5109 |
| 50 | ORF1 | 149 | NXWXXXNXXXXLXRY | 5110 |
| 50 | ORF1 | 448 | YNPXXDXG | 5111 |

### ORF1 Molecules

[0362] In some embodiments, the anellovector comprises an ORF1 molecule and/or a nucleic acid encoding an ORF1 molecule. Generally, an ORF1 molecule comprises a polypeptide having the structural features and/or activity of an Anellovirus ORF1 protein (e.g., an Anellovirus ORF1 protein as described herein, e.g., as listed in any of Tables A1-A1417), or a functional fragment thereof. In some embodiments, the ORF1 molecule comprises a truncation relative to an Anellovirus ORF1 protein (e.g., an Anellovirus ORF1 protein as described herein, e.g., as listed in any of Tables A1-A1417). In some 10 embodiments, the ORF1 molecule is truncated by at least 10, 20, 30, 40, 50, 60, 70, 80, 90, 100, 150, 200, 250, 300, 350, 400, 450, 500, 550, 600, 650, or 700 amino acids of the Anellovirus ORF1 protein. In some embodiments, an ORF1 molecule comprises an amino acid sequence having at least 70%, 75%, 80%, 85%, 90%, 95%, 96%, 97%, 98%, 99%, or 100% sequence identity to an Anellovirus ORF1 protein sequence as shown in any of Tables A1-A1417. In some embodiments, an ORF1 molecule comprises an amino acid sequence having at least 75%, 80%, 85%, 90%, 95%, 96%, 97%, 98%, or 99% sequence identity to an Alphatorquevirus, Betatorquevirus, or Gammatorquevirus ORF1 protein, e.g., as described herein. An ORF1 molecule can generally bind to a nucleic acid molecule, such as DNA (e.g., a genetic element, e.g., as described herein). In some embodiments, an ORF1 molecule localizes to the nucleus of a cell. In certain embodiments, an ORF1 molecule localizes to the nucleolus of a cell.

[0363] In some embodiments, an ORF1 molecule as described herein comprises an amino acid sequence (e.g., an ORF1 sequence, or an arginine-rich region, jelly-roll domain, HVR, N22, or C-terminal domain sequence) as listed in any of Tables A2, A4, A6, A8, A10, A12, C1-C5, 2, 4, 6, 8, 10, 12, 14, 16, 18, 20-37, or D1-D10 of PCT Publication No. WO2020/123816 (incorporated herein by reference in its entirety), or a sequence having at least 70% 80%, 85%, 90% 95%, 96%, 97%, 98% and 99% nucleotide sequence identity thereto.

[0364] Without wishing to be bound by theory, an ORF1 molecule may be capable of binding to other ORF1 molecules, e.g., to form a proteinaceous exterior (e.g., as described herein). Such an ORF1 molecule may be described as having the capacity to form a capsid. In some embodiments, the proteinaceous exterior may encapsidate a nucleic acid molecule (e.g., a genetic element as described herein). In some embodiments, a plurality of ORF1 molecules may form a multimer, e.g., to produce a proteinaceous exterior. In some embodiments, the multimer may be a homomultimer. In other embodiments, the multimer may be a heteromultimer (e.g., comprising a plurality of distinct ORF1 molecules). It is also contemplated that an ORF1 molecule may have replicase activity.

[0365] An ORF1 molecule may, in some embodiments, comprise one or more of: a first region comprising an arginine rich region, e.g., a region having at least 60% basic residues (e.g., at least 60%, 65%, 70%, 75%, 80%, 85%, 90%, 95%, or 100% basic residues; e.g., between 60%-90%, 60%-80%, 70%-90%, or 70-80% basic residues), and a second region comprising jelly-roll domain, e.g., at least six beta strands (e.g., 4, 5, 6, 7, 8, 9, 10, 11, or 12 beta strands).

### Arginine-Rich Region

[0366] An arginine rich region has at least 70% (e.g., at least about 70, 80, 90, 95, 96, 97, 98, 99, or 100%) sequence identity to an arginine-rich region sequence described herein or a sequence of at least about 40 amino acids comprising at least 60%, 70%, or 80% basic residues (e.g., arginine, lysine, or a combination thereof).

### Jelly Roll Domain

[0367] A jelly-roll domain or region comprises (e.g., consists of) a polypeptide (e.g., a domain or region comprised in a larger polypeptide) comprising one or more (e.g., 1, 2, or 3) of the following characteristics:
[0368] (i) at least 30% (e.g., at least 30%, 35%, 40%, 45%, 50%, 55%, 60%, 65%, 70%, 75%, 80%, 90%, or more) of the amino acids of the jelly-roll domain are part of one or more β-sheets;
[0369] (ii) the secondary structure of the jelly-roll domain comprises at least four (e.g., at least 4, 5, 6, 7, 8, 9, 10, 11, or 12) β-strands; and/or
[0370] (iii) the tertiary structure of the jelly-roll domain comprises at least two (e.g., at least 2, 3, or 4) β-sheets; and/or
[0371] (iv) the jelly-roll domain comprises a ratio of β-sheets to α-helices of at least 2:1, 3:1, 4:1, 5:1, 6:1, 7:1, 8:1, 9:1, or 10:1.

[0372] In certain embodiments, a jelly-roll domain comprises two β-sheets.

[0373] In certain embodiments, one or more (e.g., 1, 2, 3, 4, 5, 6, 7, 8, 9, or 10) of the β-sheets comprises about eight (e.g., 4, 5, 6, 7, 8, 9, 10, 11, or 12) β-strands. In certain embodiments, one or more (e.g., 1, 2, 3, 4, 5, 6, 7, 8, 9, or 10) of the β-sheets comprises eight β-strands. In certain embodiments, one or more (e.g., 1, 2, 3, 4, 5, 6, 7, 8, 9, or 10) of the β-sheets comprises seven β-strands. In certain embodiments, one or more (e.g., 1, 2, 3, 4, 5, 6, 7, 8, 9, or 10) of the β-sheets comprises six β-strands. In certain embodiments, one or more (e.g., 1, 2, 3, 4, 5, 6, 7, 8, 9, or 10) of the β-sheets comprises five β-strands. In certain embodiments, one or more (e.g., 1, 2, 3, 4, 5, 6, 7, 8, 9, or 10) of the β-sheets comprises four β-strands.

[0374] In some embodiments, the jelly-roll domain comprises a first β-sheet in antiparallel orientation to a second β-sheet. In certain embodiments, the first β-sheet comprises about four (e.g., 3, 4, 5, or 6) β-strands. In certain embodiments, the second β-sheet comprises about four (e.g., 3, 4, 5, or 6) β-strands. In embodiments, the first and second β-sheet comprise, in total, about eight (e.g., 6, 7, 8, 9, 10, 11, or 12) β-strands.

[0375] In certain embodiments, a jelly-roll domain is a component of a capsid protein (e.g., an ORF1 molecule as described herein). In certain embodiments, a jelly-roll domain has self-assembly activity. In some embodiments, a polypeptide comprising a jelly-roll domain binds to another copy of the polypeptide comprising the jelly-roll domain. In some embodiments, a jelly-roll domain of a first polypeptide binds to a jelly-roll domain of a second copy of the polypeptide.

[0376] An ORF1 molecule may also include a third region comprising the structure or activity of an Anellovirus N22 domain (e.g., as described herein, e.g., an N22 domain from an Anellovirus ORF1 protein as described herein), and/or a fourth region comprising the structure or activity of an Anellovirus C-terminal domain (CTD) (e.g., as described herein, e.g., a CTD from an Anellovirus ORF1 protein as described herein). In some embodiments, the ORF1 molecule comprises, in N-terminal to C-terminal order, the first, second, third, and fourth regions.

[0377] The ORF1 molecule may, in some embodiments, further comprise a hypervariable region (HVR), e.g., an HVR from an Anellovirus ORF1 protein, e.g., as described herein. In some embodiments, the HVR is positioned between the second region and the third region. In some embodiments, the HVR comprises comprises at least about 55 (e.g., at least about 45, 50, 51, 52, 53, 54, 55, 56, 57, 58, 59, 60, or 65) amino acids (e.g., about 45-160, 50-160, 55-160, 60-160, 45-150, 50-150, 55-150, 60-150, 45-140, 50-140, 55-140, or 60-140 amino acids).

[0378] In some embodiments, the first region can bind to a nucleic acid molecule (e.g., DNA). In some embodiments, the basic residues are selected from arginine, histidine, or lysine, or a combination thereof. In some embodiments, the first region comprises at least 60%, 65%, 70%, 75%, 80%, 85%, 90%, 95%, or 100% arginine residues (e.g., between 60%-90%, 60%-80%, 70%-90%, or 70-80% arginine residues). In some embodiments, the first region comprises about 30-120 amino acids (e.g., about 40-120, 40-100, 40-90, 40-80, 40-70, 50-100, 50-90, 50-80, 50-70, 60-100, 60-90, or 60-80 amino acids). In some embodiments, the first region comprises the structure or activity of a viral ORF1 arginine-rich region (e.g., an arginine-rich region from an Anellovirus ORF1 protein, e.g., as described herein). In some embodiments, the first region comprises a nuclear localization sigal.

[0379] In some embodiments, the second region comprises a jelly-roll domain, e.g., the structure or activity of a viral ORF1 jelly-roll domain (e.g., a jelly-roll domain from an Anellovirus ORF1 protein, e.g., as described herein). In some embodiments, the second region is capable of binding to the second region of another ORF1 molecule, e.g., to form a proteinaceous exterior (e.g., capsid) or a portion thereof.

[0380] In some embodiments, the fourth region is exposed on the surface of a proteinaceous exterior (e.g., a proteinaceous exterior comprising a multimer of ORF1 molecules, e.g., as described herein).

[0381] In some embodiments, the first region, second region, third region, fourth region, and/or HVR each comprise fewer than four (e.g., 0, 1, 2, or 3) beta sheets.

[0382] In some embodiments, one or more of the first region, second region, third region, fourth region, and/or HVR may be replaced by a heterologous amino acid sequence (e.g., the corresponding region from a heterologous ORF1 molecule). In some embodiments, the heterologous amino acid sequence has a desired functionality, e.g., as described herein.

[0383] In some embodiments, the ORF1 molecule comprises a plurality of conserved motifs (e.g., motifs comprising about 5, 6, 7, 8, 9, 10, 11, 12, 13, 14, 15, 16, 17, 18, 19, 20, 25, 30, 35, 40, 45, 50, 60, 70, 80, 90, 100, or more amino acids) (e.g., as shown in FIG. 34). In some embodiments, the conserved motifs may show 60, 70, 80, 85, 90, 95, or 100% sequence identity to an ORF1 protein of one or more wild-type Anellovirus clades (e.g., Alphatorquevirus, clade 1; Alphatorquevirus, clade 2; Alphatorquevirus, clade 3; Alphatorquevirus, clade 4; Alphatorquevirus, clade 5; Alphatorquevirus, clade 6; Alphatorquevirus, clade 7; Betatorquevirus; and/or Gammatorquevirus). In some embodiments, the conserved motifs each have a length between 1-1000 (e.g., between 5-10, 5-15, 5-20, 10-15, 10-20, 15-20, 5-50, 5-100, 10-50, 10-100, 10-1000, 50-100, 50-1000, or 100-1000) amino acids. In certain embodiments, the conserved motifs consist of about 2-4% (e.g., about 1-8%, 1-6%, 1-5%, 1-4%, 2-8%, 2-6%, 2-5%, or 2-4%) of the sequence of the ORF1 molecule, and each show 100% sequence identity to the corresponding motifs in an ORF1 protein of the wild-type Anellovirus clade. In certain embodiments, the conserved motifs consist of about 5-10% (e.g., about 1-20%, 1-10%, 5-20%, or 5-10%) of the sequence of the ORF1 molecule, and each show 80% sequence identity to the corresponding motifs in an ORF1 protein of the wild-type Anellovirus clade. In certain embodiments, the conserved motifs consist of about 10-50% (e.g., about 10-20%, 10-30%, 10-40%, 10-50%, 20-40%, 20-50%, or 30-50%) of the sequence of the ORF1 molecule, and each show 60% sequence identity to the corresponding motifs in an ORF1 protein of the wild-type Anellovirus clade. In some embodiments, the conserved motifs comprise one or more amino acid sequences as listed in Table 19.

[0384] In some embodiments, an ORF1 molecule comprises at least one difference (e.g., a mutation, chemical modification, or epigenetic alteration) relative to a wild-type ORF1 protein, e.g., as described herein (e.g., as shown in any of Tables A1-A1417).

### Conserved ORF1 Motif in N22 Domain

[0385] In some embodiments, a polypeptide (e.g., an ORF1 molecule) described herein comprises the amino acid sequence YNPX²DXGX²N (SEQ ID NO: 5202), wherein Xⁿ is a contiguous sequence of any n amino acids. For example, X² indicates a contiguous sequence of any two amino acids. In some embodiments, the YNPX²DXGX²N (SEQ ID NO: 5202) is comprised within the N22 domain of an ORF1 molecule, e.g., as described herein. In some embodiments, a genetic element described herein comprises a nucleic acid sequence (e.g., a nucleic acid sequence encoding an ORF1 molecule, e.g., as described herein) encoding the amino acid sequence YNPX²DXGX²N (SEQ ID NO: 5202), wherein Xⁿ is a contiguous sequence of any n amino acids.

[0386] In some embodiments, a polypeptide (e.g., an ORF1 molecule) comprises a conserved secondary structure, e.g., flanking and/or comprising a portion of the YNPX²DXGX²N (SEQ ID NO: 5202) motif, e.g., in an N22 domain. In some embodiments, the conserved secondary structure comprises a first beta strand and/or a second beta strand. In some embodiments, the first beta strand is about 5-6 (e.g., 3, 4, 5, 6, 7, or 8) amino acids in length. In some embodiments, the first beta strand comprises the tyrosine (Y) residue at the N-terminal end of the YNPX²DXGX²N (SEQ ID NO: 5202) motif. In some embodiments, the YNPX²DXGX²N (SEQ ID NO: 5202) motif comprises a random coil (e.g., about 8-9 amino acids of random coil). In some embodiments, the second beta strand is about 7-8 (e.g., 5, 6, 7, 8, 9, or 10) amino acids in length. In some embodiments, the second beta strand comprises the asparagine (N) residue at the C-terminal end of the YNPX²DXGX²N (SEQ ID NO: 5202) motif.

[0387] Exemplary YNPX²DXGX²N (SEQ ID NO: 5202) motif-flanking secondary structures are described in Example 47 and FIG. 48. In some embodiments, an ORF1 molecule comprises a region comprising one or more (e.g., 1, 2, 3, 4, 5, 6, 7, 8, 9, 10, or all) of the secondary structural elements (e.g., beta strands) shown in FIG. 48. In some embodiments, an ORF1 molecule comprises a region comprising one or more (e.g., 1, 2, 3, 4, 5, 6, 7, 8, 9, 10, or all) of the secondary structural elements (e.g., beta strands) shown in FIG. 48, flanking a YNPX²DXGX²N (SEQ ID NO: 5202) motif (e.g., as described herein).

### Conserved Secondary Structural Motif in ORF1 Jelly-Roll Domain

[0388] In some embodiments, a polypeptide (e.g., an ORF1 molecule) described herein comprises one or more secondary structural elements comprised by an Anellovirus ORF1 protein (e.g., as described herein). In some embodiments, an ORF1 molecule comprises one or more secondary structural elements comprised by the jelly-roll domain of an Anellovius ORF1 protein (e.g., as described herein). Generally, an ORF1 jelly-roll domain comprises a secondary structure comprising, in order in the N-terminal to C-terminal direction, a first beta strand, a second beta strand, a first alpha helix, a third beta strand, a fourth beta strand, a fifth beta strand, a second alpha helix, a sixth beta strand, a seventh beta strand, an eighth beta strand, and a ninth beta strand. In some embodiments, an ORF1 molecule comprises a secondary structure comprising, in order in the N-terminal to C-terminal direction, a first beta strand, a second beta strand, a first alpha helix, a third beta strand, a fourth beta strand, a fifth beta strand, a second alpha helix, a sixth beta strand, a seventh beta strand, an eighth beta strand, and/or a ninth beta strand.

[0389] In some embodiments, a pair of the conserved secondary structural elements (i.e., the beta strands and/or alpha helices) are separated by an interstitial amino acid sequence, e.g., comprising a random coil sequence, a beta strand, or an alpha helix, or a combination thereof. Interstitial amino acid sequences between the conserved secondary structural elements may comprise, for example, 1, 2, 3, 4, 5, 6, 7, 8, 9, 10, 11, 12, 13, 14, 15, 16, 17, 18, 19, 20, 21, 22, 23, 24, 25, 26, 27, 28, 29, 30, or more amino acids. In some embodiments, an ORF1 molecule may further comprise one or more additional beta strands and/or alpha helices (e.g., in the jelly-roll domain). In some embodiments, consecutive beta strands or consecutive alpha helices may be combined. In some embodiments, the first beta strand and the second beta strand are comprised in a larger beta strand. In some embodiments, the third beta strand and the fourth beta strand are comprised in a larger beta strand. In some embodiments, the fourth beta strand and the fifth beta strand are comprised in a larger beta strand. In some embodiments, the sixth beta strand and the seventh beta strand are comprised in a larger beta strand. In some embodiments, the seventh beta strand and the eighth beta strand are comprised in a larger beta strand. In some embodiments, the eighth beta strand and the ninth beta strand are comprised in a larger beta strand.

[0390] In some embodiments, the first beta strand is about 5-7 (e.g., 3, 4, 5, 6, 7, 8, 9, or 10) amino acids in length. In some embodiments, the second beta strand is about 15-16 (e.g., 13, 14, 15, 16, 17, 18, or 19) amino acids in length. In some embodiments, the first alpha helix is about 15-17 (e.g., 13, 14, 15, 16, 17, 18, 19, or 20) amino acids in length. In some embodiments, the third beta strand is about 3-4 (e.g., 1, 2, 3, 4, 5, or 6) amino acids in length. In some embodiments, the fourth beta strand is about 10-11 (e.g., 8, 9, 10, 11, 12, or 13) amino acids in length. In some embodiments, the fifth beta strand is about 6-7 (e.g., 4, 5, 6, 7, 8, 9, or 10) amino acids in length. In some embodiments, the second alpha helix is about 8-14 (e.g., 5, 6, 7, 8, 9, 10, 11, 12, 13, 14, 15, 16, or 17) amino acids in length. In some embodiments, the second alpha helix may be broken up into two smaller alpha helices (e.g., separated by a random coil sequence). In some embodiments, each of the two smaller alpha helices are about 4-6 (e.g., 2, 3, 4, 5, 6, 7, or 8) amino acids in length. In some embodiments, the sixth beta strand is about 4-5 (e.g., 2, 3, 4, 5, 6, or 7) amino acids in length. In some embodiments, the seventh beta strand is about 5-6 (e.g., 3, 4, 5, 6, 7, 8, or 9) amino acids in length. In some embodiments, the eighth beta strand is about 7-9 (e.g., 5, 6, 7, 8, 9, 10, 11, 12, or 13) amino acids in length. In some embodiments, the ninth beta strand is about 5-7 (e.g., 3, 4, 5, 6, 7, 8, 9, or 10) amino acids in length.

[0391] Exemplary jelly-roll domain secondary structures are described in Example 47 and FIG. 47. In some embodiments, an ORF1 molecule comprises a region comprising one or more (e.g., 1, 2, 3, 4, 5, 6, 7, 8, 9, 10, or all) of the secondary structural elements (e.g., beta strands and/or alpha helices) of any of the jelly-roll domain secondary structures shown in FIG. 47.

### Exemplary ORF1 Sequences

[0392] In some embodiments, a polypeptide (e.g., an ORF1 molecule) described herein comprises an amino acid sequence having at least about 70%, 75%, 80%, 85%, 90%, 95%, 96%, 97%, 98%, 99%, or 100% sequence identity to one or more Anellovirus ORF1 subsequences, e.g., as described herein). In some embodiments, an anellovector described herein comprises an ORF1 molecule comprising an amino acid sequence having at least about 70%, 75%, 80%, 85%, 90%, 95%, 96%, 97%, 98%, 99%, or 100% sequence identity to one or more Anellovirus ORF1 subsequences, e.g., as described herein. In some embodiments, an anellovector described herein comprises a nucleic acid molecule (e.g., a genetic element) encoding an ORF1 molecule comprising an amino acid sequence having at least about 70%, 75%, 80%, 85%, 90%, 95%, 96%, 97%, 98%, 99%, or 100% sequence identity to one or more Anellovirus ORF1 subsequences, e.g., as described herein.

[0393] In some embodiments, the one or more Anellovirus ORF1 subsequences comprises one or more of an arginine (Arg)-rich domain, a jelly-roll domain, a hypervariable region (HVR), an N22 domain, or a C-terminal domain (CTD) (e.g., as listed herein), or sequences having at least about 70%, 75%, 80%, 85%, 90%, 95%, 96%, 97%, 98%, 99%, or 100% sequence identity thereto. In some embodiments, the ORF1 molecule comprises a plurality of subsequences from different Anelloviruses. In some embodiments, the ORF1 molecule comprises one or more of an Arg-rich domain, a jelly-roll domain, an N22 domain, and a CTD from one Anellovirus, and an HVR from another. In some embodiments, the ORF1 molecule comprises one or more of a jelly-roll domain, an HVR, an N22 domain, and a CTD from one Anellovirus, and an Arg-rich domain from another. In some embodiments, the ORF1 molecule comprises one or more of an Arg-rich domain, an HVR, an N22 domain, and a CTD from one Anellovirus, and a jelly-roll domain from another. In some embodiments, the ORF1 molecule comprises one or more of an Arg-rich domain, a jelly-roll domain, an HVR, and a CTD from one Anellovirus, and an N22 domain from another. In some embodiments, the ORF1 molecule comprises one or more of an Arg-rich domain, a jelly-roll domain, an HVR, and an N22 domain from one Anellovirus, and a CTD from another.

[0394] In some embodiments, the one or more Anellovirus ORF1 subsequences comprises one or more of an arginine (Arg)-rich domain, a jelly-roll domain, a hypervariable region (HVR), an N22 domain, or a C-terminal domain (CTD) as described in PCT Publication No. WO2020/123816 (incorporated herein by reference in entirety).

### Consensus ORF1 Domain Sequences

[0395] In some embodiments, an ORF1 molecule, e.g., as described herein, comprises one or more of a jelly-roll domain, N22 domain, and/or C-terminal domain (CTD). In some embodiments, the jelly-roll domain comprises an amino acid sequence having a jelly-roll domain consensus sequence as described herein (e.g., as listed in any of Tables 37A-37C). In some embodiments, the N22 domain comprises an amino acid sequence having a N22 domain consensus sequence as described herein (e.g., as listed in any of Tables 37A-37C). In some embodiments, the CTD domain comprises an amino acid sequence having a CTD domain consensus sequence as described herein (e.g., as listed in any of Tables 37A-37C). In some embodiments, the amino acids listed in any of Tables 37A-37C in the format “(Xa-b)” comprise a contiguous series of amino acids, in which the series comprises at least a, and at most b, amino acids. In certain embodiments, all of the amino acids in the series are identical. In other embodiments, the series comprises at least two (e.g., at least 2, 3, 4, 5, 6, 7, 8, 9, 10, 11, 12, 13, 14, 15, 16, 17, 18, 19, 20, or 21) different amino acids.

TABLE 37A
Alphatorquevius ORF1 domain consensus sequences

| Domain | Sequence | SEQ ID NO: |
|---|---|---|
| Jelly-Roll | LVLTQWQPNTVRRCYIRGYLPLIICGEN(X₀₋₃)TTSRNYA | 5180 |
| | THSDDTIQKGPFGGGMSTTTFSLRVLYDEYQRFMNRW | |
| | TYSNEDLDLARYLGCKFTFYRHPDXDFIVQYNTNPPFK | |
| | DTKLTAPSIHP(X₁₋₅)GMLMLSKRKILIPSLKTRPKGKHY | |
| | VKVRIGPPKLFEDKWYTQSDLCDVPLVXLYATAADLQ | |
| | HPFGSPQTDNPCVTFQVLGSXYNKHLSISP; | |
| | wherein X = any amino acid. | |
| N22 | SNFEFPGAYTDITYNPLTDKGVGNMVWIQYLTKPDTIX | 5181 |
| | DKTQS(X₀₋₃)KCLIEDLPLWAALYGYVDFCEKETGDSAII | |
| | XNXGRVLIRCPYTKPPLYDKT(X₀₋₄)NKGFVPYSTNFGN | |
| | GKMPGGSGYVPIYWRARWYPTLFHQKEVLEDIVQSGP | |
| | FAYKDEKPSTQLVMKYCFNFN; | |
| | wherein X = any amino acid. | |
| CTD | WGGNPISQQVVRNPCKDSG(X₀₋₃)SGXGRQPRSVQVVD | 5182 |
| | PKYMGPEYTFHSWDWRRGLFGEKAIKRMSEQPTDDEI | |
| | FTGGXPKRPRRDPPTXQXPEE(X₁₋₄)QKESSSFR(X₂₋₁₄)PW | |
| | ESSSQEXESESQEEEE(X₀₋₃₀)EQTVQQQLRQQLREQRRL | |
| | RVQLQLLFQQLLKT(X₀₋₄)QAGLHINPLLLSQA(X₀₋₄₀)*; | |
| | wherein X = any amino acid. | |

TABLE 37B
Betatorquevius ORF1 domain consensus sequences

| Domain | Sequence | SEQ ID NO: |
|---|---|---|
| Jelly-Roll | LKQWQPSTIRKCKIKGYLPLFQCGKGRISNNYTQYKESI | 5183 |
| | VPHHEPGGGGWSIQQFTLGALYEEHLKLRNWWTKSN | |
| | DGLPLVRYLGCTIKLYRSEDTDYIVTYQRCYPMTATKL | |
| | TYLSTQPSRMLMNKHKIIVPSKXT(X₁₋₄)NKKKKPYKKIF | |
| | IKPPSQMQNKWYFQQDIANTPLLQLTXTACSLDRMYL | |
| | SSDSISNNITFTSLNTNFFQNPNFQ; | |
| | wherein X = any amino acid. | |
| N22 | (X₄₋₁₀)TPLYFECRYNPFKDKGTGNKVYLVSNN(X₁₋₈)TG | 5184 |
| | WDPPTDPDLIIEGFPLWLLLWGWLDWQKKLGKIQNID | |
| | TDYILVIQSXYYIPP(X₁₋₃)KLPYYVPLDXD(X₀₋₂)FLHGRS | |
| | PY(X₃₋₁₆)PSDKQHWHPKVRFQXETINNIALTGPGTPKLP | |
| | NQKSIQAHMKYKFYFK; | |
| | wherein X = any amino acid. | |
| CTD | WGGCPAPMETITDPCKQPKYPIPNNLLQTTSLQXPTTPI | 5185 |
| | ETYLYKFDERRGLLTKKAAKRIKKDXTTETTLFTDTGX | |
| | XTSTTLPTXXQTETTQEEXTSEEE(X₀₋₅)ETLLQQLQQLR | |
| | RKQKQLRXRILQLLQLLXLL(X₀₋₂₆)*; | |
| | wherein X = any amino acid. | |

TABLE 37C
Gammatorquevius ORF1 domain consensus sequences

| Domain | Sequence | SEQ ID NO: |
|---|---|---|
| Jelly-Roll | TIPLKQWQPESIRKCKIKGYGTLVLGAEGRQFYCYTNE | 5186 |
| | KDEYTPPKAPGGGGFGVELFSLEYLYEQWKARNNIWT | |
| | KSNXYKDLCRYTGCKITFYRHPTTDFIVXYSRQPPFEID | |
| | KXTYMXXHPQXLLLRKHKKIILSKATNPKGKLKKKIKI | |
| | KPPKQMLNKWFFQKQFAXYGLVQLQAAACBLRYPRL | |
| | GCCNENRLITLYYLN; | |
| | wherein X = any amino acid. | |
| N22 | LPIVVARYNPAXDTGKGNKXWLXSTLNGSXWAPPTTD | 5187 |
| | KDLIIEGLPLWLALYGYWSYJKKVKKDKGILQSHMFV | |
| | VKSPAIQPLXTATTQXTFYPXIDNSFIQGKXPYDEPJTX | |
| | NQKKLWYPTLEHQQETINAIVESGPYVPKLDNQKNST | |
| | WELXYXYTFYFK; | |
| | wherein X = any amino acid. | |
| CTD | WGGPQIPDQPVEDPKXQGTYPVPDTXQQTIQIXNPLKQ | 5188 |
| | KPETMFHDWDYRRGIITSTALKRMQENLETDSSFXSDS | |
| | EETP(X₀₋₂)KKKKRLTXELPXPQEETEEIQSCLLSLCEEST | |
| | CQEE(X₁₋₆)ENLQQLIHQQQQQQQQLKHNILKLLSDLKZ | |
| | KQRLLQLQTGILE(X₁₋₁₀)* | |
| | wherein X = any amino acid. | |

[0396] In some embodiments, the jelly-roll domain comprises a jelly-roll domain amino acid sequence as listed in any of Tables 37A-37C, or an amino acid sequence having at least 70%, 75%, 80%, 8%, 90%, 95%, 96%, 97%, 98%, 99%, or 100% sequence identity thereto. In some embodiments, the N22 domain comprises a N22 domain amino acid sequence as listed in any of Tables 37A-37C, or an amino acid sequence having at least 70%, 75%, 80%, 8%, 90%, 95%, 96%, 97%, 98%, 99%, or 100% sequence identity thereto. In some embodiments, the CTD domain comprises a CTD domain amino acid sequence as listed in any of Tables 37A-37C, or an amino acid sequence having at least 70%, 75%, 80%, 8%, 90%, 95%, 96%, 97%, 98%, 99%, or 100% sequence identity thereto.

### Identification of ORF1 Protein Sequences

[0397] In some embodiments, an Anellovirus ORF1 protein sequence, or a nucleic acid sequence encoding an ORF1 protein, can be identified from the genome of an Anellovirus (e.g., a putative Anellovirus genome identified, for example, by nucleic acid sequencing techniques, e.g., deep sequencing techniques). In some embodiments, an ORF1 protein sequence is identified by one or more (e.g., 1, 2, or all 3) of the following selection criteria:

[0398] (i) Length Selection: Protein sequences (e.g., putative Anellovirus ORF1 sequences passing the criteria described in (ii) or (iii) below) may be size-selected for those greater than about 600 amino acid residues to identify putative Anellovirus ORF1 proteins. In some embodiments, an Anellovirus ORF1 protein sequence is at least about 600, 650, 700, 750, 800, 850, 900, 950, or 1000 amino acid residues in length. In some embodiments, an Alphatorquevirus ORF1 protein sequence is at least about 700, 710, 720, 730, 740, 750, 760, 770, 780, 790, 800, 900, or 1000 amino acid residues in length. In some embodiments, a Betatorquevirus ORF1 protein sequence is at least about 650, 660, 670, 680, 690, 700, 750, 800, 900, or 1000 amino acid residues in length. In some embodiments, a Gammatorquevirus ORF1 protein sequence is at least about 650, 660, 670, 680, 690, 700, 750, 800, 900, or 1000 amino acid residues in length. In some embodiments, a nucleic acid sequence encoding an Anellovirus ORF1 protein is at least about 1800, 1900, 2000, 2100, 2200, 2300, 2400, or 2500 nucleotides in length. In some embodiments, a nucleic acid sequence encoding an Alphatorquevirus ORF1 protein sequence is at least about 2100, 2150, 2200, 2250, 2300, 2400, or 2500 nucleotides in length. In some embodiments, a nucleic acid sequence encoding a Betatorquevirus ORF1 protein sequence is at least about 1900, 1950, 2000, 2500, 2100, 2150, 2200, 2250, 2300, 2400, or 2500 or 1000 nucleotides in length. In some embodiments, a nucleic acid sequence encoding a Gammatorquevirus ORF1 protein sequence is at least about 1900, 1950, 2000, 2500, 2100, 2150, 2200, 2250, 2300, 2400, or 2500 or 1000 nucleotides in length.

[0399] (ii) Presence of ORF1 motif: Protein sequences (e.g., putative Anellovirus ORF1 sequences passing the criteria described in (i) above or (iii) below) may be filtered to identify those that contain the conserved ORF1 motif in the N22 domain described above. In some embodiments, a putative Anellovirus ORF1 sequence comprises the sequence YNPXXDXGXXN (SEQ ID NO: 5202). In some embodiments, a putative Anellovirus ORF1 sequence comprises the sequence Y[NCS]PXXDX[GASKR|XX[NTSVAK] (SEQ ID NO: 5204).

[0400] (iii) Presence of arginine-rich region: Protein sequences (e.g., putative Anellovirus ORF1 sequences passing the criteria described in (i) and/or (ii) above) may be filtered for those that include an arginine-rich region (e.g., as described herein). In some embodiments, a putative Anellovirus ORF1 sequence comprises a contiguous sequence of at least about 30, 35, 40, 45, 50, 55, 60, 65, or 70 amino acids that comprises at least 30% (e.g., at least about 20%, 25%, 30%, 35%, 40%, 45%, or 50%) arginine residues. In some embodiments, a putative Anellovirus ORF1 sequence comprises a contiguous sequence of about 35-40, 40-45, 45-50, 50-55, 55-60, 60-65, or 65-70 amino acids that comprises at least 30% (e.g., at least about 20%, 25%, 30%, 35%, 40%, 45%, or 50%) arginine residues. In some embodiments, the arginine-rich region is positioned at least about 30, 40, 50, 60, 70, or 80 amino acids downstream of the start codon of the putative Anellovirus ORF1 protein. In some embodiments, the arginine-rich region is positioned at least about 50 amino acids downstream of the start codon of the putative Anellovirus ORF1 protein.

[0401] In some embodiments, an ORF1 protein is identified in an Anellovirus genome sequence as described in Example 36 PCT Publication No. WO2020/123816 (incorporated herein by reference in its entirety).

### ORF2 Molecules

[0402] In some embodiments, the anellovector comprises an ORF2 molecule and/or a nucleic acid encoding an ORF2 molecule. Generally, an ORF2 molecule comprises a polypeptide having the structural features and/or activity of an Anellovirus ORF2 protein (e.g., an Anellovirus ORF2 protein as described herein, e.g., as listed in any of Tables A1-A1417), or a functional fragment thereof. In some embodiments, an ORF2 molecule comprises an amino acid sequence having at least 70%, 75%, 80%, 85%, 90%, 95%, 96%, 97%, 98%, 99%, or 100% sequence identity to an Anellovirus ORF2 protein sequence as shown in any of Tables A1-A1417.

[0403] In some embodiments, an ORF2 molecule comprises an amino acid sequence having at least 75%, 80%, 85%, 90%, 95%, 96%, 97%, 98%, or 99% sequence identity to an Alphatorquevirus, Betatorquevirus, or Gammatorquevirus ORF2 protein. In some embodiments, an ORF2 molecule (e.g., an ORF2 molecule having at least 75%, 80%, 85%, 90%, 95%, 96%, 97%, 98%, or 99% sequence identity to an Alphatorquevirus ORF2 protein) has a length of 250 or fewer amino acids (e.g., about 150-200 amino acids). In some embodiments, an ORF2 molecule (e.g., an ORF2 molecule having at least 75%, 80%, 85%, 90%, 95%, 96%, 97%, 98%, or 99% sequence identity to a Betatorquevirus ORF2 protein) has a length of about 50-150 amino acids. In some embodiments, an ORF2 molecule (e.g., an ORF2 molecule having at least 75%, 80%, 85%, 90%, 95%, 96%, 97%, 98%, or 99% sequence identity to a Gammatorquevirus ORF2 protein) has a length of about 100-200 amino acids (e.g., about 100-150 amino acids). In some embodiments, the ORF2 molecule comprises a helix-turn-helix motif (e.g., a helix-turn-helix motif comprising two alpha helices flanking a turn region). In some embodiments, the ORF2 molecule does not comprise the amino acid sequence of the ORF2 protein of TTV isolate TA278 or TTV isolate SANBAN. In some embodiments, an ORF2 molecule has protein phosphatase activity. In some embodiments, an ORF2 molecule comprises at least one difference (e.g., a mutation, chemical modification, or epigenetic alteration) relative to a wild-type ORF2 protein, e.g., as described herein (e.g., as shown in any of Tables A1-A1417).

### Conserved ORF2 Motif

[0404] In some embodiments, a polypeptide (e.g., an ORF2 molecule) described herein comprises the amino acid sequence [W/F]X⁷HX³CX¹CX⁵H (SEQ ID NO: 5203), wherein Xⁿ is a contiguous sequence of any n amino acids. In embodiments, X⁷ indicates a contiguous sequence of any seven amino acids. In some embodiments, X³ indicates a contiguous sequence of any three amino acids. In some embodiments, X¹ indicates any single amino acid. In some embodiments, X⁵ indicates a contiguous sequence of any five amino acids. In some embodiments, the [W/F] can be either tryptophan or phenylalanine. In some embodiments, the [W/F]X⁷HX³CX¹CXSH (SEQ ID NO: 5203) is comprised within the N22 domain of an ORF2 molecule, e.g., as described herein. In some embodiments, a genetic element described herein comprises a nucleic acid sequence (e.g., a nucleic acid sequence encoding an ORF2 molecule, e.g., as described herein) encoding the amino acid sequence [W/F]X⁷HX³CX¹CX⁵H (SEQ ID NO: 5203), wherein Xⁿ is a contiguous sequence of any n amino acids.

### Genetic Elements

[0405] In some embodiments, the anellovector comprises a genetic element. In some embodiments, the genetic element has one or more of the following characteristics: is substantially non-integrating with a host cell's genome, is an episomal nucleic acid, is a single stranded DNA, is circular, is about 1 to 10 kb, exists within the nucleus of the cell, can be bound by endogenous proteins, produces an effector, such as a polypeptide or nucleic acid (e.g., an RNA, iRNA, microRNA) that targets a gene, activity, or function of a host or target cell. In one embodiment, the genetic element is a substantially non-integrating DNA. In some embodiments, the genetic element comprises a packaging signal, e.g., a sequence that binds a capsid protein. In some embodiments, outside of the packaging or capsid-binding sequence, the genetic element has less than 70%, 60%, 50%, 40%, 30%, 20%, 10%, 5% sequence identity to a wild type Anellovirus nucleic acid sequence, e.g., has less than 70%, 60%, 50%, 40%, 30%, 20%, 10%, 5% sequence identity to an Anellovirus nucleic acid sequence, e.g., as described herein. In some embodiments, outside of the packaging or capsid-binding sequence, the genetic element has less than 500, 450, 400, 350, 300, 250, 200, 150, or 100 contiguous nucleotides that are at least 70%, 75%, 80%, 8%, 90%, 95%, 96%, 97%, 98%, 99%, or 100% identical to an Anellovirus nucleic acid sequence. In certain embodiments, the genetic element is a circular, single stranded DNA that comprises a promoter sequence, a sequence encoding a therapeutic effector, and a capsid binding protein.

[0406] In some embodiments, the genetic element has at least about 70%, 75%, 80%, 8%, 90%, 95%, 96%, 97%, 98%, 99%, or 100% sequence identity to an Anellovirus nucleic acid sequence, e.g., as described herein (e.g., as described in any of Tables N1-N1417), or a fragment thereof, or encodes an amino acid sequence having at least about 70%, 75%, 80%, 8%, 90%, 95%, 96%, 97%, 98%, 99%, or 100% sequence identity to an Anellovirus amino acid sequence (e.g., as described in any of Tables A1-A1417), or a fragment thereof. In some embodiments, the genetic element comprises a sequence encoding an effector (e.g., an endogenous effector or an exogenous effector, e.g., a payload), e.g., a polypeptide effector (e.g., a protein) or nucleic acid effector (e.g., a non-coding RNA, e.g., a miRNA, siRNA, mRNA, lncRNA, RNA, DNA, an antisense RNA, gRNA).

[0407] In some embodiments, the genetic element has a length less than 20 kb (e.g., less than about 19 kb, 18 kb, 17 kb, 16 kb, 15 kb, 14 kb, 13 kb, 12 kb, 11 kb, 10 kb, 9 kb, 8 kb, 7 kb, 6 kb, 5 kb, 4 kb, 3 kb, 2 kb, 1 kb, or less). In some embodiments, the genetic element has, independently or in addition to, a length greater than 1000b (e.g., at least about 1.1 kb, 1.2 kb, 1.3 kb, 1.4 kb, 1.5 kb, 1.6 kb, 1.7 kb, 1.8 kb, 1.9 kb, 2 kb, 2.1 kb, 2.2 kb, 2.3 kb, 2.4 kb, 2.5 kb, 2.6 kb, 2.7 kb, 2.8 kb, 2.9 kb, 3 kb, 3.1 kb, 3.2 kb, 3.3 kb, 3.4 kb, 3.5 kb, 3.6 kb, 3.7 kb, 3.8 kb, 3.9 kb, 4 kb, 4.1 kb, 4.2 kb, 4.3 kb, 4.4 kb, 4.5 kb, 4.6 kb, 4.7 kb, 4.8 kb, 4.9 kb, 5 kb, or greater). In some embodiments, the genetic element has a length of about 2.5-4.6, 2.8-4.0, 3.0-3.8, or 3.2-3.7 kb. In some embodiments, the genetic element has a length of about 1.5-2.0, 1.5-2.5, 1.5-3.0, 1.5-3.5, 1.5-3.8, 1.5-3.9, 1.5-4.0, 1.5-4.5, or 1.5-5.0 kb. In some embodiments, the genetic element has a length of about 2.0-2.5, 2.0-3.0, 2.0-3.5, 2.0-3.8, 2.0-3.9, 2.0-4.0, 2.0-4.5, or 2.0-5.0 kb. In some embodiments, the genetic element has a length of about 2.5-3.0, 2.5-3.5, 2.5-3.8, 2.5-3.9, 2.5-4.0, 2.5-4.5, or 2.5-5.0 kb. In some embodiments, the genetic element has a length of about 3.0-5.0, 3.5-5.0, 4.0-5.0, or 4.5-5.0 kb. In some embodiments, the genetic element has a length of about 1.5-2.0, 2.0-2.5, 2.5-3.0, 3.0-3.5, 3.1-3.6, 3.2-3.7, 3.3-3.8, 3.4-3.9, 3.5-4.0, 4.0-4.5, or 4.5-5.0 kb.

[0408] In some embodiments, the genetic element comprises one or more of the features described herein, e.g., a sequence encoding a substantially non-pathogenic protein, a protein binding sequence, one or more sequences encoding a regulatory nucleic acid, one or more regulatory sequences, one or more sequences encoding a replication protein, and other sequences. In some embodiments, the substantially non-pathogenic protein comprises an amino acid sequence or a functional fragment thereof or a sequence having at least about 60%, 65%, 70%, 75%, 80%, 85%, 90% 95%, 96%, 97%, 98%, 99%, or 100% sequence identity to any one of the amino acid sequences described herein, an Anellovirus amino acid sequence, e.g., as listed in any of Tables A1-A1417.

[0409] In some embodiments, the genetic element was produced from a double-stranded circular DNA (e.g., produced by in vitro circularization). In some embodiments, the genetic element was produced by rolling circle replication from the double-stranded circular DNA. In some embodiments, the rolling circle replication occurs in a cell (e.g., a host cell, e.g., a mammalian cell, e.g., a human cell, e.g., a HEK293T cell, an A549 cell, or a Jurkat cell). In some embodiments, the genetic element can be amplified exponentially by rolling circle replication in the cell. In some embodiments, the genetic element can be amplified linearly by rolling circle replication in the cell. In some embodiments, the double-stranded circular DNA or genetic element is capable of yielding at least 2, 4, 8, 16, 32, 64, 128, 256, 518, 1024 or more times the original quantity by rolling circle replication in the cell. In some embodiments, the double-stranded circular DNA was introduced into the cell, e.g., as described herein.

[0410] In some embodiments, the double-stranded circular DNA and/or the genetic element does not comprise one or more bacterial plasmid elements (e.g., a bacterial origin of replication or a selectable marker, e.g., a bacterial resistance gene). In some embodiments, the double-stranded circular DNA and/or the genetic element does not comprise a bacterial plasmid backbone.

[0411] In one embodiment, the invention includes a genetic element comprising a nucleic acid sequence (e.g., a DNA sequence) encoding (i) a substantially non-pathogenic exterior protein, (ii) an exterior protein binding sequence that binds the genetic element to the substantially non-pathogenic exterior protein, and (iii) a regulatory nucleic acid. In such an embodiment, the genetic element may comprise one or more sequences with at least about 60%, 70% 80%, 85%, 90% 95%, 96%, 97%, 98% and 99% nucleotide sequence identity to any one of the nucleotide sequences to a native viral sequence (e.g., a native Anellovirus sequence, e.g., as described herein).

[0412] In some embodiments, a genetic element as described herein comprises a sequence (e.g., a TATA box, cap site, transcriptional start site, 5′ UTR, open reading frame (ORF), poly(A) signal, or GC-rich region sequence) as listed in any of Tables A1, A3, A5, A7, A9, A11, B1-B5, 1, 3, 5, 7, 9, 11, 13, 15, or 17 of PCT Publication No. WO2020/123816 (incorporated herein by reference in its entirety), or a sequence having at least 70% 80%, 85%, 90% 95%, 96%, 97%, 98% and 99% nucleotide sequence identity thereto.

[0413] In some embodiments, a genetic element comprises a sequence encoding an effector (e.g., an exogenous effector). In some embodiments, the effector-encoding sequence is inserted into an Anellovirus genome sequence (e.g., as described herein). In some embodiments, the effector-encoding sequence replaces a contiguous sequence (e.g., of at least 5, 10, 15, 20, 25, 30, 40, 50, 60, 70, 80, 90, 100, 200, 300, 400, 500, 600, 700, 800, 900, 1000, or more nucleotides) from the Anellovirus genome sequence. In some embodiments, the effector-encoding sequence replaces a TATA box, cap site, transcriptional start site, 5′ UTR, open reading frame (ORF), poly(A) signal, or GC-rich region sequence, or a portion thereof (e.g., a portion consisting of at least 5, 10, 15, 20, 25, 30, 40, 50, 60, 70, 80, 90, 100, 200, 300, 400, 500, 600, 700, 800, 900, 1000, or more nucleotides) e.g., as listed in any of Tables A1, A3, A5, A7, A9, A11, B1-B5, 1, 3, 5, 7, 9, 11, 13, 15, or 17 of PCT Publication No. WO2020/123816 (incorporated herein by reference in its entirety), or a sequence having at least 70% 80%, 85%, 90% 95%, 96%, 97%, 98% and 99% nucleotide sequence identity thereto.

[0414] In some embodiments, the sequence of a first nucleic acid element comprised in a genetic element (e.g., a TATA box, cap site, transcriptional start site, 5′ UTR, open reading frame (ORF), poly(A) signal, or GC-rich region) overlaps with the sequence of a second nucleic acid element (e.g., a TATA box, cap site, transcriptional start site, 5′ UTR, open reading frame (ORF), poly(A) signal, or GC-rich region), e.g., by at least 5, 10, 15, 20, 25, 30, 40, 50, 60, 70, 80, 90, 100, 150, 200, 250, 300, 400, or 500 nucleotides. In some embodiments, the sequence of a first nucleic acid element comprised in a genetic element (e.g., a TATA box, cap site, transcriptional start site, 5′ UTR, open reading frame (ORF), poly(A) signal, or GC-rich region) does not overlap with the sequence of a second nucleic acid element (e.g., a TATA box, cap site, transcriptional start site, 5′ UTR, open reading frame (ORF), poly(A) signal, or GC-rich region).

### Protein Binding Sequence

[0415] A strategy employed by many viruses is that the viral capsid protein recognizes a specific protein binding sequence in its genome. For example, in viruses with unsegmented genomes, such as the L-A virus of yeast, there is a secondary structure (stem-loop) and a specific sequence at the 5′ end of the genome that are both used to bind the viral capsid protein. However, viruses with segmented genomes, such as Reoviridae, Orthomyxoviridae (influenza), Bunyaviruses and Arenaviruses, need to package each of the genomic segments. Some viruses utilize a complementarity region of the segments to aid the virus in including one of each of the genomic molecules. Other viruses have specific binding sites for each of the different segments. See for example, Curr Opin Struct Biol. 2010 February; 20(1): 114-120; and Journal of Virology (2003), 77(24), 13036-13041.

[0416] In some embodiments, the genetic element encodes a protein binding sequence that binds to the substantially non-pathogenic protein. In some embodiments, the protein binding sequence facilitates packaging the genetic element into the proteinaceous exterior. In some embodiments, the protein binding sequence specifically binds an arginine-rich region of the substantially non-pathogenic protein. In some embodiments, the genetic element comprises a protein binding sequence as described in Example 8. In some embodiments, the genetic element comprises a protein binding sequence having at least 70%, 80%, 85%, 90%, 95%, 96%, 97%, 98%, 99%, or 100% sequence identity to a 5′ UTR conserved domain or GC-rich domain of an Anellovirus sequence (e.g., as shown in any of Tables N1-N1417).

[0417] In embodiments, the protein binding sequence has at least about 70%, 75%, 80%, 85%, 90%, 95%, 96%, 97%, 98%, 99%, or 100% sequence identity to the Anellovirus 5′ UTR conserved domain nucleotide sequence of any of Tables N1-N1417.

### 5′ UTR Regions

[0418] In some embodiments, the genetic element (e.g., protein-binding sequence of the genetic element) comprises a nucleic acid sequence having at least about 75% (e.g., at least 75%, 80%, 85%, 90%, 95%, 96%, 97%, 98%, 99%, or 100%) identity to a nucleic acid sequence shown in Table 38 and/or FIG. 20. In some embodiments, the genetic element (e.g., protein-binding sequence of the genetic element) comprises a nucleic acid sequence of the Consensus 5′ UTR sequence shown in Table 38, wherein X₁, X₂, X₃, X₄, and X₅ are each independently any nucleotide, e.g., wherein X₁=G or T, X₂=C or A, X₃=G or A, X₄=T or C, and X₅=A, C, or T). In some embodiments, the genetic element (e.g., protein-binding sequence of the genetic element) comprises a nucleic acid sequence having at least about 75% (e.g., at least 75%, 80%, 85%, 90%, 95%, 96%, 97%, 98%, 99%, or 100%) identity to the Consensus 5′ UTR sequence shown in Table 38. In some embodiments, the genetic element (e.g., protein-binding sequence of the genetic element) comprises a nucleic acid sequence having at least about 75% (e.g., at least 75%, 80%, 85%, 90%, 95%, 96%, 97%, 98%, 99%, or 100%) identity to the exemplary TTV 5′ UTR sequence shown in Table 38. In some embodiments, the genetic element (e.g., protein-binding sequence of the genetic element) comprises a nucleic acid sequence having at least about 75% (e.g., at least 75%, 80%, 85%, 90%, 95%, 96%, 97%, 98%, 99%, or 100%) identity to the TTV-CT30F 5′ UTR sequence shown in Table 38. In some embodiments, the genetic element (e.g., protein-binding sequence of the genetic element) comprises a nucleic acid sequence having at least about 75% (e.g., at least 75%, 80%, 85%, 90%, 95%, 96%, 97%, 98%, 99%, or 100%) identity to the TTV-HD23a 5′ UTR sequence shown in Table 38. In some embodiments, the genetic element (e.g., protein-binding sequence of the genetic element) comprises a nucleic acid sequence having at least about 75% (e.g., at least 75%, 80%, 85%, 90%, 95%, 96%, 97%, 98%, 99%, or 100%) identity to the TTV-JA20 5′ UTR sequence shown in Table 38. In some embodiments, the genetic element (e.g., protein-binding sequence of the genetic element) comprises a nucleic acid sequence having at least about 75% (e.g., at least 75%, 80%, 85%, 90%, 95%, 96%, 97%, 98%, 99%, or 100%) identity to the TTV-TJN02 5′ UTR sequence shown in Table 38. In some embodiments, the genetic element (e.g., protein-binding sequence of the genetic element) comprises a nucleic acid sequence having at least about 75% (e.g., at least 75%, 80%, 85%, 90%, 95%, 96%, 97%, 98%, 99%, or 100%) identity to the TTV-tth8 5′ UTR sequence shown in Table 38.

[0419] In some embodiments, the genetic element (e.g., protein-binding sequence of the genetic element) comprises a nucleic acid sequence having at least about 75% (e.g., at least 75%, 80%, 85%, 90%, 95%, 96%, 97%, 98%, 99%, or 100%) identity to the Alphatorquevirus Consensus 5′ UTR sequence shown in Table 38. In some embodiments, the genetic element (e.g., protein-binding sequence of the genetic element) comprises a nucleic acid sequence having at least about 75% (e.g., at least 75%, 80%, 85%, 90%, 95%, 96%, 97%, 98%, 99%, or 100%) identity to the Alphatorquevirus Clade 1 5′ UTR sequence shown in Table 38. In some embodiments, the genetic element (e.g., protein-binding sequence of the genetic element) comprises a nucleic acid sequence having at least about 75% (e.g., at least 75%, 80%, 85%, 90%, 95%, 96%, 97%, 98%, 99%, or 100%) identity to the Alphatorquevirus Clade 2 5′ UTR sequence shown in Table 38. In some embodiments, the genetic element (e.g., protein-binding sequence of the genetic element) comprises a nucleic acid sequence having at least about 75% (e.g., at least 75%, 80%, 85%, 90%, 95%, 96%, 97%, 98%, 99%, or 100%) identity to the Alphatorquevirus Clade 3 5′ UTR sequence shown in Table 38. In some embodiments, the genetic element (e.g., protein-binding sequence of the genetic element) comprises a nucleic acid sequence having at least about 75% (e.g., at least 75%, 80%, 85%, 90%, 95%, 96%, 97%, 98%, 99%, or 100%) identity to the Alphatorquevirus Clade 4 5′ UTR sequence shown in Table 38. In some embodiments, the genetic element (e.g., protein-binding sequence of the genetic element) comprises a nucleic acid sequence having at least about 75% (e.g., at least 75%, 80%, 85%, 90%, 95%, 96%, 97%, 98%, 99%, or 100%) identity to the Alphatorquevirus Clade 5 5′ UTR sequence shown in Table 38. In some embodiments, the genetic element (e.g., protein-binding sequence of the genetic element) comprises a nucleic acid sequence having at least about 75% (e.g., at least 75%, 80%, 85%, 90%, 95%, 96%, 97%, 98%, 99%, or 100%) identity to the Alphatorquevirus Clade 6 5′ UTR sequence shown in Table 38. In some embodiments, the genetic element (e.g., protein-binding sequence of the genetic element) comprises a nucleic acid sequence having at least about 75% (e.g., at least 75%, 80%, 85%, 90%, 95%, 96%, 97%, 98%, 99%, or 100%) identity to the Alphatorquevirus Clade 7 5′ UTR sequence shown in Table 38.

[0420] In some embodiments, the genetic element comprises a nucleic acid sequence having at least about 70%, 75%, 80%, 85%, 90%, 95%, 96%, 97%, 98%, 99%, or 100% sequence identity to the Anellovirus 5′ UTR conserved domain nucleotide sequence of Table A1 (e.g., nucleotides 165-235 of the nucleic acid sequence of Table A1). In some embodiments, the genetic element comprises a nucleic acid sequence having at least about 70%, 75%, 80%, 85%, 90%, 95%, 96%, 97%, 98%, 99%, or 100% sequence identity to the Anellovirus 5′ UTR conserved domain nucleotide sequence of Table A3 (e.g., nucleotides 175-245 of the nucleic acid sequence of Table A3). In some embodiments, the genetic element comprises a nucleic acid sequence having at least about 70%, 75%, 80%, 85%, 90%, 95%, 96%, 97%, 98%, 99%, or 100% sequence identity to the Anellovirus 5′ UTR conserved domain nucleotide sequence of Table A5 (e.g., nucleotides 138-208 of the nucleic acid sequence of Table A5). In some embodiments, the genetic element comprises a nucleic acid sequence having at least about 70%, 75%, 80%, 85%, 90%, 95%, 96%, 97%, 98%, 99%, or 100% sequence identity to the Anellovirus 5′ UTR conserved domain nucleotide sequence of Table A7 (e.g., nucleotides 174-244 of the nucleic acid sequence of Table A7). In some embodiments, the genetic element comprises a nucleic acid sequence having at least about 70%, 75%, 80%, 85%, 90%, 95%, 96%, 97%, 98%, 99%, or 100% sequence identity to the Anellovirus 5′ UTR conserved domain nucleotide sequence of Table A9 (e.g., nucleotides 100-171 of the nucleic acid sequence of Table A9). In some embodiments, the genetic element comprises a nucleic acid sequence having at least about 70%, 75%, 80%, 85%, 90%, 95%, 96%, 97%, 98%, 99%, or 100% sequence identity to the Anellovirus 5′ UTR conserved domain nucleotide sequence of Table A11 (e.g., nucleotides 294-364 of the nucleic acid sequence of Table A11).

[0421] In some embodiments, the genetic element comprises a nucleic acid sequence having at least about 70%, 75%, 80%, 85%, 90%, 95%, 96%, 97%, 98%, 99%, or 100% sequence identity to the Anellovirus 5′ UTR conserved domain nucleotide sequence of any of Tables N1-N1417.

TABLE 38
Exemplary 5′ UTR sequences from Anelloviruses

| Source | Sequence | SEQ ID NO: |
|---|---|---|
| Consensus | CGGGTGCCGX₁AGGTGAGTTTACACACCGX₂AGT | 5112 |
| | CAAGGGGCAATTCGGGCTCX₃GGACTGGCCGGG | |
| | CX₄X₅TGGG | |
| | X₁ = G or T | |
| | X₂ = C or A | |
| | X₃ = Gor A | |
| | X₄ = T or C | |
| | X₅ = A, C, or T | |
| Exemplary TTV Sequence | CGGGTGCCGGAGGTGAGTTTACACACCGCAGTC | 5113 |
| | AAGGGGCAATTCGGGCTCGGGACTGGCCGGGCT | |
| | WTGGG | |
| TTV-CT30F | CGGGTGCCGTAGGTGAGTTTACACACCGCAGTC | 5114 |
| | AAGGGGCAATTCGGGCTCGGGACTGGCCGGGCT | |
| | ATGGG | |
| TTV-HD23a | CGGGTGCCGGAGGTGAGTTTACACACCGCAGTC | 5115 |
| | AAGGGGCAATTCGGGCTCGGGACTGGCCGGGCC | |
| | CTGGG | |
| TTV-JA20 | CGGGTGCCGGAGGTGAGTTTACACACCGCAGTC | 5116 |
| | AAGGGGCAATTCGGGCTCGGGACTGGCCGGGCT | |
| | TTGGG | |
| TTV-TJN02 | CGGGTGCCGGAGGTGAGTTTACACACCGCAGTC | 5117 |
| | AAGGGGCAATTCGGGCTCGGGACTGGCCGGGCT | |
| | ATGGG | |
| TTV-tth8 | CGGGTGCCGGAGGTGAGTTTACACACCGAAGTC | 5118 |
| | AAGGGGCAATTCGGGCTCAGGACTGGCCGGGCT | |
| | TTGGG | |
| Alphatorquevirus | CGGGTGCCGGAGGTGAGTTTACACACCGCAGTC | 5119 |
| Consensus 5′ UTR | AAGGGGCAATTCGGGCTCGGGACTGGCCGGGC | |
| | X₁X₂TGGG; wherein X₁ comprises T or C, and wherein | |
| | X₂ comprises A, C, or T. | |
| Alphatorquevirus | CGGGTGCCGTAGGTGAGTTTACACACCGCAGTC | 5120 |
| Clade 1 5′ UTR (e.g., | AAGGGGCAATTCGGGCTCGGGACTGGCCGGGCT | |
| TTV-CT30F) | ATGGG | |
| Alphatorquevirus | CGGGTGCCGGAGGTGAGTTTACACACCGCAGTC | 5121 |
| Clade 2 5′ UTR (e.g., | AAGGGGCAATTCGGGCTCGGGACTGGCCGGGCC | |
| TTV-P13-1) | CGGG | |
| Alphatorquevirus | CGGGTGCCGGAGGTGAGTTTACACACCGAAGTC | 5122 |
| Clade 3 5′ UTR (e.g., | AAGGGGCAATTCGGGCTCAGGACTGGCCGGGCT | |
| TTV-tth8) | TTGGG | |
| Alphatorquevirus | CGGGTGCCGGAGGTGAGTTTACACACCGCAGTC | 5123 |
| Clade 4 5′ UTR (e.g., | AAGGGGCAATTCGGGCTCGGGAGGCCGGGCCAT | |
| TTV-HD20a) | GGG | |
| Alphatorquevirus | CGGGTGCCGGAGGTGAGTTTACACACCGCAGTC | 5124 |
| Clade 5 5′ UTR (e.g., | AAGGGGCAATTCGGGCTCGGGACTGGCCGGGCC | |
| TTV-16) | CCGGG | |
| Alphatorquevirus | CGGGTGCCGGAGGTGAGTTTACACACCGCAGTC | 5125 |
| Clade 6 5′ UTR (e.g., | AAGGGGCAATTCGGGCTCGGGACTGGCCGGGCT | |
| TTV-TJN02) | ATGGG | |
| Alphatorquevirus | CGGGTGCCGAAGGTGAGTTTACACACCGCAGTC | 5126 |
| Clade 7 5′ UTR (e.g., | AAGGGGCAATTCGGGCTCGGGACTGGCCGGGCT | |
| TTV-HD16d) | ATGGG | |

### Identification of 5′ UTR Sequences

[0422] In some embodiments, an Anellovirus 5′ UTR sequence can be identified within the genome of an Anellovirus (e.g., a putative Anellovirus genome identified, for example, by nucleic acid sequencing techniques, e.g., deep sequencing techniques). In some embodiments, an Anellovirus 5′ UTR sequence is identified by one or both of the following steps:

[0423] (i) Identification of circularization junction point: In some embodiments, a 5′ UTR will be positioned near a circularization junction point of a full-length, circularized Anellovirus genome. A circularization junction point can be identified, for example, by identifying overlapping regions of the sequence. In some embodiments, an overlapping region of the sequence can be trimmed from the sequence to produce a full-length Anellovirus genome sequence that has been circularized. In some embodiments, a genome sequence is circularized in this manner using software. Without wishing to be bound by theory, computationally circularizing a genome may result in the start position for the sequence being oriented in a non-biological. Landmarks within the sequence can be used to re-orient sequences in the proper direction. For example, landmark sequence may include sequences having substantial homology to one or more elements within an Anellovirus genome as described herein (e.g., one or more of a TATA box, cap site, initiator element, transcriptional start site, 5′ UTR conserved domain, ORF1, ORF1/1, ORF1/2, ORF2, ORF2/2, ORF2/3, ORF2t/3, three open-reading frame region, poly(A) signal, or GC-rich region of an Anellovirus, e.g., as described herein).

[0424] (ii) Identification of 5′ UTR sequence: Once a putative Anellovirus genome sequence has been obtained, the sequence (or portions thereof, e.g., having a length between about 40-50, 50-60, 60-70, 70-80, 80-90, or 90-100 nucleotides) can be compared to one or more Anellovirus 5′ UTR sequences (e.g., as described herein) to identify sequences having substantial homology thereto. In some embodiments, a putative Anellovirus 5′ UTR region has at least 50%, 60%, 70%, 75%, 80%, 85%, 90%, 95%, 96%, 97%, 98%, 99%, or 100% sequence identity to an Anellovirus 5′ UTR sequence as described herein.

### GC-Rich Regions

[0425] In some embodiments, the genetic element (e.g., protein-binding sequence of the genetic element) comprises a nucleic acid sequence having at least about 75% (e.g., at least 75%, 80%, 85%, 90%, 95%, 96%, 97%, 98%, 99%, or 100%) identity to a nucleic acid sequence shown in any of Table 39 and/or FIGS. 20 and 32. In some embodiments, the genetic element (e.g., protein-binding sequence of the genetic element) comprises a nucleic acid sequence having at least about 75% (e.g., at least 75%, 80%, 85%, 90%, 95%, 96%, 97%, 98%, 99%, or 100%) identity to a GC-rich sequence shown in Table 39.

[0426] In some embodiments, the genetic element (e.g., protein-binding sequence of the genetic element) comprises a nucleic acid sequence having at least about 75% (e.g., at least 75%, 80%, 85%, 90%, 95%, 96%, 97%, 98%, 99%, or 100%) identity to a 36-nucleotide GC-rich sequence as shown in Table 39 (e.g., 36-nucleotide consensus GC-rich region sequence 1, 36-nucleotide consensus GC-rich region sequence 2, TTV Clade 1 36-nucleotide region, TTV Clade 3 36-nucleotide region, TTV Clade 3 isolate GHI 36-nucleotide region, TTV Clade 3 sle 1932 36-nucleotide region, TTV Clade 4 ctdc002 36-nucleotide region, TTV Clade 5 36-nucleotide region, TTV Clade 6 36-nucleotide region, or TTV Clade 7 36-nucleotide region). In some embodiments, the genetic element (e.g., protein-binding sequence of the genetic element) comprises a nucleic acid sequence comprising at least 10, 15, 20, 25, 30, 31, 32, 33, 34, 35, or 36 consecutive nucleotides of a 36-nucleotide GC-rich sequence as shown in Table 39 (e.g., 36-nucleotide consensus GC-rich region sequence 1, 36-nucleotide consensus GC-rich region sequence 2, TTV Clade 1 36-nucleotide region, TTV Clade 3 36-nucleotide region, TTV Clade 3 isolate GHI 36-nucleotide region, TTV Clade 3 sle 1932 36-nucleotide region, TTV Clade 4 ctdc002 36-nucleotide region, TTV Clade 5 36-nucleotide region, TTV Clade 6 36-nucleotide region, or TTV Clade 7 36-nucleotide region).

[0427] In some embodiments, the genetic element (e.g., protein-binding sequence of the genetic element) comprises a nucleic acid sequence having at least about 75% (e.g., at least 75%, 80%, 85%, 90%, 95%, 96%, 97%, 98%, 99%, or 100%) identity to an Alphatorquevirus GC-rich region sequence, e.g., selected from TTV-CT30F, TTV-P13-1, TTV-tth8, TTV-HD20a, TTV-16, TTV-TJN02, or TTV-HD16d, e.g., as listed in Table 39. In some embodiments, the genetic element (e.g., protein-binding sequence of the genetic element) comprises a nucleic acid sequence comprising at least 10, 15, 20, 25, 30, 35, 40, 45, 50, 60, 70, 80, 90, 100, 104, 105, 108, 110, 111, 115, 120, 122, 130, 140, 145, 150, 155, or 156 consecutive nucleotides of an Alphatorquevirus GC-rich region sequence, e.g., selected from TTV-CT30F, TTV-P13-1, TTV-tth8, TTV-HD20a, TTV-16, TTV-TJN02, or TTV-HD16d, e.g., as listed in Table 39.

[0428] In some embodiments, the 36-nucleotide GC-rich sequence is selected from:

(i)
(SEQ ID NO: 5167)
CGCGCTGCGCGCGCCGCCCAGTAGGGGGAGCCATGC,
(ii)
(SEQ ID NO: 5171)
GCGCTX₁CGCGCGCGCGCCGGGGGGCTGCGCCCCCCC,

[0429] wherein X₁ is selected from T, G, or A:

(iii)
(SEQ ID NO: 5172)
GCGCTTCGCGCGCCGCCCACTAGGGGGCGTTGCGCG;
(iv)
(SEQ ID NO: 5173)
GCGCTGCGCGCGCCGCCCAGTAGGGGGCGCAATGCG;
(v)
(SEQ ID NO: 5174)
GCGCTGCGCGCGCGGCCCCCGGGGGAGGCATTGCCT;
(vi)
(SEQ ID NO: 5175)
GCGCTGCGCGCGCGCGCCGGGGGGGCGCCAGCGCCC;
(vii)
(SEQ ID NO: 5176)
GCGCTTCGCGCGCGCGCCGGGGGGCTCCGCCCCCCC;
(viii)
(SEQ ID NO: 5177)
GCGCTTCGCGCGCGCGCCGGGGGGCTGCGCCCCCCC;
(ix)
(SEQ ID NO: 5178)
GCGCTACGCGCGCGCGCCGGGGGGCTGCGCCCCCCC;
or
(x)
(SEQ ID NO: 5179)
GCGCTACGCGCGCGCGCCGGGGGGCTCTGCCCCCCC.

[0430] In some embodiments, the genetic element (e.g., protein-binding sequence of the genetic element) comprises the nucleic acid sequence CGCGCTGCGCGCGCCGCCCAGTAGGGGGAGCCATGC (SEQ ID NO: 5167).

[0431] In some embodiments, the genetic element (e.g., protein-binding sequence of the genetic element) comprises a nucleic acid sequence of the Consensus GC-rich sequence shown in Table 39, wherein X₁, X₄, X₅, X₆, X₇, X₁₂, X₁₃, X₁₄, X₁₅, X₂₀, X₂₁, X₂₂, X₂₆, X₂₉, X₃₀, and X₃₃ are each independently any nucleotide and wherein X₂, X₃, X₈, X₉, X₁₀, X₁₁, X₁₆, X₁₇, X₁₈, X₁₉, X₂₃, X₂₄, X₂₅, X₂₇, X₂₈, X₃₁, X₃₂, and X₃₄ are each independently absent or any nucleotide. In some embodiments, one or more of (e.g., all of) X₁ through X₃₄ are each independently the nucleotide (or absent) specified in Table 39. In some embodiments, the genetic element (e.g., protein-binding sequence of the genetic element) comprises a nucleic acid sequence having at least about 75% (e.g., at least 75%, 80%, 85%, 90%, 95%, 96%, 97%, 98%, 99%, or 100%) identity to an exemplary TTV GC-rich sequence shown in Table 39 (e.g., the full sequence, Fragment 1, Fragment 2, Fragment 3, or any combination thereof, e.g., Fragments 1-3 in order). In some embodiments, the genetic element (e.g., protein-binding sequence of the genetic element) comprises a nucleic acid sequence having at least about 75% (e.g., at least 75%, 80%, 85%, 90%, 95%, 96%, 97%, 98%, 99%, or 100%) identity to a TTV-CT3OF GC-rich sequence shown in Table 39 (e.g., the full sequence, Fragment 1, Fragment 2, Fragment 3, Fragment 4, Fragment 5, Fragment 6, Fragment 7, Fragment 8, or any combination thereof, e.g., Fragments 1-7 in order). In some embodiments, the genetic element (e.g., protein-binding sequence of the genetic element) comprises a nucleic acid sequence having at least about 75% (e.g., at least 75%, 80%, 85%, 90%, 95%, 96%, 97%, 98%, 99%, or 100%) identity to a TTV-HD23a GC-rich sequence shown in Table 39 (e.g., the full sequence, Fragment 1, Fragment 2, Fragment 3, Fragment 4, Fragment 5, Fragment 6, or any combination thereof, e.g., Fragments 1-6 in order). In some embodiments, the genetic element (e.g., protein-binding sequence of the genetic element) comprises a nucleic acid sequence having at least about 75% (e.g., at least 75%, 80%, 85%, 90%, 95%, 96%, 97%, 98%, 99%, or 100%) identity to a TTV-JA20 GC-rich sequence shown in Table 39 (e.g., the full sequence, Fragment 1, Fragment 2, or any combination thereof, e.g., Fragments 1 and 2 in order). In some embodiments, the genetic element (e.g., protein-binding sequence of the genetic element) comprises a nucleic acid sequence having at least about 75% (e.g., at least 75%, 80%, 85%, 90%, 95%, 96%, 97%, 98%, 99%, or 100%) identity to a TTV-TJN02 GC-rich sequence shown in Table 39 (e.g., the full sequence, Fragment 1, Fragment 2, Fragment 3, Fragment 4, Fragment 5, Fragment 6, Fragment 7, Fragment 8, or any combination thereof, e.g., Fragments 1-8 in order). In some embodiments, the genetic element (e.g., protein-binding sequence of the genetic element) comprises a nucleic acid sequence having at least about 75% (e.g., at least 75%, 80%, 85%, 90%, 95%, 96%, 97%, 98%, 99%, or 100%) identity to a TTV-tth8 GC-rich sequence shown in Table 39 (e.g., the full sequence, Fragment 1, Fragment 2, Fragment 3, Fragment 4, Fragment 5, Fragment 6, Fragment 7, Fragment 8, Fragment 9, or any combination thereof, e.g., Fragments 1-6 in order). In some embodiments, the genetic element (e.g., protein-binding sequence of the genetic element) comprises a nucleic acid sequence having at least about 75% (e.g., at least 75%, 80%, 85%, 90%, 95%, 96%, 97%, 98%, 99%, or 100%) identity to Fragment 7 shown in Table 39. In some embodiments, the genetic element (e.g., protein-binding sequence of the genetic element) comprises a nucleic acid sequence having at least about 75% (e.g., at least 75%, 80%, 85%, 90%, 95%, 96%, 97%, 98%, 99%, or 100%) identity to Fragment 8 shown in Table 39. In some embodiments, the genetic element (e.g., protein-binding sequence of the genetic element) comprises a nucleic acid sequence having at least about 75% (e.g., at least 75%, 80%, 85%, 90%, 95%, 96%, 97%, 98%, 99%, or 100%) identity to Fragment 9 shown in Table 39.

TABLE 39
Exemplary GC-rich sequences from Anelloviruses

| Source | | Sequence | SEQ ID NO: |
|---|---|---|---|
| Consensus | | CGGCGGX₁GGX₂GX₃X₄X₅CGCGCTX₆CGCGC | 5127 |
| | | GCX₇X₈X₉X₁₀CX₁₁X₁₂X₁₃X₁₄GGGGX₁₅X₁₆X₁₇X₁₈ | |
| | | X₁₉X₂₀X₂₁GCX₂₂X₂₃X₂₄X₂₅CCCCCCCX₂₆CGCGC | |
| | | ATX₂₇X₂₈GCX₂₉CGGGX₃₀CCCCCCCCCX₃₁X₃₂X₃₃ | |
| | | GGGGGGCTCCGX₃₄CCCCCCGGCCCCCC | |
| | | X₁ = G or C | |
| | | X₂ = G, C, or absent | |
| | | X₃ = C or absent | |
| | | X₄ = G or C | |
| | | X₅ = G or C | |
| | | X₆ = T, G, or A | |
| | | X₇ = G or C | |
| | | X₈ = G or absent | |
| | | X₉ = C or absent | |
| | | X₁₀ = C or absent | |
| | | X₁₁ = G, A, or absent | |
| | | X₁₂ = G or C | |
| | | X₁₃ = C or T | |
| | | X₁₄ = G or A | |
| | | X₁₅ = G or A | |
| | | X₁₆ = A, G, T, or absent | |
| | | X₁₇ = G, C, or absent | |
| | | X₁₈ = G, C, or absent | |
| | | X₁₉ = C, A, or absent | |
| | | X₂₀ = C or A | |
| | | X₂₁ = T or A | |
| | | X₂₂ = G or C | |
| | | X₂₃ = G, T, or absent | |
| | | X₂₄ = C or absent | |
| | | X₂₅ = G, C, or absent | |
| | | X₂₆ = G or C | |
| | | X₂₇ = G or absent | |
| | | X₂₈ = C or absent | |
| | | X₂₉ = G or A | |
| | | X₃₀ = G or T | |
| | | X₃₁ = C, T, or absent | |
| | | X₃₂ = G, C, A, or absent | |
| | | X₃₃ = G or C | |
| | | X₃₄ = C or absent | |
| Exemplary TTV | Full sequence | GCCGCCGCGGCGGCGGSGGNGNSGCGCGCT | 5128 |
| | | DCGCGCGCSNNNCRCCRGGGGGNNNNCWG | |
| | | CSNCNCCCCCCCCCGCGCATGCGCGGGKCC | |
| Sequence | | CCCCCCCNNCGGGGGGCTCCGCCCCCCGGC | |
| | | CCCCCCCCGTGCTAAACCCACCGCGCATGC | |
| | | GCGACCACGCCCCCGCCGCC | |
| | Fragment 1 | GCCGCCGCGGCGGCGGSGGNGNSGCGCGCT | 5129 |
| | | DCGCGCGCSNNNCRCCRGGGGGNNNNCWG | |
| | | CSNCNCCCCCCCCCGCGCAT | |
| | Fragment 2 | GCGCGGGKCCCCCCCCCNNCGGGGGGCTC | 5130 |
| | | CG | |
| | Fragment 3 | CCCCCCGGCCCCCCCCCGTGCTAAACCCAC | 5131 |
| | | CGCGCATGCGCGACCACGCCCCCGCCGCC | |
| TTV-CT30F | Full sequence | GCGGCGG-GGGGGCG-GCCGCG- | 5132 |
| | | TTCGCGCGCCGCCCACCAGGGGGTG-- | |
| | | CTGCG-CGCCCCCCCCCGCGCAT | |
| | | GCGCGGGGCCCCCCCCC-- | |
| | | GGGGGGGCTCCGCCCCCCCGGCCCCCCCCC | |
| | | GTGCTAAACCCACCGCGCATGCGCGACCAC | |
| | | GCCCCCGCCGCC | |
| | Fragment 1 | GCGGCGG | 5133 |
| | Fragment 2 | GGGGGCG | 5134 |
| | Fragment 3 | GCCGCG | 5135 |
| | Fragment 4 | TTCGCGCGCCGCCCACCAGGGGGTG | 5136 |
| | Fragment 5 | CTGCG | 5137 |
| | Fragment 6 | CGCCCCCCCCCGCGCAT | 5138 |
| | Fragment 7 | GCGCGGGGCCCCCCCCC | 5139 |
| | Fragment 8 | GGGGGGGCTCCGCCCCCCCGGCCCCCCCCC | 5140 |
| | | GTGCTAAACCCACCGCGCATGCGCGACCAC | |
| | | GCCCCCGCCGCC | |
| TTV-HD23a | Full sequence | CGGCGGCGGCGGCG- | 5141 |
| | | CGCGCGCTGCGCGCGCG--- | |
| | | CGCCGGGGGGGCGCCAGCG- | |
| | | CCCCCCCCCCCGCGCAT | |
| | | GCACGGGTCCCCCCCCCCACGGGGGGCTCC | |
| | | G CCCCCCGGCCCCCCCCC | |
| | Fragment 1 | CGGCGGCGGCGGCG | 5142 |
| | Fragment 2 | CGCGCGCTGCGCGCGCG | 5143 |
| | Fragment 3 | CGCCGGGGGGGCGCCAGCG | 5144 |
| | Fragment 4 | CCCCCCCCCCCGCGCAT | 5145 |
| | Fragment 5 | GCACGGGTCCCCCCCCCCACGGGGGGCTCC | 5146 |
| | | G | |
| | Fragment 6 | CCCCCCGGCCCCCCCCC | 5147 |
| TTV-JA20 | Full sequence | CCGTCGGCGGGGGGGCCGCGCGCTGCGCG | 5148 |
| | | CGCGGCCC- | |
| | | CCGGGGGAGGCACAGCCTCCCCCCCCCGCG | |
| | | CGCATGCGCGCGGGTCCCCCCCCCTCCGGG | |
| | | GGGCTCCGCCCCCCGGCCCCCCCC | |
| | Fragment 1 | CCGTCGGCGGGGGGGCCGCGCGCTGCGCG | 5149 |
| | | CGCGGCCC | |
| | Fragment 2 | CCGGGGGAGGCACAGCCTCCCCCCCCCGCG | 5150 |
| | | CGCATGCGCGCGGGTCCCCCCCCCTCCGGG | |
| | | GGGCTCCGCCCCCCGGCCCCCCCC | |
| TTV-TJN02 | Full sequence | CGGCGGCGGCG-CGCGCGCTACGCGCGCG-- | 5151 |
| | | -CGCCGGGGGG----CTGCCGC- | |
| | | CCCCCCCCCGCGCAT | |
| | | GCGCGGGGCCCCCCCCC- | |
| | | GCGGGGGGCTCCG CCCCCCGGCCCCCC | |
| | Fragment 1 | CGGCGGCGGCG | 5152 |
| | Fragment 2 | CGCGCGCTACGCGCGCG | 5153 |
| | Fragment 3 | CGCCGGGGGG | 5154 |
| | Fragment 4 | CTGCCGC | 5155 |
| | Fragment 5 | CCCCCCCCCGCGCAT | 5156 |
| | Fragment 6 | GCGCGGGGCCCCCCCCC | 5157 |
| | Fragment 7 | GCGGGGGGCTCCG | 5158 |
| | Fragment 8 | CCCCCCGGCCCCCC | 5159 |
| TTV-tth8 | Full sequence | GCCGCCGCGGCGGCGGGGG- | 5160 |
| | | GCGGCGCGCTGCGCGCGCCGCCCAGTAGG | |
| | | GGGAGCCATGCG---CCCCCCCCCGCGCAT | |
| | | GCGCGGGGCCCCCCCCC- | |
| | | GCGGGGGGCTCCG | |
| | | CCCCCCGGCCCCCCCCG | |
| | Fragment 1 | GCCGCCGCGGCGGCGGGGG | 5161 |
| | Fragment 2 | GCGGCGCGCTGCGCGCGCCGCCCAGTAGG | 5162 |
| | | GGGAGCCATGCG | |
| | Fragment 3 | CCCCCCCCCGCGCAT | 5163 |
| | Fragment 4 | GCGCGGGGCCCCCCCCC | 5164 |
| | Fragment 5 | GCGGGGGGCTCCG | 5165 |
| | Fragment 6 | CCCCCCGGCCCCCCCCG | 5166 |
| | Fragment 7 | CGCGCTGCGCGCGCCGCCCAGTAGGGGGA | 5167 |
| | | GCCATGC | |
| | Fragment 8 | CCGCCATCTTAAGTAGTTGAGGCGGACGGT | 5168 |
| | | GGCGTGAGTTCAAAGGTCACCATCAGCCAC | |
| | | ACCTACTCAAAATGGTGG | |
| | Fragment 9 | CTTAAGTAGTTGAGGCGGACGGTGGCGTGA | 5169 |
| | | GTTCAAAGGTCACCATCAGCCACACCTACT | |
| | | CAAAATGGTGGACAATTTCTTCCGGGTCAA | |
| | | AGGTTACAGCCGCCATGTTAAAACACGTGA | |
| | | CGTATGACGTCACGGCCGCCATTTTGTGAC | |
| | | ACAAGATGGCCGACTTCCTTCC | |
| Additional GC-rich | 36-nucleotide | CGCGCTGCGCGCGCCGCCCAGTAGGGGGA | 5170 |
| Sequences (as shown | consensus GC- | GCCATGC | |
| in FIG. 32) | rich region | | |
| | sequence 1 | | |
| | 36-nucleotide | GCGCTX₁CGCGCGCGCGCCGGGGGGCTGCG | 5171 |
| | region | CCCCCCC, wherein X₁ is selected from | |
| | consensus | T, G, or A | |
| | sequence 2 | | |
| | TTV Clade 1 | GCGCTTCGCGCGCCGCCCACTAGGGGGCGT | 5172 |
| | 36-nucleotide | TGCGCG | |
| | region | | |
| | TTV Clade 3 | GCGCTGCGCGCGCCGCCCAGTAGGGGGCG | 5173 |
| | 36-nucleotide | CAATGCG | |
| | region | | |
| | TTV Clade 3 | GCGCTGCGCGCGCGGCCCCCGGGGGAGGC | 5174 |
| | isolate GH1 36- | ATTGCCT | |
| | nucleotide | | |
| | region | | |
| | TTV Clade 3 | GCGCTGCGCGCGCGCGCCGGGGGGGCGCC | 5175 |
| | sle 1932 36- | AGCGCCC | |
| | nucleotide | | |
| | region | | |
| | TTV Clade 4 | GCGCTTCGCGCGCGCGCCGGGGGGCTCCGC | 5176 |
| | ctdc002 36- | CCCCCC | |
| | nucleotide | | |
| | region | | |
| | TTV Clade 5 | GCGCTTCGCGCGCGCGCCGGGGGGCTGCGC | 5177 |
| | 36-nucleotide | CCCCCC | |
| | region | | |
| | TTV Clade 6 | GCGCTACGCGCGCGCGCCGGGGGGCTGCG | 5178 |
| | 36-nucleotide | CCCCCCC | |
| | region | | |
| | TTV Clade 7 | GCGCTACGCGCGCGCGCCGGGGGGCTCTGC | 5179 |
| | 36-nucleotide | CCCCCC | |
| | region | | |
| Additional | TTV-CT30F | GCGGCGGGGGGGCGGCCGCGTTCGCGCGC | 5195 |
| Alphatorquevirus | | CGCCCACCAGGGGGTGCTGCGCGCCCCCCC | |
| GC-rich region | | CCGCGCATGCGCGGGGCCCCCCCCCGGGG | |
| sequences | | GGGCTCCGCCCCCCCGGCCCCCCCCCGTGC | |
| | | TAAACCCACCGCGCATGCGCGACCACGCCC | |
| | | CCGCCGCC | |
| | TTV-P13-1 | CCGAGCGTTAGCGAGGAGTGCGACCCTACC | 5196 |
| | | CCCTGGGCCCACTTCTTCGGAGCCGCGCGC | |
| | | TACGCCTTCGGCTGCGCGCGGCACCTCAGA | |
| | | CCCCCGCTCGTGCTGACACGCTTGCGCGTG | |
| | | TCAGACCACTTCGGGCTCGCGGGGGTCGGG | |
| | TTV-tth8 | GCCGCCGCGGCGGCGGGGGGCGGCGCGCT | 5197 |
| | | GCGCGCGCCGCCCAGTAGGGGGAGCCATG | |
| | | CGCCCCCCCCCGCGCATGCGCGGGGCCCCC | |
| | | CCCCGCGGGGGGCTCCGCCCCCCGGCCCCC | |
| | | CCCG | |
| | TTV-HD20a | CGGCCCAGCGGCGGCGCGCGCGCTTCGCGC | 5198 |
| | | GCGCGCCGGGGGGCTCCGCCCCCCCCCGCG | |
| | | CATGCGCGGGGCCCCCCCCCGCGGGGGGCT | |
| | | CCGCCCCCCGGTCCCCCCCCG | |
| | TTV-16 | CGGCCGTGCGGCGGCGCGCGCGCTTCGCGC | 5199 |
| | | GCGCGCCGGGGGCTGCCGCCCCCCCCCGCG | |
| | | CATGCGCGCGGGGCCCCCCCCCGCGGGGG | |
| | | GCTCCGCCCCCCGGCCCCCCCCCCCG | |
| | TTV-TJN02 | CGGCGGCGGCGCGCGCGCTACGCGCGCGC | 5200 |
| | | GCCGGGGGGCTGCCGCCCCCCCCCCGCGCA | |
| | | TGCGCGGGGCCCCCCCCCGCGGGGGGCTCC | |
| | | GCCCCCCGGCCCCCC | |
| | TTV-HD16d | GGCGGCGGCGCGCGCGCTACGCGCGCGCG | 5201 |
| | | CCGGGGAGCTCTGCCCCCCCCCGCGCATGC | |
| | | GCGCGGGTCCCCCCCCCGCGGGGGGCTCCG | |
| | | CCCCCCGGTCCCCCCCCCG | |

[0432] In some embodiments, the genetic element comprises a nucleic acid sequence having at least about 70%, 75%, 80%, 85%, 90%, 95%, 96%, 97%, 98%, 99%, or 100% sequence identity to the Anellovirus GC-rich nucleotide sequence of any of Tables N1-N1417.

### Effector

[0433] In some embodiments, the genetic element may include one or more sequences that encode a functional effector, e.g., an endogenous effector or an exogenous effector, e.g., a therapeutic polypeptide or nucleic acid, e.g., cytotoxic or cytolytic RNA or protein. In some embodiments, the functional nucleic acid is a non-coding RNA. In some embodiments, the functional nucleic acid is a coding RNA. The effector may modulate a biological activity, for example increasing or decreasing enzymatic activity, gene expression, cell signaling, and cellular or organ function. Effector activities may also include binding regulatory proteins to modulate activity of the regulator, such as transcription or translation. Effector activities also may include activator or inhibitor functions. For example, the effector may induce enzymatic activity by triggering increased substrate affinity in an enzyme, e.g., fructose 2,6-bisphosphate activates phosphofructokinase 1 and increases the rate of glycolysis in response to the insulin. In another example, the effector may inhibit substrate binding to a receptor and inhibit its activation, e.g., naltrexone and naloxone bind opioid receptors without activating them and block the receptors' ability to bind opioids. Effector activities may also include modulating protein stability/degradation and/or transcript stability/degradation. For example, proteins may be targeted for degradation by the polypeptide co-factor, ubiquitin, onto proteins to mark them for degradation. In another example, the effector inhibits enzymatic activity by blocking the enzyme's active site, e.g., methotrexate is a structural analog of tetrahydrofolate, a coenzyme for the enzyme dihydrofolate reductase that binds to dihydrofolate reductase 1000-fold more tightly than the natural substrate and inhibits nucleotide base synthesis.

[0434] In some embodiments, the sequence encoding an effector is part of the genetic element, e.g., it can be inserted at an insert site as described in Example 10, 12, or 22. In some embodiments, the sequence encoding an effector is inserted into the genetic element at a noncoding region, e.g., a noncoding region disposed 3′ of the open reading frames and 5′ of the GC-rich region of the genetic element, in the 5′ noncoding region upstream of the TATA box, in the 5′ UTR, in the 3′ noncoding region downstream of the poly-A signal, or upstream of the GC-rich region. In some embodiments, the sequence encoding an effector is inserted into the genetic element at about nucleotide 3588 of a TTV-tth8 plasmid, e.g., as described herein or at about nucleotide 2843 of a TTMV-LY2 plasmid, e.g., as described herein. In some embodiments, the sequence encoding an effector is inserted into the genetic element at or within nucleotides 336-3015 of a TTV-tth8 plasmid, e.g., as described herein, or at or within nucleotides 242-2812 of a TTV-LY2 plasmid, e.g., as described herein. In some embodiments, the sequence encoding an effector replaces part or all of an open reading frame (e.g., an ORF as described herein, e.g., an ORF1, ORF1/1, ORF1/2, ORF2, ORF2/2, ORF2/3, and/or ORF2t/3 as shown in any of Tables A1-A1417 or N1-N1417).

[0435] In some embodiments, the sequence encoding an effector comprises 100-2000, 100-1000, 100-500, 100-200, 200-2000, 200-1000, 200-500, 500-1000, 500-2000, or 1000-2000 nucleotides. In some embodiments, the effector is a nucleic acid or protein payload, e.g., as described in Example 11.

### Regulatory Nucleic Acid

[0436] In some embodiments, the effector is a regulatory nucleic acid. Regulatory nucleic acids modify expression of an endogenous gene and/or an exogenous gene. In one embodiment, the regulatory nucleic acid targets a host gene. The regulatory nucleic acids may include, but are not limited to, a nucleic acid that hybridizes to an endogenous gene (e.g., miRNA, siRNA, mRNA, lncRNA, RNA, DNA, an antisense RNA, gRNA as described herein elsewhere), nucleic acid that hybridizes to an exogenous nucleic acid such as a viral DNA or RNA, nucleic acid that hybridizes to an RNA, nucleic acid that interferes with gene transcription, nucleic acid that interferes with RNA translation, nucleic acid that stabilizes RNA or destabilizes RNA such as through targeting for degradation, and nucleic acid that modulates a DNA or RNA binding factor. In some embodiments, the regulatory nucleic acid encodes an miRNA.

[0437] In some embodiments, the regulatory nucleic acid comprises RNA or RNA-like structures typically containing 5-500 base pairs (depending on the specific RNA structure, e.g., miRNA 5-30 bps, lncRNA 200-500 bps) and may have a nucleobase sequence identical (or complementary) or nearly identical (or substantially complementary) to a coding sequence in an expressed target gene within the cell, or a sequence encoding an expressed target gene within the cell.

[0438] In some embodiments, the regulatory nucleic acid comprises a nucleic acid sequence, e.g., a guide RNA (gRNA). In some embodiments, the DNA targeting moiety comprises a guide RNA or nucleic acid encoding the guide RNA. A gRNA short synthetic RNA can be composed of a “scaffold” sequence necessary for binding to the incomplete effector moiety and a user-defined ˜20 nucleotide targeting sequence for a genomic target. In practice, guide RNA sequences are generally designed to have a length of between 17-24 nucleotides (e.g., 19, 20, or 21 nucleotides) and complementary to the targeted nucleic acid sequence. Custom gRNA generators and algorithms are available commercially for use in the design of effective guide RNAs. Gene editing has also been achieved using a chimeric “single guide RNA” (“sgRNA”), an engineered (synthetic) single RNA molecule that mimics a naturally occurring crRNA-tracrRNA complex and contains both a tracrRNA (for binding the nuclease) and at least one crRNA (to guide the nuclease to the sequence targeted for editing). Chemically modified sgRNAs have also been demonstrated to be effective in genome editing; see, for example, Hendel et al. (2015) Nature Biotechnol., 985-991.

[0439] The regulatory nucleic acid comprises a gRNA that recognizes specific DNA sequences (e.g., sequences adjacent to or within a promoter, enhancer, silencer, or repressor of a gene).

[0440] Certain regulatory nucleic acids can inhibit gene expression through the biological process of RNA interference (RNAi). RNAi molecules comprise RNA or RNA-like structures typically containing 15-50 base pairs (such as about 18-25 base pairs) and having a nucleobase sequence identical (complementary) or nearly identical (substantially complementary) to a coding sequence in an expressed target gene within the cell. RNAi molecules include, but are not limited to: short interfering RNAs (siRNAs), double-strand RNAs (dsRNA), micro RNAs (miRNAs), short hairpin RNAs (shRNA), meroduplexes, and dicer substrates (U.S. Pat. Nos. 8,084,599 8,349,809 and 8,513,207).

[0441] Long non-coding RNAs (lncRNA) are defined as non-protein coding transcripts longer than 100 nucleotides. This somewhat arbitrary limit distinguishes lncRNAs from small regulatory RNAs such as microRNAs (miRNAs), short interfering RNAs (siRNAs), and other short RNAs. In general, the majority (˜78%) of lncRNAs are characterized as tissue-specific. Divergent lncRNAs that are transcribed in the opposite direction to nearby protein-coding genes (comprise a significant proportion ˜20% of total lncRNAs in mammalian genomes) may possibly regulate the transcription of the nearby gene.

[0442] The genetic element may encode regulatory nucleic acids with a sequence substantially complementary, or fully complementary, to all or a fragment of an endogenous gene or gene product (e.g., mRNA). The regulatory nucleic acids may complement sequences at the boundary between introns and exons to prevent the maturation of newly-generated nuclear RNA transcripts of specific genes into mRNA for transcription. The regulatory nucleic acids that are complementary to specific genes can hybridize with the mRNA for that gene and prevent its translation. The antisense regulatory nucleic acid can be DNA, RNA, or a derivative or hybrid thereof.

[0443] The length of the regulatory nucleic acid that hybridizes to the transcript of interest may be between 5 to 30 nucleotides, between about 10 to 30 nucleotides, or about 11, 12, 13, 14, 15, 16, 17, 18, 19, 20, 21, 22, 23, 24, 25, 26, 27, 28, 29, 30 or more nucleotides. The degree of identity of the regulatory nucleic acid to the targeted transcript should be at least 75%, at least 80%, at least 85%, at least 90%, or at least 95%.

[0444] The genetic element may encode a regulatory nucleic acid, e.g., a micro RNA (miRNA) molecule identical to about 5 to about 25 contiguous nucleotides of a target gene. In some embodiments, the miRNA sequence targets a mRNA and commences with the dinucleotide AA, comprises a GC-content of about 30-70% (about 30-60%, about 40-60%, or about 45%-55%), and does not have a high percentage identity to any nucleotide sequence other than the target in the genome of the mammal in which it is to be introduced, for example as determined by standard BLAST search.

[0445] In some embodiments, the regulatory nucleic acid is at least one miRNA, e.g., 2, 3, 4, 5, 6, or more. In some embodiments, the genetic element comprises a sequence that encodes an miRNA at least about 75%, 80%, 85%, 90% 95%, 96%, 97%, 98%, 99% or 100% nucleotide sequence identity to any one of the nucleotide sequences or a sequence that is complementary to a sequence described herein.

[0446] siRNAs and shRNAs resemble intermediates in the processing pathway of the endogenous microRNA (miRNA) genes (Bartel, Cell 116:281-297, 2004). In some embodiments, siRNAs can function as miRNAs and vice versa (Zeng et al., Mol Cell 9:1327-1333, 2002; Doench et al., Genes Dev 17:438-442, 2003). MicroRNAs, like siRNAs, use RISC to downregulate target genes, but unlike siRNAs, most animal miRNAs do not cleave the mRNA. Instead, miRNAs reduce protein output through translational suppression or polyA removal and mRNA degradation (Wu et al., Proc Natl Acad Sci USA 103:4034-4039, 2006). Known miRNA binding sites are within mRNA 3′ UTRs; miRNAs seem to target sites with near-perfect complementarity to nucleotides 2-8 from the miRNA's 5′ end (Rajewsky, Nat Genet 38 Suppl:S8-13, 2006; Lim et al., Nature 433:769-773, 2005). This region is known as the seed region. Because siRNAs and miRNAs are interchangeable, exogenous siRNAs downregulate mRNAs with seed complementarity to the siRNA (Birmingham et al., Nat Methods 3:199-204, 2006. Multiple target sites within a 3′ UTR give stronger downregulation (Doench et al., Genes Dev 17:438-442, 2003).

[0447] Lists of known miRNA sequences can be found in databases maintained by research organizations, such as Wellcome Trust Sanger Institute, Penn Center for Bioinformatics, Memorial Sloan Kettering Cancer Center, and European Molecule Biology Laboratory, among others. Known effective siRNA sequences and cognate binding sites are also well represented in the relevant literature. RNAi molecules are readily designed and produced by technologies known in the art. In addition, there are computational tools that increase the chance of finding effective and specific sequence motifs (Lagana et al., Methods Mol. Bio., 2015, 1269:393-412).

[0448] The regulatory nucleic acid may modulate expression of RNA encoded by a gene. Because multiple genes can share some degree of sequence homology with each other, in some embodiments, the regulatory nucleic acid can be designed to target a class of genes with sufficient sequence homology. In some embodiments, the regulatory nucleic acid can contain a sequence that has complementarity to sequences that are shared amongst different gene targets or are unique for a specific gene target. In some embodiments, the regulatory nucleic acid can be designed to target conserved regions of an RNA sequence having homology between several genes thereby targeting several genes in a gene family (e.g., different gene isoforms, splice variants, mutant genes, etc.). In some embodiments, the regulatory nucleic acid can be designed to target a sequence that is unique to a specific RNA sequence of a single gene.

[0449] In some embodiments, the genetic element may include one or more sequences that encode regulatory nucleic acids that modulate expression of one or more genes.

[0450] In one embodiment, the gRNA described elsewhere herein are used as part of a CRISPR system for gene editing. For the purposes of gene editing, the anellovector may be designed to include one or multiple guide RNA sequences corresponding to a desired target DNA sequence; see, for example, Cong et al. (2013) Science, 339:819-823; Ran et al. (2013) Nature Protocols, 8:2281-2308. At least about 16 or 17 nucleotides of gRNA sequence generally allow for Cas9-mediated DNA cleavage to occur; for Cpf1 at least about 16 nucleotides of gRNA sequence is needed to achieve detectable DNA cleavage.

### Therapeutic Effectors (e.g., Peptides or Polypeptides)

[0451] In some embodiments, the genetic element comprises a therapeutic expression sequence, e.g., a sequence that encodes a therapeutic peptide or polypeptide, e.g., an intracellular peptide or intracellular polypeptide, a secreted polypeptide, or a protein replacement therapeutic. In some embodiments, the genetic element includes a sequence encoding a protein e.g., a therapeutic protein. Some examples of therapeutic proteins may include, but are not limited to, a hormone, a cytokine, an enzyme, an antibody (e.g., one or a plurality of polypeptides encoding at least a heavy chain or a light chain), a transcription factor, a receptor (e.g., a membrane receptor), a ligand, a membrane transporter, a secreted protein, a peptide, a carrier protein, a structural protein, a nuclease, or a component thereof.

[0452] In some embodiments, the genetic element includes a sequence encoding a peptide e.g., a therapeutic peptide. The peptides may be linear or branched. The peptide has a length from about 5 to about 500 amino acids, about 15 to about 400 amino acids, about 20 to about 325 amino acids, about 25 to about 250 amino acids, about 50 to about 200 amino acids, or any range there between.

[0453] In some embodiments, the polypeptide encoded by the therapeutic expression sequence may be a functional variant or fragment thereof of any of the above, e.g., a protein having at least 80%, 85%, 90%, 95%, 967%, 98%, 99% identity to a protein sequence which disclosed in a table herein by reference to its UniProt ID.

[0454] In some embodiments, the therapeutic expression sequence may encode an antibody or antibody fragment that binds any of the above, e.g., an antibody against a protein having at least 80%, 85%, 90%, 95%, 967%, 98%, 99% identity to a protein sequence which disclosed in a table herein by reference to its UniProt ID. The term “antibody” herein is used in the broadest sense and encompasses various antibody structures, including but not limited to monoclonal antibodies, polyclonal antibodies, multispecific antibodies (e.g., bispecific antibodies), and antibody fragments so long as they exhibit the desired antigen-binding activity. An “antibody fragment” refers to a molecule that includes at least one heavy chain or light chain and binds an antigen. Examples of antibody fragments include but are not limited to Fv, Fab, Fab′, Fab′-SH, F(ab′)₂; diabodies; linear antibodies; single-chain antibody molecules (e.g. scFv); and multispecific antibodies formed from antibody fragments.

### Exemplary Intracellular Polypeptide Effectors

[0455] In some embodiments, the effector comprises a cytosolic polypeptide or cytosolic peptide. In some embodiments, the effector comprises cytosolic peptide is a DPP-4 inhibitor, an activator of GLP-1 signaling, or an inhibitor of neutrophil elastase. In some embodiments, the effector increases the level or activity of a growth factor or receptor thereof (e.g., an FGF receptor, e.g., FGFR3). In some embodiments, the effector comprises an inhibitor of n-myc interacting protein activity (e.g., an n-myc interacting protein inhibitor); an inhibitor of EGFR activity (e.g., an EGFR inhibitor); an inhibitor of IDH1 and/or IDH2 activity (e.g., an IDH1 inhibitor and/or an IDH2 inhibitor); an inhibitor of LRP5 and/or DKK2 activity (e.g., an LRP5 and/or DKK2 inhibitor); an inhibitor of KRAS activity; an activator of HTT activity; or inhibitor of DPP-4 activity (e.g., a DPP-4 inhibitor).

[0456] In some embodiments, the effector comprises a regulatory intracellular polyeptpide. In some embodiments, the regulatory intracellular polypeptide binds one or more molecule (e.g., protein or nucleic acid) endogenous to the target cell. In some embodiments, the regulatory intracellular polypeptide increases the level or activity of one or more molecule (e.g., protein or nucleic acid) endogenous to the target cell. In some embodiments, the regulatory intracellular polypeptide decreases the level or activity of one or more molecule (e.g., protein or nucleic acid) endogenous to the target cell.

### Exemplary Secreted Polypeptide Effectors

[0457] Exemplary secreted therapeutics are described herein, e.g., in the tables below.

TABLE 50
Exemplary cytokines and cytokine receptors

| Cytokine | Cytokine receptor(s) | Entrez Gene ID | UniProt ID |
|---|---|---|---|
| IL-1α, IL-1β, or a | IL-1 type 1 receptor, IL-1 type | 3552, 3553 | P01583, P01584 |
| heterodimer thereof | 2 receptor | | |
| IL-1Ra | IL-1 type 1 receptor, IL-1 type | 3454, 3455 | P17181, P48551 |
| | 2 receptor | | |
| IL-2 | IL-2R | 3558 | P60568 |
| IL-3 | IL-3 receptor α + β c (CD131) | 3562 | P08700 |
| IL-4 | IL-4R type I, IL-4R type II | 3565 | P05112 |
| IL-5 | IL-5R | 3567 | P05113 |
| IL-6 | IL-6R (sIL-6R) gp130 | 3569 | P05231 |
| IL-7 | IL-7R and sIL-7R | 3574 | P13232 |
| IL-8 | CXCR1 and CXCR2 | 3576 | P10145 |
| IL-9 | IL-9R | 3578 | P15248 |
| IL-10 | IL-10R1/IL-10R2 complex | 3586 | P22301 |
| IL-11 | IL-11Rα 1 gp130 | 3589 | P20809 |
| IL-12 (e.g., p35, p40, or a | IL-12Rβ1 and IL-12Rβ2 | 3593, 3592 | P29459, P29460 |
| heterodimer thereof) | | | |
| IL-13 | IL-13R1α1 and IL-13R1α2 | 3596 | P35225 |
| IL-14 | IL-14R | 30685 | P40222 |
| IL-15 | IL-15R | 3600 | P40933 |
| IL-16 | CD4 | 3603 | Q14005 |
| IL-17A | IL-17RA | 3605 | Q16552 |
| IL-17B | IL-17RB | 27190 | Q9UHF5 |
| IL-17C | IL-17RA to IL-17RE | 27189 | Q9P0M4 |
| e | SEF | 53342 | Q8TAD2 |
| IL-17F | IL-17RA, IL-17RC | 112744 | Q96PD4 |
| IL-18 | IL-18 receptor | 3606 | Q14116 |
| IL-19 | IL-20R1/IL-20R2 | 29949 | Q9UHD0 |
| IL-20 | L-20R1/IL-20R2 and IL-22R1/ | 50604 | Q9NYY1 |
| | IL-20R2 | | |
| IL-21 | IL-21R | 59067 | Q9HBE4 |
| IL-22 | IL-22R | 50616 | Q9GZX6 |
| IL-23 (e.g., p19, p40, or a | IL-23R | 51561 | Q9NPF7 |
| heterodimer thereof) | | | |
| IL-24 | IL-20R1/IL-20R2 and IL- | 11009 | Q13007 |
| | 22R1/IL-20R2 | | |
| IL-25 | IL-17RA and IL-17RB | 64806 | Q9H293 |
| IL-26 | IL-10R2 chain and IL-20R1 | 55801 | Q9NPH9 |
| | chain | | |
| IL-27 (e.g., p28, EBI3, or | WSX-1 and gp130 | 246778 | Q8NEV9 |
| a heterodimer thereof) | | | |
| IL-28A, IL-28B, and IL29 | IL-28R1/IL-10R2 | 282617, 282618 | Q8IZI9, Q8IU54 |
| IL-30 | IL6R/gp130 | 246778 | Q8NEV9 |
| IL-31 | IL-31RA/OSMRβ | 386653 | Q6EBC2 |
| IL-32 | | 9235 | P24001 |
| IL-33 | ST2 | 90865 | O95760 |
| IL-34 | Colony-stimulating factor 1 | 146433 | Q6ZMJ4 |
| | receptor | | |
| IL-35 (e.g., p35, EBI3, or | IL-12Rβ2/gp130; IL- | 10148 | Q14213 |
| a heterodimer thereof) | 12Rβ2/IL-12Rβ2; | | |
| | gp130/gp130 | | |
| IL-36 | IL-36Ra | 27179 | Q9UHA7 |
| IL-37 | IL-18Rα and IL-18BP | 27178 | Q9NZH6 |
| IL-38 | IL-1R1, IL-36R | 84639 | Q8WWZ1 |
| IFN-α | IFNAR | 3454 | P17181 |
| IFN-β | IFNAR | 3454 | P17181 |
| IFN-γ | IFNGR1/IFNGR2 | 3459 | P15260 |
| TGF-β | TβR-I and TβR-II | 7046, 7048 | P36897, P37173 |
| TNF-α | TNFR1, TNFR2 | 7132, 7133 | P19438, P20333 |

[0458] In some embodiments, an effector described herein comprises a cytokine of Table 50, or a functional variant thereof, e.g., a homolog (e.g., ortholog or paralog) or fragment thereof. In some embodiments, an effector described herein comprises a protein having at least 80%, 85%, 90%, 95%, 967%, 98%, 99% sequence identity to an amino acid sequence listed in Table 50 by reference to its UniProt ID. In some embodiments, the functional variant binds to the corresponding cytokine receptor with a Kd of no more than 10%, 20%, 30%, 40%, or 50% higher or lower than the Kd of the corresponding wild-type cytokine for the same receptor under the same conditions. In some embodiments, the effector comprises a fusion protein comprising a first region (e.g., a cytokine polypeptide of Table 50 or a functional variant or fragment thereof) and a second, heterologous region. In some embodiments, the first region is a first cytokine polypeptide of Table 50. In some embodiments, the second region is a second cytokine polypeptide of Table 50, wherein the first and second cytokine polypeptides form a cytokine heterodimer with each other in a wild-type cell. In some embodiments, the polypeptide of Table 50 or functional variant thereof comprises a signal sequence, e.g., a signal sequence that is endogenous to the effector, or a heterologous signal sequence. In some embodiments, an anellovector encoding a cytokine of Table 50, or a functional variant thereof, is used for the treatment of a disease or disorder described herein.

[0459] In some embodiments, an effector described herein comprises an antibody molecule (e.g., an scFv) that binds a cytokine of Table 50. In some embodiments, an effector described herein comprises an antibody molecule (e.g., an scFv) that binds a cytokine receptor of Table 50. In some embodiments, the antibody molecule comprises a signal sequence.

[0460] Exemplary cytokines and cytokine receptors are described, e.g., in Akdis et al., “Interleukins (from IL-1 to IL-38), interferons, transforming growth factor β, and TNF-α; Receptors, functions, and roles in diseases” October 2016 Volume 138, Issue 4, Pages 984-1010, which is herein incorporated by reference in its entirety, including Table I therein.

TABLE 51
Exemplary polypeptide hormones and receptors

| Hormone | Receptor | Entrez Gene ID | UniProt ID |
|---|---|---|---|
| Natriuretic Peptide, e.g., Atrial | NPRA, NPRB, NPRC | 4878 | P01160 |
| Natriuretic Peptide (ANP) | | | |
| Brain Natriuretic Peptide (BNP) | NPRA, NPRB | 4879 | P16860 |
| C-type natriuretic peptide | NPRB | 4880 | P23582 |
| (CNP) | | | |
| Growth hormone (GH) | GHR | 2690 | P10912 |
| Human growth hormone (hGH) | hGH receptor (human | 2690 | P10912 |
| | GHR) | | |
| Prolactin (PRL) | PRLR | 5617 | P01236 |
| Thyroid-stimulating hormone | TSH receptor | 7253 | P16473 |
| (TSH) | | | |
| Adrenocorticotropic hormone | ACTH receptor | 5443 | P01189 |
| (ACTH) | | | |
| Follicle-stimulating hormone | FSHR | 2492 | P23945 |
| (FSH) | | | |
| Luteinizing hormone (LH) | LHR | 3973 | P22888 |
| Antidiuretic hormone (ADH) | Vasopressin receptors, e.g., | 554 | P30518 |
| | V2; AVPR1A; AVPR1B; | | |
| | AVPR3; AVPR2 | | |
| Oxytocin | OXTR | 5020 | P01178 |
| Calcitonin | Calcitonin receptor (CT) | 796 | P01258 |
| Parathyroid hormone (PTH) | PTH1R and PTH2R | 5741 | P01270 |
| Insulin | Insulin receptor (IR) | 3630 | P01308 |
| Glucagon | Glucagon receptor | 2641 | P01275 |

[0461] In some embodiments, an effector described herein comprises a hormone of Table 51, or a functional variant thereof, e.g., a homolog (e.g., ortholog or paralog) or fragment thereof. In some embodiments, an effector described herein comprises a protein having at least 80%, 85%, 90%, 95%, 967%, 98%, 99% sequence identity to an amino acid sequence listed in Table 51 by reference to its UniProt ID. In some embodiments, the functional variant binds to the corresponding receptor with a Kd of no more than 10%, 20%, 30%, 40%, or 50% higher than the Kd of the corresponding wild-type hormone for the same receptor under the same conditions. In some embodiments, the polypeptide of Table 51 or functional variant thereof comprises a signal sequence, e.g., a signal sequence that is endogenous to the effector, or a heterologous signal sequence. In some embodiments, an anellovector encoding a hormone of Table 51, or a functional variant thereof, is used for the treatment of a disease or disorder described herein.

[0462] In some embodiments, an effector described herein comprises an antibody molecule (e.g., an scFv) that binds a hormone of Table 51. In some embodiments, an effector described herein comprises an antibody molecule (e.g., an scFv) that binds a hormone receptor of Table 51. In some embodiments, the antibody molecule comprises a signal sequence.

TABLE 52
Exemplary growth factors

| | | |
|---|---|---|
| Growth Factor | Entrez Gene ID | UniProt ID |

PDGF family

| PDGF (e.g., PDGF-1, | PDGF receptor, e.g., | 5156 | P16234 |
|---|---|---|---|
| PDGF-2, or a | PDGFRα, PDGFRβ | | |
| heterodimer thereof) | | | |
| CSF-1 | CSF1R | 1435 | P09603 |
| SCF | CD117 | 3815 | P10721 |
| VEGF family | | | |
| VEGF (e.g., isoforms | VEGFR-1, VEGFR- | 2321 | P17948 |
| VEGF 121, VEGF 165, | 2 | | |
| VEGF 189, and VEGF | | | |
| 206) | | | |
| VEGF-B | VEGFR-1 | 2321 | P17949 |
| VEGF-C | VEGFR-2 and | 2324 | P35916 |
| | VEGFR-3 | | |
| PIGF | VEGFR-1 | 5281 | Q07326 |
| EGF family | | | |
| EGF | EGFR | 1950 | P01133 |
| TGF-α | EGFR | 7039 | P01135 |
| amphiregulin | EGFR | 374 | P15514 |
| HB-EGF | EGFR | 1839 | Q99075 |
| betacellulin | EGFR, ErbB-4 | 685 | P35070 |
| epiregulin | EGFR, ErbB-4 | 2069 | O14944 |
| Heregulin | EGFR, ErbB-4 | 3084 | Q02297 |
| FGF family | | | |
| FGF-1, FGF-2, FGF-3, | FGFR1, FGFR2, | 2246, 2247, 2248, 2249, | P05230, P09038, |
| FGF-4, FGF-5, FGF-6, | FGFR3, and FGFR4 | 2250, 2251, 2252, 2253, | P11487, P08620, |
| FGF-7, FGF-8, FGF-9 | | 2254 | P12034, P10767, |
| | | | P21781, P55075, P31371 |
| Insulin family | | | |
| Insulin | IR | 3630 | P01308 |
| IGF-I | IGF-I receptor, IGF- | 3479 | P05019 |
| | II receptor | | |
| IGF-II | IGF-II receptor | 3481 | P01344 |
| HGF family | | | |
| HGF | MET receptor | 3082 | P14210 |
| MSP | RON | 4485 | P26927 |
| Neurotrophin family | | | |
| NGF | LNGFR, trkA | 4803 | P01138 |
| BDNF | trkB | 627 | P23560 |
| NT-3 | trkA, trkB, trkC | 4908 | P20783 |
| NT-4 | trkA, trkB | 4909 | P34130 |
| NT-5 | trkA, trkB | 4909 | P34130 |
| Angiopoietin family | | | |
| ANGPT1 | HPK-6/TEK | 284 | Q15389 |
| ANGPT2 | HPK-6/TEK | 285 | O15123 |
| ANGPT3 | HPK-6/TEK | 9068 | O95841 |
| ANGPT4 | HPK-6/TEK | 51378 | Q9Y264 |

[0463] In some embodiments, an effector described herein comprises a growth factor of Table 52, or a functional variant thereof, e.g., a homolog (e.g., ortholog or paralog) or fragment thereof. In some embodiments, an effector described herein comprises a protein having at least 80%, 85%, 90%, 95%, 967%, 98%, 99% sequence identity to an amino acid sequence listed in Table 52 by reference to its UniProt ID. In some embodiments, the functional variant binds to the corresponding receptor with a Kd of no more than 10%, 20%, 30%, 40%, or 50% higher than the Kd of the corresponding wild-type growth factor for the same receptor under the same conditions. In some embodiments, the polypeptide of Table 52 or functional variant thereof comprises a signal sequence, e.g., a signal sequence that is endogenous to the effector, or a heterologous signal sequence. In some embodiments, an anellovector encoding a growth factor of Table 52, or a functional variant thereof, is used for the treatment of a disease or disorder described herein.

[0464] In some embodiments, an effector described herein comprises an antibody molecule (e.g., an scFv) that binds a growth factor of Table 52. In some embodiments, an effector described herein comprises an antibody molecule (e.g., an scFv) that binds a growth factor receptor of Table 52. In some embodiments, the antibody molecule comprises a signal sequence.

[0465] Exemplary growth factors and growth factor receptors are described, e.g., in Bafico et al., “Classification of Growth Factors and Their Receptors” Holland-Frei Cancer Medicine. 6th edition, which is herein incorporated by reference in its entirety.

TABLE 53
Clotting-associated factors

| Effector | Indication | Entrez Gene ID | UniProt ID |
|---|---|---|---|
| Factor I | Afibrinogenomia | 2243, 2266, | P02671, P02679, |
| (fibrinogen) | | 2244 | P02675 |
| Factor II | Factor II Deficiency | 2147 | P00734 |
| Factor IX | Hemophilia B | 2158 | P00740 |
| Factor V | Owren′s disease | 2153 | P12259 |
| Factor VIII | Hemophilia A | 2157 | P00451 |
| Factor X | Stuart-Prower Factor | 2159 | P00742 |
| | Deficiency | | |
| Factor XI | Hemophilia C | 2160 | P03951 |
| Factor XIII | Fibrin Stabilizing factor | 2162, 2165 | P00488, P05160 |
| | deficiency | | |
| vWF | von Willebrand disease | 7450 | P04275 |

[0466] In some embodiments, an effector described herein comprises a polypeptide of Table 53, or a functional variant thereof, e.g., a homolog (e.g., ortholog or paralog) or fragment thereof. In some embodiments, an effector described herein comprises a protein having at least 80%, 85%, 90%, 95%, 967%, 98%, 99% sequence identity to an amino acid sequence listed in Table 53 by reference to its UniProt ID. In some embodiments, the functional variant catalyzes the same reaction as the corresponding wild-type protein, e.g., at a rate no less than 10%, 20%, 30%, 40%, or 50% lower than the wild-type protein. In some embodiments, the polypeptide of Table 53 or functional variant thereof comprises a signal sequence, e.g., a signal sequence that is endogenous to the effector, or a heterologous signal sequence. In some embodiments, an anellovector encoding a polypeptide of Table 53, or a functional variant thereof is used for the treatment of a disease or disorder of Table 53.

### Exemplary Protein Replacement Therapeutics

[0467] Exemplary protein replacement therapeutics are described herein, e.g., in the tables below.

TABLE 54
Exemplary enzymatic effectors and corresponding indications

| Effector | deficiency | Entrez Gene ID | UniProt ID |
|---|---|---|---|
| 3-methylcrotonyl-CoA | 3-methylcrotonyl-CoA | 56922, 64087 | Q96RQ3, Q9HCC0 |
| carboxylase | carboxylase deficiency | | |
| Acetyl-CoA- | Mucopolysaccharidosis MPS | 138050 | Q68CP4 |
| glucosaminide N- | III (Sanfilippo′s syndrome) | | |
| acetyltransferase | Type III-C | | |
| ADAMTS13 | Thrombotic | 11093 | Q76LX8 |
| | Thrombocytopenia Purpura | | |
| adenine | Adenine | 353 | P07741 |
| phosphoribosyl- | phosphoribosyltransferase | | |
| transferase | deficiency | | |
| Adenosine deaminase | Adenosine deaminase | 100 | P00813 |
| | deficiency | | |
| ADP-ribose protein | Glutamyl ribose-5-phosphate | 26119, 54936 | Q5SW96, Q9NX46 |
| hydrolase | storage disease | | |
| alpha glucosidase | Glycogen storage disease | 2548 | P10253 |
| | type 2 (Pompe′s disease) | | |
| Arginase | Familial hyperarginemia | 383, 384 | P05089, P78540 |
| Arylsulfatase A | Metachromatic | 410 | P15289 |
| | leukodystrophy | | |
| Cathepsin K | Pycnodysostosis | 1513 | P43235 |
| Ceramidase | Farber′s disease | 125981, 340485, | Q8TDN7, |
| | (lipogranulomatosis) | 55331 | Q5QJU3, Q9NUN7 |
| Cystathionine B | Homocystinuria | 875 | P35520 |
| synthase | | | |
| Dolichol-P-mannose | Congenital disorders of N- | 8813, 54344 | O60762, Q9P2X0 |
| synthase | glycosylation CDG Ie | | |
| Dolicho-P- | Congenital disorders of N- | 84920 | Q5BKT4 |
| Glc:Man9GlcNAc2-PP- | glycosylation CDG Ic | | |
| dolichol | | | |
| glucosyltransferase | | | |
| Dolicho-P- | Congenital disorders of N- | 10195 | Q92685 |
| Man:Man5GlcNAc2- | glycosylation CDG Id | | |
| PP-dolichol | | | |
| mannosyltransferase | | | |
| Dolichyl-P-glucose:Glc- | Congenital disorders of N- | 79053 | Q9BVK2 |
| 1-Man-9-GlcNAc-2-PP- | glycosylation CDG Ih | | |
| dolichyl-α-3- | | | |
| glucosyltransferase | | | |
| Dolichyl-P- | Congenital disorders of N- | 79087 | Q9BV10 |
| mannose:Man-7- | glycosylation CDG Ig | | |
| GlcNAc-2-PP-dolichyl- | | | |
| α-6-mannosyltransferase | | | |
| Factor II | Factor II Deficiency | 2147 | P00734 |
| Factor IX | Hemophilia B | 2158 | P00740 |
| Factor V | Owren′s disease | 2153 | P12259 |
| Factor VIII | Hemophilia A | 2157 | P00451 |
| Factor X | Stuart-Prower Factor | 2159 | P00742 |
| | Deficiency | | |
| Factor XI | Hemophilia C | 2160 | P03951 |
| Factor XIII | Fibrin Stabilizing factor | 2162, 2165 | P00488, P05160 |
| | deficiency | | |
| Galactosamine-6-sulfate | Mucopolysaccharidosis MPS | 2588 | P34059 |
| sulfatase | IV (Morquio′s syndrome) | | |
| | Type IV-A | | |
| Galactosylceramide β- | Krabbe′s disease | 2581 | P54803 |
| galactosidase | | | |
| Ganglioside β- | GM1 gangliosidosis, | 2720 | P16278 |
| galactosidase | generalized | | |
| Ganglioside β- | GM2 gangliosidosis | 2720 | P16278 |
| galactosidase | | | |
| Ganglioside β- | Sphingolipidosis Type I | 2720 | P16278 |
| galactosidase | | | |
| Ganglioside β- | Sphingolipidosis Type II | 2720 | P16278 |
| galactosidase | (juvenile type) | | |
| Ganglioside β- | Sphingolipidosis Type III | 2720 | P16278 |
| galactosidase | (adult type) | | |
| Glucosidase I | Congenital disorders of N- | 2548 | P10253 |
| | glycosylation CDG IIb | | |
| Glucosylceramide β- | Gaucher′s disease | 2629 | P04062 |
| glucosidase | | | |
| Heparan-S-sulfate | Mucopolysaccharidosis MPS | 6448 | P51688 |
| sulfamidase | III (Sanfilippo′s syndrome) | | |
| | Type III-A | | |
| homogentisate oxidase | Alkaptonuria | 3081 | Q93099 |
| Hyaluronidase | Mucopolysaccharidosis MPS | 3373, 8692, 8372, | Q12794, Q12891, |
| | IX (hyaluronidase deficiency) | 23553 | O43820, Q2M3T9 |
| Iduronate sulfate | Mucopolysaccharidosis MPS | 3423 | P22304 |
| sulfatase | II (Hunter′s syndrome) | | |
| Lecithin-cholesterol | Complete LCAT deficiency, | 3931 | 606967 |
| acyltransferase (LCAT) | Fish-eye disease, | | |
| | atherosclerosis, | | |
| | hypercholesterolemia | | |
| Lysine oxidase | Glutaric acidemia type I | 4015 | P28300 |
| Lysosomal acid lipase | Cholesteryl ester storage | 3988 | P38571 |
| | disease (CESD) | | |
| Lysosomal acid lipase | Lysosomal acid lipase | 3988 | P38571 |
| | deficiency | | |
| lysosomal acid lipase | Wolman′s disease | 3988 | P38571 |
| Lysosomal pepstatin- | Ceroid lipofuscinosis Late | 1200 | 014773 |
| insensitive peptidase | infantile form (CLN2, | | |
| | Jansky-Bielschowsky | | |
| | disease) | | |
| Mannose (Man) | Congenital disorders of N- | 4351 | P34949 |
| phosphate (P) isomerase | glycosylation CDG Ib | | |
| Mannosyl-α-1,6- | Congenital disorders of N- | 4247 | Q10469 |
| glycoprotein-β-1,2-N- | glycosylation CDG IIa | | |
| acetylglucosminyltransf | | | |
| erase | | | |
| Metalloproteinase-2 | Winchester syndrome | 4313 | P08253 |
| methylmalonyl-CoA | Methylmalonic acidemia | 4594 | P22033 |
| mutase | (vitamin b12 non-responsive) | | |
| N-Acetyl | Mucopolysaccharidosis MPS | 411 | P15848 |
| galactosamine α-4- | VI (Maroteaux-Lamy | | |
| sulfate sulfatase | syndrome) | | |
| (arylsulfatase B) | | | |
| N-acetyl-D- | Mucopolysaccharidosis MPS | 4669 | P54802 |
| glucosaminidase | III (Sanfilippo′s syndrome) | | |
| | Type III-B | | |
| N-Acetyl- | Schindler′s disease Type I | 4668 | P17050 |
| galactosaminidase | (infantile severe form) | | |
| N-Acetyl- | Schindler′s disease Type II | 4668 | P17050 |
| galactosaminidase | (Kanzaki disease, adult-onset | | |
| | form) | | |
| N-Acetyl- | Schindler′s disease Type III | 4668 | P17050 |
| galactosaminidase | (intermediate form) | | |
| N-acetyl-glucosaminine- | Mucopolysaccharidosis MPS | 2799 | P15586 |
| 6-sulfate sulfatase | III (Sanfilippo′s syndrome) | | |
| | Type III-D | | |
| N-acetylglucosaminyl-1- | Mucolipidosis ML III | 79158 | Q3T906 |
| phosphotransferase | (pseudo-Hurler′s | | |
| | polydystrophy) | | |
| N-Acetylglucosaminyl- | Mucolipidosis ML II (I-cell | 79158 | Q3T906 |
| 1-phosphotransferase | disease) | | |
| catalytic subunit | | | |
| N-acetylglucosaminy1-1- | Mucolipidosis ML III | 84572 | Q9UJJ9 |
| phosphotransferase, | (pseudo-Hurler′s | | |
| substrate-recognition | polydystrophy) Type III-C | | |
| subunit | | | |
| N- | Aspartylglucosaminuria | 175 | P20933 |
| Aspartylglucosaminidase | | | |
| Neuraminidase 1 | Sialidosis | 4758 | Q99519 |
| (sialidase) | | | |
| Palmitoyl-protein | Ceroid lipofuscinosis Adult | 5538 | P50897 |
| thioesterase-1 | form (CLN4, Kufs′ disease) | | |
| Palmitoyl-protein | Ceroid lipofuscinosis | 5538 | P50897 |
| thioesterase-1 | Infantile form (CLN1, | | |
| | Santavuori-Haltia disease) | | |
| Phenylalanine | Phenylketonuria | 5053 | P00439 |
| hydroxylase | | | |
| Phosphomannomutase-2 | Congenital disorders of N- | 5373 | 015305 |
| | glycosylation CDG Ia (solely | | |
| | neurologic and neurologic- | | |
| | multivisceral forms) | | |
| Porphobilinogen | Acute Intermittent Porphyria | 3145 | P08397 |
| deaminase | | | |
| Purine nucleoside | Purine nucleoside | 4860 | P00491 |
| phosphorylase | phosphorylase deficiency | | |
| pyrimidine 5′ | Hemolytic anemia and/or | 51251 | Q9HOPO |
| nucleotidase | pyrimidine 5′ nucleotidase | | |
| | deficiency | | |
| Sphingomyelinase | Niemann-Pick disease type A | 6609 | P17405 |
| Sphingomyelinase | Niemann-Pick disease type B | 6609 | P17405 |
| Sterol 27-hydroxylase | Cerebrotendinous | 1593 | Q02318 |
| | xanthomatosis (cholestanol | | |
| | lipidosis) | | |
| Thymidine | Mitochondrial | 1890 | P19971 |
| phosphorylase | neurogastrointestinal | | |
| | encephalomyopathy | | |
| | (MNGIE) | | |
| Trihexosylceramide α- | Fabry′s disease | 2717 | P06280 |
| galactosidase | | | |
| tyrosinase, e.g., OCA1 | albinism, e.g., ocular albinism | 7299 | P14679 |
| UDP-GlcNAc:dolichyl- | Congenital disorders of N- | 1798 | Q9H3H5 |
| P NAcGlc | glycosylation CDG Ij | | |
| phosphotransferase | | | |
| UDP-N- | Sialuria French type | 10020 | Q9Y223 |
| acetylglucosamine-2- | | | |
| epimerase/N- | | | |
| acetylmannosamine | | | |
| kinase, sialin | | | |
| Uricase | Lesch-Nyhan syndrome, gout | 391051 | No protein |
| uridine diphosphate | Crigler-Najjar syndrome | 54658 | P22309 |
| glucuronyl-transferase | | | |
| (e.g., UGT1A1) | | | |
| α-1,2- | Congenital disorders of N- | 79796 | Q9H6U8 |
| Mannosyltransferase | glycosylation CDG Il | | |
| | (608776) | | |
| α-1,2- | Congenital disorders of N- | 79796 | Q9H6U8 |
| Mannosyltransferase | glycosylation, type I (pre- | | |
| | Golgi glycosylation defects) | | |
| α-1,3- | Congenital disorders of N- | 440138 | Q2TAA5 |
| Mannosyltransferase | glycosylation CDG Ii | | |
| α-D-Mannosidase | α-Mannosidosis, type I | 10195 | Q92685 |
| | (severe) or II (mild) | | |
| α-L-Fucosidase | Fucosidosis | 4123 | Q9NTJ4 |
| α-1-Iduronidase | Mucopolysaccharidosis MPS | 2517 | P04066 |
| | I H/S (Hurler-Scheie | | |
| | syndrome) | | |
| α-1-Iduronidase | Mucopolysaccharidosis MPS | 3425 | P35475 |
| | I-H (Hurler′s syndrome) | | |
| α-1-Iduronidase | Mucopolysaccharidosis MPS | 3425 | P35475 |
| | I-S (Scheie′s syndrome) | | |
| β-1,4- | Congenital disorders of N- | 3425 | P35475 |
| Galactosyltransferase | glycosylation CDG IId | | |
| β-1,4- | Congenital disorders of N- | 2683 | P15291 |
| Mannosyltransferase | glycosylation CDG Ik | | |
| β-D-Mannosidase | β-Mannosidosis | 56052 | Q9BT22 |
| β-Galactosidase | Mucopolysaccharidosis MPS | 4126 | O00462 |
| | IV (Morquio′s syndrome) | | |
| | Type IV-B | | |
| β-Glucuronidase | Mucopolysaccharidosis MPS | 2720 | P16278 |
| | VII (Sly′s syndrome) | | |
| β-Hexosaminidase A | Tay-Sachs disease | 2990 | P08236 |
| β-Hexosaminidase B | Sandhoff′s disease | 3073 | P06865 |

[0468] In some embodiments, an effector described herein comprises an enzyme of Table 54, or a functional variant thereof, e.g., a homolog (e.g., ortholog or paralog) or fragment thereof. In some embodiments, an effector described herein comprises a protein having at least 80%, 85%, 90%, 95%, 967%, 98%, 99% sequence identity to an amino acid sequence listed in Table 54 by reference to its UniProt ID. In some embodiments, the functional variant catalyzes the same reaction as the corresponding wild-type protein, e.g., at a rate no less than 10%, 20%, 30%, 40%, or 50% lower than the wild-type protein. In some embodiments, an anellovector encoding an enzyme of Table 54, or a functional variant thereof is used for the treatment of a disease or disorder of Table 54. In some 10 embodiments, an anellovector is used to deliver uridine diphosphate glucuronyl-transferase or a functional variant thereof to a target cell, e.g., a liver cell. In some embodiments, an anellovector is used to deliver OCA1 or a functional variant thereof to a target cell, e.g., a retinal cell.

TABLE 55
Exemplary non-enzymatic effectors and corresponding indications

| Effector | Indication | Entrez Gene ID | UniProt ID |
|---|---|---|---|
| Survival motor neuron | spinal muscular atrophy | 6606 | Q16637 |
| protein (SMN) | | | |
| Dystrophin or micro- | muscular dystrophy | 1756 | P11532 |
| dystrophin | (e.g., Duchenne | | |
| | muscular dystrophy or | | |
| | Becker muscular | | |
| | dystrophy) | | |
| Complement protein, | Complement Factor I | 3426 | P05156 |
| e.g., Complement | deficiency | | |
| factor C1 | | | |
| Complement factor H | Atypical hemolytic | 3075 | P08603 |
| | uremic syndrome | | |
| Cystinosin (lysosomal | Cystinosis | 1497 | O60931 |
| cystine transporter) | | | |
| Epididymal secretory | Niemann-Pick disease | 10577 | P61916 |
| protein 1 (HE1; NPC2 | Type C2 | | |
| protein) | | | |
| GDP-fucose | Congenital disorders of | 55343 | Q96A29 |
| transporter-1 | N-glycosylation CDG | | |
| | IIc (Rambam-Hasharon | | |
| | syndrome) | | |
| GM2 activator protein | GM2 activator protein | 2760 | Q17900 |
| | deficiency (Tay-Sachs | | |
| | disease AB variant, | | |
| | GM2A) | | |
| Lysosomal | Ceroid lipofuscinosis | 1207 | Q13286 |
| transmembrane CLN3 | Juvenile form (CLN3, | | |
| protein | Batten disease, Vogt- | | |
| | Spielmeyer disease) | | |
| Lysosomal | Ceroid lipofuscinosis | 1203 | O75503 |
| transmembrane CLN5 | Variant late infantile | | |
| protein | form, Finnish type | | |
| | (CLN5) | | |
| Na phosphate | Infantile sialic acid | 26503 | Q9NRA2 |
| cotransporter, sialin | storage disorder | | |
| Na phosphate | Sialuria Finnish type | 26503 | Q9NRA2 |
| cotransporter, sialin | (Salla disease) | | |
| NPC1 protein | Niemann-Pick disease | 4864 | O15118 |
| | Type C1/Type D | | |
| Oligomeric Golgi | Congenital disorders of | 91949 | P83436 |
| complex-7 | N-glycosylation CDG | | |
| | Ile | | |
| Prosaposin | Prosaposin deficiency | 5660 | P07602 |
| Protective | Galactosialidosis | 5476 | P10619 |
| protein/cathepsin A | (Goldberg′s syndrome, | | |
| (PPCA) | combined | | |
| | neuraminidase and β- | | |
| | galactosidase | | |
| | deficiency) | | |
| Protein involved in | Congenital disorders of | 9526 | O75352 |
| mannose-P-dolichol | N-glycosylation CDG If | | |
| utilization | | | |
| Saposin B | Saposin B deficiency | 5660 | P07602 |
| | (sulfatide activator | | |
| | deficiency) | | |
| Saposin C | Saposin C deficiency | 5660 | P07602 |
| | (Gaucher′s activator | | |
| | deficiency) | | |
| Sulfatase-modifying | Mucosulfatidosis | 285362 | Q8NBK3 |
| factor-1 | (multiple sulfatase | | |
| | deficiency) | | |
| Transmembrane | Ceroid lipofuscinosis | 54982 | Q9NWW5 |
| CLN6 protein | Variant late infantile | | |
| | form (CLN6) | | |
| Transmembrane | Ceroid lipofuscinosis | 2055 | Q9UBY8 |
| CLN8 protein | Progressive epilepsy | | |
| | with intellectual | | |
| | disability | | |
| vWF | von Willebrand disease | 7450 | P04275 |
| Factor I (fibrinogen) | Afibrinogenomia | 2243, 2244, | P02671, P02675, |
| | | 2266 | P02679 |
| erythropoietin (hEPO) | | | |

[0469] In some embodiments, an effector described herein comprises an erythropoietin (EPO), e.g., a human erythropoietin (hEPO), or a functional variant thereof. In some embodiments, an anellovector encoding an erythropoietin, or a functional variant thereof is used for stimulating erythropoiesis. In some embodiments, an anellovector encoding an erythropoietin, or a functional variant thereof is used for the treatment of a disease or disorder, e.g., anemia. In some embodiments, an anellovector is used to deliver EPO or a functional variant thereof to a target cell, e.g., a red blood cell.

[0470] In some embodiments, an effector described herein comprises a polypeptide of Table 55, or a functional variant thereof, e.g., a homolog (e.g., ortholog or paralog) or fragment thereof. In some embodiments, an effector described herein comprises a protein having at least 80%, 85%, 90%, 95%, 967%, 98%, 99% sequence identity to an amino acid sequence listed in Table 55 by reference to its UniProt ID. In some embodiments, an anellovector encoding a polypeptide of Table 55, or a functional variant thereof is used for the treatment of a disease or disorder of Table 55. In some embodiments, an anellovector is used to deliver SMN or a functional variant thereof to a target cell, e.g., a cell of the spinal cord and/or a motor neuron. In some embodiments, an anellovector is used to deliver a micro-dystrophin to a target cell, e.g., a myocyte.

[0471] Exemplary micro-dystrophins are described in Duan, “Systemic AAV Micro-dystrophin Gene Therapy for Duchenne Muscular Dystrophy.” Mol Ther. 2018 Oct. 3:26(10): 2337-2356. doi: 10.1016/j.ymthe.2018.07.011. Epub 2018 Jul. 17.

[0472] In some embodiments, an effector described herein comprises a clotting factor, e.g., a clotting factor listed in Table 54 or Table 55 herein. In some embodiments, an effector described herein comprises a protein that, when mutated, causes a lysosomal storage disorder, e.g., a protein listed in Table 54 or Table 55 herein. In some embodiments, an effector described herein comprises a transporter protein, e.g., a transporter protein listed in Table 55 herein.

[0473] In some embodiments, a functional variant of a wild-type protein comprises a protein that has one or more activities of the wild-type protein, e.g., the functional variant catalyzes the same reaction as the corresponding wild-type protein, e.g., at a rate no less than 10%, 20%, 30%, 40%, or 50% lower than the wild-type protein. In some embodiments, the functional variant binds to the same binding partner that is bound by the wild-type protein, e.g., with a Kd of no more than 10%, 20%, 30%, 40%, or 50% higher than the Kd of the corresponding wild-type protein for the same binding partner under the same conditions. In some embodiments, the functional variant has at a polyeptpide sequence at least 70%, 75%, 80%, 85%, 90%, 95%, 96%, 97%, 98%, or 99% identical to that of the wild-type polypeptide. In some embodiments, the functional variant comprises a homolog (e.g., ortholog or paralog) of the corresponding wild-type protein. In some embodiments, the functional variant is a fusion protein. In some embodiments, the fusion comprises a first region with at least 70%, 75%, 80%, 85%, 90%, 95%, 96%, 97%, 98%, or 99% identity to the corresponding wild-type protein, and a second, heterologous region. In some embodiments, the functional variant comprises or consists of a fragment of the corresponding wild-type protein.

### Regeneration, Repair, and Fibrosis Factors

[0474] Therapeutic polypeptides described herein also include growth factors, e.g., as disclosed in Table 56, or functional variants thereof, e.g., a protein having at least 80%, 85%, 90%, 95%, 967%, 98%, 99% identity to a protein sequence disclosed in Table 56 by reference to its UniProt ID. Also included are antibodies or fragments thereof against such growth factors, or miRNAs that promote regeneration and repair.

TABLE 56
Exemplary regeneration, repair, and fibrosis factors

| Target | Gene accession # | Protein accession # |
|---|---|---|
| VEGF-A | NG_008732 | NP_001165094 |
| NRG-1 | NG_012005 | NP_001153471 |
| FGF2 | NG_029067 | NP_001348594 |
| FGF1 | Gene ID: 2246 | NP_001341882 |
| miR-199-3p | MIMAT0000232 | |
| miR-590-3p | MIMAT0004801 | |
| mi-17-92 | MI0000071 | https://www.ncbi.nlm.nih.gov/pmc/ |
| | | articles/PMC2732113/figure/F1/ |
| miR-222 | MI0000299 | |
| miR-302-367 | MIR302A And | https://www.ncbi.nlm.nih.gov/pmc/ |
| | MIR367 | articles/PMC4400607/ |

### Transformation Factors

[0475] Therapeutic polypeptides described herein also include transformation factors, e.g., protein factors that transform fibroblasts into differentiated cell e.g., factors disclosed in Table 57 or functional variants thereof, .g., a protein having at least 80%, 85%, 90%, 95%, 967%, 98%, 99% identity to a protein sequence disclosed in Table 57 by reference to its UniProt ID.

TABLE 57
Exemplary transformation factors

| | | Gene | Protein |
|---|---|---|---|
| Target | Indication | accession # | accession # |
| MESP1 | Organ Repair by | Gene ID: 55897 | EAX02066 |
| | transforming fibroblasts | | |
| ETS2 | Organ Repair by | GeneID: 2114 | NP_005230 |
| | transforming fibroblasts | | |
| HAND2 | Organ Repair by | GeneID: 9464 | NP_068808 |
| | transforming fibroblasts | | |
| MYOCARDIN | Organ Repair by | GeneID: 93649 | NP_001139784 |
| | transforming fibroblasts | | |
| ESRRA | Organ Repair by | Gene ID: 2101 | AAH92470 |
| | transforming fibroblasts | | |
| miR-1 | Organ Repair by | MI0000651 | n/a |
| | transforming fibroblasts | | |
| miR-133 | Organ Repair by | MI0000450 | n/a |
| | transforming fibroblasts | | |
| TGFb | Organ Repair by | GeneID: 7040 | NP_000651.3 |
| | transforming fibroblasts | | |
| WNT | Organ Repair by | Gene ID: 7471 | NP_005421 |
| | transforming fibroblasts | | |
| JAK | Organ Repair by | Gene ID: 3716 | NP_001308784 |
| | transforming fibroblasts | | |
| NOTCH | Organ Repair by | GeneID: 4851 | XP_011517019 |
| | transforming fibroblasts | | |

Proteins that Stimulate Cellular Regeneration

[0476] Therapeutic polypeptides described herein also include proteins that stimulate cellular regeneration e.g., proteins disclosed in Table 58 or functional variants thereof, e.g., a protein having at least 80%, 85%, 90%, 95%, 967%, 98%, 99% identity to a protein sequence disclosed in Table 58 by reference to its UniProt ID.

TABLE 58
Exemplary proteins that stimulate cellular regeneration

| Target | Gene accession # | Protein accession # |
|---|---|---|
| MST1 | NG_016454 | NP_066278 |
| STK30 | Gene ID: 26448 | NP_036103 |
| MST2 | Gene ID: 6788 | NP_006272 |
| SAV1 | Gene ID: 60485 | NP_068590 |
| LATS1 | Gene ID: 9113 | NP_004681 |
| LATS2 | Gene ID: 26524 | NP_055387 |
| YAP1 | NG_029530 | NP_001123617 |
| CDKN2b | NG_023297 | NP_004927 |
| CDKN2a | NG_007485 | NP_478102 |

### STING Modulator Effectors

[0477] In some embodiments, a secreted effector described herein modulates STING/cGAS signaling. In some embodiments, the STING modulator is a polypeptide, e.g., a viral polypeptide or a functional variant thereof. For instance, the effector may comprise a STING modulator (e.g., inhibitor) described in Maringer et al. “Message in a bottle: lessons learned from antagonism of STING signalling during RNA virus infection” Cytokine & Growth Factor Reviews Volume 25, Issue 6, December 2014, Pages 669-679, which is incorporated herein by reference in its entirety. Additional STING modulators (e.g., activators) are described, e.g., in Wang et al. “STING activator c-di-GMP enhances the anti-tumor effects of peptide vaccines in melanoma-bearing mice.” Cancer Immunol Immunother. 2015 August; 64(8): 1057-66. doi: 10.1007/s00262-015-1713-5. Epub 2015 May 19; Bose “cGAS/STING Pathway in Cancer: Jekyll and Hyde Story of Cancer Immune Response” Int J Mol Sci. 2017 November; 18(11): 2456; and Fu et al. “STING agonist formulated cancer vaccines can cure established tumors resistant to PD-1 blockade” Sci Transl Med. 2015 Apr. 15; 7(283): 283ra52, each of which is incorporated herein by reference in its entirety.

[0478] Some examples of peptides include, but are not limited to, fluorescent tag or marker, antigen, peptide therapeutic, synthetic or analog peptide from naturally-bioactive peptide, agonist or antagonist peptide, anti-microbial peptide, a targeting or cytotoxic peptide, a degradation or self-destruction peptide, and degradation or self-destruction peptides. Peptides useful in the invention described herein also include antigen-binding peptides, e.g., antigen binding antibody or antibody-like fragments, such as single chain antibodies, nanobodies (see, e.g., Steeland et al. 2016. Nanobodies as therapeutics: big opportunities for small antibodies. Drug Discov Today: 21(7): 1076-113). Such antigen binding peptides may bind a cytosolic antigen, a nuclear antigen, or an intra-organellar antigen.

[0479] In some embodiments, the genetic element comprises a sequence that encodes small peptides, peptidomimetics (e.g., peptoids), amino acids, and amino acid analogs. Such therapeutics generally have a molecular weight less than about 5,000 grams per mole, a molecular weight less than about 2,000 grams per mole, a molecular weight less than about 1,000 grams per mole, a molecular weight less than about 500 grams per mole, and salts, esters, and other pharmaceutically acceptable forms of such compounds. Such therapeutics may include, but are not limited to, a neurotransmitter, a hormone, a drug, a toxin, a viral or microbial particle, a synthetic molecule, and agonists or antagonists thereof.

[0480] In some embodiments, the composition or anellovector described herein includes a polypeptide linked to a ligand that is capable of targeting a specific location, tissue, or cell.

### Gene Editing Components

[0481] The genetic element of the anellovector may include one or more genes that encode a component of a gene editing system. Exemplary gene editing systems include the clustered regulatory interspaced short palindromic repeat (CRISPR) system, zinc finger nucleases (ZFNs), and Transcription Activator-Like Effector-based Nucleases (TALEN). ZFNs, TALENs, and CRISPR-based methods are described, e.g., in Gaj et al. Trends Biotechnol. 31.7(2013):397-405; CRISPR methods of gene editing are described, e.g., in Guan et al., Application of CRISPR-Cas system in gene therapy: Pre-clinical progress in animal model. DNA Repair 2016 October; 46:1-8. doi: 10.1016/j.dnarep.2016.07.004; Zheng et al., Precise gene deletion and replacement using the CRISPR/Cas9 system in human cells. BioTechniques, Vol. 57, No. 3, September 2014, pp. 115-124.

[0482] CRISPR systems are adaptive defense systems originally discovered in bacteria and archaca. CRISPR systems use RNA-guided nucleases termed CRISPR-associated or “Cas” endonucleases (e. g., Cas9 or Cpf1) to cleave foreign DNA. In a typical CRISPR/Cas system, an endonuclease is directed to a target nucleotide sequence (e.g., a site in the genome that is to be sequence-edited) by sequence-specific, non-coding “guide RNAs” that target single- or double-stranded DNA sequences. Three classes (I-III) of CRISPR systems have been identified. The class II CRISPR systems use a single Cas endonuclease (rather than multiple Cas proteins). One class II CRISPR system includes a type II Cas endonuclease such as Cas9, a CRISPR RNA (“crRNA”), and a trans-activating crRNA (“tracrRNA”). The crRNA contains a “guide RNA”, typically about 20-nucleotide RNA sequence that corresponds to a target DNA sequence. The crRNA also contains a region that binds to the tracrRNA to form a partially double-stranded structure which is cleaved by RNase III, resulting in a crRNA/tracrRNA hybrid. The crRNA/tracrRNA hybrid then directs the Cas9 endonuclease to recognize and cleave the target DNA sequence. The target DNA sequence must generally be adjacent to a “protospacer adjacent motif” (“PAM”) that is specific for a given Cas endonuclease; however, PAM sequences appear throughout a given genome.

[0483] In some embodiments, the anellovector includes a gene for a CRISPR endonuclease. For example, some CRISPR endonucleases identified from various prokaryotic species have unique PAM sequence requirements; examples of PAM sequences include 5′-NGG (Streptococcus pyogenes), 5′-NNAGAA (Streptococcus thermophilus CRISPR1), 5′-NGGNG (Streptococcus thermophilus CRISPR3), and 5′-NNNGATT (Neisseria meningiditis). Some endonucleases, e.g., Cas9 endonucleases, are associated with G-rich PAM sites, e.g., 5′-NGG, and perform blunt-end cleaving of the target DNA at a location 3 nucleotides upstream from (5′ from) the PAM site. Another class II CRISPR system includes the type Vendonuclease Cpf1, which is smaller than Cas9; examples include AsCpf1 (from Acidaminococcus sp.) and LbCpf1 (from Lachnospiraceae sp.). Cpf1 endonucleases, are associated with T-rich PAM sites, e. g., 5′-TTN. Cpf1 can also recognize a 5′-CTA PAM motif. Cpf1 cleaves the target DNA by introducing an offset or staggered double-strand break with a 4- or 5-nucleotide 5′ overhang, for example, cleaving a target DNA with a 5-nucleotide offset or staggered cut located 18 nucleotides downstream from (3′ from) from the PAM site on the coding strand and 23 nucleotides downstream from the PAM site on the complimentary strand; the 5-nucleotide overhang that results from such offset cleavage allows more precise genome editing by DNA insertion by homologous recombination than by insertion at blunt-end cleaved DNA. See, e.g., Zetsche et al. (2015) Cell, 163:759-771.

[0484] A variety of CRISPR associated (Cas) genes may be included in the anellovector. Specific examples of genes are those that encode Cas proteins from class II systems including Cas1, Cas2, Cas3, Cas4, Cas5, Cas6, Cas7, Cas8, Cas9, Cas10, Cpf1, C2C1, or C2C3. In some embodiments, the anellovector includes a gene encoding a Cas protein, e.g., a Cas9 protein, may be from any of a variety of prokaryotic species. In some embodiments, the anellovector includes a gene encoding a particular Cas protein, e.g., a particular Cas9 protein, is selected to recognize a particular protospacer-adjacent motif (PAM) sequence. In some embodiments, the anellovector includes nucleic acids encoding two or more different Cas proteins, or two or more Cas proteins, may be introduced into a cell, zygote, embryo, or animal, e.g., to allow for recognition and modification of sites comprising the same, similar or different PAM motifs. In some embodiments, the anellovector includes a gene encoding a modified Cas protein with a deactivated nuclease, e.g., nuclease-deficient Cas9.

[0485] Whereas wild-type Cas9 protein generates double-strand breaks (DSBs) at specific DNA sequences targeted by a gRNA, a number of CRISPR endonucleases having modified functionalities are known, for example: a “nickase” version of Cas endonuclease (e.g., Cas9) generates only a single-strand break; a catalytically inactive Cas endonuclease, e.g., Cas9 (“dCas9”) does not cut the target DNA. A gene encoding a dCas9 can be fused with a gene encoding an effector domain to repress (CRISPRi) or activate (CRISPRa) expression of a target gene. For example, the gene may encode a Cas9 fusion with a transcriptional silencer (e.g., a KRAB domain) or a transcriptional activator (e.g., a dCas9-VP64 fusion). A gene encoding a catalytically inactive Cas9 (dCas9) fused to FokI nuclease (“dCas9-FokI”) can be included to generate DSBs at target sequences homologous to two gRNAs. See, e.g., the numerous CRISPR/Cas9 plasmids disclosed in and publicly available from the Addgene repository (Addgene, 75 Sidney St., Suite 550A, Cambridge, MA 02139; addgene.org/crispr/). A “double nickase” Cas9 that introduces two separate double-strand breaks, each directed by a separate guide RNA, is described as achieving more accurate genome editing by Ran et al. (2013) Cell, 154:1380-1389.

[0486] CRISPR technology for editing the genes of eukaryotes is disclosed in US Patent Application Publications 2016/0138008A1 and US2015/0344912A1, and in U.S. Pat. Nos. 8,697,359, 8,771,945, 8,945,839, 8,999,641, 8,993,233, 8,895,308, 8,865,406, 8,889,418, 8,871,445, 8,889,356, 8,932,814, 8,795,965, and 8,906,616. Cpf1 endonuclease and corresponding guide RNAs and PAM sites are disclosed in US Patent Application Publication 2016/0208243 A1.

[0487] In some embodiments, the anellovector comprises a gene encoding a polypeptide described herein, e.g., a targeted nuclease, e.g., a Cas9, e.g., a wild type Cas9, a nickase Cas9 (e.g., Cas9 D10A), a dead Cas9 (dCas9), eSpCas9, Cpf1, C2C1, or C2C3, and a gRNA. The choice of genes encoding the nuclease and gRNA(s) is determined by whether the targeted mutation is a deletion, substitution, or addition of nucleotides, e.g., a deletion, substitution, or addition of nucleotides to a targeted sequence. Genes that encode a catalytically inactive endonuclease e.g., a dead Cas9 (dCas9, e.g., D10A; H840A) tethered with all or a portion of (e.g., biologically active portion of) an (one or more) effector domain (e.g., VP64) create chimeric proteins that can modulate activity and/or expression of one or more target nucleic acids sequences.

[0488] In some embodiments, the anellovector includes a gene encoding a fusion of a dCas9 with all or a portion of one or more effector domains (e.g., a full-length wild-type effector domain, or a fragment or variant thereof, e.g., a biologically active portion thereof) to create a chimeric protein useful in the methods described herein. Accordingly, in some embodiments, the anellovector includes a gene encoding a dCas9-methylase fusion. In other some embodiments, the anellovector includes a gene encoding a dCas9-enzyme fusion with a site-specific gRNA to target an endogenous gene.

[0489] In other aspects, the anellovector includes a gene encoding 1, 2, 3, 4, 5, 6, 7, 8, 9, 10, 11, 12, 13, 14, 15, 16, 17, 18, 19, 20, or more effector domains (all or a biologically active portion) fused with dCas9.

### Regulatory Sequences

[0490] In some embodiments, the genetic element comprises a regulatory sequence, e.g., a promoter or an enhancer, operably linked to the sequence encoding the effector.

[0491] In some embodiments, a promoter includes a DNA sequence that is located adjacent to a DNA sequence that encodes an expression product. A promoter may be linked operatively to the adjacent DNA sequence. A promoter typically increases an amount of product expressed from the DNA sequence as compared to an amount of the expressed product when no promoter exists. A promoter from one organism can be utilized to enhance product expression from the DNA sequence that originates from another organism. For example, a vertebrate promoter may be used for the expression of jellyfish GFP in vertebrates. In addition, one promoter element can increase an amount of products expressed for multiple DNA sequences attached in tandem. Hence, one promoter element can enhance the expression of one or more products. Multiple promoter elements are well-known to persons of ordinary skill in the art.

[0492] In one embodiment, high-level constitutive expression is desired. Examples of such promoters include, without limitation, the retroviral Rous sarcoma virus (RSV) long terminal repeat (LTR) promoter/enhancer, the cytomegalovirus (CMV) immediate early promoter/enhancer (see, e.g., Boshart et al, Cell, 41:521-530 (1985)), the SV40 promoter, the dihydrofolate reductase promoter, the cytoplasmic beta.-actin promoter and the phosphoglycerol kinase (PGK) promoter.

[0493] In another embodiment, inducible promoters may be desired. Inducible promoters are those which are regulated by exogenously supplied compounds, either in cis or in trans, including without limitation, the zinc-inducible sheep metallothionine (MT) promoter; the dexamethasone (Dex)-inducible mouse mammary tumor virus (MMTV) promoter; the T7 polymerase promoter system (WO 98/10088); the tetracycline-repressible system (Gossen et al, Proc. Natl. Acad. Sci. USA, 89:5547-5551 (1992)); the tetracycline-inducible system (Gossen et al., Science, 268: 1766-1769 (1995); see also Harvey et al., Curr. Opin. Chem. Biol., 2:512-518 (1998)); the RU486-inducible system (Wang et al., Nat. Biotech., 15:239-243 (1997) and Wang et al., Gene Ther., 4:432-441 (1997)]; and the rapamycin-inducible system (Magari et al., J. Clin. Invest., 100:2865-2872 (1997); Rivera et al., Nat. Medicine. 2:1028-1032 (1996)). Other types of inducible promoters which may be useful in this context are those which are regulated by a specific physiological state, e.g., temperature, acute phase, or in replicating cells only.

[0494] In some embodiments, a native promoter for a gene or nucleic acid sequence of interest is used. The native promoter may be used when it is desired that expression of the gene or the nucleic acid sequence should mimic the native expression. The native promoter may be used when expression of the gene or other nucleic acid sequence must be regulated temporally or developmentally, or in a tissue-specific manner, or in response to specific transcriptional stimuli. In a further embodiment, other native expression control elements, such as enhancer elements, polyadenylation sites or Kozak consensus sequences may also be used to mimic the native expression.

[0495] In some embodiments, the genetic element comprises a gene operably linked to a tissue-specific promoter. For instance, if expression in skeletal muscle is desired, a promoter active in muscle may be used. These include the promoters from genes encoding skeletal α-actin, myosin light chain 2A, dystrophin, muscle creatine kinase, as well as synthetic muscle promoters with activities higher than naturally-occurring promoters. See Li et al., Nat. Biotech., 17:241-245 (1999). Examples of promoters that are tissue-specific are known for liver albumin, Miyatake et al. J. Virol., 71:5124-32 (1997); hepatitis B virus core promoter, Sandig et al., Gene Ther. 3:1002-9 (1996); alpha-fetoprotein (AFP), Arbuthnot et al., Hum. Gene Ther., 7:1503-14 (1996)], bone (osteocalcin, Stein et al., Mol. Biol. Rep., 24:185-96 (1997); bone sialoprotein, Chen et al., J. Bone Miner. Res. 11:654-64 (1996)), lymphocytes (CD2, Hansal et al., J. Immunol., 161:1063-8 (1998); immunoglobulin heavy chain; T cell receptor a chain), neuronal (neuron-specific enolase (NSE) promoter, Andersen et al. Cell. Mol. Neurobiol., 13:503-15 (1993); neurofilament light-chain gene, Piccioli et al., Proc. Natl. Acad. Sci. USA, 88:5611-5 (1991); the neuron-specific vgf gene, Piccioli et al., Neuron, 15:373-84 (1995)]; among others.

[0496] The genetic element may include an enhancer, e.g., a DNA sequence that is located adjacent to the DNA sequence that encodes a gene. Enhancer elements are typically located upstream of a promoter element or can be located downstream of or within a coding DNA sequence (e.g., a DNA sequence transcribed or translated into a product or products). Hence, an enhancer element can be located 100 base pairs, 200 base pairs, or 300 or more base pairs upstream or downstream of a DNA sequence that encodes the product. Enhancer elements can increase an amount of recombinant product expressed from a DNA sequence above increased expression afforded by a promoter element. Multiple enhancer elements are readily available to persons of ordinary skill in the art.

[0497] In some embodiments, the genetic element comprises one or more inverted terminal repeats (ITR) flanking the sequences encoding the expression products described herein. In some embodiments, the genetic element comprises one or more long terminal repeats (LTR) flanking the sequence encoding the expression products described herein. Examples of promoter sequences that may be used, include, but are not limited to, the simian virus 40 (SV40) early promoter, mouse mammary tumor virus (MMTV), human immunodeficiency virus (HIV) long terminal repeat (LTR) promoter, MoMuLV promoter, an avian leukemia virus promoter, an Epstein-Barr virus immediate early promoter, and a Rous sarcoma virus promoter.

### Replication Proteins

[0498] In some embodiments, the genetic element of the anellovector, e.g., synthetic anellovector, may include sequences that encode one or more replication proteins. In some embodiments, the anellovector may replicate by a rolling-circle replication method, e.g., synthesis of the leading strand and the lagging strand is uncoupled. In such embodiments, the anellovector comprises three elements additional elements: i) a gene encoding an initiator protein, ii) a double strand origin, and iii) a single strand origin. A rolling circle replication (RCR) protein complex comprising replication proteins binds to the leading strand and destabilizes the replication origin. The RCR complex cleaves the genome to generate a free 3′OH extremity. Cellular DNA polymerase initiates viral DNA replication from the free 3′OH extremity. After the genome has been replicated, the RCR complex closes the loop covalently. This leads to the release of a positive circular single-stranded parental DNA molecule and a circular double-stranded DNA molecule composed of the negative parental strand and the newly synthesized positive strand. The single-stranded DNA molecule can be either encapsidated or involved in a second round of replication. See for example, Virology Journal 2009, 6:60 doi: 10.1186/1743-422X-6-60.

[0499] The genetic element may comprise a sequence encoding a polymerase, e.g., RNA polymerase or a DNA polymerase.

### Other Sequences

[0500] In some embodiments, the genetic element further includes a nucleic acid encoding a product (e.g., a ribozyme, a therapeutic mRNA encoding a protein, an exogenous gene).

[0501] In some embodiments, the genetic element includes one or more sequences that affect species and/or tissue and/or cell tropism (e.g. capsid protein sequences), infectivity (e.g. capsid protein sequences), immunosuppression/activation (e.g. regulatory nucleic acids), viral genome binding and/or packaging, immune evasion (non-immunogenicity and/or tolerance), pharmacokinetics, endocytosis and/or cell attachment, nuclear entry, intracellular modulation and localization, exocytosis modulation, propagation, and nucleic acid protection of the anellovector in a host or host cell.

[0502] In some embodiments, the genetic element may comprise other sequences that include DNA, RNA, or artificial nucleic acids. The other sequences may include, but are not limited to, genomic DNA, cDNA, or sequences that encode tRNA, mRNA, rRNA, miRNA, gRNA, siRNA, or other RNAi molecules. In one embodiment, the genetic element includes a sequence encoding an siRNA to target a different loci of the same gene expression product as the regulatory nucleic acid. In one embodiment, the genetic element includes a sequence encoding an siRNA to target a different gene expression product as the regulatory nucleic acid.

[0503] In some embodiments, the genetic element further comprises one or more of the following sequences: a sequence that encodes one or more miRNAs, a sequence that encodes one or more replication proteins, a sequence that encodes an exogenous gene, a sequence that encodes a therapeutic, a regulatory sequence (e.g., a promoter, enhancer), a sequence that encodes one or more regulatory sequences that targets endogenous genes (siRNA, lncRNAs, shRNA), and a sequence that encodes a therapeutic mRNA or protein.

[0504] The other sequences may have a length from about 2 to about 5000 nts, about 10 to about 100 nts, about 50 to about 150 nts, about 100 to about 200 nts, about 150 to about 250 nts, about 200 to about 300 nts, about 250 to about 350 nts, about 300 to about 500 nts, about 10 to about 1000 nts, about 50 to about 1000 nts, about 100 to about 1000 nts, about 1000 to about 2000 nts, about 2000 to about 3000 nts, about 3000 to about 4000 nts, about 4000 to about 5000 nts, or any range therebetween.

### Encoded Genes

[0505] For example, the genetic element may include a gene associated with a signaling biochemical pathway, e.g., a signaling biochemical pathway-associated gene or polynucleotide. Examples include a disease associated gene or polynucleotide. A “disease-associated” gene or polynucleotide refers to any gene or polynucleotide which is yielding transcription or translation products at an abnormal level or in an abnormal form in cells derived from a disease-affected tissues compared with tissues or cells of a non disease control. It may be a gene that becomes expressed at an abnormally high level; it may be a gene that becomes expressed at an abnormally low level, where the altered expression correlates with the occurrence and/or progression of the disease. A disease-associated gene also refers to a gene possessing mutation(s) or genetic variation that is directly responsible or is in linkage disequilibrium with a gene(s) that is responsible for the etiology of a disease.

[0506] Examples of disease-associated genes and polynucleotides are available from McKusick-Nathans Institute of Genetic Medicine, Johns Hopkins University (Baltimore, Md.) and National Center for Biotechnology Information, National Library of Medicine (Bethesda, Md.). Examples of disease-associated genes and polynucleotides are listed in Tables A and B of U.S. Pat. No. 8,697,359, which are herein incorporated by reference in their entirety. Disease specific information is available from McKusick-Nathans Institute of Genetic Medicine, Johns Hopkins University (Baltimore, Md.) and National Center for Biotechnology Information, National Library of Medicine (Bethesda, Md.). Examples of signaling biochemical pathway-associated genes and polynucleotides are listed in Tables A-C of U.S. Pat. No. 8,697,359, which are herein incorporated by reference in their entirety.

[0507] Moreover, the genetic elements can encode targeting moieties, as described elsewhere herein. This can be achieved, e.g., by inserting a polynucleotide encoding a sugar, a glycolipid, or a protein, such as an antibody. Those skilled in the art know additional methods for generating targeting moieties.

### Viral Sequence

[0508] In some embodiments, the genetic element comprises at least one viral sequence. In some embodiments, the sequence has homology or identity to one or more sequence from a single stranded DNA virus, e.g., Anellovirus, Bidnavirus, Circovirus, Geminivirus, Genomovirus, Inovirus, Microvirus, Nanovirus, Parvovirus, and Spiravirus. In some embodiments, the sequence has homology or identity to one or more sequence from a double stranded DNA virus, e.g., Adenovirus, Ampullavirus, Ascovirus, Asfarvirus, Baculovirus, Fusellovirus, Globulovirus, Guttavirus, Hytrosavirus, Herpesvirus, Iridovirus, Lipothrixvirus, Nimavirus, and Poxvirus. In some embodiments, the sequence has homology or identity to one or more sequence from an RNA virus, e.g., Alphavirus, Furovirus, Hepatitis virus, Hordeivirus, Tobamovirus, Tobravirus, Tricornavirus, Rubivirus, Birnavirus, Cystovirus, Partitivirus, and Reovirus.

[0509] In some embodiments, the genetic element may comprise one or more sequences from a non-pathogenic virus, e.g., a symbiotic virus, e.g., a commensal virus, e.g., a native virus, e.g., an Anellovirus. Recent changes in nomenclature have classified the three Anelloviruses able to infect human cells into Alphatorquevirus (TT), Betatorquevirus (TTM), and Gammatorquevirus (TTMD) Genera of the Anelloviridae family of viruses. To date Anelloviruses have not been linked to any human disease. In some embodiments, the genetic element may comprise a sequence with homology or identity to a Torque Teno Virus (TT), a non-enveloped, single-stranded DNA virus with a circular, negative-sense genome. In some embodiments, the genetic element may comprise a sequence with homology or identity to a SEN virus, a Sentinel virus, a TTV-like mini virus, and a TT virus. Different types of TT viruses have been described including TT virus genotype 6, TT virus group, TTV-like virus DXL1, and TTV-like virus DXL2. In some embodiments, the genetic element may comprise a sequence with homology or identity to a smaller virus, Torque Teno-like Mini Virus (TTM), or a third virus with a genomic size in between that of TTV and TTMV, named Torque Teno-like Midi Virus (TTMD). In some embodiments, the genetic element may comprise one or more sequences or a fragment of a sequence from a non-pathogenic virus having at least about 60%, 70% 80%, 85%, 90% 95%, 96%, 97%, 98% and 99% nucleotide sequence identity to any one of the nucleotide sequences described herein.

[0510] In some embodiments, the genetic element comprises one or more sequences with homology or identity to one or more sequences from one or more non-Anelloviruses, e.g., adenovirus, herpes virus, pox virus, vaccinia virus, SV40, papilloma virus, an RNA virus such as a retrovirus, e.g., lentivirus, a single-stranded RNA virus, e.g., hepatitis virus, or a double-stranded RNA virus e.g., rotavirus. Since, in some embodiments, recombinant retroviruses are defective, assistance may be provided order to produce infectious particles. Such assistance can be provided, e.g., by using helper cell lines that contain plasmids encoding all of the structural genes of the retrovirus under the control of regulatory sequences within the LTR. Suitable cell lines for replicating the anellovectors described herein include cell lines known in the art. e.g., A549 cells, which can be modified as described herein. Said genetic element can additionally contain a gene encoding a selectable marker so that the desired genetic elements can be identified.

[0511] In some embodiments, the genetic element includes non-silent mutations, e.g., base substitutions, deletions, or additions resulting in amino acid differences in the encoded polypeptide, so long as the sequence remains at least about 70%, 75%, 80%, 85%, 90%, 95%, 96%, 97%, 98%, or 99% identical to the polypeptide encoded by the first nucleotide sequence or otherwise is useful for practicing the present invention. In this regard, certain conservative amino acid substitutions may be made which are generally recognized not to inactivate overall protein function: such as in regard of positively charged amino acids (and vice versa), lysine, arginine and histidine; in regard of negatively charged amino acids (and vice versa), aspartic acid and glutamic acid; and in regard of certain groups of neutrally charged amino acids (and in all cases, also vice versa), (1) alanine and serine. (2) asparagine, glutamine, and histidine, (3) cysteine and serine. (4) glycine and proline. (5) isoleucine, leucine and valine, (6) methionine, leucine and isoleucine, (7) phenylalanine, methionine, leucine, and tyrosine, (8) serine and threonine, (9) tryptophan and tyrosine. (10) and for example tyrosine, tryptophan and phenylalanine. Amino acids can be classified according to physical properties and contribution to secondary and tertiary protein structure. A conservative substitution is recognized in the art as a substitution of one amino acid for another amino acid that has similar properties.

[0512] Identity of two or more nucleic acid or polypeptide sequences having the same or a specified percentage of nucleotides or amino acid residues that are the same (e.g., about 60%, 65%, 70%, 75%, 80%, 85%, 90%, 91%, 92%, 93%, 94%, 95%, 96%, 97%, 98%, 99%, or higher identity over a specified region, when compared and aligned for maximum correspondence over a comparison window or designated region) may be measured using a BLAST or BLAST 2.0 sequence comparison algorithms with default parameters described below, or by manual alignment and visual inspection (see, e.g., NCBI web site www.ncbi.nlm.nih.gov/BLAST/ or the like). Identity may also refer to, or may be applied to, the compliment of a test sequence. Identity also includes sequences that have deletions and/or additions, as well as those that have substitutions. As described herein, the algorithms account for gaps and the like. Identity may exist over a region that is at least about 10 amino acids or nucleotides in length, about 15 amino acids or nucleotides in length, about 20 amino acids or nucleotides in length, about 25 amino acids or nucleotides in length, about 30 amino acids or nucleotides in length, about 35 amino acids or nucleotides in length, about 40 amino acids or nucleotides in length, about 45 amino acids or nucleotides in length, about 50 amino acids or nucleotides in length, or more.

[0513] In some embodiments, the genetic element comprises a nucleotide sequence with at least about 75% nucleotide sequence identity, at least about 80%, 85%, 90% 95%, 96%, 97%, 98%, 99% or 100% nucleotide sequence identity to any one of the nucleotide sequences described herein, e.g., as listed in any of Tables N1-N1417. Since the genetic code is degenerate, a homologous nucleotide sequence can include any number of silent base changes, i.e., nucleotide substitutions that nonetheless encode the same amino acid.

### Gene Editing Component

[0514] The genetic element of the anellovector may include one or more genes that encode a component of a gene editing system. Exemplary gene editing systems include the clustered regulatory interspaced short palindromic repeat (CRISPR) system, zinc finger nucleases (ZFNs), and Transcription Activator-Like Effector-based Nucleases (TALEN). ZFNs, TALENs, and CRISPR-based methods are described, e.g., in Gaj et al. Trends Biotechnol. 31.7(2013): 397-405; CRISPR methods of gene editing are described, e.g., in Guan et al., Application of CRISPR-Cas system in gene therapy: Pre-clinical progress in animal model. DNA Repair 2016 October; 46:1-8. doi: 10.1016/j.dnarep.2016.07.004; Zheng et al., Precise gene deletion and replacement using the CRISPR/Cas9 system in human cells. BioTechniques, Vol. 57, No. 3, September 2014, pp. 115-124.

[0515] CRISPR systems are adaptive defense systems originally discovered in bacteria and archaca. CRISPR systems use RNA-guided nucleases termed CRISPR-associated or “Cas” endonucleases (e.g., Cas9 or Cpf1) to cleave foreign DNA. In a typical CRISPR/Cas system, an endonuclease is directed to a target nucleotide sequence (e.g., a site in the genome that is to be sequence-edited) by sequence-specific, non-coding “guide RNAs” that target single- or double-stranded DNA sequences. Three classes (I-III) of CRISPR systems have been identified. The class II CRISPR systems use a single Cas endonuclease (rather than multiple Cas proteins). One class II CRISPR system includes a type II Cas endonuclease such as Cas9, a CRISPR RNA (“crRNA”), and a trans-activating crRNA (“tracrRNA”). The crRNA contains a “guide RNA”, typically about 20-nucleotide RNA sequence that corresponds to a target DNA sequence. The crRNA also contains a region that binds to the tracrRNA to form a partially double-stranded structure which is cleaved by RNase III, resulting in a crRNA/tracrRNA hybrid. The crRNA/tracrRNA hybrid then directs the Cas9 endonuclease to recognize and cleave the target DNA sequence. The target DNA sequence must generally be adjacent to a “protospacer adjacent motif” (“PAM”) that is specific for a given Cas endonuclease; however, PAM sequences appear throughout a given genome.

[0516] In some embodiments, the anellovector includes a gene for a CRISPR endonuclease. For example, some CRISPR endonucleases identified from various prokaryotic species have unique PAM sequence requirements; examples of PAM sequences include 5′-NGG (Streptococcus pyogenes), 5′-NNAGAA (Streptococcus thermophilus CRISPR1), 5′-NGGNG (Streptococcus thermophilus CRISPR3), and 5′-NNNGATT (Neisseria meningiditis). Some endonucleases, e. g., Cas9 endonucleases, are associated with G-rich PAM sites, e. g., 5′-NGG, and perform blunt-end cleaving of the target DNA at a location 3 nucleotides upstream from (5′ from) the PAM site. Another class II CRISPR system includes the type V endonuclease Cpf1, which is smaller than Cas9; examples include AsCpf1 (from Acidaminococcus sp.) and LbCpf1 (from Lachnospiraceae sp.). Cpf1 endonucleases, are associated with T-rich PAM sites, e. g., 5′-TTN. Cpf1 can also recognize a 5′-CTA PAM motif. Cpf1 cleaves the target DNA by introducing an offset or staggered double-strand break with a 4- or 5-nucleotide 5′ overhang, for example, cleaving a target DNA with a 5-nucleotide offset or staggered cut located 18 nucleotides downstream from (3′ from) from the PAM site on the coding strand and 23 nucleotides downstream from the PAM site on the complimentary strand; the 5-nucleotide overhang that results from such offset cleavage allows more precise genome editing by DNA insertion by homologous recombination than by insertion at blunt-end cleaved DNA. See, e. g., Zetsche et al. (2015) Cell, 163:759-771.

[0517] A variety of CRISPR associated (Cas) genes may be included in the anellovector. Specific examples of genes are those that encode Cas proteins from class II systems including Cas1, Cas2, Cas3, Cas4, Cas5, Cas6, Cas7, Cas8, Cas9, Cas10, Cpf1, C2C1, or C2C3. In some embodiments, the anellovector includes a gene encoding a Cas protein, e.g., a Cas9 protein, may be from any of a variety of prokaryotic species. In some embodiments, the anellovector includes a gene encoding a particular Cas protein, e.g., a particular Cas9 protein, is selected to recognize a particular protospacer-adjacent motif (PAM) sequence. In some embodiments, the anellovector includes nucleic acids encoding two or more different Cas proteins, or two or more Cas proteins, may be introduced into a cell, zygote, embryo, or animal, e.g., to allow for recognition and modification of sites comprising the same, similar or different PAM motifs. In some embodiments, the anellovector includes a gene encoding a modified Cas protein with a deactivated nuclease, e.g., nuclease-deficient Cas9.

[0518] Whereas wild-type Cas9 protein generates double-strand breaks (DSBs) at specific DNA sequences targeted by a gRNA, a number of CRISPR endonucleases having modified functionalities are known, for example: a “nickase” version of Cas9 generates only a single-strand break; a catalytically inactive Cas9 (“dCas9”) does not cut the target DNA. A gene encoding a dCas9 can be fused with a gene encoding an effector domain to repress (CRISPRi) or activate (CRISPRa) expression of a target gene. For example, the gene may encode a Cas9 fusion with a transcriptional silencer (e.g., a KRAB domain) or a transcriptional activator (e.g., a dCas9-VP64 fusion). A gene encoding a catalytically inactive Cas9 (dCas9) fused to FokI nuclease (“dCas9-FokI”) can be included to generate DSBs at target sequences homologous to two gRNAs. See, e.g., the numerous CRISPR/Cas9 plasmids disclosed in and publicly available from the Addgene repository (Addgene, 75 Sidney St., Suite 550A, Cambridge, MA 02139; addgene.org/crispr/). A “double nickase” Cas9 that introduces two separate double-strand breaks, each directed by a separate guide RNA, is described as achieving more accurate genome editing by Ran et al. (2013) Cell, 154:1380-1389.

[0519] CRISPR technology for editing the genes of eukaryotes is disclosed in US Patent Application Publications 2016/0138008A1 and US2015/0344912A1, and in U.S. Pat. Nos. 8,697,359, 8,771,945, 8,945,839, 8,999,641, 8,993,233, 8,895,308, 8,865,406, 8,889,418, 8,871,445, 8,889,356, 8,932,814, 8,795,965, and 8,906,616. Cpf1 endonuclease and corresponding guide RNAs and PAM sites are disclosed in US Patent Application Publication 2016/0208243 A1.

[0520] In some embodiments, the anellovector comprises a gene encoding a polypeptide described herein, e.g., a targeted nuclease, e.g., a Cas9, e.g., a wild type Cas9, a nickase Cas9 (e.g., Cas9 D10A), a dead Cas9 (dCas9), cSpCas9, Cpf1, C2C1, or C2C3, and a gRNA. The choice of genes encoding the nuclease and gRNA(s) is determined by whether the targeted mutation is a deletion, substitution, or addition of nucleotides, e.g., a deletion, substitution, or addition of nucleotides to a targeted sequence. Genes that encode a catalytically inactive endonuclease e.g., a dead Cas9 (dCas9, e.g., D10A; H840A) tethered with all or a portion of (e.g., biologically active portion of) an (one or more) effector domain (e.g., VP64) create chimeric proteins that can modulate activity and/or expression of one or more target nucleic acids sequences.

[0521] As used herein, a “biologically active portion of an effector domain” is a portion that maintains the function (e.g. completely, partially, or minimally) of an effector domain (e.g., a “minimal” or “core” domain). In some embodiments, the anellovector includes a gene encoding a fusion of a dCas9 with all or a portion of one or more effector domains to create a chimeric protein useful in the methods described herein. Accordingly, in some embodiments, the anellovector includes a gene encoding a dCas9-methylase fusion. In other some embodiments, the anellovector includes a gene encoding a dCas9-enzyme fusion with a site-specific gRNA to target an endogenous gene.

[0522] In other aspects, the anellovector includes a gene encoding 1, 2, 3, 4, 5, 6, 7, 8, 9, 10, 11, 12, 13, 14, 15, 16, 17, 18, 19, 20, or more effector domains (all or a biologically active portion) fused with dCas9.

### Proteinaceous Exterior

[0523] In some embodiments, the anellovector, e.g., synthetic anellovector, comprises a proteinaccous exterior that encloses the genetic element. The proteinaceous exterior can comprise a substantially non-pathogenic exterior protein that fails to elicit an unwanted immune response in a mammal. The proteinaceous exterior of the anellovectors typically comprises a substantially non-pathogenic protein that may self-assemble into an icosahedral formation that makes up the proteinaceous exterior.

[0524] In some embodiments, the proteinaceous exterior protein is encoded by a sequence of the genetic element of the anellovector (e.g., is in cis with the genetic element). In other embodiments, the proteinaceous exterior protein is encoded by a nucleic acid separate from the genetic element of the anellovector (e.g., is in trans with the genetic element).

[0525] In some embodiments, the protein, e.g., substantially non-pathogenic protein and/or proteinaceous exterior protein, comprises one or more glycosylated amino acids, e.g., 2, 3, 4, 5, 6, 7, 8, 9, 10, or more.

[0526] In some embodiments, the protein, e.g., substantially non-pathogenic protein and/or proteinaceous exterior protein comprises at least one hydrophilic DNA-binding region, an arginine-rich region, a threonine-rich region, a glutamine-rich region, a N-terminal polyarginine sequence, a variable region, a C-terminal polyglutamine/glutamate sequence, and one or more disulfide bridges.

[0527] In some embodiments, the protein is a capsid protein, e.g., has a sequence having at least about 60%, 65%, 70%, 75%, 80%, 85%, 90% 95%, 96%, 97%, 98%, 99%, or 100% sequence identity to a protein encoded by any one of the nucleotide sequences encoding a capsid protein described herein, e.g., an Anellovirus ORF1 sequence or a capsid protein sequence as listed in any of Tables A1-A1417. In some embodiments, the protein or a functional fragment of a capsid protein is encoded by a nucleotide sequence having at least about 60%, 70% 80%, 85%, 90% 95%, 96%, 97%, 98%, 99%, or 100% sequence identity to any one of the nucleotide sequences described herein, e.g., an Anellovirus capsid sequence or a capsid protein sequence as listed in any of Tables A1-A1417. In some embodiments, the protein comprises a capsid protein or a functional fragment of a capsid protein that is encoded by a capsid nucleotide sequence or a sequence having at least about 60%, 65%, 70%, 75%, 80%, 85%, 90% 95%, 96%, 97%, 98%, 99%, or 100% nucleotide sequence identity to any one of the nucleotide sequences described herein, e.g., an Anellovirus capsid sequence or a capsid protein sequence as listed in any of Tables N1-N1417.

[0528] In some embodiments, the anellovector comprises a nucleotide sequence encoding a capsid protein or a functional fragment of a capsid protein or a sequence having at least about 60%, 70% 80%, 85%, 90% 95%, 96%, 97%, 98%, 99%, or 100% sequence identity to any one of the amino acid sequences described herein, e.g., an Anellovirus capsid sequence or a capsid protein sequence in any of Tables A1-A1417. In some embodiments, the anellovector comprises a nucleotide sequence encoding a capsid protein or a functional fragment of a capsid protein or a sequence having at least about 60%, 65%, 70%, 75%, 80%, 85%, 90% 95%, 96%, 97%, 98%, 99%, or 100% sequence identity to any one of the amino acid sequences described herein, e.g., an Anellovirus capsid sequence or a capsid protein sequence in any of Tables A1-A1417.

[0529] In some embodiments, the anellovector comprises a nucleotide sequence encoding an amino acid sequence having about position 1 to about position 150 (e.g., or any subset of amino acids within each range, e.g., about position 20 to about position 35, about position 25 to about position 30, about position 26 to about 30), about position 150 to about position 390 (e.g., or any subset of amino acids within each range, e.g., about position 200 to about position 380, about position 205 to about position 375, about position 205 to about 371), about 390 to about position 525, about position 525 to about position 850 (e.g., or any subset of amino acids within each range, e.g., about position 530 to about position 840, about position 545 to about position 830, about position 550 to about 820), about 850 to about position 950 (e.g., or any subset of amino acids within each range, e.g., about position 860 to about position 940, about position 870 to about position 930, about position 880 to about 923) of the amino acid sequences described herein, an Anellovirus amino acid sequence, e.g., as listed in any of Tables A1-A1417, or shown in FIG. 1, or a functional fragment thereof. In some embodiments, the protein comprises an amino acid sequence or a functional fragment thereof or a sequence having at least about 60%, 65%, 70%, 75%, 80%, 85%, 90% 95%, 96%, 97%, 98%, 99%, or 100% sequence identity to about position 1 to about position 150 (e.g., or any subset of amino acids within each range as described herein), about position 150 to about position 390, about position 390 to about position 525, about position 525 to about position 850, about position 850 to about position 950 of the amino acid sequences described herein, an Anellovirus amino acid sequence, e.g., as listed in any of Tables A1-A1417, or as shown in FIG. 1. In some embodiments, the protein comprises an amino acid sequence or a functional fragment thereof or a sequence having at least about 60%, 65%, 70%, 75%, 80%, 85%, 90% 95%, 96%, 97%, 98%, 99%, or 100% sequence identity to any one of the amino acid sequences or ranges of amino acids described herein, an Anellovirus amino acid sequence, e.g., as listed in any of Tables A1-A1417, or shown in FIG. 1. In some embodiments, the ranges of amino acids with less sequence identity may provide one or more of the properties described herein and differences in cell/tissue/species specificity (e.g. tropism).

[0530] In some embodiments, the anellovector lacks lipids in the proteinaceous exterior. In some embodiments, the anellovector lacks a lipid bilayer, e.g., a viral envelope. In some embodiments, the interior of the anellovector is entirely covered (e.g., 100% coverage) by a proteinaceous exterior. In some embodiments, the interior of the anellovector is less than 100% covered by the proteinaceous exterior, e.g., 95%, 90%, 85%, 80%, 70%, 60%, 50% or less coverage. In some embodiments, the proteinaccous exterior comprises gaps or discontinuities, e.g., permitting permeability to water, ions, peptides, or small molecules, so long as the genetic element is retained in the anellovector.

[0531] In some embodiments, the proteinaceous exterior comprises one or more proteins or polypeptides that specifically recognize and/or bind a host cell, e.g., a complementary protein or polypeptide, to mediate entry of the genetic element into the host cell.

[0532] In some embodiments, the proteinaceous exterior comprises one or more of the following: one or more glycosylated proteins, a hydrophilic DNA-binding region, an arginine-rich region, a threonine-rich region, a glutamine-rich region, a N-terminal polyarginine sequence, a variable region, a C-terminal polyglutamine/glutamate sequence, and one or more disulfide bridges. For example, the proteinaceous exterior comprises a protein encoded by an Anellovirus ORF1 described herein.

[0533] In some embodiments, the proteinaceous exterior comprises one or more of the following characteristics: an icosahedral symmetry, recognizes and/or binds a molecule that interacts with one or more host cell molecules to mediate entry into the host cell, lacks lipid molecules, lacks carbohydrates, is pH and temperature stable, is detergent resistant, and is substantially non-immunogenic or non-pathogenic in a host.

### II. Compositions and Methods for Making Anellovectors

[0534] The present disclosure provides, in some aspects, anellovectors and methods thereof for delivering effectors. In some embodiments, the anellovectors or components thereof can be made as described below. In some embodiments, the compositions and methods described herein can be used to produce a genetic element or a genetic element construct. In some embodiments, the compositions and methods described herein can be used to produce one or more Anellovirus ORF molecules (e.g., an ORF1, ORF2, ORF2/2, ORF2/3, ORF1/1, or ORF1/2 molecule, or a functional fragment or splice variant thereof). In some embodiments, the compositions and methods described herein can be used to produce a proteinaceous exterior or a component thereof (e.g., an ORF1 molecule), e.g., in a host cell. In some embodiments, the anellovectors or components thereof can be made using a tandem construct, e.g., as described in U.S. Provisional Application 63/038,483, which is incorporated herein by reference in its entirety. In some embodiments, the anellovectors or components thereof can be made using a bacmid/insect cell system, e.g., as described as described in U.S. Provisional Application No. 63/038,603, which is incorporated herein by reference in its entirety.

[0535] Without wishing to be bound by theory, rolling circle amplification may occur via Rep protein binding to a Rep binding site (e.g., comprising a 5′ UTR, e.g., comprising a hairpin loop and/or an origin of replication, e.g., as described herein) positioned 5′ relative to (or within the 5′ region of) the genetic element region. The Rep protein may then proceed through the genetic element region, resulting in the synthesis of the genetic element. The genetic element may then be circularized and then enclosed within a proteinaceous exterior to form an anellovector.

### Components and Assembly of Anellovectors

[0536] The compositions and methods herein can be used to produce anellovectors. As described herein, an anellovector generally comprises a genetic element (e.g., a single-stranded, circular DNA molecule, e.g., comprising a 5′ UTR region as described herein) enclosed within a proteinaceous exterior (e.g., comprising a polypeptide encoded by an Anellovirus ORF1 nucleic acid, e.g., as described herein). In some embodiments, the genetic element comprises one or more sequences encoding Anellovirus ORFs (e.g., one or more of an Anellovirus ORF1, ORF2, ORF2/2, ORF2/3, ORF1/1, or ORF1/2). As used herein, an Anellovirus ORF or ORF molecule (e.g., an Anellovirus ORF1, ORF2, ORF2/2, ORF2/3, ORF1/1, or ORF1/2) includes a polypeptide comprising an amino acid sequence having at least 70%, 75%, 80%, 85%, 90%, 95%, 96%, 97%, 98%, 99%, or 100% sequence identity to a corresponding Anellovirus ORF sequence, e.g., as described in PCT/US2018/037379 or PCT/US19/65995 (each of which is incorporated by reference herein in their entirety). In embodiments, the genetic element comprises a sequence encoding an Anellovirus ORF1, or a splice variant or functional fragment thereof (e.g., a jelly-roll region, e.g., as described herein). In some embodiments, the proteinaceous exterior comprises a polypeptide encoded by an Anellovirus ORF1 nucleic acid (e.g., an Anellovirus ORF1 molecule or a splice variant or functional fragment thereof).

[0537] In some embodiments, an anellovector is assembled by enclosing a genetic element (e.g., as described herein) within a proteinaceous exterior (e.g., as described herein). In some embodiments, the genetic element is enclosed within the proteinaceous exterior in a host cell (e.g., as described herein). In some embodiments, the host cell expresses one or more polypeptides comprised in the proteinaceous exterior (e.g., a polypeptide encoded by an Anellovirus ORF1 nucleic acid, e.g., an ORF1 molecule). For example, in some embodiments, the host cell comprises a nucleic acid sequence encoding an Anellovirus ORF1 molecule, e.g., a splice variant or a functional fragment of an Anellovirus ORF1 polypeptide (e.g., a wild-type Anellovirus ORF1 protein or a polypeptide encoded by a wild-type Anellovirus ORF1 nucleic acid, e.g., as described herein). In embodiments, the nucleic acid sequence encoding the Anellovirus ORF1 molecule is comprised in a nucleic acid construct (e.g., a plasmid, viral vector, virus, minicircle, bacmid, or artificial chromosome) comprised in the host cell. In embodiments, the nucleic acid sequence encoding the Anellovirus ORF1 molecule is integrated into the genome of the host cell.

[0538] In some embodiments, the host cell comprises the genetic element and/or a nucleic acid construct comprising the sequence of the genetic element. In some embodiments, the nucleic acid construct is selected from a plasmid, viral nucleic acid, minicircle, bacmid, or artificial chromosome. In some embodiments, the genetic element is excised from the nucleic acid construct and, optionally, converted from a double-stranded form to a single-stranded form (e.g., by denaturation). In some embodiments, the genetic element is generated by a polymerase based on a template sequence in the nucleic acid construct. In some embodiments, the polymerase produces a single-stranded copy of the genetic element sequence, which can optionally be circularized to form a genetic element as described herein. In other embodiments, the nucleic acid construct is a double-stranded minicircle produced by circularizing the nucleic acid sequence of the genetic element in vitro. In embodiments, the in vitro-circularized (IVC) minicircle is introduced into the host cell, where it is converted to a single-stranded genetic element suitable for enclosure in a proteinaceous exterior, as described herein.

### ORF1 Molecules, e.g., for Assembly of Anellovectors

[0539] An anellovector can be made, for example, by enclosing a genetic element within a proteinaceous exterior. The proteinaceous exterior of an Anellovector generally comprises a polypeptide encoded by an Anellovirus ORF1 nucleic acid (e.g., an Anellovirus ORF1 molecule or a splice variant or functional fragment thereof, e.g., as described herein). An ORF1 molecule may, in some embodiments, comprise one or more of: a first region comprising an arginine rich region, e.g., a region having at least 60% basic residues (e.g., at least 60%, 65%, 70%, 75%, 80%, 85%, 90%, 95%, or 100% basic residues; e.g., between 60%-90%, 60%-80%, 70%-90%, or 70-80% basic residues), and a second region comprising jelly-roll domain, e.g., at least six beta strands (e.g., 4, 5, 6, 7, 8, 9, 10, 11, or 12 beta strands). In embodiments, the proteinaceous exterior comprises one or more (e.g., 1, 2, 3, 4, or all 5) of an Anellovirus ORF1 arginine-rich region, jelly-roll region, N22 domain, hypervariable region, and/or C-terminal domain. In some embodiments, the proteinaceous exterior comprises an Anellovirus ORF1 jelly-roll region (e.g., as described herein). In some embodiments, the proteinaceous exterior comprises an Anellovirus ORF1 arginine-rich region (e.g., as described herein). In some embodiments, the proteinaceous exterior comprises an Anellovirus ORF1 N22 domain (e.g., as described herein). In some embodiments, the proteinaceous exterior comprises an Anellovirus hypervariable region (e.g., as described herein). In some embodiments, the proteinaceous exterior comprises an Anellovirus ORF1 C-terminal domain (e.g., as described herein).

[0540] In some embodiments, the anellovector comprises an ORF1 molecule and/or a nucleic acid encoding an ORF1 molecule. Generally, an ORF1 molecule comprises a polypeptide having the structural features and/or activity of an Anellovirus ORF1 protein (e.g., an Anellovirus ORF1 protein as described herein), or a functional fragment thereof. In some embodiments, the ORF1 molecule comprises a truncation relative to an Anellovirus ORF1 protein (e.g., an Anellovirus ORF1 protein as described herein). In some embodiments, the ORF1 molecule is truncated by at least 10, 20, 30, 40, 50, 60, 70, 80, 90, 100, 150, 200, 250, 300, 350, 400, 450, 500, 550, 600, 650, or 700 amino acids of the Anellovirus ORF1 protein. In some embodiments, an ORF1 molecule comprises an amino acid sequence having at least 75%, 80%, 85%, 90%, 95%, 96%, 97%, 98%, or 99% sequence identity to an Alphatorquevirus, Betatorquevirus, or Gammatorquevirus ORF1 protein, e.g., as described herein. An ORF1 molecule can generally bind to a nucleic acid molecule, such as DNA (e.g., a genetic element, e.g., as described herein). In some embodiments, an ORF1 molecule localizes to the nucleus of a cell. In certain embodiments, an ORF1 molecule localizes to the nucleolus of a cell.

[0541] Without wishing to be bound by theory, an ORF1 molecule may be capable of binding to other ORF1 molecules, e.g., to form a proteinaceous exterior (e.g., as described herein). Such an ORF1 molecule may be described as having the capacity to form a capsid. In some embodiments, the proteinaceous exterior may enclose a nucleic acid molecule (e.g., a genetic element as described herein, e.g., produced using a composition or construct as described herein). In some embodiments, a plurality of ORF1 molecules may form a multimer, e.g., to produce a proteinaceous exterior. In some embodiments, the multimer may be a homomultimer. In other embodiments, the multimer may be a heteromultimer.

[0542] In some embodiments, a first plurality of anellovectors comprising an ORF1 molecule as described herein is administered to a subject. In some embodiments, a second plurality of anellovectors comprising an ORF1 molecule described herein, is subsequently administered to the subject following administration of the first plurality. In some embodiments the second plurality of anellovectors comprises an ORF1 molecule having the same amino acid sequence as the ORF1 molecule comprised by the anellovectors of the first plurality. In some embodiments the second plurality of anellovectors comprises an ORF1 molecule having at least 70%, 75%, 80%, 85%, 90%, 95%, 96%, 97%, 98%, 99%, or 100% amino acid sequence identity to the ORF1 molecule comprised by the anellovectors of the first plurality.

### ORF2 Molecules, e.g., for Assembly of Anellovectors

[0543] Producing an anellovector using the compositions or methods described herein may involve expression of an Anellovirus ORF2 molecule (e.g., as described herein), or a splice variant or functional fragment thereof. In some embodiments, the anellovector comprises an ORF2 molecule, or a splice variant or functional fragment thereof, and/or a nucleic acid encoding an ORF2 molecule, or a splice variant or functional fragment thereof. In some embodiments, the anellovector does not comprise an ORF2 molecule, or a splice variant or functional fragment thereof, and/or a nucleic acid encoding an ORF2 molecule, or a splice variant or functional fragment thereof. In some embodiments, producing the anellovector comprises expression of an ORF2 molecule, or a splice variant or functional fragment thereof, but the ORF2 molecule is not incorporated into the anellovector.

### Production of Protein Components

[0544] Protein components of an anellovector, e.g., ORF1, can be produced in a variety of ways, e.g., as described herein. In some embodiments, the protein components of an anellovector, including, e.g., the proteinaceous exterior, are produced in the same host cell that packages the genetic elements into the proteinaceous exteriors, thereby producing the anellovectors. In some embodiments, the protein components of an anellovector, including, e.g., the proteinaceous exterior, are produced in a cell that does not comprise a genetic element and/or a genetic element construct (e.g., as described herein).

### Baculovirus Expression Systems

[0545] A viral expression system, e.g., a baculovirus expression system, may be used to express proteins (e.g., for production of anellovectors), e.g., as described herein. Baculoviruses are rod-shaped viruses with a circular, supercoiled double-stranded DNA genome. Genera of baculoviruses include: Alphabaculovirus (nucleopolyhedroviruses (NPVs) isolated from Lepidoptera), Betabaculoviruses (granuloviruses (GV) isolated from Lepidoptera), Gammabaculoviruses (NPVs isolated from Hymenoptera) and Deltabaculoviruses (NPVs isolated from Diptera). While GVs typically contain only one nucleocapsid per envelope, NPVs typically contain either single (SNPV) or multiple (MNPV) nucleocapsids per envelope. The enveloped virions are further occluded in granulin matrix in GVs and polyhedrin in NPVs. Baculoviruses typically have both lytic and occluded life cycles. In some embodiments, the lytic and occluded life cycles manifest independently throughout the three phases of virus replication: early, late, and very late phase. In some embodiments, during the early phase, viral DNA replication takes place following viral entry into the host cell, early viral gene expression and shut-off of the host gene expression machinery. In some embodiments, in the late phase late genes that code for viral DNA replication are expressed, viral particles are assembled, and extracellular virus (EV) is produced by the host cell. In some embodiments, in the very late phase the polyhedrin and p10 genes are expressed, occluded viruses (OV) are produced by the host cell, and the host cell is lysed. Since baculoviruses infect insect species, they can be used as biological agents to produce exogenous proteins in baculoviruses-permissive insect cells or larvae. Different isolates of baculovirus, such as Autographa californica multiple nuclear polyhedrosis virus (AcMNPV) and Bombyx mori (silkworm) nuclear polyhedrosis virus (BmNPV) may be used in exogenous protein expression. Various baculoviral expression systems are commercially available, e.g., from ThermoFisher.

[0546] In some embodiments, the proteins described herein (e.g., an Anellovirus ORF molecule, e.g., ORF1, ORF2, ORF2/2, ORF2/3, ORF1/1, or ORF1/2, or a functional fragment or splice variant thereof) may be expressed using a baculovirus expression vector (e.g., a bacmid) that comprises one or more components described herein. For example, a baculovirus expression vector may include one or more of (e.g., all of) a selectable marker (e.g., kanR), an origin of replication (e.g., one or both of a bacterial origin of replication and an insect cell origin of replication), a recombinase recognition site (e.g., an att site), and a promoter. In some embodiments, a baculovirus expression vector (e.g., a bacmid as described herein) can be produced by replacing the naturally occurring wild-type polyhedrin gene, which encodes for baculovirus occlusion bodies, with genes encoding the proteins described herein. In some embodiments, the genes encoding the proteins described herein are cloned into a baculovirus expression vector (e.g., a bacmid as described herein) containing a baculovirus promoter. In some embodiments, the baculovirual vector comprises one or more non-baculoviral promoters, e.g., a mammalian promoter or an Anellovirus promoter. In some embodiments, the genes encoding the proteins described herein are cloned into a donor vector (e.g., as described herein), which is then contacted with an empty baculovirus expression vector (e.g., an empty bacmid) such that the genes encoding the proteins described herein are transferred (e.g., by homologous recombination or transposase activity) from the donor vector into the baculovirus expression vector (e.g., bacmid). In some embodiments, the baculovirus promoter is flanked by baculovirus DNA from the nonessential polyhedrin gene locus. In some embodiments, a protein described herein is under the transcriptional control of the AcNPV polyhedrin promoter in the very late phase of viral replication. In some embodiments, a strong promoter suitable for use in baculoviral expression in insect cells include, but are not limited to, baculovirus p10 promoters, polyhedrin (polh) promoters, p6.9 promoters and capsid protein promoters. Weak promoters suitable for use in baculoviral expression in insect cells include ie1, ie2, ie0, et1, 39K (aka pp31) and gp64 promoters of baculoviruses.

[0547] In some embodiments, a recombinant baculovirus is produced by homologous recombination between a baculoviral genome (e.g., a wild-type or mutant baculoviral genome), and a transfer vector. In some embodiments, one or more genes encoding a protein described herein are cloned into the transfer vector. In some embodiments, the transfer vector further contains a baculovirus promoter flanked by DNA from a nonessential gene locus, e.g., polyhedrin gene. In some embodiments, one or more genes encoding a protein described herein are inserted into the baculoviral genome by homologous recombination between the baculoviral genome and the transfer vector. In some embodiments, the baculoviral genome is linearized at one or more unique sites. In some embodiments, the linearized sites are located near the target site for insertion of genes encoding the proteins described herein into the baculoviral genome. In some embodiments, a linearized baculoviral genome missing a fragment of the baculoviral genome downstream from a gene, e.g., polyhedrin gene, can be used for homologous recombination. In some embodiments, the baculoviral genome and transfer vector are co-transfected into insect cells. In some embodiments, the method of producing the recombinant baculovirus comprises the steps of preparing the baculoviral genome for performing homologous recombination with a transfer vector containing the genes encoding one or more protein described herein and co-transfecting the transfer vector and the baculoviral genome DNA into insect cells. In some embodiments, the baculoviral genome comprises a region homologous to a region of the transfer vector. These homologous regions may enhance the probability of recombination between the baculoviral genome and the transfer vector. In some embodiments, the homology region in the transfer vector is located upstream or downstream of the promoter. In some embodiments, to induce homologous recombination, the baculoviral genome, and transfer vector are mixed at a weight ratio of about 1:1 to 10:1.

[0548] In some embodiments, a recombinant baculovirus is generated by a method comprising site-specific transposition with Tn7, e.g., whereby the genes encoding the proteins described herein are inserted into bacmid DNA, e.g., propagated in bacteria, e.g., E. coli (e.g., DH 10Bac cells). In some embodiments, the genes encoding the proteins described herein are cloned into a pFASTBAC® vector and transformed into competent cells, e.g., DH10BAC® competent cells, containing the bacmid DNA with a mini-attTn7 target site. In some embodiments, the baculovirus expression vector. e.g., pFASTBAC® vector, may have a promoter, e.g., a dual promoter (e.g., polyhedrin promoter, p10 promoter). Commercially available pFASTBACK donor plasmids include: pFASTBAC 1, pFASTBAC HT, and pFASTBAC DUAL. In some embodiments, recombinant bacmid DNA containing-colonies are identified and bacmid DNA is isolated to transfect insect cells.

[0549] In some embodiments, a baculoviral vector is introduced into an insect cell together with a helper nucleic acid. The introduction may be concurrent or sequential. In some embodiments, the helper nucleic acid provides one or more baculoviral proteins, e.g., to promote packaging of the baculoviral vector. In some embodiments, recombinant baculovirus produced in insect cells (e.g., by homologous recombination) is expanded and used to infect insect cells (e.g., in the mid-logarithmic growth phase) for recombinant protein expression. In some embodiments, recombinant bacmid DNA produced by site-specific transposition in bacteria. e.g., E. coli, is used to transfect insect cells with a transfection agent, e.g., Cellfectin® II. Additional information on baculovirus expression systems is discussed in U.S. patent application Ser. Nos. 14/447,341, 14/277,892, and 12/278,916, which are hereby incorporated by reference.

### Insect Cell Systems

[0550] The proteins described herein may be expressed in insect cells infected or transfected with recombinant baculovirus or bacmid DNA, e.g., as described above. In some embodiments, insect cells include: the Sf9 and Sf21 cells derived from Spodoptera frugiperda and the Tn-368 and High Five™ BTI-TN-5B1-4 cells (also referred to as Hi5 cells) derived from Trichoplusia ni. In some embodiments, insect cell lines Sf21 and Sf9, derived from the ovaries of the pupal fall army worm Spodoptera frugiperda, can be used for the expression of recombinant proteins using the baculovirus expression system. In some embodiments, Sf21 and Sf9 insect cells may be cultured in commercially available serum-supplemented or serum-free media. Suitable media for culturing insect cells include: Grace's Supplemented (TNM-FH), IPL-41, TC-100, Schneider's Drosophila, SF-900 II SFM, and EXPRESS-FIVE™ SFM. In some embodiments, some serum-free media formulations utilize a phosphate buffer system to maintain a culture pH in the range of 6.0-6.4 (Licari et al. Insect cell hosts for baculovirus expression vectors contain endogenous exoglycosidase activity. Biotechnology Progress 9: 146-152 (1993) and Drugmand et al. Insect cells as factories for biomanufacturing. Biotechnology Advances 30:1140-1157 (2012)) for both cultivation and recombinant protein production. In some embodiments, a pH of 6.0-6.8 for cultivating various insect cell lines may be used. In some embodiments, insect cells are cultivated in suspension or as a monolaver at a temperature between 25° to 30° ° C. with aeration. Additional information on insect cells is discussed, for example, in U.S. patent application Ser. Nos. 14/564,512 and 14/775,154, each of which is hereby incorporated by reference.

### Mammalian Cell Systems

[0551] In some embodiments, the proteins described herein may be expressed in vitro in animal cell lines infected or transfected with a vector encoding the protein, e.g., as described herein. Animal cell lines envisaged in the context of the present disclosure include porcine cell lines, e.g., immortalised porcine cell lines such as, but not limited to the porcine kidney epithelial cell lines PK-15 and SK, the monomyeloid cell line 3D4/31 and the testicular cell line ST. Also, other mammalian cells lines are included, such as CHO cells (Chinese hamster ovaries), MARC-145, MDBK, RK-13, EEL. Additionally or alternatively, particular embodiments of the methods of the invention make use of an animal cell line which is an epithelial cell line, i.e. a cell line of cells of epithelial lineage. Cell lines suitable for expressing the proteins described herein include, but are not limited to cell lines of human or primate origin, such as human or primate kidney carcinoma cell lines.

### Genetic Element Constructs, e.g., for Assembly of Anellovectors

[0552] The genetic element of an anellovector as described herein may be produced from a genetic element construct that comprises a genetic element region and optionally other sequence such as vector backbone. Generally, the genetic element construct comprises an Anellovirus 5′ UTR (e.g., as described herein). A genetic element construct may be any nucleic acid construct suitable for delivery of the sequence of the genetic element into a host cell in which the genetic element can be enclosed within a proteinaceous exterior. In some embodiments, the genetic element construct comprises a promoter. In some embodiments, the genetic element construct is a linear nucleic acid molecule. In some embodiments, the genetic element construct is a circular nucleic acid molecule (e.g., a plasmid, bacmid, or a minicircle, e.g., as described herein). The genetic element construct may, in some embodiments, be double-stranded. In other embodiments, the genetic element is single-stranded. In some embodiments, the genetic element construct comprises DNA. In some embodiments, the genetic element construct comprises RNA. In some embodiments, the genetic element construct comprises one or more modified nucleotides.

[0553] In some aspects, the present disclosure provides a method for replication and propagation of the anellovector as described herein (e.g., in a cell culture system), which may comprise one or more of the following steps: (a) introducing (e.g., transfecting) a genetic element (e.g., linearized) into a cell line sensitive to anellovector infection; (b) harvesting the cells and optionally isolating cells showing the presence of the genetic element; (c) culturing the cells obtained in step (b) (e.g., for at least three days, such as at least one week or longer), depending on experimental conditions and gene expression; and (d) harvesting the cells of step (c), e.g., as described herein.

### Plasmids

[0554] In some embodiments, the genetic element construct is a plasmid. The plasmid will generally comprise the sequence of a genetic element as described herein as well as an origin of replication suitable for replication in a host cell (e.g., a bacterial origin of replication for replication in bacterial cells) and a selectable marker (e.g., an antibiotic resistance gene). In some embodiments, the sequence of the genetic element can be excised from the plasmid. In some embodiments, the plasmid is capable of replication in a bacterial cell. In some embodiments, the plasmid is capable of replication in a mammalian cell (e.g., a human cell). In some embodiments, a plasmid is at least 300, 400, 500, 600, 700, 800, 900, 1000, 2000, 3000, 4000, or 5000 bp in length. In some embodiments, the plasmid is less than 600, 700, 800, 900, 1000, 2000, 3000, 4000, 5000, 6000, 7000, 8000, 9000, or 10,000 bp in length. In some embodiments, the plasmid has a length between 300-400, 400-500, 500-600, 600-700, 700-800, 800-900, 900-1000, 1000-1500, 1500-2000, 2000-2500, 2500-3000, 3000-4000, or 4000-5000 bp. In some embodiments, the genetic element can be excised from a plasmid (e.g., by in vitro circularization), for example, to form a minicircle, e.g., as described herein. In embodiments, excision of the genetic element separates the genetic element sequence from the plasmid backbone (e.g., separates the genetic element from a bacterial backbone).

### Small Circular Nucleic Acid Constructs

[0555] In some embodiments, the genetic element construct is a circular nucleic acid construct, e.g., lacking a backbone (e.g., lacking a bacterial origin of replication and/or selectable marker). In embodiments, the genetic element is a double-stranded circular nucleic acid construct. In embodiments, the double-stranded circular nucleic acid construct is produced by in vitro circularization (IVC), e.g., as described herein. In embodiments, the double-stranded circular nucleic acid construct can be introduced into a host cell, in which it can be converted into or used as a template for generating single-stranded circular genetic elements, e.g., as described herein. In some embodiments, the circular nucleic acid construct does not comprise a plasmid backbone or a functional fragment thereof. In some embodiments, the circular nucleic acid construct is at least 2000, 2100, 2200, 2300, 2400, 2500, 2600, 2700, 2800, 2900, 3000, 3100, 3200, 3300, 3400, 3500, 3600, 3700, 3800, 3900, 4000, 4100, 4200, 4300, 4400, or 4500 bp in length. In some embodiments, the circular nucleic acid construct is less than 2900, 3000, 3100, 3200, 3300, 3400, 3500, 3600, 3700, 3800, 3900, 4000, 4100, 4200, 4300, 4400, 4500, 4600, 4700, 4800, 4900, 5000, 5500, or 6000 bp in length. In some embodiments, the circular nucleic acid construct is between 2000-2100, 2100-2200, 2200-2300, 2300-2400, 2400-2500, 2500-2600, 2600-2700, 2700-2800, 2800-2900, 2900-3000, 3000-3100, 3100-3200, 3200-3300, 3300-3400, 3400-3500, 3500-3600, 3600-3700, 3700-3800, 3800-3900, 3900-4000, 4000-4100, 4100-4200, 4200-4300, 4300-4400, or 4400-4500 bp in length. In some embodiments, the circular nucleic acid construct is a minicircle.

### In Vitro Circularization

[0556] In some instances, the genetic element to be packaged into a proteinaceous exterior is a single stranded circular DNA. The genetic element may, in some instances, be introduced into a host cell via a genetic element construct having a form other than a single stranded circular DNA. For example, the genetic element construct may be a double-stranded circular DNA. The double-stranded circular DNA may then be converted into a single-stranded circular DNA in the host cell (e.g., a host cell comprising a suitable enzyme for rolling circle replication, e.g., an Anellovirus Rep protein, e.g., Rep68/78, Rep60, RepA, RepB, Pre, MobM, TraX, TrwC, Mob02281, Mob02282, NikB, ORF50240, NikK, TecH, OrfJ, or TraI, e.g., as described in Wawrzyniak et al. 2017, Front. Microbiol. 8: 2353; incorporated herein by reference with respect to the listed enzymes). In some embodiments, the double-stranded circular DNA is produced by in vitro circularization (IVC), e.g., as described in Example 15.

[0557] Generally, in vitro circularized DNA constructs can be produced by digesting a genetic element construct (e.g., a plasmid comprising the sequence of a genetic element) to be packaged, such that the genetic element sequence is excised as a linear DNA molecule. The resultant linear DNA can then be ligated, e.g., using a DNA ligase, to form a double-stranded circular DNA. In some instances, a double-stranded circular DNA produced by in vitro circularization can undergo rolling circle replication, e.g., as described herein. Without wishing to be bound by theory, it is contemplated that in vitro circularization results in a double-stranded DNA construct that can undergo rolling circle replication without further modification, thereby being capable of producing single-stranded circular DNA of a suitable size to be packaged into an anellovector, e.g., as described herein. In some embodiments, the double-stranded DNA construct is smaller than a plasmid (e.g., a bacterial plasmid). In some embodiments, the double-stranded DNA construct is excised from a plasmid (e.g., a bacterial plasmid) and then circularized, e.g., by in vitro circularization.

### Tandem Constructs

[0558] In some embodiments, a genetic element construct comprises a first copy of a genetic element sequence (e.g., the nucleic acid sequence of a genetic element, e.g., as described herein) and at least a portion of a second copy of a genetic element sequence (e.g., the nucleic acid sequence of the same genetic element, or the nucleic acid sequence of a different genetic element), arranged in tandem. Genetic element constructs having such a structure are generally referred to herein as tandem constructs. Such tandem constructs are used for producing an anellovector genetic element. The first copy of the genetic element sequence and the second copy of the genetic element sequence may, in some instances, be immediately adjacent to each other on the genetic acid construct. In other instances, the first copy of the genetic element sequence and the second copy of the genetic element sequence may be separated, e.g., by a spacer sequence. In some embodiments, the second copy of the genetic element sequence, or the portion thereof, comprises an upstream replication-facilitating sequence (uRFS), e.g., as described herein. In some embodiments, the second copy of the genetic element sequence, or the portion thereof, comprises a downstream replication-facilitating sequence (dRFS), e.g., as described herein. In some embodiments, the uRFS and/or dRFS comprises an origin of replication (e.g., a mammalian origin of replication, an insect origin of replication, or a viral origin of replication, e.g., a non-Anellovirus origin of replication, e.g., as described herein) or portion thereof. In some embodiments, the uRFS and/or dRFS does not comprise an origin of replication. In some embodiments, the uRFS and/or dRFS comprises a hairpin loop (e.g., in the 5′ UTR). In some embodiments, a tandem construct produces higher levels of a genetic element than an otherwise similar construct lacking the second copy of the genetic element or portion thereof. Without being bound by theory, a tandem construct described herein may, in some embodiments, replicate by rolling circle replication. In some embodiments, a tandem construct is a plasmid. In some embodiments, a tandem construct is circular. In some embodiments, a tandem construct is linear. In some embodiments, a tandem construct is single-stranded. In some embodiments, a tandem construct is double-stranded. In some embodiments, a tandem construct is DNA.

[0559] A tandem construct may, in some instances, include a first copy of the sequence of the genetic element and a second copy of the sequence of the genetic element, or a portion thereof. It is understood that the second copy can be an identical copy of the first copy or a portion thereof, or can comprise one or more sequence differences, e.g., substitutions, additions, or deletions. In some instances, the second copy of the genetic element sequence or portion thereof is positioned 5′ relative to the first copy of the genetic element sequence. In some instances, the second copy of the genetic element sequence or portion thereof is positioned 3′ relative to the first copy of the genetic element sequence. In some instances, the second copy of the genetic element sequence or portion thereof and the first copy of the genetic element sequence are adjacent to each other in the tandem construct. In some instances, the second copy of the genetic element sequence or portion thereof and the first copy of the genetic element sequence are separated, e.g., by a spacer sequence

[0560] In some embodiments, the tandem constructs described herein can be used to produce the genetic element of a vector (e.g., anellovector), vehicle, or particle (e.g., viral particle) comprising a capsid (e.g., a capsid comprising an Anellovirus ORF, e.g., an ORF1 molecule, e.g., as described herein) encapsulating a genetic element comprising a protein binding sequence that binds to the capsid and a heterologous (e.g., relative to the Anellovirus from which the ORF1 molecule was derived) sequence encoding a therapeutic effector. In embodiments, the vector is capable of delivering the genetic element into a mammalian, e.g., human, cell. In some embodiments, the genetic element has less than about 50% (e.g., less than 50%, 40%, 30%, 25%, 20%, 15%, 10%, 9%, 8%, 7%, 6%, 5.5%, 5%, 4.5%, 4%, 3.5%, 3%, 2.5%, 2%, 1.5%, or less) identity to a wild type Anellovirus genome sequence. In some embodiments, the genetic element has no more than 1.5%, 2%, 2.5%, 3%, 3.5%, 4%, 4.5%, 5%, 5.5%, 6%, 7%, 8%, 9%, 10%, 15%, 20%, 25%, 30%, 40%, 50%, 60%, 70%, 75%, or 80% identity to a wild type Anellovirus genome sequence. In some embodiments, the genetic element has greater than about 2000, 3000, 4000, 4500, or 5000 contiguous nucleotides of non-Anellovirus genome sequence. In some embodiments, the genetic element has greater than about 2000 to 5000, 2500 to 4500, 3000 to 4500, 2500 to 4500, 3500, or 4000, 4500 (e.g., between about 3000 to 4500) nucleotides nucleotides of non-Anellovirus genome sequence.

[0561] In some embodiments of the systems and methods herein, a vector (e.g., an anellovector) is made by introducing into a cell a first nucleic acid molecule that is a genetic element or genetic element construct, e.g., a tandem construct, and a second nucleic acid molecule encoding one or more additional proteins (e.g., a Rep molecule and/or a capsid protein), e.g., as described herein. In some embodiments, the first nucleic acid molecule and the second nucleic acid molecule are attached to each other (e.g., in a genetic element construct described herein, e.g., in cis). In some embodiments, the first nucleic acid molecule and the second nucleic acid molecule are separate (e.g, in trans). In some embodiments, the first nucleic acid molecule is a plasmid, cosmid, bacmid, minicircle, or artificial chromosome. In some embodiments, the second nucleic acid molecule is a plasmid, cosmid, bacmid, minicircle, or artificial chromosome. In some embodiments, the second nucleic acid molecule is integrated into the genome of the host cell.

[0562] In some embodiments, the method further includes introducing the first nucleic acid molecule and/or the second nucleic acid molecule into the host cell. In some embodiments, the second nucleic acid molecule is introduced into the host cell prior to, concurrently with, or after the first nucleic acid molecule. In other embodiments, the second nucleic acid molecule is integrated into the genome of the host cell. In some embodiments, the second nucleic acid molecule is or comprises or is part of a helper construct, helper virus or other helper vector, e.g., as described herein.

### Cis/Trans Constructs

[0563] In some embodiments, a genetic element construct as described herein comprises one or more sequences encoding one or more Anellovirus ORFs, e.g., proteinaceous exterior components (e.g., polypeptides encoded by an Anellovirus ORF1 nucleic acid, e.g., as described herein). For example, the genetic element construct may comprise a nucleic acid sequence encoding an Anellovirus ORF1 molecule. Such genetic element constructs can be suitable for introducing the genetic element and the Anellovirus ORF(s) into a host cell in cis. In other embodiments, a genetic element construct as described herein does not comprise sequences encoding one or more Anellovirus ORFs, e.g., proteinaccous exterior components (e.g., polypeptides encoded by an Anellovirus ORF1 nucleic acid, e.g., as described herein). For example, the genetic element construct may not comprise a nucleic acid sequence encoding an Anellovirus ORF1 molecule. Such genetic element constructs can be suitable for introducing the genetic element into a host cell, with the one or more Anellovirus ORFs to be provided in trans (e.g., via introduction of a second nucleic acid construct encoding one or more of the Anellovirus ORFs, or via an Anellovirus ORF cassette integrated into the genome of the host cell). In some embodiments, an ORF1 molecule is provided in trans, e.g., as described herein. In some embodiments, an ORF2 molecule is provided in trans, e.g., as described herein. In some embodiments, an ORF1 molecule and an ORF1 molecule are both provided in trans, e.g., as described herein.

[0564] In some embodiments, the genetic element construct comprises a sequence encoding an Anellovirus ORF1 molecule, or a splice variant or functional fragment thereof (e.g., a jelly-roll region, e.g., as described herein). In embodiments, the portion of the genetic element that does not comprise the sequence of the genetic element comprises the sequence encoding the Anellovirus ORF1 molecule, or splice variant or functional fragment thereof (e.g., in a cassette comprising a promoter and the sequence encoding the Anellovirus ORF1 molecule, or splice variant or functional fragment thereof). In further embodiments, the portion of the construct comprising the sequence of the genetic element comprises a sequence encoding an Anellovirus ORF1 molecule, or a splice variant or functional fragment thereof (e.g., a jelly-roll region, e.g., as described herein). In embodiments, enclosure of such a genetic element in a proteinaceous exterior (e.g., as described herein) produces a replication-component anellovector (e.g., an anellovector that upon infecting a cell, enables the cell to produce additional copies of the anellovector without introducing further nucleic acid constructs, e.g., encoding one or more Anellovirus ORFs as described herein, into the cell).

[0565] In other embodiments, the genetic element does not comprise a sequence encoding an Anellovirus ORF1 molecule, or a splice variant or functional fragment thereof (e.g., a jelly-roll region, e.g., as described herein). In embodiments, enclosure of such a genetic element in a proteinaceous exterior (e.g., as described herein) produces a replication-incompetent anellovector (e.g., an anellovector that, upon infecting a cell, does not enable the infected cell to produce additional anellovectors, e.g., in the absence of one or more additional constructs, e.g., encoding one or more Anellovirus ORFs as described herein).

### Expression Cassettes

[0566] In some embodiments, a genetic element construct comprises one or more cassettes for expression of a polypeptide or noncoding RNA (e.g., a miRNA or an siRNA). In some embodiments, the genetic element construct comprises a cassette for expression of an effector (e.g., an exogenous or endogenous effector), e.g., a polypeptide or noncoding RNA, as described herein. In some embodiments, the genetic element construct comprises a cassette for expression of an Anellovirus protein (e.g., an Anellovirus ORF1, ORF2, ORF2/2, ORF2/3, ORF1/1, or ORF1/2, or a functional fragment thereof). The expression cassettes may, in some embodiments, be located within the genetic element sequence. In embodiments, an expression cassette for an effector is located within the genetic element sequence. In embodiments, an expression cassette for an Anellovirus protein is located within the genetic element sequence. In other embodiments, the expression cassettes are located at a position within the genetic element construct outside of the sequence of the genetic element (e.g., in the backbone). In embodiments, an expression cassette for an Anellovirus protein is located at a position within the genetic element construct outside of the sequence of the genetic element (e.g., in the backbone).

[0567] A polypeptide expression cassette generally comprises a promoter and a coding sequence encoding a polypeptide, e.g., an effector (e.g., an exogenous or endogenous effector as described herein) or an Anellovirus protein (e.g., a sequence encoding an Anellovirus ORF1, ORF2, ORF2/2, ORF2/3, ORF1/1, or ORF1/2, or a functional fragment thereof). Exemplary promoters that can be included in an polypeptide expression cassette (e.g., to drive expression of the polypeptide) include, without limitation, constitutive promoters (e.g., CMV, RSV, PGK, EFla, or SV40), cell or tissue-specific promoters (e.g., skeletal α-actin promoter, myosin light chain 2A promoter, dystrophin promoter, muscle creatine kinase promoter, liver albumin promoter, hepatitis B virus core promoter, osteocalcin promoter, bone sialoprotein promoter, CD2 promoter, immunoglobulin heavy chain promoter, T cell receptor a chain promoter, neuron-specific enolase (NSE) promoter, or neurofilament light-chain promoter), and inducible promoters (e.g., zinc-inducible sheep metallothionine (MT) promoter; the dexamethasone (Dex)-inducible mouse mammary tumor virus (MMTV) promoter; the T7 polymerase promoter system, tetracycline-repressible system, tetracycline-inducible system, RU486-inducible system, rapamycin-inducible system), e.g., as described herein. In some embodiments, the expression cassette further comprises an enhancer, e.g., as described herein.

### Design and Production of a Genetic Element Construct

[0568] Various methods are available for synthesizing a genetic element construct. For instance, the genetic element construct sequence may be divided into smaller overlapping pieces (e.g., in the range of about 100 bp to about 10 kb segments or individual ORFs) that are easier to synthesize. These DNA segments are synthesized from a set of overlapping single-stranded oligonucleotides. The resulting overlapping synthons are then assembled into larger pieces of DNA, e.g., the genetic element construct. The segments or ORFs may be assembled into the genetic element construct, e.g., by in vitro recombination or unique restriction sites at 5′ and 3′ ends to enable ligation.

[0569] The genetic element construct can be synthesized with a design algorithm that parses the construct sequence into oligo-length fragments, creating suitable design conditions for synthesis that take into account the complexity of the sequence space. Oligos are then chemically synthesized on semiconductor-based, high-density chips, where over 200,000 individual oligos are synthesized per chip. The oligos are assembled with an assembly techniques, such as BioFab®, to build longer DNA segments from the smaller oligos. This is done in a parallel fashion, so hundreds to thousands of synthetic DNA segments are built at one time.

[0570] Each genetic element construct or segment of the genetic element construct may be sequence verified. In some embodiments, high-throughput sequencing of RNA or DNA can take place using Any Dot.chips (Genovoxx, Germany), which allows for the monitoring of biological processes (e.g., miRNA expression or allele variability (SNP detection). Other high-throughput sequencing systems include those disclosed in Venter, J., et al. Science 16 Feb. 2001; Adams, M. et al, Science 24 Mar. 2000; and M. J. Levene, et al. Science 299:682-686, January 2003; as well as US Publication Application No. 20030044781 and 2006/0078937. Overall such systems involve sequencing a target nucleic acid molecule having a plurality of bases by the temporal addition of bases via a polymerization reaction that is measured on a molecule of nucleic acid, i.e., the activity of a nucleic acid polymerizing enzyme on the template nucleic acid molecule to be sequenced is followed in real time. In some embodiments, shotgun sequencing is performed.

[0571] A genetic element construct can be designed such that factors for replicating or packaging may be supplied in cis or in trans, relative to the genetic element. For example, when supplied in cis, the genetic element may comprise one or more genes encoding an Anellovirus ORF1, ORF1/1, ORF1/2, ORF2, ORF2/2, ORF2/3, or ORF2t/3, e.g., as described herein. In some embodiments, replication and/or packaging signals can be incorporated into a genetic element, for example, to induce amplification and/or encapsulation. In some embodiments, an effector is inserted into a specific site in the genome. In some embodiments, one or more viral ORFs are replaced with an effector.

[0572] In another example, when replication or packaging factors are supplied in trans, the genetic element may lack genes encoding one or more of an Anellovirus ORF1, ORF1/1, ORF1/2, ORF2, ORF2/2, ORF2/3, or ORF2t/3, e.g., as described herein; this protein or proteins may be supplied, e.g., by another nucleic acid, e.g., a helper nucleic acid. In some embodiments, minimal cis signals (e.g., 5′ UTR and/or GC-rich region) are present in the genetic element. In some embodiments, the genetic element does not encode replication or packaging factors (e.g., replicase and/or capsid proteins). Such factors may, in some embodiments, be supplied by one or more helper nucleic acids (e.g., a helper viral nucleic acid, a helper plasmid, or a helper nucleic acid integrated into the host cell genome). In some embodiments, the helper nucleic acids express proteins and/or RNAs sufficient to induce amplification and/or packaging, but may lack their own packaging signals. In some embodiments, the genetic element and the helper nucleic acid are introduced into the host cell (e.g., concurrently or separately), resulting in amplification and/or packaging of the genetic element but not of the helper nucleic acid.

[0573] In some embodiments, the genetic element construct may be designed using computer-aided design tools.

[0574] General methods of making constructs are described in, for example, Khudyakov & Fields, Artificial DNA: Methods and Applications, CRC Press (2002); in Zhao, Synthetic Biology: Tools and Applications, (First Edition), Academic Press (2013); and Egli & Herdewijn, Chemistry and Biology of Artificial Nucleic Acids, (First Edition), Wiley-VCH (2012).

### Effectors

[0575] The compositions and methods described herein can be used to produce a genetic element of an anellovector comprising a sequence encoding an effector (e.g., an exogenous effector or an endogenous effector), e.g., as described herein. The effector may be, in some instances, an endogenous effector or an exogenous effector. In some embodiments, the effector is a therapeutic effector. In some embodiments, the effector comprises a polypeptide (e.g., a therapeutic polypeptide or peptide, e.g., as described herein). In some embodiments, the effector comprises a non-coding RNA (e.g., an miRNA, siRNA, shRNA, mRNA, lncRNA, RNA, DNA, antisense RNA, or gRNA). In some embodiments, the effector comprises a regulatory nucleic acid, e.g., as described herein.

[0576] In some embodiments, the effector-encoding sequence may be inserted into the genetic element e.g., at a non-coding region, e.g., a noncoding region disposed 3′ of the open reading frames and 5′ of the GC-rich region of the genetic element, in the 5′ noncoding region upstream of the TATA box, in the 5′ UTR, in the 3′ noncoding region downstream of the poly-A signal, or upstream of the GC-rich region. In some embodiments, the effector-encoding sequence may be inserted into the genetic element, e.g., in a coding sequence (e.g., in a sequence encoding an Anellovirus ORF1, ORF1/1, ORF1/2, ORF2, ORF2/2, ORF2/3, and/or ORF2t/3, e.g., as described herein). In some embodiments, the effector-encoding sequence replaces all or a part of the open reading frame. In some embodiments, the genetic element comprises a regulatory sequence (e.g., a promoter or enhancer, e.g., as described herein) operably linked to the effector-encoding sequence.

### Host Cells

[0577] The anellovectors described herein can be produced, for example, in a host cell. Generally, a host cell is provided that comprises an anellovector genetic element and the components of an anellovector proteinaceous exterior (e.g., a polypeptide encoded by an Anellovirus ORF1 nucleic acid or an Anellovirus ORF1 molecule). The host cell is then incubated under conditions suitable for enclosure of the genetic element within the proteinaceous exterior (e.g., culture conditions as described herein). In some embodiments, the host cell is further incubated under conditions suitable for release of the anellovector from the host cell, e.g., into the surrounding supernatant. In some embodiments, the host cell is lysed for harvest of anellovectors from the cell lysate. In some embodiments, an anellovector may be introduced to a host cell line grown to a high cell density. In some embodiments, a host cell is an Expi-293 cell.

Introduction of Genetic Elements into Host Cells

[0578] The genetic element, or a nucleic acid construct comprising the sequence of a genetic element, may be introduced into a host cell. In some embodiments, the genetic element itself is introduced into the host cell. In some embodiments, a genetic element construct comprising the sequence of the genetic element (e.g., as described herein) is introduced into the host cell. A genetic element or genetic element construct can be introduced into a host cell, for example, using methods known in the art. For example, a genetic element or genetic element construct can be introduced into a host cell by transfection (e.g., stable transfection or transient transfection). In embodiments, the genetic element or genetic element construct is introduced into the host cell by lipofectamine transfection. In embodiments, the genetic element or genetic element construct is introduced into the host cell by calcium phosphate transfection. In some embodiments, the genetic element or genetic element construct is introduced into the host cell by electroporation. In some embodiments, the genetic element or genetic element construct is introduced into the host cell using a gene gun. In some embodiments, the genetic element or genetic element construct is introduced into the host cell by nucleofection. In some embodiments, the genetic element or genetic element construct is introduced into the host cell by PEI transfection. In some embodiments, the genetic element is introduced into the host cell by contacting the host cell with an anellovector comprising the genetic element

[0579] In embodiments, the genetic element construct is capable of replication once introduced into the host cell. In embodiments, the genetic element can be produced from the genetic element construct once introduced into the host cell. In some embodiments, the genetic element is produced in the host cell by a polymerase, e.g., using the genetic element construct as a template.

[0580] In some embodiments, the genetic elements or vectors comprising the genetic elements are introduced (e.g., transfected) into cell lines that express a viral polymerase protein in order to achieve expression of the anellovector. To this end, cell lines that express an anellovector polymerase protein may be utilized as appropriate host cells. Host cells may be similarly engineered to provide other viral functions or additional functions.

[0581] To prepare the anellovector disclosed herein, a genetic element construct may be used to transfect cells that provide anellovector proteins and functions required for replication and production. Alternatively, cells may be transfected with a second construct (e.g., a virus) providing anellovector proteins and functions before, during, or after transfection by the genetic element or vector comprising the genetic element disclosed herein. In some embodiments, the second construct may be useful to complement production of an incomplete viral particle. The second construct (e.g., virus) may have a conditional growth defect, such as host range restriction or temperature sensitivity, e.g., which allows the subsequent selection of transfectant viruses. In some embodiments, the second construct may provide one or more replication proteins utilized by the host cells to achieve expression of the anellovector. In some embodiments, the host cells may be transfected with vectors encoding viral proteins such as the one or more replication proteins. In some embodiments, the second construct comprises an antiviral sensitivity.

[0582] The genetic element or vector comprising the genetic element disclosed herein can, in some instances, be replicated and produced into anellovectors using techniques known in the art. For example, various viral culture methods are described, e.g., in U.S. Pat. Nos. 4,650,764; 5,166,057; 5,854,037; European Patent Publication EP 0702085A1; U.S. patent application Ser. No. 09/152,845: International Patent Publications PCT WO97/12032; WO96/34625; European Patent Publication EP-A780475; WO 99/02657; WO 98/53078; WO 98/02530; WO 99/15672; WO 98/13501; WO 97/06270; and EPO 780 47SA1, each of which is incorporated by reference herein in its entirety.

### Methods for Providing Protein(s) in Cis or Trans

[0583] In some embodiments (e.g., cis embodiments described herein), the genetic element construct further comprises one or more expression cassettes comprising a coding sequence for an Anellovirus ORF (e.g., an Anellovirus ORF1, ORF2, ORF2/2, ORF2/3, ORF1/1, or ORF1/2, or a functional fragment thereof). In embodiments, the genetic element construct comprises an expression cassette comprising a coding sequence for an Anellovirus ORF1, or a splice variant or functional fragment thereof. Such genetic element constructs, which comprise expression cassettes for the effector as well as the one or more Anellovirus ORFs, may be introduced into host cells. Host cells comprising such genetic element constructs may, in some instances, be capable of producing the genetic elements and components for proteinaceous exteriors, and for enclosure of the genetic elements within proteinaceous exteriors, without requiring additional nucleic acid constructs or integration of expression cassettes into the host cell genome. In other words, such genetic element constructs may be used for cis anellovector production methods in host cells, e.g., as described herein.

[0584] In some embodiments (e.g., trans embodiments described herein), the genetic element does not comprise an expression cassette comprising a coding sequence for one or more Anellovirus ORFs (e.g., an Anellovirus ORF1, ORF2, ORF2/2, ORF2/3, ORF1/1, or ORF1/2, or a functional fragment thereof). In embodiments, the genetic element construct does not comprise an expression cassette comprising a coding sequence for an Anellovirus ORF1, or a splice variant or functional fragment thereof. Such genetic element constructs, which comprise expression cassettes for the effector but lack expression cassettes for one or more Anellovirus ORFs (e.g., Anellovirus ORF1 or a splice variant or functional fragment thereof), may be introduced into host cells. Host cells comprising such genetic element constructs may, in some instances, require additional nucleic acid constructs or integration of expression cassettes into the host cell genome for production of one or more components of the anellovector (e.g., the proteinaceous exterior proteins). In some embodiments, host cells comprising such genetic element constructs are incapable of enclosure of the genetic elements within proteinaceous exteriors in the absence of an additional nucleic construct encoding an Anellovirus ORF1 molecule. In other words, such genetic element constructs may be used for trans anellovector production methods in host cells, e.g., as described herein.

[0585] In some embodiments (e.g., cis embodiments described herein), the genetic element construct further comprises one or more expression cassettes comprising a coding sequence for one or more non-Anellovirus ORF (e.g., a non-Anellovirus Rep molecule, e.g., an AAV Rep molecule, e.g., an AAV Rep protein, e.g., an AAV Rep2 protein). Such genetic element constructs, which comprise expression cassettes for the effector as well as the one or more non-Anellovirus ORFs, may be introduced into host cells. Host cells comprising such genetic element constructs may, in some instances, be capable of producing the genetic elements and components for proteinaceous exteriors, and for enclosure of the genetic elements within proteinaceous exteriors, without requiring additional nucleic acid constructs or integration of expression cassettes into the host cell genome. In other words, such genetic element constructs may be used for cis anellovector production methods in host cells, e.g., as described herein.

[0586] In some embodiments (e.g., trans embodiments described herein), the genetic element does not comprise an expression cassette comprising a coding sequence for one or more non-Anellovirus ORFs (e.g., a non-Anellovirus Rep molecule, e.g., an AAV Rep molecule, e.g., an AAV Rep protein, e.g., an AAV Rep2 protein). Such genetic element constructs, which comprise expression cassettes for the effector but lack expression cassettes for one or more non-Anellovirus ORFs (e.g., a non-Anellovirus Rep molecule, e.g., an AAV Rep molecule, e.g., an AAV Rep protein, e.g., an AAV Rep2 protein), may be introduced into host cells. Host cells comprising such genetic element constructs may, in some instances, require additional nucleic acid constructs or integration of expression cassettes into the host cell genome for production of one or more components of the anellovector (e.g., for replication of the genetic element). In some embodiments, host cells comprising such genetic element constructs are incapable of replicating the genetic elements in the absence of an additional nucleic construct, e.g., encoding a non-Anellovirus Rep molecule, e.g., an AAV Rep molecule, e.g., an AAV Rep protein, e.g., an AAV Rep2 protein. In other words, such genetic element constructs may be used for trans anellovector production methods in host cells, e.g., as described herein.

### Exemplary Cell Types

[0587] Exemplary host cells suitable for production of anellovectors include, without limitation, mammalian cells, e.g., human cells and insect cells. In some embodiments, the host cell is a human cell or cell line. In some embodiments, the cell is an immune cell or cell line, e.g., a T cell or cell line, a cancer cell line, a hepatic cell or cell line, a neuron, a glial cell, a skin cell, an epithelial cell, a mesenchymal cell, a blood cell, an endothelial cell, an eye cell, a gastrointestinal cell, a progenitor cell, a precursor cell, a stem cell, a lung cell, a cardiac cell, or a muscle cell. In some embodiments, the host cell is an animal cell (e.g., a mouse cell, rat cell, rabbit cell, or hamster cell, or insect cell).

[0588] In some embodiments, the host cell is a lymphoid cell. In some embodiments, the host cell is a T cell or an immortalized T cell. In embodiments, the host cell is a Jurkat cell. In embodiments, the host cell is a MOLT cell (e.g., a MOLT-4 or a MOLT-3 cell). In embodiments, the host cell is a MOLT-4 cell. In embodiments, the host cell is a MOLT-3 cell. In some embodiments, the host cell is an acute lymphoblastic leukemia (ALL) cell, e.g., a MOLT cell, e.g., a MOLT-4 or MOLT-3 cell. In some embodiments, the host cell is a B cell or an immortalized B cell. In some embodiments, the host cell comprises a genetic element construct (e.g., as described herein).

[0589] In some embodiments, the host cell is a MOLT cell (e.g., a MOLT-4 or a MOLT-3 cell).

[0590] In some embodiments, the host cell is an acute lymphoblastic leukemia (ALL) cell, e.g., a MOLT cell, e.g., a MOLT-4 or MOLT-3 cell.

[0591] In some embodiments, the host cell is an Expi-293 cell. In some embodiments, the host cell is an Expi-293F cell.

[0592] In an aspect, the present disclosure provides a method of manufacturing an anellovector comprising a genetic element enclosed in a proteinaceous exterior, the method comprising providing a MOLT-4 cell comprising an anellovector genetic element, and incubating the MOLT-4 cell under conditions that allow the anellovector genetic element to become enclosed in a proteinaceous exterior in the MOLT-4 cell. In some embodiments, the MOLT-4 cell further comprises one or more Anellovirus proteins (e.g., an Anellovirus ORF1 molecule) that form part or all of the proteinaceous exterior. In some embodiments, the anellovector genetic element is produced in the MOLT-4 cell, e.g., from a genetic element construct (e.g., as described herein). In some embodiments, the method further comprises introducing the anellovector genetic element construct into the MOLT-4 cell.

[0593] In an aspect, the present disclosure provides a method of manufacturing an anellovector comprising a genetic element enclosed in a proteinaceous exterior, the method comprising providing a MOLT-3 cell comprising an anellovector genetic element, and incubating the MOLT-3 cell under conditions that allow the anellovector genetic element to become enclosed in a proteinaceous exterior in the MOLT-3 cell. In some embodiments, the MOLT-3 cell further comprises one or more Anellovirus proteins (e.g., an Anellovirus ORF1 molecule) that form part or all of the proteinaceous exterior. In some embodiments, the anellovector genetic element is produced in the MOLT-3 cell, e.g., from a genetic element construct (e.g., as described herein). In some embodiments, the method further comprises introducing the anellovector genetic element construct into the MOLT-3 cell.

[0594] In some embodiments, the host cell is a human cell. In embodiments, the host cell is a HEK293T cell, HEK293F cell, A549 cell, Jurkat cell, Raji cell, Chang cell, HeLa cell Phoenix cell, MRC-5 cell, NCI-H292 cell, or Wi38 cell. In some embodiments, the host cell is a non-human primate cell (e.g., a Vero cell, CV-1 cell, or LLCMK2 cell). In some embodiments, the host cell is a murine cell (e.g., a McCoy cell). In some embodiments, the host cell is a hamster cell (e.g., a CHO cell or BHK 21 cell). In some embodiments, the host cell is a MARC-145, MDBK, RK-13, or EEL cell. In some embodiments, the host cell is an epithelial cell (e.g., a cell line of epithelial lineage).

[0595] In some embodiments, the anellovector is cultivated in continuous animal cell line (e.g., immortalized cell lines that can be serially propagated). According to one embodiment of the invention, the cell lines may include porcine cell lines. The cell lines envisaged in the context of the present invention include immortalised porcine cell lines such as, but not limited to the porcine kidney epithelial cell lines PK-15 and SK, the monomyeloid cell line 3D4/31 and the testicular cell line ST.

### Culture Conditions

[0596] Host cells comprising a genetic element and components of a proteinaceous exterior can be incubated under conditions suitable for enclosure of the genetic element within the proteinaceous exterior, thereby producing an anellovector. Suitable culture conditions include those described, e.g., in any of Examples 4, 5, 7, 8, 9, 10, 11, or 15. In some embodiments, the host cells are incubated in liquid media (e.g., Grace's Supplemented (TNM-FH), IPL-41, TC-100, Schneider's Drosophila, SF-900 II SFM, or and EXPRESS-FIVE™ SFM). In some embodiments, the host cells are incubated in adherent culture. In some embodiments, the host cells are incubated in suspension culture. In some embodiments, the host cells are incubated in a tube, bottle, microcarrier, or flask. In some embodiments, the host cells are incubated in a dish or well (e.g., a well on a plate). In some embodiments, the host cells are incubated under conditions suitable for proliferation of the host cells. In some embodiments, the host cells are incubated under conditions suitable for the host cells to release anellovectors produced therein into the surrounding supernatant.

[0597] The production of anellovector-containing cell cultures according to the present invention can be carried out in different scales (e.g., in flasks, roller bottles or bioreactors). The media used for the cultivation of the cells to be infected generally comprise the standard nutrients required for cell viability, but may also comprise additional nutrients dependent on the cell type. Optionally, the medium can be protein-free and/or serum-free. Depending on the cell type the cells can be cultured in suspension or on a substrate. In some embodiments, different media is used for growth of the host cells and for production of anellovectors.

### Harvest

[0598] Anellovectors produced by host cells can be harvested, e.g., according to methods known in the art. For example, anellovectors released into the surrounding supernatant by host cells in culture can be harvested from the supernatant (e.g., as described in Example 4). In some embodiments, the supernatant is separated from the host cells to obtain the anellovectors. In some embodiments, the host cells are lysed before or during harvest. In some embodiments, the anellovectors are harvested from the host cell lysates (e.g., as described in Example 10). In some embodiments, the anellovectors are harvested from both the host cell lysates and the supernatant. In some embodiments, the purification and isolation of anellovectors is performed according to known methods in virus production, for example, as described in Rinaldi, et al., DNA Vaccines: Methods and Protocols (Methods in Molecular Biology), 3rd ed. 2014, Humana Press (incorporated herein by reference in its entirety). In some embodiments, the anellovector may be harvested and/or purified by separation of solutes based on biophysical properties, e.g., ion exchange chromatography or tangential flow filtration, prior to formulation with a pharmaceutical excipient.

### In Vitro Assembly Methods

[0599] An anellovector may be produced, e.g., by in vitro assembly, e.g., in a cell-free suspension or in a supernatant. In some embodiments, the genetic element is contacted to an ORF1 molecule in vitro. e.g., under conditions that allow for assembly.

[0600] In some embodiments, baculovirus constructs are used to produce Anellovirus proteins. These proteins may then be used, e.g., for in vitro assembly to encapsidate a genetic element, e.g., a genetic element comprising RNA. In some embodiments, a polynucleotide encoding one or more Anellovirus protein is fused to a promoter for expression in a host cell, e.g., an insect or animal cell. In some embodiments, the polynucleotide is cloned into a baculovirus expression system. In some embodiments, a host cell, e.g., an insect cell is infected with the baculovirus expression system and incubated for a period of time. In some embodiments, an infected cell is incubated for about 1, 2, 3, 4, 5, 10, 15, or 20 days. In some embodiments, an infected cell is lysed to recover the Anellovirus protein.

[0601] In some embodiments, an isolated Anellovirus protein is purified. In some embodiments, an Anellovirus protein is purified using purification techniques including but not limited to chelating purification, heparin purification, gradient sedimentation purification, and/or SEC purification. In some embodiments, a purified Anellovirus protein is mixed with a genetic element to encapsidate the genetic element, e.g., a genetic element comprising RNA. In some embodiments, a genetic element is encapisdated using an ORF1 protein, ORF2 protein, or modified version thereof. In some embodiments two nucleic acids are encapsidated. For instance, the first nucleic acid may be an mRNA e.g., chemically modified mRNA, and the second nucleic acid may be DNA.

[0602] In some embodiments, DNA encoding Anellovirus (AV) ORF1 (e.g., wildtype ORF1 protein, ORF1 proteins harboring mutations, e.g., to improve assembly efficiency, yield or stability, chimeric ORF1 protein, or fragments thereof) are expressed in insect cell lines (e.g., Sf9 and/or HighFive), animal cell lines (e.g., chicken cell lines (MDCC)), bacterial cells (e.g., E. coli) and/or mammalian cell lines (e.g., 293expi and/or MOLT4). In some embodiments, DNA encoding AV ORF1 may be untagged. In some embodiments, DNA encoding AV ORF1 may contain tags fused N-terminally and/or C-terminally. In some embodiments, DNA encoding AV ORF1 may harbor mutations, insertions or deletions within the ORF1 protein to introduce a tag, e.g., to aid in purification and/or identity determination, e.g., through immunostaining assays (including but not limited to ELISA or Western Blot). In some embodiments, DNA encoding AV ORF1 may be expressed alone or in combination with any number of helper proteins. In some embodiments, DNA encoding AV ORF1 is expressed in combination with AV ORF2 and/or ORF3 proteins.

[0603] In some embodiments, ORF1 proteins harboring mutations to improve assembly efficiency may include, but are not limited to, ORF1 proteins that harbor mutations introduced into the N-terminal Arginine Arm (ARG arm) to alter the pI of the ARG arm permitting pH sensitive nucleic acid binding to trigger particle assembly (SEQ ID 3-5). In some embodiments, ORF1 proteins harboring mutations that improve stability may include mutations to an interprotomer contacting beta strands F and G of the canonical jellyroll beta-barrel to alter hydrophobic state of the protomer surface and improve thermodynamic favorability of capsid formation.

[0604] In some embodiments, chimeric ORF1 proteins may include, but are not limited to, ORF1 proteins which have a portion or portions of their sequence replaced with comparable portions from another capsid protein, e.g., Beak and Feather Disease Virus (BFDV) capsid protein, or Hepatitis E capsid protein, e.g., ARG arm or F and G beta strands of Ring 9 ORF1 replaced with the comparable components from BFDV capsid protein. In some embodiments, chimeric ORF1 proteins may also include ORF1 proteins which have a portion or portions of their sequence replaced with comparable portions of another AV ORF1 protein (e.g., jellyroll fragments or the C-terminal portion of Ring 2 ORF1 replaced with comparable portions of Ring 9 ORF1.

[0605] In some embodiments, the present disclosure describes a method of making an anellovector, the method comprising: (a) providing a mixture comprising: (i) a genetic element comprising RNA, and (ii) an ORF1 molecule; and (b) incubating the mixture under conditions suitable for enclosing the genetic element within a proteinaceous exterior comprising the ORF1 molecule, thereby making an anellovector; optionally wherein the mixture is not comprised in a cell. In some embodiments, the method further comprises, prior to the providing of (a), expressing the ORF1 molecule, e.g., in a host cell (e.g., an insect cell or a mammalian cell). In some embodiments, the expressing comprises incubating a host cell (e.g., an insect cell or a mammalian cell) comprising a nucleic acid molecule (e.g., a baculovirus expression vector) encoding the ORF1 molecule under conditions suitable for producing the ORF1 molecule. In some embodiments, the method further comprises, prior to the providing of (a), purifying the ORF1 molecule expressed by the host cell. In some embodiments, the method is performed in a cell-free system. In some embodiments, the present disclosure describes a method of manufacturing an anellovector composition, comprising: (a) providing a plurality of anellovectors or compositions according to any of the preceding embodiments; (b) optionally evaluating the plurality for one or more of: a contaminant described herein, an optical density measurement (e.g., OD 260), particle number (e.g., by HPLC), infectivity (e.g., particle:infectious unit ratio, e.g., as determined by fluorescence and/or ELISA); and (c) formulating the plurality of anellovectors, e.g., as a pharmaceutical composition suitable for administration to a subject, e.g., if one or more of the parameters of (b) meet a specified threshold.

### Enrichment and Purification

[0606] Harvested anellovectors can be purified and/or enriched, e.g., to produce an anellovector preparation. In some embodiments, the harvested anellovectors are isolated from other constituents or contaminants present in the harvest solution, e.g., using methods known in the art for purifying viral particles (e.g., purification by sedimentation, chromatography, and/or ultrafiltration). In some embodiments, the purification steps comprise removing one or more of serum, host cell DNA, host cell proteins, particles lacking the genetic element, and/or phenol red from the preparation. In some embodiments, the harvested anellovectors are enriched relative to other constituents or contaminants present in the harvest solution, e.g., using methods known in the art for enriching viral particles.

[0607] In some embodiments, the resultant preparation or a pharmaceutical composition comprising the preparation will be stable over an acceptable period of time and temperature, and/or be compatible with the desired route of administration and/or any devices this route of administration will require, e.g., needles or syringes.

### III. Vectors

[0608] The genetic element described herein may be included in a vector. Suitable vectors as well as methods for their manufacture and their use are well known in the prior art.

[0609] In one aspect, the invention includes a vector comprising a genetic element comprising (i) a sequence encoding a non-pathogenic exterior protein, (ii) an exterior protein binding sequence that binds the genetic element to the non-pathogenic exterior protein, and (iii) a sequence encoding a regulatory nucleic acid.

[0610] The genetic element or any of the sequences within the genetic element can be obtained using any suitable method. Various recombinant methods are known in the art, such as, for example screening libraries from cells harboring viral sequences, deriving the sequences from a vector known to include the same, or isolating directly from cells and tissues containing the same, using standard techniques. Alternatively or in combination, part or all of the genetic element can be produced synthetically, rather than cloned.

[0611] In some embodiments, the vector includes regulatory elements, nucleic acid sequences homologous to target genes, and various reporter constructs for causing the expression of reporter molecules within a viable cell and/or when an intracellular molecule is present within a target cell.

[0612] Reporter genes are used for identifying potentially transfected cells and for evaluating the functionality of regulatory sequences. In general, a reporter gene is a gene that is not present in or expressed by the recipient organism or tissue and that encodes a polypeptide whose expression is manifested by some easily detectable property, e.g., enzymatic activity. Expression of the reporter gene is assayed at a suitable time after the DNA has been introduced into the recipient cells. Suitable reporter genes may include genes encoding luciferase, beta-galactosidase, chloramphenicol acetyl transferase, secreted alkaline phosphatase, or the green fluorescent protein gene (e.g., Ui-Tei et al., 2000 FEBS Letters 479: 79-82). Suitable expression systems are well known and may be prepared using known techniques or obtained commercially. In general, the construct with the minimal 5′ flanking region showing the highest level of expression of reporter gene is identified as the promoter. Such promoter regions may be linked to a reporter gene and used to evaluate agents for the ability to modulate promoter-driven transcription.

[0613] In some embodiments, the vector is substantially non-pathogenic and/or substantially non-integrating in a host cell or is substantially non-immunogenic in a host.

[0614] In some embodiments, the vector is in an amount sufficient to modulate one or more of phenotype, virus levels, gene expression, compete with other viruses, disease state, etc. at least about 5%, 10%, 15%, 20%, 25%, 30%, 35%, 40%, 45%, 50%, or more.

### IV. Compositions

[0615] The anellovector or vector described herein may also be included in pharmaceutical compositions with a pharmaceutical excipient, e.g., as described herein. In some embodiments, the pharmaceutical composition comprises at least 10⁵, 10⁶, 10⁷, 10⁸, 10⁹, 10¹⁰, 10¹¹, 10¹², 10¹³, 10¹⁴, or 10¹⁵ anellovectors. In some embodiments, the pharmaceutical composition comprises about 10⁵-10¹⁵, 10⁵-10¹⁰, or 10¹⁰-10¹⁵ anellovectors. In some embodiments, the pharmaceutical composition comprises about 10⁸ (e.g., about 10⁵, 10⁶, 10⁷, 10⁸, 10⁹, or 10¹⁰) genomic equivalents/mL of the anellovector. In some embodiments, the pharmaceutical composition comprises 10⁵-10¹⁰, 10⁶-10¹⁰, 10⁷-10¹⁰, 10⁸-10¹⁰, 10⁹-10¹⁰, 10⁵-10⁶, 10⁵-10⁷, 10⁵-10⁸, 10⁵-10⁹, 10⁵-10¹¹, 10⁵-10¹², 10⁵-10¹³, 10⁵-10¹⁴, 10⁵-10¹⁵, or 10¹⁰-10¹⁵ genomic equivalents/mL of the anellovector, e.g., as determined according to the method of Example 18. In some embodiments, the pharmaceutical composition comprises sufficient anellovectors to deliver at least 1, 2, 5, or 10, 100, 500, 1000, 2000, 5000, 8,000, 1×10⁴, 1×10⁵, 1×10⁶, 1×10⁷ or greater copies of a genetic element comprised in the anellovectors per cell to a population of the eukaryotic cells. In some embodiments, the pharmaceutical composition comprises sufficient anellovectors to deliver at least about 1×10⁴, 1×10⁵, 1×10⁶, 1× or 10⁷, or about 1×10⁴-1×10⁵, 1×10⁴-1×10⁶, 1×10⁴-1×10⁷, 1×10⁵-1×10⁶, 1×10⁵-1×10⁷, or 1×10⁶-1×10⁷ copies of a genetic element comprised in the anellovectors per cell to a population of the eukaryotic cells.

[0616] In some embodiments, the pharmaceutical composition has one or more of the following characteristics: the pharmaceutical composition meets a pharmaceutical or good manufacturing practices (GMP) standard; the pharmaceutical composition was made according to good manufacturing practices (GMP); the pharmaceutical composition has a pathogen level below a predetermined reference value, e.g., is substantially free of pathogens; the pharmaceutical composition has a contaminant level below a predetermined reference value, e.g., is substantially free of contaminants; or the pharmaceutical composition has low immunogenicity or is substantially non-immunogenic, e.g., as described herein.

[0617] In some embodiments, the pharmaceutical composition comprises below a threshold amount of one or more contaminants. Exemplary contaminants that are desirably excluded or minimized in the pharmaceutical composition include, without limitation, host cell nucleic acids (e.g., host cell DNA and/or host cell RNA), animal-derived components (e.g., serum albumin or trypsin), replication-competent viruses, non-infectious particles, free viral capsid protein, adventitious agents, and aggregates.

[0618] In embodiments, the contaminant is host cell DNA. In embodiments, the composition comprises less than about 10 ng of host cell DNA per dose. In embodiments, the level of host cell DNA in the composition is reduced by filtration and/or enzymatic degradation of host cell DNA. In embodiments, the pharmaceutical composition consists of less than 10% (e.g., less than about 10%, 5%, 4%, 3%, 2%, 1%, 0.5%, or 0.1%) contaminant by weight.

[0619] In one aspect, the invention described herein includes a pharmaceutical composition comprising:
[0620] a) an anellovector comprising a genetic element comprising (i) a sequence encoding a non-pathogenic exterior protein, (ii) an exterior protein binding sequence that binds the genetic element to the non-pathogenic exterior protein, and (iii) a sequence encoding a regulatory nucleic acid; and a proteinaccous exterior that is associated with, e.g., envelops or encloses, the genetic element; and
[0621] b) a pharmaceutical excipient.

### Vesicles

[0622] In some embodiments, the composition further comprises a carrier component, e.g., a microparticle, liposome, vesicle, or exosome. In some embodiments, liposomes comprise spherical vesicle structures composed of a uni- or multilamellar lipid bilayer surrounding internal aqueous compartments and a relatively impermeable outer lipophilic phospholipid bilayer. Liposomes may be anionic, neutral or cationic. Liposomes are generally biocompatible, nontoxic, can deliver both hydrophilic and lipophilic drug molecules, protect their cargo from degradation by plasma enzymes, and transport their load across biological membranes (see, e.g., Spuch and Navarro, Journal of Drug Delivery, vol. 2011, Article ID 469679, 12 pages, 2011. doi: 10.1155/2011/469679 for review).

[0623] Vesicles can be made from several different types of lipids; however, phospholipids are most commonly used to generate liposomes as drug carriers. Vesicles may comprise without limitation DOTMA, DOTAP, DOTIM, DDAB, alone or together with cholesterol to yield DOTMA and cholesterol, DOTAP and cholesterol, DOTIM and cholesterol, and DDAB and cholesterol. Methods for preparation of multilamellar vesicle lipids are known in the art (see for example U.S. Pat. No. 6,693,086, the teachings of which relating to multilamellar vesicle lipid preparation are incorporated herein by reference). Although vesicle formation can be spontaneous when a lipid film is mixed with an aqueous solution, it can also be expedited by applying force in the form of shaking by using a homogenizer, sonicator, or an extrusion apparatus (see, e.g., Spuch and Navarro, Journal of Drug Delivery, vol. 2011, Article ID 469679, 12 pages, 2011. doi: 10.1155/2011/469679 for review). Extruded lipids can be prepared by extruding through filters of decreasing size, as described in Templeton et al., Nature Biotech, 15:647-652, 1997, the teachings of which relating to extruded lipid preparation are incorporated herein by reference.

[0624] As described herein, additives may be added to vesicles to modify their structure and/or properties. For example, either cholesterol or sphingomyelin may be added to the mixture to help stabilize the structure and to prevent the leakage of the inner cargo. Further, vesicles can be prepared from hydrogenated egg phosphatidylcholine or egg phosphatidylcholine, cholesterol, and dicetyl phosphate. (see, e.g., Spuch and Navarro, Journal of Drug Delivery, vol. 2011, Article ID 469679, 12 pages, 2011. doi: 10.1155/2011/469679 for review). Also, vesicles may be surface modified during or after synthesis to include reactive groups complementary to the reactive groups on the recipient cells. Such reactive groups include without limitation maleimide groups. As an example, vesicles may be synthesized to include maleimide conjugated phospholipids such as without limitation DSPE-MaL-PEG2000.

[0625] A vesicle formulation may be mainly comprised of natural phospholipids and lipids such as 1,2-distearoryl-sn-glycero-3-phosphatidyl choline (DSPC), sphingomyelin, egg phosphatidylcholines and monosialoganglioside. Formulations made up of phospholipids only are less stable in plasma. However, manipulation of the lipid membrane with cholesterol reduces rapid release of the encapsulated cargo or 1,2-dioleoyl-sn-glycero-3-phosphoethanolamine (DOPE) increases stability (see, e.g., Spuch and Navarro, Journal of Drug Delivery, vol. 2011, Article ID 469679, 12 pages, 2011. doi: 10.1155/2011/469679 for review).

[0626] In embodiments, lipids may be used to form lipid microparticles. Lipids include, but are not limited to, DLin-KC2-DMA4, C12-200 and colipids disteroylphosphatidyl choline, cholesterol, and PEG-DMG may be formulated (see, e.g., Novobrantseva, Molecular Therapy-Nucleic Acids (2012) 1, e4; doi: 10.1038/mtna.2011.3) using a spontaneous vesicle formation procedure. The component molar ratio may be about 50/10/38.5/1.5 (DLin-KC2-DMA or C12-200/disteroylphosphatidyl choline/cholesterol/PEG-DMG). Tekmira has a portfolio of approximately 95 patent families, in the U.S. and abroad, that are directed to various aspects of lipid microparticles and lipid microparticles formulations (see, e.g., U.S. Pat. Nos. 7,982,027; 7,799,565; 8,058,069; 8,283,333; 7,901,708; 7,745,651; 7,803,397; 8,101,741; 8,188,263; 7,915,399; 8,236,943 and 7,838,658 and European Pat. Nos. 1766035; 1519714; 1781593 and 1664316), all of which may be used and/or adapted to the present invention. In some embodiments, microparticles comprise one or more solidified polymer(s) that is arranged in a random manner. The microparticles may be biodegradable. Biodegradable microparticles may be synthesized, e.g., using methods known in the art including without limitation solvent evaporation, hot melt microencapsulation, solvent removal, and spray drying. Exemplary methods for synthesizing microparticles are described by Bershteyn et al., Soft Matter 4:1787-1787, 2008 and in US 2008/0014144 A1, the specific teachings of which relating to microparticle synthesis are incorporated herein by reference.

[0627] Exemplary synthetic polymers which can be used to form biodegradable microparticles include without limitation aliphatic polyesters, poly (lactic acid) (PLA), poly (glycolic acid) (PGA), co-polymers of lactic acid and glycolic acid (PLGA), polycarprolactone (PCL), polyanhydrides, poly(ortho)esters, polyurethanes, poly(butyric acid), poly(valeric acid), and poly(lactide-co-caprolactone), and natural polymers such as albumin, alginate and other polysaccharides including dextran and cellulose, collagen, chemical derivatives thereof, including substitutions, additions of chemical groups such as for example alkyl, alkylene, hydroxylations, oxidations, and other modifications routinely made by those skilled in the art), albumin and other hydrophilic proteins, zein and other prolamines and hydrophobic proteins, copolymers and mixtures thereof. In general, these materials degrade either by enzymatic hydrolysis or exposure to water, by surface or bulk erosion.

[0628] The microparticles diameter ranges from 0.1-1000 micrometers (μm). In some embodiments, their diameter ranges in size from 1-750 μm, or from 50-500 μm, or from 100-250 μm. In some embodiments, their diameter ranges in size from 50-1000 μm, from 50-750 μm, from 50-500 μm, or from 50-250 μm. In some embodiments, their diameter ranges in size from 0.05-1000 μm, from 10-1000 μm, from 100-1000 μm, or from 500-1000 μm. In some embodiments, their diameter is about 0.5 μm, about 10 μm, about 50 μm, about 100 μm, about 200 μm, about 300 μm, about 350 μm, about 400 μm, about 450 μm, about 500 μm, about 550 μm, about 600 μm, about 650 μm, about 700 μm, about 750 μm, about 800 μm, about 850 μm, about 900 μm, about 950 μm, or about 1000 μm. As used in the context of microparticle diameters, the term “about” means+/−5% of the absolute value stated.

[0629] In some embodiments, a ligand is conjugated to the surface of the microparticle via a functional chemical group (carboxylic acids, aldehydes, amines, sulfhydryls and hydroxyls) present on the surface of the particle and present on the ligand to be attached. Functionality may be introduced into the microparticles by, for example, during the emulsion preparation of microparticles, incorporation of stabilizers with functional chemical groups.

[0630] Another example of introducing functional groups to the microparticle is during post-particle preparation, by direct crosslinking particles and ligands with homo- or heterobifunctional crosslinkers. This procedure may use a suitable chemistry and a class of crosslinkers (CDI, EDAC, glutaraldehydes, etc. as discussed in more detail below) or any other crosslinker that couples ligands to the particle surface via chemical modification of the particle surface after preparation. This also includes a process whereby amphiphilic molecules such as fatty acids, lipids or functional stabilizers may be passively adsorbed and adhered to the particle surface, thereby introducing functional end groups for tethering to ligands.

[0631] In some embodiments, the microparticles may be synthesized to comprise one or more targeting groups on their exterior surface to target a specific cell or tissue type (e.g., cardiomyocytes). These targeting groups include without limitation receptors, ligands, antibodies, and the like. These targeting groups bind their partner on the cells surface. In some embodiments, the microparticles will integrate into a lipid bilayer that comprises the cell surface and the mitochondria are delivered to the cell.

[0632] The microparticles may also comprise a lipid bilayer on their outermost surface. This bilayer may be comprised of one or more lipids of the same or different type. Examples include without limitation phospholipids such as phosphocholines and phosphoinositols. Specific examples include without limitation DMPC, DOPC, DSPC, and various other lipids such as those described herein for liposomes.

[0633] In some embodiments, the carrier comprises nanoparticles, e.g., as described herein.

[0634] In some embodiments, the vesicles or microparticles described herein are functionalized with a diagnostic agent. Examples of diagnostic agents include, but are not limited to, commercially available imaging agents used in positron emissions tomography (PET), computer assisted tomography (CAT), single photon emission computerized tomography, x-ray, fluoroscopy, and magnetic resonance imaging (MRI); and contrast agents. Examples of suitable materials for use as contrast agents in MRI include gadolinium chelates, as well as iron, magnesium, manganese, copper, and chromium.

### Carriers

[0635] A composition (e.g., pharmaceutical composition) described herein may comprise, be formulated with, and/or be delivered in, a carrier. In one aspect, the invention includes a composition, e.g., a pharmaceutical composition, comprising a carrier (e.g., a vesicle, a liposome, a lipid nanoparticle, an exosome, a red blood cell, an exosome (e.g., a mammalian or plant exosome), a fusosome) comprising (e.g., encapsulating) a composition described herein (e.g., an anellovector, Anellovirus, anellovector, or genetic element described herein).

[0636] In some embodiments, the compositions and systems described herein can be formulated in liposomes or other similar vesicles. Generally, liposomes are spherical vesicle structures composed of a uni- or multilamellar lipid bilayer surrounding internal aqueous compartments and a relatively impermeable outer lipophilic phospholipid bilayer. Liposomes may be anionic, neutral or cationic. Liposomes generally have one or more (e.g., all) of the following characteristics: biocompatibility, nontoxicity, can deliver both hydrophilic and lipophilic drug molecules, can protect their cargo from degradation by plasma enzymes, and can transport their load across biological membranes and the blood brain barrier (BBB) (see, e.g., Spuch and Navarro, Journal of Drug Delivery, vol. 2011, Article ID 469679, 12 pages, 2011. doi: 10.1155/2011/469679; and Zylberberg & Matosevic. 2016. Drug Delivery, 23:9, 3319-3329, doi: 10.1080/10717544.2016.1177136).

[0637] Vesicles can be made from several different types of lipids; however, phospholipids are most commonly used to generate liposomes as drug carriers. Methods for preparation of multilamellar vesicle lipids are known (see, for example, U.S. Pat. No. 6,693,086, the teachings of which relating to multilamellar vesicle lipid preparation are incorporated herein by reference). Although vesicle formation can be spontaneous when a lipid film is mixed with an aquecous solution, it can also be expedited by applying force in the form of shaking by using a homogenizer, sonicator, or an extrusion apparatus (see, e.g., Spuch and Navarro, Journal of Drug Delivery, vol. 2011, Article ID 469679, 12 pages, 2011. doi: 10.1155/2011/469679 for review). Extruded lipids can be prepared by, e.g., extruding through filters of decreasing size, as described in Templeton et al., Nature Biotech, 15:647-652, 1997.

[0638] Lipid nanoparticles (LNPs) are another example of a carrier that provides a biocompatible and biodegradable delivery system for the pharmaceutical compositions described herein. See, e.g., Gordillo-Galeano et al. European Journal of Pharmaceutics and Biopharmaceutics. Volume 133, December 2018, Pages 285-308. Nanostructured lipid carriers (NLCs) are modified solid lipid nanoparticles (SLNs) that retain the characteristics of the SLN, improve drug stability and loading capacity, and prevent drug leakage. Polymer nanoparticles (PNPs) are an important component of drug delivery. These nanoparticles can effectively direct drug delivery to specific targets and improve drug stability and controlled drug release. Lipid-polymer nanoparticles (PLNs), a new type of carrier that combines liposomes and polymers, may also be employed. These nanoparticles possess the complementary advantages of PNPs and liposomes. A PLN is composed of a core-shell structure; the polymer core provides a stable structure, and the phospholipid shell offers good biocompatibility. As such, the two components increase the drug encapsulation efficiency rate, facilitate surface modification, and prevent leakage of water-soluble drugs. For a review, see, e.g., Li et al. 2017, Nanomaterials 7, 122; doi: 10.3390/nano7060122.

[0639] Exosomes can also be used as drug delivery vehicles for the compositions and systems described herein. For a review, see Ha et al. July 2016. Acta Pharmaceutica Sinica B. Volume 6, Issue 4, Pages 287-296; doi.org/10.1016/j.apsb.2016.02.001.

[0640] Ex vivo differentiated red blood cells can also be used as a carrier for a composition described herein. See, e.g., WO2015073587: WO2017123646: WO2017123644: WO2018102740; WO2016183482: WO2015153102: WO2018151829: WO2018009838; Shi et al. 2014. Proc Natl Acad Sci USA. 111(28): 10131-10136; U.S. Pat. No. 9,644,180; Huang et al. 2017. Nature Communications 8: 423; Shi et al. 2014. Proc Natl Acad Sci USA. 111(28): 10131-10136.

[0641] Fusosome compositions, e.g., as described in WO2018208728, can also be used as carriers to deliver a composition described herein.

### Membrane Penetrating Polypeptides

[0642] In some embodiments, the composition further comprises a membrane penetrating polypeptide (MPP) to carry the components into cells or across a membrane, e.g., cell or nuclear membrane. Membrane penetrating polypeptides that are capable of facilitating transport of substances across a membrane include, but are not limited to, cell-penetrating peptides (CPPs)(see, e.g., U.S. Pat. No. 8,603,966), fusion peptides for plant intracellular delivery (see, e.g., Ng et al., PLOS One, 2016, 11:e0154081), protein transduction domains, Trojan peptides, and membrane translocation signals (MTS) (see, e.g., Tung et al., Advanced Drug Delivery Reviews 55:281-294 (2003)). Some MPP are rich in amino acids, such as arginine, with positively charged side chains.

[0643] Membrane penetrating polypeptides have the ability of inducing membrane penetration of a component and allow macromolecular translocation within cells of multiple tissues in vivo upon systemic administration. A membrane penetrating polypeptide may also refer to a peptide which, when brought into contact with a cell under appropriate conditions, passes from the external environment in the intracellular environment, including the cytoplasm, organelles such as mitochondria, or the nucleus of the cell, in amounts significantly greater than would be reached with passive diffusion.

[0644] Components transported across a membrane may be reversibly or irreversibly linked to the membrane penetrating polypeptide. A linker may be a chemical bond, e.g., one or more covalent bonds or non-covalent bonds. In some embodiments, the linker is a peptide linker. Such a linker may be between 2-30 amino acids, or longer. The linker includes flexible, rigid or cleavable linkers.

### Combinations

[0645] In one aspect, the anellovector or composition comprising a anellovector described herein may also include one or more heterologous moiety. In one aspect, the anellovector or composition comprising a anellovector described herein may also include one or more heterologous moiety in a fusion. In some embodiments, a heterologous moiety may be linked with the genetic element. In some embodiments, a heterologous moiety may be enclosed in the proteinaceous exterior as part of the anellovector. In some embodiments, a heterologous moiety may be administered with the anellovector.

[0646] In one aspect, the invention includes a cell or tissue comprising any one of the anellovectors and heterologous moieties described herein.

[0647] In another aspect, the invention includes a pharmaceutical composition comprising a anellovector and the heterologous moiety described herein.

[0648] In some embodiments, the heterologous moiety may be a virus (e.g., an effector (e.g., a drug, small molecule), a targeting agent (e.g., a DNA targeting agent, antibody, receptor ligand), a tag (e.g., fluorophore, light sensitive agent such as KillerRed), or an editing or targeting moiety described herein. In some embodiments, a membrane translocating polypeptide described herein is linked to one or more heterologous moieties. In one embodiment, the heterologous moiety is a small molecule (e.g., a peptidomimetic or a small organic molecule with a molecular weight of less than 2000 daltons), a peptide or polypeptide (e.g., an antibody or antigen-binding fragment thereof), a nanoparticle, an aptamer, or pharmacoagent.

### Viruses

[0649] In some embodiments, the composition may further comprise a virus as a heterologous moiety, e.g., a single stranded DNA virus, e.g., Anellovirus, Bidnavirus, Circovirus, Geminivirus, Genomovirus, Inovirus, Microvirus, Nanovirus, Parvovirus, and Spiravirus. In some embodiments, the composition may further comprise a double stranded DNA virus, e.g., Adenovirus, Ampullavirus, Ascovirus, Asfarvirus, Baculovirus, Fusellovirus, Globulovirus, Guttavirus, Hytrosavirus, Herpesvirus, Iridovirus, Lipothrixvirus, Nimavirus, and Poxvirus. In some embodiments, the composition may further comprise an RNA virus, e.g., Alphavirus, Furovirus, Hepatitis virus, Hordeivirus, Tobamovirus, Tobravirus, Tricornavirus, Rubivirus, Birnavirus, Cystovirus, Partitivirus, and Reovirus. In some embodiments, the anellovector is administered with a virus as a heterologous moiety.

[0650] In some embodiments, the heterologous moiety may comprise a non-pathogenic, e.g., symbiotic, commensal, native, virus. In some embodiments, the non-pathogenic virus is one or more anelloviruses, e.g., Alphatorquevirus (TT), Betatorquevirus (TTM), and Gammatorquevirus (TTMD). In some embodiments, the anellovirus may include a Torque Teno Virus (TT), a SEN virus, a Sentinel virus, a TTV-like mini virus, a TT virus, a TT virus genotype 6, a TT virus group, a TTV-like virus DXL1, a TTV-like virus DXL2, a Torque Teno-like Mini Virus (TTM), or a Torque Teno-like Midi Virus (TTMD). In some embodiments, the non-pathogenic virus comprises one or more sequences having at least at least about 60%, 70% 80%, 85%, 90% 95%, 96%, 97%, 98% and 99% nucleotide sequence identity to any one of the nucleotide sequences described herein, e.g., as listed in any of Tables N1-N1417.

[0651] In some embodiments, the heterologous moiety may comprise one or more viruses that are identified as lacking in the subject. For example, a subject identified as having dyvirosis may be administered a composition comprising an anellovector and one or more viral components or viruses that are imbalanced in the subject or having a ratio that differs from a reference value, e.g., a healthy subject.

[0652] In some embodiments, the heterologous moiety may comprise one or more non-anelloviruses, e.g., adenovirus, herpes virus, pox virus, vaccinia virus, SV40, papilloma virus, an RNA virus such as a retrovirus, e.g., lenti virus, a single-stranded RNA virus, e.g., hepatitis virus, or a double-stranded RNA virus e.g., rotavirus. In some embodiments, the anellovector or the virus is defective, or requires assistance in order to produce infectious particles. Such assistance can be provided, e.g., by using helper cell lines that contain a nucleic acid, e.g., plasmids or DNA integrated into the genome, encoding one or more of (e.g., all of) the structural genes of the replication defective anellovector or virus under the control of regulatory sequences within the LTR. Suitable cell lines for replicating the anellovectors described herein include cell lines known in the art, e.g., A549 cells, which can be modified as described herein.

### Targeting Moiety

[0653] In some embodiments, the composition or anellovector described herein may further comprise a targeting moiety, e.g., a targeting moiety that specifically binds to a molecule of interest present on a target cell. The targeting moiety may modulate a specific function of the molecule of interest or cell, modulate a specific molecule (e.g., enzyme, protein or nucleic acid), e.g., a specific molecule downstream of the molecule of interest in a pathway, or specifically bind to a target to localize the anellovector or genetic element. For example, a targeting moiety may include a therapeutic that interacts with a specific molecule of interest to increase, decrease or otherwise modulate its function.

### Tagging or Monitoring Moiety

[0654] In some embodiments, the composition or anellovector described herein may further comprise a tag to label or monitor the anellovector or genetic element described herein. The tagging or monitoring moiety may be removable by chemical agents or enzymatic cleavage, such as proteolysis or intein splicing. An affinity tag may be useful to purify the tagged polypeptide using an affinity technique. Some examples include, chitin binding protein (CBP), maltose binding protein (MBP), glutathione-S-transferase (GST), and poly(His) tag. A solubilization tag may be useful to aid recombinant proteins expressed in chaperone-deficient species such as E. coli to assist in the proper folding in proteins and keep them from precipitating. Some examples include thioredoxin (TRX) and poly(NANP). The tagging or monitoring moiety may include a light sensitive tag, e.g., fluorescence. Fluorescent tags are useful for visualization. GFP and its variants are some examples commonly used as fluorescent tags. Protein tags may allow specific enzymatic modifications (such as biotinylation by biotin ligasc) or chemical modifications (such as reaction with FLASH-EDT2 for fluorescence imaging) to occur. Often tagging or monitoring moiety are combined, in order to connect proteins to multiple other components. The tagging or monitoring moiety may also be removed by specific proteolysis or enzymatic cleavage (e.g. by TEV protease, Thrombin, Factor Xa or Enteropeptidase).

### Nanoparticles

[0655] In some embodiments, the composition or anellovector described herein may further comprise a nanoparticle. Nanoparticles include inorganic materials with a size between about 1 and about 1000 nanometers, between about 1 and about 500 nanometers in size, between about 1 and about 100 nm, between about 50 nm and about 300 nm, between about 75 nm and about 200 nm, between about 100 nm and about 200 nm, and any range therebetween. Nanoparticles generally have a composite structure of nanoscale dimensions. In some embodiments, nanoparticles are typically spherical although different morphologies are possible depending on the nanoparticle composition. The portion of the nanoparticle contacting an environment external to the nanoparticle is generally identified as the surface of the nanoparticle. In nanoparticles described herein, the size limitation can be restricted to two dimensions and so that nanoparticles include composite structure having a diameter from about 1 to about 1000 nm, where the specific diameter depends on the nanoparticle composition and on the intended use of the nanoparticle according to the experimental design. For example, nanoparticles used in therapeutic applications typically have a size of about 200 nm or below.

[0656] Additional desirable properties of the nanoparticle, such as surface charges and steric stabilization, can also vary in view of the specific application of interest. Exemplary properties that can be desirable in clinical applications such as cancer treatment are described in Davis et al, Nature 2008 vol. 7, pages 771-782; Duncan, Nature 2006 vol. 6, pages 688-701; and Allen, Nature 2002 vol. 2 pages 750-763, each incorporated herein by reference in its entirety. Additional properties are identifiable by a skilled person upon reading of the present disclosure. Nanoparticle dimensions and properties can be detected by techniques known in the art. Exemplary techniques to detect particles dimensions include but are not limited to dynamic light scattering (DLS) and a variety of microscopies such at transmission electron microscopy (TEM) and atomic force microscopy (AFM). Exemplary techniques to detect particle morphology include but are not limited to TEM and AFM. Exemplary techniques to detect surface charges of the nanoparticle include but are not limited to zeta potential method. Additional techniques suitable to detect other chemical properties comprise by ¹H, ¹¹B, and ¹³C and ¹⁹F NMR, UV/Vis and infrared/Raman spectroscopies and fluorescence spectroscopy (when nanoparticle is used in combination with fluorescent labels) and additional techniques identifiable by a skilled person.

### Small Molecules

[0657] In some embodiments, the composition or anellovector described herein may further comprise a small molecule. Small molecule moieties include, but are not limited to, small peptides, peptidomimetics (e.g., peptoids), amino acids, amino acid analogs, synthetic polynucleotides, polynucleotide analogs, nucleotides, nucleotide analogs, organic and inorganic compounds (including heterorganic and organometallic compounds) generally having a molecular weight less than about 5,000 grams per mole, e.g., organic or inorganic compounds having a molecular weight less than about 2,000 grams per mole, e.g., organic or inorganic compounds having a molecular weight less than about 1,000 grams per mole, e.g., organic or inorganic compounds having a molecular weight less than about 500 grams per mole, and salts, esters, and other pharmaceutically acceptable forms of such compounds. Small molecules may include, but are not limited to, a neurotransmitter, a hormone, a drug, a toxin, a viral or microbial particle, a synthetic molecule, and agonists or antagonists.

[0658] Examples of suitable small molecules include those described in, “The Pharmacological Basis of Therapeutics,” Goodman and Gilman, McGraw-Hill, New York, N.Y., (1996), Ninth edition, under the sections: Drugs Acting at Synaptic and Neuroeffector Junctional Sites; Drugs Acting on the Central Nervous System; Autacoids; Drug Therapy of Inflammation; Water, Salts and Ions; Drugs Affecting Renal Function and Electrolyte Metabolism; Cardiovascular Drugs; Drugs Affecting Gastrointestinal Function; Drugs Affecting Uterine Motility; Chemotherapy of Parasitic Infections; Chemotherapy of Microbial Diseases; Chemotherapy of Neoplastic Diseases; Drugs Used for Immunosuppression; Drugs Acting on Blood-Forming organs; Hormones and Hormone Antagonists; Vitamins, Dermatology; and Toxicology, all incorporated herein by reference. Some examples of small molecules include, but are not limited to, prion drugs such as tacrolimus, ubiquitin ligase or HECT ligase inhibitors such as heclin, histone modifying drugs such as sodium butyrate, enzymatic inhibitors such as 5-aza-cytidine, anthracyclines such as doxorubicin, beta-lactams such as penicillin, anti-bacterials, chemotherapy agents, anti-virals, modulators from other organisms such as VP64, and drugs with insufficient bioavailability such as chemotherapeutics with deficient pharmacokinetics.

[0659] In some embodiments, the small molecule is an epigenetic modifying agent, for example such as those described in de Groote et al. Nuc. Acids Res. (2012): 1-18. Exemplary small molecule epigenetic modifying agents are described, e.g., in Lu et al. J. Biomolecular Screening 17.5(2012):555-71, e.g., at Table 1 or 2, incorporated herein by reference. In some embodiments, an epigenetic modifying agent comprises vorinostat or romidepsin. In some embodiments, an epigenetic modifying agent comprises an inhibitor of class I, II, III, and/or IV histone deacetylase (HDAC). In some embodiments, an epigenetic modifying agent comprises an activator of SirTI. In some embodiments, an epigenetic modifying agent comprises Garcinol, Lys-CoA, C646, (+)-JQI, I-BET, BICI, MS120, DZNep, UNC0321, EPZ004777, AZ505, AMI-I, pyrazole amide 7b, benzo[d]imidazole 17b, acylated dapsone derivative (c.e.g, PRMTI), methylstat, 4,4-dicarboxy-2,2″-bipyridine, SID 85736331, hydroxamate analog 8, tanylcypromie, bisguanidine and biguanide polyamine analogs, UNC669, Vidaza, decitabine, sodium phenyl butyrate (SDB), lipoic acid (LA), quercetin, valproic acid, hydralazine, bactrim, green tea extract (e.g., epigallocatechin gallate (EGCG)), curcumin, sulforphane and/or allicin/diallyl disulfide. In some embodiments, an epigenetic modifying agent inhibits DNA methylation, e.g., is an inhibitor of DNA methyltransferase (e.g., is 5-azacitidine and/or decitabine). In some embodiments, an epigenetic modifying agent modifies histone modification, e.g., histone acetylation, histone methylation, histone sumoylation, and/or histone phosphorylation. In some embodiments, the epigenetic modifying agent is an inhibitor of a histone deacetylase (e.g., is vorinostat and/or trichostatin A).

[0660] In some embodiments, the small molecule is a pharmaceutically active agent. In one embodiment, the small molecule is an inhibitor of a metabolic activity or component. Useful classes of pharmaceutically active agents include, but are not limited to, antibiotics, anti-inflammatory drugs, angiogenic or vasoactive agents, growth factors and chemotherapeutic (anti-neoplastic) agents (e.g., tumour suppressers). One or a combination of molecules from the categories and examples described herein or from (Orme-Johnson 2007, Methods Cell Biol. 2007:80:813-26) can be used. In one embodiment, the invention includes a composition comprising an antibiotic, anti-inflammatory drug, angiogenic or vasoactive agent, growth factor or chemotherapeutic agent.

### Peptides or Proteins

[0661] In some embodiments, the composition or anellovector described herein may further comprise a peptide or protein. The peptide moieties may include, but are not limited to, a peptide ligand or antibody fragment (e.g., antibody fragment that binds a receptor such as an extracellular receptor), neuropeptide, hormone peptide, peptide drug, toxic peptide, viral or microbial peptide, synthetic peptide, and agonist or antagonist peptide.

[0662] Peptides moieties may be linear or branched. The peptide has a length from about 5 to about 200 amino acids, about 15 to about 150 amino acids, about 20 to about 125 amino acids, about 25 to about 100 amino acids, or any range therebetween.

[0663] Some examples of peptides include, but are not limited to, fluorescent tags or markers, antigens, antibodies, antibody fragments such as single domain antibodies, ligands and receptors such as glucagon-like peptide-1 (GLP-1), GLP-2 receptor 2, cholecystokinin B (CCKB) and somatostatin receptor, peptide therapeutics such as those that bind to specific cell surface receptors such as G protein-coupled receptors (GPCRs) or ion channels, synthetic or analog peptides from naturally-bioactive peptides, anti-microbial peptides, pore-forming peptides, tumor targeting or cytotoxic peptides, and degradation or self-destruction peptides such as an apoptosis-inducing peptide signal or photosensitizer peptide.

[0664] Peptides useful in the invention described herein also include small antigen-binding peptides, e.g., antigen binding antibody or antibody-like fragments, such as single chain antibodies, nanobodies (see, e.g., Steeland et al. 2016. Nanobodies as therapeutics: big opportunities for small antibodies. Drug Discov Today: 21(7): 1076-113). Such small antigen binding peptides may bind a cytosolic antigen, a nuclear antigen, an intra-organellar antigen.

[0665] In some embodiments, the composition or anellovector described herein includes a polypeptide linked to a ligand that is capable of targeting a specific location, tissue, or cell.

### Oligonucleotide Aptamers

[0666] In some embodiments, the composition or anellovector described herein may further comprise an oligonucleotide aptamer. Aptamer moieties are oligonucleotide or peptide aptamers. Oligonucleotide aptamers are single-stranded DNA or RNA (ssDNA or ssRNA) molecules that can bind to pre-selected targets including proteins and peptides with high affinity and specificity.

[0667] Oligonucleotide aptamers are nucleic acid species that may be engineered through repeated rounds of in vitro selection or equivalently, SELEX (systematic evolution of ligands by exponential enrichment) to bind to various molecular targets such as small molecules, proteins, nucleic acids, and even cells, tissues and organisms. Aptamers provide discriminate molecular recognition, and can be produced by chemical synthesis. In addition, aptamers may possess desirable storage properties, and elicit little or no immunogenicity in therapeutic applications.

[0668] Both DNA and RNA aptamers can show robust binding affinities for various targets. For example, DNA and RNA aptamers have been selected for t lysozyme, thrombin, human immunodeficiency virus trans-acting responsive element (HIV TAR),(see en.wikipedia.org/wiki/Aptamer-cite_note-10), hemin, interferon γ, vascular endothelial growth factor (VEGF), prostate specific antigen (PSA), dopamine, and the non-classical oncogene, heat shock factor 1 (HSF1).

### Peptide Aptamers

[0669] In some embodiments, the composition or anellovector described herein may further comprise a peptide aptamer. Peptide aptamers have one (or more) short variable peptide domains, including peptides having low molecular weight, 12-14 kDa. Peptide aptamers may be designed to specifically bind to and interfere with protein-protein interactions inside cells.

[0670] Peptide aptamers are artificial proteins selected or engineered to bind specific target molecules. These proteins include of one or more peptide loops of variable sequence. They are typically isolated from combinatorial libraries and often subsequently improved by directed mutation or rounds of variable region mutagenesis and selection. In vivo, peptide aptamers can bind cellular protein targets and exert biological effects, including interference with the normal protein interactions of their targeted molecules with other proteins. In particular, a variable peptide aptamer loop attached to a transcription factor binding domain is screened against the target protein attached to a transcription factor activating domain. In vivo binding of the peptide aptamer to its target via this selection strategy is detected as expression of a downstream yeast marker gene. Such experiments identify particular proteins bound by the aptamers, and protein interactions that the aptamers disrupt, to cause the phenotype. In addition, peptide aptamers derivatized with appropriate functional moieties can cause specific post-translational modification of their target proteins, or change the subcellular localization of the targets

[0671] Peptide aptamers can also recognize targets in vitro. They have found use in lieu of antibodies in biosensors and used to detect active isoforms of proteins from populations containing both inactive and active protein forms. Derivatives known as tadpoles, in which peptide aptamer “heads” are covalently linked to unique sequence double-stranded DNA “tails”, allow quantification of scarce target molecules in mixtures by PCR (using, for example, the quantitative real-time polymerase chain reaction) of their DNA tails.

[0672] Peptide aptamer selection can be made using different systems, but the most used is currently the yeast two-hybrid system. Peptide aptamers can also be selected from combinatorial peptide libraries constructed by phage display and other surface display technologies such as mRNA display, ribosome display, bacterial display and yeast display. These experimental procedures are also known as biopannings. Among peptides obtained from biopannings, mimotopes can be considered as a kind of peptide aptamers. All the peptides panned from combinatorial peptide libraries have been stored in a special database with the name MimoDB.

### V. Host Cells

[0673] The invention is further directed to a host or host cell comprising a anellovector described herein. In some embodiments, the host or host cell is a plant, insect, bacteria, fungus, vertebrate, mammal (e.g., human), or other organism or cell. In certain embodiments, as confirmed herein, provided anellovectors infect a range of different host cells. Target host cells include cells of mesodermal, endodermal, or ectodermal origin. Target host cells include, e.g., epithelial cells, muscle cells, white blood cells (e.g., lymphocytes), kidney tissue cells, lung tissue cells.

[0674] In some embodiments, the anellovector is substantially non-immunogenic in the host. The anellovector or genetic element fails to produce an undesired substantial response by the host's immune system. Some immune responses include, but are not limited to, humoral immune responses (e.g., production of antigen-specific antibodies) and cell-mediated immune responses (e.g., lymphocyte proliferation).

[0675] In some embodiments, a host or a host cell is contacted with (e.g., infected with) an anellovector. In some embodiments, the host is a mammal, such as a human. The amount of the anellovector in the host can be measured at any time after administration. In certain embodiments, a time course of anellovector growth in a culture is determined.

[0676] In some embodiments, the anellovector, e.g., an anellovector as described herein, is heritable. In some embodiments, the anellovector is transmitted linearly in fluids and/or cells from mother to child. In some embodiments, daughter cells from an original host cell comprise the anellovector. In some embodiments, a mother transmits the anellovector to child with an efficiency of at least 25%, 50%, 60%, 70%, 80%, 85%, 90%, 95%, or 99%, or a transmission efficiency from host cell to daughter cell at least 25%, 50%, 60%, 70%, 80%, 85%, 90%, 95%, or 99%. In some embodiments, the anellovector in a host cell has a transmission efficiency during meiosis of at 25%, 50%, 60%, 70%, 80%, 85%, 90%, 95%, or 99%. In some embodiments, the anellovector in a host cell has a transmission efficiency during mitosis of at least 25%, 50%, 60%, 70%, 80%, 85%, 90%, 95%, or 99%. In some embodiments, the anellovector in a cell has a transmission efficiency between about 10%-20%, 20%-30%, 30%-40%, 40%-50%, 50%-60%, 60%-70%, 70%-75%, 75%-80%, 80%-85%, 85%-90%, 90%-95%, 95%-99%, or any percentage therebetween.

[0677] In some embodiments, the anellovector, e.g., anellovector replicates within the host cell. In one embodiment, the anellovector is capable of replicating in a mammalian cell, e.g., human cell. In other embodiments, the anellovector is replication deficient or replication incompetent.

[0678] While in some embodiments the anellovector replicates in the host cell, the anellovector does not integrate into the genome of the host, e.g., with the host's chromosomes. In some embodiments, the anellovector has a negligible recombination frequency, e.g., with the host's chromosomes. In some embodiments, the anellovector has a recombination frequency, e.g., less than about 1.0 cM/Mb, 0.9 cM/Mb, 0.8 cM/Mb, 0.7 cM/Mb, 0.6 cM/Mb, 0.5 cM/Mb, 0.4 cM/Mb, 0.3 cM/Mb, 0.2 cM/Mb, 0.1 cM/Mb, or less, e.g., with the host's chromosomes.

### VI. Methods of Use

[0679] The anellovectors and compositions comprising anellovectors described herein may be used in methods of treating a disease, disorder, or condition, e.g., in a subject (e.g., a mammalian subject, e.g., a human subject) in need thereof. Administration of a pharmaceutical composition described herein may be, for example, by way of parenteral (including intravenous, intratumoral, intraperitoneal, intramuscular, intracavity, and subcutaneous) administration. The anellovectors may be administered alone or formulated as a pharmaceutical composition.

[0680] The anellovectors may be administered in the form of a unit-dose composition, such as a unit dose parenteral composition. Such compositions are generally prepared by admixture and can be suitably adapted for parenteral administration. Such compositions may be, for example, in the form of injectable and infusable solutions or suspensions or suppositories or aerosols.

[0681] In some embodiments, administration of a anellovector or composition comprising same, e.g., as described herein, may result in delivery of a genetic element comprised by the anellovector to a target cell, e.g., in a subject.

[0682] An anellovector or composition thereof described herein, e.g., comprising an effector (e.g., an endogenous or exogenous effector), may be used to deliver the effector to a cell, tissue, or subject. In some embodiments, the anellovector or composition thereof is used to deliver the effector to bone marrow, blood, heart, GI or skin. Delivery of an effector by administration of a anellovector composition described herein may modulate (e.g., increase or decrease) expression levels of a noncoding RNA or polypeptide in the cell, tissue, or subject. Modulation of expression level in this fashion may result in alteration of a functional activity in the cell to which the effector is delivered. In some embodiments, the modulated functional activity may be enzymatic, structural, or regulatory in nature.

[0683] In some embodiments, the anellovector, or copies thereof, are detectable in a cell 24 hours (e.g., 1 day, 2 days, 3 days, 4 days, 5 days, 6 days, 1 week, 2 weeks, 3 weeks, 4 weeks, 30 days, or 1 month) after delivery into a cell. In embodiments, a anellovector or composition thereof mediates an effect on a target cell, and the effect lasts for at least 1, 2, 3, 4, 5, 6, or 7 days, 2, 3, or 4 weeks, or 1, 2, 3, 6, or 12 months. In some embodiments (e.g., wherein the anellovector or composition thereof comprises a genetic element encoding an exogenous protein), the effect lasts for less than 1, 2, 3, 4, 5, 6, or 7 days, 2, 3, or 4 weeks, or 1, 2, 3, 6, or 12 months.

[0684] Examples of diseases, disorders, and conditions that can be treated with the anellovector described herein, or a composition comprising the anellovector, include, without limitation: immune disorders, interferonopathies (e.g., Type I interferonopathies), infectious diseases, inflammatory disorders, autoimmune conditions, cancer (e.g., a solid tumor, e.g., lung cancer, non-small cell lung cancer, e.g., a tumor that expresses a gene responsive to mIR-625, e.g., caspase-3), and gastrointestinal disorders. In some embodiments, the anellovector modulates (e.g., increases or decreases) an activity or function in a cell with which the anellovector is contacted. In some embodiments, the anellovector modulates (e.g., increases or decreases) the level or activity of a molecule (e.g., a nucleic acid or a protein) in a cell with which the anellovector is contacted. In some embodiments, the anellovector decreases viability of a cell, e.g., a cancer cell, with which the anellovector is contacted, e.g., by at least about 10%, 20%, 30%, 40%, 50%, 60%, 70%, 80%, 90%, 95%, 99%, or more. In some embodiments, the anellovector comprises an effector, e.g., an miRNA, e.g., miR-625, that decreases viability of a cell, e.g., a cancer cell, with which the anellovector is contacted, e.g., by at least about 10%, 20%, 30%, 40%, 50%, 60%, 70%, 80%, 90%, 95%, 99%, or more. In some embodiments, the anellovector increases apoptosis of a cell, e.g., a cancer cell, e.g., by increasing caspase-3 activity, with which the anellovector is contacted, e.g., by at least about 10%, 20%, 30%, 40%, 50%, 60%, 70%, 80%, 90%, 95%, 99%, or more. In some embodiments, the anellovector comprises an effector, e.g., an miRNA, e.g., miR-625, that increases apoptosis of a cell, e.g., a cancer cell, e.g., by increasing caspase-3 activity, with which the anellovector is contacted, e.g., by at least about 10%, 20%, 30%, 40%, 50%, 60%, 70%, 80%, 90%, 95%, 99%, or more.

### VII. Methods of Production

### Producing the Genetic Element

[0685] Methods of making the genetic element of the anellovector are described in, for example, Khudyakov & Fields, Artificial DNA: Methods and Applications, CRC Press (2002); in Zhao, Synthetic Biology: Tools and Applications, (First Edition), Academic Press (2013); and Egli & Herdewijn, Chemistry and Biology of Artificial Nucleic Acids, (First Edition), Wiley-VCH (2012).

[0686] In some embodiments, the genetic element may be designed using computer-aided design tools. The anellovector may be divided into smaller overlapping pieces (e.g., in the range of about 100 bp to about 10 kb segments or individual ORFs) that are easier to synthesize. These DNA segments are synthesized from a set of overlapping single-stranded oligonucleotides. The resulting overlapping synthons are then assembled into larger pieces of DNA, e.g., the anellovector. The segments or ORFs may be assembled into the anellovector, e.g., in vitro recombination or unique restriction sites at 5′ and 3′ ends to enable ligation.

[0687] The genetic element can alternatively be synthesized with a design algorithm that parses the anellovector into oligo-length fragments, creating optimal design conditions for synthesis that take into account the complexity of the sequence space. Oligos are then chemically synthesized on semiconductor-based, high-density chips, where over 200,000 individual oligos are synthesized per chip. The oligos are assembled with an assembly techniques, such as BioFab®, to build longer DNA segments from the smaller oligos. This is done in a parallel fashion, so hundreds to thousands of synthetic DNA segments are built at one time.

[0688] Each genetic element or segment of the genetic element may be sequence verified. In some embodiments, high-throughput sequencing of RNA or DNA can take place using Any Dot.chips (Genovoxx, Germany), which allows for the monitoring of biological processes (e.g., miRNA expression or allele variability (SNP detection). In particular, the AnyDot-chips allow for 10×-50× enhancement of nucleotide fluorescence signal detection. Any Dot.chips and methods for using them are described in part in International Publication Application Nos. WO 02088382, WO 03020968, WO 0303 1947. WO 2005044836, PCTEP 05105657, PCMEP 05105655; and German Patent Application Nos. DE 101 49 786, DE 102 14 395, DE 103 56 837, DE 10 2004 009 704, DE 10 2004 025 696, DE 10 2004 025 746, DE 10 2004 025 694, DE 10 2004 025 695, DE 10 2004 025 744, DE 10 2004 025 745, and DE 10 2005 012 301.

[0689] Other high-throughput sequencing systems include those disclosed in Venter, J., et al. Science 16 Feb. 2001; Adams, M. et al, Science 24 Mar. 2000; and M. J. Levene, et al. Science 299:682-686, January 2003; as well as US Publication Application No. 20030044781 and 2006/0078937. Overall such systems involve sequencing a target nucleic acid molecule having a plurality of bases by the temporal addition of bases via a polymerization reaction that is measured on a molecule of nucleic acid, i.e., the activity of a nucleic acid polymerizing enzyme on the template nucleic acid molecule to be sequenced is followed in real time. The sequence can then be deduced by identifying which base is being incorporated into the growing complementary strand of the target nucleic acid by the catalytic activity of the nucleic acid polymerizing enzyme at each step in the sequence of base additions. A polymerase on the target nucleic acid molecule complex is provided in a position suitable to move along the target nucleic acid molecule and extend the oligonucleotide primer at an active site. A plurality of labeled types of nucleotide analogs are provided proximate to the active site, with each distinguishably type of nucleotide analog being complementary to a different nucleotide in the target nucleic acid sequence. The growing nucleic acid strand is extended by using the polymerase to add a nucleotide analog to the nucleic acid strand at the active site, where the nucleotide analog being added is complementary to the nucleotide of the target nucleic acid at the active site. The nucleotide analog added to the oligonucleotide primer as a result of the polymerizing step is identified. The steps of providing labeled nucleotide analogs, polymerizing the growing nucleic acid strand, and identifying the added nucleotide analog are repeated so that the nucleic acid strand is further extended and the sequence of the target nucleic acid is determined.

[0690] In some embodiments, shotgun sequencing is performed. In shotgun sequencing, DNA is broken up randomly into numerous small segments, which are sequenced using the chain termination method to obtain reads. Multiple overlapping reads for the target DNA are obtained by performing several rounds of this fragmentation and sequencing. Computer programs then use the overlapping ends of different reads to assemble them into a continuous sequence.

[0691] In some embodiments, factors for replicating or packaging may be supplied in cis or in trans, relative to the genetic element. For example, when supplied in cis, the genetic element may comprise one or more genes encoding an Anellovirus ORF1, ORF1/1, ORF1/2, ORF2, ORF2/2, ORF2/3, or ORF2t/3, e.g., as described herein. In some embodiments, replication and/or packaging signals can be incorporated into a genetic element, for example, to induce amplification and/or encapsulation. In some embodiments, this is done both in context of larger regions of the anellovector genome (e.g., inserting effectors into a specific site in the genome, or replacing viral ORFs with effectors).

[0692] In another example, when supplied in trans, the genetic element may lack genes encoding one or more of an Anellovirus ORF1, ORF1/1, ORF1/2, ORF2, ORF2/2, ORF2/3, or ORF2t/3, e.g., as described herein; this protein or proteins may be supplied, e.g., by another nucleic acid, e.g., a helper nucleic acid. In some embodiments, minimal cis signals (e.g., 5′ UTR and/or GC-rich region) are present in the genetic element. In some embodiments, the genetic element does not encode replication or packaging factors (e.g., replicase and/or capsid proteins). Such factors may, in some embodiments, be supplied by one or more helper nucleic acids (e.g., a helper viral nucleic acid, a helper plasmid, or a helper nucleic acid integrated into the host cell genome). In some embodiments, the helper nucleic acids express proteins and/or RNAs sufficient to induce amplification and/or packaging, but may lack their own packaging signals. In some embodiments, the genetic element and the helper nucleic acid are introduced into the host cell (e.g., concurrently or separately), resulting in amplification and/or packaging of the genetic element but not of the helper nucleic acid.

### In Vitro Circularization

[0693] In some instances, the genetic element to be packaged into a proteinaceous exterior is a single stranded circular DNA. The genetic element may, in some instances, be introduced into a host cell in a form other than a single stranded circular DNA. For example, the genetic element may be introduced into the host cell as a double-stranded circular DNA. The double-stranded circular DNA may then be converted into a single-stranded circular DNA in the host cell (e.g., a host cell comprising a suitable enzyme for rolling circle replication, e.g., an Anellovirus Rep protein, e.g., Rep68/78, Rep60, RepA, RepB, Pre, MobM, TraX, TrwC, Mob02281, Mob02282, NikB, ORF50240, NikK, TecH, OrfJ, or TraI, e.g., as described in Wawrzyniak et al. 2017, Front. Microbiol. 8: 2353; incorporated herein by reference with respect to the listed enzymes). In some embodiments, the double-stranded circular DNA is produced by in vitro circularization, e.g., as described in Example 35. Generally, in vitro circularized DNA constructs can be produced by digesting a plasmid comprising the sequence of a genetic element to be packaged, such that the genetic element sequence is excised as a linear DNA molecule. The resultant linear DNA can then be ligated, e.g., using a DNA ligase, to form a double-stranded circular DNA. In some instances, a double-stranded circular DNA produced by in vitro circularization can undergo rolling circle replication, e.g., as described herein. Without wishing to be bound by theory, it is contemplated that in vitro circularization results in a double-stranded DNA construct that can undergo rolling circle replication without further modification, thereby being capable of producing single-stranded circular DNA of a suitable size to be packaged into an anellovector, e.g., as described herein. In some embodiments, the double-stranded DNA construct is smaller than a plasmid (e.g., a bacterial plasmid). In some embodiments, the double-stranded DNA construct is excised from a plasmid (e.g., a bacterial plasmid) and then circularized, e.g., by in vitro circularization.

### Producing the Anellovector

[0694] The genetic elements and vectors comprising the genetic elements prepared as described herein can be used in a variety of ways to express the anellovector in appropriate host cells. In some embodiments, the genetic element and vectors comprising the genetic element are transfected in appropriate host cells and the resulting RNA may direct the expression of the anellovector gene products. e.g., non-pathogenic protein and protein binding sequence, at high levels. Host cell systems which provide for high levels of expression include continuous cell lines that supply viral functions, such as cell lines superinfected with APV or MPV, respectively, cell lines engineered to complement APV or MPV functions, etc.

[0695] In some embodiments, the anellovector is produced as described in any of Examples 1, 2, 5, 6, or 15-17.

[0696] In some embodiments, the anellovector is cultivated in continuous animal cell lines in vitro. According to one embodiment of the invention, the cell lines may include porcine cell lines. The cell lines envisaged in the context of the present invention include immortalised porcine cell lines such as, but not limited to the porcine kidney epithelial cell lines PK-15 and SK, the monomyeloid cell line 3D4/31 and the testicular cell line ST. Also, other mammalian cells lines are included, such as CHO cells (Chinese hamster ovaries), MARC-145, MDBK, RK-13, EEL. Additionally or alternatively, particular embodiments of the methods of the invention make use of an animal cell line which is an epithelial cell line, i.e. a cell line of cells of epithelial lineage. Cell lines susceptible to infection with anellovectors include, but are not limited to cell lines of human or primate origin, such as human or primate kidney carcinoma cell lines.

[0697] In some embodiments, the genetic elements and vectors comprising the genetic elements are transfected into cell lines that express a viral polymerase protein in order to achieve expression of the anellovector. To this end, transformed cell lines that express an anellovector polymerase protein may be utilized as appropriate host cells. Host cells may be similarly engineered to provide other viral functions or additional functions.

[0698] To prepare the anellovector disclosed herein, a genetic element or vector comprising the genetic element disclosed herein may be used to transfect cells which provide anellovector proteins and functions required for replication and production. Alternatively, cells may be transfected with helper virus before, during, or after transfection by the genetic element or vector comprising the genetic element disclosed herein. In some embodiments, a helper virus may be useful to complement production of an incomplete viral particle. The helper virus may have a conditional growth defect, such as host range restriction or temperature sensitivity, which allows the subsequent selection of transfectant viruses. In some embodiments, a helper virus may provide one or more replication proteins utilized by the host cells to achieve expression of the anellovector. In some embodiments, the host cells may be transfected with vectors encoding viral proteins such as the one or more replication proteins. In some embodiments, a helper virus comprises an antiviral sensitivity.

[0699] The genetic element or vector comprising the genetic element disclosed herein can be replicated and produced into anellovector particles by any number of techniques known in the art, as described, e.g., in U.S. Pat. Nos. 4,650,764; 5,166,057; 5,854,037; European Patent Publication EP 0702085A1: U.S. patent application Ser. No. 09/152,845: International Patent Publications PCT WO97/12032: WO96/34625; European Patent Publication EP-A780475: WO 99/02657: WO 98/53078: WO 98/02530; WO 99/15672: WO 98/13501: WO 97/06270; and EPO 780 47SA1, each of which is incorporated by reference herein in its entirety.

[0700] The production of anellovector-containing cell cultures according to the present invention can be carried out in different scales, such as in flasks, roller bottles or bioreactors. The media used for the cultivation of the cells to be infected are known to the skilled person and can generally comprise the standard nutrients required for cell viability, but may also comprise additional nutrients dependent on the cell type. Optionally, the medium can be protein-free and/or serum-free. Depending on the cell type the cells can be cultured in suspension or on a substrate. In some embodiments, different media is used for growth of the host cells and for production of anellovectors.

[0701] The purification and isolation of anellovectors can be performed according to methods known by the skilled person in virus production and is described for example by Rinaldi, et al., DNA Vaccines: Methods and Protocols (Methods in Molecular Biology), 3rd ed. 2014, Humana Press.

[0702] In one aspect, the present invention includes a method for the in vitro replication and propagation of the anellovector as described herein, which may comprise the following steps: (a) transfecting a linearized genetic element into a cell line sensitive to anellovector infection; (b) harvesting the cells and isolating cells showing the presence of the genetic element; (c) culturing the cells obtained in step (b) for at least three days, such as at least one week or longer, depending on experimental conditions and gene expression; and (d) harvesting the cells of step (c).

[0703] In some embodiments, an anellovector may be introduced to a host cell line grown to a high cell density. In some embodiments, the anellovector may be harvested and/or purified by separation of solutes based on biophysical properties, e.g., ion exchange chromatography or tangential flow filtration, prior to formulation with a pharmaceutical excipient.

### VIII. Administration/Delivery

[0704] The composition (e.g., a pharmaceutical composition comprising an anellovector as described herein) may be formulated to include a pharmaceutically acceptable excipient. Pharmaceutical compositions may optionally comprise one or more additional active substances, e.g. therapeutically and/or prophylactically active substances. Pharmaceutical compositions of the present invention may be sterile and/or pyrogen-free. General considerations in the formulation and/or manufacture of pharmaceutical agents may be found, for example, in Remington: The Science and Practice of Pharmacy 21st ed., Lippincott Williams & Wilkins, 2005 (incorporated herein by reference).

[0705] Although the descriptions of pharmaceutical compositions provided herein are principally directed to pharmaceutical compositions which are suitable for administration to humans, it will be understood by the skilled artisan that such compositions are generally suitable for administration to any other animal, e.g., to non-human animals, e.g. non-human mammals. Modification of pharmaceutical compositions suitable for administration to humans in order to render the compositions suitable for administration to various animals is well understood, and the ordinarily skilled veterinary pharmacologist can design and/or perform such modification with merely ordinary, if any, experimentation. Subjects to which administration of the pharmaceutical compositions is contemplated include, but are not limited to, humans and/or other primates; mammals, including commercially relevant mammals such as cattle, pigs, horses, sheep, cats, dogs, mice, and/or rats; and/or birds, including commercially relevant birds such as poultry, chickens, ducks, geese, and/or turkeys.

[0706] Formulations of the pharmaceutical compositions described herein may be prepared by any method known or hereafter developed in the art of pharmacology. In general, such preparatory methods include the step of bringing the active ingredient into association with an excipient and/or one or more other accessory ingredients, and then, if necessary and/or desirable, dividing, shaping and/or packaging the product.

[0707] In one aspect, the invention features a method of delivering an anellovector to a subject. The method includes administering a pharmaceutical composition comprising an anellovector as described herein to the subject. In some embodiments, the administered anellovector replicates in the subject (e.g., becomes a part of the virome of the subject).

[0708] The pharmaceutical composition may include wild-type or native viral elements and/or modified viral elements. The anellovector may include one or more of the sequences (e.g., nucleic acid sequences or nucleic acid sequences encoding amino acid sequences thereof) in any of Tables N1-N1417 or a sequence with at least about 60%, 65%, 70%, 75%, 80%, 85%, 90% 95%, 96%, 97%, 98% and 99% nucleotide sequence identity to any one of the nucleotide sequences or a sequence that is complementary to the sequence in any of Tables N1-N1417. The anellovector may comprise a nucleic acid molecule comprising a nucleic acid sequence with at least about 60%, 65%, 70%, 75%, 80%, 85%, 90% 95%, 96%, 97%, 98% and 99% sequence identity to one or more of the sequences in any of Tables N1-N1417. The anellovector may comprise a nucleic acid molecule encoding an amino acid sequence with at least about 60%, 65%, 70%, 75%, 80%, 85%, 90% 95%, 96%, 97%, 98% and 99% sequence identity to any one of the amino acid sequences in any of Tables A1-A1417. The anellovector may comprise a polypeptide comprising an amino acid sequence with at least about 60%, 65%, 70%, 75%, 80%, 85%, 90% 95%, 96%, 97%, 98% and 99% sequence identity to any one of the amino acid sequences in any of Tables A1-A1417. The anellovector may include one or more of the sequences in any of Tables A1-A1417 or N1-N1417, or a sequence with at least about 60%, 65%, 70%, 75%, 80%, 85%, 90% 95%, 96%, 97%, 98% and 99% nucleotide sequence identity to any one of the nucleotide sequences or a sequence that is complementary to the sequence in any of Tables N1-N1417.

[0709] In some embodiments, the anellovector is sufficient to increase (stimulate) endogenous gene and protein expression, e.g., at least about 5%, 10%, 15%, 20%, 25%, 30%, 35%, 40%, 45%, 50%, or more as compared to a reference, e.g., a healthy control. In certain embodiments, the anellovector is sufficient to decrease (inhibit) endogenous gene and protein expression, e.g., at least about 5%, 10%, 15%, 20%, 25%, 30%, 35%, 40%, 45%, 50%, or more as compared to a reference, e.g., a healthy control.

[0710] In some embodiments, the anellovector inhibits/enhances one or more viral properties, e.g., tropism, infectivity, immunosuppression/activation, in a host or host cell, e.g., at least about 5%, 10%, 15%, 20%, 25%, 30%, 35%, 40%, 45%, 50%, or more as compared to a reference, e.g., a healthy control.

[0711] In some embodiments, the subject is administered the pharmaceutical composition further comprising one or more viral strains that are not represented in the viral genetic information.

[0712] In some embodiments, the pharmaceutical composition comprising an anellovector described herein is administered in a dose and time sufficient to modulate a viral infection. Some non-limiting examples of viral infections include adeno-associated virus, Aichi virus, Australian bat lyssavirus, BK polyomavirus, Banna virus, Barmah forest virus, Bunyamwera virus, Bunyavirus La Crosse, Bunyavirus snowshoe hare, Cercopithecine herpesvirus, Chandipura virus, Chikungunya virus, Cosavirus A, Cowpox virus, Coxsackievirus, Crimean-Congo hemorrhagic fever virus, Dengue virus, Dhori virus, Dugbe virus, Duvenhage virus, Eastern equine encephalitis virus, Ebolavirus, Echovirus, Encephalomyocarditis virus, Epstein-Barr virus, European bat lyssavirus, GB virus C/Hepatitis G virus, Hantaan virus, Hendra virus, Hepatitis A virus, Hepatitis B virus, Hepatitis C virus, Hepatitis E virus, Hepatitis delta virus, Horsepox virus, Human adenovirus, Human astrovirus, Human coronavirus, Human cytomegalovirus, Human enterovirus 68, Human enterovirus 70, Human herpesvirus 1, Human herpesvirus 2, Human herpesvirus 6, Human herpesvirus 7, Human herpesvirus 8, Human immunodeficiency virus, Human papillomavirus 1, Human papillomavirus 2, Human papillomavirus 16, Human papillomavirus 18, Human parainfluenza, Human parvovirus B19, Human respiratory syncytial virus, Human rhinovirus, Human SARS coronavirus, Human spumaretrovirus, Human T-lymphotropic virus, Human torovirus, Influenza A virus, Influenza B virus, Influenza C virus, Isfahan virus, JC polyomavirus, Japanese encephalitis virus, Junin arenavirus, KI Polyomavirus, Kunjin virus, Lagos bat virus, Lake Victoria marburgvirus, Langat virus, Lassa virus, Lordsdale virus, Louping ill virus, Lymphocytic choriomeningitis virus, Machupo virus, Mayaro virus, MERS coronavirus, Measles virus, Mengo encephalomyocarditis virus, Merkel cell polyomavirus, Mokola virus, Molluscum contagiosum virus, Monkeypox virus, Mumps virus, Murray valley encephalitis virus, New York virus, Nipah virus, Norwalk virus, O'nyong-nyong virus, Orf virus, Oropouche virus, Pichinde virus, Poliovirus, Punta toro phlebovirus, Puumala virus, Rabies virus, Rift valley fever virus, Rosavirus A, Ross river virus, Rotavirus A, Rotavirus B, Rotavirus C, Rubella virus, Sagiyama virus, Salivirus A, Sandfly fever sicilian virus, Sapporo virus, Semliki forest virus, Seoul virus, Simian foamy virus, Simian virus 5, Sindbis virus, Southampton virus, St. louis encephalitis virus, Tick-borne powassan virus, Torque teno virus, Toscana virus, Uukuniemi virus, Vaccinia virus, Varicella-zoster virus, Variola virus, Venezuelan equine encephalitis virus, Vesicular stomatitis virus, Western equine encephalitis virus, WU polyomavirus, West Nile virus, Yaba monkey tumor virus, Yaba-like disease virus, Yellow fever virus, and Zika Virus. In certain embodiments, the anellovector is sufficient to outcompete and/or displace a virus already present in the subject, e.g., at least about 5%, 10%, 15%, 20%, 25%, 30%, 35%, 40%, 45%, 50%, or more as compared to a reference. In certain embodiments, the anellovector is sufficient to compete with chronic or acute viral infection. In certain embodiments, the anellovector may be administered prophylactically to protect from viral infections (e.g. a provirotic). In some embodiments, the anellovector is in an amount sufficient to modulate (e.g., phenotype, virus levels, gene expression, compete with other viruses, disease state, etc. at least about 5%, 10%, 15%, 20%, 25%, 30%, 35%, 40%, 45%, 50%, or more).

### Redosing

[0713] The anellovectors described herein can, in some instances, be used as a delivery vehicle that can be administered in multiple doses (e.g., doses administered separately). While not wishing to be bound by theory, in some embodiments, an anellovector (e.g., as described herein) induces a relatively low immune response (as measured, for example, as 50% GMT values, e.g., as observed in Example 12), e.g., allowing for repeated dosing of a subject with one or more anellovectors (e.g., multiple doses of the same anellovector or different anellovectors). In an aspect, the invention provides a method of delivering an effector, comprising administering to a subject a first plurality of anellovectors and then a second plurality of anellovectors. In some embodiments, the second plurality of anellovectors comprise the same proteinaceous exterior as the anellovectors of the first plurality. In another aspect, the invention provides a method of selecting a subject (e.g., a human subject) to receive an effector, wherein the subject previously received, or was identified as having received, a first plurality of anellovectors comprising a genetic element encoding an effector, in which the method involves selecting the subject to receive a second plurality of anellovectors comprising a genetic element encoding an effector (e.g., the same effector as that encoded by the genetic element of the first plurality of anellovectors, or a different effector as that encoded by the genetic element of the first plurality of anellovectors). In another aspect, the invention provides a method of identifying a subject (e.g., a human subject) as suitable to receive a second plurality of anellovectors, the method comprising identifying the subject has having previously received a first plurality of anellovectors comprising a genetic element encoding an effector, wherein the subject being identified as having received the first plurality of anellovectors is indicative that the subject is suitable to receive the second plurality of anellovectors.

[0714] In some embodiments, the second plurality of anellovectors comprises a proteinaceous exterior with at least one surface epitope in common with the anellovectors of the first plurality of anellovectors. In some embodiments, the anellovectors of the first plurality and the anellovectors of the second plurality carry genetic elements encoding the same effector. In some embodiments, the anellovectors of the first plurality and the anellovectors of the second plurality carry genetic elements encoding different effectors.

[0715] In some embodiments, the second plurality comprises about the same quantity and/or concentration of anellovectors as the first plurality (e.g., when normalized to the body mass of the subject at the time of administration), e.g., the second plurality comprises 90-110%, e.g., 95-105% of the number of anellovectors in the first plurality when normalized to body mass of the subject at the time of administration. In some embodiments, wherein the first plurality comprises a greater dosage of anellovectors than the second plurality, e.g., wherein the first plurality comprises a greater quantity and/or concentration of anellovectors relative to the second plurality. In some embodiments, wherein the first plurality comprises a lower dosage of anellovectors than the second plurality, e.g., wherein the first plurality comprises a lower quantity and/or concentration of anellovectors relative to the second plurality.

[0716] In some embodiments, the subject is evaluated between the administration of the first and second pluralities of anellovectors, e.g., for the presence (e.g., persistence) of anellovectors from the first plurality, or progeny thereof. In some embodiments, the subject is administered the second plurality of anellovectors if the presence of anellovectors from the first plurality, or the progeny thereof, are not detected.

[0717] In some embodiments, the second plurality is administered to the subject at least 1, 2, 3, or 4 weeks, or 1, 2, 3, 4, 5, 6, 7, 8, 9, 10, 11, or 12 months, or 1, 2, 3, 4, 5, 10, or 20 years after the administration of the first plurality to the subject. In some embodiments, the second plurality is administered to the subject between 1-2 weeks, 2-3 weeks, 3-4 weeks, 1-2 months, 3-4 months, 4-5 months, 5-6 months, 6-7 months, 7-8 months, 8-9 months, 9-10 months, 10-11 months, 11-12 months, 1-2 years, 2-3 years, 3-4 years, 4-5 years, 5-10 years, or 10-20 years after the administration of the first plurality to the subject. In some embodiments, the method comprises administering a repeated dose of anellovectors over the course of at least 1, 2, 3, 4, or 5 years.

[0718] In some embodiments, the method further comprises assessing, after administration of the first plurality and before administration of the second plurality, one or more of:
[0719] a) the level or activity of the effector in the subject (e.g., by detecting a protein effector, e.g., by ELISA; by detecting a nucleic acid effector, e.g., by RT-PCR, or by detecting a downstream effect of the effector, e.g., level of an endogenous gene affected by the effector);
[0720] b) the level or activity of the anellovector of the first plurality in the subject (e.g., by detecting the level of the VPI of the anellovector);
[0721] c) the presence, severity, progression, or a sign or symptom of a disease in the subject that the anellovector was administered to treat; and/or
[0722] d) the presence or level of an immune response, e.g., neutralizing antibodies, against an anellovector.

[0723] In some embodiments, the method further comprises administering to the subject a third, fourth, fifth, and/or further plurality of anellovectors, e.g., as described herein.

[0724] In some embodiments, the first plurality and the second plurality are administered via the same route of administration, e.g., intravenous administration. In some embodiments, the first plurality and the second plurality are administered via different routes of administration. In some embodiments, the first and the second pluralities are administered by the same entity (e.g., the same health care provider). In some embodiments, the first and the second pluralities are administered by different entities (e.g., different health care providers).

[0725] All references and publications cited herein are hereby incorporated by reference.

[0726] The following examples are provided to further illustrate some embodiments of the present invention, but are not intended to limit the scope of the invention; it will be understood by their exemplary nature that other procedures, methodologies, or techniques known to those skilled in the art may alternatively be used.

### EXAMPLES

### Table of Contents

[0727] Example 1: Immunologic effects of Anellovectors (Anellovector A): in vivo effector function, e.g., expression of the miRNA, of the anellovector after administration
[0728] Example 2: Identification and use of protein binding sequences: putative protein-binding sites in the Anellovirus genome
[0729] Example 3: Replication-deficient anellovectors and helper viruses
[0730] Example 4: Manufacturing process for replication-competent anellovectors
[0731] Example 5: Manufacturing process of replication-deficient anellovectors: recovery and scaling up of production of replication-deficient anellovectors
[0732] Example 6 Production of anellovectors using suspension cells: production of anellovectors in cells in suspension.
[0733] Example 7: Quantification of anellovector genome equivalents by qPCR: development of a hydrolysis probe-based quantitative PCR assay to quantify anellovectors
[0734] Example 8: Functional effects of an anellovector expressing an exogenous microRNA sequence: use of an anellovector to express a functional nucleic acid effector
[0735] Example 9: Characterization of regions required for anellovector development
[0736] Example 10: Anellovector delivery of exogenous proteins in vivo: This example demonstrates in vivo effector function (e.g. expression of proteins) of anellovectors after administration
[0737] Example 11: Tandem copies of the Anellovirus genome
[0738] Example 12: In vitro circularized Anellovirus genomes: constructs comprising circular, double stranded Anelloviral genome DNA with minimal non-viral DNA
[0739] Example 13: Production of anellovectors containing chimeric ORF1 with hypervariable domains from different Torque Teno Virus strains
[0740] Example 14: Design of an anellovector harboring a DNA payload
[0741] Example 15: Transduction of Anellovector-encoding antibody transgene
[0742] Example 16: Anellovectors based on tth8 and LY2 each successfully transduced the EPO gene into lung cancer cells
[0743] Example 17: Anellovectors with therapeutic transgenes can be detected in vivo after intravenous (i.v.) administration
[0744] Example 18: In vitro circularized genome as input material for producing anellovectors in vitro

### Example 1: Immunologic Effects of Anellovectors (Anellovector A)

[0745] This example describes in vivo effector function, e.g., expression of the miRNA, of the anellovector after administration.

[0746] Purified anellovectors prepared as described herein are intravenously administered to healthy pigs at various doses using hundred-fold dilutions starting from 10¹⁴ genome equivalents per kilogram down to 0 genome equivalents per kilogram. In order to evaluate the effects on immune tolerance, pigs are injected daily for 3 days with anellovectors or vehicle control PBS and sacrificed after 3 days.

[0747] Spleen, bone marrow and lymph nodes are harvested. Single cell suspensions are prepared from each of the tissues and stained with extracellular markers for MHC-II, CD11c, and intracellular IFN. MHC+, CD11c+, IFN+antigen presenting cells are analyzed via flow cytometry from each tissue, e.g., wherein a cell that is positive for a given one of the above-mentioned markers is a cell that exhibits higher fluorescence than 99% of cells in a negative control population that lack expression of the marker but is otherwise similar to the the assay population of cells, under the same conditions.

[0748] In an embodiment, a decreased number of IFN+ cells in the anellovector treatment group compared to the control will indicate that the anellovectors decrease IFN production in cells after administration.

### Example 2: Identification and Use of Protein Binding Sequences

[0749] This example describes putative protein-binding sites in the Anellovirus genome, which can be used for amplifying and packaging effectors, e.g., in an anellovector as described herein. In some instances, the protein-binding sites may be capable of binding to an exterior protein, such as a capsid protein.

[0750] Two conserved domains within the Anellovirus genome are putative origins of replication: the 5′ UTR conserved domain (5CD) and the GC-rich domain (GCR) (de Villiers et al., Journal of Virology 2011; Okamoto et al., Virology 1999). In one example, in order to confirm whether these sequences act as DNA replication sites or as capsid packaging signals, deletions of each region are made in plasmids harboring an Anellovirus sequence. A539 cells are transfected with the deletion constructs. Transfected cells are incubated for four days, and then virus is isolated from supernatant and cell pellets. A549 cells are infected with virus, and after four days, virus is isolated from the supernatant and infected cell pellets. qPCR is performed to quantify viral genomes from the samples. Disruption of an origin of replication prevents viral replicase from amplifying viral DNA and results in reduced viral genomes isolated from transfected cell pellets compared to wild-type virus. A small amount of virus is still packaged and can be found in the transfected supernatant and infected cell pellets. In some embodiments, disruption of a packaging signal will prevent the viral DNA from being encapsulated by capsid proteins. Therefore, in embodiments, there will still be an amplification of viral genomes in the transfected cells, but no viral genomes are found in the supernatant or infected cell pellets.

[0751] In a further example, in order to characterize additional replication or packaging signals in the DNA, a series of deletions across the entire TTMV-LY2 genome is used. Deletions of 100 bp are made stepwise across the length of the sequence. Plasmids harboring Anellovirus genome deletions are transfected into A549 and tested as described above. In some embodiments, deletions that disrupt viral amplification or packaging will contain potential cis-regulatory domains.

[0752] Replication and packaging signals can be incorporated into effector-encoding DNA sequences (e.g., in a genetic element in an anellovector) to induce amplification and encapsulation. This is done both in context of larger regions of the anellovector genome (i.e., inserting effectors into a specific site in the genome, or replacing viral ORFs with effectors, etc.), or by incorporating minimal cis signals into the effector DNA. In cases where the anellovector lacks trans replication or packaging factors (e.g., replicase and capsid proteins, etc.), the trans factors are supplied by helper genes. The helper genes express all of the proteins and RNAs sufficient to induce amplification and packaging, but lack their own packaging signals. The anellovector DNA is co-transfected with helper genes, resulting in amplification and packaging of the effector but not of the helper genes.

### Example 3: Replication-Deficient Anellovectors and Helper Viruses

[0753] For replication and packaging of an anellovector, some elements (e.g., an ORF1, ORF1/1, ORF1/2, ORF2, ORF2/2, ORF2/3, and/or ORF2t/3 molecule, or a nucleic acid sequence encoding same) can be provided in trans. These include proteins or non-coding RNAs that direct or support DNA replication or packaging. Trans elements can, in some instances, be provided from a source alternative to the anellovector, such as a helper virus, plasmid, or from the cellular genome.

[0754] Other elements are typically provided in cis (e.g., a TATA box, cap site, initiator element, transcriptional start site, 5′ UTR conserved domain, three open-reading frame region, poly(A) signal, or GC-rich region). These elements can be, for example, sequences or structures in the anellovector DNA that act as origins of replication (e.g., to allow amplification of anellovector DNA) or packaging signals (e.g., to bind to proteins to load the genome into the capsid). Generally, a replication deficient virus or anellovector will be missing one or more of these elements, such that the DNA is unable to be packaged into an infectious virion or anellovector even if other elements are provided in trans.

[0755] Replication deficient viruses can be useful for controlling replication of an anellovector (e.g., a replication-deficient or packaging-deficient anellovector) in the same cell. In some instances, the virus will lack cis replication or packaging elements, but express trans elements such as proteins and non-coding RNAs. Generally, the therapeutic anellovector would lack some or all of these trans elements and would therefore be unable to replicate on its own, but would retain the cis elements. When co-transfected/infected into cells, the replication-deficient virus would drive the amplification and packaging of the anellovector. The packaged particles collected would thus be comprised solely of therapeutic anellovector, without contamination from the replication-deficient virus.

[0756] To develop a replication deficient anellovector, conserved elements in the non-coding regions of Anellovirus will be removed. In particular, deletions of the conserved 5′ UTR domain and the GC-rich domain will be tested, both separately and together. Both elements are contemplated to be important for viral replication or packaging. Additionally, deletion series will be performed across the entire non-coding region to identify previously unknown regions of interest.

[0757] Successful deletion of a replication element will result in reduction of anellovector DNA amplification within the cell, e.g., as measured by qPCR, but will support some infectious anellovector production, e.g., as monitored by assays on infected cells that can include any or all of qPCR, western blots, fluorescence assays, or luminescence assays. Successful deletion of a packaging element will not disrupt anellovector DNA amplification, so an increase in anellovector DNA will be observed in transfected cells by qPCR. However, the anellovector genomes will not be encapsulated, so no infectious anellovector production will be observed.

### Example 4: Manufacturing Process for Replication-Competent Anellovectors

[0758] This example describes a method for recovery and scaling up of production of replication-competent anellovectors. Anellovectors are replication competent when they encode in their genome all the required nucleic acid elements and ORFs necessary to replicate in cells. Since these anellovectors are not defective in their replication they do not need a complementing activity provided in trans. They might, however need helper activity, such as enhancers of transcriptions (e.g. sodium butyrate) or viral transcription factors (e.g. adenoviral E1, E2 E4, VA; HSV Vp16 and immediate early proteins).

[0759] In this example, double-stranded DNA encoding the full sequence of a synthetic anellovector either in its linear or circular form is introduced into 5E+05 adherent mammalian cells in a T75 flask by chemical transfection or into 5E+05 cells in suspension by electroporation. After an optimal period of time (e.g., 3-7 days post transfection), cells and supernatant are collected by scraping cells into the supernatant medium. A mild detergent, such as a biliary salt, is added to a final concentration of 0.5% and incubated at 37° C. for 30 minutes. Calcium and Magnesium Chloride is added to a final concentration of 0.5 mM and 2.5 mM, respectively. Endonuclease (e.g. DNAse I, Benzonase), is added and incubated at 25-37° C. for 0.5-4 hours. Anellovector suspension is centrifuged at 1000×g for 10 minutes at 4° C. The clarified supernatant is transferred to a new tube and diluted 1:1 with a cryoprotectant buffer (also known as stabilization buffer) and stored at −80° ° C. if desired. This produces passage 0 of the anellovector (P0). To bring the concentration of detergent below the safe limit to be used on cultured cells, this inoculum is diluted at least 100-fold or more in serum-free media (SFM) depending on the anellovector titer.

[0760] A fresh monolayer of mammalian cells in a T225 flask is overlaid with the minimum volume sufficient to cover the culture surface and incubated for 90 minutes at 37° C. and 5% carbon dioxide with gentle rocking. The mammalian cells used for this step may or may not be the same type of cells as used for the P0 recovery. After this incubation, the inoculum is replaced with 40 ml of serum-free, animal origin-free culture medium. Cells are incubated at 37° C. and 5% carbon dioxide for 3-7 days. 4 ml of a 10× solution of the same mild detergent previously utilized is added to achieve a final detergent concentration of 0.5%, and the mixture is then incubated at 37° C. for 30 minutes with gentle agitation. Endonuclease is added and incubated at 25-37° C. for 0.5-4 hours. The medium is then collected and centrifuged at 1000×g at 4° C. for 10 minutes. The clarified supernatant is mixed with 40 ml of stabilization buffer and stored at −80° C. This generates a seed stock, or passage 1 of anellovector (P1).

[0761] Depending on the titer of the stock, it is diluted no less than 100-fold in SFM and added to cells grown on multilayer flasks of the required size. Multiplicity of infection (MOI) and time of incubation is optimized at smaller scale to ensure maximal anellovector production. After harvest, anellovectors may then be purified and concentrated as needed. A schematic showing a workflow, e.g., as described in this example, is provided in FIG. 12.

### Example 5: Manufacturing Process of Replication-Deficient Anellovectors

[0762] This example describes a method for recovery and scaling up of production of replication-deficient anellovectors.

[0763] Anellovectors can be rendered replication-deficient by deletion of one or more ORFs (e.g., ORF1, ORF1/1, ORF1/2, ORF2, ORF2/2, ORF2/3, and/or ORF2t/3) involved in replication. Replication-deficient anellovectors can be grown in a complementing cell line. Such cell line constitutively expresses components that promote anellovector growth but that are missing or nonfunctional in the genome of the anellovector.

[0764] In one example, the sequence(s) of any ORF(s) involved in anellovector propagation are cloned into a lentiviral expression system suitable for the generation of stable cell lines that encode a selection marker, and lentiviral vector is generated as described herein. A mammalian cell line capable of supporting anellovector propagation is infected with this lentiviral vector and subjected to selective pressure by the selection marker (e.g., puromycin or any other antibiotic) to select for cell populations that have stably integrated the cloned ORFs. Once this cell line is characterized and certified to complement the defect in the engineered anellovector, and hence to support growth and propagation of such anellovectors, it is expanded and banked in cryogenic storage. During expansion and maintenance of these cells, the selection antibiotic is added to the culture medium to maintain the selective pressure. Once anellovectors are introduced into these cells, the selection antibiotic may be withheld.

[0765] Once this cell line is established, growth and production of replication-deficient anellovectors is carried out, e.g., as described in Example 15.

### Example 6: Production of Anellovectors Using Suspension Cells

[0766] This example describes the production of anellovectors in cells in suspension.

[0767] In this example, an A549 or 293T producer cell line that is adapted to grow in suspension conditions is grown in animal component-free and antibiotic-free suspension medium (Thermo Fisher Scientific) in WAVE bioreactor bags at 37 degrees and 5% carbon dioxide. These cells, seeded at 1×10⁶ viable cells/mL, are transfected using lipofectamine 2000 (Thermo Fisher Scientific) under current good manufacturing practices (cGMP), with a plasmid comprising anellovector sequences, along with any complementing plasmids suitable or required to package the anellovector (e.g., in the case of a replication-deficient anellovector, e.g., as described in Example 16). The complementing plasmids can, in some instances, encode for viral proteins that have been deleted from the anellovector genome (e.g., an anellovector genome based on a viral genoe, e.g., an Anellovirus genome, e.g., as described herein) but are useful or required for replication and packaging of the anellovectors. Transfected cells are grown in the WAVE bioreactor bags and the supernatant is harvested at the following time points: 48, 72, and 96 hours post transfection. The supernatant is separated from the cell pellets for each sample using centrifugation. The packaged anellovector particles are then purified from the harvested supernatant and the lysed cell pellets using ion exchange chromatography.

[0768] The genome equivalents in the purified prep of the anellovectors can be determined, for example, by using a small aliquot of the purified prep to harvest the anellovector genome using a viral genome extraction kit (Qiagen), followed by qPCR using primers and probes targeted towards the anellovector DNA sequence, e.g., as described in Example 18.

[0769] The infectivity of the anellovectors in the purified prep can be quantified by making serial dilutions of the purified prep to infect new A549 cells. These cells are harvested 72 hours post transfection, followed by a qPCR assay on the genomic DNA using primers and probes that are specific to the anellovector DNA sequence.

### Example 7: Quantification of Anellovector Genome Equivalents by qPCR

[0770] This example demonstrates the development of a hydrolysis probe-based quantitative PCR assay to quantify anellovectors. Sets of primers and probes are designed based on an Anellovirus genome sequence. using the software Geneious with a final user optimization. Exemplary primer sequences for TTV (Accession No. AJ620231.1) and TTMV (Accession No. JX134045.1) are shown in Table 44 below.

TABLE 44
Sequences of forward and reverse primers and hydrolysis probes used to
quantify TTMV and TTV genome equivalents by quantitative PCR.

| TTMV | | SEQ ID NO: |
|---|---|---|
| Forward Primer | 5′-GAAGCCCACCAAAAGCAATT-3′ | 5189 |
| Reverse Primer | 5′-AGTTCCCGTGTCTATAGTCGA-3′ | 5190 |
| Probe | 5′-ACTTCGTTACAGAGTCCAGGGG-3′ | 5191 |
| TTV | | |
| Forward Primer | 5′-AGCAACAGGTAATGGAGGAC-3′ | 5192 |
| Reverse Primer | 5′-TGGAAGCTGGGGTCTTTAAC-3′ | 5193 |
| Probe | 5′-TCTACCTTAGGTGCAAAGGGCC-3′ | 5194 |

[0771] As a first step in the development process, qPCR is run using the Anellovirus primers with SYBR-green chemistry to check for primer specificity. FIG. 13 shows one distinct amplification peak for each primer pair.

[0772] Hydrolysis probes are ordered labeled with the fluorophore 6FAM at the 5′ end and a minor groove binding, non-fluorescent quencher (MGBNFQ) at the 3′ end. The PCR efficiency of the new primers and probes was evaluated using two different commercial master mixes using purified plasmid DNA as component of a standard curve and increasing concentrations of primers. The standard curve is set up by using purified plasmids containing the target sequences for the different sets of primers-probes. Seven tenfold serial dilutions are performed to achieve a linear range over 7 logs and a lower limit of quantification of 15 copies per 20 ul reaction. All primers for qPCR are ordered from a commercial vendor such as IDT. Hydrolysis probes conjugated to the fluorophore 6FAM and a minor groove binding, non-fluorescent quencher (MGBNFQ) as well as all the qPCR master mixes are obtained from Thermo Fisher. An exemplary amplification plot is shown in FIG. 15.

[0773] Using these primer-probe sets and reagents, the genome equivalent (GEq)/ml in anellovector stocks is quantified. The linear range is then used to calculate the GEq/ml. Samples with higher concentrations than the linear range can be diluted as needed.

### Example 8: Functional Effects of an Anellovector Expressing an Exogenous microRNA Sequence

[0774] This example demonstrates the successful expression of an exogenous miRNA (miR-625) from anellovector genome using a native promoter.

[0775] 500 ng of following plasmid DNAs are transfected into 60% confluent wells of HEK293T cells in a 24 well plate:
[0776] i) Empty plasmid backbone
[0777] ii) Plasmid containing an Anellovirus genome in which endogenous miRNA is knocked out (KO)
[0778] iii) Anellovirus genome in which endogenous miRNA is replaced with a non-targeting scramble miRNA
[0779] iv) Anellovirus genome in which endogenous miRNA sequence is replaced with miRNA encoding miR-625

[0780] 72 hours post transfection, total miRNA is harvested from the transfected cells using the Qiagen miRNeasy kit, followed by reverse transcription using miRNA Script RT II kit. Quantitative PCR is performed on the reverse transcribed DNA using primer that should specifically detect miRNA-625 or RNU6 small RNA. RNU6 small RNA is used as a housekeeping gene and data is plotted as a fold change relative to empty vector.

### Example 9: Characterization of Regions Required for Anellovector Development

[0781] This Example describes deletions in the Anellovirus genome to help characterize the portions of the genome sufficient for replicating virus and anellovector production. A series of deletions were made in the non-coding region (NCR) of TTV-tth8 downstream of the ORFs (nts 3016 to 3753). A 36-nucleotide (nt) sequence (CGCGCTGCGCGCGCCGCCCAGTAGGGGGAGCCATGC (SEQ ID NO: 5167)) was deleted from the GC region (labeled Δ36nt (GC)). Additionally, a 78-nt pre-microRNA sequence (CCGCCATCTTAAGTAGTTGAGGCGGACGGTGGCGTGAGTTCAAAGGTCACCATCAGCCACA CCTACTCAAAATGGTGG (SEQ ID NO: 5168)) was deleted from the 3′ NCR (labeled Δ36nt (GC) AmiR). And lastly, an extra 171 nts in the 3′NCR of Δ36nt (GC) was deleted (CTTAAGTAGTTGAGGCGGACGGTGGCGTGAGTTCAAAGGTCACCATCAGCCACACCTACTC AAAATGGTGGACAATTTCTTCCGGGTCAAAGGTTACAGCCGCCATGTTAAAACACGTGACGT ATGACGTCACGGCCGCCATTTTGTGACACAAGATGGCCGACTTCCTTCC (SEQ ID NO: 5169)) and labeled Δ3′NCR (FIG. 26). 2 μg of circular pTTV-tth8 (WT), pTTV-tth8(Δ36nt (GC)), pTTV-tth8(Δ36nt (GC) ΔmiR), pTTV-tth8(Δ3′NCR) DNA plasmids harboring the altered 3′NCRs TTV-tth8 respectively described above, were transfected into HEK293 at 60% confluency in a 12-well plate using lipofectamine 2000, in triplicates. 48 hours after transfection, cell pellets were harvested and lysed to isolate mRNA transcripts (RNeasy, Qiagen cat #74104) and converted to cDNA (High-Capacity cDNA Reverse Transcription kit, ThermoFisher, cat #4368814). qPCR was performed on all samples measuring viral transcripts expression with each deletion and normalized to the internal control mRNA of GAPDH.

[0782] As shown in FIGS. 27A-27D, all three of the deletion mutants significantly inhibited viral transcript expression in vitro. Therefore, the 3′ NCR of TTV-tth8 is necessary for anellovector production for expression of transgene.

[0783] The TTV strain tth8, GeneBank Accession No. AJ620231.1, was deposited as a full-genome sequence. In the GC-rich region, however, there is a stretch of 36 nucleotides annotated as generic Ns. This region is highly conserved among TTV strains and therefore might be important for the biology of these viruses. The DNA sequences of several hundred TTV strains were computationally aligned and used to generate a strong consensus sequence for those 36 nucleotides (CGCGCTGCGCGCGCCGCCCAGTAGGGGGAGCCATGC (SEQ ID NO: 5167)). The TTV-tth8 genome sequence referred to herein as the “wild-type” sequence accordingly had this consensus sequence inserted in place of the stretch of 36 Ns listed in the publicly available TTV-tth8 sequence.

### Example 10: Anellovector Delivery of Exogenous Proteins In Vivo

[0784] This example demonstrates in vivo effector function (e.g. expression of proteins) of anellovectors after administration.

[0785] Anellovectors comprising a transgene encoding nano-luciferase (nLuc) (FIGS. 28A-28B) are prepared. Briefly, double-stranded DNA plasmids harboring the Anellovirus non-coding regions and an nLuc expression cassette are transfected into HEK293T cells along with double-stranded DNA plasmids encoding the full Anellovirus genome to act as trans replication and packaging factors. After transfection, cells are incubated to permit anellovector production and anellovector material is harvested and enriched via nuclease treatment, ultrafiltration/diafiltration, and sterile filtration. Additional HEK293T cells are transfected with non-replicating DNA plasmids harboring nLuc expression cassettes and Anellovirus ORF transfection cassettes, but lacking non-coding domains essential for replication and packaging, to act as a “non-viral” negative control. The non-viral samples are prepared following the same protocol as the anellovector material.

[0786] Anellovector preparation is administered to a cohort of three healthy mice intramuscularly, and monitored by IVIS Lumina imaging (Bruker) over the course of nine days. As a non-viral control, the non-replicating preparation is administered to three additional mice. Injections of 25 μL of anellovector or non-viral preparations are administered to the left hind leg on Day 0, and re-administered to the right hind leg on Day 4. Observation of more occurences of nLuc luminescent signal in mice injected with the anellovector preparation than the non-viral preparation would be consistent with trans gene expression after in vivo anellovector transduction.

### Example 11: Tandem Copies of the Anellovirus Genome

[0787] This example describes plasmid-based expression vectors harboring two copies of a single anelloviral genome, arranged in tandem such that the GC-rich region of the upstream genome is near the 5′ region of the downstream genome (FIG. 31A).

[0788] Anelloviruses replicate via rolling circle, in which a replicase (Rep) protein binds to the genome at an origin of replication and initiates DNA synthesis around the circle. For anellovirus genomes contained in plasmid backbones, this requires either replication of the full plasmid length, which is longer than the native viral genome, or recombination of the plasmid resulting in a smaller circle comprising the genome with minimal backbone. Therefore, viral replication off of a plasmid can be inefficient. To improve viral genome replication efficiency, plasmids are engineered with tandem copies of TTV-tth8 and TTMV-LY2. These plasmids present every possible circular permutation of the anelloviral genome: regardless of where the Rep protein binds, it will be able to drive replication of the viral genome from the upstream origin of replication to the downstream origin. A similar strategy has been used to produce porcine Anelloviruses (Huang et al., 2012, Journal of Virology 86 (11) 6042-6054).

[0789] Tandem anellovector can be assembled, for example, by sequentially cloning copies of the genome into a plasmid backbone, leaving 12 bp of non-viral DNA between the two sequences. Alternatively, tandem anellovector can be assembled via Golden-gate assembly, simultaneously incorporating two copies of the genome into a backbone and leaving no extra nucleotides between the genomes.

[0790] Plasmid harboring tandem copies of an anellovector genetic element sequence is transfected into HEK239T cells. Cells are incubated for five days, then lysed using 0.1% Triton X-100 and treated with nucleases to digest DNA not protected by viral capsids. qPCR is then performed using Taqman probes for the TTV-tth8 genome sequence and the plasmid backbone. TTV-tth8 genome copies are normalized to backbone copics.

### Example 12: In Vitro Circularized Anellovirus Genomes

[0791] This example describes constructs comprising circular, double stranded Anelloviral genome DNA with minimal non-viral DNA. These circular viral genomes more closely match the double-stranded DNA intermediates found during wild-type Anellovirus replication. When introduced into a cell, such circular, double stranded Anelloviral genome DNA with minimal non-viral DNA can undergo rolling circle replication to produce, for example, a genetic element as described herein.

[0792] In one example, plasmids harboring an Anellovirus genome sequence are digested with restriction endonucleases recognizing sites flanking the genomic DNA. The resulting linearized genomes are then ligated to form circular DNA. These ligation reactions are done with varying DNA concentrations to optimize the intramolecular ligations. The ligated circles are either directly transfected into mammalian cells, or further processed to remove non-circular genome DNA by digesting with restriction endonucleases to cleave the plasmid backbone and exonucleases to degrade linear DNA. To demonstrate the improvements in Anellovirus production, circularized Anellovirus genome constructs are transfected into HEK293T cells. After 7 days of incubation, cells are lysed, and qPCR is performed to compare the levels of anellovirus genome between circularized and plasmid-based anelloviral genomes. Increased levels of Anelloviral genomes show that circularization of the viral DNA is a useful strategy for increasing Anellovirus production.

[0793] Digested plasmid can be purified on 1% agarose gels prior to electroelution or Qiagen column purification and ligation with T4 DNA Ligase. Circularized DNA is concentrated on a 100 kDa UF/DF membrane before transfection. Circularization is confirmed by gel electrophoresis. T-225 flasks are seeded with HEK293T at 3×10⁴ cells/cm² one day prior to lipofection with Lipofectamine 2000. Nine micrograms of circularized Anellovirus DNA and 50 μg of circularized Anellovirus-nLuc are co-transfected one day post flask seeding. As a comparison, an additional T-225 flask is co-transfected with 50 μg of linearized Anellovirus and 50 μg of linearized Anellovirus-nLuc.

[0794] Anellovector production proceeds for eight days prior to cell harvest in Triton X-100 harvest buffer. Generally, anellovectors can be enriched, e.g., by lysis of host cells, clarification of the lysate, filtration, and chromatography. In this example, harvested cells are nuclease treated prior to sodium chloride adjustment and 1.2 μm/0.45 μm normal flow filtration. Clarified harvest is concentrated and buffer exchanged into PBS on a 750 kDa MWCO mPES hollow fiber membrane. The TFF retentate is filtered with a 0.45 μm filter before loading on a Sephacryl S-500 HR SEC column pre-equilibrated in PBS. Anellovectors are processed across the SEC column at 30 cm/hr. Individual fractions are collected and assayed by qPCR for viral genome copy number and transgene copy number. Viral genomes and transgene copies are observed beginning at the void volume, Fraction 7, of the SEC chromatogram. Agreement between copy number for Anellovirus genomes and Anellovirus-nLuc transgene for Anellovectors produced using circularized input DNA at Fraction 7-Fraction 10 indicates packaged Anellovectors containing nLuc transgene. SEC fractions are pooled and concentrated using a 100 kDa MWCO PVDF membrane and then 0.2 μm filtered prior to in vivo administration.

### Example 13: Production of Anellovectors Containing Chimeric ORF1 with Hypervariable Domains from Different Torque Teno Virus Strains

[0795] This example describes domain swapping of hypervariable regions of ORF1 to produce chimeric anellovectors containing the ORF1 arginine-rich region, jelly-roll domain, N22, and C-terminal domain of one TTV strain, and the hypervariable domain from an ORF1 protein of a different TTV strain.

[0796] The full-length genome of a first Anellovirus is cloned into expression vectors for expression in mammalian cells. This genome is mutated to remove the hypervariable domain of the ORF1 coding sequence and replace it with the hypervariable domain of the ORF1 coding sequence from a second Anellovirus genome (FIG. 36). The plasmid containing the first Anellovirus genome with the swapped hypervariable domain is then linearized and circularized as described herein. HEK293T cells are transfected with the circularized genome and incubated for 5-7 days to allow anellovector production. After the incubation period anellovectors are purified from the supernatant and cell pellet of transfected cells by gradient ultracentrifugation.

[0797] To determine if the chimeric anellovectors are still infectious, the isolated viral particles are added to uninfected cells. The cells are incubated for 5-7 days to allow viral replication. After incubation the ability of the chimeric anellovectors to establish infection will be monitored by immunofluorescence, western blot, and qPCR. The structural integrity of the chimeric viruses is assessed by negative stain and cryo-electron microscopy. Chimeric anellovectors can further be tested for ability to infect cells in vivo. Establishment of the ability to produce functional chimeric anellovectors through hypervariable domain swapping could allow for engineering of viruses to alter tropism and potentially evade immune detection.

### Example 14: Design of an Anellovector Harboring a Payload

[0798] This example describes the design of an exemplary anellovector genetic element harboring a trans gene. The genetic element is composed of the essential cis replication and packaging domains from an Anellovirus genome (e.g., as described herein) along with a non-Anellovirus payload, which may include, e.g., protein or non-coding RNA-expressing genes. The anellovector lacks essential trans protein elements for replication and packaging, and requires proteins provided by other sources (e.g., helpers, e.g., replicating viruses, expression plasmids, or genome integrations) for rolling circle replication and encapsidation.

[0799] In one set of examples, the entire protein-coding DNA sequence is deleted, from the first start codon to the last stop codon (FIG. 38). The resulting DNA retains the viral non-coding region (NCR), including the viral promoter, the 5′ UTR conserved domain, the 3′ UTR (which encodes miRNAs in some anellovirus strains), and the GC-rich region. The anellovector NCR harbors essential cis domains, including the viral origin of replication and capsid binding domains. However, lacking the anellovirus protein-coding open reading frames, the anellovector is unable to express essential protein factors required for DNA replication and encapsidation, and therefore cannot amplify or package unless these elements are provided in trans.

[0800] Payload DNA, including but not limited to protein-encoding sequences, full trans genes (including non-anelloviral promoter sequences), and non-coding RNA genes are incorporated into the anellovector genetic element by insertion into the site of the deleted anelloviral open reading frames (FIG. 38). Expression from protein-coding sequences can be driven, for example, by either the native viral promoter or a synthetic promoter incorporated as a trans gene.

[0801] Replication-deficient or incompetent anellovector genetic elements (e.g., as described herein) may lack the protein-coding sequences for viral replication and/or capsid factors. Therefore, packaged anellovectors are produced by co-transfecting cells with the anellovector DNA described in this example and viral-protein-encoding DNA. The viral proteins are expressed off of replication-competent wild-type viral genomes, non-replicating plasmids harboring the viral proteins under control of the viral promoter, or plasmids harboring the viral proteins under control of a strong constitutive promoter.

### Example 15: Transduction of Anellovector Encoding a Transgene

[0802] In this example, an Anellovector carrying the payload immunoadhesin (IA) is made using an Anellovirus genome (e.g., as described herein), and then engineered to deliver a human immunoadhesin. A double-stranded circular IA anellovector DNA, which includes the Anellovirus non-coding regions (5′ UTR, GC-rich region) and an IA-encodnig cassette, but did not include the Anellovirus ORFs, is designed (e.g., as described herein) and then produced by in vitro circularization, as described herein. The Anellovirus ORFs are provided in trans in a separate in vitro circularized DNA. Both DNAs are co-transfected into HEK293T cells in two biological replicates. Two biological replicates each of a negative control (mock transfection) and a positive control (IA expression cassette in a plasmid) are also tested. Transduction of the anellovector preparation into the lung-derived human cell lines EKVX and A549 is expected to result in detection of secreted immunoadhesin by ELISA. Moreover, immunofluorescence analysis of the IA anellovector-transduced EKVX cells is expected to reveal cells that are positive for expression of the immunoadhesin.

### Example 16: Anellovectors Carrying the EPO Gene into Lung Cancer Cells

[0803] In this example, a non-small cell lung cancer line (EKVX) is transduced with anellovectors carrying the erythropocitin gene (EPO). The anellovectors are generated by in vitro circularization, as described herein. Each of the anellovectors included a genetic element that included the EPO-encoding cassette and non-coding regions of the Anellovirus genome (5′ UTR, GC-rich region), respectively, but did not include the Anellovirus ORFs, e.g., as described herein. Cells are inoculated with purified anellovectors or a positive control (AAV2-EPO at high dose or at the same dose as the anellovectors) and incubated for 7 days. Anellovirus ORFs are provided in trans in a separate in vitro circularized DNA. Culture supernatant is sampled 3, 5.5, and 7 days post-inoculation and assayed using a commercial ELISA kit to detect EPO. Successful transduction of cells is expected to result in significantly higher EPO titers compared to untreated (negative) control cells (P<0.013 at all time points).

### Example 17: Anellovectors with Therapeutic Transgenes can be Detected In Vivo after Intravenous (i.v.) Administration

[0804] In this example, anellovectors encoding human growth hormone (hGH) are detected in vivo after intravenous (i.v.) administration. Replication-deficient anellovectors encoding an exogenous hGH are generated by in vitro circularization as described herein. The genetic element of the hGH anellovectors includes Anellovirus non-coding regions (5′ UTR, GC-rich region) and the hGH-encoding cassette, but does not include Anellovirus ORFs. hGH anellovectors are administered to mice intravenously. The Anellovirus ORFs are provided in trans in a separate in vitro circularized DNA. Briefly, anellovectors or PBS are injected intravenously at day 0 (n=4 mice/group). Anellovectors are administered to independent animal groups at 4.66E+07 anellovector genomes per mouse.

[0805] In a first example, anellovector viral genome DNA copies are detected. At day 7, blood and plasma are collected and analyzed for the hGH DNA amplicon by qPCR. Presence of hGH anellovectors in the cellular fraction of whole blood after 7 days post infection in vivo and the absence of anellovectors in plasma would demonstrate the inability of such anellovectors to replicate in vivo.

[0806] In a second example, hGH mRNA transcripts are detected after in vivo transduction. At day 7, blood is collected and analyzed for the hGH mRNA transcript amplicon by qRT-PCR. GAPDH is used as a control housekeeping gene. hGH mRNA transcripts are measured in the cellular fraction of whole blood.

### Example 18: In Vitro Circularized Genome as Input Material for Producing Anellovectors In Vitro

[0807] This example demonstrates whether in vitro circularized (IVC) double stranded anellovirus DNA, as source material for an anellovector genetic element as described herein, is more robust than an anellovirus genome DNA in a plasmid to yield packaged anellovector genomes of the expected density.

[0808] 1.2E+07 HEK293T cells (human embryonic kidney cell line) in T75 flasks are transfected with 11.25 ug of either (i) in vitro circularized double stranded Anellovirus genome (IVC Anellovirus), (ii) Anellovirus genome in a plasmid backbone, or (iii) plasmid containing just the ORF1 sequence of Anellovirus (non-replicating Anellovirus). Cells are harvested 7 days post transfection, lysed with 0.1% Triton, and treated with 100 units per ml of Benzonase. The lysates are used for cesium chloride density analysis; density is measured and TTV-tth8 copy quantification is performed for each fraction of the cesium chloride linear gradient.

[0809] 1E+07 Jurkat cells (human T lymphocyte cell line) are nucleofected with either in-vitro circularized Anellovirus genome (IVC Anellovirus) or Anellovirus genome in plasmid. Cells are harvested 4 days post transfection and lysed using a buffer containing 0.5% triton and 300 mM sodium chloride, followed by two rounds of instant freeze-thaw. The lysates are treated with 100 units/ml benzonase, followed by cesium chloride density analysis. Density measurement and LY2 genome quantification is performed on each fraction of the cesium chloride linear gradient.

LENGTHY TABLES
The patent application contains a lengthy table section. A copy of the table is available in electronic form from the USPTO web site (https://seqdata.uspto.gov/?pageRequest=docDetail&DocID=US20240254512A1). An electronic copy of the table will also be available from the USPTO upon request and payment of the fee set forth in 37 CFR 1.19(b)(3).

What is claimed is:

1. An anellovector comprising:
(i) a proteinaceous exterior comprising an Anellovirus ORF1 protein comprising an amino acid sequence of SEQ ID NO: 2466, or a polypeptide comprising an amino acid sequence having at least about 70%, 75%, 80%, 85%, 90%, 91%, 92%, 93%, 94%, 95%, 96%, 97%, 98%, or 99% sequence identity thereto, and
(ii) a genetic element enclosed by the proteinaceous exterior, wherein the genetic element comprises a promoter element operably linked to a nucleic acid sequence (e.g., a DNA sequence) encoding an exogenous effector.

2. An anellovector comprising:
(i) a proteinaceous exterior comprising an Anellovirus ORF1 protein comprising an amino acid sequence of SEQ ID NO: 2466, or a polypeptide comprising an amino acid sequence having at least about 70%, 75%, 80%, 85%, 90%, 91%, 92%, 93%, 94%, 95%, 96%, 97%, 98%, or 99% sequence identity thereto, and
(ii) a genetic element enclosed by the proteinaceous exterior, wherein the genetic element comprises a promoter element operably linked to a nucleic acid sequence (e.g., a DNA sequence) encoding an effector (e.g., an exogenous effector or an endogenous effector);
wherein the proteinaceous exterior and/or the genetic element comprises at least one difference (e.g., a mutation, chemical modification, or epigenetic alteration) relative to a wild-type Anellovirus ORF 1 protein and/or wild-type Anellovirus genome, respectively (e.g., as described herein), e.g., an insertion, substitution, chemical or enzymatic modification, and/or deletion, e.g., a deletion of a domain (e.g., one or more of an arginine-rich region, jelly-roll domain, HVR, N22, or CTD, e.g., as described herein) or genomic region (e.g., one or more of a TATA box, cap site, transcriptional start site, 5′ UTR, open reading frame (ORF), poly(A) signal, or GC-rich region, e.g., as described herein).

3. An anellovector comprising:
(i) a proteinaceous exterior comprising a polypeptide encoded by an Anellovirus ORF1 nucleic acid sequence according to nucleotides 338-2305 of SEQ ID NO: 2465, or a polypeptide encoded by a nucleic acid sequence having at least about 70%, 75%, 80%, 85%, 90%, 91%, 92%, 93%, 94%, 95%, 96%, 97%, 98%, or 99% sequence identity to the Anellovirus ORF1 nucleic acid sequence, and
(ii) a genetic element enclosed by the proteinaceous exterior, wherein the genetic element comprises a promoter element operably linked to a nucleic acid sequence (e.g., a DNA sequence) encoding an exogenous effector.

4. An anellovector comprising:
(i) a proteinaceous exterior comprising a polypeptide encoded by an Anellovirus ORF1 nucleic acid sequence according to nucleotides 338-2305 of SEQ ID NO: 2465, or a polypeptide encoded by a nucleic acid sequence having at least about 70%, 75%, 80%, 85%, 90%, 91%, 92%, 93%, 94%, 95%, 96%, 97%, 98%, or 99% sequence identity to the Anellovirus ORF1 nucleic acid sequence, and
(ii) a genetic element enclosed by the proteinaceous exterior, wherein the genetic element comprises a promoter element operably linked to a nucleic acid sequence (e.g., a DNA sequence) encoding an effector (e.g., an exogenous effector or an endogenous effector);
wherein the proteinaceous exterior and/or the genetic element comprises at least one difference (e.g., a mutation, chemical modification, or epigenetic alteration) relative to a wild-type Anellovirus ORF1 protein and/or wild-type Anellovirus genome, respectively (e.g., as described herein), e.g., an insertion, substitution, chemical or enzymatic modification, and/or deletion, e.g., a deletion of a domain (e.g., one or more of an arginine-rich region, jelly-roll domain, HVR, N22, or CTD, e.g., as described herein) or genomic region (e.g., one or more of a TATA box, cap site, transcriptional start site, 5′ UTR, open reading frame (ORF), poly(A) signal, or GC-rich region, e.g., as described herein).

5. An anellovector comprising:
(i) a proteinaceous exterior (e.g., comprising an Anellovirus ORF1 molecule as described herein, or a polypeptide comprising an amino acid sequence having at least about 70%, 75%, 80%, 85%, 90%, 91%, 92%, 93%, 94%, 95%, 96%, 97%, 98%, or 99% sequence identity thereto), and
(ii) a genetic element enclosed by the proteinaceous exterior, wherein the genetic element comprises: (a) a 5′ UTR conserved domain according to nucleotides 1-64 of SEQ ID NO: 2465, or a nucleic acid sequence having at least 70%, 75%, 80%, 85%, 90%, 91%, 92%, 93%, 94%, 95%, 96%, 97%, 98%, 99%, or 100% sequence identity thereto, and (b) a promoter element operably linked to a nucleic acid sequence (e.g., a DNA sequence) encoding an exogenous effector.

6. An anellovector comprising:
(i) a proteinaceous exterior (e.g., comprising an Anellovirus ORF1 molecule as described herein, or a polypeptide comprising an amino acid sequence having at least about 70%, 75%, 80%, 85%, 90%,
(ii) a genetic element enclosed by the proteinaceous exterior, wherein the genetic element comprises: (a) a 5′ UTR conserved domain according to nucleotides 1-64 of SEQ ID NO: 2465, or a nucleic acid sequence having at least 70%, 75%, 80%, 85%, 90%, 91%, 92%, 93%, 94%, 95%, 96%, 97%, 98%, 99%, or 100% sequence identity thereto, and (b) a promoter element operably linked to a nucleic acid sequence (e.g., a DNA sequence) encoding an effector (e.g., an exogenous effector or an endogenous effector);
wherein the proteinaceous exterior and/or the genetic element comprises at least one difference (e.g., a mutation, chemical modification, or epigenetic alteration) relative to a wild-type Anellovirus ORF1 protein and/or wild-type Anellovirus genome, respectively (e.g., as described herein), e.g., an insertion, substitution, chemical or enzymatic modification, and/or deletion, e.g., a deletion of a domain (e.g., one or more of an arginine-rich region, jelly-roll domain, HVR, N22, or CTD, e.g., as described herein) or genomic region (e.g., one or more of a TATA box, cap site, transcriptional start site, 5′ UTR, open reading frame (ORF), poly(A) signal, or GC-rich region, e.g., as described herein).

7. An anellovector comprising:
(i) a proteinaceous exterior (e.g., comprising an Anellovirus ORF1 molecule as described herein, or a polypeptide comprising an amino acid sequence having at least about 70%, 75%, 80%, 85%, 90%, 91%, 92%, 93%, 94%, 95%, 96%, 97%, 98%, or 99% sequence identity thereto), and
(ii) a genetic element enclosed by the proteinaceous exterior, wherein the genetic element comprises a promoter element operably linked to a nucleic acid sequence (e.g., a DNA sequence) encoding an exogenous effector, and wherein the genetic element has at least about 70%, 75%, 80%, 85%, 90%, 91%, 92%, 93%, 94%, 95%, 96%, 97%, 98%, 99%, or 100% sequence identity to an Anellovirus genome sequence of SEQ ID NO: 2465.

8. An anellovector comprising:
(i) a proteinaceous exterior (e.g., comprising an Anellovirus ORF1 molecule as described herein, or a polypeptide comprising an amino acid sequence having at least about 70%, 75%, 80%, 85%, 90%, 91%, 92%, 93%, 94%, 95%, 96%, 97%, 98%, or 99% sequence identity thereto), and
(ii) a genetic element enclosed by the proteinaceous exterior, wherein the genetic element comprises a promoter element operably linked to a nucleic acid sequence (e.g., a DNA sequence) encoding an effector (e.g., an exogenous effector or an endogenous effector), and wherein the genetic element has at least about 70%, 75%, 80%, 85%, 90%, 91%, 92%, 93%, 94%, 95%, 96%, 97%, 98%, 99%, or 100% sequence identity to an Anellovirus genome sequence of SEQ ID NO: 2465;
wherein the proteinaceous exterior and/or the genetic element comprises at least one difference (e.g., a mutation, chemical modification, or epigenetic alteration) relative to a wild-type Anellovirus ORF1 protein and/or wild-type Anellovirus genome, respectively (e.g., as described herein), e.g., an insertion, substitution, chemical or enzymatic modification, and/or deletion, e.g., a deletion of a domain (e.g., one or more of an arginine-rich region, jelly-roll domain, HVR, N22, or CTD, e.g., as described herein) or genomic region (e.g., one or more of a TATA box, cap site, transcriptional start site, 5′ UTR, open reading frame (ORF), poly(A) signal, or GC-rich region, e.g., as described herein).

9. An isolated ORF1 molecule comprising the amino acid sequence of SEQ ID NO: 2466, or an amino acid sequence having at least about 70%, 75%, 80%, 85%, 90%, 91%, 92%, 93%, 94%, 95%, 96%, 97%, 98%, 99%, or 100% sequence identity thereto:
wherein the ORF1 molecule comprises at least one difference (e.g., a mutation, chemical modification, or epigenetic alteration) relative to a wild-type ORF1 protein (e.g., as described herein), e.g., an insertion, substitution, chemical or enzymatic modification, and/or deletion, e.g., a deletion of a domain (e.g., one or more of an arginine-rich region, jelly-roll domain, HVR, N22, or CTD, e.g., as described herein).

10. An isolated ORF1 molecule comprising the amino acid sequence of the jelly-roll domain of SEQ ID NO: 2466, or an amino acid sequence having at least about 70%, 75%, 80%, 85%, 90%, 91%, 92%, 93%, 94%, 95%, 96%, 97%, 98%, 99%, or 100% sequence identity thereto:
wherein the ORF1 molecule comprises at least one difference (e.g., a mutation, chemical modification, or epigenetic alteration) relative to a wild-type ORF1 protein (e.g., as described herein), e.g., an insertion, substitution, chemical or enzymatic modification, and/or deletion, e.g., a deletion of a domain (e.g., one or more of an arginine-rich region, jelly-roll domain, HVR, N22, or CTD, e.g., as described herein).

11. An isolated ORF2 molecule comprising the amino acid sequence of SEQ ID NO: 2467, or an amino acid sequence having at least about 70%, 75%, 80%, 85%, 90%, 91%, 92%, 93%, 94%, 95%, 96%, 97%, 98%, 99%, or 100% sequence identity thereto:
wherein the ORF2 molecule comprises at least one difference (e.g., a mutation, chemical modification, or epigenetic alteration) relative to a wild-type ORF2 protein (e.g., as described herein), e.g., an insertion, substitution, chemical or enzymatic modification, and/or deletion, e.g., a deletion of a domain.

12. An isolated nucleic acid molecule (e.g., a genetic element construct or a genetic element) comprising the nucleic acid sequence of a 5′ UTR conserved domain according to nucleotides 1-64 of SEQ ID NO: 2465, or a nucleic acid sequence having at least 70%, 75%, 80%, 85%, 90%, 91%, 92%, 93%, 94%, 95%, 96%, 97%, 98%, or 99% sequence identity thereto.

13. An isolated nucleic acid molecule (e.g., a genetic element construct or a construct for providing an ORF1 molecule in trans. e.g., as described herein) comprising the nucleic acid sequence of an ORF1 gene according to nucleotides 338-2305 of SEQ ID NO: 2465, or a nucleic acid sequence having at least 70%, 75%, 80%, 85%, 90%, 91%, 92%, 93%, 94%, 95%, 96%, 97%, 98%, or 99% sequence identity thereto.

14. An isolated nucleic acid molecule (e.g., a genetic element construct or a construct for providing an ORF2 molecule in trans. e.g., as described herein) comprising the nucleic acid sequence of an ORF2 gene according to nucleotides 114-446 of SEQ ID NO: 2465, or a nucleic acid sequence having at least 70%, 75%, 80%, 85%, 90%, 91%, 92%, 93%, 94%, 95%, 96%, 97%, 98%, or 99% sequence identity thereto.

15. An isolated nucleic acid molecule (e.g., a genetic element construct, a genetic element, or a construct for providing an ORF1 or ORF2 molecule in trans. e.g., as described herein) comprising an Anellovirus genome sequence of SEQ ID NO: 2465, or a nucleic acid sequence having at least 50%, 60%, 70%, 75%, 80%, 85%, 90%, 91%, 92%, 93%, 94%, 95%, 96%, 97%, 98%, or 99% sequence identity thereto.

16. A genetic element comprising:
(a) a 5′ UTR conserved domain according to nucleotides 1-64 of SEQ ID NO: 2465, or a nucleic acid sequence having at least 70%, 75%, 80%, 85%, 90%, 91%, 92%, 93%, 94%, 95%, 96%, 97%, 98%, 99%, or 100% sequence identity thereto, and
(b) a promoter element operably linked to a nucleic acid sequence (e.g., a DNA sequence) encoding an exogenous effector.

17. A method of manufacturing an anellovector composition, the method comprising:
(a) providing a cell, e.g., a host cell as described herein;
(b) introducing a nucleic acid molecule encoding an ORF1 polypeptide comprising a sequence of SEQ ID NO: 2466 or ORF2 polypeptide comprising a sequence of SEQ ID NO: 2467 (or an amino acid sequence having at least about 70%, 75%, 80%, 85%, 90%, 91%, 92%, 93%, 94%, 95%, 96%, 97%, 98%, or 99% sequence identity thereto) into the cell;
(c) introducing a genetic element construct into the cell (e.g., before, after, or simultaneously with (b)),
(d) incubating the cell under conditions that allow the cell to produce anellovector; and
(e) formulating the anellovectors, e.g., as a pharmaceutical composition suitable for administration to a subject,
thereby making the anellovector composition.

18. A method of manufacturing an anellovector composition, the method comprising:
(a) providing a cell, e.g., a host cell as described herein;
(b) introducing a nucleic acid molecule encoding an ORF1 or ORF2 polypeptide into the cell;
(c) introducing a genetic element construct comprising a 5′ UTR conserved domain according to nucleotides 1-64 of SEQ ID NO: 2465 (or a nucleic acid sequence having at least about 70%, 75%, 80%, 85%, 90%, 91%, 92%, 93%, 94%, 95%, 96%, 97%, 98%,
or 99% sequence identity thereto) into the cell (e.g., before, after, or simultaneously with (b)),
(d) incubating the cell under conditions that allow the cell to produce anellovector; and
(e) formulating the anellovectors, e.g., as a pharmaceutical composition suitable for administration to a subject,
thereby making the anellovector composition.

19. A method of making an anellovector, e.g., a synthetic anellovector, comprising:
(a) providing a host cell comprising:
(i) a nucleic acid molecule, e.g., a first nucleic acid molecule, comprising the nucleic acid sequence of a Anellovirus genome comprising a sequence of SEQ ID NO: 2465 (or a nucleic acid sequence having at least 70%, 75%, 80%, 85%, 90%, 91%, 92%, 93%, 94%, 95%, 96%, 97%, 98%, or 99% sequence identity thereto), and
(ii) a nucleic acid molecule, e.g., a second nucleic acid molecule, encoding one or more of an amino acid sequence chosen from an ORF1, ORF2, ORF2/2, ORF2/3, ORF1/1, or ORF1/2 encoded by SEQ ID NO: 2465, or an amino acid sequence having at least 70% 75%, 80%, 85%, 90%, 91%, 92%, 93%, 94%, 95%, 96%, 97%, 98%, or 99% sequence identity thereto; and
(b) culturing the host cell under conditions suitable to make the anellovector.

20. An anellovector comprising:
(i) a proteinaceous exterior comprising an Anellovirus ORF1 protein comprising an amino acid sequence of SEQ ID NO: 268, or a polypeptide comprising an amino acid sequence having at least about 70%, 75%, 80%, 85%, 90%, 91%, 92%, 93%, 94%, 95%, 96%, 97%, 98%, or 99% sequence identity thereto, and
(ii) a genetic element enclosed by the proteinaceous exterior, wherein the genetic element comprises a promoter element operably linked to a nucleic acid sequence (e.g., a DNA sequence) encoding an exogenous effector.

21. An anellovector comprising:
(i) a proteinaceous exterior comprising an Anellovirus ORF1 protein comprising an amino acid sequence of SEQ ID NO: 268, or a polypeptide comprising an amino acid sequence having at least about 70%, 75%, 80%, 85%, 90%, 91%, 92%, 93%, 94%, 95%, 96%, 97%, 98%, or 99% sequence identity thereto, and
(ii) a genetic element enclosed by the proteinaceous exterior, wherein the genetic element comprises a promoter element operably linked to a nucleic acid sequence (e.g., a DNA sequence) encoding an effector (e.g., an exogenous effector or an endogenous effector);
wherein the proteinaceous exterior and/or the genetic element comprises at least one difference (e.g., a mutation, chemical modification, or epigenetic alteration) relative to a wild-type Anellovirus ORF1 protein and/or wild-type Anellovirus genome, respectively (e.g., as described herein), e.g., an insertion, substitution, chemical or enzymatic modification, and/or deletion, e.g., a deletion of a domain (e.g., one or more of an arginine-rich region, jelly-roll domain, HVR, N22, or CTD, e.g., as described herein) or genomic region (e.g., one or more of a TATA box, cap site, transcriptional start site, 5′ UTR, open reading frame (ORF), poly(A) signal, or GC-rich region, e.g., as described herein).

22. An anellovector comprising:
(i) a proteinaceous exterior comprising a polypeptide encoded by an Anellovirus ORF1 nucleic acid sequence according to nucleotides 407-2617 of SEQ ID NO: 267, or a polypeptide encoded by a nucleic acid sequence having at least about 70%, 75%, 80%, 85%, 90%, 91%, 92%, 93%, 94%, 95%, 96%, 97%, 98%, or 99% sequence identity to the Anellovirus ORF1 nucleic acid sequence, and
(ii) a genetic element enclosed by the proteinaceous exterior, wherein the genetic element comprises a promoter element operably linked to a nucleic acid sequence (e.g., a DNA sequence) encoding an exogenous effector.

23. An anellovector comprising:
(i) a proteinaceous exterior comprising a polypeptide encoded by an Anellovirus ORF1 nucleic acid sequence according to nucleotides 407-2617 of SEQ ID NO: 267, or a polypeptide encoded by a nucleic acid sequence having at least about 70%, 75%, 80%, 85%, 90%, 91%, 92%, 93%, 94%, 95%, 96%, 97%, 98%, or 99% sequence identity to the Anellovirus ORF1 nucleic acid sequence, and
(ii) a genetic element enclosed by the proteinaceous exterior, wherein the genetic element comprises a promoter element operably linked to a nucleic acid sequence (e.g., a DNA sequence) encoding an effector (e.g., an exogenous effector or an endogenous effector);
wherein the proteinaceous exterior and/or the genetic element comprises at least one difference (e.g., a mutation, chemical modification, or epigenetic alteration) relative to a wild-type Anellovirus ORF1 protein and/or wild-type Anellovirus genome, respectively (e.g., as described herein), e.g., an insertion, substitution, chemical or enzymatic modification, and/or deletion, e.g., a deletion of a domain (e.g., one or more of an arginine-rich region, jelly-roll domain, HVR, N22, or CTD, e.g., as described herein) or genomic region (e.g., one or more of a TATA box, cap site, transcriptional start site, 5′ UTR, open reading frame (ORF), poly(A) signal, or GC-rich region, e.g., as described herein).

24. An anellovector comprising:
(i) a proteinaceous exterior (e.g., comprising an Anellovirus ORF1 molecule as described herein, or a polypeptide comprising an amino acid sequence having at least about 70%, 75%, 80%, 85%, 90%, 91%, 92%, 93%, 94%, 95%, 96%, 97%, 98%, or 99% sequence identity thereto), and
(ii) a genetic element enclosed by the proteinaceous exterior, wherein the genetic element comprises: (a) a 5′ UTR conserved domain according to nucleotides 1-70 of SEQ ID NO: 267, or a nucleic acid sequence having at least 70%, 75%, 80%, 85%, 90%, 91%, 92%, 93%, 94%, 95%, 96%, 97%, 98%, 99%, or 100% sequence identity thereto, and (b) a promoter element operably linked to a nucleic acid sequence (e.g., a DNA sequence) encoding an exogenous effector.

25. An anellovector comprising:
(i) a proteinaceous exterior (e.g., comprising an Anellovirus ORF1 molecule as described herein, or a polypeptide comprising an amino acid sequence having at least about 70%, 75%, 80%, 85%, 90%,
(ii) a genetic element enclosed by the proteinaceous exterior, wherein the genetic element comprises: (a) a 5′ UTR conserved domain according to nucleotides 1-70 of SEQ ID NO: 267, or a nucleic acid sequence having at least 70%, 75%, 80%, 85%, 90%, 91%, 92%, 93%, 94%, 95%, 96%, 97%, 98%, 99%, or 100% sequence identity thereto, and (b) a promoter element operably linked to a nucleic acid sequence (e.g., a DNA sequence) encoding an effector (e.g., an exogenous effector or an endogenous effector);
wherein the proteinaceous exterior and/or the genetic element comprises at least one difference (e.g., a mutation, chemical modification, or epigenetic alteration) relative to a wild-type Anellovirus ORF1 protein and/or wild-type Anellovirus genome, respectively (e.g., as described herein), e.g., an insertion, substitution, chemical or enzymatic modification, and/or deletion, e.g., a deletion of a domain (e.g., one or more of an arginine-rich region, jelly-roll domain, HVR, N22, or CTD, e.g., as described herein) or genomic region (e.g., one or more of a TATA box, cap site, transcriptional start site, 5′ UTR, open reading frame (ORF), poly(A) signal, or GC-rich region, e.g., as described herein).

26. An anellovector comprising:
(i) a proteinaceous exterior (e.g., comprising an Anellovirus ORF1 molecule as described herein, or a polypeptide comprising an amino acid sequence having at least about 70%, 75%, 80%, 85%, 90%, 91%, 92%, 93%, 94%, 95%, 96%, 97%, 98%, or 99% sequence identity thereto), and
(ii) a genetic element enclosed by the proteinaceous exterior, wherein the genetic element comprises a promoter element operably linked to a nucleic acid sequence (e.g., a DNA sequence) encoding an exogenous effector, and wherein the genetic element has at least about 70%, 75%, 80%, 85%, 90%, 91%, 92%, 93%, 94%, 95%, 96%, 97%, 98%, 99%, or 100% sequence identity to an Anellovirus genome sequence of SEQ ID NO: 267.

27. An anellovector comprising:
(i) a proteinaceous exterior (e.g., comprising an Anellovirus ORF1 molecule as described herein, or a polypeptide comprising an amino acid sequence having at least about 70%, 75%, 80%, 85%, 90%, 91%, 92%, 93%, 94%, 95%, 96%, 97%, 98%, or 99% sequence identity thereto), and
(ii) a genetic element enclosed by the proteinaceous exterior, wherein the genetic element comprises a promoter element operably linked to a nucleic acid sequence (e.g., a DNA sequence) encoding an effector (e.g., an exogenous effector or an endogenous effector), and wherein the genetic element has at least about 70%, 75%, 80%, 85%, 90%, 91%, 92%, 93%, 94%, 95%, 96%, 97%, 98%, 99%, or 100% sequence identity to an Anellovirus genome sequence of SEQ ID NO: 267;
wherein the proteinaceous exterior and/or the genetic element comprises at least one difference (e.g., a mutation, chemical modification, or epigenetic alteration) relative to a wild-type Anellovirus ORF1 protein and/or wild-type Anellovirus genome, respectively (e.g., as described herein), e.g., an insertion, substitution, chemical or enzymatic modification, and/or deletion, e.g., a deletion of a domain (e.g., one or more of an arginine-rich region, jelly-roll domain, HVR, N22, or CTD, e.g., as described herein) or genomic region (e.g., one or more of a TATA box, cap site, transcriptional start site, 5′ UTR, open reading frame (ORF), poly(A) signal, or GC-rich region, e.g., as described herein).

28. An isolated ORF1 molecule comprising the amino acid sequence of SEQ ID NO: 268, or an amino acid sequence having at least about 70%, 75%, 80%, 85%, 90%, 91%, 92%, 93%, 94%, 95%, 96%, 97%, 98%, 99%, or 100% sequence identity thereto:
wherein the ORF1 molecule comprises at least one difference (e.g., a mutation, chemical modification, or epigenetic alteration) relative to a wild-type ORF1 protein (e.g., as described herein), e.g., an insertion, substitution, chemical or enzymatic modification, and/or deletion, e.g., a deletion of a domain (e.g., one or more of an arginine-rich region, jelly-roll domain, HVR, N22, or CTD, e.g., as described herein).

29. An isolated ORF1 molecule comprising the amino acid sequence of the jelly-roll domain of SEQ ID NO: 268, or an amino acid sequence having at least about 70%, 75%, 80%, 85%, 90%, 91%, 92%, 93%, 94%, 95%, 96%, 97%, 98%, 99%, or 100% sequence identity thereto:
wherein the ORF1 molecule comprises at least one difference (e.g., a mutation, chemical modification, or epigenetic alteration) relative to a wild-type ORF1 protein (e.g., as described herein), e.g., an insertion, substitution, chemical or enzymatic modification, and/or deletion, e.g., a deletion of a domain (e.g., one or more of an arginine-rich region, jelly-roll domain, HVR, N22, or CTD, e.g., as described herein).

30. An isolated ORF2 molecule comprising the amino acid sequence of SEQ ID NO: 269, or an amino acid sequence having at least about 70%, 75%, 80%, 85%, 90%, 91%, 92%, 93%, 94%, 95%, 96%, 97%, 98%, 99%, or 100% sequence identity thereto:
wherein the ORF2 molecule comprises at least one difference (e.g., a mutation, chemical modification, or epigenetic alteration) relative to a wild-type ORF2 protein (e.g., as described herein), e.g., an insertion, substitution, chemical or enzymatic modification, and/or deletion, e.g., a deletion of a domain.

31. An isolated nucleic acid molecule (e.g., a genetic element construct or a genetic element) comprising the nucleic acid sequence of a 5′ UTR conserved domain according to nucleotides 1-70 of SEQ ID NO: 267, or a nucleic acid sequence having at least 70%, 75%, 80%, 85%, 90%, 91%, 92%, 93%, 94%, 95%, 96%, 97%, 98%, or 99% sequence identity thereto.

32. An isolated nucleic acid molecule (e.g., a genetic element construct or a construct for providing an ORF1 molecule in trans. e.g., as described herein) comprising the nucleic acid sequence of an ORF1 gene according to nucleotides 407-2617 of SEQ ID NO: 267, or a nucleic acid sequence having at least 70%, 75%, 80%, 85%, 90%, 91%, 92%, 93%, 94%, 95%, 96%, 97%, 98%, or 99% sequence identity thereto.

33. An isolated nucleic acid molecule (e.g., a genetic element construct or a construct for providing an ORF2 molecule in trans. e.g., as described herein) comprising the nucleic acid sequence of an ORF2 gene according to nucleotides 87-533 of SEQ ID NO: 267, or a nucleic acid sequence having at least 70%, 75%, 80%, 85%, 90%, 91%, 92%, 93%, 94%, 95%, 96%, 97%, 98%, or 99% sequence identity thereto.

34. An isolated nucleic acid molecule (e.g., a genetic element construct, a genetic element, or a construct for providing an ORF1 or ORF2 molecule in trans. e.g., as described herein) comprising an Anellovirus genome sequence of SEQ ID NO: 267, or a nucleic acid sequence having at least 50%, 60%, 70%, 75%, 80%, 85%, 90%, 91%, 92%, 93%, 94%, 95%, 96%, 97%, 98%, or 99% sequence identity thereto.

35. A genetic element comprising:
(a) a 5′ UTR conserved domain according to nucleotides 1-70 of SEQ ID NO: 267, or a nucleic acid sequence having at least 70%, 75%, 80%, 85%, 90%, 91%, 92%, 93%, 94%, 95%, 96%, 97%, 98%, 99%, or 100% sequence identity thereto, and
(b) a promoter element operably linked to a nucleic acid sequence (e.g., a DNA sequence) encoding an exogenous effector.

36. A method of manufacturing an anellovector composition, the method comprising:
(f) providing a cell, e.g., a host cell as described herein;
(g) introducing a nucleic acid molecule encoding an ORF1 polypeptide comprising a sequence of SEQ ID NO: 268 or ORF2 polypeptide comprising a sequence of SEQ ID NO: 269 (or an amino acid sequence having at least about 70%, 75%, 80%, 85%, 90%, 91%, 92%, 93%, 94%, 95%, 96%, 97%, 98%, or 99% sequence identity thereto) into the cell;
(h) introducing a genetic element construct into the cell (e.g., before, after, or simultaneously with (b)),
(i) incubating the cell under conditions that allow the cell to produce anellovector; and
(j) formulating the anellovectors, e.g., as a pharmaceutical composition suitable for administration to a subject,
thereby making the anellovector composition.

37. A method of manufacturing an anellovector composition, the method comprising:
(f) providing a cell, e.g., a host cell as described herein;
(g) introducing a nucleic acid molecule encoding an ORF1 or ORF2 polypeptide into the cell;
(h) introducing a genetic element construct comprising a 5′ UTR conserved domain according to nucleotides 1-70 of SEQ ID NO: 267 (or a nucleic acid sequence having at least about 70%, 75%, 80%, 85%, 90%, 91%, 92%, 93%, 94%, 95%, 96%, 97%, 98%, or 99% sequence identity thereto) into the cell (e.g., before, after, or simultaneously with (b)),
(i) incubating the cell under conditions that allow the cell to produce anellovector; and
(j) formulating the anellovectors, e.g., as a pharmaceutical composition suitable for administration to a subject,
thereby making the anellovector composition.

38. A method of making an anellovector, e.g., a synthetic anellovector, comprising:
(a) providing a host cell comprising:
(i) a nucleic acid molecule, e.g., a first nucleic acid molecule, comprising the nucleic acid sequence of a Anellovirus genome comprising a sequence of SEQ ID NO: 267 (or a nucleic acid sequence having at least 70%, 75%, 80%, 85%, 90%, 91%, 92%, 93%, 94%, 95%, 96%, 97%, 98%, or 99% sequence identity thereto), and
(ii) a nucleic acid molecule, e.g., a second nucleic acid molecule, encoding one or more of an amino acid sequence chosen from an ORF1, ORF2, ORF2/2, ORF2/3, ORF1/1, or ORF1/2 encoded by SEQ ID NO: 267, or an amino acid sequence having at least 70% 75%, 80%, 85%, 90%, 91%, 92%, 93%, 94%, 95%, 96%, 97%, 98%, or 99% sequence identity thereto; and
(b) culturing the host cell under conditions suitable to make the anellovector.

The application's sequence listing, which the Patent Office published only in electronic form, follows.

SEQUENCE LISTING (5260 sequences)

SEQ ID NO: 1 - DNA, 4917 bp, Betatorquevirus sp.
cgggtgccgaaggtgagtgaaaccaccgtagtcaaggggcaattcgggctagctcagtctggcggaacgggcaagaaatttaaaataacatttattttacagatatgagctctatctggaagaaacctacattctcagtgagacaacaagaaaaccattggcttggaattgttttcagcactcatgacagcttctgccactgtgaagacccctggttacatttgatgattcttctaaacaaacaaggaaaagctccaaaacctgaatccgacgttcgcaatataaaatgcctccttactggaatagatacaactactaccaaagaagaccatacagaagaagacgtcgttaccggtttcgacgatggagagctggaaaaactattcgcagaaaatggcacagacgaaaatggagacgaaggaacaaggtaaaaagacgctttagaaagaaaaaactaaaaaaaattgttctaaagcaatttcaaccacataaaataactaaatgtaaaataataggcaaaaaatgtttatttcaaggtagtcctttaagatctagtaataactacatacagtactgttattcatatgtacctgaattatatcctggtggtggagggtggtctttacttgtacatagcttaggaagtatgtatgaagactatcaacatttaaacaatatatggacaacaagtaatgcaggaatgcctcttgtaagatacatgggagtggaatttaagttttatcaagatttgtatacagactatgttgttatctgggataattgctggccattggttgacaccccatacacacatgctaacagttgtcctagccaaatgcttcaaagaaaaaacaaaataatagtgcccagcaaactaacacaaaatagaaaaaaaccatacaaaagatgctttgtaacacctccaacacaaatgcttaaccgttggtatttccaaagagacatttgtgacacaccattagcaatgataaccgcaacagcagttagtcttacaaaaccattttgtgacccaaaagcaaaaagtaacaatataactattaactgcctaaacccacacagatttagaaaccctaactttcaaaacccgccaataacaacaggatacagtccattttcagcagacaatttagaaaaccatccaaaaatgtacttatacggttcacacacagtaatacaacaaagaaaagacttactaacattaacacctttatgtaataccaaagacaacagagctggagcaatgttatcaattttactaaaccaagataacgcaaataaattcgaaaactggggaaatcctttcaattccatttacttttcctcagaagaaacacatatttaccaatcacaacacggcccaacatctgaggaagtaaaaaaatggaattcatataaaagtgacaacaacaatataggcagtgaagttacattaatggtaggtcacaacctgtatgcttgtagatacaatccagaaaaagacacaggagaaggaaacatgtgttacttactaaacaattcctcagcagctagcctagaaccgccagcaaacaaaaacctagtttttgaaggttttccactatacatactactatggggatggacagactttataaagaaactaaagcaaacaattgacattgacaaaaactactttttagtaataaaaaccccattttttgaagaaaaactaccatactatatacctatagatgatgactttagagatggatttgaaccctacactccacacgaaactaacaatgcacaggcctacatttctccatacaacatgaaccactggtatccaaaactactatttcaatatcaaagtattgaaaaaatttgtagatctgggccagcatgccctagaccaacaaacgacaactacttacaagcattttacaaatacaaatttcactttaaatggggtggatgtcctaaacaactagcaaaagcatatgatccttgtttacagtcaaaatggcccactcccgataacatcactccaggaccaccgtagtcaaggggcaattcgggctagctcagtctggcggaacgggcaagaaatttaaaataacatttattttacagatatgagctctatctggaagaaacctacattctcagtgagacaacaagaaaaccattggcttggaattgttttcagcactcatgacagcttctgccactgtgaagacccctggttacatttgatgattcttctaaacaaacaaggaaaagctccaaaacctgaatccgacgttcgcaatataaaatgcctccttactggaatagatacaactactaccaaagaagaccatacagaagaagacgtcgttaccggtttcgacgatggagagctggaaaaactattcgcagaaaatggcacagacgaaaatggagacgaaggaacaaggtaaaaagacgctttagaaagaaaaaactaaaaaaaattgttctaaagcaatttcaaccacataaaataactaaatgtaaaataataggcaaaaaatgtttatttcaaggtagtcctttaagatctagtaataactacatacagtactgttattcatatgtacctgaattatatcctggtggtggagggtggtctttacttgtacatagcttaggaagtatgtatgaagactatcaacatttaaacaatatatggacaacaagtaatgcaggaatgcctcttgtaagatacatgggagtggaatttaagttttatcaagatttgtatacagactatgttgttatctgggataattgctggccattggttgacaccccatacacacatgctaacagttgtcctagccaaatgcttcaaagaaaaaacaaaataatagtgcccagcaaactaacacaaaatagaaaaaaaccatacaaaagatgctttgtaacacctccaacacaaatgcttaaccgttggtatttccaaagagacatttgtgacacaccattagcaatgataaccgcaacagcagttagtcttacaaaaccattttgtgacccaaaagcaaaaagtaacaatataactattaactgcctaaacccacacagatttagaaaccctaactttcaaaacccgccaataacaacaggatacagtccattttcagcagacaatttagaaaaccatccaaaaatgtacttatacggttcacacacagtaatacaacaaagaaaagacttactaacattaacacctttatgtaataccaaagacaacagagctggagcaatgttatcaattttactaaaccaagataacgcaaataaattcgaaaactggggaaatcctttcaattccatttacttttcctcagaagaaacacatatttaccaatcacaacacggcccaacatctgaggaagtaaaaaaatggaattcatataaaagtgacaacaacaatataggcagtgaagttacattaatggtaggtcacaacctgtatgcttgtagatacaatccagaaaaagacacaggagaaggaaacatgtgttacttactaaacaattcctcagcagctagcctagaaccgccagcaaacaaaaacctagtttttgaaggttttccactatacatactactatggggatggacagactttataaagaaactaaagcaaacaattgacattgacaaaaactactttttagtaataaaaaccccattttttgaagaaaaactaccatactatatacctatagatgatgactttagagatggatttgaaccctacactccacacgaaactaacaatgcacaggcctacatttctccatacaacatgaaccactggtatccaaaactactatttcaatatcaaagtattgaaaaaatttgtagatctgggccagcatgccctagaccaacaaacgacaactacttacaagcattttacaaatacaaatttcactttaaatggggtggatgtcctaaacaactagcaaaagcatatgatccttgtttacagtcaaaatggcccactcccgataacatcactccaggacttgaaatctcgaatcctaatgagccaccacaaacccacatctatgactgggactgggaagaagattatgttaaagaaaaagctctccaaagaattagagtatacacagaatctcctaaacaaatactcttccttacagactcgaaacaaaaccccaaaccactccaaatcaaggaaaagaaagaggagtcagaaaacgaagaggaaacgcagctactcctccagctccaccacatccgacaccagcgaaagcagctcgaactccttctccagtcaaaacagggactaataaatacacaataaaacactgtaaaattagagtaaaactatttccatctccaacaaaaaaccgtagaatgactccaaaagaaagagaactagaaaaagaggtggcaaaaatatttaaaagaccaccaagagactttatatttgactttcctacttatccttatattccacctacaccccttgcaaactttgaccttaatttcaaagaataaaggccaacatacttcacttgatggtgtctgtttattaaagtttaacttaaataagctaactccgcctccctagtatgttggcgctgtaaagggggctccgcccccttacacccccaagggggctccgcccccttacaccccctaataaatattcaacaggaaaaccacctcatttaaattgccgaccacaaaccgtcttttacttcccctttttaccaacacttcccttttttctcattattattcattacattaattagtaaactgcgtaaatccggggagtggcaactaaactatataactaacaacacttccgaatggctgagtttatgccgccagtcgtagactgcaccacttcagtgactgcaggctgagcttggg

SEQ ID NO: 2 - protein, 583 aa, Betatorquevirus sp.
MPPYWNRYNYYQRRPYRRRRRYRFRRWRAGKTIRRKWHRRKWRRRNKVKRRFRKKKLKKIVLKQFQPHKITKCKIIGKKCLFQGSPLRSSNNYIQYCYSYVPELYPGGGGWSLLVHSLGSMYEDYQHLNNIWTTSNAGMPLVRYMGVEFKFYQDLYTDYVVIWDNCWPLVDTPYTHANSCPSQMLQRKNKIIVPSKLTQNRKKPYKRCFVTPPTQMLNRWYFQRDICDTPLAMITATAVSLTKPFCDPKAKSNNITINCLNPHRFRNPNFQNPPITTGYSPFSADNLENHPKMYLYGSHTVIQQRKDLLTLTPLCNTKDNRAGAMLSILLNQDNANKFENWGNPFNSIYFSSEETHIYQSQHGPTSEEVKKWNSYKSDNNNIGSEVTLMVGHNLYACRYNPEKDTGEGNMCYLLNNSSAASLEPPANKNLVFEGFPLYILLWGWTDFIKKLKQTIDIDKNYFLVIKTPFFEEKLPYYIPIDDDFRDGFEPYTPHETNNAQAYISPYNMNHWYPKLLFQYQSIEKICRSGPACPRPTNDNYLQAFYKYKFHFKWGGCPKQLAKAYDPCLQSKWPTPDNITPGPP

SEQ ID NO: 3 - protein, 108 aa, Betatorquevirus sp.
MSSIWKKPTFSVRQQENHWLGIVFSTHDSFCHCEDPWLHLMILLNKQGKAPKPESDVRNIKCLLTGIDTTTTKEDHTEEDVVTGFDDGELEKLFAENGTDENGDEGTR

SEQ ID NO: 4 - DNA, 4593 bp, Betatorquevirus sp.
caggtaccgaaggtgagtgaaaccaccgtagttaaggggcttattgggctgaagcagtattgacggaacgggcaagaaactaaaaaataacttttattttacagaaatgagcaactacctaatgccatctttatacagccaaaatggattagaaaaccagtgggtaaactgcatatggaatactcacgaccttatgtgtggatgcaacaattgctttaaacacctcgcagctattctacaaaagaaaaatataaaatgcctcccttcaacttctaccgaagacgctggcgtccaaactggagaacctaccgaaaaagaagatttaccagaagaaggagacctagacaaacttttcgaagacgatttcgacgaaaacgatgggtaagaagacgccataaaaaattttataaaaaacttaaaagaataactttaaaagtatggcaaccaaaaagtattagaaaatgtacaattaaaggacctttatgtttatttgcttgtggaataagaaaaataagtaacaattttacattattttctgaaagctatgtaccagagggagaaagtggtgggggagcctggtctataatgcaacttactttatctgctctatgggacgaatacgtacactttaaaaattggtggactgtaactaacgataaccacccactagtaaggtacttaaaatgtaaatttaaattttatagaagtaaatttacagactatgtagtagtaccacaactctgtcctccatttgctgtaactagagacgattacctaggaacacagccactaagactattaatgaacaaaaacaaaattattgtaccaaagctaacaccatcatcaacaaaaaaatacataaaaaaaaccttttttccaccatctatgtggacaacaaactggtactttcaacaagatgttacaaaaattccactcatagtactaaaaacagcagcaatgtcactaaatcaaccttggcaaccacaagacatggttagctacaacataacattacatgcactatcaacgttttttgaaaacccaaaatttaaaacagaaaaactaactccatactctccaaaaactcaaccacaaacaccttcaacaccatactacctatatggaacagaacggccaaatgatgaccacacatataactcaaatgaactagttagactagtaaacacaaacacttttacaaagggaacccctggaacagaacaaggaaaatggggaaacccttttcacccagcatacggaggttcacatgcagccatatactacagtacacaagcaccaaatacaggttggagtggtaagacagtatttacacaaatagcacacctataccaaacatgtagatacaatccatttaaagacaaaggaactggaaataaagtatactttaaaagcaccagcttagaacaaggcaaaatgaatacattaccaacagatgctaaaatactaattacagatcttccattatggataatattttggggatggtctagctggcttaaaaaattacatccgattaatcacatggaaacagattacatgtatattgtacaatcaccatacatataccctaaacaagactggtatgtatttattgatatgtactttgtaaacatacaaagtgaagatgaacaccttactgagacagaaaaaaacttttggcatcctagatatgactttcaacaagattgtgaattttactttgcacaaagcgggccatacgccccaaaaattaatatgagtaaatgtatacaagctaattgcttttactctttttatgtaaagtggggaggatgcccagcacacatggacacatttacaaacccagaagaccaagaaagatttcccatccccaataacttccctcaaacaaatgagatcaaagatccaacattttcaaaatttggatacatctatgagtgggacgaaaaaagacaatgcattacaaaaactgctgcaaaaagaattaaaagaaaaatataaaatgcctcccttcaacttctaccgaagacgctggcgtccaaactggagaacctaccgaaaaagaagatttaccagaagaaggagacctagacaaacttttcgaagacgatttcgacgaaaacgatgggtaagaagacgccataaaaaattttataaaaaacttaaaagaataactttaaaagtatggcaaccaaaaagtattagaaaatgtacaattaaaggacctttatgtttatttgcttgtggaataagaaaaataagtaacaattttacattattttctgaaagctatgtaccagagggagaaagtggtgggggagcctggtctataatgcaacttactttatctgctctatgggacgaatacgtacactttaaaaattggtggactgtaactaacgataaccacccactagtaaggtacttaaaatgtaaatttaaattttatagaagtaaatttacagactatgtagtagtaccacaactctgtcctccatttgctgtaactagagacgattacctaggaacacagccactaagactattaatgaacaaaaacaaaattattgtaccaaagctaacaccatcatcaacaaaaaaatacataaaaaaaaccttttttccaccatctatgtggacaacaaactggtactttcaacaagatgttacaaaaattccactcatagtactaaaaacagcagcaatgtcactaaatcaaccttggcaaccacaagacatggttagctacaacataacattacatgcactatcaacgttttttgaaaacccaaaatttaaaacagaaaaactaactccatactctccaaaaactcaaccacaaacaccttcaacaccatactacctatatggaacagaacggccaaatgatgaccacacatataactcaaatgaactagttagactagtaaacacaaacacttttacaaagggaacccctggaacagaacaaggaaaatggggaaacccttttcacccagcatacggaggttcacatgcagccatatactacagtacacaagcaccaaatacaggttggagtggtaagacagtatttacacaaatagcacacctataccaaacatgtagatacaatccatttaaagacaaaggaactggaaataaagtatactttaaaagcaccagcttagaacaaggcaaaatgaatacattaccaacagatgctaaaatactaattacagatcttccattatggataatattttggggatggtctagctggcttaaaaaattacatccgattaatcacatggaaacagattacatgtatattgtacaatcaccatacatataccctaaacaagactggtatgtatttattgatatgtactttgtaaacatacaaagtgaagatgaacaccttactgagacagaaaaaaacttttggcatcctagatatgactttcaacaagattgtgaattttactttgcacaaagcgggccatacgccccaaaaattaatatgagtaaatgtatacaagctaattgcttttactctttttatgtaaagtggggaggatgcccagcacacatggacacatttacaaacccagaagaccaagaaagatttcccatccccaataacttccctcaaacaaatgagatcaaagatccaacattttcaaaatttggatacatctatgagtgggacgaaaaaagacaatgcattacaaaaactgctgcaaaaagaattaaaacatacgaatcacctacaaaatattttgcagaatatggaaacaaagatgtcccccaccaaacacaaacggaagaaagcgacgaaacgacggacgaggaaaaagctcaaacatcgtcgacagaagaccagctcctccagctcaaactctaccaaaagcagctcaagcgacagctcagaaagctcagattaaaattataaaactggacactaacatatttggtgaaagatatgttaaaaacagacgcatgactagtaaagagtttgaggaagaactatggcttgctaaagcttttaaaagaccaccctgcactatgattttggatcgcccattttacccttggctaccgcctgaacctattgttaatcagccgcttgtaaacttttcactcaatttcactgaataaaggccagcattaattcacttagtggtgtctgtttattaaattttaaacttatataaacggtcaccgcctccctaatacgcaggcgccataagggggctccgcccccttacacccccaagggggctccgcccccttacacccccaaaatattataattaaccaaaccacataatttaaattaccgaccacaaactgtcaccagtgcaacaggaaaccacaaaatttgcattgccgaccacaaacagacacaggaaaaccacctaattagcattgcccaccacaaacggctaactgttaaacttgttcctcttttttagaaccactcccactaattcattaataatcagacacatatcctgggaggagtcacaccagtatataaccactatacgtgacgaatggctgagtttatcccgtcaaacggagacgagaaacttctcggctgcttcaggg

SEQ ID NO: 5 - protein, 581 aa, Betatorquevirus sp.
MPPFNFYRRRWRPNWRTYRKRRFTRRRRPRQTFRRRFRRKRWVRRRHKKFYKKLKRITLKVWQPKSIRKCTIKGPLCLFACGIRKISNNFTLFSESYVPEGESGGGAWSIMQLTLSALWDEYVHFKNWWTVTNDNHPLVRYLKCKFKFYRSKFTDYVVVPQLCPPFAVTRDDYLGTQPLRLLMNKNKIIVPKLTPSSTKKYIKKTFFPPSMWTTNWYFQQDVTKIPLIVLKTAAMSLNQPWQPQDMVSYNITLHALSTFFENPKFKTEKLTPYSPKTQPQTPSTPYYLYGTERPNDDHTYNSNELVRLVNTNTFTKGTPGTEQGKWGNPFHPAYGGSHAAIYYSTQAPNTGWSGKTVFTQIAHLYQTCRYNPFKDKGTGNKVYFKSTSLEQGKMNTLPTDAKILITDLPLWIIFWGWSSWLKKLHPINHMETDYMYIVQSPYIYPKQDWYVFIDMYFVNIQSEDEHLTETEKNFWHPRYDFQQDCEFYFAQSGPYAPKINMSKCIQANCFYSFYVKWGGCPAHMDTFTNPEDQERFPIPNNFPQTNEIKDPTFSKFGYIYEWDEKRQCITKTAAKRIKRKI

SEQ ID NO: 6 - protein, 92 aa, Betatorquevirus sp.
MSNYLMPSLYSQNGLENQWVNCIWNTHDLMCGCNNCFKHLAAILQKKNIKCLPSTSTEDAGVQTGEPTEKEDLPEEGDLDKLFEDDFDENDG

SEQ ID NO: 7 - DNA, 4504 bp, Betatorquevirus sp.
cgggtgccgaaggtgagtgaaaccaccgtagtcaaggggcaattcgggctagatcagtctagcggaacgggcaagaaacttaaaatttatattttataggaatgagtcatcgttggacaactccaaaatcaagtattagagagaaaaaactacaatggctgaatttaatagcacatgcacacggcattttctgcgactgcccagaccctatggaacatacagcagctctcatttttgaacaagaacccgacctaaaatttaaagtacctgaaaaagatctaattaaaaaatgccttggtggagaacccgtcgttaccgctggagaaacagaagacgtagacgcttttggacctggagacctggacgcccttttcgcagaagatggtggacaagaaaacgacgatcggtaagaaaaaaaaaacttaaaaaactaagactaactcaatggcaacctcactatatcagaaaactaactgtagtgggattttatcctatgtttatggctacatcagacagactatccaatatactaaactgctacctagaaactacaacaccccactatatgcatggaggcggaggattctctatcagcaacttttctttaatgactctttatttagagcacttacaagtaagaaactggtggactgttagcaaccagaatatgcctctaataagatttacaggatgtactatatacttgtacaaaatggctgaatatgattacttattttactataacacacaaccacccatgacagcaacattaacaacatatcaaagcacacaccctgcagccatgctactcaacaaacatacaaaaaaaataacatgcaaaagatacaacaaaaagaaaaaaccttacactaaattaaaaattaaacctccatcacaattcttaaacaaatggtatttccaatatgacattgcaaacacaccattattacaaactatgtgcacagcatgctcgtttgaccgcatgtttcttaattctacatcagttagttccacaataggttttgtaagtcttgacacacgaggctttctcaaccaccaatacacaccgttaagtacatctggctatataccaaaaccaaatactttattatttggcgtcaataatggaacacaagacatatcaaaaattacatacaatgaactaatatacatgggctgtaccactgacctacaagaaggcacacctattcaacacatatcaacaacaccatacacaggccccgaatcctacaatgactttcaaaagagactatttaatgcaaaaacaagacatgaaaactggggtaatccatttaaaccatcacgctttaccggagatcaaagattaattgaaacaaacaaaacatgggacgaaattttaaaaacaacaaatggaacccaaccactaggaaccggatgggtagaaaaaacacataaaacttttgaatgccgctataacccattcgcagacaaaggctccggtaacatattataccttcttaaaataaattcagggttacattctacagattggggaccaccaacagacaaagatgtagtaacacaagatttacctttatggttactaacatggggatacctagactttcaaagaaactgcaaagaatatagagacatagacacaacatgcatatgtgtaatacaatcaccatatatatttcctaaaacagaaaaattttatgttccattagactatgactttttagaaggcagaagcccatatagaccagaaggtaacataattccctcagatgaatataactggcatcctaaagtagctttccaaacaagatcaattaattcaatagcaacaagcggaccagctacaataaaactacctaaagacatttcctgtgaaagtcacataagatatcgattttattttaaggttggaggacaaccaccaccaatgtcaatacttacaaacccaacagaccaaccaaaataccccatacccaataatctcatcagcacaccttcgttacagagtccagcaacaccaattgaacaactactctggagctttgacgaacgcagacaaacactcacaaaaactgctacacaaagaattacagactacaaaccaactgaaagctctcttttacaaattacagacccatccagctactgccctacaaccacactcttcaaagaaaaagaaacatcggagacagagagctcggaagaagaagaccaaacaccgatccaggagcaactccacaagcagcgaagaaagcaaaagcagctcagacagcaaatcaagctgctcctcaacagattaataaatatagaatagaaaaatgtaaagttaacgtactattatttcctccggatgagcctaaaaacaggcgcatgaatccgtgggaaaaagaacaagaaattttagaagcagctatatggggtagaaggccaagagattacatatttgataaaccattttatgatttatgtccagaagtacctaaatacactgtaaactttgatcttaatgcgccgcaataaaattcaaggcctgcaaatattcactctcggtgtccatttatataagttaaacttaaataaacatccaccacactcccaaatacgcaggcgccatagggggctccgccccctataacccccagggggggcacagccccccctacaacccccctaataaatattcataacggaaaccacaaaattagaattgccgaccacaaacggctgtatgctaattaacttcccaaaaattcaccaacttcctcaaaaattaattaataatcaccgtcacaaagggcggagacaactacctataaaataaactgcacttccgaatggctgagtttatgccgctagacggagcgcagaacgaagtctcagcgctgatcttgggcgggtgccgaaggtgagtgaaaccaccgtagtcaaggggcaattcgggctagctcagtctggcggaacgggcaagaaacttaaaacaatactttattttacagatatgagctctatctggaagaaaccaacattttcaccaagacaacaagaaaaccactggctcggaattgtgttttcaactcatgatgccttctgccactgtgaagacccctggttacatttaatgattcttcttaacaaacaaggcaacgctcccaaaccagaatctgaagtacaaaacataaaatgcctccttactggaatagatacaactactaccaaagaggaccataccgaagaagacgtcgttaccggcttcgacgatggagagctggaaaaactattcgcagaagatggcaccgcagaaaatggagacgaaggaacaaggtaaagagacgctttagaaaaaagaaactgaaaaaaattgttttaaaacaatttcagccacataaaataactaaatgtaaaattattggaaaaaaatgtctatttcaaggtagtcctttaagaagcagtaataactatattcaatactgttactcttatgtacctgaactgtatcctgggggaggaggctggtctctacttgtacatagtttaggtagtttatatgaagattatcaacatttgcataatgtatggactactagcaatgctggaatgcctttagtacgctttctaggagtagaatttaaattttatcaagacttatacactgattacgttgttatatatgataattgctggcctttagtagacactccttatactcatgcaaacagctgccctagccaaatgctacaaagaaaaaacaaaataatagtaccaagtaaaatgactcaaaacagaaagaaaccatataaaagatgctttgtaaaacctccaacacaaatgtataaccgttggtatttccaaagagacatttgtgacacacctctcaacatgctaaccgcaactgccatttcattaaccaaacctttttgtgaccctaaagcaaaaagcaataacataacagtttactgcttaaacccacacagatttagagtaccaaactttcaaaacccaccaataacaactggatacagtccatttacagcagacaatttagaaaaccacccaaaaatgtacttatacgcttcacaccaacttattcaaaaaaaaaaagacctacaacaattagtgccactaacaaacactaaagataacaaagctggagctatgttaaaccacctatacaaaagcaaccaaagcaataacaaatttgaaaattggggtaacccattttacagacttaatttttggggcaacgacaacttaatataccaatctcaacacggcccaacaagtgaggaagctaaaaagtgggcaaccgaatacaacaattccgaagaatacatagattcagaagttacattaatggtaggctataacttatatgcatgtagatacaatccagaaagagacacaggacaaggaaatatgtgttatttattaaacaattcatctgcagctagtttagaaccaccatcaaacaaaaatcttatatttgagggctttcctctttggg

SEQ ID NO: 8 - protein, 675 aa, Betatorquevirus sp.
MPWWRTRRYRWRNRRRRRFWTWRPGRPFRRRWWTRKRRSVRKKKLKKLRLTQWQPHYIRKLTVVGFYPMFMATSDRLSNILNCYLETTTPHYMHGGGGFSISNFSLMTLYLEHLQVRNWWTVSNQNMPLIRFTGCTIYLYKMAEYDYLFYYNTQPPMTATLTTYQSTHPAAMLLNKHTKKITCKRYNKKKKPYTKLKIKPPSQFLNKWYFQYDIANTPLLQTMCTACSFDRMFLNSTSVSSTIGFVSLDTRGFLNHQYTPLSTSGYIPKPNTLLFGVNNGTQDISKITYNELIYMGCTTDLQEGTPIQHISTTPYTGPESYNDFQKRLFNAKTRHENWGNPFKPSRFTGDQRLIETNKTWDEILKTTNGTQPLGTGWVEKTHKTFECRYNPFADKGSGNILYLLKINSGLHSTDWGPPTDKDVVTQDLPLWLLTWGYLDFQRNCKEYRDIDTTCICVIQSPYIFPKTEKFYVPLDYDFLEGRSPYRPEGNIIPSDEYNWHPKVAFQTRSINSIATSGPATIKLPKDISCESHIRYRFYFKVGGQPPPMSILTNPTDQPKYPIPNNLISTPSLQSPATPIEQLLWSFDERRQTLTKTATQRITDYKPTESSLLQITDPSSYCPTTTLFKEKETSETESSEEEDQTPIQEQLHKQRRKQKQLRQQIKLLLNRLINIE

SEQ ID NO: 9 - protein, 102 aa, Betatorquevirus sp.
MSHRWTTPKSSIREKKLQWLNLIAHAHGIFCDCPDPMEHTAALIFEQEPDLKFKVPEKDLIKKCLGGEPVVTAGETEDVDAFGPGDLDALFAEDGGQENDDR

SEQ ID NO: 10 - protein, 124 aa, Betatorquevirus sp.
LPYNHTLQRKRNIGDRELGRRRPNTDPGATPQAAKKAKAAQTANQAAPQQINKYRIEKCKVNVLLFPPDEPKNRRMNPWEKEQEILEAAIWGRRPRDYIFDKPFYDLCPEVPKYTVNFDLNAPQ

SEQ ID NO: 11 - DNA, 4481 bp, Betatorquevirus sp.
cgggtgccgaaggtgagtgaaaccaccgaagtcaaggggcaattcgggctatggcagtctggcggaacgggcaagaaacttaaaataatatttattttacagatgcacaaattctctaggaaagaccaaattaaatttattaactgcttggttggagtacatgacttaaaatgtgaatgcaacaaacctgcttaccactcctttgaaatattggcaaaacaactagctccagaattaacaacacaagaaaaagaccaccttaaaaaatgccttggtacaactactacggacgccgccgtcggagaccatggagacgattttggagacgacctagaaaccgttttcgccgacgatattacagaagaagaaactgggtaagaagacgacgttttaaaaagaaacttaaaaaaattaaaataactcaatatcaaccacaatgcattagaaaatgtaaaatatatggacctatatgcttgtttgaaactactaaccaaagacttgaaaatgactttgatctatatgaactcagtgaagttccagaaactttaccggggggaggtggatggggtataaaagcattttctttagaagctttatactcagagcatgaatattgtcataatgtatggactactagtaacaaaaatttacctttagtacgctatttgggatgtaaacttagattttaccaatcagactatgtagattactgtgtaactgtttgtaaccaattacctttacaaagcagcttaggaatgtataatgccatgcaacctagcattcatcacttattacctaaagctattataattccttcaacaaaaacatacaagcgtaaaaaaccatacagacaaatatgggtaggaccaccatctcaactacaaaacaaatggtactttcaacaaaacatagcaaaaactcctttacttatgacaagagcctctgctatgtctctacaaaacttttttataaaccccagaaacataaacaccaacatgacaatacacacattaaatactgaactttttcaaaacagacaattcaaaaacacaacagaatactactgcaaaatacaaagagaaaaaaaagtatacctatacgcttctagagaaatactaacatcatcaacaacaggccttgacaaaaaacaactaataccactaacaaacacagttatatacaaaagaggcaacactgcacaagaagcaggacaaacaacaaaatggacgaactggcaactaagtgccggaaacccattccatgcagactacttacaaaaagaaattaaagtttatcaaatagcagaagacccctcaaatatttttaaagacttaacaaaaacacaaactacatactcagaagtagaagtaacaaaatccataagatacaacccatttaatgaccaaggaaacacaaaccaatgttactttaaaagtaaccaaaaagatgaatttaattggctacccccagacaacccagaactaacaaatgaaggtcttccatttggctactactatggggctttacagactggcacaaaaaaattaaaaaacacctacatttagaaacagactatgctatatgcctaacacaccaaccaactacaataacaaaagaatacttagtaccactaagtgactcatttatgaatggacacagtccatatcaaaatgacggagaaccaaatgacccagatagaacaagctggtacccacaactacaatatcaaaatgaaattataaatgctatttgtgcttcaggcccaggagtagctagacttccagattacttttcagcacaggcactaatgagatacaaattttattttaagtggggtggaagccctcctccaatgtctacagtcaaagaccccaaagaacaaccaacttttattatacccggtaacagaacctcaccaaattcgttacagaatccaacaacagatccaaccaccttgttatggaactttgacgaacgcagacaacaaattaccccaaaagctattgagagaatacaaaaagactcaaaacctgaaacaactcttattacaggtggaagccacttccaagaaccaacaccttactaccaagaagcgacatcggagacgagctccgaggaagaagaagaaacatcactattcgagcagctcaacagacagcgactcaaacaacagcgaatcaagcagcgaatattgagtacactgaaaaaattacaaagtatagaataaaaagacacccagaaccagctttactttttccaccaccaaaaagaaacagaagactaaccccatgggaagaacaagaagagagagaagtagcctacttgtttggtaggccccaaagacgttttatattcgatatgccatattatcatgatataccaattacacctaaagtaaactttgccttaagatttaaagatcaataaacaaataaagggctaggccccattaattcaaactcggtgtctgttcctttaagtctcaacttatttaaatggtcaccgcctccctaaaattagggcgccaaaagggggctctgcccccttaaacccccagggggctccgccccctgcaacccccagggggctccgccccctacaaccccctaattaatatttaacaggaaaaccacctaattaacattgccgaccacaaaccgtcaaccacttcccctttttgccacacttccctttttactcattattattcattaaattaattagtaaacaccgtatatcctgggcgtagcttaataactataaaactaacacacatgacgaatggctgagtttataccgccagacggaggacacatcacttcagtgactgagtactgccaaagggcgggtgccgaaggtgagtgaaaccaccgaagtcaaggggcaattcgggctaggtcagtctggcggaacgggcaagaaacttaattatgtatttttttacagatatgagccatcgcctaattccacctaaaccatcttccagacaacagaaaataaaatggatgaatatgataacgcacacccatgatattttctgcgattgctacgacccaattactcacacagctgcgcttatatttgaacaagaaccggaattaaaattttcagcaccagaaaaagatataattaaaaaatgccttactggagaagatactaccgccgctacaaaagaagaaaacccagatggtattggagaaggagacctagacgccctatttacagaagactttggagaagaaaatcttacagggtaagaaaaagaaaacttaaaaaactaactctgaaacaatggcaaccacattatataagaactcttaaagtaagaggacaatatccaatgatattaactacttcgcaaagactaacaaataacttaacttgttacttagaaagcattgcacctgaagactggccgggaggtgggggattcagtatatgtaatttttcactagaaatgttatacaaagaaaacttaattgctaataacttttggactgttactaatgacaatatgcctttaataagatatttaggatgttatatgtatttgtacagacaaccagaaatagactggctattttactataataatacacttcccatgacagctagtaaactaacatacatgagtacacaaccacaagttatgctacaactaaaacacataaaagtacttaaatgctccaaatatagcaaatctagaaaaccatacaaaaaaatttttataagaccaccatctcaaatgcagaacaaatggtacttacaacacgatattgcagatgtaacattactacaaacccttgcaacagcctgttcgttagaccgcaaatacttacatgcaaacgcccaatcatctacaatgggcttttacagtttaaatacagaagaaattaaaaatcattattttggacaaacacaaggaacaataggctacacaccactagacaatgaaaaaatatttgctatacatcaaattccacataatttaaaactaacagaaattaatataggagatctaatatttttaggacaagtaactaacaatgaagcaggaacaccaataagacacattaacaactcaactagaacatttacagaaagactaactaaagccctaacacaatcaggctaccaaggaaacccattttacaaagactacatacaccaagacgcagtaatagtaaaaacaaacaaaactttagaacaactaaaaactacttacaaatccgacgaccaaaaattaaacaacactgacttttcctttaaatcaaacctagtaatgaaatgcagatataacccatttaaagacaaaggcatacaaaacagagtatacctagttaaaatactacaacaaacacattcccacacatgggatgcaccaacagacaaagatattatctgggaaaacttaccactttacttattattttggggatatttagactttcaaagaaaatgtggtactgaacaacaaaggg

SEQ ID NO: 12 - protein, 653 aa, Betatorquevirus sp.
MPWYNYYGRRRRRPWRRFWRRPRNRFRRRYYRRRNWVRRRRFKKKLKKIKITQYQPQCIRKCKIYGPICLFETTNQRLENDFDLYELSEVPETLPGGGGWGIKAFSLEALYSEHEYCHNVWTTSNKNLPLVRYLGCKLRFYQSDYVDYCVTVCNQLPLQSSLGMYNAMQPSIHHLLPKAIIIPSTKTYKRKKPYRQIWVGPPSQLQNKWYFQQNIAKTPLLMTRASAMSLQNFFINPRNINTNMTIHTLNTELFQNRQFKNTTEYYCKIQREKKVYLYASREILTSSTTGLDKKQLIPLTNTVIYKRGNTAQEAGQTTKWTNWQLSAGNPFHADYLQKEIKVYQIAEDPSNIFKDLTKTQTTYSEVEVTKSIRYNPFNDQGNTNQCYFKSNQKDEFNWLPPDNPELTNEGLPFWLLLWGFTDWHKKIKKHLHLETDYAICLTHQPTTITKEYLVPLSDSFMNGHSPYQNDGEPNDPDRTSWYPQLQYQNEIINAICASGPGVARLPDYFSAQALMRYKFYFKWGGSPPPMSTVKDPKEQPTFIIPGNRTSPNSLQNPTTDPTTLLWNFDERRQQITPKAIERIQKDSKPETTLITGGSHFQEPTPYYQEATSETSSEEEEETSLFEQLNRQRLKQQRIKQRILSTLKKLQSIE

SEQ ID NO: 13 - protein, 91 aa, Betatorquevirus sp.
MHKFSRKDQIKFINCLVGVHDLKCECNKPAYHSFEILAKQLAPELTTQEKDHLKKCLGTTTTDAAVGDHGDDFGDDLETVFADDITEEETG

SEQ ID NO: 14 - DNA, 4435 bp, Betatorquevirus sp.
cgggtgctggaggtgagtgaaaccaccgcaatcaaggggcaattcgggcatgatcagtctggtggaacgggcaagaaactaaaataattattcttttgcagatgtcaagccgctttataccaacacaagattcaaagaaccagaaatacttaaaatggctgaatgctcttactcacattcatgatatttactgcaactgctacaacccgctaacacacaccgttgccttaattttcgaaaaagaatctgatttcaactttaatacttcagaaaaacaactaattcaaaaatgcctttctggagaagaccatactacacccgctggagaacctggagaagaactcgccgcaggagacctagacgcgctttttggagaacctttcgaagaagacgacaaacggtaagaagacgccgctttagaaaaaaactaaaaactttatctataagacaatttcaaccaccaacaataagactactaaaaataactggaaaataccaactatttttctgtacttcagacagaataccgaacaataatactttataccttgatacaatttcaccttttcatataccttccggaggaggattttctttaacacaatttactttacaaaacttatttgatcaacacataagactgagaaactggtggactaaaagcaatgaattcctacctttaataagatacataaaatgcattgtatacttatattaccaagaaaatgttgactatatatttgcttatgacacttctttccctttaaaagctagcagacttatgtataactctactcaaccttctgtaatgtaccttatgaaacatagaaaaataataccttgtaaacattacaacaaacgcagaaaaccatacaaaagactagtaattaaaccacctgcacaactagaaaacaaatggtattttcaacacaatttagcagacataccacttgtaaactttatggcagtagcatgctcattagatagatggtacacatcttctaaagcaagcactccaactataggatttacatgcctagatgccacagtatggcaaatgcacaactttaaagaacaaactacatatggatacactccacaaccaaaccaacacctatttagtatggccaatggaaatttaacattaaatacaattaaaataggagacttaatattactagcaaatgccaccgatcatcaagtaggaacagaactaaaaaatgttacaggcacggctgaaacaaaatggaataactgggtaacaaacagggaaaactggggtaatcctttcttattagactacttagatggtacaaaaccactaattaaatcaaccacaccactcactcagatcagagacaaactaaaaaattataagtgggactttaacaaacatttatcagactttgatagcatgttccaaattagcacagtacctaatctcattcactgcagatataacccaaatgcagacaaaggcataggaaacaaagtatattttttgccaattacaaaccaagcacgtcaaggctgggatccacaacctgacaaacctgaacttttataccaagatttaccattatgggcactttactggggcctagtagactggaacaaacgagcaggaaccataacatctatagaaacacacggaataacagtattccaaacacaatatattaacccaaaagaagaaaaatactacataccattaggtaaatattttctatctgacagatcagaatactacccaccaggagacccctcagaaccacaaattgccataggtgaccttaaaaactggcatccaaaactatcctttcaacttgatgtaattactgatatctgtaactgtggaccaggcactgtaaaactgcctccagatataagttgtgaagcttacctaaaatataaatttatttttaagattggaggctcaccaccaccaatggaaattgtatcagaccctagcaaacaacccatatggcctctacccaataacttcactgaaacaacttcgttacagagtccagggataccctttgaacacttcttgtaccacttcgaccaaagaggagactacctcacaaaaacagctatacaacgcctgcaaaaagactacccgtctaaagaaattatttcttcaattacaggagcaactggcctcaacatcccaacacatcaaacccaagaaagcgactcggaagaggagattccgcaagaagtccaaacgacattacagcagcagctcctcctgcagcgaagagagcaacacaaactcagacagcgaatcaacaagctcctaaccaaaatatctctattagaataagtaaatgtactataactacatctttgtttcctcccgataagcctgtaaatcgccgcttaactccaaaagaaatggaggaagaaatagcaaacagtaaaatatggggacatattccccgtactcatttacttgatgtgcctttctatacaaacataccaaaaccacctttatacaatgtaacctttgatattactccccctcaataaacaaggcctgaatttttcacatctcggtgtccatttattaaagctttacttatataaacatccaccactctcccaaatacgcaggcgcaaaagggggctccgaaaccacaagaaaaacaatacttatttggaacacaaaacggacaacacaaccctaccaaagaacatattataaatttaatatacttagggggcacaggacctgctaaaacaggcatacctataacaggctctgaaggtttaaacaaactacccacagaaaccacaatgtggggaaatatatttgtaccacactattttagtggtgaaggagccgtttatatttcatcaaaaagcccttcagaaattaaaacttactacaattcacaacccacaagacttacccaagacacagttgagaaagttgactttattacaccaaaatcaactgccaattttattaactgtagatataatccccttgcagacaaaggcacaggaaacaaagtttacttagtatcaaattctagagatcaagaaccctgggcaccaccaacatcacctttactaataagacaagacttacctttatggataatactatggggatttgtagactgggaaaaaaaattagcagaaacatcacaaatagacactacaaaaattgtagtaatagaatccccctatattacaccaaaactagcaaaatatgttccactagaccaatgctttatagatggacacagcccacatataacagacatgacaaattatgatgaacaacactggtatcctaaagttgcatttcaatatgaaagtataacaaatatatgcaactcaggaccaggtacagctaaattaccaaaagaaacatcagcagaagctcactataaatacacttttcatttaaagttcggaggatgcccacctcctatggaaaaaatttgcaacccgaccaaccaagctgtgtatcccgtccccaataaccagccatcaacaccttcgttacagagtccaacaaacccaatacaaacctacttgtacgacttcgacgaaagacgtggacaaattacagcaaaagctgcaaaacgcctcaaaaaagactttgaaactgaaaaaactcttttacaaattacaggatcaagcccaatggacctcgaagcccacgtcgagacacagacatcagaacaggaggactcggaagaagaggaagagaccctccacctcaagctccagcgactccgaagaaagcaaaaattactccgacagcggatcctccagctgttagacacacaaaacttagaatgataaaatgtaactttagagtaaacatgtttggtgataaccctccaaacaggagattaacaccaaaagaatttgaagaagaattagaaaacagtaaaatatggaaacatagacctagacaatatttgtatgatatacctttctatgactttttaccacctacacctataatcccacgtattaattttgaccttggatggaaaaaataaaggcctgcatacttcaacttgaggtgtccatttattttagtttaaacttatataaacatccaccactctcccaaatacgcaggcgcaaaagggggctccgcccccttaaaccccaaagggggctccgcccccttaaacccccaagggggctccgcccccttacaccccgtaataaatattcaacaggaaaaccacctaatttaaattgccgaccacaaaccgtcacttacttctccttttttatatacttccccttttactaattattattcattacattaattaataaacagcgtatgtccggggaggagcttattacctatataactaactacacttccgaatggctgagtttatgccgccagacggagactgcaacacgttagtgacttcagtctgatcaaggg

SEQ ID NO: 15 - protein, 679 aa, Betatorquevirus sp.
MPFWRRPYYTRWRTWRRTRRRRPRRAFWRTFRRRRQTVRRRRFRKKLKTLSIRQFQPPTIRLLKITGKYQLFFCTSDRIPNNNTLYLDTISPFHIPSGGGFSLTQFTLQNLFDQHIRLRNWWTKSNEFLPLIRYIKCIVYLYYQENVDYIFAYDTSFPLKASRLMYNSTQPSVMYLMKHRKIIPCKHYNKRRKPYKRLVIKPPAQLENKWYFQHNLADIPLVNFMAVACSLDRWYTSSKASTPTIGFTCLDATVWQMHNFKEQTTYGYTPQPNQHLFSMANGNLTLNTIKIGDLILLANATDHQVGTELKNVTGTAETKWNNWVTNRENWGNPFLLDYLDGTKPLIKSTTPLTQIRDKLKNYKWDFNKHLSDFDSMFQISTVPNLIHCRYNPNADKGIGNKVYFLPITNQARQGWDPQPDKPELLYQDLPLWALYWGLVDWNKRAGTITSIETHGITVFQTQYINPKEEKYYIPLGKYFLSDRSEYYPPGDPSEPQIAIGDLKNWHPKLSFQLDVITDICNCGPGTVKLPPDISCEAYLKYKFIFKIGGSPPPMEIVSDPSKQPIWPLPNNFTETTSLQSPGIPFEHFLYHFDQRGDYLTKTAIQRLQKDYPSKEIISSITGATGLNIPTHQTQESDSEEEIPQEVQTTLQQQLLLQRREQHKLRQRINKLLTKISLLE

SEQ ID NO: 16 - protein, 102 aa, Betatorquevirus sp.
LQMSSRFIPTQDSKNQKYLKWLNALTHIHDIYCNCYNPLTHTVALIFEKESDFNFNTSEKQLIQKCLSGEDHTTPAGEPGEELAAGDLDALFGEPFEEDDKR

SEQ ID NO: 17 - DNA, 4233 bp, Alphatorquevirus sp.
cgggtgccggaggtgagtttacacaccgcagtcaaggggcaattcgggctcgggactggccgggccccgggcaaggctcttaaatagctatgttttttggtaggcctcacagaaagaagaggctactgtcactgtctagcttgccaactgcaaagaaaaaaccacctatgagtctgtggaggcctcctctgcacaatgtcccggggatcgagcacctctggtacgagtccgtgcatcgtagccatgctgctgtttgtggctgtggggatcctgtacgccatcttactactcttgctgaaagatatggcatcccggggggctcgcgatcttctggggcaccgggagtagggggcaaccagaaccctccccctatccgtcgagcccgccacccggcggccgctccggaccccccagcaggtaaccagcctccggccctgccatggcatggggatggtggaagcgacggcggcgctggtggtggagaaagcggtggacccgtggccgacttcgcagacgatggactggacgacctcgtcgccgccctcgacgaagaagagtaaggaggagaaggaggtggaggagagggcgacccagacgcagactgtacagacgcaggagacggtacagacgaaaacgaaagcgggccaaaataactataagacaatggcaacccgctatgacgagacgctgttttataaggggctacatgcccgctgtagtatgtggctggggtgcctactctagaaactatactagtcacctagaggacaaaataaccaaaggaccctacggaggtgggcacagcaccatgagattctcactacaaatattatacgaagaacacttaaaacatcataactactggactagaagtaacgaggacctagagctggcactgtactacggagccagcataaaattttatagagacccagaaacagactttatagtaacataccaaagaaaatctcccatgggaggtaacatactaaccgctccatcactacacccagcagaggcaatgctgagcaaaaacaaaatcctagtacccagtctacagacaaaaccaaaaggcaaaaaaactgttagaattaatatagcaccccccactctatttgtgcacaaatggtactttcaaaaggacatatgtgacctcaccctgttcaacttgaacgttgttgcggctgacttgcggtttccgttctgctcaccacaaactgacaacgtttgtgtaaccttccaggttcttgcctcagagtacaaccagttcctctctataactgaacctacctcaggcagtaataacccagacaactttataatagatttcttaaaaacagcttttccagacaacaaacctagacacgctaacatactgaacacatacagaactgagggatgtttctcacacccacaactaaaaaagtacttaccacaaatgactcccttagacaacgataaatactttcacacaccagatggactatggggagatgcgatttacaattatacaaacaatggagcaaatggctcacaaaatatacagaacattagaaccataattaaatcaaacatggattcatattaccgtaaagtaacagaagaaaccacaataagaccagtaggctgcaaagcccactgccatttaacaggcatattctcacctccattcttaaacactggcagaatttgtagagaatttccaggactatacaatgacattgtttacaacccctggacagacaaaggcaaaggcaacagaatatggctagacagcctatcaaaaaaagacaacaagtacactccaaaacagagcataatgctaatggaaaacatgcccctatacataatgctaaacggatactttgactgggccaaaaaagaaacaggcaactggggcatagtcaccacacacagactactaatagtgtgtccttacacctttccaaggctttacctagatacagaccccaacaacggatacgtagtctactctgagacatttggagcaggccaaatgccagacaaaaacccatatgtacccgtggcgtggagatccaaatggtacccccacctactacaccaagaacaagtagtagaagatatagtactgtcagggccctttgcaccaaaagtacaaaaacccagcatgacactgaacatgaaatactcattcagattcaaatggggtggcaatcctatttccacacagattgttaaagacccctgcactcagcccacctttgaaatacccggtggcggtaacatccctcgcagagtacaagtcatcaatccgaaagtgctcggacccagctacagtttcagatcctttgacatcagacgtgacatgtttagcagctcgagtcttaaaagaatctcagaacaacaagagacttctgagtttttattctcaggtggcaaacgccccaggatcgacctgcccaagtaccagccgccagaagaagactcaagtatccaaaagagacaaagagaaccgagaccgtggacgagcgagagcgaaagcgaagcagaaacccaagaagagacgcaggagggctcgatccgagagcagctccagcagcagctccaagagcagcttcaactccgaagagggctcaagtgcctcttcgagcagttagtcagaacccagcagggagtccacgtagacccctgcctcgtgtaggccccgagcagtggctctttcctgagagaaagcccaaaccccctcctacttccggggactgggctatggagtaccttatgtgtaaaataatgaacaggcctccccgcagtcatctcacagacccgccattctacccttactgcaaaaacaattacaatgtaacctttcagcttaactacaaataaacctcagccatactattctaggccgtgggagtttcactcatcggtgtctacctctaaaagtcactaagcactccgagcgccagcgaggagtgcgacccttccccctgactcaacttcttcggagccgcgcgctacgccttcggctgcgcgcggcacctcagacccccgctcgtgctgacacgctcgcgcgtgtcagaccacttcgggctcgcgggggtcgggaattttattaaacagactccaggttgccattggacactggagccttgaatcagtaacgaaagtgagtggggccagacttcgccataaggcctttatcttcttgccatttgtccgtgttgggggtcgccataggcttcgggctcggttttagcacttccggactacaaaaaccgccatattagtgacgtcacggccgccattttaagtaagcatggcgggcggtgatgttaaatgtcaaaggtcacagcctgtcatgcttgcacaaaatggcggacttccgcttccgggtcagccgccatttttgatcacgtgaccacctacgtcacggccgccattttagcgcacaaaatggccaacttccttcctctttttcaaaaaaaagcggaagtgccgccgcggcggcggggggctcgtgctgacacgctcgcgcgtgtcagaccacttcgggctcgcgggggtcgggaattttattaaacagactccaggttgccattggacactggagccttgaatcagtaacgaaagtgagtggggccagacttcgccataaggcctttatcttcttgccatttgtccgtgttgggggtcgccataggcttcgggctcggttttagcacttccggactacaaaaaccgccatattagtgacgtcacggccgccattttaagtaagcatggcgggcggtgatgtcaaatgtgaaaggtcacagcctgtcatgcttgcacaaaatggcggacttccgcttccgggttagccgccatatttaatcacgtgaccgcatacgtcacagccgccattttagtttacaaaatggccgacttccttcctctttttcaaaaaaaaagcggaagtgccgccgcggcggcggggggcggcgcgctacgcgcgccgcccagtagggggtgctattgcacccccccccgcgcatgcgcggggccccccccccggggggctctgccccccggccccccccgtgctacgtcactaaccacgtgcgttccacaggccagtcgtgtactatgtcgtgcacttcctgggcggagtttacgttctaatataaatgactgcacttccgaatggctgagtttatgctgcccgtccgcggagaggagccacggcagagactccgaacgtcccgaggg

SEQ ID NO: 18 - protein, 747 aa, Alphatorquevirus sp.
MAWGWWKRRRRWWWRKRWTRGRLRRRWTGRPRRRPRRRRVRRRRRWRRGRPRRRLYRRRRRYRRKRKRAKITIRQWQPAMTRRCFIRGYMPAVVCGWGAYSRNYTSHLEDKITKGPYGGGHSTMRFSLQILYEEHLKHHNYWTRSNEDLELALYYGASIKFYRDPETDFIVTYQRKSPMGGNILTAPSLHPAEAMLSKNKILVPSLQTKPKGKKTVRINIAPPTLFVHKWYFQKDICDLTLFNLNVVAADLRFPFCSPQTDNVCVTFQVLASEYNQFLSITEPTSGSNNPDNFIIDFLKTAFPDNKPRHANILNTYRTEGCFSHPQLKKYLPQMTPLDNDKYFHTPDGLWGDAIYNYTNNGANGSQNIQNIRTIIKSNMDSYYRKVTEETTIRPVGCKAHCHLTGIFSPPFLNTGRICREFPGLYNDIVYNPWTDKGKGNRIWLDSLSKKDNKYTPKQSIMLMENMPLYIMLNGYFDWAKKETGNWGIVTTHRLLIVCPYTFPRLYLDTDPNNGYVVYSETFGAGQMPDKNPYVPVAWRSKWYPHLLHQEQVVEDIVLSGPFAPKVQKPSMTLNMKYSFRFKWGGNPISTQIVKDPCTQPTFEIPGGGNIPRRVQVINPKVLGPSYSFRSFDIRRDMFSSSSLKRISEQQETSEFLFSGGKRPRIDLPKYQPPEEDSSIQKRQREPRPWTSESESEAETQEETQEGSIREQLQQQLQEQLQLRRGLKCLFEQLVRTQQGVHVDPCLV

SEQ ID NO: 19 - protein, 156 aa, Alphatorquevirus sp.
MFFGRPHRKKRLLSLSSLPTAKKKPPMSLWRPPLHNVPGIEHLWYESVHRSHAAVCGCGDPVRHLTTLAERYGIPGGSRSSGAPGVGGNQNPPPIRRARHPAAAPDPPAGNQPPALPWHGDGGSDGGAGGGESGGPVADFADDGLDDLVAALDEEE

SEQ ID NO: 20 - protein, 65 aa, Alphatorquevirus sp.
LPRVGPEQWLFPERKPKPPPTSGDWAMEYLMCKIMNRPPRSHLTDPPFYPYCKNNYNVTFQLNYK

SEQ ID NO: 21 - DNA, 4193 bp, Alphatorquevirus sp.
cgggtgccggaggtgagtttacacaccgcagtcaaggggcaattcgggctcgggactggccgggctatgggcaaggctcttagggtcatcgctcttaaatatgtttgttggcaggctttacagaaaaaagaaaagggcgctgtcattgcttggcgtgcgaactccacaggagaaacgggctcgtgacatgacctggcgcccaccggtacacaatgccgccggcatcgacaggcagttctttgaggcttgttttcgatgccacgcagcttgctgtggctgcggtaattttgtcagccatgttaatgtactggcttctcgctatggcttcacagggcgtccggcgccgccaggtggtcctgggccggcgccccaattgagacccgcgcttccagcgcctgagccggaccccgagggtcctgagcctcagccatggcgtggagctggtggtggcaacgatggaggcgccgccgttggaaacccaggcgccgccgctggagacgcctacgacggagacgacctagacgccctcttcgccgccgtcgccgaggacgcagagtaaggaggcggaggtggggcaggagacgggggcgacgcagacggtacaccaccagacgaaagagacgcatcaggggtcgcaactttaaaaagaaactagtactaactcagtggcacccctctagcataagacgctgcttaatcaagggcatagtccccctggtgatatgcgggcacaccaggtggaactggaactacgccctacacagtgaggactatactgaagagggtcgctatgcccacggggggtccctcagcaccactacgtggtcgctcaaggtgctgtatgacgagtacttaaagcaccacaacttctggggctaccccaacaaccagctagacctggccaggtacaagggggcaaaatttaccttctacagacacaaaaagactgactttatagtattctttaacagaaagcctccctttaagctaaacaaatacagctgcgcctcttaccaccctggcatgctaatgcagcaaaaacacaaggtactcattcccagctatgacactaaacccaagggcaagctaaaaattactgttaaaataaagccccccactctgttagaggacaagtggtacactcagcaagacctgtgcgacgttaacttgttgcaacttgtggttactgcggctgactttcaacatccgttctgctcaccacaaacgaacacttcaaccacaacgttccaagtgttgaaagacatttattacaacactatgagcatctctgagcctccagaggcctacactaatgttaataacccttttgaatgcaaacattttagagaatactcacaagaactagaggaaataatatattcaaggggctcttactggaactctttccacgcccttgagtaccttaatccaggaatatctgacaataacaactcaaagatttttagctctacatccacatcactaacaacttggctcactggaaaaggctcagacaaatttcaaactggaaacagcacccaatttggccataacagctacaaacccacaaaacagaacattactgctgcaagaaatgcatactggactgccctaaacaaacctaatgacctcgctgttaacatagcacaggcaaaagcagaaagattcgagtaccacctaggctggtactctcccatactactgagcaaccacagaagcaacttgaactttgccagggcctaccaagatgttacttacaaccctaactgtgacaggggagttaaaaacagagtgtgggttcagcctctcactaaacccaccacagagtttgatgaaaagaggtgcaagtgtgtggtagagaacctgcccctatgggcagctctgtactgctaccacaactttgtagaagaggagctaggcatctcctctgagatctacaactcctgtatagtagtagtgcagtgcccttacacctttcctgccatgtatgacaaaaaactacccaacaaagggtacatattctatgacaccctgtttggcaacggcaaaatgcccgacggacgcggacagatagacgtcttctggcagcagcggtggtacccccgcatggccacgcagactcaggtaatgcatgacattaccatgacaggccccttctcctaccacgacgagctagtaagcacacaactgactgccaagtacacctttgactttatgtggggcggcaatatgatctccacacagatcatcaagaacccctgcaaagacagtggactggaacccgcctatcccggtagacagcgtcgcgacttacaaattgttgacccacactccatgggcccacaattctcgttccacaactgggactacagacggggcctatttggccaagacgctatcgacagagtgtcaaaagaaccaagagatgctccagagtatcctaacccatacaaaaggcctagatatgttcctcccacagaccgcgcagaccaagagcaagaaaaagacttcaattttcagaaagaaagcggggcgtcctcgtcagaagagagcgatcaagaagtcctccaagagacgcaagtactccagttcaagccagagcagcagcaacaactccacctgcagctcgcgcagcagcagcgactcggagagcaactccgattcctactccaccagatgttcaaaacccaagccaatttgcacctaaacccatatacatacacccacctgtaaacaaggtgtttttgttcgaccctgagggtcccaggcccataaacaccagagagggctgggcagatgagtaccagactgcctccttttggggcaggcccgtccgttcctactacacggacacccccttctacccagagattcccaaggtggcccctcaattttctgtaagttttaaactcggctggaaataaaaatgcaaggcctttcactgttcacttgtcggtgtctacctcttaaagtcactaagcactccgagcgttagcgaggagtgcgacccttccccctggtgcaacgccctcggcggccgcgcgctacgccttcggctgcgcgcggcacctcggacccccgctcgtgctgacacgcttgcgcgtgtcagaccacttcgggctcgcgggggtcgggaaatttgctaaacagactccgagttgccattggacactggagctgtgaatcagtaacgaaagtgagtggggccagacttcgccataaggcctttatcttgttgccatttgtccgtgtagggggtcgccataggcttcggcctccattttaggccttccggactaccaaaatggccgattccgtgacgtcatggcggccattttaagtaagctccacccaggactgacgtcagtgtcaaaggtcatcctcggcgggaacttacatgaaatggcgaccaatttcttccgggtcaaaggtcacgcctacgtcattcgtcacgtggggaggcatactgcgcaaacgcggaagtaggccccgtcacgtgacggtcacgtgggtgctgcgtcacaaccgccattttagttcacaaaatggctgacttccttccgcttttttaaaaattaaccgtctgcgtcgcccccgtctcctgccccacctccgcctccttactctgcgtccccccccccgcgcatgcgcgcggggcctccccccccgcggggggctccgccccccggtcccccccccgaagtacgtcactaaccacgtgactcccacaggccaaccagagtctacatcgtgcacttcctgggcatggtctatgtgataatataagtaagtgcacttccgaatggctgagttttccacgcccgtccgcagcggcagcaccacggagggtgatccccgcgtcccgagggcgggtgccggaggtgagtttacacaccgcagtcaaggggcaattcgggctcgggactggccgggccccgggcaaggctcttaaaaaccccccccccgcgcatgcgcgcggggcctccccccccgcggggggctccgccccccggtcccccccccgaagtacgtcactaaccacgtgactcccacaggccaaccagagtctacatcgtgcacttcctgggcatggtctatgtgataatataagtaagtgcacttccgaatggctgagttttccacgcccgtccgcagcggcagcaccacggagggtgatccccgcgtcccgaggg

SEQ ID NO: 22 - protein, 767 aa, Alphatorquevirus sp.
MAWSWWWQRWRRRRWKPRRRRWRRLRRRRPRRPLRRRRRGRRVRRRRWGRRRGRRRRYTTRRKRRIRGRNFKKKLVLTQWHPSSIRRCLIKGIVPLVICGHTRWNWNYALHSEDYTEEGRYAHGGSLSTTTWSLKVLYDEYLKHHNFWGYPNNQLDLARYKGAKFTFYRHKKTDFIVFFNRKPPFKLNKYSCASYHPGMLMQQKHKVLIPSYDTKPKGKLKITVKIKPPTLLEDKWYTQQDLCDVNLLQLVVTAADFQHPFCSPQTNTSTTTFQVLKDIYYNTMSISEPPEAYTNVNNPFECKHFREYSQELEEIIYSRGSYWNSFHALEYLNPGISDNNNSKIFSSTSTSLTTWLTGKGSDKFQTGNSTQFGHNSYKPTKQNITAARNAYWTALNKPNDLAVNIAQAKAERFEYHLGWYSPILLSNHRSNLNFARAYQDVTYNPNCDRGVKNRVWVQPLTKPTTEFDEKRCKCVVENLPLWAALYCYHNFVEEELGISSEIYNSCIVVVQCPYTFPAMYDKKLPNKGYIFYDTLFGNGKMPDGRGQIDVFWQQRWYPRMATQTQVMHDITMTGPFSYHDELVSTQLTAKYTFDFMWGGNMISTQIIKNPCKDSGLEPAYPGRQRRDLQIVDPHSMGPQFSFHNWDYRRGLFGQDAIDRVSKEPRDAPEYPNPYKRPRYVPPTDRADQEQEKDFNFQKESGASSSEESDQEVLQETQVLQFKPEQQQQLHLQLAQQQRLGEQLRFLLHQMFKTQANLHLNPYTYTHL

SEQ ID NO: 23 - protein, 167 aa, Alphatorquevirus sp.
LAGLWARLLGSSLLNMFVGRLYRKKKRALSLLGVRTPQEKRARDMTWRPPVHNAAGIDRQFFEACFRCHAACCGCGNFVSHVNVLASRYGFTGRPAPPGGPGPAPQLRPALPAPEPDPEGPEPQPWRGAGGGNDGGAAVGNPGAAAGDAYDGDDLDALFAAVAEDAE

SEQ ID NO: 24 - protein, 59 aa, Alphatorquevirus sp.
LFDPEGPRPINTREGWADEYQTASFWGRPVRSYYTDTPFYPEIPKVAPQFSVSFKLGWK

SEQ ID NO: 25 - DNA, 4073 bp, Betatorquevirus sp.
cgggagccgaaggtgagtgaaaccaccgaagtctaggggcaattcgggctagatcagtctggcggaacgggcaagaaacttaaaataaatttattttacagatatgttctcttcatggaagaatcctacatcctcacagagacagaaagaactccaatggattggcatcattaactctacacacgaccaaatttgccactgcgacgacccaacattacacctactttactgcctcaacaaattctctggatttaacaaaccagaattggatataaataatataaaatgcctccttaccggccctactaccaaaactacagaagaaaatacttccgaaaaagaagaaacaggttttatagaaggggagttagagcgacttttcgacgaagacaatggagaagaaaaagaaaatacaagcccaaatacaaggtaaagaaatttaaattttataaaaaaaagaagaaatcaattatactaagacagtttcaaccaactgctattaacaaatgtaaatgcatagggtttaaatgcttactacaaggatctatattaagagctatgaataactttgtacaatatatttactcatttgtacctgaaaagcaaccagggggtggcggatggagtattcaaatactaagtttagactctgtatacgaagactaccaacacttacaatgcatttggactaaaggaaatgcaggcctaccattagtaagatatctaggaacaaaatttacactataccaatcacaagaaacagactacgtattcaaatacgacaactgctggcccatggtagacaccatacacacacacgcagactctgctccatttagaatgctacaaacaaaaaataaagtagtagtacccagcataaacaccaaaaaaaggagaaaaccatataaaaaagtatttgtacgcccaccagcacaaatgacaaacaaatggtactttcaaaaagaaatatgcaaaacaccactcgtaatgtttacaacaactgccgtctcactaacatttccatttgctgatccaaaagctaaaagcaataatgtaacagtactctgtataaacccatacatttttaaaaaccctgactttcaacactacggaactacagggtattcacctaaatccactaatgacggaacgccattatacttatacggcagcaatcaagccaatgttacttatgaaaaattaaaatcaggcaaccaaaaaccgatgataacagcattagtagacacaaaaaaccacacaccaggaacaccactaaataactcacagaaccaaagtatagataaacttgccggaaacccattccatgaggaatggaccagcggaaatcaatacatatacttttcactaatgacacccacagaaatgcaagctcttttaacaaaaagtgaagagccatctgatagtaaaaaaaaatccatcacaaacacgggtgaaattatttacacattcagatataacccagacaaagatgatggatccaccaacaaacaatacattgttagcacatcttcaggacgaataatacaaccaccagacaatgaaaaccacatactatcaggctttccatttccatacatgctatggggatggacagactggataaaaaaactaggagaaacaccatcattcgacacaaacaaactagtagtacttgaatcaaaagcctttaacgataccactattccattatttattccaatagacccacaatttgcacacggctttgacccatactcagacatgaatgaaccaaaccacactatctcaccttacaatgccaaaaactggtttcctagatatgaatatcagaaatatacaataaatgaaatatgtttatctggacctgcgtgtcctagaccaccttggaatcactatttacaagccttatgtaaatatactatgtattttaaatggggaggatgtcctaaaaacctacaaaaagcttataatccttgttcacagtcaatatggcccacgcccgataacaagtatggacgatctgaggtgcagaatcctaacatcttcccacaaacagaactatactcatgggactggcaaaaagactatgttacagaagaagctattaaaagaatcaaaagatatacagacattgatccaacaatattctcagttacaggaccaaagtcaaacccgccaccactcaaaaagatcaagaaacaagacgaagaagaagaggaggagaagaaactccagttccagctccacaagctgcgattccagaaagtcatcctccaactccagctccagcagcaattaaaatctataaatcaaaaataaaagtaaacttatttgaacccacaaaaccaaaaaataggagaatgacaccaagagaaaaagaagaagaaaaactagacgcagcaatatggaaaagaccacaaagagactttatactcgatatacctttctaccctggtataccccctaccccactagtaaactttgacttaaaatacaaatatgaataaacaaggccaacattaattcacttagtggtgtccatttatttaagttcaacttatataaacatccaccgcctccctgaaattcgggcgccaaaatttaaaagggggctccgcccccttcaacccccaagggggctccgcccccttacacccccaagggggctccgcccccttacacccccaagggggccacgcccccttcaacccccaagggggctccgccccctaacacccccttataaatattcaacaggaaaaccacctaatttaaattgccgaccacaaaccgtcgtttacttccccttttaacactacttcctcaaattctcattattattcattacattcattagtaaacaccgtaattccggggaggagactattcactatataactaactacacttccgaatggctgagtttatgccgccagacggaggctgtatcacttcagtgactacagactgatcttgggcgggagccgaaggtgagtgaaaccaccgaagtctaggggcaattcgggctagatcagtctggcagaacgggcaagaaacttaaaataatattcttttttacagaaatgagcaccttcttaacaccatcaatctacagcaaaaatggcttagaaaaccaatggctaaactcaatttggaacatacatgaccttatgtgtggatgcaacgactgcttcaaacacttatttgatatacttaaaagaaaaggaaacctaccatgcctcccttcaattactaccgaagacgatactacaaaagaccccaatggaaatggcgccgcagacgctggactagaagatggagaactagaccgcttattcgcagaggatacacaagaagacgaagggtaagaagacgaaaatttttaaaatacaaacataaaaaactaaaaactataactataagacaatggcaaccaaataatataaaaaaatgtaaaattaaaggacaactatgcctattaacatgtggacaaaacagaattaacaataactttatattaactgctgaaagtataatacctgttggagaaccgggagggggaggcttttcaataatgcaattaacattaagagctttgtatgacgaatatacacattttagaaactggtggacaacaagcaactgtggactgccattagtaagatactctagttgcagtattaaattttattgtagcaatgacactgactatatagtaacagcacacaagggggctccgcccccttacacccccaagggggctccgcccccttacacccccaagggggccacgcccccttcaacccccaagggggctccgccccctaacacccccttataaatattcaacaggaaaaccacctaatttaaattgccgaccacaaaccgtcgtttacttccccttttaacactacttcctcaaattctcattattattcattacattcattagtaaacaccgtaattccggggaggagactattcactatataactaactacacttccgaatggctgagtttatgccgccagacggaggctgtatcacttcagtgactacagactgatcttggg

SEQ ID NO: 26 - protein, 677 aa, Betatorquevirus sp.
MPPYRPYYQNYRRKYFRKRRNRFYRRGVRATFRRRQWRRKRKYKPKYKVKKFKFYKKKKKSIILRQFQPTAINKCKCIGFKCLLQGSILRAMNNFVQYIYSFVPEKQPGGGGWSIQILSLDSVYEDYQHLQCIWTKGNAGLPLVRYLGTKFTLYQSQETDYVFKYDNCWPMVDTIHTHADSAPFRMLQTKNKVVVPSINTKKRRKPYKKVFVRPPAQMTNKWYFQKEICKTPLVMFTTTAVSLTFPFADPKAKSNNVTVLCINPYIFKNPDFQHYGTTGYSPKSTNDGTPLYLYGSNQANVTYEKLKSGNQKPMITALVDTKNHTPGTPLNNSQNQSIDKLAGNPFHEEWTSGNQYIYFSLMTPTEMQALLTKSEEPSDSKKKSITNTGEIIYTFRYNPDKDDGSTNKQYIVSTSSGRIIQPPDNENHILSGFPFPYMLWGWTDWIKKLGETPSFDTNKLVVLESKAFNDTTIPLFIPIDPQFAHGFDPYSDMNEPNHTISPYNAKNWFPRYEYQKYTINEICLSGPACPRPPWNHYLQALCKYTMYFKWGGCPKNLQKAYNPCSQSIWPTPDNKYGRSEVQNPNIFPQTELYSWDWQKDYVTEEAIKRIKRYTDIDPTIFSVTGPKSNPPPLKKIKKQDEEEEEEKKLQFQLHKLRFQKVILQLQLQQQLKSINQK

SEQ ID NO: 27 - protein, 109 aa, Betatorquevirus sp.
MFSSWKNPTSSQRQKELQWIGIINSTHDQICHCDDPTLHLLYCLNKFSGFNKPELDINNIKCLLTGPTTKTTEENTSEKEETGFIEGELERLFDEDNGEEKENTSPNTR

SEQ ID NO: 28 - DNA, 4041 bp, Alphatorquevirus sp.
cgggagccgaaggtgagtttacacaccgcagtctaggggcaattcgggcacgggtctggccgggctatgggcaagactcttaaaaaatttcctcgctctgtactccgccaggacaccaagtcatgccgtggtctccgccgagacataatatcagaacaagagaagatctctgggtgcaatcggttatttactcacatgacactttttgtggctgtgatagtgttcttcagcatcttactagcctcctgggtggcctacaaccagctccacctagagacccagcaccccctgccatacggagcctgccggcactgccgccagctccgcaaccccctgaagaaccacggcgtggtggagatacagacgaaggccgtggagaagatggaggagacgccgctggggcctacgaaccaggagacctagaagaacttttcgccgccgccgaggaagacgatatgtgagtagagggcggcgccgccgatacaggcgcagacggagacgggggcgacgcagaaggggacacagacgcaggcacagaaagacgctcattgtcaggcagtggcaaccagacgttattaaaagatgctttattactgggtggctacccctaattatctgtggaaacggacacacccaatttaactttataactcatatggacgacattccacccaaaaatgcgtcctatggaggcaactttacaaatgttacctttaaccttgcctgcttctatgaagaattcatgcatcacagaaacagatggtcagcctccaaccatgacctagaactggtcagatacctcagaaccagcctaaaactctacagacacgagtcagtagactatgtagttagctacaccaccacaggcccattcgaaacaaatgaattgtcctacatgctcactcaccctctagccatgcttctcagcaaaaaacatgtagttgtacccagcctaaagacaaaaccacacggcagaaagtacaaaaagataacaatcaaacccccaaaactaatgctaaacaaatggtactttgccaaagacttctgccacataggcctctttcagctctgggccacaggcctagaactaagaaacccatggctcaggtcaggcacaaacagcccagttataggattctatgtccttaaaaatcaggtttatcaaaacaaatacagcaacctaaacacaacagaagcttacacttcaagaaaaagtgcatatgatgaactaacaaaacatagctctgatacaaagtggtacaattggcagtatacatacaacaaaataatgaaacctatttactatgcagctgccaatgaacaaaactcaaagtttaaaacccaaacatataattggaaaaattacaaacaaaacttccaagcagtaaaaactaaatgggaaaaaacttgtaaagacgcctatgaattagtatcagaagaatacaaacaaatatacagcacaactgtcacatatccaccaccatgggaacccttgacacaaaacacaggcagacagtacctagaacatgactgtggcatatacagcccatactttctaacaccacaaatatacactcctgaatggcacacagcctggtcctacattagatacaatcccctaacagacaaaggcataggcaacagaatatgtgtgcagtactgcagcgaggccagcagtgactacaacccagtaaaaagcaagtgcatgctacaagacatgcccttgtggatgatgctgtatggctatgcagactatgtagtaaagagcacaggcatacagtcagcctggacagacatgagagtggccattaggagcccctacacagacccaaaactcataggcagctcagaaaacacaatgttcatacccataggcatagaattcatgaacggagacatgccagacaagaggccctacattccgttaaagtggtggttcaagtggtaccccatgattacacaccaaaaaaccgcacttgaggcaatagtttcctgcagcccgttcatgcccagagatcaggaacaagccagttgggacataactgtaggttacaaagcaaccttcttatggggcgggtcccccttacctccacagcccatcgacgacccctgccaaaaatccacacacgaacttcccgaccccgatagaaaccctccaagaatacaaatctcagacccgcagcacctcggaccggcgacgctgttccactcgtgggacctcagacgtggattcattaatacaaaaagtattaaaagagtgtcagaacacctcgactctaatgaatatttttcaacaggcgtcgtgtccaaaaaaccccgattcgacacaccccaccacgggcagctatcaaaccaagaagaagacgccttacatatcctcagacaactccagaaagagcaagaagagagcacctccgaagaagaacaagcactccaaaaagaagaggagcaaaaagaaaagctcctacagcagctccgagtccagcgacagcaccagcgagtcctcaggcagggaatcaaacacctcatgggagacgtcctccgactcagacagggagtccactggaacccaatcctataatacttccagcagaaccaataccagacctcctattccccaatactggtaaaaaaaaaaaattttcgcccttcgattggcagtgcgagcaggagcttgcgactttaatgaaacgacctatgcgtttctatccctcagacagcccgttctacccatggctaccccccaagcgagatatcccaaaaatatgtaaagtaaacttcaaaataaatttcagtgaatgaatctcgaggccccgggagtttcacttagcggtgtctacctctaaaggtcactaagcactccgagcgcaagcgaggagtgcgaccccctgcccggtagcaacttcctcggggtccggcgctacgccttcggctgcgccggacgcctcggacccccgctcgtgctgacacgctcgcgcgtgtcagaccacttcgggctcgcgggggtcgggttatttattaaacagactccgagtcgcccttggactcaggagctgtgaatcagtaacgaaagtgagtggggccagacttcgccatagggcctttaacttccgggtgcgggtgggggccgccattttagcttcggccgccattttaggccctcgcgggcctccgtaggcgcgcttttataacgtcacaggcgccatcttggctgtgacgtttcagtcacgtggggagggaacgcctaaacccggaagcgtccctggtcacgtgattgtgacgtcacggtcgccattttgtgtggcagccattttgtgacttccttccgctttttcaaaaaaaaagaggaagtatgacgtagcggcgggggggcggcgcgcttcgcgcgccgcccactagggggcgctgcgcgcccccccccgcgcatgcgcggggacccccccccccggggggggctccgcccccccggccccccccccatgctaaatccaccgcgcatgcgcggccacgcccccgccgccattttgtgcagcccgccaatttctattcaaacagaccaatcaacatctactacgtacacttcctggggtgtgtcctgccactctatataaacaacagcggtgacgaatggtagagttttttccgcccgtccgcagcgaggacgcgagcgtagcgagcggccgagcgacccgtgggcgggagccgaaggtgggggggcggcgcgcttcgcgcgccgcccactagggggcgctgcgcgcccccccccgcgcatgcgcggggacccccccccccggggggggctccgcccccccggccccccccccatgctaaatccaccgcgcatgcgcggccacgcccccgccgccattttgtgcagcccgccaatttctattcaaacagaccaatcaacatctactacgtacacttcctggggtgtgtcctgccactctatataaacaacagcggtgacgaatggtagagttttttccgcccgtccgcagcgaggacgcgagcgtagcgagcggccgagcgacccgtggg

SEQ ID NO: 29 - protein, 641 aa, Alphatorquevirus sp.
MDDIPPKNASYGGNFTNVTFNLACFYEEFMHHRNRWSASNHDLELVRYLRTSLKLYRHESVDYVVSYTTTGPFETNELSYMLTHPLAMLLSKKHVVVPSLKTKPHGRKYKKITIKPPKLMLNKWYFAKDFCHIGLFQLWATGLELRNPWLRSGTNSPVIGFYVLKNQVYQNKYSNLNTTEAYTSRKSAYDELTKHSSDTKWYNWQYTYNKIMKPIYYAAANEQNSKFKTQTYNWKNYKQNFQAVKTKWEKTCKDAYELVSEEYKQIYSTTVTYPPPWEPLTQNTGRQYLEHDCGIYSPYFLTPQIYTPEWHTAWSYIRYNPLTDKGIGNRICVQYCSEASSDYNPVKSKCMLQDMPLWMMLYGYADYVVKSTGIQSAWTDMRVAIRSPYTDPKLIGSSENTMFIPIGIEFMNGDMPDKRPYIPLKWWFKWYPMITHQKTALEAIVSCSPFMPRDQEQASWDITVGYKATFLWGGSPLPPQPIDDPCQKSTHELPDPDRNPPRIQISDPQHLGPATLFHSWDLRRGFINTKSIKRVSEHLDSNEYFSTGVVSKKPRFDTPHHGQLSNQEEDALHILRQLQKEQEESTSEEEQALQKEEEQKEKLLQQLRVQRQHQRVLRQGIKHLMGDVLRLRQGVHWNPIL

SEQ ID NO: 30 - DNA, 3921 bp, Alphatorquevirus sp.
cgggtgccggaggtgagtttacacaccgcagtcaaggggcaattcgggctcgggactggccgggctatgggcaaggctcttaaagaatgcgtttttctcaaatttatcgcagaaagaagaggctcctgccactgctttgcttgcgagctaaaccgaaagcacaacctagtatgagctggtgtactccagttgaaaatgcctataagagagagatcaactttctcaggggctgccaactgcttcacactagcttttgtggctgtgatgattttattaatcatattattcgcctacaaaatcttcacgggaatctacaccagcccacgggaccgtctacacctccagtgacccgtagagctctggccctgccggctgctccggagtcatggcgttccggtggtggtggtggagacgccgcccccagcgacggtggacccgccgcagatggaggagactacgaacccgcagacctagacgcactgtacgacgccgtcgccgcagaccaagagtaaggagaaggcggtggggcaggagacgggggcgacgcagactgtacagacgcagatacaaaaaaaggcgcaaaagacgaaaaaaaatgaccttgaaagtgtggaatccatccaccattcgcgcctgtaatattagaggctttgtagcactagtagtctgtggacacactcgtgcaggctctaactatgccatacacagcgaagactacatacctcaactgagaccctacggagggtcttttagcactactacctggagcctaaaagtactgtttgacgagcaccttaaatttagaaacaaatggagctatcctaatacagagctagacctagccagatacaggggagccacattcacattttacagagacccaaaagtagactacatagtagtatacaacacagtgcctccatttaagcttaacaaatacagctgccctatgctacatcccggtatgatgatgcagtataaaaaaaaaatattaatacctagctatcaaacaaaaccaaagggaagcgctaaagtaagacttagaataaaacctcctgtattatttgaagataagtggtacactcaacaagacctgtgccccgttaatcttttgtcacttgcggttagcgcatgttccttcctgcatccgtttataccaccagaaaatgacaacatatgcataacgttccaggtgttgcgagacttttattacacacaaatgtcagttacacccacaacaaccgcttccctaaatgagaaagacagaaaaatatttagtgaacacttatataaaaacgctgaatactggcaatcacaccacactgctgctagagtatctacctctcaaaagcctgcattacgaacatgtaaagcaatacccaatgatgacggatacctaaacacaacacctactcagaatactttcagaactggaaacaacacaatatatggccaaccaggctacaatccagacaatgaaaaactaactaagataagagaatggtactttacccaagaaaccacagataaccccatacatggcacttacttaaaacctacattaaactctgtagattaccatttaggaaaatacagtgctatatttttaagtccctacagaacaaacactcagtttgacacagcataccaagatgtaacctacaaccccaacacagacaaaggcaaaggaaacaaaatatggattcagagctgcacaaaagaaaccactatcctagaccaaagttgtaaatgtgtagtagaagacctaccgttgtgggctatggtaaatggctacctagaattttgtgactcagaacttccaggagccaatatttacaatacctacattgtagttgtcatatgcccttacactaaacctgcaatgctaaacaaaactaatacaaaacaagggtatgtgttctatgacaccctgtttggagatggaaaaatgcctacaggcacaggcctggtacccttctggctgcaaagcagatggtaccctagatgccagtttcagcaacaggtgctgcatgacttgtacgtcacgggtccatttagctacaaagatgacctaaaatcatttagctttaatgctaaatacaaatttagcttcttatggggcggcaatatgattccccaacagattatcaaaaacccgtgcaaaaaagaagaatccacattcacctatcccagtagagagcctcgcgacttacaagttgttgacccactcaccgtgggcccagaatgggtcttccacacatgggactggagacgtggactttttggtaaagatgctatcgacagagtgtcaaaaaaaccagacgatgatgcagaatattatccagtaccaaaaaggcctcgattcttccctccaacagacacacagtcagagccagaaaaagacttcggtttcacaccggagagccaagagctattccaggaagagccacaagcaccccaagaagaaagccaagaagtacagcagcagcaactcctccacctcagactctcacagcagttcagaatcagacagcagctccagcacctgttcgtacaagtcctcaaaacccaagccggtctccacataaacccattatttttaaaccatgcataaatcaggtgtttatgtttccaccagacacccctagacccattataacaaaagaagggtgggaggatgagtttgtaacttgcaaacactgggataggccagccagaacatactacacagacagacctacctacccttggatgcccaaggcaccccctcaatgcaatgtaagtttcaaactgggctttaaataaaaattcaaggccttaaactgttcacttgtcggtgtctacctctaaaggtcactaagcactccgagcgttagcgaggagtgcgaccctcccccctggtgcaacaccctcggagtccggcgctacgccttcggctgcgccggacacctcggccccccccctccacccgaaacgcttgcgcgtttcggaccttcggcgtcggggggggggcgggagctttactaaacagactccgaggtgccattggacactgagtgggcgtacagcaacgaaagtgagtggggccagacttcgccatagggcctttatcttcttgccatttgtcagtgtccggggttgccataggcttcggcctgcgtgtcagaccacttcgggctcgcgggggtcgggaattttgctaaacagactccaagttgccattggactcaggagctgtgaatcagtaacgaaagtgagtggggccagacttcgccataaggcctttatcttcttgccattggatcgtggggagggggtacgtaggcttcggactcgattttaggccttccggactacaaaaatggcgaattttatgacgtcacggcggccattttaagtaaggcggaaaggcttccactgtgcacaaaatggcggcggagcacttccggcttgcccaaaatggcggtcaacatcttccaggtcaaaggtcaccgctacgtcacaagtcacgtgggggggttgacgtataaacccggaagtcaatactcccacgtgacctgtcacgtggtgcgtgcgtcacgacggccattttgttttacaaaatggcggacttccttcctcttttttaaaaataacggccctgcggcggcgcgcgcgctgcgcgcgcgccgggggctgccgcccccccccgcgcatgcgcgcgggtcccccccccgccgcggggggctccgccccccggccccccccagttttaaacgtcactaaccacgtgactctccacagcgaaccactgtgctatgtcgtgcacttcctgggcggagtctacgttctaatataagtaactgcacttccgaatggctgagttttccacgcccgtccgcagcggcagcaccacggagggtgatccccgcgtcccgaggg

SEQ ID NO: 31 - protein, 742 aa, Alphatorquevirus sp.
MAFRWWWWRRRPQRRWTRRRWRRLRTRRPRRTVRRRRRRPRVRRRRWGRRRGRRRLYRRRYKKRRKRRKKMTLKVWNPSTIRACNIRGFVALVVCGHTRAGSNYAIHSEDYIPQLRPYGGSFSTTTWSLKVLFDEHLKFRNKWSYPNTELDLARYRGATFTFYRDPKVDYIVVYNTVPPFKLNKYSCPMLHPGMMMQYKKKILIPSYQTKPKGSAKVRLRIKPPVLFEDKWYTQQDLCPVNLLSLAVSACSFLHPFIPPENDNICITFQVLRDFYYTQMSVTPTTTASLNEKDRKIFSEHLYKNAEYWQSHHTAARVSTSQKPALRTCKAIPNDDGYLNTTPTQNTFRTGNNTIYGQPGYNPDNEKLTKIREWYFTQETTDNPIHGTYLKPTLNSVDYHLGKYSAIFLSPYRTNTQFDTAYQDVTYNPNTDKGKGNKIWIQSCTKETTILDQSCKCVVEDLPLWAMVNGYLEFCDSELPGANIYNTYIVVVICPYTKPAMLNKTNTKQGYVFYDTLFGDGKMPTGTGLVPFWLQSRWYPRCQFQQQVLHDLYVTGPFSYKDDLKSFSFNAKYKFSFLWGGNMIPQQIIKNPCKKEESTFTYPSREPRDLQVVDPLTVGPEWVFHTWDWRRGLFGKDAIDRVSKKPDDDAEYYPVPKRPRFFPPTDTQSEPEKDFGFTPESQELFQEEPQAPQEESQEVQQQQLLHLRLSQQFRIRQQLQHLFVQVLKTQAGLHINPLFLNHA

SEQ ID NO: 32 - protein, 141 aa, Alphatorquevirus sp.
MRFSQIYRRKKRLLPLLCLRAKPKAQPSMSWCTPVENAYKREINFLRGCQLLHTSFCGCDDFINHIIRLQNLHGNLHQPTGPSTPPVTRRALALPAAPESWRSGGGGGDAAPSDGGPAADGGDYEPADLDALYDAVAADQE

SEQ ID NO: 33 - protein, 59 aa, Alphatorquevirus sp.
MFPPDTPRPIITKEGWEDEFVTCKHWDRPARTYYTDRPTYPWMPKAPPQCNVSFKLGFK

SEQ ID NO: 34 - DNA, 3914 bp, Alphatorquevirus sp.
cgggtgccgaaggtgagtttacacaccgcagtcaaggggcaattcgggctcgggactggccgggctatgggcaagactcttagggttatcgctctttaaaacatgtttctcggcagggtctggagaaagaaaaggcaagtgccactgccaacactgcgagtggtgtcgctaccacaacctccacctatgagcagccagtggagacccccggttcacaatgtccaagggctggagcgcaattggtgggagtgcttcttccgtggtcatgcttgcttttgtggttgtggtgatgctattactcatattaatcatctggcgtctcgttttggacgtcctcctgctacctcaactccccgagaaccgcaggcacctccagtgaccccgttcccggccctgccggccccggagcctagcccagagccatggcgtggcgccggtggcgatggcggccgtggtggagacgccggaggcgccgccggtggagaaggagacgccggaggcccagacgacgccgcccttatcgacgccgtcgaactcgcagagtaaggaggcgcagggggcggtggaggcgcgcttacagacgttgggggcgacgcagacgcagacgcagacacaaaaagaaactggtactgactcagtggcagccccctatagttaagaagtgcctaataatagggtacgacccccttataatctgtggcataaacaggacagcttttaactacactacacactcagaagatttcacttttaacaacgagagctttggagggggaatatgcacagcacagtacacactaagaatactattccaagagaagctggcccaacacaacttctggacggccagcaacgaggacctggacttggccaggtacctgggtggagtactaatactgttcagacacccaacagtagattttttagtaagagtgcgcaccagtcctccattcaatgacacagacatgactgctctcactctgcacccaggcataatgatgctcagtaaaaaggttattaaggtacccagccttaaaaccaggcccagcaaaaaacactatataaaaataaaattcggagcccctaaactgtttgaagacaagtggtacccccagaacgagctatgtgatgtaactctagtcagcatacaggcaaccgcagctgatttccaatatccgttcggctcaccactaacgaactcagtctgttgcaacttccaggttcttaacagcaactatgacaaagcacttagtatacttaacactactcaggtaaaagaagaactgcatactaaaagacaacaatgttataattttcttttaaaacaatacagctactacaacacaaaacagacactagctcaacttaaatttaacttttttccaaaacagaaccccaaaatgccaacaatagacaatgcagactcatctaaacctccagagtgtctcactaaaactgaggttaatgaaaactacccacactgggactctctatatggtggcctagcatatggctttacacctacctctgataatgaaaacacaaaccaagcaaaagacttacaaagccaaatgctaaccgcaaacaatttctatacaatagcaggcaaaaaactaataaagggattcacacccatacagtatcaaaataagcaaaacacaaacatctttgactactacacaggcatgtactgtagcatatttctatcctccggaaggtccaacccagaagttaaaggcagctatacagacatatcttacaacccactcacagataaaggtgtaggcaacatgatatggatagactggctaagcaaaccagacagcatatacgactcctctaagagcaaatgcctactaaaagactttcccttgtggtgcatggtatacgggtacgcagactactgcagaaaagccacaggagactcagccatactactagacagcagagtagtaataagatgcccgtacacataccctcagcttataaaacacaacaatgaaaactgggggttcgtcccctatagcgaaaactttggactgggtagaatgcccgggggcaatccaaacccctcgaccagaatgagactatactggtacccaatgctgctacaccagatggaagtattagagtgcttggcacagaccggaccgtttgcctaccacggagacgagagaaagactgtactgactgctaaatacaagttcagatggaagtggggaggaaaccctgtctttcaacaggttcttagagacccctgcacaggaggtgccgtggcgccccacaccagtcgacaccctcgcgcaatacaagtctttgacccgaagtaccaagccccggagtacctgttccacaagtgggacttcaggaggggactctttagcactaaaggtattaaaagagtgtcagaacaaccaacaaatgatgagtttcttacaggccgcagcaagagacccaagaaagatacaggggccccgctccaagaagaggagcaaaaagaagactcgcatttcagactcccccagctcagaccctggctcccctccagccaggaaacgcagagccaaagcgaagaagagcagcagacgcgcagcacaacagtacaagaacaattacagcaacagctccagcaacagcgactcatgggagtccaactccgagacgtctgtctccagctcgcaagagtccaagcggggcacagtctccaccccgttttccaatgccatgtataaacaaggtgtttatatttcctgagagggagccaaagaagccccctaccagcaaagactggcaggaagaatttgaggcctgtaaacactgggacaggcctgctagacctagcttagatagaccccctttctacccttggatgcccagggaacccccaacctgtcgtgtaaccttcaagcttggctggcaataaaattacaaggccgtgggagtttcacttgtcggtgtctgcttattaaggtcactaagcactccgagcgtaagcgaggagtgcgaccccctgccctgggcccacttcttcggagccgcgcgctacgccttcggctgcgcgcggcacctcagacccccgctcgtgctgacacgctcgcgcgtgtcagaccacttcgggctcgcgggggtcggaaattttgctaaacagactccgagttgccattggacactgtagctgtgaattagtaacaaaagtgagtggggccagacttcgccataaggcctttatctttttgccattggatagtgtagggggtcgccataggcttcagcctcagttttaggccttccggactacaaaaatggcggattccgtgacgtcatggccgccattttaagtaaggcggaagcagctccactttctcacaaaatggcggcggagcacttccggcttgcccaaaatggcgggcaagctcttccgggtcaaaggttaagcacctacgtcataagtcacgtgactggggagaccttgaacccggaagcttcctcgatcacgtgtcttgtcacgtgggcgctacgtcaccggcgccatcttgttttacaaaatggccgacttccttccggttttttgaaaaaaggcgccaaaaaacggcttcggcgggggcgcgcgcgctacgcgcgcgccttaactatagggggctgccactgagtcagtaccagtttctttttgtgtctgcggctgcgtctgcgtcgcccccaacgtctgtaagcgcgcctccaccgccccccggccccccccccggtgtatgcgtcactaaccacgtgactcgttccagcgaaccacgagtctacgtgattcacttcctgggcgtggtttacatcctcatataagaccgtgcacttccgaatggctgagttttccacgcccgtccgcagcgagaacgcaacggaggagcgaccgcgcgtcccgaggg

SEQ ID NO: 35 - protein, 769 aa, Alphatorquevirus sp.
MAWRRWRWRPWWRRRRRRRWRRRRRRPRRRRPYRRRRTRRVRRRRGRWRRAYRRWGRRRRRRRHKKKLVLTQWQPPIVKKCLIIGYDPLIICGINRTAFNYTTHSEDFTFNNESFGGGICTAQYTLRILFQEKLAQHNFWTASNEDLDLARYLGGVLILFRHPTVDFLVRVRTSPPFNDTDMTALTLHPGIMMLSKKVIKVPSLKTRPSKKHYIKIKFGAPKLFEDKWYPQNELCDVTLVSIQATAADFQYPFGSPLTNSVCCNFQVLNSNYDKALSILNTTQVKEELHTKRQQCYNFLLKQYSYYNTKQTLAQLKFNFFPKQNPKMPTIDNADSSKPPECLTKTEVNENYPHWDSLYGGLAYGFTPTSDNENTNQAKDLQSQMLTANNFYTIAGKKLIKGFTPIQYQNKQNTNIFDYYTGMYCSIFLSSGRSNPEVKGSYTDISYNPLTDKGVGNMIWIDWLSKPDSIYDSSKSKCLLKDFPLWCMVYGYADYCRKATGDSAILLDSRVVIRCPYTYPQLIKHNNENWGFVPYSENFGLGRMPGGNPNPSTRMRLYWYPMLLHQMEVLECLAQTGPFAYHGDERKTVLTAKYKFRWKWGGNPVFQQVLRDPCTGGAVAPHTSRHPRAIQVFDPKYQAPEYLFHKWDFRRGLFSTKGIKRVSEQPTNDEFLTGRSKRPKKDTGAPLQEEEQKEDSHFRLPQLRPWLPSSQETQSQSEEEQQTRSTTVQEQLQQQLQQQRLMGVQLRDVCLQLARVQAGHSLHPVFQCHV

SEQ ID NO: 36 - protein, 147 aa, Alphatorquevirus sp.
MFLGRVWRKKRQVPLPTLRVVSLPQPPPMSSQWRPPVHNVQGLERNWWECFFRGHACFCGCGDAITHINHLASRFGRPPATSTPREPQAPPVTPFPALPAPEPSPEPWRGAGGDGGRGGDAGGAAGGEGDAGGPDDAALIDAVELAE

SEQ ID NO: 37 - protein, 129 aa, Alphatorquevirus sp.
LAPLQPGNAEPKRRRAADAQHNSTRTITATAPATATHGSPTPRRLSPARKSPSGAQSPPRFPMPCINKVFIFPEREPKKPPTSKDWQEEFEACKHWDRPARPSLDRPPFYPWMPREPPTCRVTFKLGWQ

SEQ ID NO: 38 - DNA, 3892 bp, Alphatorquevirus sp.
cgggtgccggaggtgagtttacacaccgcagtcaaggggcaattcgggctcgggactggccgggctatgggcaaggctcttaaaaaggcatgtttctcggtaaactctacagaaagaaaaggaaactgctactgccagctgtgcatccttcaccggcgccatcttccatgagctcgacctggcgggtcccgcggggcgatgtcgcctcccgtgagcgtcactggtacctttcagtacgagacagccacgacgctttttgtggctgtcgtgatcctatttttcatctttctcgtctggctgcacgttttaacaatcagggacctccgccgcccccccaggacgacggcccgacgtcggctaccccagtgagacgcctcctcccgctaccctcctacccgggagagggtcccccagatagatggcctggtgggcatggaggcgccgctggtggcggccgcggagacggtggcgatgggggcgtacgcgccgcagacgaagagtaccggcccgaagacctcgacgagcttttcggcgctatcgaacaagaacagtaaggaggcgccggagggggaggcggaggggctacaggcgacggtacagactgagacgcttgcgcagacgcagatacaaacgcaaaaagatagtactgactcagtggaacccccagaccgtcaggagatgcaccataaagggtctcatgccagtactctgggcgggcatgggccaggggggccacaactatgcggtgcgctccgatgactacgtggccaaggggggtttcgggggctccttcgccacagagaccttctccctgaaggtgctctatgaccaataccagaggggctttaacaggtggacttatagcaacgaggacttagacctagccctgtactatggctgcaagtgggtcttctacagaagcccagacacagactttatagtatacttcactaacaatccccccatgaagaccaaccagttcaccgctcccctgaccactccaggcatgctcatgaggaacaaatataagatactgatacccagctttaaaaccaggcccaaggggcgcaaaacagtgactgtgagaataaaaccccccaaactgttcctgcacaagtggtacacccagcaggacctgtgcccagttccgttagtccaactgaacgtgaccgcagcggatatgcaacatccgttcggctcaccactaactgaaaacccttgcatcactttccaagttttagggaacttgtacaataactgcctcaacattgacctcccccaatttacagaagatggagaacttgaaaatagtccaaattatactagaggaaatacagaggacttaaaaaccctttataaagaattattctgtaagaaagaaagcggtcactactggcaaaccttcatcactaactccatgatgaagtcccacatagacgctaccaaagctcagtcagctaccactaactatcccaacgcgccacaaagcgtagcctacaacaaagcggactttcctacaaagccagccaaagaaaacttcattagctggaaaaacaaatttactgacggtagagacagtaactttctctttgccacctatcaccctgaccaagtaacaaccacaattaaagaaatgagagacaataactttgccttagaaacaggccccaatgacaagtacgggtccttcaccagccagtacaccagaaacactcacctactagactactacctgggcttctacagccccatcttcctgtccccaggaaggtccaatatagaattttttacagccttcagagacatagtgtacaaccctctcctagacaaagcccagggcaacatgatctggttccagtatcacactaaatttgacaataaattcaaaaaaccagaatgccactgggagatagcagatatgcccctgtgggccctctgcaacgggtacgtagagtacctcgagagtcagattaaatatggagatatactcctagagggcaaagtcctcataaggtgtccttacaccaagccgcccctagtagacaagaacgaccccacagccgggttcgttgtctacaacactaactttggcatgggcaagtggatagacggcggcggctacatccccctacacgagagaagcaagtggtatgtcatgctcagataccagacggacgtcctccatgacatagtaacctgtggaccgtggcagtacagagacgataacaaaaacgctcagctagtggccaagtactactttcggttcaagtggggaggaaacacaatccattcccaggttatcagaaacccgtgcccagacaccgaagtttccggagcccgtcgacagcctagacaagtacaagtcgttgacccgcagctcatcacaccgccgtgggtcctccacacgttcgaccagagacgcggactctttagtgaagcagctatcagacgtctgctcaaacaaccaattcctggcgagtatgatcctcaaccccccccgagtcccactcctctttctaccctcagcattccagaaagaagacggcggtgccgaaagcgactccggttcaccggtcaaaagaccccggtactcgttcgaagagagccagacggaaaccctctcctcggaggaggacccggcggagacgacgagggagctcctcctccgaaagctccgagagcagcgagcactccagttccagctgcagcacttcgcagtccaactcgccaagacccaagcgaacctgcacgtaaaccccctgtcatactgcccgccataaacaaggtgtttctgtttccccccgagggtcccaaacccatctcaggcagagaggcctgggcagacgagtacgccaccgcggcggcctgggacaggcccgtccgcacctaccactcagacacccccatttatccctggatgccccaacaattccgtgtaagcttcaaactcgggttccaataaaaatatactaggccgtaaactgttcacttgtcggtgtctacctcttaaggtcactaagcactccgagcgtcagcgaggagtgcgaccctctaccctggtgcaacgccctcggcggccgcgcgctacgccttcggctgcgcgcggcacctcggacccccgctcgtgctgacacgctcgcgcgtgtcagaccacttcgggctcgcgggggtcgggaattttgctaaacagactccgagttgccattggatactgtagctgtgaatcagtaacgaaagtgagtggggccagacttcgccataaggcctttatcttcttgccattggtcagtgtcgggggtcgccataggcttcgggctcggttttaggccttccggactaccaaaatggcggattccgtgacgtcatggccgccattttgagtaaggcggaacaggctgtcaccccgtgtcaaaggtcaggggtcagccttccgctttgcacaaaatggagggcaatatcttccgggtcagaggtcgctaccgcgtcataagtcacgtgggaacggctgctgtaaacccggaagtagctgacccacgtgacttgtcacgtgactagcacgtcacagccgccattttgtatcacaaaatggccgacttccttcctcttttttaaaaataacggcccggcggcggcgcgcgcgcttcgcgcgcggcccggccagtcccgagcccgaattgccccttgactgcggtgtgtaaactcacccccggcccccccccgtcgtggatcgtcactaaccacgtgactctcacaggccaaccacagtctatgtcgtacacttcctgggcatggtctacgtgataatataagacggcgcacttccgaatggctgagttttcgccgcccgtccgcagcgagatcgcgacggaggagcgatcgagcgtcccgaggg

SEQ ID NO: 39 - protein, 847 aa, Alphatorquevirus sp.
MAWWAWRRRWWRPRRRWRWGRTRRRRRVPARRPRRAFRRYRTRTVRRRRRGRRRGYRRRYRLRRLRRRRYKRKKIVLTQWNPQTVRRCTIKGLMPVLWAGMGQGGHNYAVRSDDYVAKGGFGGSFATETFSLKVLYDQYQRGFNRWTYSNEDLDLALYYGCKWVFYRSPDTDFIVYFTNNPPMKTNQFTAPLTTPGMLMRNKYKILIPSFKTRPKGRKTVTVRIKPPKLFLHKWYTQQDLCPVPLVQLNVTAADMQHPFGSPLTENPCITFQVLGNLYNNCLNIDLPQFTEDGELENSPNYTRGNTEDLKTLYKELFCKKESGHYWQTFITNSMMKSHIDATKAQSATTNYPNAPQSVAYNKADFPTKPAKENFISWKNKFTDGRDSNFLFATYHPDQVTTTIKEMRDNNFALETGPNDKYGSFTSQYTRNTHLLDYYLGFYSPIFLSPGRSNIEFFTAFRDIVYNPLLDKAQGNMIWFQYHTKFDNKFKKPECHWEIADMPLWALCNGYVEYLESQIKYGDILLEGKVLIRCPYTKPPLVDKNDPTAGFVVYNTNFGMGKWIDGGGYIPLHERSKWYVMLRYQTDVLHDIVTCGPWQYRDDNKNAQLVAKYYFRFKWGGNTIHSQVIRNPCPDTEVSGARRQPRQVQVVDPQLITPPWVLHTFDQRRGLFSEAAIRRLLKQPIPGEYDPQPPPSPTPLSTLSIPERRRRCRKRLRFTGQKTPVLVRREPDGNPLLGGGPGGDDEGAPPPKAPRAASTPVPAAALRSPTRQDPSEPARKPPVILPAINKVFLFPPEGPKPISGREAWADEYATAAAWDRPVRTYHSDTPIYPWMPQQFRVSFKLGFQ

SEQ ID NO: 40 - protein, 154 aa, Alphatorquevirus sp.
MFLGKLYRKKRKLLLPAVHPSPAPSSMSSTWRVPRGDVASRERHWYLSVRDSHDAFCGCRDPIFHLSRLAARFNNQGPPPPPQDDGPTSATPVRRLLPLPSYPGEGPPDRWPGGHGGAAGGGRGDGGDGGVRAADEEYRPEDLDELFGAIEQEQ

SEQ ID NO: 41 - DNA, 3888 bp, Alphatorquevirus sp.
cgggtgccggaggtgagtttacacaccgcagtcaaggggcaattcgggctcgggactggccgggctatgggcaaggctcttaaaaagctatgtttctcggtaaaccttacagaaagaaaaggaaactgctactgcaagctgtgcgtactccacaggcgccatcttccatgagctctacctggcgagtgccccgcggcgatgtctccgcccgcgagctatgttggtaccgctcagttcgagagagccacgatgctttttgtggctgtcgtgatcctgtttttcatctttctcgtctggctgcacgttctaaccatcagggacctccgacgccccccacggacgagcgcccgccggcgtctaccccagtgaggcgcctgctgccgctgccctcctaccccggcgagggtccccaggctagatggcctggtgggcatggagaaagcgctggtggcgcccgcggaggcggtggagatggcggcgcccgcgcaggcgaagaagagtaccggcccgaagacctagacgagctgttcggcgctatcgaacaagaacagtaaggagacggaggcgagggtggcggaggggctacaggcgccggtacagactgagacgctaccgtagacggggcaggcgacgcaaaaagatagtactgactcagtggaacccccagaccaccagaaggtgcattatccgcggacttatgccagttatctgggcgggcatgggcacggggggccaaaactatgccgtccgctcagatgactttgtagtagacaaaggcttcgggggctccttcgctacagagactttctctttaagagtactgtatgaccagcaccagaagggctttaacaggtggtcccacaccaacgaggacctagaccttgcccgttacagggggtgcaaatggaccttttacagacacccagacactgactttatagtgtacttcactaacaatccccccatgaaaactaaccagtacactgcccctctcaccactcctggcatgctcatgagaagcaaatataaaatactaatacctagttttaaaacaaaacccaaaggaaaaaagacaataagcttcagagccagacccccaaaactattccaagacaagtggtacactcagcaagacctctgccctgtgcccctcatccaactaaacttaaccgcagctgatttcacacatccgttcggctcaccactaactgactctccttgcgtaaggttccaagtcctcggggacttgtacaataagtgtctcaatatagaccttccgcaatttgaccacgatggtaccgttttaaccacaccctcttacagtagagataataaggagcagttacaagaattatataaaactctatttgttaaaaaaggctgcggacactactggcaaacattcataaccaataccatggtcaaagcacacatagatgctacacaggcacaaagccatgaacacgacacttcagcccctgaaagtggaaaagatccatttccaacaaagcctcaaagatcccaatttgaaaactggaaaaagaaattcacagaccccagagacagcaactttctctttgccacttatcacccagaaaacattacagaaattatcaaagaaatgagagacaataactttagtctagaaactggaaagaatgacctttatggtgattatcaggcccaatatactagaaacactcaccttctagactactacctgggcttctacagccccatattcttgtccagtggcagatccaatactgaattctttactgcctacagagacatagtatataatccactactagacaaaggcacaggtaatatgatttggttccaataccacacaaaaactgacaacatatttaaaaaaccagagtgccactgggaaatactagacatgcccctgtgggccctctgcaacgggtacaaagagtacctagagagccaaataaaatatggtgatatcttagtagaaggcaaagtcctcataagatgcccatacaccaaacctcccctagcagaccccaacaacagtctagcaggatatgtagtctacaacacaaactttggacaaggcaagtggatcgacggcaagggctacatccccctaagacacaggagcaagtggtatgtaatgctcatgtaccagacggacgtactccatgacctagtgacttgtggaccctggcaatacagagacgataataagaactctcaactaatagccaagtacagatttactttctactggggaggtaacatggtacattctcaggtcatcaggaacccgtgcaaagacacccaagtatccggaccccgtcgacagcctagagagatacaagtcgttgacccgcaactcatcaccccgccgtgggtcctccactcgttcgaccagagacgaggaatgtttactgaaacagctatcagacgtctgctcagacaaccagtacctggcgagtatgctcctccagcactcagggtcccgctcctctttccctcctcagagttccaacgagagggagaaggtgcagaaagcgactcatcttccccggcaaaaaggccgcgactctggcaagaagaggacagccagacggagacgcactcctcggaggggccggcggagacgacgagggagctcctcgagcgaaagctcagagagcagcgagtcctcaacctccaactccagcaattcgctgtacaactcgccaagacccaagcgaacctccacataaaccccctattatactcccagcagtaaataaagtatacctgtttccaccagaaaaacctactcctatacaggggtaccacgggtggaacaccgagtatgaggcctgccaggccttcgacagaccacccagaaagtacctctcagacacacctacctacccttggctccccgttcccaatcctgaaataaaagtgagctttaagctcggtttcaaatgttacaaggccgtgggagtttcactggtcggtgtctacctcttaaggtcactaagcactccgagcgtcagcgaggagtgcgacccttccccctggtgcaacgccctcggcggccgcgcgctacgccttcggctgcgcgcggcacctcggacccccgctcgtgctgacacgcttgcgcgtgtcagaccacttcgggctcgcgggggtcgggaattttgctaaacagactccgagttgccattggacactgtagctgtgaatcagtaacgaaagtgagtggggccagacttcgccataaggcctttatcttcttgccattggtccgtctcgggggtcgccataggcttcgggctcggttttaggccttccggactacaaaaatggcggatttagtgacgtcacggccgccattttaagtaggtgccgtccaggactgctgttccgggtcaaagggcatcctcggcggaacctacacaaaatggaggtcaatttcttccgggtcaaaggtcaggtctacgtcataagtcacgtgggagggccctgctacgtcgtatgcggaagtaggccccgccacgtgactagtcacgtgggcactgcgtcacggcggccattttgaatcacaaaatggcggacttccttcctcttttttgaaaataacgtaccagcggcggcggcggcgagtaaagcgtctaggtcttcgtctcctggtttgatatgcggggccccccccccgcggggggctccgccccccggtcccccccccgaagtacgtcactaaccacgtgactcccacaggccaaccacagtctatgtcgtacacttcctgggcatggtctacgtgataatataaagcggtgcacttccgaatggctgagttttccacgcccgtccgcagcgagatcgcgacggaggagcgatcgagcgtcccgaggg

SEQ ID NO: 42 - protein, 782 aa, Alphatorquevirus sp.
MAWWAWRKRWWRPRRRWRWRRPRRRRRVPARRPRRAVRRYRTRTVRRRRRGWRRGYRRRYRLRRYRRRGRRRKKIVLTQWNPQTTRRCIIRGLMPVIWAGMGTGGQNYAVRSDDFVVDKGFGGSFATETFSLRVLYDQHQKGFNRWSHTNEDLDLARYRGCKWTFYRHPDTDFIVYFTNNPPMKTNQYTAPLTTPGMLMRSKYKILIPSFKTKPKGKKTISFRARPPKLFQDKWYTQQDLCPVPLIQLNLTAADFTHPFGSPLTDSPCVRFQVLGDLYNKCLNIDLPQFDHDGTVLTTPSYSRDNKEQLQELYKTLFVKKGCGHYWQTFITNTMVKAHIDATQAQSHEHDTSAPESGKDPFPTKPQRSQFENWKKKFTDPRDSNFLFATYHPENITEIIKEMRDNNFSLETGKNDLYGDYQAQYTRNTHLLDYYLGFYSPIFLSSGRSNTEFFTAYRDIVYNPLLDKGTGNMIWFQYHTKTDNIFKKPECHWEILDMPLWALCNGYKEYLESQIKYGDILVEGKVLIRCPYTKPPLADPNNSLAGYVVYNTNFGQGKWIDGKGYIPLRHRSKWYVMLMYQTDVLHDLVTCGPWQYRDDNKNSQLIAKYRFTFYWGGNMVHSQVIRNPCKDTQVSGPRRQPREIQVVDPQLITPPWVLHSFDQRRGMFTETAIRRLLRQPVPGEYAPPALRVPLLFPSSEFQREGEGAESDSSSPAKRPRLWQEEDSQTETHSSEGPAETTRELLERKLREQRVLNLQLQQFAVQLAKTQANLHINPLLYSQQ

SEQ ID NO: 43 - protein, 154 aa, Alphatorquevirus sp.
MFLGKPYRKKRKLLLQAVRTPQAPSSMSSTWRVPRGDVSARELCWYRSVRESHDAFCGCRDPVFHLSRLAARSNHQGPPTPPTDERPPASTPVRRLLPLPSYPGEGPQARWPGGHGESAGGARGGGGDGGARAGEEEYRPEDLDELFGAIEQEQ

SEQ ID NO: 44 - protein, 199 aa, Alphatorquevirus sp.
LARRGQPDGDALLGGAGGDDEGAPRAKAQRAASPQPPTPAIRCTTRQDPSEPPHKPPIILPAVNKVYLFPPEKPTPIQGYHGWNTEYEACQAFDRPPRKYLSDTPTYPWLPVPNPEIKVSFKLGFKCYKAVGVSLVGVYLLRSLSTPSVSEECDPSPWCNALGGRALRLRLRAAPRTPARADTLARVRPLRARGGREFC

SEQ ID NO: 45 - DNA, 3888 bp, Alphatorquevirus sp.
cgggtgccggaggtgagtttacacaccgcagtcaaggggcaattcgggctggggactggccgggcatcgggcaaggctcttagggtgttcattcttaatatgttcttcggcagggcctaccgcgcaaagaaaaggaaactgcttctgctggctctgccgcctacaccgccgccatctcccatgagtctgtggcgacccccggcgcacaatgttgccggtcaggagagacagttctttgaggcttgtctccgagcccactcttctttttgtggctgtggtgattttatttttcatcttactagtctggctgcacgtcttaattttcaaggagggccgccgccaccgggcgcgccccggccccaggctccgccggctgtgaggcccggtctgcccgctctgccgccccccgagggtcttaacccgagaccatggcgtggtggggatggcgcagacgctggtggcgaccgcggtggagacgcaggcgccgctggacccgccgccgacgccgagtaccgacccgaagacctcgacgacctgtacgccgctatcgaaagagacgcagagtaaggaggagacgatgggggaggcgatggacccgcagggggcgactcagactgcgcaggcgccgcaggcgccgcaaaaaaataatactgactcagtggaacccccagactgtcagaaaatgctatatcaggggtctcatgccccttatctgggcgggaatggggtccggtggcaagaactacgccgtccgctcggacgactacaccaccgccggcttcgggggttccttcggcaccgagaccttctctctgagggtcctctttgaccagtatcagaggggcttcaacaggtggtcccatactaacagagacttagatctggctctctactacgggtgcagattcagattctacagacacgacaatgtagactttatagtcagcttcaccaagaatcccccgatgaaaaccaaccaatatacagcccccctgacacaccccggcatgctcatgcgcgccaagtacaaggtgctgatccccagcagaaaaaccagacccagggggcgcaagtacatatccgttagcataaagccccccaacctatttcagcacaagtggtacactcagagcgacctctgttccgttagtctggtgcaacttaacctgaccgcagcggatatgcaacatccgttcggctcaccactaactgacactccttgcgtcagcttccaggtattgggagacctctataacgagtgtctcaaccttgacctccccaaactaaaagactttactaaaaacggccctgagtatgaaaacaacggttttagtaacaaagagcatttagataaactactaaaacaactattcttaaatggccaatactggcagacctttatcacaggtccctttgtaaaagaccaaatgcaggcaggcaattatgacaactacctttcaaagttaaaaactgcaagtacgtatacaaaaccagaccaaacaaccaactatactacagcacaggctgctaaatttgtaagtgctgcagacagcaactacctatttgttacctaccacccagaaaacatcccagaacaaattaaaaagataagagacaactactttgagttagaaacaggcaaaaacgacgtgtacggagacaataaggcccagtacaggtctagtacccaccttctagaataccacctaggcatctacagccccatattcctcagctccgggaggtccaacacccagatgtggaccgcctacagagacatagtctacaacccactattagacaagggcgagggcaacagaatctggttccagtaccacactaagaaagacaacagatacacagtacccaactgtcactggatgatagaaaacctgcccctgtggagtctgctccacggataccgagagtacctagagagccagatcaagtacggagacatactcttagagggcaaggtactaataacctgtccttataccatgccgcccctgtacgaccccaaagacccaagcaagggctgggtgccatacaacgacaccttcggtagaggcaagtggatagacggtgggggatacgtgcccctcatcgagagaggccgctggtacgtcatgatgaggtatcagctagacgtcttccacgacatagtcacctgtgggcccttcgcctaccgggacgatgagaaaaacgcccagctggtggcgggctataccttcagattcaagtggggcggtaccaccatccattcccaggtcatcagaaacccctgcaaggacgagcagctatctcccggcccccgtagaagacctagagacgtacaagtggttgacccgcaatccatcgggccgccgtgggtcttccacgagtgggaccagagacgtggacagtttactgactcagctctcagacgtatgttactccaaccaatccctcgcagcccgtttgctccagggccaaagagacctctcctattcttatccccagaataccatggccccgcgcaagaaagcgactcaggttcactggcaaaaagaccccgcatctggcaagaagaagagatccagagccagacggggtcggggcagtccgaggcggaggcggagacgacgagggagctcctcgagcgaaagctccgagagcagcaactcctccagctccagctccagcgcctcacagtcagcctcgccaagacccaagcgggtctccatataaacccccttttgttatcttccccgcctctaataaggtgaccatgttctccaccagcactcccaaggcgcccagcaagggcgactgggagactgagtaccaggccgccgcggccttcgacaggcctccgcgcaccgacctaaacagaccccctcactacccctggctgcccaactcctacagggtctctttcagactcgggttccactgaaccccgccgataaaataaagctgctttcactgtacgttggccgtgggagtttcacttagcggagtctacctctaaaggtcgccaagcactccgagcgtcagcgaggagtgcgacccttccccctggtgcaacgccctcggcggccgcgcgctacgccttcggctgcgcgcggcgcctcggacccccgctcgtgctgacacgctcgcgcgtgtcagaccacttcgggctcgcgggggtcgggaaatttgctaaacagactccgagttgccattggatactgtagctgtgaatcagtaacgaaagtgagtggggccagacttcgccatagggcctttatcttctcgccattggtccgtgtagggggtcgccataggcttcggcctccgtttcaggccttccggactaccaaaatggcgcattccgtgacgtcatggccgccattttaagtaaggcggaacaggctgacaccccgtgtgaaaggtcagggttcagcttccgccttacacaaaatggaggtcaaaaacatccgggtcagaggtcgccgtgacgtcataagtcacgtgggaatggctgctgtgaacccggaagtagctgacccgcgtgacttgtcacgtgacgcgcgcgtcaccgccgccattttgtgtcacaagatggccgacttccttcctctttttcaaaaaaataccggaagtaacgtacctggggcggggcgcgcgcttcgcgcgcgccccgggccccccccccccccgcggggggctccgccccccggccccccccggtgctgacgtcacaaacttgtgatccaatcacagggagccacgcgtgtatgtcgtccacttcctgggccgggtctacgtcctgatataaggcggcgcacttccgaatggctgagttttctccgcccgtccgcagcgagatcgcgacggaggagcgatcgagcgtccccaggg

SEQ ID NO: 46 - protein, 779 aa, Alphatorquevirus sp.
MAWWGWRRRWWRPRWRRRRRWTRRRRRVPTRRPRRPVRRYRKRRRVRRRRWGRRWTRRGRLRLRRRRRRRKKIILTQWNPQTVRKCYIRGLMPLIWAGMGSGGKNYAVRSDDYTTAGFGGSFGTETFSLRVLFDQYQRGFNRWSHTNRDLDLALYYGCRFRFYRHDNVDFIVSFTKNPPMKTNQYTAPLTHPGMLMRAKYKVLIPSRKTRPRGRKYISVSIKPPNLFQHKWYTQSDLCSVSLVQLNLTAADMQHPFGSPLTDTPCVSFQVLGDLYNECLNLDLPKLKDFTKNGPEYENNGFSNKEHLDKLLKQLFLNGQYWQTFITGPFVKDQMQAGNYDNYLSKLKTASTYTKPDQTTNYTTAQAAKFVSAADSNYLFVTYHPENIPEQIKKIRDNYFELETGKNDVYGDNKAQYRSSTHLLEYHLGIYSPIFLSSGRSNTQMWTAYRDIVYNPLLDKGEGNRIWFQYHTKKDNRYTVPNCHWMIENLPLWSLLHGYREYLESQIKYGDILLEGKVLITCPYTMPPLYDPKDPSKGWVPYNDTFGRGKWIDGGGYVPLIERGRWYVMMRYQLDVFHDIVTCGPFAYRDDEKNAQLVAGYTFRFKWGGTTIHSQVIRNPCKDEQLSPGPRRRPRDVQVVDPQSIGPPWVFHEWDQRRGQFTDSALRRMLLQPIPRSPFAPGPKRPLLFLSPEYHGPAQESDSGSLAKRPRIWQEEEIQSQTGSGQSEAEAETTRELLERKLREQQLLQLQLQRLTVSLAKTQAGLHINPLLLSSPPLIR

SEQ ID NO: 47 - protein, 172 aa, Alphatorquevirus sp.
LGTGRASGKALRVFILNMFFGRAYRAKKRKLLLLALPPTPPPSPMSLWRPPAHNVAGQERQFFEACLRAHSSFCGCGDFIFHLTSLAARLNFQGGPPPPGAPRPQAPPAVRPGLPALPPPEGLNPRPWRGGDGADAGGDRGGDAGAAGPAADAEYRPEDLDDLYAAIERDAE

SEQ ID NO: 48 - protein, 125 aa, Alphatorquevirus sp.
LARRRDPEPDGVGAVRGGGGDDEGAPRAKAPRAATPPAPAPAPHSQPRQDPSGSPYKPPFVIFPASNKVTMFSTSTPKAPSKGDWETEYQAAAAFDRPPRTDLNRPPHYPWLPNSYRVSFRLGFH

SEQ ID NO: 49 - DNA, 3883 bp, Alphatorquevirus sp.
cctcggggggctctgccccccggcccccccccgccttatacgtcactaaccacgtgactccttccagcgaaccacgagtctacgtgattcacttcctgggcgtggtttacattctgatataaggccgtgcacttccgaatggctgagttttccacgcccgtccgcagcggcacagcgacggaggagatctaccgcgtcccgagggcgggtgccgaaggtgagtttacacaccgcagtcaaggggcaattcgggctcgggactggccgggctatgggcaaggctcttagggttatcgctctttaaaacatgtttctcggcagggtctggagaaagaaaaggcaagtgccactgccaacactgcgagtggtgccgcttccacaaccttcacatatgagcagccagtggagacccccggttcacaatgtccaagggctggagcgcaattggtgggagtgcttcttccgtggtcatgcttgcttttgtggctgtggtgacgctattactcatattaatcatctggcatctcgttttggacgtcctcctgctacgtcaactccccgaggaccgcaaccacctccagtaaccccgtacccggccctgccggccccggagcctagcccagagccatggcgtggcgccggtggcgatggcgaccgtggtggagacgccggaggcgccgccggtggagaaggagacgccggaggcccagacgacgccgcccttatcgacgccgtcgacctcgcagagtaaggaggcgcagggggcggtggaggcgcgcttacagacgttgggggcgacgcagacgcagacgcagacacaaaaagagacttgtactgactcagtggcagccccctatagttaaaaagtgcctaataatagggtacgacccccttataatctgtggcataaacagaacagcttttaactacactacacactcagaagatttcacttttaacaacgagagctttggagggggaatatgcacagcacagtacacactaagaatactattccaagaaaagctggcccaacacaacttctggacggccagcaacgaggacctggacttggccaggtacctgggtggagtagtaatactatttagacacccaacagtagattttttagtaagagtgcgcaccagtcctccattcaatgacacagacatgactgctctcactctgcacccgggcattatgatgctcagtaaaaaggttattaaggtacccagccttaaaaccaggcccagcagaaaacactatgtaaaaataagattcggagcccctaaactgtttgaagacaagtggtacccccagaacgagctgtgtgatgtaactctggtcagcatacaggcaaccgcagctgatttccaatatccgttcggctcaccactaacgaactcagtctgttgcaacttccaggttcttaacagcaactatgacaaagcacttagtgtacttaacactactaaggaaacagacgaactgcatactaaaagacaagaatgttataaatttcttttacaacaatacagctactacaacacaaaacagacactagctcaacttaaatttgacttttttccaaaacagaaccccaaaatgccaaaaaaaaacaatgcagagtcatccaaatctccagagtctctcaccaaaacaaatgttacatctacatacccacactgggactctctatatggtggcctagcatatggctttacaccttcatctgcttctgataacacaaacaatgcaaaagacttagaaacccaaatgatagaagccaacgaattctatacaaaagcaggcaaaaaactaataaagggcttcacgcctataccacatgacaaaaataaagacacaaacatctttgactactacacaggcatgtactgtagcatatttctatcctcaggaaggtccaacccagaagttaaaggcagctacacagacatatcttacaacccactaacagataaaggtgtaggcaacatgatatggatagactggctaagcaaaccagacagcatctacaaccccactaagagcaaatgcctactaaaagactttcccttatggtgcatggtatacggatacgcagactactgcagaaaagtcacaggagactcagccatactactagactgcagagcagtaataagatgcccgtacacataccctcagcttataaaacacaacaatgaaaactggggattcgtcccctatagcgaaaactttggactgggtagaatgcctgggggcaatccaaacccctctaccagaatgagactacactggtacccaacactgctacaccagatggaagtattagaatgcttggcacaaaccggaccgtttgcctaccacggagacgagagaaagactgtactgactgccaaatacaagttcagatggaagtggggaggaaaccctgtctttcaacaggttcttagagacccctgcaccggaggtgccgtggcgccccacaccagtcgacaccctcgcgcaatacaagtctttgacccgaagcaccaagccccggagtacctgttccacaagtgggacttcaggaggggactctttagcactaaaggtattaaaagagtgtcagaacaaccaacaaatgatgagtctcttacaggccgcagcaagagacccaagaaagatacaggggccccgctgcaagaagaggagcaaaaagaagactcgcctttcagactcccccagctcagaccctggctcccctccagccaggaaacgcagagccaaagcgaagaagagcagcagacggcatgcacaacggtacaagaacaattacagcaacagctccagcaacagcgactcatgggaatccaactccgacacgtctgtctccagctcgcaagagtccaagcggggcacagtctccaccccgttttccaatgccatgtataaacaaggtgtttatatttcctgagagagagcccaagctgccccctaccagcaaagactggcaggaggaattcgaggcctgtaagtactgggacaggcctgcaagacctagcttagatagaccccctttctacccctggatgcccaaggaacccccaacttgtcgtgtaaccttcaagcttggctggcaataaaattacaaggccgtgggagtttcacttgtcggtgtctgcttattaaggtcactaagcactccgagcgccagcgaggagtgcgaccctctgccctgggcccacttcttcggagccgcgcgctacgccttcggctgcgcgcggcacctcagacccccgctcgtgctgacacgctcgcgcgtgtcagaccacttcgggctcgcgggggtcgggaattttgctaaacagactccgagttgccattggacactgtagccgtgaatcagtaacgaaagtgagtggggccagacttcgccataaggcctttatcttcttgccattggatagtgtagggggtcgccataggcttcggcctcggttttaggccttccggactaccaaaatggcgcattccgtgacgtcatggccgccattttaagtaaggcggaagcagctccactttctcacaaaatggcggcggagcacttccggcttgcccaaaatggcgggcaagctcttccgggtcaaagttcagcaactacgttataagtcacgtgactggggaggtcgtgaacccggaagcctcctcgatcacgtgtcttgtcacgtggacgctacgtcaccggcgccattttgttttacaaaatggccgacttccttccgcttttttaaaaaaggcgcgaaaaaacggctgcggcgggggcgcgcgcgctacgcgcgcgcctcccgagcccgaattgccccttgactgcggtgtgtaaactcaccttcggcacccc

SEQ ID NO: 50 - protein, 769 aa, Alphatorquevirus sp.
MAWRRWRWRPWWRRRRRRRWRRRRRRPRRRRPYRRRRPRRVRRRRGRWRRAYRRWGRRRRRRRHKKRLVLTQWQPPIVKKCLIIGYDPLIICGINRTAFNYTTHSEDFTFNNESFGGGICTAQYTLRILFQEKLAQHNFWTASNEDLDLARYLGGVVILFRHPTVDFLVRVRTSPPFNDTDMTALTLHPGIMMLSKKVIKVPSLKTRPSRKHYVKIRFGAPKLFEDKWYPQNELCDVTLVSIQATAADFQYPFGSPLTNSVCCNFQVLNSNYDKALSVLNTTKETDELHTKRQECYKFLLQQYSYYNTKQTLAQLKFDFFPKQNPKMPKKNNAESSKSPESLTKTNVTSTYPHWDSLYGGLAYGFTPSSASDNTNNAKDLETQMIEANEFYTKAGKKLIKGFTPIPHDKNKDTNIFDYYTGMYCSIFLSSGRSNPEVKGSYTDISYNPLTDKGVGNMIWIDWLSKPDSIYNPTKSKCLLKDFPLWCMVYGYADYCRKVTGDSAILLDCRAVIRCPYTYPQLIKHNNENWGFVPYSENFGLGRMPGGNPNPSTRMRLHWYPTLLHQMEVLECLAQTGPFAYHGDERKTVLTAKYKFRWKWGGNPVFQQVLRDPCTGGAVAPHTSRHPRAIQVFDPKHQAPEYLFHKWDFRRGLFSTKGIKRVSEQPTNDESLTGRSKRPKKDTGAPLQEEEQKEDSPFRLPQLRPWLPSSQETQSQSEEEQQTACTTVQEQLQQQLQQQRLMGIQLRHVCLQLARVQAGHSLHPVFQCHV

SEQ ID NO: 51 - protein, 147 aa, Alphatorquevirus sp.
MFLGRVWRKKRQVPLPTLRVVPLPQPSHMSSQWRPPVHNVQGLERNWWECFFRGHACFCGCGDAITHINHLASRFGRPPATSTPRGPQPPPVTPYPALPAPEPSPEPWRGAGGDGDRGGDAGGAAGGEGDAGGPDDAALIDAVDLAE

SEQ ID NO: 52 - protein, 129 aa, Alphatorquevirus sp.
LAPLQPGNAEPKRRRAADGMHNGTRTITATAPATATHGNPTPTRLSPARKSPSGAQSPPRFPMPCINKVFIFPEREPKLPPTSKDWQEEFEACKYWDRPARPSLDRPPFYPWMPKEPPTCRVTFKLGWQ

SEQ ID NO: 53 - DNA, 3881 bp, Alphatorquevirus sp.
cgggtgccgaaggtgagtttacacaccgcagtcaaggggcaattcgggctcgggactggccgggctatgggcaaggctcttagggttatcgctctttaaaacatgtttctcggcagggtctggagaaagaaaaggcaagtgccactgccaacactgcgagtggtgccgcttccacaaccttcacatatgagcagccagtggagacccccggttcacaatgtccaagggctggagcgcaattggtgggagtgcttcttccgtggtcatgcttgcttttgtggctgtggtgacgctattactcatattaatcatctggcatctcgttttggacgtcctcctgctacgtcaactccccgaggaccgcaaccacctccagtaaccccgtacccggccctgccggccccggagcctagcccagagccatggcgtggcgccggtggcgatggcgaccgtggtggagacgccggaggcgccgccggtggagaaggagacgccggaggcccagacgacgccgcccttatcgacgccgtcgacctcgcagagtaaggaggcgcagggggcggtggaggcgcgcttacagacgttgggggcgacgcagacgcagacgcagacacaaaaagagacttgtactgactcagtggcagccccctatagttaaaaagtgcctaataatagggtacgacccccttataatctgtggcataaacagaacagcttttaactacactacacactcagaagatttcacttttaacaacgagagctttggagggggaatatgcacagcacagtacacactaagaatactattccaagaaaagctggcccaacacaacttctggacggccagcaacgaggacctggacttggccaggtacctgggtggagtagtaatactatttagacacccaacagtagattttttagtaagagtgcgcaccagtcctccattcaatgacacagacatgactgctctcactctgcacccgggcattatgatgctcagtaaaaaggttattaaggtacccagccttaaaaccaggcccagcagaaaacactatgtaaaaataagattcggagcccctaaactgtttgaagacaagtggtacccccagaacgagctgtgtgatgtaactctggtcagcatacaggcaaccgcagctgatttccaatatccgttcggctcaccactaacgaactcagtctgttgcaacttccaggttcttaacagcaactatgacaaagcacttagtgtacttaacactactaaggaaacagacgaactgcatactaaaagacaagaatgttataaatttcttttacaacaatacagctactacaacacaaaacagacactagctcaacttaaatttgacttttttccaaaacagaaccccaaaatgccaaaaaaaaacaatgcagagtcatccaaatctccagagtctctcaccaaaacaaatgttacatctacatacccacactgggactctctatatggtggcctagcatatggctttacaccttcatctgcttctgataacacaaacaatgcaaaagacttagaaacccaaatgatagaagccaacgaattctatacaaaagcaggcaaaaaactaataaagggcttcacgcctataccacatgacaaaaataaagacacaaacatctttgactactacacaggcatgtactgtagcatatttctatcctcaggaaggtccaacccagaagttaaaggcagctacacagacatatcttacaacccactaacagataaaggtgtaggcaacatgatatggatagactggctaagcaaaccagacagcatctacaaccccactaagagcaaatgcctactaaaagactttcccttatggtgcatggtatacggatacgcagactactgcagaaaagtcacaggagactcagccatactactagactgcagagcagtaataagatgcccgtacacataccctcagcttataaaacacaacaatgaaaactggggattcgtcccctatagcgaaaactttggactgggtagaatgcctgggggcaatccaaacccctctaccagaatgagactacactggtacccaacactgctacaccagatggaagtattagaatgcttggcacaaaccggaccgtttgcctaccacggagacgagagaaagactgtactgactgccaaatacaagttcagatggaagtggggaggaaaccctgtctttcaacaggttcttagagacccctgcaccggaggtgccgtggcgccccacaccagtcgacaccctcgcgcaatacaagtctttgacccgaagcaccaagccccggagtacctgttccacaagtgggacttcaggaggggactctttagcactaaaggtattaaaagagtgtcagaacaaccaacaaatgatgagtctcttacaggccgcagcaagagacccaagaaagatacaggggccccgctgcaagaagaggagcaaaaagaagactcgcctttcagactcccccagctcagaccctggctcccctccagccaggaaacgcagagccaaagcgaagaagagcagcagacggcatgcacaacggtacaagaacaattacagcaacagctccagcaacagcgactcatgggaatccaactccgacacgtctgtctccagctcgcaagagtccaagcggggcacagtctccaccccgttttccaatgccatgtataaacaaggtgtttatatttcctgagagagagcccaagctgccccctaccagcaaagactggcaggaggaattcgaggcctgtaagtactgggacaggcctgcaagacctagcttagatagaccccctttctacccctggatgcccaaggaacccccaacttgtcgtgtaaccttcaagcttggctggcaataaaattacaaggccgtgggagtttcacttgtcggtgtctgcttattaaggtcactaagcactccgagcgccagcgaggagtgcgaccctctgccctgggcccacttcttcggagccgcgcgctacgccttcggctgcgcgcggcacctcagacccccgctcgtgctgacacgctcgcgcgtgtcagaccacttcgggctcgcgggggtcgggaattttgctaaacagactccgagttgccattggacactgtagccgtgaatcagtaacgaaagtgagtggggccagacttcgccataaggcctttatcttcttgccattggatagtgtagggggtcgccataggcttcggcctcggttttaggccttccggactaccaaaatggcgcattccgtgacgtcatggccgccattttaagtaaggcggaagcagctccactttctcacaaaatggcggcggagcacttccggcttgcccaaaatggcgggcaagctcttccgggtcaaagttcagcaactacgttataagtcacgtgactggggaggtcgtgaacccggaagcctcctcgatcacgtgtcttgtcacgtggacgctacgtcaccggcgccattttgttttacaaaatggccgacttccttccgcttttttaaaaaaggcgcgaaaaaacggctgcggcgggggcgcgcgcgctacgcgcgcgcgataaccctaagagccttgcccatagcccggccagtcccgagcccgaattgcccccctcggggggctctgccccccggccccccccgccttatacgtcactaaccacgtgactccttccagcgaaccacgagtctacgtgattcacttcctgggcgtggtttacattctgatataaggccgtgcacttccgaatggctgagttttccacgcccgtccgcagcggcacagcgacggaggagatctaccgcgtcccgaggg

SEQ ID NO: 54 - protein, 769 aa, Alphatorquevirus sp.; identical to SEQ ID NO: 50

SEQ ID NO: 55 - protein, 147 aa, Alphatorquevirus sp.; identical to SEQ ID NO: 51

SEQ ID NO: 56 - protein, 129 aa, Alphatorquevirus sp.; identical to SEQ ID NO: 52

SEQ ID NO: 57 - DNA, 3880 bp, Alphatorquevirus sp.
cgggtgccggaggtgagtttacacaccgcagtcaaggggcaattcgggctcgggactggccgggctatgggcaaggctcttaaagcgtacgtcccccgctatgtttctcggcagggtgtggaggaaacagaaaaggaaagtgcttctgctggctgtgcgagctacacagaagacatctcccatgagtatctggcgtcccccccctcgggaatgtctcctacagggagagaaattggcttcaggccgtcgaaggatcccacagttctttttgcggctgtggtgattttattcttcatcttactaatttggctgcacgctttgctcttcaggggcccccgccggagggtggtccgcctcggccgaggccgccgctcctgagagcgctgccggcccccgaggtccgcagggagacgcgcacggagaacccgggcgcctccggtgagccatggcctggcgatggtggtggcagagacgatggcgccgccgcccgtggccccgcagacggtggagacgcctacgacgccggagacctagacgacctgttcgccgccgtcgaagaagagcaacagtaaggaggcggaggtggaggggcagacgtgggcgacgcatatacacccgacgcgcggtcagacgcagacgcagacccagaaagaaacttgtactgactcagtggagcccccagacagtcagaaactgctccatcaggggtatagtgcccatggtgatatgcggacacaccacagcaggtagaaactatgccctgcacagcgaggactttaccactcagataagaccctttggaggcagcttcagcacgaccacctggtccctaaaagtgctctgggacgaacaccagaaattccaaaacaggtggtcctacccaaacacacaactggacctagccaggtacaggggggtcaccttctggttctacagagaccagaaaacagactatatagtacaatggagcagaaatcctccctttaaactaaacaaatacagcagctccatgtaccaccctggaatgatgatgcaggcaaaaaagaaactagtggtgcctagtttccagaccagacctaaaggcaaaaagagatacagagtcacaataagaccccccaacatgttcaatgacaagtggtacactcaagaggacctctgtccggtacctcttgtgcaaattgtggtttctgcggctagcctgctacatccgttctgctcaccacaaacgaacaacccttgcatcactttccaggttttgaaagacatttactcaaactgcataggagttaactcttccaacgcagacccatataaaactctacaagacacactttactcacataacacatactttcaaaccacacaagttttagcacagttatctgcagcatttcagcccgcattaaaacctgcaccagcaaataccacttcaaccagaagaacactaggcaacgcagtagctgaactaaaagcaaatggcgacttctacacaggcaacaacccagtgtttggcatgtgttcatataaacccaccaaagaaatactaacatccgcaaacaagtggttctgggacaatctgatgcatgacaatgacttacactccacatatggcaaggcaacccttagttgcatggagtaccacacaggcatttacagctccatattcctaagtcctcaaaggtccctagaattcccagcagcataccaggatgtcacatacaacccaaactgtgacagagccataggcaaccgtgtatggttccaatatagcacaaaaatggacacagagtttaatgaaaaacagtgtaaatgtgtgttaacaaacattcccttgtgggcggcctttaatggctacccagactttatagaacaagaactcagtatcagcacagagatacacaactttggcatagtatgcttccagtgcccctacacctttcccccctgctatgacaaaactaagccaaacaaaggctacgtgttctatgacactacctttggcaacggaaaaatgccagacgggtccggccacattcccgtctactggcagcagagatggtggattagactagcctttcaggtacaagtaatgcatgactttgtactcactggcccctttagctacaaagatgacctagcaaacactacactaacagccaggtacaagttcagattcaaatggggcggtaatatcatccccgaacagattatcaagaacccgtgtaagagagaacagtccctcggttcctaccccgatagacaacgtcgcgacctacaagttgttgacccatcaaccatgggcccgatctacaccttccacacatgggactggcgacgggggctttttggtacagatgctatcaagagagtgtcacaaaaaccgggagatgctctccgctttacaaaccctttcaagagacccagatatcttcccccgacagacggagaagactaccgacaagaagaagacttcgctttacaggaaaaaagacggcgcacatccacagaagaagtccaggacccggagagccccccgcaaaacgcgccgctcctacagcagcagcagcagcagcgggagctctcactccagctcgcagagcagcagcgactcggagtccaactcagattcatcctccaagaagtcctcaaaacgcaagcgggtctccacctaaaccccctattattagggccgccacaaacaaggtctatctctttgagccccccagaggcctcctcccaatagtgggaaaagaggcctgggaggacgagtacaccacctgcaagtactgggatcgccctcccagaaccaaccacctagacatgcccacctatccctggatgccccccagcatcaaagtcagctttaaacttggatttaaaccctaaataaaaatacaaggccgtacactgttcacttgtcggtgtctacctctataagtcactaagcactccgagcgcagcgagggtgtctacctctataagtcactaagcactccgagcgcagcgaggagtgcgaccctactgggtgggtgcaacgccctcggcagccgcgcgctacgccttcggctgcgcgcggcacctcggacccccgctcgtgctgacacgctcgcgcgtgtcagaccacttcgggctcgcgggggtcgggaattttgctaaacagactccgagttgctcttggacactgtagctgtgaatcagtaacgaaagtgagtggggccagacttcgccatagggcctttatcttcttgccatttgtccgtgtcgggggtcgccataggcttcgggctcggttttaggccttccggactaccaaaatggcggattccgtgacgtcatggccgccattttgagtaaggcggaacaggctgtcaccccgtgtcaaaggtcaggggtcagccttccgctttgcacaaaatggagggcaatatcttccgggtcacaggtcgctaccgcgtcataagtcacgtgggcacggctgctgtgaacccggaagtagctgacccacgtgacttgtcacgtgactagcacgtcacagccgccattttgtatcacaagatggccgacttccttcctcttttttaaaattaacggcccggccagtcccgagcccgaattgccccttgactgcggtgtgtaaactcacccccccccccccgcgcatgcgcggggccccctccccgcggggggctccgccccccggtcccccccccgaagatcgtcactaaccacgtgactcctctcgcccaatcagagtctatgtcgtccatttcctgggcatggtctacatcctgatataagtagctgcacttccgaatggctgagttttccacgcccgtccgcggcgagatcgcgacggaggagcgatcgagcgtcccgaggg

SEQ ID NO: 58 - protein, 765 aa, Alphatorquevirus sp.
MAWRWWWQRRWRRRPWPRRRWRRLRRRRPRRPVRRRRRRATVRRRRWRGRRGRRIYTRRAVRRRRRPRKKLVLTQWSPQTVRNCSIRGIVPMVICGHTTAGRNYALHSEDFTTQIRPFGGSFSTTTWSLKVLWDEHQKFQNRWSYPNTQLDLARYRGVTFWFYRDQKTDYIVQWSRNPPFKLNKYSSSMYHPGMMMQAKKKLVVPSFQTRPKGKKRYRVTIRPPNMFNDKWYTQEDLCPVPLVQIVVSAASLLHPFCSPQTNNPCITFQVLKDIYSNCIGVNSSNADPYKTLQDTLYSHNTYFQTTQVLAQLSAAFQPALKPAPANTTSTRRTLGNAVAELKANGDFYTGNNPVFGMCSYKPTKEILTSANKWFWDNLMHDNDLHSTYGKATLSCMEYHTGIYSSIFLSPQRSLEFPAAYQDVTYNPNCDRAIGNRVWFQYSTKMDTEFNEKQCKCVLTNIPLWAAFNGYPDFIEQELSISTEIHNFGIVCFQCPYTFPPCYDKTKPNKGYVFYDTTFGNGKMPDGSGHIPVYWQQRWWIRLAFQVQVMHDFVLTGPFSYKDDLANTTLTARYKFRFKWGGNIIPEQIIKNPCKREQSLGSYPDRQRRDLQVVDPSTMGPIYTFHTWDWRRGLFGTDAIKRVSQKPGDALRFTNPFKRPRYLPPTDGEDYRQEEDFALQEKRRRTSTEEVQDPESPPQNAPLLQQQQQQRELSLQLAEQQRLGVQLRFILQEVLKTQAGLHLNPLLLGPPQTRSISLSPPEASSQ

SEQ ID NO: 59 - DNA, 3876 bp, Alphatorquevirus sp.
cgggtgccgaaggtgagtttacacaccgaagtcaaggggcaattcgggctcgggactggccgggctatgggcaaggctcttagagttatcgctctttaaaacatgtttctcggcagggtttggagaaagaaagggaaagtgtcactgccaacactgtcagtggtgccgcttccacaaccttcacatatgagcagccagtggagaccccccgttcacaatgtccaagggctggagcgcaattggtgggagtgcttcttccgtagtcatgcttgcttttgtggctgtggtgatgctattactcatattaataatttggcgtctcgttttggacgtcctcctgctgcctcaactccccgaggaccacagccaccgccagtgaccccgttcccggccctgccggctccggagcccagtcctgagccatggcgtggcgccggtggcgatggcggccgtggtggagacgccggaggcgccgccggtggagaaggagacgccggaggcccagacgacgccgcccttatcgacgccgtcgacctcgcagagtaaggaggcgcagggggcggtggaagcgcgcttacagacgttgggggcgacgcagacgcagacgaaaacacaaaaaaaaactcgtactgactcagtggcagcccccaattgttaaaaagtgcctaataatagggtacgaccccataattatctgtggcattaacagaaccacctttaactacactacacactcagaggactacacctttaacaacgacagctttgggggtgggctctgcaccacacaatacacactaagaatactgttccaagagaaactttgccaacacaacttctggacagccagcaacgaagacctagacctagccaggtacctagggggtacatttatattttttagacacccaacagtagactttctggttagaattcgcaccagtcctccctttgaggacacagacatgactgcactcactctacacccaggcatgatgatgctcagtaaaaaggttattaagatacccagtcttaaaactagacccagcagaaaacactttgtaaaaattagattcggggcccctaaactgtttgaagacaagtggtacccccagaacgagctctgtgatgtaactctttgcagcatacaagcaaccgcagctgatttccaatatccgttcggctcaccactaacgaactcaatctgttgtaacttccaggttcttaacagtaactatgacaatgcactttctgtgttacacttatctaacgaagtaacaaaccctatacacacagccagacaaaaatgctataactacttattaagacaatacagctattataacacaaaacaagtagtagctcaacttaaataccactgggaccccaaacaaaaccctaacatgccaagcacaaataacgcagatacttcactaccaccagaaaaactaacaaaagagaatacaagtacctacccacactgggatacaatgtcaggaggtttggcttatggaaactaccctgaaacaccaaccacatcacacagtaaaactgacctatataagtcaatgattacaggcaatgaattttacaccaaagcagggaaaaaaataatacctacctttataccaatagaactatatgaaagtactacagagtcatacactacaaagaaaaacaatacaaacatttttgactactacacaggcatgttcagtagtatatttctgtccagcggcaggagtaacccagaagtaaaaggcagctacacagacatatcatacaacccactaacagacaaaggagtgggaaatatgatatggcttgactggctatccaaaccagacagcagatacgaccccaaaaagagtaaatgccttataaaagactttccactatgggccgcatgctacgggtacgcagactactgtagaaaagccactggagactcaggcatactttttaactccagaatagtaataagaagtccttatacatacccacaactaataaaacacagcgacgaactgtggggattcgtaccctacagcgagaactttggactggggcgactgccaggaggcaactccaaacctcccaccagaatgagactacattggtacgtcatgctactacaccagactgaagtactagagtgtatatcacaaacgggcccatttgcctgcaaaggagacgagagaaagactgtactgactgccaaatacaagttcagatggaagtggggaggcaaccctgtgtttcaacaggttcttagagacccctgcacgggaggagccgtggcgccccacaccagtcgacaccctcgcgcaatacaagtctttgacccgaagcaccaagccccggagtatctcttccacaagtgggacttccgcaggggactttttagcactaaaggtattaaaagagtgtcagaacaaccaacaaatgatgagtttcttacaggccgcagcaagagacccaagaaagacacgggagccaaaacggaagaagaagaccaacaagaagaaaacttacatttcagacacccccagctccgaccctggctcacctccagccaggaaacgcaaagccaaagcgagcaagaagacaagaccccaaaaacgatacaagaacaattacaagagcagctccagcaacagcagctcatgggagtccaactccgaaacgtctgcctccagctcgccagagtccaagcagggcacagtctccaccccatattccaatgccatgtataaacaaggtgtttatatttcctgagagagagcccaagcagcctcctaccagcaaagactggcaggaggaattcgaggcctgtaagcactgggacaggcctgctagacctagcttagatagaccccctttctacccctggatgcccagggaacccccaacttgtcatgtaaccttcaagcttggctggaaataaaattacaaggccgtgggagtttcacttgtcggtgtctgcttattaaggtcactaagcactccgagcgtaagcgaggagtgcgaccccctgccctgggcccacttcttcggagccgcgcgctacgccttcggctgcgcgcggcacctcagacccccgctcgtgctgacacgcttgcgcgtgtcagaccacttcgggctcgcgggggtcgggagctttattaaacagactccaggttgccattggacactgaagccgtgaatcagtaacgaaagtgagtggggccagacttcgccataaggcctttatcttcttgccattggatagtgtagggggtcgccataggcttcggcctccgttttaggccttccggactacaaaaatggcgcattccgtgacgtcatggccgccattttaagtaaggcggaagcagctccactttctcacaaaatggcggcggagcacttccggcttgcccaaaatggcgggcaagctcttccgggttaaaggtcagcaactacgtcataagtcacgtgactgcggaggtcgtgaacccggaagcttcctcggtcacgtgtcttgtcacgtggacgctacgtcaccggcgccattttgttttacaaaatggccgacttccttccgcttttttgaaaaaaggcgccaaaaaacggctgcggcgggggcgcgcgcgctacgcgcgcgcggcatgcgcgcggggcctcccccccctcggggggctctgccccccggcccccccccgctatatacgtcactgaccacgtgactcgtttcagcgaaccacgagtctacgtgattcacttcctgggcgtggtttacatcctgatataaggccgtgcacttccgaatggctgagttttccacgcccgtccgcagcggcacagcgacggaggagatctaccgcgtcccgaggg

SEQ ID NO: 60 - protein, 777 aa, Alphatorquevirus sp.
MAWRRWRWRPWWRRRRRRRWRRRRRRPRRRRPYRRRRPRRVRRRRGRWKRAYRRWGRRRRRRKHKKKLVLTQWQPPIVKKCLIIGYDPIIICGINRTTFNYTTHSEDYTFNNDSFGGGLCTTQYTLRILFQEKLCQHNFWTASNEDLDLARYLGGTFIFFRHPTVDFLVRIRTSPPFEDTDMTALTLHPGMMMLSKKVIKIPSLKTRPSRKHFVKIRFGAPKLFEDKWYPQNELCDVTLCSIQATAADFQYPFGSPLTNSICCNFQVLNSNYDNALSVLHLSNEVTNPIHTARQKCYNYLLRQYSYYNTKQVVAQLKYHWDPKQNPNMPSTNNADTSLPPEKLTKENTSTYPHWDTMSGGLAYGNYPETPTTSHSKTDLYKSMITGNEFYTKAGKKIIPTFIPIELYESTTESYTTKKNNTNIFDYYTGMFSSIFLSSGRSNPEVKGSYTDISYNPLTDKGVGNMIWLDWLSKPDSRYDPKKSKCLIKDFPLWAACYGYADYCRKATGDSGILFNSRIVIRSPYTYPQLIKHSDELWGFVPYSENFGLGRLPGGNSKPPTRMRLHWYVMLLHQTEVLECISQTGPFACKGDERKTVLTAKYKFRWKWGGNPVFQQVLRDPCTGGAVAPHTSRHPRAIQVFDPKHQAPEYLFHKWDFRRGLFSTKGIKRVSEQPTNDEFLTGRSKRPKKDTGAKTEEEDQQEENLHFRHPQLRPWLTSSQETQSQSEQEDKTPKTIQEQLQEQLQQQQLMGVQLRNVCLQLARVQAGHSLHPIFQCHV

SEQ ID NO: 61 - protein, 147 aa, Alphatorquevirus sp.
MFLGRVWRKKGKVSLPTLSVVPLPQPSHMSSQWRPPVHNVQGLERNWWECFFRSHACFCGCGDAITHINNLASRFGRPPAASTPRGPQPPPVTPFPALPAPEPSPEPWRGAGGDGGRGGDAGGAAGGEGDAGGPDDAALIDAVDLAE

SEQ ID NO: 62 - protein, 128 aa, Alphatorquevirus sp.
LAHLQPGNAKPKRARRQDPKNDTRTITRAAPATAAHGSPTPKRLPPARQSPSRAQSPPHIPMPCINKVFIFPEREPKQPPTSKDWQEEFEACKHWDRPARPSLDRPPFYPWMPREPPTCHVTFKLGWK

SEQ ID NO: 63 - DNA, 3875 bp, Alphatorquevirus sp.
cgggtgccgaaggtgagtttacacaccgcagtcaaggggcaattcgggctcgggactggccgggctatgggcaaggctcttaaaaaagcatgtttctcggtaaaatttacagaaagaaaaggaaagtgctactgtacggcctgccagctccaaagaagaaactacctactgctatgagccactggagcacacccgtccaccatgcaacggggatcgagcacctctggtaccagtctgttattaacagccattctgctagctgcggttgtggcgatcctgtacgccactttacttatcttgctgagaggtatggctttgccccaactccccgcgccccgccagtagccccgacgcccaccatccgtagagccaggcccgcgcctgccgctccggagccccgtgccctaccatggcatggggatggtggagaagaaaacgcaagtggtggtggagacgccggtttgcccgagggagacttcgcagacgacggattagacgccctcgtcgccgcactcgacgaagaacagtaaggaggcgcagacaatggaggagggggcgacccagacgcagactgtttaagcgaaagagacgctttaggagacgcagacgaaaagctaagataaaaataacacagtggcagcccagtagaacaaagagatgctttattataggctactttccagcacttatatgtggtcagggaagatggtcagagaactttaccagccacatagaagacaaaacccctaagggaccctttggaggggggcacagcacagccaggctatctttaaaagtactatacgaagaaaaccagaagcatcacaacttctggacagccagtaacaaagagctagagctagccaggttttttggcagtacctggacactgtacagacacgaagaagtagactacatatgcacctttaacagaaaaagccccctgggaggcaacctgctaacagcacccagtctgcacccgggggccgccatgctatctaaacataaaatactaatacccagttttaagaccagaccgggcggaaaacccactgtaaaattcaggataaaaccccccacaacactaatagacaaatggtactttcaaaaagatatttgtgacactacactgctcaacatcaactttgttgcatgtgacttgcggtttccgttctgctcaccacaaactgacaacgtttgtgtaacatttcaagtcctttccgcggtttataacgacttcctctctataaccaacagcaagttacaagcaacaacttgggaaaacgaatacacaaattttttaaacaaagcatttccatcagacagaagcattaataaattaaacacatttacaacagaaggagcctttagtcaccctaaaatagaaaaatataaaccacaaattccactacctaatggaaagtactttcaagataaagatggccaatggggagacccaatacacattacagatcagcaaagtagacaacaaattataaaaaaaatagttgaaaatgcaaaaaactacctaaaaaaatacacagaagagtttaaacaatttccaaacattgcccagttccaccacggattttttacacagtggacaggcatatacagtgctgcttttttaaactaccacagaatatctccagaagtaccaggcctatacacagataccatctacaacccacttgtagacaaaggcataggaaaccacatatggatagactacctcagcaaaccagaccctaacttagatccagtaaaaagtaaatgccacatagcagacctgccaatgtggatggcaacctttggcctagtagactggtgcaaaaaagacacaggcaactggggcatacccgcgtgggccagagtactaatgatatgtccctatacgtttccacctatgtatgaccaaaacaacccaaacagaggatttataccgataggttacaacttctcacaaggactaatgccagacggtagcaaatacattccaatgcaaatgagagctaagtggtaccccaacctgttaaaccaacaagcagtacttgaagacataagtgagtcaggaccctttgcatttagagaaaaaaaacctagcgccagcataacagtaaaatacaaatttagatggcactttgggggcaaccctgtgtccgaacaggttattgcagacccatgccaacaaccaacctttgaaatgcccggagccggttcgctgcctcgcagactacaagtcacggacccgaaactcctcgggccacactacacattccacagctgggactggagacgtgactactttaacagaaagactcttaaaagaatgtcagaacaacaagaaacttctgagtttttattcccaggcccaaaaaaacccagagtggatctcggggtcgtccaagctgtcgaaaaagtctcttccccgaggaaaagagaacagaaaccgtgggaagacagcgagcagcaatcagagacagaagccctctcggaagaagaagaagagggctcgatacagcagcagctccagcagcagctgcaacagcaaaagcagctcaggagaggaatcaactgcctcttcgagcagctagtaaaaacccagcagggagtccacctagatccttccctcttgtaggccccaggcagtggctgtttccagagagaaagccggcccctgcccctagctcgggagactgggccacagagtatttagcagccagagtgtttgacagacccccgagaagcaacctgaaggatacaccctactatccctacattaaaaaccaatacaatgtgtactttgacctaacctttgaataaagtgcagctttcaacttgcaaggccgtgggagtttcactggtcggtgtctacctctaaaggtcactaagcactccgagcgtcagcgaggagtgcgacccttccccctgactcaacttcttcggagccgcgcgctacgccttcggctgcgcgcggcacctcagacccccgctcgtgctgacacgctcgcgcgtgtcagaccacttcgggctcgcgggggtcgggaaatttattaaacagactccaagttgccattggattttaaagctatgaatcagtaacgaaagtgagtggggccagacttcgccatagggcctttatcttcttgccatttgtccgtgtccggggtcgccgtaggcttcgggctccgttttaggccttccggactacagaatgcgccattttagtgacgtcacggtcgccatgttaagtagttgaggcggacggtggcgtgagttcaaaggtcaccatcagccacacctactcaaaatggtgtacaacttcttccgggtcaaaggtcactggcgccattttaagtcacgtgacctactacgtcacggccgccattttagttcacaaaatggctgacttccttcctctttttcaaaaaaaagcggaagtgccgccgcggcggcggggggcggcgcgctgcgcgcgccgcccagtagggggcgccatgcgcccccccccgcgcatgcgcggggccccccccccgcggggggctctgcccccccggccccccccgtgctacgtcactaaccacgtgtccttcacagggggggcggcgcgctgcgcgcgccgcccagtagggggcgccatgcgccccccccccgcgcatgcgcggggcccccccccgcggggggctctgccccccggccccccccgtgctacgtcactaaccacgtgtccttcacaggccaaccatcgtgtatgtcgtgcacttcctgggcatggtctacattataatataaagcggtgcacttccgaatggctgagtttttcacgcccgtccgcagcggcagcaccacggagggtgatccccgcgtcccgaggg

SEQ ID NO: 64 - protein, 742 aa, Alphatorquevirus sp.
MAWGWWRRKRKWWWRRRFARGRLRRRRIRRPRRRTRRRTVRRRRQWRRGRPRRRLFKRKRRFRRRRRKAKIKITQWQPSRTKRCFIIGYFPALICGQGRWSENFTSHIEDKTPKGPFGGGHSTARLSLKVLYEENQKHHNFWTASNKELELARFFGSTWTLYRHEEVDYICTFNRKSPLGGNLLTAPSLHPGAAMLSKHKILIPSFKTRPGGKPTVKFRIKPPTTLIDKWYFQKDICDTTLLNINFVACDLRFPFCSPQTDNVCVTFQVLSAVYNDFLSITNSKLQATTWENEYTNFLNKAFPSDRSINKLNTFTTEGAFSHPKIEKYKPQIPLPNGKYFQDKDGQWGDPIHITDQQSRQQIIKKIVENAKNYLKKYTEEFKQFPNIAQFHHGFFTQWTGIYSAAFLNYHRISPEVPGLYTDTIYNPLVDKGIGNHIWIDYLSKPDPNLDPVKSKCHIADLPMWMATFGLVDWCKKDTGNWGIPAWARVLMICPYTFPPMYDQNNPNRGFIPIGYNFSQGLMPDGSKYIPMQMRAKWYPNLLNQQAVLEDISESGPFAFREKKPSASITVKYKFRWHFGGNPVSEQVIADPCQQPTFEMPGAGSLPRRLQVTDPKLLGPHYTFHSWDWRRDYFNRKTLKRMSEQQETSEFLFPGPKKPRVDLGVVQAVEKVSSPRKREQKPWEDSEQQSETEALSEEEEEGSIQQQLQQQLQQQKQLRRGINCLFEQLVKTQQGVHLDPSLL

SEQ ID NO: 65 - protein, 146 aa, Alphatorquevirus sp.
MFLGKIYRKKRKVLLYGLPAPKKKLPTAMSHWSTPVHHATGIEHLWYQSVINSHSASCGCGDPVRHFTYLAERYGFAPTPRAPPVAPTPTIRRARPAPAAPEPRALPWHGDGGEENASGGGDAGLPEGDFADDGLDALVAALDEEQ

SEQ ID NO: 66 - protein, 82 aa, Alphatorquevirus sp.
LPLRAASKNPAGSPPRSFPLVGPRQWLFPERKPAPAPSSGDWATEYLAARVFDRPPRSNLKDTPYYPYIKNQYNVYFDLTFE

SEQ ID NO: 67 - DNA, 3867 bp, Alphatorquevirus sp.
cgggtgccggaggtgagtttacacaccgcagtcaaggggcaattcgggctcgggactggccgggctatgggcaaggctcttaaagaatgcgtttttctcgaatttatcgtagaaagaagaggctactgccactgctttgcctgccagcagaaccgaaagaacaacctgtgatgagttggcgctgtccccttgaaaatgcctataagagggaacagtacttcctcaggggctgccaaatgcttcacactagtttttgtggttgcgatgattttattaatcatgttattcgcctacaaaaccttcacggcaatctacaccaacccaccgggccgtccacacctccagtaggccgtagagctctggccctgccggcagctccggaaccatggcgtggagatggtggtgggcccgaaggcgaccgaaccgccgatggacccgcagacgctggaggagactacgcacccggagacctagacgacctattcgccgccgccgccgccgaccaagagtaaggaggaaacggtggggcaggaaacgggggcgacgacgctattacagacgtagatttaaaaaaagacgcaggagacgcagaaaactgactcttaaaatgtggaatccatccacaattagagcatgtaacataaagggtgctatatctcttgtaatgtgcggacacactcaggccggtagaaactatgccattagaagtgaagactttatacctcaacttcagagctttggagggtcttttagcaccaccacctggagcctaaaagtactgtttgatgagtatcagaagttccacaacttctggacataccccaacacccagctagacctctgcagatacaaatgtagtatatttaccttttacagagaccccaaagtagactacattgttatatacaacacacagcctccttttaaaattaacaagtacagcagtcctttcctacatcctggccttatgatgctacagaaaaaaaaaatactagttcctagctttcaaactaaaccagggggcaaagctagaattaaagttaaaattaagccccctcctctatttgaggacaagtggtacactcagcaagacttgtgtccagtaaacctgttatcacttgcggtttccgcatgcagcttcttacatccgttctgctcaccagaaagtgacacaatatgtgtaaccttccaggtcttgcgagagttttactacacacacttaactgtcactccaaccacaactacctctttaccaccagaagaccaagctatatttgacaactacctgtataaaaatgcaaacttttatcagtctttacatgcaccagctataataaacctagcacaacaaccagctaaatggacacaaaacaacattaattcattacaaaccaaaatttctaacataacaacatatttaagtagcacagtaacacaaaactcatttaaaactggaaataacagcatttatggccaaccaaattacaaccccaacaaacaatatctacacccaatgagagaatggttttttgaacaaacaactacagtaaatgaaatacatggcacatatggaaagcctacatataatgcagtagagtatcacctaggaaagtatagtcctatatttcttagtccttatagaactaacactcaatttcccactgcataccaagacacaacttataaccctaatgtagacaaaggaaaaggcaataaaatatggcttcaaagcacaactaaaaaaacatcagactttgaagaacgcagctgccgctgtactatctcagacctcccactgtgggctatggtaaatggctatgcagactatgcagagtctgaactaggatcagaagtatttgctgtatatgtttgctgtgtaatatgtccttatacaaagccacctttgtttaacaagtctaaacctgaaatgggctacatattttatgatacactgtttggagatggtaaactacccacaggcacaggccttgtacccttttactggcaaagtagatggtatcctaaactagcctggcaactacaagtaatgcatgacctatatgtatcaggccccttcagctacaaagatgaccttaaaagctttactataaacacaacctacaagtttaaattcttatggggtggcaatatgattcctgaacaggttatcaaaaacccgtgcaaaacaacagatccaacattcaccctgcccggtagacagcctcgcgacctacaaattgttgacccacttaccatgggcccgcaatgggaattccacacctgggactggagacgcggactgtttggacagagtgctactagaagagtgtcagaaaaaccaggaaatgatgcagagtattatgcgcctccaaaaaaacctagatttttcccaccaacagacctccaagagcaagaaaaagactcagattcacaggaggagacgagactcttatggcacccgtcgccgccaaggagccaagaagagatccagcaagagcagcagcgagacctccacctcagactcggacaacaactcagaatcagacagcagctccagcaagtcttcttacaagtcctcaaaacgcaagcgaacctccacataaatccattattcttaaaccaacaataaacacagtgtacatgtttcccccagacacacctaggcccataaacacagcagaaggatggaaacaagagtatgaggcagctagaacctgggataggcctgttagaagctactacacagacaccccttactacccctgggcccccatacccaaacagcctttctctgtatcttttaaactcggctacaaataaaaattcaaggccgtgggagtttcacttgtcggtgtctacctcttaaagtcactaagcactccgagcgttagcgaggagtgcgaccctcccccctggtacaacgccctcggagtccggcgctacgccttcggctgcgccggacacctcggcccccccctccacccgaaacgcttgcgcgtttcggaccttcggcgtcggggggggcgggggctttactaaacagactccgagttgccattggacactgagtgggcgtacagcaacgaaagtgagtggggccagacttcgccataaggcctttatcttcttgccattggtccgtgtagggggtcgccataggcttcggcctagtttttaggccttccggactacaaaaatggcggattccgtgacgtcatgaccgccattttaagtaaggcggaacaggctgtaaccttgtgtcaaagttcaaaggtcagccttccgctttgcacaaaatggtggacaatatcttccgggtcaaaggttatgcctacgtcataagtcacgtgagggaggctgctgtaaacacggaagtagctgacccgcgtgacttgtcacgtggtgcatacgtcaccgccgccattttgttttacaaaatggccgacttccttccgcttttttgaaaaaaggcgccaaaaaaccgccggcggcggcgcgcgcgctacgcgcgcgcgccggggggctccgcccccccccccctgcgcatgcgcggggcccccccccccgcgggggggctccgccccccggcccccccccccccgaagatcgtcactaaccacgtggtactccacaggccaatcagacagtgtccaatggcaactcggagtctgtttagtaaagcccccgcccccccccgaagatcgtcactaaccacgtggtactccacaggccaatcagaaccttctacgtacacttcctgggctgggtctttgagtccatataactaactgcacttccgaatggctgagttttccacgcccgtccgcagcgagaacaccacggaggggagtccgagcgtcccgaggg

SEQ ID NO: 68 - protein, 747 aa, Alphatorquevirus sp.
MAWRWWWARRRPNRRWTRRRWRRLRTRRPRRPIRRRRRRPRVRRKRWGRKRGRRRYYRRRFKKRRRRRRKLTLKMWNPSTIRACNIKGAISLVMCGHTQAGRNYAIRSEDFIPQLQSFGGSFSTTTWSLKVLFDEYQKFHNFWTYPNTQLDLCRYKCSIFTFYRDPKVDYIVIYNTQPPFKINKYSSPFLHPGLMMLQKKKILVPSFQTKPGGKARIKVKIKPPPLFEDKWYTQQDLCPVNLLSLAVSACSFLHPFCSPESDTICVTFQVLREFYYTHLTVTPTTTTSLPPEDQAIFDNYLYKNANFYQSLHAPAIINLAQQPAKWTQNNINSLQTKISNITTYLSSTVTQNSFKTGNNSIYGQPNYNPNKQYLHPMREWFFEQTTTVNEIHGTYGKPTYNAVEYHLGKYSPIFLSPYRTNTQFPTAYQDTTYNPNVDKGKGNKIWLQSTTKKTSDFEERSCRCTISDLPLWAMVNGYADYAESELGSEVFAVYVCCVICPYTKPPLFNKSKPEMGYIFYDTLFGDGKLPTGTGLVPFYWQSRWYPKLAWQLQVMHDLYVSGPFSYKDDLKSFTINTTYKFKFLWGGNMIPEQVIKNPCKTTDPTFTLPGRQPRDLQIVDPLTMGPQWEFHTWDWRRGLFGQSATRRVSEKPGNDAEYYAPPKKPRFFPPTDLQEQEKDSDSQEETRLLWHPSPPRSQEEIQQEQQRDLHLRLGQQLRIRQQLQQVFLQVLKTQANLHINPLFLNQQ

SEQ ID NO: 69 - protein, 141 aa, Alphatorquevirus sp.
MRFSRIYRRKKRLLPLLCLPAEPKEQPVMSWRCPLENAYKREQYFLRGCQMLHTSFCGCDDFINHVIRLQNLHGNLHQPTGPSTPPVGRRALALPAAPEPWRGDGGGPEGDRTADGPADAGGDYAPGDLDDLFAAAAADQE

SEQ ID NO: 70 - protein, 122 aa, Alphatorquevirus sp.
MAPVAAKEPRRDPARAAARPPPQTRTTTQNQTAAPASLLTSPQNASEPPHKSIILKPTINTVYMFPPDTPRPINTAEGWKQEYEAARTWDRPVRSYYTDTPYYPWAPIPKQPFSVSFKLGYK

SEQ ID NO: 71 - DNA, 3856 bp, Alphatorquevirus sp.
cgggtgccgtaggtgagtttacacaccgcagtcaaggggcaattcgggctcgggactggccgggctatgggcaaggctcttagggttatcgctcttaaaaatgttttttggtagaccttacagaaaaaagaaaagggcgctgctactgtctgagctgccagatccaaagaaaaaaccacctggtgatatgacctggcgccccccggtacacaatgccgccggcattgataggcagttctttgaagcctgctttcgatgccacagtagttgctgcggctgcggcagctttattaatcatcttaatgtactggctgctcgctatggctttactggggggccggcgccgccaggtggtcctcggccggcgccccaagtgaggcccgcgcttcccgcgccggagcccgacccggaggccaacaaccgtgagccatggcgtggagctggtggtggcaacgatggagacgccgcggctggaaacccaggcgccgccgctggagacgcctacgatggagaagacctcgacgccctgttcgccgccgtcgccgaagacgcagagtaaggagacggaggtgggggaagagacgtgggcgacgcagacggtacacccgtagacgaaagagacgcattaagtccagaaactttaaaaagaaactagtactaactcagtggcacccctctgtagtaagacgctgctttatcaggggcatagttcctattctcatatgcgggcacacaaaatggaacagtaactacgccctgcatagcgaggactacacagaagagggccgctaccctcacggagggtccctctcaaccactacgtggtcactaaaggtgctgtacgacgagtacctaaagcaccacaacttctggggctacccaaacacccagctagacctggccagatacaggggctgcacctttactttctacagacacaaaaaaactgactttatagtatggtggaacagaaagcctccctttaaactaaacaagctgagctgcgcgtccttccacccgggcatgctcatgcaacagaaacacaaggtgctaatcccaagctttgacactaaacccgggggcagagctaaaattagagtcagaataaagccccccactctgttagaggacaagtggtacactcagcaagacttgtgtccggtaaacctggcgcaacttgtggttactgcggctgactttcaacatccgttctgctcaccacaaacgaacactccaaccacaaccttccaggtgttgaaagaaatgtattatgacaccataggcatagtggacacaaaagaaacttacaattcagttaataataaaaatacatctgacacatacgataaatttatggacacattaataagaaagctatacacaacaggatcatactggaactcctttcacacagcagaatatttaaaccccaacataacagacaagcacaataacaaaatatttcaagaccatgccacaacattaatggagtggctaacagcaaaaggcccaaacaaatttaacacaggcaacagcacccaatttgggcacaatacttattcgcctgatgccactaaactaatagcagcaaacaattgctactggaaagcactcaccaatgaaaataaccaagctacacaaatagggcaagcacgcgacccacactttgagtatcacacgggcatttacagtcccatattcctcagcagacacagaagcacactaaactttgccagggcctaccaagacgttacatacaacccaaactgtgacagaggagttaaaaacagagtgtgggtgcaggccctcactaaggccaccacagaatttgacgagaaacgcagcaagtgcgttatctgtgacctgcctctgtgggccgctctgtactgctaccacaactttgtagaagaggagctgggcatctcctccgagatttacaactcctgtatagtctgtgtacagtgcccttacacctttccccccatgtatgacaagaaaaacccaaacaaggggtacgtgttctatgacgccctattcggaaacggaaagaccccagacggacgcggacaaatagacgtgttctggcagcagcggtggtacccccgcatggcctgccaggtgcaagtcatgcacgacatcacgatgacgggacccttctcctaccacgacgaactagttagtacacaactgactgctaaatacaaattcgacttcatgtggggtggaaacatgatctcctcacagatcatcaagaacccctgcaaagacacggacatggacaccacctatcccagtagacagcgtcgcgacttacaaattgttgacccacactccatggggccctccttcgcgttccacacgtgggactacagacgcggactgtttggtaaagatgctatcgacagagtgtcaaaacaacaagactatgctccagagtatcctaacccatacaaaaagcctagatattttcccccaacagaccggtcagagctccaagggcaagaagaagactggagtttccaggtcgaaagcgaggggtcgtcgtcagaagagagcgatcaagaagcccaagaagaggaggtactccagttccagccaggacagcagctccagcaactccacctgcagctcgcgcagcagcagcagatcgggcagcagctccgattcctgttccaacaaatgctcaaaacccaggccaatctgcacctaaacccatatacatacacccagctataaacaaggtgttcatgtttgagccccagggtcccaggcctataactaccagacaggggtgggaagacgagtacaccactgccaacatatggggccggcccgtccgctccttctacacagacacccccttctaccccgaggttcctaaaatacctcctcagtttcatgtatctttcaaactcggctggaaataaaaatacaaggcctttcactgttcacttgtcggtgtctacctcttaaggtcactaagcactccgagcgccagcgaggagtgcgacccttccccctggtgcaacgccctcggcggccgcgcgctacgccttcggctgcgcgcggcacctcggacccccgctcgtgctgacacgcttgcgcgtgtcagaccacttcgggctcgcgggggtcggaaattttgctaaacagactccgagttgccattggacacagtagctgtgaatcagtaacgaaagtgagtggggccagacttcgccataaggcctttatcttctcgccattggtccgtcgggaggggtcgctccaaacgcgaaccccgttttcagcccttccggactaccaaaatggccgatttggtgacgtcacggcggccattttaagtaaggcggaagcagctccactatacaaaatggcggcggagcacttccggcttgcccaaaatggcggccaagctcttccgggttaaaggtcagcaactacgtcacaagtcacgtgggaagggttgacatgtaacccggaagtcaatcctcccacgtggcctgtcacgtgactgctacgtcacggccgccattttagtttacaaaatggcgaacttccttcctgttttttaaaaattaaccgtcggcggcggcgcctgggtttccagccgcggcgtctccatcgttgccaccaccagctacagccccccccgcggggggctccgccccccggcccccccccccgaagtacgtcactaaccacgtgactcccgcaggccaaccacagtgtatgtcgtgcacttcctgggcatggtctacgtgataatataaacaacagcacttccgaatggctgagttttccacgcccgtccgcagcgaggagcaccggcagggacatccgcgcgtcccgaggg

SEQ ID NO: 72 - protein, 768 aa, Alphatorquevirus sp.
MAWSWWWQRWRRRGWKPRRRRWRRLRWRRPRRPVRRRRRRRRVRRRRWGKRRGRRRRYTRRRKRRIKSRNFKKKLVLTQWHPSVVRRCFIRGIVPILICGHTKWNSNYALHSEDYTEEGRYPHGGSLSTTTWSLKVLYDEYLKHHNFWGYPNTQLDLARYRGCTFTFYRHKKTDFIVWWNRKPPFKLNKLSCASFHPGMLMQQKHKVLIPSFDTKPGGRAKIRVRIKPPTLLEDKWYTQQDLCPVNLAQLVVTAADFQHPFCSPQTNTPTTTFQVLKEMYYDTIGIVDTKETYNSVNNKNTSDTYDKFMDTLIRKLYTTGSYWNSFHTAEYLNPNITDKHNNKIFQDHATTLMEWLTAKGPNKFNTGNSTQFGHNTYSPDATKLIAANNCYWKALTNENNQATQIGQARDPHFEYHTGIYSPIFLSRHRSTLNFARAYQDVTYNPNCDRGVKNRVWVQALTKATTEFDEKRSKCVICDLPLWAALYCYHNFVEEELGISSEIYNSCIVCVQCPYTFPPMYDKKNPNKGYVFYDALFGNGKTPDGRGQIDVFWQQRWYPRMACQVQVMHDITMTGPFSYHDELVSTQLTAKYKFDFMWGGNMISSQIIKNPCKDTDMDTTYPSRQRRDLQIVDPHSMGPSFAFHTWDYRRGLFGKDAIDRVSKQQDYAPEYPNPYKKPRYFPPTDRSELQGQEEDWSFQVESEGSSSEESDQEAQEEEVLQFQPGQQLQQLHLQLAQQQQIGQQLRFLFQQMLKTQANLHLNPYTYTQL

SEQ ID NO: 73 - protein, 167 aa, Alphatorquevirus sp.
LAGLWARLLGLSLLKMFFGRPYRKKKRALLLSELPDPKKKPPGDMTWRPPVHNAAGIDRQFFEACFRCHSSCCGCGSFINHLNVLAARYGFTGGPAPPGGPRPAPQVRPALPAPEPDPEANNREPWRGAGGGNDGDAAAGNPGAAAGDAYDGEDLDALFAAVAEDAE

SEQ ID NO: 74 - protein, 138 aa, Alphatorquevirus sp.
LEFPGRKRGVVVRRERSRSPRRGGTPVPARTAAPATPPAARAAAADRAAAPIPVPTNAQNPGQSAPKPIYIHPAINKVFMFEPQGPRPITTRQGWEDEYTTANIWGRPVRSFYTDTPFYPEVPKIPPQFHVSFKLGWK

SEQ ID NO: 75 - DNA, 3853 bp, Alphatorquevirus sp.
cgggtgccggaggtgagtttacacaccgcagtcaaggggcaattcgggctcgggactggccgggctatgggcaagactcttagggtcatcgctcttaaaaatgttttttggcaggccttacagaaaaaagaaaagggcgctgtcactgtctggcgtgcgagctctacaggcgaaacggtctcgggacatgacctggcgccccccgatacacaatgccgccggcatcaataggcagttctttgaagcctgctttagatgccacaacagttgctgtggctgcggcagctttattgatcatattaatgtactggctgctcgctatggctttactggggggccggcgccgccaggtggtcctcggccggcgccccaagtgaggcccgcgcttcccgcgccggagcccgacccggaggccgacaaccgtgagccatggcgtggagctggtggtggcaacgatggaggcgccgcggctggaaacccaggcgccgccgctggagacgcctacgatggagaagacctcgacgccctgttcgccgccgtcgccgaagacgcagagtaaggagacggaggtggggtaaaagacgggggcgacgcagacggtacacccgtagacgaaagagacgcattaagctcagaaactttaaaaagaaactagtactgactcagtggcacccctccgtagtcagacgctgctttatcaggggcatagttcccatccttatatgcgggcacacaaaatggaacagtaactacgccctgcatagtgaggactacacagaagagggccgctaccctcacggagggtccctctcgaccactacgtggtcactaaaggtgctgtacgacgagtacctaaagcaccacaacttctggggctacccaaacacccagctagacctggccaggtacaggggctgcaccttcactttctacagacacaaaaaaactgactttatagtatggtggaacagaaagcctccctttaaactaaacaagctgagctgcccgtccttccacccgggcatgctcatgcaacagaaacacaaggtgctaatcccaagctttgacactaaacccgggggcagagctaaaattagagttagaataaagccccccactctgttagaggacaagtggtacactcagcaagacttgtgtccggtaaacctggcgcaacttgtggttactgcggctgactttcaacatccgttctgctcaccacaaacgaacactccaaccacaaccttccaggtgttgaaagaaatgtattataacactattggcatagttgacacagaagaaagttacatttcagttaatgataaaactacatttaaaacatacaatgagtttctaacaactttacaaaaccacttatactccacaggttcctactggaactcctttcacacagcagaatacttaaaccccaatgtcacagacacttacaaccacaaaatatttaataatacatccacatcattaacaccatggctcacaggcaaaagcaacaccaattttcaaactggtaacagcacccagtttggctacaacagctacaaaccaacagcagaaaacattcaattagccaatactgcatactggcaagcactcacaaaaccaaacgaccaggcaacacaaataggacaggctcgtgcaaaacaatttgaataccacactggcatctacagccccatattcctaagcagacacagaagcacactaaactttgccagggcctaccaggacgtcacatacaacccaaactgtgacagaggagttaaaaacagggtgtgggtgcagtccctaactaagtccaccacagagttcgatgaaaaacgcagcaagtgcgttatcactgacctgcctctgtgggccgctctgtactgctatcacaactttgtagaagaggagctaggcatctcctcagagatctacaacgcctgtatagtctgtgtacagtgtccttacacctttccccccatgtatgacaaaaaaaacccaaacaaggggtacgtgttctatgacgccctgttcggaaacggaaaaaccccagacggacgcggacaggtagacgtgttctggcagcagcggtggtacccccgcatggcctgccaggtgcaagtcatgcacgacatcaccatgaccggacccttctcctaccacgacgaactagtgagtacacaactgactgctaagtacaaatttgacttcatgtggggtggaaacatgatctcctcacagatcatcaagaacccctgcaaagacacagacatggacaccacctatcccagtagacagcgtcgcgacatacaaattgttgacccacactccatggggccctccttcgcgttccacacgtgggactacagacgcggactgtttggtaaagatgctatcgacagagtgtcaaaacaacaagactatgctccagagtatcctaacccatacaaaaagcctagatattttcccccaacagacagggcagagctccaagggcaagaagaagactggagtttccaggtcgaaagcgaggggtcgtcgtcagaagagagcgatcaagaagcccaagaagaggaggtactccagttccagccaggacagcagctgcagcaactccacctgcagctcgcgcagcagcagcagatcgggcagcagctccgattcctgttccaacaaatgctcaaaacccaggccaatctgcacctaaacccatatacatacacccagctataaacagggtgttcatgtttgaaccccagggccccaggcctataaccacaagagaggggtgggaagacgagtacacaaccgccggcgtatggggccggcccgtccgctccttttacacagacacccccttctaccccgaggttcccaagataccccctcaattctctgtaactttcaaactcggctggaaataaaaatgcaaggcctttcactgttcacttgtcggtgtctacctcttaaggtcactaagcactccgagcgtcagcgaggagtgcgacccttccccctggtgcaacgccctcggcggccgcgcgctacgccttcggctgcgcgcggcacctcggacccccgctcgtgctgacacgcttgcgcgtgtcagaccacttcgggctcgcgggggtcgggaattttgctaaacagactccgacttgccattggacactgtagccgtgaatcagtaacgaaagtgagtggggccagacttcgccataaggcctttatcttcttgccattggtccgtcgggaggggtcgctccaaacgcggaccccgttttcagcccttccggactacaaaatcggccattttagtgacgtcacggcaaccatttttagtaaggcggaagcagcttcactatacaaaatggcggcggagcacttccggcttgcccaaaatggcggccaagctcttccgggtcaaaggtggcaaactacgtcacaagtcacgtggggagggttggcgtataacccggaagtcaatcctcccacgtggcctgtcacgtgactgctacgtcacggccgccattttagtgcacaaaatggcggacttccttccttttttttaaaaattaaccgtcggcggcggcgcgcgcgctgcgcgcgcgccggggggctgcgcctctttcgtctacgggtgtaccgtctgcgtcgcccccgtcttttaccccccccccgaagtgcgtcactaaccacgtgactcccacaggccaatcagagtgtatgtcgtgcacttcctgggcatggtctacgtcctcatataactaagtgcacttccgaatggctgagttttccacgcccgtccgcagcggcagcaccacggagggtgatccccgcgtcccgaggg

SEQ ID NO: 76 - protein, 768 aa, Alphatorquevirus sp.
MAWSWWWQRWRRRGWKPRRRRWRRLRWRRPRRPVRRRRRRRRVRRRRWGKRRGRRRRYTRRRKRRIKLRNFKKKLVLTQWHPSVVRRCFIRGIVPILICGHTKWNSNYALHSEDYTEEGRYPHGGSLSTTTWSLKVLYDEYLKHHNFWGYPNTQLDLARYRGCTFTFYRHKKTDFIVWWNRKPPFKLNKLSCPSFHPGMLMQQKHKVLIPSFDTKPGGRAKIRVRIKPPTLLEDKWYTQQDLCPVNLAQLVVTAADFQHPFCSPQTNTPTTTFQVLKEMYYNTIGIVDTEESYISVNDKTTFKTYNEFLTTLQNHLYSTGSYWNSFHTAEYLNPNVTDTYNHKIFNNTSTSLTPWLTGKSNTNFQTGNSTQFGYNSYKPTAENIQLANTAYWQALTKPNDQATQIGQARAKQFEYHTGIYSPIFLSRHRSTLNFARAYQDVTYNPNCDRGVKNRVWVQSLTKSTTEFDEKRSKCVITDLPLWAALYCYHNFVEEELGISSEIYNACIVCVQCPYTFPPMYDKKNPNKGYVFYDALFGNGKTPDGRGQVDVFWQQRWYPRMACQVQVMHDITMTGPFSYHDELVSTQLTAKYKFDFMWGGNMISSQIIKNPCKDTDMDTTYPSRQRRDIQIVDPHSMGPSFAFHTWDYRRGLFGKDAIDRVSKQQDYAPEYPNPYKKPRYFPPTDRAELQGQEEDWSFQVESEGSSSEESDQEAQEEEVLQFQPGQQLQQLHLQLAQQQQIGQQLRFLFQQMLKTQANLHLNPYTYTQL

SEQ ID NO: 77 - protein, 167 aa, Alphatorquevirus sp.
LAGLWARLLGSSLLKMFFGRPYRKKKRALSLSGVRALQAKRSRDMTWRPPIHNAAGINRQFFEACFRCHNSCCGCGSFIDHINVLAARYGFTGGPAPPGGPRPAPQVRPALPAPEPDPEADNREPWRGAGGGNDGGAAAGNPGAAAGDAYDGEDLDALFAAVAEDAE

SEQ ID NO: 78 - protein, 138 aa, Alphatorquevirus sp.
LEFPGRKRGVVVRRERSRSPRRGGTPVPARTAAAATPPAARAAAADRAAAPIPVPTNAQNPGQSAPKPIYIHPAINRVFMFEPQGPRPITTREGWEDEYTTAGVWGRPVRSFYTDTPFYPEVPKIPPQFSVTFKLGWK

SEQ ID NO: 79 - DNA, 3852 bp, Alphatorquevirus sp.
cgggtgccgaaggtgagtttacacaccgaagtcaaggggcaattcgggctcgggactggccgggctatgggcaaggctctgaaaaagctatgttttttggaaggtgctggagaaagaaaaggcaactgcttctgctacctgtgcagtctccacaggcgacaccttccatgagccgctggcaaccacccgtccacaatgcccccggcattgagagacagtggtatgactccgtttggcgcagtcacgctgcttgctgtggttgtggcgatgttattggtcaccttaatgatctggcggctcgttttggacgtcctgggaaccccagacccccgggcgctcctcagccgccgccagtgaggcccctgccggccctgccggctccggagcccccggctgaccgagcgccatggcctatggctggtggaggagacgacggtggcgccgccggaggtggccgcgacggaggagatggaggacccgccgccgcagaagaagacgacctagacgcccttttcgccgccgccgaagagtaaggagacggaggggtcggtggaggagggcttataagagatggcgcagacgcagggggcgacgcaaacacaaaaagagacttgtactgactcagtggcaaccctctgttgttaaaaaatgttatatagtgggctacgaccccataatagtatgtggacgaaacagaactagcagtaactacagcagccacatagatgactttacatttaacaacgaggcctacggaggaggcctctgcacccacagatacactttaaggactctatttcaagactttttactacaccacaactattggacctcctctaacaaagacctagacctgggaaggtacctaggatgcaatataatattttttagacaccccactgtagactttatagccagaataagaaacatgcctccctttgaagacactgacgccacagcaatgacactacacccaggcatgctagtactctctaaaaagagaataatgattcccagcttaaagtctaggcctagcagaaaacactatgtaaaagttaaagtagggcccccaaaactgtttgaagacaagtggtacccccagagcgagttatgtgatgtaacattactaactgtacaggcaaccgcagcggacttgcaatatccgttcggctcaccactaacgaactcagtatgctgcaacttccaggttttagacagcaactatgacaacatactaaccgtcttagaggacaccacagaggccgagaacagaaatagaatctataataaaatacttaactttattacagtatataacaccacagaaacagcagcacaactaaacaaatttttacctaccataaatacaaatcaactaaattcagaaaatgctagtgacagtaccatacaagttaacacgacacaaggcacagaagcaaactcattttcactttggaactcaaaaaacccacatcaaaataccctgtacgcaggcagtgcatatataacttatccacaacagcaaaagaaaacaccaccagaacaaatgaaagaagcaaacaaagcatatataaatgcagccaaacaaaacctaccaaactggggaataagcacacagtacacaaaaggtacaacaccatacccatttgaatactacacaggactatacagcagtatatttttaagtgcaggaagatctaactgggaactaaaaggctgctacacagacattagttacaatcccctaacagacaaaggaataggtaacatgatatggctagatataataaccaaatcagatagtaaatacacagaaaacaaatctaaatgtttaatggccaactacccactatgggctatgtgctatggatacctagactggtgtgataaagtactagaccacataaacatagactcagagtacagagtatgcataagatgcccatacacacaccctatgatgaccaaggcctcagacccactgtgggggtttgtaccctacagctacaactttggaaagggcaaaatgcccggaggaaacccagtaccatctctctggatgagagtacactggtaccccacagtttttcaccaaagagaggtacttgaatgcttatcacagaccggaccgtttgcatacaagagtgacgaaaataaagctgtactgactataaaatattcattcagatggaaatggggaggaaatcctatatttcaacaggtggtcagagacccctgcaaacatccacaaggacccagtccccatagacagcctcgtgagctacaaatcgctgacccgaagtaccagaccccacaactcatctggcacgcgtgggacttcagacgtggactgtttagcaagacaggtattaaaagaatgtcagaacaaccagcttatgatgaattttctgcagacaggagcaagagacccaagaaagacacagacgtccagcacagccaagagcaaaaagaagactcgcatacccaccagcgagtcctccagccctggctccactcctcccaagaggagcaaacggagtcgcaaagcgagcaagaagaagcgacgatacaagagcagctacaaaaacaactcctccagcagcgactcatgggagacaaactccgagtcgtctgccagcagatcgccagtctccaagccgggcacggccttcatcccctactccaatgccatgtataaataaagtatacatgtttcctgatatattccctaaacctgctccttccagcaacgactggaaagaggagtatatggcctgcagatattgggacaggcctccccgctctgacctaaccaaaccccctttttacccctggatgcctcctacatacaatgtaaaatttaaccttaacttcaaataaatgttggccgtgggagtttcacttgtcggtgtctacctcttaaggtcactaagcactccgagcgacagcgaggagtgcgaccctaccccctgggcccacttcttcggagccgcgcgctacgccttcggctgcgcgcggcacctcagacccccgctcgtgctgacacgcttgcgcgtgtcagaccacttcgggctcgcgggggtcgggaaatttgctaaacagactccaagttgccattggatactgtagctatgaatcagtaacgaaagtgagtggggccagacttcgccataaggcctttatcttcttgccattggatagtgtagggggttgccataggcttcggcctcgtttttaggccttccggactacaaaaatggcgcattccgtgacgtcatggccgccattttaagtaaggcggaagcaggctgtcactataacaaaatggcggcgacagccttccgctttacacaaaatggaggtgtttatcttccgggtcaaaggtcaccgctacgtcatcagtcacgtgggaagggttcgctgtaaacccggaagcaatcctctcacgtggttggtcacgtggtgcgtgcgtcacggtcgccattttagttcacaaaatggccgacttccttccgcttttttaaaagctaacggcccagcggcggcgcgcgcgctacgtgaccaaccacgtgagaggattgcttccgggtttacagcgaacccttcccatctttttgtgtttgcgtcgccccctgcgtctgcgccatctcttataagccctccgccccccggccccccccccgaagtccgtcactaaccacgtgactcccacaggccaaccgacgtgtacgtgatacacttcctgggcgtgacttacatcctaatataactaacagcacttccgaatggctgagttttccacgcccgtccgcagcgagaacaccacggaggggagtccgagcgtcccgaggg

SEQ ID NO: 80 - protein, 763 aa, Alphatorquevirus sp.
MAYGWWRRRRWRRRRWPRRRRWRTRRRRRRRPRRPFRRRRRVRRRRGRWRRAYKRWRRRRGRRKHKKRLVLTQWQPSVVKKCYIVGYDPIIVCGRNRTSSNYSSHIDDFTFNNEAYGGGLCTHRYTLRTLFQDFLLHHNYWTSSNKDLDLGRYLGCNIIFFRHPTVDFIARIRNMPPFEDTDATAMTLHPGMLVLSKKRIMIPSLKSRPSRKHYVKVKVGPPKLFEDKWYPQSELCDVTLLTVQATAADLQYPFGSPLTNSVCCNFQVLDSNYDNILTVLEDTTEAENRNRIYNKILNFITVYNTTETAAQLNKFLPTINTNQLNSENASDSTIQVNTTQGTEANSFSLWNSKNPHQNTLYAGSAYITYPQQQKKTPPEQMKEANKAYINAAKQNLPNWGISTQYTKGTTPYPFEYYTGLYSSIFLSAGRSNWELKGCYTDISYNPLTDKGIGNMIWLDIITKSDSKYTENKSKCLMANYPLWAMCYGYLDWCDKVLDHINIDSEYRVCIRCPYTHPMMTKASDPLWGFVPYSYNFGKGKMPGGNPVPSLWMRVHWYPTVFHQREVLECLSQTGPFAYKSDENKAVLTIKYSFRWKWGGNPIFQQVVRDPCKHPQGPSPHRQPRELQIADPKYQTPQLIWHAWDFRRGLFSKTGIKRMSEQPAYDEFSADRSKRPKKDTDVQHSQEQKEDSHTHQRVLQPWLHSSQEEQTESQSEQEEATIQEQLQKQLLQQRLMGDKLRVVCQQIASLQAGHGLHPLLQCHV

SEQ ID NO: 81 - protein, 147 aa, Alphatorquevirus sp.
MFFGRCWRKKRQLLLLPVQSPQATPSMSRWQPPVHNAPGIERQWYDSVWRSHAACCGCGDVIGHLNDLAARFGRPGNPRPPGAPQPPPVRPLPALPAPEPPADRAPWPMAGGGDDGGAAGGGRDGGDGGPAAAEEDDLDALFAAAEE

SEQ ID NO: 82 - protein, 124 aa, Alphatorquevirus sp.
LAPLLPRGANGVAKRARRSDDTRAATKTTPPAATHGRQTPSRLPADRQSPSRARPSSPTPMPCINKVYMFPDIFPKPAPSSNDWKEEYMACRYWDRPPRSDLTKPPFYPWMPPTYNVKFNLNFK

SEQ ID NO: 83 - DNA, 3851 bp, Alphatorquevirus sp.
cgggtgccggaggtgagtttacacaccgcagtcaaggggcaattcgggctcgggactggccgggccatgggcaaggctcttaaaaagctatgtttgtcggtaaaatctacaggaagaaaaggaaactgcttctgcaggctgtgcgtgctccacaggcgccatcttccatgagccgctgctggtgtcctcctcggggtgatgtctccacccgcgagtcccggtggtacgaggcggttcgaggaagccacgatgctttttgtggctgtggtgatcctattcttcatttttctcgtctggttgcacgttctaaccatcagggacctccgacgccccccacggacgaccgtgcgccgcagaataccccagtgagacgcctgctgcctctccccagctaccccggcgagggtccccaggctagatggcctggtggggatggaggcgccgctggtggcgaccgaagagaaggtggagatggcggcgcgcgcgccgccgaagacgagtaccagcccgaagacctcgacgagcttttcggcgctatcgaacaagaacagtaaggaggaggcgaagggggaggcggaggggctaccggcgccgttacagactgagacgctatgccagacgcaggttccgacgcaaaaagatagtactgactcagtggaacccccagactaccagaaaatgtataataaggggcatgatgccagtactgtgggccggcatgggcacggggggcagaaactacgccgtcaggtcagacgactatgtagtgaacagagggttcgggggttccttcgccacagagaccttctctcttaaggtcctgtatgaccagttcctcaggggcttcaacaggtggtcccacactaacgaggacctagacctggcccgctacaggggctgcaggtggaccttctacagacataaagacacagactttatagtgtactttacaaacaatcctcccatgaagaccaaccaattctcggcccccctgacgacccccggcatgctcatgcgcagcaaatacaagatcctgatccccagcttccagaccagacccaagggtcgcaaaacagtaacagttaggattaggccccccaaactatttcaagacaagtggtacacccagcaggacctctgttcagttcctcttgtccaactgaacgtgaccgcagctgatttcacacatccgttcggctcaccactaactgaaactccttgcgtagagttccaggtgctgggtgacttgtacaatacatgtctcaatatcgaccttccgcaatttactgaatcaggagacataagtagcaattactccaaacctaataaggacaatttaaaagaattatacaaagaattattcacaaaacccacatcaggacactactggcagacattcataaccaacagcatggtcagagcacacatagatgcagacgcagccaagttagcacaaacagcatccacctcacccacatacaaccaagaccccttccccacagtacctactaagacagactttaatgaatggaaaaagaagttcacagacactagagacagctcctttctctttgccacttaccatccccaagctataacaaagacaattaaaaaaatgagagataataactttaacctaggaacagggcccaatgacaagtatggagactacacagcacagtacaaaggaaacacacacatgctagactactacctgggcttttacagccccatattcctctcagacggcagatccaacgtagaattcttcaccgcctacagagacatagtatacaatccgttcttagataaggcccagggcaacatggtatggtttcagtaccacacaaagacagacaacaaatttaaaaaaccagagtgccactgggaaataagagacatgcccctgtgggccctcctaaacggatatgtagactacttagagactcaaatacagtatggtgacctcagtaaagaaggcaaagtcctcataaggtgtccctacaccaggccggcactagtagaccccaaagacgagactgcaggatatgtagtctacaacagaaactttggcagaggcaagtggatagatggagggggctatatccccctgcacgagagaacaaagtggtatgtcatgctgcgataccagacggacgtcttccatgacatagtgacctgtgggccctggcagtacagagacgacaacaaaaacagtcagctagtagccaagtaccgcttcagcttcatatggggaggtaacactgtgcactctcaggtcatcagaaacccgtgcaaagacaaccaagtatccggtccccgtcgacagcctagggatgtacaagtcgttgacccgcaactcatcacgccgccgtgggtcctccacagcttcgaccagcgaagaggcctctttactgagacagctctcagacgtctgctccagcaaccattacctggcgagtatgctgttagcaccctcaggacacccctcctctttctaccctcagaataccaacgagaagacggcgctgcagaaagcgcctcaggttccccggccaaaagaccccgtatctggccagaagagagccagacggagacgatctcctcggaggaggacccggcggagacgacgagggagctcctccagcgaaagctccgagagcagcgagcactccagttccagctccagcacttcgcggtccaactcgccaagacccaggcgaatctccacgtaaaccccctgttatccttcccgcagtaaacaaagtgtacctgtttccaccagaaaagcccattcccatacaggggtaccacggatggaacacagagttcgaggcctgcgatgcctttgacagaccccccagaaagttcctcacagacacacctacctacccctggctccccgtccccaatcctgaaataaaagtgagctttaagctcggtttcaaataaacaaggccgtgggagtttcacttgtcggtgtctacctcttaaggtcactaagcactccgagcgtcagcgaggagtgcgaccctctgccctggtgcaacgccctcggcggccgcgcgctacgccttcggctgcgcgcggcacctcggacccccgctcgtgctgacacgcttgcgcgtgtcagaccacttcgggctcgcgggggtcgggaattttgctaaacagactccgagttgccattggacactgtagccgtgaatcagtaacgaaagtgagtggggccagacttcgccataaggcctttatcttcttgccattggtccgtgtggggggtcgccacaggcttcggcctcggttttaggccttccgaactaccaaaatggcggattcagtgacgtcacggccgccattttaagtaggtgccgtccaggactgcgtttccgggtcagagggcatcctcggcggaacctgcacaaaatggcggtcaaaaacatccgggtcaaaggtcgcagctacgtcataagtcacgtgcaggggtcctgctgcgtcatatgcggaagtaggccccgccacgtgactcgtcacgtgactgctacgtcacggcggccattttgaatcacaaaatggcggacttccttcctctttttcaaaaataacggccctgcggcggcgcgcgcgcttcgcgcgcgccgggggccccgcgggggggctccgccccccggccccccccccgaagtacgtcactaaccacgtgactcccgcaggccaaccacagtctatgtcgtgcacttcctgggcatggtctacgtgataatataaagcggtgcacttccgaatggctgagttttccacgcccgtccgcagcgagatcgcgacgcaggagcgatcgagcgtcccgaggg

SEQ ID NO: 84 - protein, 780 aa, Alphatorquevirus sp.
MAWWGWRRRWWRPKRRWRWRRARRRRRVPARRPRRAFRRYRTRTVRRRRRGRRRGYRRRYRLRRYARRRFRRKKIVLTQWNPQTTRKCIIRGMMPVLWAGMGTGGRNYAVRSDDYVVNRGFGGSFATETFSLKVLYDQFLRGFNRWSHTNEDLDLARYRGCRWTFYRHKDTDFIVYFTNNPPMKTNQFSAPLTTPGMLMRSKYKILIPSFQTRPKGRKTVTVRIRPPKLFQDKWYTQQDLCSVPLVQLNVTAADFTHPFGSPLTETPCVEFQVLGDLYNTCLNIDLPQFTESGDISSNYSKPNKDNLKELYKELFTKPTSGHYWQTFITNSMVRAHIDADAAKLAQTASTSPTYNQDPFPTVPTKTDFNEWKKKFTDTRDSSFLFATYHPQAITKTIKKMRDNNFNLGTGPNDKYGDYTAQYKGNTHMLDYYLGFYSPIFLSDGRSNVEFFTAYRDIVYNPFLDKAQGNMVWFQYHTKTDNKFKKPECHWEIRDMPLWALLNGYVDYLETQIQYGDLSKEGKVLIRCPYTRPALVDPKDETAGYVVYNRNFGRGKWIDGGGYIPLHERTKWYVMLRYQTDVFHDIVTCGPWQYRDDNKNSQLVAKYRFSFIWGGNTVHSQVIRNPCKDNQVSGPRRQPRDVQVVDPQLITPPWVLHSFDQRRGLFTETALRRLLQQPLPGEYAVSTLRTPLLFLPSEYQREDGAAESASGSPAKRPRIWPEESQTETISSEEDPAETTRELLQRKLREQRALQFQLQHFAVQLAKTQANLHVNPLLSFPQ

SEQ ID NO: 85 - protein, 154 aa, Alphatorquevirus sp.
MFVGKIYRKKRKLLLQAVRAPQAPSSMSRCWCPPRGDVSTRESRWYEAVRGSHDAFCGCGDPILHFSRLVARSNHQGPPTPPTDDRAPQNTPVRRLLPLPSYPGEGPQARWPGGDGGAAGGDRREGGDGGARAAEDEYQPEDLDELFGAIEQEQ

SEQ ID NO: 86 - protein, 126 aa, Alphatorquevirus sp.
LARREPDGDDLLGGGPGGDDEGAPPAKAPRAASTPVPAPALRGPTRQDPGESPRKPPVILPAVNKVYLFPPEKPIPIQGYHGWNTEFEACDAFDRPPRKFLTDTPTYPWLPVPNPEIKVSFKLGFK

SEQ ID NO: 87 - DNA, 3850 bp, Alphatorquevirus sp.
cgggtgccggaggtgagtttacacaccgcagtcaaggggcaattcgggctcgggactggccgggctatgggcaagactcttagggtcatcgctcttaaaaatgttttttggcaggccttacagaaaaaagaaaagggcgctgtcactgtctggcgtgcgagctctacaggcgaaacggtctcgggacatgacctggcgccccccgatacacaatgccgccggcatcaataggcagttctttgaagcctgctttagatgccacaacagttgctgtggctgcggcagctttattgatcatattaatgtactggctgctcgctatggctttactggggggccggcgccgccaggtggtcctcggccggcgccccaagtgaggcccgcgcttcccgcgccggagcccgacccggaggccgacaaccgtgagccatggcgtggagctggtggtggcaacgatggaggcgccgcggctggaaacccaggcgccgccgctggagacgcctacgatggagaagacctcgacgccctgttcgccgccgtcgccgaagacgcagagtaaggagacggaggtggggtaaaagacgggggcgacgcagacggtacacccgtagacgaaagagacgcattaagctcagaaactttaaaaagaaactagtactgactcagtggcacccctccgtagtcagacgctgctttatcaggggcatagttcccatccttatatgcgggcacacaaaatggaacagtaactacgccctgcatagtgaggactacacagaagagggccgctaccctcacggagggtccctctcgaccactacgtggtcactaaaggtgctgtacgacgagtacctaaagcaccacaacttctggggctacccaaacacccagctagacctggccaggtacaggggctgcaccttcactttctacagacacaaaaaaactgactttatagtatggtggaacagaaagcctccctttaaactaaacaagctgagctgcccgtccttccacccgggcatgctcatgcaacagaaacacaaggtgctaatcccaagctttgacactaaacccgggggcagagctaaaattagagttagaataaagccccccactctgttagaggacaagtggtacactcagcaagacttgtgtccggtaaacctggcgcaacttgtggttactgcggctgactttcaacatccgttctgctcaccacaaacgaacactccaaccacaaccttccaggtgttgaaagaaatgtattataacactattggcatagttgacacagaagaaagttacatttcagttaatgataaaactacatttaaaacatacaatgagtttctaacaactttacaaaaccacttatactccacaggttcctactggaactcctttcacacagcagaatacttaaaccccaatgtcacagacacttacaaccacaaaatatttaataatacatccacatcattaacaccatggctcacaggcaaaagcaacaccaattttcaaactggtaacagcacccagtttggctacaacagctacaaaccaacagcagaaaacattcaattagccaatactgcatactggcaagcactcacaaaaccaaacgaccaggcaacacaaataggacaggctcgtgcaaaacaatttgaataccacactggcatctacagccccatattcctaagcagacacagaagcacactaaactttgccagggcctaccaggacgtcacatacaacccaaactgtgacagaggagttaaaaacagggtgtgggtgcagtccctaactaagtccaccacagagttcgatgaaaaacgcagcaagtgcgttatcactgacctgcctctgtgggccgctctgtactgctatcacaactttgtagaagaggagctaggcatctcctcagagatctacaacgcctgtatagtctgtgtacagtgtccttacacctttccccccatgtatgacaaaaaaaacccaaacaaggggtacgtgttctatgacgccctgttcggaaacggaaaaaccccagacggacgcggacaggtagacgtgttctggcagcagcggtggtacccccgcatggcctgccaggtgcaagtcatgcacgacatcaccatgaccggacccttctcctaccacgacgaactagtgagtacacaactgactgctaagtacaaatttgacttcatgtggggtggaaacatgatctcctcacagatcatcaagaacccctgcaaagacacagacatggacaccacctatcccagtagacagcgtcgcgacatacaaattgttgacccacactccatggggccctccttcgcgttccacacgtgggactacagacgcggactgtttggtaaagatgctatcgacagagtgtcaaaacaacaagactatgctccagagtatcctaacccatacaaaaagcctagatattttcccccaacagacagggcagagctccaagggcaagaagaagactggagtttccaggtcgaaagcgaggggtcgtcgtcagaagagagcgatcaagaagcccaagaagaggaggtactccagttccagccaggacagcagctgcagcaactccacctgcagctcgcgcagcagcagcagatcgggcagcagctccgattcctgttccaacaaatgctcaaaacccaggccaatctgcacctaaacccatatacatacacccagctataaacagggtgttcatgtttgaaccccagggccccaggcctataaccacaagagaggggtgggaagacgagtacacaaccgccggcgtatggggccggcccgtccgctccttttacacagacacccccttctaccccgaggttcccaagataccccctcaattctctgtaactttcaaactcggctggaaataaaaatgcaaggcctttcactgttcacttgtcggtgtctacctcttaaggtcactaagcactccgagcgtcagcgaggagtgcgacccttccccctggtgcaacgccctcggcggccgcgcgctacgccttcggctgcgcgcggcacctcggacccccgctcgtgctgacacgcttgcgcgtgtcagaccacttcgggctcgcgggggtcgggaattttgctaaacagactccgacttgccattggacactgtagccgtgaatcagtaacgaaagtgagtggggccagacttcgccataaggcctttatcttcttgccattggtccgtcgggaggggtcgctccaaacgcggaccccgttttcagcccttccggactacaaaatcggccattttagtgacgtcacggcaaccatttttagtaaggcggaagcagcttcactatacaaaatggcggcggagcacttccggcttgcccaaaatggcggccaagctcttccgggtcaaaggtggcaaactacgtcacaagtcacgtggggagggttggcgtataacccggaagtcaatcctcccacgtggcctgtcacgtgactgctacgtcacggccgccattttagtgcacaaaatggcggacttccttccttttttttaaaaattaaccgtcggcggcggcgcgcatgctgcgcgcacgcgccggggggctgcgccccgcggggcccccccccgcggggggctccgccccccggcccccccccccgaagtgcgtcactaaccacgtgactcccacaggccaatcagagtgtatgtcgtgcacttcctgggcatggtctacgtcctcatataactaagtgcacttccgaatggctgagttttccacgcccgtccgcagcggcagcaccacggagggtgatccccgcgtcccgaggg

SEQ ID NO: 88 - protein, 768 aa, Alphatorquevirus sp.; identical to SEQ ID NO: 76

SEQ ID NO: 89 - protein, 167 aa, Alphatorquevirus sp.; identical to SEQ ID NO: 77

SEQ ID NO: 90 - protein, 138 aa, Alphatorquevirus sp.; identical to SEQ ID NO: 78

SEQ ID NO: 91 - DNA, 3850 bp, Alphatorquevirus sp.
cgggtgccggaggtgagtttacacaccgcagtcaaggggcaattcgggctcgggactggccgggctatgggcaaggctcttagggttttcgctcttaaaatgcgcttttctcgcatatacaggacgcccaaaccgaaaggtgccctgtcactgccgcctgtgccagctacaccggctaaacgggctcagggtgatatgagctggagaccacccgttcacgatggggcaggtatcgagaggcagttctttgaatcctgctttcgatcccactccggttgctgtggctgtagcaattttattgctcatctcaatttactggctgctcgctatggttttactggggggccggcgccgcctggtggtcctggggcgctccccgcactgagacgggcgctgccggcgcccccggcgccagagcctaaccccgaacagccatggcgtggagctggtggtggcagagatggcgccgacgaccgtggggccgacgaagacgctggaggaaactacgcagccgaagacctagacgccctgttcgccgccgtcgcaggagacgtcgaagaacgagagtaaggaggcgccgcggtggtcggtggggacgcagacgggggcgacgcacttttaagagacgcagacgcaggcgaccctactataaacctaaaaagaaactagttcttacccagtggcacccccagactgtaagacgatgtgccataaggggcatgattcccctaatactgtgcgggcacactacctggaacagaaactatgccatgcgtagcgaagactacccagaacagggtagatatccctttggggggtccgtcagtaccactacgtggtcccttagggtgctgttcgacgagcatcagaaacacagaaatacatggagctaccccaacacccagctagacctagccagatacaaacgctgcagattcacattttacagacacaaaaagactgactttatagtcacctggagccgcaggcccccctttaagcttaacaagtacagcaccgccatgatgcacccaggcatgatgatgcagcagaaatataaattattaatcccaagctgggacactaaacctaagggcagacccaaagtgtccgttacaattaggccccccaccctctttgaggacaagtggtatacgcaacaggatctatgtgatgtaaatcttgtgtcacttgcggtttctgcggcgagcttctcacatccgttcagccaaccgtcaagtaacaacatttgcacaaccttccaggtccttaaagataattactacccagttataggcgttttaactaactataataatcaaaaagcaggcaatgacaaagactacaaagcaaacacagacaacttagaaaactggctgtacaaaacaggcagtctataccacacatttcacacacaagaatacttaaatccaagtagaaaatttgaccaaaaatcaggtgcagcaaaagaaattaatcaaaaaacgtggctaggtaaaaacaatgcaaactttcaaacaggcaaatcgtccctgtttggctttaacacatacaaccctgacaaagacaagttacttaacattagaaagcagtactttcaaacactaacacaagaaaatgacttacacagcaaatatggtaaagccaatgcagagcaatttgagtaccacctggggtggtactcccccatatttctaagcagacacagaagcaacttagagtttgccacagcataccaggatgtcacttacaatccaaactgtgacaggggcaagggcaacagaatctggttccagtacggaaccaagatggacacctggttcagtgagaaacagagcaagtgtgttttagtagatttgcccctgtggtgcatgttctatggctatgctgacttcatagaggcagagctaggcatttctgccgagatccacaatgtaggcatagtagtagtccagtgcccctacacgttcccccccatgtttgacaaaacacagccagacaaaggatacgtgttttatgacatgctgtttgggtcaggaaagatgccagacggttcaggccaagtacccatctactggcagcagagatggtacccccgtatggcctttcagctacaagtcatgcacgacataacactaacagggccctttagctacaaagatgatctagtaatgacagagctggccgccaaatacaggttcgatttcttatggggtggcaatatgatttccgaacagattatcaagaacccgtgcagagacgaaggcatggaaccctcctaccccggtagactccgtagggacatacaaattgttgacccacgctccgtgggccctccctgggttttccatacctgggactacagacggggactctttggttcagaggctatcaaaagagtgtcaacaaaaccgactgatgatgactggattacagtgccttacaaaaagccaaagtattttccccccacagaaagaggagaccaaaatcaagaagaaggctggtctttacaggtgcaaaacctcctcatatcgtcagaagagacagaagcgaaagcccagacggaggagcagcagcagcagcagcagctcctccgactccaactccaagagcaacagcagctcggagtcagactcagactgctctgtcaagagctgctcaaaacgcaagcgggtctccacatgaaccccctgttcttctcccagcaactaacagggtttacatgttccccccagagccggcagttagaccaatcttaggcaggcaggcctgggaggacgagttcaccacctgcaagtactgggaccgtcccgccagggtaaaccacacagacaggccttactacccttgggcacctactccccccccccaatttcatgtatccttcaaacttggctggaaataaacttgcaaggccgtggaactctcgcttgtcggtgtctacctcttaaggtcactaagcactccgagcgttagcgaggagtgcgaccctccgccaaggggcaactccctcggagtccggcgctacgccttcggctgcgccggacacctcggaccccccctccacccgaaacgcttgcgcgtttcggaccttcggcgtcggggggggtcgggggctttgctaaacagactccgaggtgccattggacactgagggggcgaacagcaacgaaagtgagtggggccagacttcgccatagggcctttatcttctcgccatttgtccgtggggaggggtcgccataacgcggaccccgtttttaccccttccagactacaaaaatggcgtctttggtgacgtcacggccgccattttaagtaaggcggaagcagctccactctctcacaaaatggcggcggagcacttccggcttgcccaaaatggagggcaagctcttccgggtaaaaggtcggcagctacgtcacaagtcacgtgggtgggtgacgctgtaaacccggaagcaatcctcccacgtggctgttcacgtgactgctacgtcacagccgccattttgttttacaaaatggccgacttccttccgcttttttaaaaaaaggcgccaaaaaacggccgcggcgggggcgcgcgcgctacgcgcgcgcgtcacaagtcacgtgggaggattgcttccgggtttacagcgtcaccgcggggggctccgccccccggccccccccccgaagtccgtcactaaccacgtgacctctttccgccaatcagagtctacatcgtgcacttcctgggcatggtctacatcctcatataaagcggtgtacttccgaatggctgagtttttcacgcccgtccgcagcggcagcaccacggagggtgatccccgcgtcccgaggg

SEQ ID NO: 92 - protein, 774 aa, Alphatorquevirus sp.
MAWSWWWQRWRRRPWGRRRRWRKLRSRRPRRPVRRRRRRRRRTRVRRRRGGRWGRRRGRRTFKRRRRRRPYYKPKKKLVLTQWHPQTVRRCAIRGMIPLILCGHTTWNRNYAMRSEDYPEQGRYPFGGSVSTTTWSLRVLFDEHQKHRNTWSYPNTQLDLARYKRCRFTFYRHKKTDFIVTWSRRPPFKLNKYSTAMMHPGMMMQQKYKLLIPSWDTKPKGRPKVSVTIRPPTLFEDKWYTQQDLCDVNLVSLAVSAASFSHPFSQPSSNNICTTFQVLKDNYYPVIGVLTNYNNQKAGNDKDYKANTDNLENWLYKTGSLYHTFHTQEYLNPSRKFDQKSGAAKEINQKTWLGKNNANFQTGKSSLFGFNTYNPDKDKLLNIRKQYFQTLTQENDLHSKYGKANAEQFEYHLGWYSPIFLSRHRSNLEFATAYQDVTYNPNCDRGKGNRIWFQYGTKMDTWFSEKQSKCVLVDLPLWCMFYGYADFIEAELGISAEIHNVGIVVVQCPYTFPPMFDKTQPDKGYVFYDMLFGSGKMPDGSGQVPIYWQQRWYPRMAFQLQVMHDITLTGPFSYKDDLVMTELAAKYRFDFLWGGNMISEQIIKNPCRDEGMEPSYPGRLRRDIQIVDPRSVGPPWVFHTWDYRRGLFGSEAIKRVSTKPTDDDWITVPYKKPKYFPPTERGDQNQEEGWSLQVQNLLISSEETEAKAQTEEQQQQQQLLRLQLQEQQQLGVRLRLLCQELLKTQAGLHMNPLFFSQQLTGFTCSPQSRQLDQS

SEQ ID NO: 93 - protein, 167 aa, Alphatorquevirus sp.
MGKALRVFALKMRFSRIYRTPKPKGALSLPPVPATPAKRAQGDMSWRPPVHDGAGIERQFFESCFRSHSGCCGCSNFIAHLNLLAARYGFTGGPAPPGGPGALPALRRALPAPPAPEPNPEQPWRGAGGGRDGADDRGADEDAGGNYAAEDLDALFAAVAGDVEERE

SEQ ID NO: 94 - protein, 159 aa, Alphatorquevirus sp.
LDYSALQKAKVFSPHRKRRPKSRRRLVFTGAKPPHIVRRDRSESPDGGAAAAAAAPPTPTPRATAARSQTQTALSRAAQNASGSPHEPPVLLPATNRVYMFPPEPAVRPILGRQAWEDEFTTCKYWDRPARVNHTDRPYYPWAPTPPPQFHVSFKLGWK

SEQ ID NO: 95 - DNA, 3845 bp, Alphatorquevirus sp.
cgggtgccggaggtgagtttacacaccgcagtcaaggggcaattcgggctcgggactggccgggctatgggcaaggctcttagggtcttcattcttaatatgtttctcggcagggtctaccgccgcaagaaagggaaagtgccactgctggctgtgcagactctaccgaagacaccttccatgagtcattggcgaccccctcttagaaatgtcccctacagggaaagatgttggcttgaggcctgtctcagagcccacgattctttttgtggctgtcctagtcctgttattcatttttctagtctggttgcacgttttaatctacaaggaggcccgccgccagacgatgactccccgcagggcgcgccgctcctgagggccctgccggcaccgagcccccgcaggcagacccgtaccgagaacccttccggtgagccatggcctactcctactggtggcgccgccggaggtggccgtggagaggtagatggaggcgctggaggcgccgcagacgagtaccgcgccgaagacctcgacgacctgttcgccgctatcgaaggagaccagtaaggagaaaacgtcggtgggggaggcgagggcgacggcgccggtacgttagacgatacagacgtagactgactgtcagacgaaagagaaagaaactcaaactgagcgtgtggcagccccaaaatatcagatactgtgccataaaaggcctctttcccatcctcatctgcgggcacggaaagagcgccggcaactatgccatccactctgacgactttgtgaccagcagattctctttcgggggcggtctcagcaccacctcatactctctaaagctgctattcgaccagaacctcagaggactgaacaggtggaccgctagcaacgaccagctagacctagctaggtacctgggggccgtgttctggttctacagagaccagaagacagactacatagtgcagtatgacatctcagagccctttaagatagacaaagacagctccccttcctatcacccaggcatgatgatgagggccaaacacaaggtgctggtgcccagctaccagacctggcccaagggacgctctaaaatcaaacttaagataaagccccccaagatgttcgttgacaagtggtacacacaagaggatctctgtaacgttattcttgtgtcatttgcggtcagcctagcttccttccaacatccgttctgccgaccactaactgaaaacccttgcgtcagcttccaagttctgcaaaatttctacaacaatataataggctactcctcagcagacacattagttgaaaatgtgtttaactcttacttatactgcaaggcctccttttggcagagccatctcaccccctcttttgttaaaaaaattaacaacaaccccgatggcacaccaataagtgcaactgtagcttctatgcctagcatgacagactacaataactgggtgtcaaacacaaatagaggagctgggttttacaaccaaaatgtaaatgtccactacaattactgtcagtacaaccctgatgctaaccatctaacaaccctcagaaagtactactttttctgggagacctacccggcagctgctaagaagtctactacagcacacgtccccataaccaccacccaaccgacaaaaaactggtgggagtacagattaggcctgtacagtcccatctttctcagtccactcagaagcagcaacatagagtggcccttcgcatacagggacatagtgtacaacccactgatggacaaaggggtgggcaacatgatgtggttccagtacaacacaaaaccagacacccagttctctgtcacctcgtgcagagcagtgttagaggacaaacccctgtggtccatggcctacgggtacgcggactttctcctctccattctaggagaacatgacgatgtagacttccacggcctggtctgtatcatatgcccctacaccagaccgcccctctacgacaaggagaaccccaaaatgggctatgtgttctatgatgccaagttcggcaatggcaaatggatagatgggacagggttcatcccggtagagttccagagcaggtggaaaccagaactggccttccagaaagacgtactgactgacctagccatgtcaggccccttctcctacagcgacgaccttaaaaacaccacgatccaggcccaatacaaattcaaattcaaatggggcggtaatctctcttaccaccagacaatcagaaacccgtgcgcctcggacggacagacgcccagtaccagtagacagtctagagaggtacaaatcgttgacccgctcaccatgggaccccgatacgttttccactcgtgggactggcgacgtgggtggcttaatgacagaactctcaaacgcttgtttaaaaaaccgctcgattatgaagagtatccaaaatctccaaagagacctagaattttcccgcctacagagcagcttcaagaagacccacaagagcaagaaagagactcctcttcctcggaagaaagtctccctacatcgtcagaagagacgccgccagcccacctactcagagtacacctcagaaagcaactccgagaacagcgagacctccgagtccaactcagagccctattcgcccaagtcctcaaaacgcaagcgggcctacacataaaccccctattattggccccgcattaaacaaagtatacttcttcccagagagggcacctaaaccttctcccacctcgggggactgggccactgagtaccaggcggccgccgccttcgatagaccccctagaagtaacctctcagacacccccttctatccctggatgccaacaaacaccaaattctctgtaacctttaaactcggatggaaaccctgaataaaattcaaggccgtgcactgttcacttgtcggtgtctacctcttaaagtcaccaagcactccgagcgtcagcgaggagtgcgacccttccccctgactcaacttcttcggagccgcgcgctacgccttcggctgcgcgcggcacctcagacccccgctcgtgctgacacgctcgcgcgtgtcagaccacttcgggctcgcgggggtcgggaattttgctaaacagactccgagttgccattggatactgtagctgtgaatcagtaacgaaagtgagtggggccagacttcgccataaggcctttatcttcttgccattggacagtgtcgggggtcgccataggcttcgggctcggttttaggccttccggactaccaaaatggcggattccgtgacgtcatggccgccattttgagtaaggcggaacaggctgtcaccccgtgtcaaaggtcaggggtcagccttccgctttgcacaaaatggagggcaatatcttccgggtcagaggtcgctaccgcgtcataagtcacgtgggaacggctgctgtaaacccggaagtagctgacccacgtgacttgtcacgtgactagcacgtcacagccgccattttgtatcacaaaatggccgacttccttcctcttttttaaaaataacggcccggcggcggcgcggaaaagctcgtctagctcttcttcgtcgtagtctcggtctcgcgggcccccccccccctccgggggggctccgccccccggcccccccccgtcgtggatcgtcactaaccacgtgactctcacaggccaaccacagtctatgtcgtacacttcctgggcatggtctacgtgataatataagacggcgcacttccgaatggctgagttttcgccgcccgtccgcagcgagatcgcgacggaggagcgatcgagcgtcccgaggg

SEQ ID NO: 96 - protein, 759 aa, Alphatorquevirus sp.
MAYSYWWRRRRWPWRGRWRRWRRRRRVPRRRPRRPVRRYRRRPVRRKRRWGRRGRRRRYVRRYRRRLTVRRKRKKLKLSVWQPQNIRYCAIKGLFPILICGHGKSAGNYAIHSDDFVTSRFSFGGGLSTTSYSLKLLFDQNLRGLNRWTASNDQLDLARYLGAVFWFYRDQKTDYIVQYDISEPFKIDKDSSPSYHPGMMMRAKHKVLVPSYQTWPKGRSKIKLKIKPPKMFVDKWYTQEDLCNVILVSFAVSLASFQHPFCRPLTENPCVSFQVLQNFYNNIIGYSSADTLVENVFNSYLYCKASFWQSHLTPSFVKKINNNPDGTPISATVASMPSMTDYNNWVSNTNRGAGFYNQNVNVHYNYCQYNPDANHLTTLRKYYFFWETYPAAAKKSTTAHVPITTTQPTKNWWEYRLGLYSPIFLSPLRSSNIEWPFAYRDIVYNPLMDKGVGNMMWFQYNTKPDTQFSVTSCRAVLEDKPLWSMAYGYADFLLSILGEHDDVDFHGLVCIICPYTRPPLYDKENPKMGYVFYDAKFGNGKWIDGTGFIPVEFQSRWKPELAFQKDVLTDLAMSGPFSYSDDLKNTTIQAQYKFKFKWGGNLSYHQTIRNPCASDGQTPSTSRQSREVQIVDPLTMGPRYVFHSWDWRRGWLNDRTLKRLFKKPLDYEEYPKSPKRPRIFPPTEQLQEDPQEQERDSSSSEESLPTSSEETPPAHLLRVHLRKQLREQRDLRVQLRALFAQVLKTQAGLHINPLLLAPH

SEQ ID NO: 97 - protein, 167 aa, Alphatorquevirus sp.
MGKALRVFILNMFLGRVYRRKKGKVPLLAVQTLPKTPSMSHWRPPLRNVPYRERCWLEACLRAHDSFCGCPSPVIHFSSLVARFNLQGGPPPDDDSPQGAPLLRALPAPSPRRQTRTENPSGEPWPTPTGGAAGGGRGEVDGGAGGAADEYRAEDLDDLFAAIEGDQ

SEQ ID NO: 98 - DNA, 3843 bp, Alphatorquevirus sp.
cgggtgccgaaggtgagtttacacaccgcagtcaaggggcaattcgggctcgggactggccgggctatgggcaaggctcttagggttatcactctttaaaacatgtttttcggcagggtgtggagaaagaaaaggaaagtgccactgccaacactgccagtggtgccgcttccacaacctacacgtatgagcagccagtggagaccccctgttcacaatgtccaggggctggagcgaaattggtatgagtccttcttccgcagccatgcttgtttttgtggttgtggtgatgctgttactcatattaatcatctggcggctcgttttggacgtcctcctgctacctcaactccccgaggaccacagacaccttcagtgaccccgttaccggccctgccggccccggagcccacgcccgagccatggcgtggcgccggtggcgatggcggccgtggtggagacgccggaggcgccgccggtggagaaggagacggaggagacccagacgacgccgcgcttatcgacgccgtcgacctcgcagagtaaggaggcgcagggggcggtggaggcgcgcttatagacgttgggggcgacgcaggcgcagacgaagacacaaaaagaaacttgtactgactcagtggcagccagcaatagttaagaggtgctacataatagggtacgaccccataatagtgtgtggcattaacagaacttcttttaactacaccacacactcagaagactacacatacaacaatgacagctttggtgggggtctgtgcacaacccagtactcgctgagaattctctttcaagacaaactagcacaacacaacttctggaccaaaagcaacgaacacctagacctagctagatacctgggggcaacaataatattttttagacaccccactgtagactttttagtcagagtgagaacctctccaccctttacagacactgacatgacagcactaacactacatccaggcatgatgatgctagctaagaaaactataaagatacccagcttaaaaacaagaccctccagaaaacactttatcagaataaaagtaggggcccctaagttatttcaagacaagtggtacccacagaacgagctctgtgatgtaaccctcctaactgtacaggcaaccacagccgatttcacatatccgttcggctcaccactaacgaactcagtctgttgtaacttccaggtgcttaacagcaactatgacgaagcacttagcatacttaacacagctaacgtgctaacacaagaaatacatactaaaagacagcagtgctatacttttcttttacaacagtacagctactataacacaaagcaaacagtagcacaactcaaatttgacttctttcctaaacagaacccaaaaatgccaaaactaagcaatgctcaaacttcagaaacccctgaacaactaactaaaacaaatgtttcaacaacatacccacactgggactcactatatggtggcctagcatatggcttttcaccaactgcaaatagtgaaaacacaaaccaagcaaaagaccttgaaacccaaatgatagaagccaaccaattctatacaacagcaggcaaaaaactaataaaaggctttacacctataccacataacaataagaacaatacaaacatatttgactactacacaggcatgtactgtagcatatttctgtcctccggaaggtccaacccagaagttaaaggcagctatacagacatatcttacaacccactagtagacaaaggggtgggaaacatgatctggatagactggctgtcaaaacctgactccagatacgacccaaacaaaagcaaatgcttattaaaagactttcccctatggtgcatggtatacgggtacgcagactactgcagaaaagccacgggagactcagccatactactagactgcagagtagtcataaggtgcccttacacttaccctcaactaataagacacaacgacgaccagtggggcttcgtaccatacagcgagaactttggactgggtaggatgcccggagggaaccccaacccctctaccagaatgagactacactggtaccccatgctgctacaccagaccgaagtactagagtgcatagctcagagcggaccttttgcttaccacggggacgaacgcaaagctgtactgactatgaaatacaaatttagatggaactggggtggaaaccccgtgtttcaacaggttcttagagacccctgttcgggaacgtaccaggaaccccacaccagtagacaccctcgctcaatacaagtcactgacccgaaataccaagtcccagaatacctcttccacgcgtgggacttcaaaagaggactgtttagcactaaaagtattaagagagtgtcagaacaatcaatacatgatgaacttattacaggcagggcaaaaaggcccaaaaaagacacggggccagcgccccaagaagaggagcaaagagaaggctcgcctttcagagtccgagagctcagaccatgggtctcctccagccaggagacgcagagccaaagcgagcaagaagaaacagtccagaaaacggtgcgagaacaactacaagaccagctccagcagcagcgggtcatgggagtccaactcagaaacatctgcctccagctcgccagagtgcaagcggggcacagtctccaccccgctttccaatgccatgcataaacaaggtttttattttccctgacagggagcccaaaccacctccttccagcagagactggcaggaggagttcgaggcctgtaaagcctgggacaggcctgccagaaataacctcagcagtccccctttctacccctggatgcccagggagccccccacctgtcgtgtaaccttcaaacttggctggaaataaaattacaaggccgtgggagtttcacttgtcggtgtctgcttattaaagtcactaagcactccgagcgtaagcgaggagtgcgaccccctgccctgggcccacttcttcggagccgcgcgctacgccttcggctgcgcgcggcacctcagacccccgctcgtgctgacacgctcgcgcgtgtcagaccacttcgggctcgcgggggtcgggaattttgctaaacagactccgagttgccattggacactgtagccgtgaatcagtaacgaaagtgagtggggccagacttcgccataaggcctttatcttcttgccattggatggtgtagggggtcgccataggcttcggcctcggttttaggccttccggactacaaaaatggcgcattccgtgacgtcatggccgccattttaagtaaggcggaagcagctccactttctcacaaaatggcggcggagcacttccggcttgcccaaaatggcgggcaagctcttccgggtcaaagttcagcagctacgtcataagtcacgtgactggggaggtcgtgaacccggaagcttcctcgatcacgtgtcttgtcacgtgggtgctacgtcaccggcgccattttgttatacaaaatggccgacttccttcctcttttttgaaaaaaggcgccaaaaaacggctgcggcgggggcgcgcgcgctacgcgcgcgcgggggccccccccccgcggggggctccgcccccccggccccccccccgctatatacgtcactaaccacgtgactcgtttcagcgaaccacgagtctacgtgattcacttcctgggcgtggtttacgtcctcatataaggccgtgcacttccgaatggctgagttttccacgcccgtccgcagcggcacagcgacggaggagatctaccgcgtcccgaggg

SEQ ID NO: 99 - protein, 769 aa, Alphatorquevirus sp.
MAWRRWRWRPWWRRRRRRRWRRRRRRPRRRRAYRRRRPRRVRRRRGRWRRAYRRWGRRRRRRRHKKKLVLTQWQPAIVKRCYIIGYDPIIVCGINRTSFNYTTHSEDYTYNNDSFGGGLCTTQYSLRILFQDKLAQHNFWTKSNEHLDLARYLGATIIFFRHPTVDFLVRVRTSPPFTDTDMTALTLHPGMMMLAKKTIKIPSLKTRPSRKHFIRIKVGAPKLFQDKWYPQNELCDVTLLTVQATTADFTYPFGSPLTNSVCCNFQVLNSNYDEALSILNTANVLTQEIHTKRQQCYTFLLQQYSYYNTKQTVAQLKFDFFPKQNPKMPKLSNAQTSETPEQLTKTNVSTTYPHWDSLYGGLAYGFSPTANSENTNQAKDLETQMIEANQFYTTAGKKLIKGFTPIPHNNKNNTNIFDYYTGMYCSIFLSSGRSNPEVKGSYTDISYNPLVDKGVGNMIWIDWLSKPDSRYDPNKSKCLLKDFPLWCMVYGYADYCRKATGDSAILLDCRVVIRCPYTYPQLIRHNDDQWGFVPYSENFGLGRMPGGNPNPSTRMRLHWYPMLLHQTEVLECIAQSGPFAYHGDERKAVLTMKYKFRWNWGGNPVFQQVLRDPCSGTYQEPHTSRHPRSIQVTDPKYQVPEYLFHAWDFKRGLFSTKSIKRVSEQSIHDELITGRAKRPKKDTGPAPQEEEQREGSPFRVRELRPWVSSSQETQSQSEQEETVQKTVREQLQDQLQQQRVMGVQLRNICLQLARVQAGHSLHPAFQCHA

SEQ ID NO: 100 - protein, 147 aa, Alphatorquevirus sp.
MFFGRVWRKKRKVPLPTLPVVPLPQPTRMSSQWRPPVHNVQGLERNWYESFFRSHACFCGCGDAVTHINHLAARFGRPPATSTPRGPQTPSVTPLPALPAPEPTPEPWRGAGGDGGRGGDAGGAAGGEGDGGDPDDAALIDAVDLAE

SEQ ID NO: 101 - protein, 128 aa, Alphatorquevirus sp.
MGLLQPGDAEPKRARRNSPENGARTTTRPAPAAAGHGSPTQKHLPPARQSASGAQSPPRFPMPCINKVFIFPDREPKPPPSSRDWQEEFEACKAWDRPARNNLSSPPFYPWMPREPPTCRVTFKLGWK

SEQ ID NO: 102 - DNA, 3841 bp, Alphatorquevirus sp.
cgggtgccggaggtgagtttacacaccgcagtcaaggggcaattcgggctcgggactggccgggctatgggcaaggctcttagggtcttcattcttaatatgtttctcggcagggtctaccgccgcaagaaagggaaagtgccactgctggctgtgcagactctaccgaagacaccttccatgagtcattggcgaccccctcttagaaatgtcccctacagggaaagatgttggcttgaggcctgtctcagagcccacgattctttttgtggctgtcctagtcctgttattcatttttctagtctggttgcacgttttaatctacaaggaggcccgccgccagacgatgactccccgcagggcgcgccgctcctgagggccctgccggcaccgagcccccgcaggcagacccgtaccgagaacccttccggtgagccatggcctactcctactggtggcgccgccggaggtggccgtggagaggtagatggaggcgctggaggcgccgcagacgagtaccgcgccgaagacctcgacgacctgttcgccgctatcgaaggagaccagtaaggagaaaacgtcggtgggggaggcgagggcgacggcgccggtacgttagacgatacagacgtagactgactgtcagacgaaagagaaagaaactcaaactgagcgtgtggcagccccaaaatatcagatactgtgccataaaaggcctctttcccatcctcatctgcgggcacggaaagagcgccggcaactatgccatccactctgacgactttgtgaccagcagattctctttcgggggcggtctcagcaccacctcatactctctaaagctgctattcgaccagaacctcagaggactgaacaggtggaccgctagcaacgaccagctagacctagctaggtacctgggggccgtgttctggttctacagagaccagaagacagactacatagtgcagtatgacatctcagagccctttaagatagacaaagacagctccccttcctatcacccaggcatgatgatgagggccaaacacaaggtgctggtgcccagctaccagacctggcccaagggacgctctaaaatcaaacttaagataaagccccccaagatgttcgttgacaagtggtacacacaagaggatctctgtaacgttattcttgtgtcatttgcggtcagcctagcttccttccaacatccgttctgccgaccactaactgaaaacccttgcgtcagcttccaagttctgcaaaatttctacaacaatataataggctactcctcagcagacacattagttgaaaatgtgtttaactcttacttatactgcaaggcctccttttggcagagccatctcaccccctcttttgttaaaaaaattaacaacaaccccgatggcacaccaataagtgcaactgtagcttctatgcctagcatgacagactacaataactgggtgtcaaacacaaatagaggagctgggttttacaaccaaaatgtaaatgtccactacaattactgtcagtacaaccctgatgctaaccatctaacaaccctcagaaagtactactttttctgggagacctacccggcagctgctaagaagtctactacagcacacgtccccataaccaccacccaaccgacaaaaaactggtgggagtacagattaggcctgtacagtcccatctttctcagtccactcagaagcagcaacatagagtggcccttcgcatacagggacatagtgtacaacccactgatggacaaaggggtgggcaacatgatgtggttccagtacaacacaaaaccagacacccagttctctgtcacctcgtgcagagcagtgttagaggacaaacccctgtggtccatggcctacgggtacgcggactttctcctctccattctaggagaacatgacgatgtagacttccacggcctggtctgtatcatatgcccctacaccagaccgcccctctacgacaaggagaaccccaaaatgggctatgtgttctatgatgccaagttcggcaatggcaaatggatagatgggacagggttcatcccggtagagttccagagcaggtggaaaccagaactggccttccagaaagacgtactgactgacctagccatgtcaggccccttctcctacagcgacgaccttaaaaacaccacgatccaggcccaatacaaattcaaattcaaatggggcggtaatctctcttaccaccagacaatcagaaacccgtgcgcctcggacggacagacgcccagtaccagtagacagtctagagaggtacaaatcgttgacccgctcaccatgggaccccgatacgttttccactcgtgggactggcgacgtgggtggcttaatgacagaactctcaaacgcttgtttaaaaaaccgctcgattatgaagagtatccaaaatctccaaagagacctagaattttcccgcctacagagcagcttcaagaagacccacaagagcaagaaagagactcctcttcctcggaagaaagtctccctacatcgtcagaagagacgccgccagcccacctactcagagtacacctcagaaagcaactccgagaacagcgagacctccgagtccaactcagagccctattcgcccaagtcctcaaaacgcaagcgggcctacacataaaccccctattattggccccgcattaaacaaagtatacttcttcccagagagggcacctaaaccttctcccacctcgggggactgggccactgagtaccaggcggccgccgccttcgatagaccccctagaagtaacctctcagacacccccttctatccctggatgccaacaaacaccaaattctctgtaacctttaaactcggatggaaaccctgaataaaattcaaggccgtgcactgttcacttgtcggtgtctacctcttaaagtcaccaagcactccgagcgtcagcgaggagtgcgacccttccccctgactcaacttcttcggagccgcgcgctacgccttcggctgcgcgcggcacctcagacccccgctcgtgctgacacgctcgcgcgtgtcagaccacttcgggctcgcgggggtcgggaattttgctaaacagactccgagttgccattggatactgtagctgtgaatcagtaacgaaagtgagtggggccagacttcgccataaggcctttatcttcttgccattggtcagtgtcgggggtcgccataggcttcgggctcggttttaggccttccggactaccaaaatggcggattccgtgacgtcatggccgccattttgagtaaggcggaacaggctgtcaccccgtgtcaaaggtcaggggtcagccttccgctttacccgaaatggaggactaatgcttccgggtcaaaggtcaccgctacgtcataagtcacgtgaggatggctgctgtgaacccggaagtagctgacccgcgtgacttgtcacgtgacgtgtgcgtcatcgccgccattttgtatcacaagatggctgacttccttcctctttttcaaaaaataacggccctgcggcggcgcgcgcgcttcgcgcgcgcggcccggccagtcccgagcccgaattgccccttgactgcggtgtgtaaactcacccccggcccccccccgtcgtggatcgtcactaaccacgtgactctcacaggccaaccacagtctatgtcgtacacttcctgggcatggtctacgtgataatataagacggcgcacttccgaatggctgagttttcgccgcccgtccgcagcgagatcgcgacggaggagcgatcgagcgtcccgaggg

SEQ ID NO: 103 - protein, 759 aa, Alphatorquevirus sp.; identical to SEQ ID NO: 96

SEQ ID NO: 104 - protein, 167 aa, Alphatorquevirus sp.; identical to SEQ ID NO: 97

SEQ ID NO: 105 - DNA, 3841 bp, Alphatorquevirus sp.
cgggtgccgaaggtgagtttacacaccggagtcaaggggcaattcgggctcgggactggccgggctatgggcaaggctcttaaaaatgcacttttctaggtgcagtagaaagaaaaggaaactgtcactgctactactgcacccttcaaaaaaagctaggccatctgtgagaggtatgtggagacccccgactcgaaatgcattcaccattcaacgtgactggttctacagttgctttcactcccacgcttctatgtgtggctgtgctgattttattggtcatttcaatcatatcgctgctatgctcggccgtccggaagaccagaaccctcctccgccacccggggctctgagacccctacccgctctcccggcctcctccgaggcacccggtgatcgagcaccatggcctatgggtggtggtggaggcgacggaggcgcccgtggaggaggaggagatggcgccgctggagacgtcgccggagaccccgcagacgccgacctcgtcgccgctatcgacgccgcagaacagtaaggagacgcggcagggggaggtggactaagagatatagacgatggcgccgcaagggcaaacgcagaggcaaaaaaaaaattattataaaacagtggcagcccaactacactcgcagatgcaacatagtgggctacctgcctctcctaatctgtggggaaaatactgttgctacaaactatgccacccactccgacgatagctactaccccggaccctttggggggggaatgactacagacaaatttactctaagaatactctatgacgagtacaggaggtttatgaactactggaccgcctcaaacgaggacctagacctctgtagatacctaggagttactctatatgtgtttagacacccagaagtagactttatactaattataaatacctcccctccatttctagacacagaaataacagggcccagcatacaccccggtatgatggccctcaacaagagagccaggtggatacctagcttaaaaaacagaccaggcagaaagcactatgtaaagattaaagtaggagccccccgaatgttcacagataagtggtacccccagacagacctctgtgacatgacactcctaacgatctttgccagtgcggcggatatgcaatatccgttcggctcaccactaactgacactatagttgtgtcattccaagttctgcaatccatgtacaacgactgcctgagtatacttcctgataattttacagagacatcaggcaaaggcacccagctacataacaaaataattaaccatctgccctactacaacaccacacaaacacaagcacaatttaaaagatttgtagaaaacatgacagcaaccaatggagacaatgtatgggcaaactacataaacacaacaaagttctcacaagtacaaaacccaaaaaatgacacaggcattggaggcccttacacctcatattcagactcatggtacaaaggcatagtatataatgagaaaattacaaagatacctgaaaaagcaagtaaactatactacgaggaaaccaaacaactaattggcattacattcacaggatccacacacagactccattactgtggaggcctatactcctccgtatggctatcagcaggtagatcctactttgaaaccaaaggcccatacacagacataacctacaaccccttttcagacagaggagaaggtaatatgctatggatagactggctaactaaagatgactcagcctactcaaaaacaagtagcaagtgcctcatagagaacttacccctgtgggcctcagtatacggatacaaagagtactgcagcaaagtaacaggagatacaaacatagaacacaactgtagatgtgttatcagaagcccctacacagttccacaactgttagaccacaacaatcccctcagaggctacgtgccttacagctttaactttggaaatggtaaaatgccaggcggtagcagcctagtgcccattagaatgagagccaagtggtaccccactctgttccaccaaaaagaagtactagaggccatagcacaggcaggcccctttgcatatcactcagatatgaaaaaagtgtcccttggcataaagtacagatttaagtgggtgtggggtggcaaccccgtgtcccaacaggttgttagaaacccctgcaagaccacccaaggttcctcgggcaatagagtgcctcgatcaatacaagtcgttgacccgcggtacaacacaccagaactcacgatacacgcgtgggacttcagacatgggttctttggcagaaaagctgttaagagaatgcaagaacaaccaatccctcatgaaactttttcagcagggttcaagcgcagtcgccgagatacagaagcactccaatccagccaagaagaacaacaaaaagaaaacttacttttcccagtccagcagctcaagcgagtccccccgtgggagacctcgcaagagagccaaagcgaggaagaaaactcgcaaaaacaggagaccctctcccagcaactcagagagcagctgcacaagcagcgactcatgggagagcaactccgatcgctcctctaccaaatgcaaagggtccagcaaaatcaacacataaaccctatgttattgccaaagggtctggcattaacctctatttctcacaatgtaatatagatatgtttggtgaccccaaaccctacaacccctcctccaatgactggaaggaggagtacgaagccgcaaaacagtgggacagaccccccagacacgacctgaggagcacccccttctacccctgggcccccacccccaaaccatacaatgttagctttgccctcaactacaaataaacggtggccgtgggagtttcacttgtcggtgtctacctcttaaggtcactaagcactccgagcgtcagcgaggagtgcgacccttcaccaaggggcaactccctcgaagtccggcgctacgcgcttcgcgctgcgccggacatctcggaccccccctcgacccgaatcgcttgcgcgattcggacctgcggcctcgggggggtcgggggctttattaaacggactccgaggtgccattggacactgagggggtgaacagcaacgaaagtgagtggggccagacttcgccatagggcctttatcttcttgccatttgtccgcgaccgggggtcgctcctaggcgcggaccccgtttcggggtccttccgggttcctcggcgccgttccagtgacgtcacgggcgccatcttaagtggctgtcgccgaggattgacgtcacagttcaaaggtcatcctcggcggtaaccgcaaagatggcggtcaatctcttccgggtcaaaggtcgtgcatacgtcataagtcacatgacaggggtccgcttaaacacggaagtgggccccgacatgtgactcgtcacgtgtgtacacgtcacggccgccattttgtgtcacaaaatggccgacttccttcctcttttttaaaaaaaggcgcgaaaaaaccgtcggcggggggggccgcgcgctgcgcgcgcggcccccccccccccccccccccccccccccccgcgcgcatgcgcgcgggtccccccccctccggggggctccgccccccggccccccccgtgctacgtcactaacctacgtgtccgcctcccataggccggacacagtctacgtcatacacttcctgggcatggtctacgtgataatataagtggctgcacttccgaatggctgagttttccacgcccgtccgcagagagggagccacggaggggatcccgaacgtcccgaggg

SEQ ID NO: 106 - protein, 767 aa, Alphatorquevirus sp.
MAYGWWWRRRRRPWRRRRWRRWRRRRRPRRRRPRRRYRRRRTVRRRGRGRWTKRYRRWRRKGKRRGKKKIIIKQWQPNYTRRCNIVGYLPLLICGENTVATNYATHSDDSYYPGPFGGGMTTDKFTLRILYDEYRRFMNYWTASNEDLDLCRYLGVTLYVFRHPEVDFILIINTSPPFLDTEITGPSIHPGMMALNKRARWIPSLKNRPGRKHYVKIKVGAPRMFTDKWYPQTDLCDMTLLTIFASAADMQYPFGSPLTDTIVVSFQVLQSMYNDCLSILPDNFTETSGKGTQLHNKIINHLPYYNTTQTQAQFKRFVENMTATNGDNVWANYINTTKFSQVQNPKNDTGIGGPYTSYSDSWYKGIVYNEKITKIPEKASKLYYEETKQLIGITFTGSTHRLHYCGGLYSSVWLSAGRSYFETKGPYTDITYNPFSDRGEGNMLWIDWLTKDDSAYSKTSSKCLIENLPLWASVYGYKEYCSKVTGDTNIEHNCRCVIRSPYTVPQLLDHNNPLRGYVPYSFNFGNGKMPGGSSLVPIRMRAKWYPTLFHQKEVLEAIAQAGPFAYHSDMKKVSLGIKYRFKWVWGGNPVSQQVVRNPCKTTQGSSGNRVPRSIQVVDPRYNTPELTIHAWDFRHGFFGRKAVKRMQEQPIPHETFSAGFKRSRRDTEALQSSQEEQQKENLLFPVQQLKRVPPWETSQESQSEEENSQKQETLSQQLREQLHKQRLMGEQLRSLLYQMQRVQQNQHINPMLLPKGLALTSISHNVI

SEQ ID NO: 107 - protein, 159 aa, Alphatorquevirus sp.
LAGLWARLLKMHFSRCSRKKRKLSLLLLHPSKKARPSVRGMWRPPTRNAFTIQRDWFYSCFHSHASMCGCADFIGHFNHIAAMLGRPEDQNPPPPPGALRPLPALPASSEAPGDRAPWPMGGGGGDGGARGGGGDGAAGDVAGDPADADLVAAIDAAEQ

SEQ ID NO: 108 - protein, 57 aa, Alphatorquevirus sp.
MFGDPKPYNPSSNDWKEEYEAAKQWDRPPRHDLRSTPFYPWAPTPKPYNVSFALNYK

SEQ ID NO: 109 - DNA, 3839 bp, Alphatorquevirus sp.
cgggagccgaaggtgagtttacacaccgcagtctaggggcaattcgggcacgggtctggccgggctatgggcaaggctcttaaaaaattaccccggtgtgttctccgccaggacaacaagtcatgccgtggcgaccgccggtgcataacatcccgggtagagaaaatcaatggtttgcaagcttctttcacgggcatgcttctttttgcggttgtggtgaccctgttgggcatcttaacggcattgctcatcgctttcctcacgccgctccaccgagaccacctccagggctagagcagccaaacctcggagggccggaaggtcccggaggtcccccggcacccctgccagctctgcctgccccggcagagcccgacccggcaccacgccgtggtggtggggccgatggaggcggcgccgctggggccgccgccgccgcagaccatggaggatacgacgaaggagatctagaagatcttttcgccgccgcggccgaagacgatatgtgagtaggcgggggcgccgccgcagattctggcgcagacgcagacggggcagacgcagggggcgacgaaagacacacaaacccactattgtactcagacagtggcaacctgacgtagtgagaccctgcaaaataacaggatggatgccccttattatctgtgggtcaggaagcacccagttcaacttcataacccacatggatgactttccccccatgggctacacctacgggggcaattttacaaatgtaaccttctcattagaggccatatatgaacaatttctttaccacagaaacagatggagctcctccaaccatgacctagaccttgccaggtaccagggaaccaccctaaaactatacagacacgaatacctagactacatagtcagctacaacagaacaggcccttttcagatcagcgacatgacctacctcagcactcaccctgctatgatgctacttcaaaaacatagaatagtagtacccagctttaaaacaaagccaagggggcgcaggtccataaaaattagaataaagcccccaaaactaatgctaaacaagtggtacttcacaaaagacatttgcagcatgggactcttccaactacaggccacagcatgcaccttaaacaacccctggctcagagacaccaccaagagccctgtcataggctttagagtccttaaaaactcctactactcagacctttctaacttagcagatgaagagtctgagaacagaaggcgaggaattattaaccacctccacccacaaacactaacaggctcaccaccaaatgccaaaggatgggaaatcacttacacaagactaatgggacccacatactacaaatcagtaccaagcagcacatacaattggctaaattatcaaacacactatgctacagtttataatgcgtttgcaaaagaaaaaagcgcaaaattagacacaataaacaaggaataccattaccactaccccacatatgcaataaaagactttaaaacaaattcaacacttacacatgactatggcatatacagtccctactacttaacaccaaccagaataagcttagactggcaaacaccatggacatatataagatacaacccactagcagacaaaggcctaggaaacatagtatacgctcagtggtgctcagaaaaaacacccaatgtcagcacaactaaaagcaaatgcataatgaaagacctaccactatggtgcatattctatggctacataaactgggtaattaaaagcaccggagtaagctccgctgctacagacatgagaataatgataataagtccttacactgacccagcacttatagggtcaactccagaccaaggctttctgccagtaagtgacaccttttgcaatggagacatgccgtttcttgcaccatatgtgccaatcaagtggtgggttaactggtacccttgcattgcacaccaaaaggaagtgtttgaggcaattgttaactgtggaccgttcgtcccacgagaccagacgaaaccctcttgggaaattaccttaggttacaaaatgaactggaaatggggtggctctcccctgccttcacaggcaatcgacgacccctgccagaagcccacccatgagcttcccgaccccgatagacaccctcgcatgctacaagtctcagacccgacaaagctcggaccgaagacagtgttccacaagtgggactggagacgtgggatgcttagcaaaagaagtattaaaagagtccaagaagactcaagcgatgatgaatatgttgcagggcctttaccacgaaaaagaaacaagctcgacaccaggaccgcaggtcttcaaacccccgaaaaagaaagttacactttactccaagccctccaagactcggcggaagagagcccctcgagccaagaacaagcaccccaagaagaaaaccaaaaagaggcgctcctacagcagctcgagctccaaaagcagcaccagcgagtcctcaaacgaggcctcaaactcctcctgggagacatcctccgactccgccgaggagtccactgggaccccctcctgtcctaattcagggtccttctatcccagacctgcttttccctaacacacaaaaaaaaaaactattttccaactacgactgggtgtgcgagtacgagctggccaaatgcatggatcgccccttgcggcactacccatcagacccccctcactacccctggctaccaaaaaagcctgctacccctcctacatgtagagtaagtttcaaattaaagctcgatgcctaaaattcaaggccgtgggtgtttcacttcatcggtgtctacctctaaaagtcactaagcactccgagcgtaagcgaggagtgcgacccccctgcccggtagcaacttcctcggggtccggcgctacgccttcggctgcgccggacgcctcggaccccccctcgacccgaatcgctcgcgcgattcggacctgcggcctcgggggggtcgggggctttactaaacagactccgaggtgccattggacactgagggggtgaacagcaacgaaagtgagtggggccagacttcgccataaggcctttaactttgggtcgcttgtcagcggcttccgggtccgcatgggggccgccattttagcttcggtcgccattttaggccctcgcggggctccgtagtcgcatattagtgacgtcacggcagccatcttagtcgtgacgtcaaagtcacgtggggagggcggcgtgtaacccggaagtcatcctcatcacgtgacctgacgtcacggccgccattttgtgctgtccgccatcttgtgacttccttccgctttttgtaaaaaaaagaggaagtatgacgttgcggcgggggggcggcgcgcttcgcgcgccgcccaccagggggcgctacgcgcccccccccgcgcatgcgcgggtcccccccctcggggggggctccgcccccccggccccccccccgcgcttaatccaccgcgcatgcgcaaccacgcccccgccgccattttgtgcagcccgccaattttattttaaacagaccaatcagctactacttcgtgcacttcctggggcgtgtcctgccactgtatataaacagaagcggtgacgaatggtagagttttttctcgcccgtccgcggcgagagcgcgagcgaagcgagcgatcgagcgacccgtgggcgggagccggaggtgagtttacacaccgcagtctaggggcaattcgggcacgggtctggccgggctatgggcaagccgcggcgagagcgcgagcgaagcgagcgatcgagcgacccgtggg

SEQ ID NO: 110 - protein, 645 aa, Alphatorquevirus sp.
MPLIICGSGSTQFNFITHMDDFPPMGYTYGGNFTNVTFSLEAIYEQFLYHRNRWSSSNHDLDLARYQGTTLKLYRHEYLDYIVSYNRTGPFQISDMTYLSTHPAMMLLQKHRIVVPSFKTKPRGRRSIKIRIKPPKLMLNKWYFTKDICSMGLFQLQATACTLNNPWLRDTTKSPVIGFRVLKNSYYSDLSNLADEESENRRRGIINHLHPQTLTGSPPNAKGWEITYTRLMGPTYYKSVPSSTYNWLNYQTHYATVYNAFAKEKSAKLDTINKEYHYHYPTYAIKDFKTNSTLTHDYGIYSPYYLTPTRISLDWQTPWTYIRYNPLADKGLGNIVYAQWCSEKTPNVSTTKSKCIMKDLPLWCIFYGYINWVIKSTGVSSAATDMRIMIISPYTDPALIGSTPDQGFLPVSDTFCNGDMPFLAPYVPIKWWVNWYPCIAHQKEVFEAIVNCGPFVPRDQTKPSWEITLGYKMNWKWGGSPLPSQAIDDPCQKPTHELPDPDRHPRMLQVSDPTKLGPKTVFHKWDWRRGMLSKRSIKRVQEDSSDDEYVAGPLPRKRNKLDTRTAGLQTPEKESYTLLQALQDSAEESPSSQEQAPQEENQKEALLQQLELQKQHQRVLKRGLKLLLGDILRLRRGVHWDPLLS

SEQ ID NO: 111 - DNA, 3838 bp, Alphatorquevirus sp.
cgggtgccgaaggtgagtttacacaccgcagtcaaggggcaattcgggctcgggactggccgggctatgggcaagactcttagggttatcgctttttaaaacatgtttctcggcagggtctggagaaagaaaaggcaagtgccactgccaacactgcgagtggtgtcgctaccacaacctccacctatgagcagccagtggagacccccggttcacaatgtccaagggctggagcgcaattggtgggagtgcttcttccgtggtcatgcttgcttttgtggttgtggtgatgctattactcatattaatcatctggcgtctcgttttggacgtcctcctgctacctcaactccccgagggccgcagccacctccagtgaccccgttcccggccctgccggccccggagcctagcccagagccatggcgtggcgccggtggcgatggcggccgtggtggagacgccggaggcgccgccggtggagaaggagacgccggaggcccagacgacgccgcccttatcgacgccgtcgaactcgcagagtaaggaggcgcagggggcggtggaggcgcgcttacagacgttgggggcgacgcagacgcagacgcagacacaaaaagaaactggtactgactcagtggcagccccctatagttaagaagtgcctaataatagggtacgacccccttataatctgtggcataaacaggacagcttttaactacactacacactcagaagatttcacttttaacaacgagagctttggagggggaatatgcacagcacagtacacactaagaatactattccaagagaagctggcccaacacaacttctggacggccagcaacgaggacctggacttggccaggtacctgggtggagtactaatactgttcagacacccaacagtagattttttagtaagagtgcgcaccagtcctccattcaatgacacagacatgactgctctcactctgcacccaggcataatgatgctcagtaaaaaggttattaaggtacccagccttaaaaccaggcccagcaaaaaacactatataaaaataaaattcggagcccctaaactgtttgaagacaagtggtacccccagaacgagctatgtgatgtaactctagtcagcatacaggcaaccgcagctgatttccaatatccgttcggctcaccactaacgaactcagtctgttgcaacttccaggttcttaacagcaactatgacaaagcacttagtatacttaacactactcaggtaacagaagaactgcatactaaaagacaacaatgttataattttcttttacaacaatacagctactacaacacaaaacagacactagctcaacttaaatttaacttttttccaaaacagaaccccaaaatgccaacattagacaatgcagactcatctaaacctccagagtctctcactaaatctaacgttactgagaactacccacactgggactctctatatggtggcctagcatatggctttacatctacctctcatagtgaaaacacaaaccaagcaaaagacttacaaaaccaaatgataaacgcaaacactttctatacaaaagcaggcaaacaactaataaagggattcacacccatacagcatgacagtcacccaaacacaaacatctttgactactacacaggtatgtactgtagcatatttctatcctccggaaggtccaacccagaagttaaaggcagctatacagacatatcttacaacccactcacagataaaggtgtaggcaacatgatatggatagactggctaaacaaaccagacagcatatacgaccccgctaagagcaaatgcctactaaaagactttcccttgtggtgcatggtatacgggtacgcagactactgcagaaaagccacaggagactcagccatactactagacagcagagtagtaataagatgcccgtacacataccctcagcttataaaacacaacaatgaaaactgggggttcgtcccctatagcgaaaactttggactgggtagaatgcccgggggcaatccaaacccctcgaccagaatgagactacactggtacccaacgctgctacaccagatggaagtattagagtgcttggcacagaccggaccgtttgcctaccacggagacgagagaaagactgtactgactgctaaatacaagttcagatggaagtggggaggaaaccctgtctttcaacaggttcttagagacccctgcacaggaggtgccgtggcgccccacaccagtcgacaccctcgcgcaatacaagtctttgacccgaagtaccaagccccggagtacctgttccacaagtgggacttcaggaggggactctttagcactaaaggtattaaaagagtgtcagaacaaccaacaaatgatgagtttcttacaggccgcagcaagagacccaagaaagatacaggggccccgctccaagaagaggagcaaaaagaagactcgcatttcagactcccccagctcagaccctggctcccctccagccaggaaacgcagagccaaagcgaagaagagcagcagacacgcagcacaacactacaagaacaattacagcaacagctccagcaacagcgactcatgggagtccaactccgagacgtctgtctccagctcgcaagagtccaagcggggcacagtctccaccccgttttccaatgccatgtataaacaaggtgtttatatttcctgagagggagccaaagaagccccctaccagcaaagactggcaggaagaatttgaggcctgtaaacactgggacaggcctgctagacctagcttagatagaccccctttctacccttggatgcccagggaacccccaacctgtcgtgtaaccttcaagcttggctggcaataaaattacaaggccgtgggagtttcacttgtcggtgtctgcttattaaggtcactaagcactccgagcgtaagcgaggagtgcgaccccctgccctgggcccacttcttcggagccgcgcgctacgccttcggctgcgcgcggcacctcagacccccgctcgtgctgacacgctcgcgcgtgtcagaccacttcgggctcgcgggggtcggaaattttgctaaacagactccgagttgccattggacactgtagctgtgaattagtaacaaaagtgagtggggccagacttcgccataaggcctttatctttttgccattggatagtgtagggggtcgccataggcttcagcctcagttttaggccttccggactacaaaaatggcggattccgtgacgtcatggccgccattttaagtaaggcggaagcagctccactttctcacaaaatggcggcggagcacttccggcttgcccaaaatggcgggcaagctcttccgggtcaaaggttaagcacctacgtcataagtcgcgtgactggggaggccttgaacccggaagcttcctcgatcacgtgtcttgtcacgtgggcgctacgtcaccggcgccatcttgttttacaaaatggccgacttccttccggttttttgaaaaaaggcgccaaaaaacggctgcggcgggggcgcgcgcgctacgcgcgcgccccccccccccctcggggggctccgccccccggccccccccggtgtatgcgtcactaaccacgtgactcgttccagcgaaccacgagtctacgtgattcacttcctgggcgtggtttacatcctcatataagaccgtgcacttccgaatggctgagttttccacgcccgtccgcagcgagaacgcaacggaggagcgaccgcgcgtcccgaggg

SEQ ID NO: 112 - protein, 769 aa, Alphatorquevirus sp.
MAWRRWRWRPWWRRRRRRRWRRRRRRPRRRRPYRRRRTRRVRRRRGRWRRAYRRWGRRRRRRRHKKKLVLTQWQPPIVKKCLIIGYDPLIICGINRTAFNYTTHSEDFTFNNESFGGGICTAQYTLRILFQEKLAQHNFWTASNEDLDLARYLGGVLILFRHPTVDFLVRVRTSPPFNDTDMTALTLHPGIMMLSKKVIKVPSLKTRPSKKHYIKIKFGAPKLFEDKWYPQNELCDVTLVSIQATAADFQYPFGSPLTNSVCCNFQVLNSNYDKALSILNTTQVTEELHTKRQQCYNFLLQQYSYYNTKQTLAQLKFNFFPKQNPKMPTLDNADSSKPPESLTKSNVTENYPHWDSLYGGLAYGFTSTSHSENTNQAKDLQNQMINANTFYTKAGKQLIKGFTPIQHDSHPNTNIFDYYTGMYCSIFLSSGRSNPEVKGSYTDISYNPLTDKGVGNMIWIDWLNKPDSIYDPAKSKCLLKDFPLWCMVYGYADYCRKATGDSAILLDSRVVIRCPYTYPQLIKHNNENWGFVPYSENFGLGRMPGGNPNPSTRMRLHWYPTLLHQMEVLECLAQTGPFAYHGDERKTVLTAKYKFRWKWGGNPVFQQVLRDPCTGGAVAPHTSRHPRAIQVFDPKYQAPEYLFHKWDFRRGLFSTKGIKRVSEQPTNDEFLTGRSKRPKKDTGAPLQEEEQKEDSHFRLPQLRPWLPSSQETQSQSEEEQQTRSTTLQEQLQQQLQQQRLMGVQLRDVCLQLARVQAGHSLHPVFQCHV

SEQ ID NO: 113 - protein, 147 aa, Alphatorquevirus sp.
MFLGRVWRKKRQVPLPTLRVVSLPQPPPMSSQWRPPVHNVQGLERNWWECFFRGHACFCGCGDAITHINHLASRFGRPPATSTPRGPQPPPVTPFPALPAPEPSPEPWRGAGGDGGRGGDAGGAAGGEGDAGGPDDAALIDAVELAE

SEQ ID NO: 114 - protein, 129 aa, Alphatorquevirus sp.
LAPLQPGNAEPKRRRAADTQHNTTRTITATAPATATHGSPTPRRLSPARKSPSGAQSPPRFPMPCINKVFIFPEREPKKPPTSKDWQEEFEACKHWDRPARPSLDRPPFYPWMPREPPTCRVTFKLGWQ

SEQ ID NO: 115 - DNA, 3833 bp, Alphatorquevirus sp.
cgggtgccggaggtgagtttacacaccgcagtcaaggggcaattcgggctcgggactggccgggccccgggcaaggctcttaaaaaatgcactttcgcagagtgcgagcgaaaaggaaactgctactgcaagctgtgcgagctccaccgaagacacctgccatgagcttcgtgacacccagcattaatgcctcagtccgagagcagcaatggttcgagtctatccttagatctcaccactcgtactgtggctgtggtgatcccgtgcttcattttactaaccttgctactcgctttaactatttgcctgctacctcttcgcctctggaccctcccggcccagcgccgcgaggccgcccggcgctccgccgcctcccggcgctcccttcagcccccgcgaccccttctagagaaccagcatggcctactggttcagaaggtggggctggaggccgaggcgccggtggagaaggtggcgccgccgtcgaaggagactaccgagaagaagaactagacgagctgttcgcggccttggaagaagacgcaaaccaagggtaaggaggcgccgcagacctcgcagacgtacctacaggcgggggtggagacgcaggaggtacataagacgtgggcgacgcaaaaagaaactcgtactgactcagtggaacccagcagtagttaagagatgcaacattaagggcggacttccaataattatatgcggagagcccagggcagcctttaactatggctaccacatggaggactatactcctcaacctttccccttcggagggggaatgagcacagtgactttctctctgaaaggcttgtatgaccagtacgttaaacaccaaaacaggtggactttctcaaacgaccagctagacctggccagatacaggggctgtaaactaaggttctacagaagccccgtctgtgactttatagtacactacaacctaatacctccactaaaaatgaaccagtttacaagtcccaacacgcacccgggactactcatgctcagcaaacacaagataataattcccagctttcaaacaagacccgggggcaaacgctttgttaaaataagactcaatccccccaaactatttgaagacaagtggtacactcagcaagacctttgcaaggttccgctcgttagtattacagcaactgcggctgacttgcggtatccgttctgctcaccacaaacgaacaacccttgcaccaccttccaggtactgcgcaaaaactacaacacagttataggaacttccactaaggaccaagaatccacacaagactttgaaaactggttatatctcacaccatctcactatcaaacatttgccacagaagagacactaggcagaatacctaatacatttccagatggaagcactaacacagaaaaacacacatggcaaaacgcatggtctaaaacaggagaagcctactcaccacaagcataccctcagaccacaataacaggtatgcaagcaagtggcactataaactcaagcacaggacaaatgtacaaagtgccatatgacagtaacttcggctttgccacttacataccacaaacaagatacatatattctagaagacaaaaaaacttctactatgaaatcaataatcccataagtaaaaaaatctggccacaacccagtacaacaacacccacagtagattactatgaatacagactgggatggttcagtaacatatttataggccccaacagatacaacttacagtttcaaacagcatacgtagacaccacatataacccactcatggacaaaggcaagggcaacaaaatatggttccaatacctaagtaaaaaaggcacagactacaatgaaaaacaatgctactgtacccttgaagacatgcccctctgggcaatgtgctttgcatacacagactatgtagagagtcaactaggaccaaatatagaccatgaaacagctggactaataattataatctgtccctacactcaaccaccaatgtatgacaaacagaagcctaactggggatacgtagtatatgacacaaactttggcaatggaaaaatgccctccggaagtggccaagtaccagtatactggcaatgcagatggaggcccatgctatggttccaacagcaagtactaaatgacatctcaaagactggaccatacgcctacagagacgagtataaaaatgtacagctgaccatgtactacaacttcgtatttaactgggggggggcgacatgtattacccacaggtcgttaaaaacccctgtggagacaccggaatcgttcccggttccggtagattcactcgagaagtacaagtcgttagcccgctttccatgggaccggcctacatcctccactacttcgactccagacgcgggttctttagtgaaaaagctcttaaaagaatgcaacaacaacaagaatttgatgaatcttttacattcaaacctaagagacccaaactttctacagcagccacagaaatcctccagctcgaagaagactcgtgttcaggggaaggaaaatcgccactacagcaagaagagaaagaagcagaagtcctccaaacgccacaagtacagctccagctccagcgaaacatccaggagcagctcgcaatcaagcagcagctccaattcctcttgctccaactcctcaagacccaatccaatttgcatttaaacccacaatttttaagccctccataacctatgacatgtttggggacccccttcctcaccccccaacagcccaagactgggaaacagagtaccagtgctgtaaggcctttaacagaccacctagaaccaacctaaaagacacccccttctacccctggatgcccaaacctatacctcaattccgtgtatcttttaagcttggttttcaataaacaaggccgtgggagtctcacttgtcggtgtcaacctcttaaggtcaccaagcactccgagcgtaagcgaggagtgcgaccctcccccctggaacaactccctcgaagtccggcgctacgcgcttcgcgctgcgccggacatctcggaccccccctccacccgaaacgcttgcgcgtttcggaccttcggcgtcgggggggtcgggggctttactaaacagactccgaggtgccattggacactgagggggtgaacagcaacgaaagtgagtggggccagacttcgccataaggcctttatcttcttgccatttgtcagtgtcgggggttgccataggcttcggcctcggttttaggccttccggactaccaaaatggcggatttcatgacgtcatggccgccattttaggctgttgccgggcgtttgacttccgtgttaaaggtcaaacacccggcggcaccacaaaatggccgtcaatttgttccgaagtcaaaggttaccgctacgtcataagtcacgtggtagggaggagcgaccaacccggaagtcatcctcacccacgtgacttaccacgtggtgtgtacgtcacacgccgccattttaaatcacaaaatggcgtacttccttccgctttttcaaaaaaaacggccctgcggcggcgcgcgcgcttcgcgcgcggtgtctccacaggggtttttaacgacctgtgggtaatacatgtcgcccccccccccgaagtccgtcactaaccacgtgactcccgcaggccaaccgagtgctatgtcgtccacttcctgggcggagtctacgtcctcatataagtaagtctacttccgaatggctgagttttccacgcccgtccgcagcgagaacgccacggaggggagtccgcgcgtcccgaggg

SEQ ID NO: 116 - protein, 765 aa, Alphatorquevirus sp.
MAYWFRRWGWRPRRRWRRWRRRRRRLPRRRTRRAVRGLGRRRKPRVRRRRRPRRRTYRRGWRRRRYIRRGRRKKKLVLTQWNPAVVKRCNIKGGLPIIICGEPRAAFNYGYHMEDYTPQPFPFGGGMSTVTFSLKGLYDQYVKHQNRWTFSNDQLDLARYRGCKLRFYRSPVCDFIVHYNLIPPLKMNQFTSPNTHPGLLMLSKHKIIIPSFQTRPGGKRFVKIRLNPPKLFEDKWYTQQDLCKVPLVSITATAADLRYPFCSPQTNNPCTTFQVLRKNYNTVIGTSTKDQESTQDFENWLYLTPSHYQTFATEETLGRIPNTFPDGSTNTEKHTWQNAWSKTGEAYSPQAYPQTTITGMQASGTINSSTGQMYKVPYDSNFGFATYIPQTRYIYSRRQKNFYYEINNPISKKIWPQPSTTTPTVDYYEYRLGWFSNIFIGPNRYNLQFQTAYVDTTYNPLMDKGKGNKIWFQYLSKKGTDYNEKQCYCTLEDMPLWAMCFAYTDYVESQLGPNIDHETAGLIIIICPYTQPPMYDKQKPNWGYVVYDTNFGNGKMPSGSGQVPVYWQCRWRPMLWFQQQVLNDISKTGPYAYRDEYKNVQLTMYYNFVFNWGGATCITHRSLKTPVETPESFPVPVDSLEKYKSLARFPWDRPTSSTTSTPDAGSLVKKLLKECNNNKNLMNLLHSNLRDPNFLQQPQKSSSSKKTRVQGKENRHYSKKRKKQKSSKRHKYSSSSSETSRSSSQSSSSSNSSCSNSSRPNPICI

SEQ ID NO: 117 - protein, 156 aa, Alphatorquevirus sp.
MHFRRVRAKRKLLLQAVRAPPKTPAMSFVTPSINASVREQQWFESILRSHHSYCGCGDPVLHFTNLATRFNYLPATSSPLDPPGPAPRGRPALRRLPALPSAPATPSREPAWPTGSEGGAGGRGAGGEGGAAVEGDYREEELDELFAALEEDANQG

SEQ ID NO: 118 - DNA, 3833 bp, Alphatorquevirus sp.
cgggtgccggaggtgagtttacacaccgaagtcaaggggcaattcgggctcgggactggccgggccccgggcaaggctcttaaatagctatgttttttggtaggcctcacagaaagaagaggtcactgttactgcctagcctgcctactgcaaagaaaaaaccacctatgagtctctggaggcctccactacacaatgtcccggggatcgagcacctctggtacgactcaatgcatcgtagccatgctgctatttgcggctgtagcgattttatacgccatattactactcttgctgaaagatatggcgtcccggggaggcagagaccttctggggcacctggagtagggggcaacccttccgatccctctatccgtcgagcccgccatccggcggccgctccggaccccccagcaggtaaccagcctccggccctgccatggcatggggatggtggaaacgaaggcggcgctggtggtggagaaaacgatggacccgtggccgacttcgcagacgatggcctagaagaactcgtcgccgccctcgacgacgaagagtaaggagaaggaggaggtggaggagagggcgacccaggcgcagactgtacagacggtacagacgttacagacgaaaaagaaagagggcaaaactgactataagacagtggcaacccgccactactagaagatgcagaataagagggtttatgcccgccataatgtgcggctggggagcttactcaaaaaactataccagtcacttagaagacaaactgagcaaaggaccttacgggggtgggcacagcaccatgagattctccctagcagtgttctacgaagaacacttaaaaaaccacaactactggacttacagtaacaaagacctagaactggccctttactatggcaccaccataaagttttacagagacccacacactgactttatagccacatacaacagaaaaagccccctagggggaaacagactgacgggaccgtccctacaccctggagccatgatgcttcaaaaaaacaaaatactaataccaagcctacaaacaaaacccaaaggaaaaaaaacagtaactgttaatatagcacctccaacactattcacacacaaatggtactttcaaaaagacatatgtcaaactacactgtttaacttgaacgttgctgcggctgacttgcggtttccgttcggctcaccacaaactgacaacatttgtgtaacgttccaagtactaagctccgcctataacgacttcctttctgtggtcagcacagaagatgacaaaacattgttccgcaaattcttaaattctgtaatgccaggcacatctgctagaaaagctaatattttaaacacttataaaacagaaggcaactactctcatccacaacttaaaaaatacaaacgaccatcaaactttaatgaccaaacaacatactttttaacaccagacggactatggggagacagcatatatgtttacaatggagactctcctaacacagcacaaactgtttcaaatgtaattgaaacaataatttctaacgcagaaaactactttaaaaagctacaaaatgaaccacaagtaacacaaggcagactattacacacacacttaacaggaatatactcctctacatttttaaacccaggcagagtagcccaagaatttcctggactgtacacagacataatatacaatccctgggtagacaaaggcacaggcaacagagtgtggctagacagtataactaaaacaaataacctatacatagaaggtcaaagcatagtgctactagaaaacatgcccctatggtgtatgttaaatggatacatagactgggcaaaaaaagaaaccaacaactggggcctaccatccatatacagactactaatagtatgcccctacacctatcctagcctttatcacactacaaacaaaaactatggctttataccatacgcaaccacctttggggcaggacagatgccagacaaagacccctacgttccagtaaactggagaggaaagtggtatccacacatactacaccaacaagcagtaatagaagacatagtaatatcaggaccattcgcacctaaaacagtcactccaaacatgcaactaaacatgaaatacacagccagatttaaatggggtggtaaccctatctccacacagattgttacagacccgtgcacacagtccaccttcgacatacccgctggcggtaacatccctgggagagtacaagtcctcaatccgaaattactcgggccaaactattccttcagatcctttgacatcagacgtgacttctttagcgcgacgagtattaaaagaatcgcacaacaaccagaaacttctgaagatttattcgcaggtggcaaacgccccagaatcgacctcccaaagtacgaaccgccagaagaaaactacagtacgaaacaaagagaaccgaggccgtgggagacgtcaagcgaaagcgaagcagaagtccaagagcaaaaagaggaggcgacatcggtccgagagcagctccagcagcagctccaagagcagcttcaactccgaagaggactcaagtgcctcttcgagcagttgataagaacccagcagggagtccacgtaaatcctatcctaacgtaggccctagtcagtggctatttccagagagaaaaccaaaaccccctccatcggcaggagactgggccatggagtacctggcctgcaaaatattcaacaggcctccccgtacacacctcacagaccctcctttctacccctactgcaaaaacaattacaatgtaacctttcagcttaactacaaataaagctcagcctcactgttctaggccgtgggagtttcacttgtcggtgtctacctctaaaagtcactaagcactccgagcgttagcgaggagtgcgacccttccccctgactcaacttcttcggagccgcgcgctacgccttcggctgcgcgcggcacctcagacccccgctcgtgctgacacgcttgcgcgtgtcagaccacttcgggctcgcgggggtcgggagctttattaaacagactccaggttgccattggacactgaagccgtgaatcagtaacgaaagtgagtggggccagacttcgccataaggcctttatcttcttgccatttgtccgtctcgggggtcgccataggcttcgggctcggttttaggccttccggactacaaaaaccgccatattagtgacgtcacagccgccatcttaagtagttgaggcggacggtggcgtgagttcaaaggtcaccatcagccacacctactcaaaatggagggcaactttttccgggtcaaaggtcaccgacgccatattaaatcacgtgactgcatacgtcacagccgccattttaaatcacaaaatggccgacttccttcctctttttcaaaaaaaagcggaagtgccgccgcggcggcggggggcggcgcgctgcgcgcgccgcccagtagggggtgctaaagcacccccccccgcgcatgcgcggggccccccccccgggggggctctgccccccggcccccccccgtgctacgtcactaacccccccgcgcaggcgcggggccccccccccggggggctctgccccccggccccccccgtgctacgtcactaaccacgtgtcctttacaggccaaccctcgtctatgtcgtgcacttcctgggcatggtctacgtgataatataaatgaatgcacttccgaatggctgagtttatgctgcccgtccgctgagaggagccacggcagggggtccgaacgtcccgaggg

SEQ ID NO: 119 - protein, 741 aa, Alphatorquevirus sp.
MAWGWWKRRRRWWWRKRWTRGRLRRRWPRRTRRRPRRRRVRRRRRWRRGRPRRRLYRRYRRYRRKRKRAKLTIRQWQPATTRRCRIRGFMPAIMCGWGAYSKNYTSHLEDKLSKGPYGGGHSTMRFSLAVFYEEHLKNHNYWTYSNKDLELALYYGTTIKFYRDPHTDFIATYNRKSPLGGNRLTGPSLHPGAMMLQKNKILIPSLQTKPKGKKTVTVNIAPPTLFTHKWYFQKDICQTTLFNLNVAAADLRFPFGSPQTDNICVTFQVLSSAYNDFLSVVSTEDDKTLFRKFLNSVMPGTSARKANILNTYKTEGNYSHPQLKKYKRPSNFNDQTTYFLTPDGLWGDSIYVYNGDSPNTAQTVSNVIETIISNAENYFKKLQNEPQVTQGRLLHTHLTGIYSSTFLNPGRVAQEFPGLYTDIIYNPWVDKGTGNRVWLDSITKTNNLYIEGQSIVLLENMPLWCMLNGYIDWAKKETNNWGLPSIYRLLIVCPYTYPSLYHTTNKNYGFIPYATTFGAGQMPDKDPYVPVNWRGKWYPHILHQQAVIEDIVISGPFAPKTVTPNMQLNMKYTARFKWGGNPISTQIVTDPCTQSTFDIPAGGNIPGRVQVLNPKLLGPNYSFRSFDIRRDFFSATSIKRIAQQPETSEDLFAGGKRPRIDLPKYEPPEENYSTKQREPRPWETSSESEAEVQEQKEEATSVREQLQQQLQEQLQLRRGLKCLFEQLIRTQQGVHVNPILT

SEQ ID NO: 120 - protein, 156 aa, Alphatorquevirus sp.
MFFGRPHRKKRSLLLPSLPTAKKKPPMSLWRPPLHNVPGIEHLWYDSMHRSHAAICGCSDFIRHITTLAERYGVPGRQRPSGAPGVGGNPSDPSIRRARHPAAAPDPPAGNQPPALPWHGDGGNEGGAGGGENDGPVADFADDGLEELVAALDDEE

SEQ ID NO: 121 - DNA, 3831 bp, Alphatorquevirus sp.
cgggtgccggaggtgagtttacacaccgcagtcaaggggcaattcgggctcgggactggccgggctatgggcaaggctcttaaaaaagacatggttttcttgggtcgcctctacagaaagaaaaggacactgctactgtctggcctgcacaatccaaagaataaaccacctatgagctggcgtcctcccgtccacaatgccccaggcatcgaaagaaacctctacgaggctttctatcgaacacactcagctagctgtggctgtggcgatcttcttggccatcttacccgcctggttgaccggtatggcactccgccgcgccctgcacctcccaccgacccgccacctcgcctgagggccctacccgcgccgcctcctcctctatcccgtaaccgagacctactatggcctggtggggatggaggagacgttggcggcgccgcccctggtggagacgccgccgccgacgaccagtacgccgtagaagaaatagaacagcttatggccgccgccgaggaagacgcacagtaaggagaaaaacatgggggaggcggaggagacgcagacgcacttacagacgcaggcggactgtcagactaagacgcagacgcagaaaaaagttagtactgactcagtggaatcccccctttgtaagacgctgctacataaaaggagtaatgcctgtcattatatgcgggcagcacagagcctcctttaactatgccatacactctgacgactgcctgaaacagggactgagttttggaggaggcatgagcaccataaccatgtccctccaagtactgtatgacgagtacacaagaagcctaaacaggtggtcctacagcaatgaacagttagacctgtgcagatacaggggatgcaccttaagaatatacagagaccccaaaactgactttataatgacttttgatactatacctcccatgaaaatggaccaactaacaggtcccaatcaccacccgggtctgttaatgctaagaaaacagaaaattttaattcccagcttcttaactagaccaaagggcagaaaatacagaaaagtaaaaatactgccccccaaaatgtttgaagacaagtggtatgcacagcacgacttatgcaaagttcctcttgtcagtttgcggtttaccgcagctagtttccagtatccgttctgctcaccacaaacgaacactaacgcaattacctttcaggtgttgcaaagaaactacaatgaagtaataggttaccccattgcatacggaactgacgaatgcaccaaatttgaaaagtggctatatgggtcctgcacccactaccaagcctttgcaacagaagcccacctcagaccccgttcacacacacccgcagggcagccaataactaactcttcagcacatgctggttcctccacttggtcagccactagaacaacttatacagtgggaggcgaaccaccttcaaccacagcttaccaaaactgggacttatggtggagacatgacttttatgccaataaagcagacagccactacggctactgctcctttacacccaaagatcagataggaataaaaaacattataactattagaaacaacaacttctactatttaacaaactgggacaactcaaacaacaaccatattaatgccacttatgctaatgcaaaatactcacaatatgagtaccacgctggctggtactcatccatgtttctaagccccatcagataccagcttcagcacagaacagcttactttgactgcacctacaatcccctaaaggaccacgcaaaaggaaatagaatgtggtttcaatacctcacaaaaccagacaccacatttaactccacacagtgcagatatgtcctacaagacatacccctgtgggccatggctaacggctacacagactatataagtagccaactaggaaacattcaagaccacgaaaccgtaggcattatatgtgtacagtgcccctatacttgccccccgctttttgtaaaagaagctccggacgaaggctttgtgttttatgacggactgtttggacagggaaaaatgccagacggaagctcacagataacaagattctgggccgccagatggagagtatacctaggtgtacaacaacaagtgttaaatgacattcacaactgtggcccttgggcctacagagatgaacacctaagtaccacccttaccatggggtatacatttaagtttaactgggggggcgacatgatgtttccgcaggttatcaaaaacccctgtcccgactcaggactggctcccagtggcagtagacagcaacgcgacgtacaaatcgttgacccgctcacagtgggaccccagtggattttccacccctttgacatcaggcgcgggttctataatccaaaagctatcaaacgagtgtctgaaaaaccaacagatgatgaactctttattcagcttccaaaacgacctcgtttccttacagccacagagtaccaagagcaagaaaacagcttatatttcagggaaggaaaatcggacatctcggaagaagagaaagaagccgaagtgcaagaggggtcgatacagagacagctcacagtccagctccgagagcagcagctcatcggaaagcagctcagggagctgtgggtccaactcgccaaaacccagagcaatacgcacctaaaccccctcttattttcccgagcataaataaagtatacatgtttgccccagaaaaaagaacccccaccaaaggagactgggagaccgagtaccaggcttgcaaggccttcgaccggcctcccagaacagaccttagcagacccccttgctacccctggatgcctcctaccttcaatgtaagctttaagctcaacttcaaataaatgttggccgtgggagttacacttgtcggtgtctacctctataagtcactaagcactccgagcgttagcgaggagtgcgacccttgggggtgggtgcaacgccctcggcggccgcgcgctacgccttcggctgcgcgcggcacctcggacccccgctcgtgctgacacgctcgcgcgtgtcagaccacttcgggctcgcgggggtcgggaattttgctaaacagactccaagttgccattggacactgtagctgtgaatcagtaacgaaagtgagtggggccagacttcgccataaggcctttatcttcttgccattggatagtgtagggggtcgccataggcttcggcctggttttcaggccttccggactacaaatatggccgatttagtgacgtcacggccgccattttaagtagttgaggcggacggtggcgtcaggtcaaaggtcactgtcagcgtcagctactcaaaatggtggttaacttcttccgggtcaaaggtcacgcctacgtcacaagtcacgtggggagggtactactcaaacacggaagtaggccccgccacgtgactattacgtgggtgctacgtcatcgccgccatcttaaatcacaaaatggccgacttccttcctgtttttttaaaattaacggtccggcggcggcgcgcgcgctgcgcgcgcgctgacagtccgcctgcgtctgtaagtgcgtctgcgtctcctccgcctccccgcggggggctccgccccccggccccccccgtcaaagtccgtcactcaccacgtgacccctttccaccaatcagggtctacgtggtgcacttcctgggcgtggtttacatcctaatataaagcgcagcacttccgaatggctgagttttccacgcccgtccgcagccagatcgccacggagggagatcagcgcgtcccgaggg

SEQ ID NO: 122 - protein, 771 aa, Alphatorquevirus sp.
MAWWGWRRRWRRRPWWRRRRRRPVRRRRNRTAYGRRRGRRTVRRKTWGRRRRRRRTYRRRRTVRLRRRRRKKLVLTQWNPPFVRRCYIKGVMPVIICGQHRASFNYAIHSDDCLKQGLSFGGGMSTITMSLQVLYDEYTRSLNRWSYSNEQLDLCRYRGCTLRIYRDPKTDFIMTFDTIPPMKMDQLTGPNHHPGLLMLRKQKILIPSFLTRPKGRKYRKVKILPPKMFEDKWYAQHDLCKVPLVSLRFTAASFQYPFCSPQTNTNAITFQVLQRNYNEVIGYPIAYGTDECTKFEKWLYGSCTHYQAFATEAHLRPRSHTPAGQPITNSSAHAGSSTWSATRTTYTVGGEPPSTTAYQNWDLWWRHDFYANKADSHYGYCSFTPKDQIGIKNIITIRNNNFYYLTNWDNSNNNHINATYANAKYSQYEYHAGWYSSMFLSPIRYQLQHRTAYFDCTYNPLKDHAKGNRMWFQYLTKPDTTFNSTQCRYVLQDIPLWAMANGYTDYISSQLGNIQDHETVGIICVQCPYTCPPLFVKEAPDEGFVFYDGLFGQGKMPDGSSQITRFWAARWRVYLGVQQQVLNDIHNCGPWAYRDEHLSTTLTMGYTFKFNWGGDMMFPQVIKNPCPDSGLAPSGSRQQRDVQIVDPLTVGPQWIFHPFDIRRGFYNPKAIKRVSEKPTDDELFIQLPKRPRFLTATEYQEQENSLYFREGKSDISEEEKEAEVQEGSIQRQLTVQLREQQLIGKQLRELWVQLAKTQSNTHLNPLLFSRA

SEQ ID NO: 123 - protein, 154 aa, Alphatorquevirus sp.
MGKALKKDMVFLGRLYRKKRTLLLSGLHNPKNKPPMSWRPPVHNAPGIERNLYEAFYRTHSASCGCGDLLGHLTRLVDRYGTPPRPAPPTDPPPRLRALPAPPPPLSRNRDLLWPGGDGGDVGGAAPGGDAAADDQYAVEEIEQLMAAAEEDAQ

SEQ ID NO: 124 - protein, 54 aa, Alphatorquevirus sp.
MFAPEKRTPTKGDWETEYQACKAFDRPPRTDLSRPPCYPWMPPTFNVSFKLNFK

SEQ ID NO: 125 - DNA, 3829 bp, Alphatorquevirus sp.
cgggtgccggaggtgagtttacacaccgcagtcaaggggcaattcgggctcgggactggccgggctatgggcaaggctcttagggtcttcattcttaatatgtttctcggcagggtctaccgccgcaagaaagggaaagtgccactgctggctgtgcagactctaccgaagacaccttccatgagtcattggcgaccccctcttagaaatgtcccctacagggaaagatgttggcttgaggcctgtctcagagcccacgattctttttgtggctgtcctagtcctgttattcatttttctagtctggttgcacgttttaatctacaaggaggcccgccgccagacgatgactccccgcagggcgcgccgctcctgagggccctgccggcaccgagcccccgcaggcagacccgtaccgagaacccttccggtgagccatggcctactcctactggtggcgccgccggaggtggccgtggagaggtagatggaggcgctggaggcgccgcagacgagtaccgcgccgaagacctcgacgacctgttcgccgctatcgaaggagaccagtaaggagaaaacgtcggtgggggaggcgagggcgacggcgccggtacgttagacgatacagacgtagactgactgtcagacgaaagagaaagaaactcaaactgagcgtgtggcagccccaaaatatcagatactgtgccataaaaggcctctttcccatcctcatctgcgggcacggaaagagcgccggcaactatgccatccactctgacgactttgtgaccagcagattctctttcgggggcggtctcagcaccacctcatactctctaaagctgctattcgaccagaacctcagaggactgaacaggtggaccgctagcaacgaccagctagacctagctaggtacctgggggccgtgttctggttctacagagaccagaagacagactacatagtgcagtatgacatctcagagccctttaagatagacaaagacagctccccttcctatcacccaggcatgatgatgagggccaaacacaaggtgctggtgcccagctaccagacctggcccaagggacgctctaaaatcaaacttaagataaagccccccaagatgttcgttgacaagtggtacacacaagaggatctctgtaacgttattcttgtgtcatttgcggtcagcctagcttccttccaacatccgttctgccgaccactaactgaaaacccttgcgtcagcttccaagttctgcaaaatttctacaacaatataataggctactcctcagcagacacattagttgaaaatgtgtttaactcttacttatactgcaaggcctccttttggcagagccatctcaccccctcttttgttaaaaaaattaacaacaaccccgatggcacaccaataagtgcaactgtagcttctatgcctagcatgacagactacaataactgggtgtcaaacacaaatagaggagctgggttttacaaccaaaatgtaaatgtccactacaattactgtcagtacaaccctgatgctaaccatctaacaaccctcagaaagtactactttttctgggagacctacccggcagctgctaagaagtctactacagcacacgtccccataaccaccacccaaccgacaaaaaactggtgggagtacagattaggcctgtacagtcccatctttctcagtccactcagaagcagcaacatagagtggcccttcgcatacagggacatagtgtacaacccactgatggacaaaggggtgggcaacatgatgtggttccagtacaacacaaaaccagacacccagttctctgtcacctcgtgcagagcagtgttagaggacaaacccctgtggtccatggcctacgggtacgcggactttctcctctccattctaggagaacatgacgatgtagacttccacggcctggtctgtatcatatgcccctacaccagaccgcccctctacgacaaggagaaccccaaaatgggctatgtgttctatgatgccaagttcggcaatggcaaatggatagatgggacagggttcatcccggtagagttccagagcaggtggaaaccagaactggccttccagaaagacgtactgactgacctagccatgtcaggccccttctcctacagcgacgaccttaaaaacaccacgatccaggcccaatacaaattcaaattcaaatggggcggtaatctctcttaccaccagacaatcagaaacccgtgcgcctcggacggacagacgcccagtaccagtagacagtctagagaggtacaaatcgttgacccgctcaccatgggaccccgatacgttttccactcgtgggactggcgacgtgggtggcttaatgacagaactctcaaacgcttgtttaaaaaaccgctcgattatgaagagtatccaaaatctccaaagagacctagaattttcccgcctacagagcagcttcaagaagacccacaagagcaagaaagagactcctcttcctcggaagaaagtctccctacatcgtcagaagagacgccgccagcccacctactcagagtacacctcagaaagcaactccgagaacagcgagacctccgagtccaactcagagccctattcgcccaagtcctcaaaacgcaagcgggcctacacataaaccccctattattggccccgcattaaacaaagtatacttcttcccagagagggcacctaaaccttctcccacctcgggggactgggccactgagtaccaggcggccgccgccttcgatagaccccctagaagtaacctctcagacacccccttctatccctggatgccaacaaacaccaaattctctgtaacctttaaactcggatggaaaccctgaataaaattcaaggccgtgcactgttcacttgtcggtgtctacctcttaaagtcaccaagcactccgagcgtcagcgaggagtgcgacccttccccctgactcaacttcttcggagccgcgcgctacgccttcggctgcgcgcggcacctcagacccccgctcgtgctgacacgctcgcgcgtgtcagaccacttcgggctcgcgggggtcgggaattttgctaaacagactccgagttgccattggatactgtagctgtgaatcagtaacgaaagtgagtggggccagacttcgccataaggcctttatcttcttgccattggacagtgtcgggggtcgccataggcttcgggctcggttttaggccttccggactaccaaaatggcggattccgtgacgtcatggccgccattttgagtaaggcggaacaggctgtcaccccgtgtcaaaggtcaggggtcagccttccgctttacccgaaatggaggactaatgcttccgggtcaaaggtcaccgctacgtcataagtcacgtgaggatggctgctgtgaacccggaagtagctgacccgcgtgacttgtcacgtgacgtgtgcgtcatcgccgccattttgtatcacaagatggctgacttccttcctctttttcaaaaaataacggccctgcggcggcgcgcgcgcttcgcgcacgcgccggggggcgggcccccccccccctccgggggggctccgccccccggcccccccccgtcgtggatcgtcactaaccacgtgactctcacaggccaaccacagtctatgtcgtacacttcctgggcatggtctacgtgataatataagacggcgcacttccgaatggctgagttttcgccgcccgtccgcagcgagatcgcgacggaggagcgatcgagcgtcccgaggg

SEQ ID NO: 126 - protein, 759 aa, Alphatorquevirus sp.; identical to SEQ ID NO: 96

SEQ ID NO: 127 - protein, 167 aa, Alphatorquevirus sp.; identical to SEQ ID NO: 97

SEQ ID NO: 128 - DNA, 3829 bp, Alphatorquevirus sp.
cgggtgccgaaggtgagtttacacaccggagtcaaggggcaattcgggctcgggactggccgggctatgggcaaggctcttaaaaatgcacttttctaggtgcagtagaaagaaaaggaaactgtcactgctactactgcacccttcaaaaaaagctaggccatctgtgagaggtatgtggagacccccgactcgaaatgcattcaccattcaacgtgactggttctacagttgctttcactcccacgcttctatgtgtggctgtgctgattttattggtcatttcaatcatatcgctgctatgctcggccgtccggaagaccagaaccctcctccgccacccggggctctgagacccctacccgctctcccggcctcctccgaggcacccggtgatcgagcaccatggcctatgggtggtggtggaggcgacggaggcgcccgtggaggaggaggagatggcgccgctggagacgtcgccggagaccccgcagacgccgacctcgtcgccgctatcgacgccgcagaacagtaaggagacgcggcagggggaggtggactaagagatatagacgatggcgccgcaagggcaaacgcagaggcaaaaaaaaaattattataaaacagtggcagcccaactacactcgcagatgcaacatagtgggctacctgcctctcctaatctgtggggaaaatactgttgctacaaactatgccacccactccgacgatagctactaccccggaccctttggggggggaatgactacagacaaatttactctaagaatactctatgacgagtacaagaggtttatgaactactggaccgcctcaaacgaggacctagacctctgtagatacctaggagttactctatatgtgtttagacacccagaagtagactttatactaattataaatacctcccctccatttctagacacagaaataacagggcccagcatacaccccggtatgatggccctcaacaagagagccaggtggatacctagcttaaaaaacagaccaggcagaaagcactatgtaaagattaaagtaggagccccccgaatgttcacagataagtggtacccccagacagacctctgtgacatgacactcctaacgatctttgccagtgcggcggatatgcaatatccgttcggctcaccactaactgacactatagttgtgtcattccaagttctgcaatccatgtacaacgactgcctgagcatacttcctgataattttacagagacatcaggcaaaggcacccagctacataacaaaataattaagcatctgccctactacaacaccacacaaacacaagcacaatttaaaagatttgtagaaaacataacagcaaccaatggagacaatgtatgggcaaactacataaacacaacaaagttctcacaagtacaaaacccaaaaaatgacacaggcattggaggcccttacacctcattttcagactcatggtacaaaggcacagtatataatgagaaaattacaaagatacctgaaaaagcaagtaaactatactacgaggaaaccaaacaactaattggcattacattcacaggatccacacacagactccattactgtggaggcctatactcctccgtatggctatcagcaggtagatcctactttgaaaccaaaggcccatacacagacataacctacaaccccttttcagacagaggagaaggtaatatgctatggatagactggctaactaaagatgactcagcctactcaaaaacaagtagcaagtgcctcatagagaacttacccctgtgggcctcagtatacggatacaaagagtactgcagcaaagtaacaggagatacaaacatagaacacaactgtagatgtgttatcagaagcccctacacagttccacaactgttagaccacaacaatcccctcagaggctacgtgccttacagctttaactttggaaatggtaaaatgccaggcggtagcagcctagtgcccattagaatgagagccaagtggtaccccactctgttccaccaaaaagaagtactagaggccatagcacaggcaggcccctttgcatatcactcagatatgaaaaaagtgtcccttggcataaagtacagatttaagtgggtgtggggtggcaaccccgtgtcccaacaggttgttagaaacccctgcaagaccacccaaggttcctcgggcaatagagtgcctcgatcaatacaagtcgttgacccgcggtacaacacaccagaactcacgatacacgcgtgggacttcagacatgggttctttggcagaaaagctgttaagagaatgcaagaacaaccaatccctcatgaaactttttcagcagggttcaagcgcagtcgccgagatacagaagcactccaatccagccaagaagaacaacaaaaagaaaacttacttttcccagtccagcagctcaagcgagtccccccgtgggagacctcgcaagagagccaaagcgaggaagaaaactcgcaaaaacaggagaccctctcccagcaactcagagagcagctgcacaagcagcgactcatgggagagcaactccgatcgctcctctaccaaatgcaaagggtccaacaaaatcaacacataaaccctatgttattgccaaagggtctggcattaacctctatttctcacaatgtaatatagatatgtttggtgaccccaaaccctacaacccctcctccaatgactggaaggaggagtacgaagccgcaaaacagtgggacagaccccccagacacgacctgaggagcacccccttctacccctgggcccccacccccaaaccatacaatgttagctttgccctcaactacaaataaacggtggccgtgggagtttcacttgtcggtgtctacctcttaaggtcactaagcactccgagcgtcagcgaggagtgcgacccttcaccaaggggcaactccctcgaagtccggcgctacgcgcttcgcgctgcgccggacatctcggaccccccctcgacccgaatcgcttgcgcgattcggacctgcggcctcgggggggtcgggggctttattaaacggactccgaggtgccattggacactgagggggtgaacagcaacgaaagtgagtggggccagacttcgccatagggcctttatcttcttgccatttgtccgcgaccgggggtcgctcctaggcgcggaccccgtttcggggtccttccgggttcctcggcgccgttccagtgacgtcacgggcgccatcttaagtggctgtcgccgaggattgacgtcacagttcaaaggtcatcctcggcggtaaccgcaaagatggcggtcaatctcttccgggtcaaaggtcgtgcatacgtcataagtcacatgacaggggtccgcttaaacacggaagtgggccccgacatgtgactcgtcacgtgtgtacacgtcacggccgccattttgtgtcacaaaatggccgacttccttcctcttttttaaaaaaaggcgcgaaaaaaccgtcggcgggggggccgcgcgctgcgcgcgcggcccaccccccccccccccccgcgcgcatgcgcgcgggtccccccccctccggggggctccgccccccggccccccccgtgctacgtcactaacctacgtgtccgcctcccataggccggacacagtctacgtcatacacttcctgggcatggtctacgtgataatataagtggctgcacttccgaatggctgagttttccacgcccgtccgcagagagggagccacggaggggatcccgaacgtcccgaggg

SEQ ID NO: 129 - protein, 767 aa, Alphatorquevirus sp.
MAYGWWWRRRRRPWRRRRWRRWRRRRRPRRRRPRRRYRRRRTVRRRGRGRWTKRYRRWRRKGKRRGKKKIIIKQWQPNYTRRCNIVGYLPLLICGENTVATNYATHSDDSYYPGPFGGGMTTDKFTLRILYDEYKRFMNYWTASNEDLDLCRYLGVTLYVFRHPEVDFILIINTSPPFLDTEITGPSIHPGMMALNKRARWIPSLKNRPGRKHYVKIKVGAPRMFTDKWYPQTDLCDMTLLTIFASAADMQYPFGSPLTDTIVVSFQVLQSMYNDCLSILPDNFTETSGKGTQLHNKIIKHLPYYNTTQTQAQFKRFVENITATNGDNVWANYINTTKFSQVQNPKNDTGIGGPYTSFSDSWYKGTVYNEKITKIPEKASKLYYEETKQLIGITFTGSTHRLHYCGGLYSSVWLSAGRSYFETKGPYTDITYNPFSDRGEGNMLWIDWLTKDDSAYSKTSSKCLIENLPLWASVYGYKEYCSKVTGDTNIEHNCRCVIRSPYTVPQLLDHNNPLRGYVPYSFNFGNGKMPGGSSLVPIRMRAKWYPTLFHQKEVLEAIAQAGPFAYHSDMKKVSLGIKYRFKWVWGGNPVSQQVVRNPCKTTQGSSGNRVPRSIQVVDPRYNTPELTIHAWDFRHGFFGRKAVKRMQEQPIPHETFSAGFKRSRRDTEALQSSQEEQQKENLLFPVQQLKRVPPWETSQESQSEEENSQKQETLSQQLREQLHKQRLMGEQLRSLLYQMQRVQQNQHINPMLLPKGLALTSISHNVI

SEQ ID NO: 130 - protein, 159 aa, Alphatorquevirus sp.; identical to SEQ ID NO: 107

SEQ ID NO: 131 - protein, 57 aa, Alphatorquevirus sp.; identical to SEQ ID NO: 108

SEQ ID NO: 132 - DNA, 3826 bp, Alphatorquevirus sp.
ccccgaagatcgtcactaaccacgtgactcccgcaggccaaccatgtgctacgtcgtgcacttcctgggcggagtttacctcataatataagtagctgcacttccgaatggctgagttttccacgcccgtccgcagcgagatcgcgacggaggagcgatcgagcgtcccgagggcgggtgccggaggtgagtttacacaccgcagtcaaggggcaattcgggctcgggactggccgggccatgggcaaggctcttaaaaaagtaatgtttttcggtcggccttacagaaagaaaagggcactgccactgctacgcgtgccagctccagaggcgaaaccacctgctatgagctggagacccccggtgcacaaccccaatgggatacagagaaacctgtgggaggcattctttcgcatgcatgcttcagcttgtggttgtggcgatcttgttgggcatattactgtactggctggtcggtatggtgctcctcctcgtcccccggcccccgaggctcccagaccaccgctgatacgccagctggcccttccggcgccccccgctgatcctcagcaggccaaccagagatggcctggtggggacggtggagaagatggcgctggaggccccgccgctggcggcgccgtcgcagacgccgaataccaagaagacgagctcaacgccctgttcgacgccgtcgagcaagaagagtaaggaggaggcgatgggggaggcggaggtggagacgggggtacagacgcagactgagactaagacgcagacgcagacgaaaacgaaagatagtactgactcagtggaacccagctaaagtgaggagatgtaccattaagggagttctccccatgatcttgtgcggggcaggacgctcggggtttaactatggcctgcacagcgacgactgcacagtgcagaaaccccttggccaaaacccccacgggggcggtatgagcacagtgacttttagccttcaggtcctctatgaccaataccagaggtttatgaacaagtggtcgtactctaatgaccaactagacctcgccaggtactttggttgcaccttctacttctacagacacccagatgttgactttgtagctcaatatgacaacgtaccccccatgaaaatggacgagaacacagctcccaacactcaccctgccttcctactacagaacaaacacagggttaaaatccccagctttaagactaagccctttggacgaaaaaaagttagagtaacagtggggccccccaaactgtttgaagacaagtggtacagccagcatgacttgtgtaaggttcccctagtcagttggcggttaaccgcaagtgactttaggtttccgttctgctcaccactaactgacaacccttgctacaccttccaagtattgcatgaaaactattacacagtaataggcacttctgctttagataaaggcacaaactataacgcagctgcaataaccgccctagaaaaatggctatatggaaaatgcacacactatcaaacatttgccacagacaccagactaaatcctcaaagacccatatcctcaaataatagtaaaacatatgctccatcaggagaccaagaagaaataatatggtcctcctcagacttccaaacctttaaaaaacacacagacagtaactatgggtactgcactttttgccctacaacctcaggcagcagtgatatactagagaaaattaaaaagtatagagacaaaaggttttcttggcttacagaaacgccacccaccaacacctgtcacataaatgccacctacgcccgtggcaaatacaaagaatatgaataccacctaggctggtactctaacatatttataggcaacctaagacacaacctagcattcacaccagcatacttagacatcacctacaaccccatcacagacaaaggagagggtaacattgtgtggttccaatatgccacaaaacccaccacagaatacatagaggcccaagctaaatgcactatcacaaacattcccctgtacgctgctttctatggctacgaagactatatccagagaacactaggcccctatcaagatgtagagaccctaggcataatctgtgtaaaatgtccctacacagatccacctctagttaacaaaaacgcaggcaaaagcaactggggctacgtgttttatgacgttcactttggcaacggaaaaacccctgagggactgggccaagtacacccttactggatgcagaggtggagaccctacgtacagtttcaaaaagaaactatgaacaagatagccagaaccggacctttcagctacagagacgatacgccttccattaccctgacggcccagtacaagtttcgttttaactgggggggcgactctatatttccacagattattaaaaacccctgcccagacagtggggtacgacctggaaccggtagagagcgtcgctcagtacaagtcgttagcccgctcacaatgggcccccagtacatattccactcctgggactggcgacggggtttctttaatcaaaagactctcaaaagaatgcttgaaaaaccagttaatgatggagagtatccaacaggcccaaaagtccctcgatggtttcccccactcgacaaccaagagcaagaaggcgcctcagattcagaggcgacaagctcgcagtcctcgcaagaagaagccgctcaagaagccctccaagaagtccaagaggcgacgctacagcagcacctcctccagcagtaccgagagcagcgacgaatcggaaagcaactccaactcgtcatgctccaactcaccaagacgcagagcaacctgcacataaatccccgtgtccttggccatgcataaataaagtgtacatgtttcccccagaaaaacccatgcccatacacgggtaccacgggtgggagacggagtatcaggcctgcaaagcttttgacaggccacctagaaactacctttcagacaaacccatctatccctggcttccccgctcccaaccagaatttaaagttagttttaagcttggttttcaataaacaaggccgtgggaatttcacttgtcggtgtctacctcttaaagtcactaagcactccgagcgtcagcgaggagtgcgacccttccccctggtgcaacgccctcggcggccgcgcgctacgccttcggctgcgcgcggcacctcggacccccgctcgtgctgacacgctcgcgcgtgtcagaccacttcgggctcgcgggggtcgggaattttgctaaacagactccgagttgccattggacactgtagctgtgaatcagtaacgaaagtgagtggggccagacttcgccataaggcctttatctttttgccattggtccgtgtcgggggtcgccataggcttcgaacttggttttagaccttccggactacaaaaaccgccattctagtgacgtcacggcggccattttaagtaagcatggcgggcggtgacgtacaaggtgaaaggtcaccgcacttccgtgtttacacaaaatggtggccaactccttccgggtcaaaggtcagcgcctacgtcataagtcacgtggagagggctgcgtcacaacccggaagcaatcctcaccacgtgatttgtcacgtgagtgctacgtcacagccgccattttagttcacaaaatggcggacttccttcctcttttttaaaaataacggccctgcggcggcgcgcgcgcggcgcgcgcgcgagcgccgtctcccgagcccgaattgccccttgactgcggtgtgtaaactcacctccggcacccc

SEQ ID NO: 133 - protein, 766 aa, Alphatorquevirus sp.
MAWWGRWRRWRWRPRRWRRRRRRRIPRRRAQRPVRRRRARRVRRRRWGRRRWRRGYRRRLRLRRRRRRKRKIVLTQWNPAKVRRCTIKGVLPMILCGAGRSGFNYGLHSDDCTVQKPLGQNPHGGGMSTVTFSLQVLYDQYQRFMNKWSYSNDQLDLARYFGCTFYFYRHPDVDFVAQYDNVPPMKMDENTAPNTHPAFLLQNKHRVKIPSFKTKPFGRKKVRVTVGPPKLFEDKWYSQHDLCKVPLVSWRLTASDFRFPFCSPLTDNPCYTFQVLHENYYTVIGTSALDKGTNYNAAAITALEKWLYGKCTHYQTFATDTRLNPQRPISSNNSKTYAPSGDQEEIIWSSSDFQTFKKHTDSNYGYCTFCPTTSGSSDILEKIKKYRDKRFSWLTETPPTNTCHINATYARGKYKEYEYHLGWYSNIFIGNLRHNLAFTPAYLDITYNPITDKGEGNIVWFQYATKPTTEYIEAQAKCTITNIPLYAAFYGYEDYIQRTLGPYQDVETLGIICVKCPYTDPPLVNKNAGKSNWGYVFYDVHFGNGKTPEGLGQVHPYWMQRWRPYVQFQKETMNKIARTGPFSYRDDTPSITLTAQYKFRFNWGGDSIFPQIIKNPCPDSGVRPGTGRERRSVQVVSPLTMGPQYIFHSWDWRRGFFNQKTLKRMLEKPVNDGEYPTGPKVPRWFPPLDNQEQEGASDSEATSSQSSQEEAAQEALQEVQEATLQQHLLQQYREQRRIGKQLQLVMLQLTKTQSNLHINPRVLGHA

SEQ ID NO: 134 - protein, 199 aa, Alphatorquevirus sp.
LSFPRPSAARSRRRSDRASRGRVPEVSLHTAVKGQFGLGTGRAMGKALKKVMFFGRPYRKKRALPLLRVPAPEAKPPAMSWRPPVHNPNGIQRNLWEAFFRMHASACGCGDLVGHITVLAGRYGAPPRPPAPEAPRPPLIRQLALPAPPADPQQANQRWPGGDGGEDGAGGPAAGGAVADAEYQEDELNALFDAVEQEE

SEQ ID NO: 135 - protein, 147 aa, Alphatorquevirus sp.
MVSPTRQPRARRRLRFRGDKLAVLARRSRSRSPPRSPRGDATAAPPPAVPRAATNRKATPTRHAPTHQDAEQPAHKSPCPWPCINKVYMFPPEKPMPIHGYHGWETEYQACKAFDRPPRNYLSDKPIYPWLPRSQPEFKVSFKLGFQ

SEQ ID NO: 136 - DNA, 3825 bp, Alphatorquevirus sp.
cgggtgccggaggtgagtttacacaccgcagtcaaggggcaattcgggctcgggactggccgggctatgggcaaggctcttagggtcatcgctcttaaaaatgttttttggcagaccttacagaagaaagaaaagggcgctgctactgtctgagctgccagatccaaagaaaaaaccacctggtgatatgagctggcgccccccggtacacaatgccgcaggtatcgacaggcagttctttgaagcctgctttagatgccacaatagttgctgtggctgcggcagctttattaatcatcttaatgtactggctgctcgctatggctttactgggggtccggcgccgccaggtggtcctcggccggcgcgacaagtgaggcccgcgcttcccgcgccggagcccgaccctgaggccgacaaccgtgagccatggcgtggagctggtggtggcaacgatggagacgccgcggctggaaacccaggcgccgccgctggagacgcctacgatggagaagacctcgacgccctcttcgccgccgtcgccgaagacgcagagtaaggagacggaggtgggggaagagacgggggcgacgcagacggtacacccgtagacgaaagagacgcattaagcccagaaactttagaaagaaactagtactgactcagtggcacccctctgtagtaagacgctgctttatcaggggcatagtccctatccttatatgcgggcacacaaaatggaacagtaactacgccctgcatagcgaggactacacagaagagggccgctaccctcacggagggtccctctcgaccactacgtggtcactaaaggtgctgtacgacgagtacctaaagcaccacaacttctggggctacccaaacaccgagctagacctggtcagatacaggggctgcaccttcactttctacagacacaaaaaaactgactttatagtatggtggaacagaaagcctccctttaaactaaacaagctgagctgcccgtccttccacccgggcatgctcatgcaacagaaacacaaggtgctaatcccaagctttgacactaaacccgggggcagagctaaaattagaattaaaataaagccccccactctgttagaggacaagtggtacactcagcaagacttgtgtccggtaaacctggcgcaacttgtggttactgcggctgactttcaacatccgttctgctcaccacaaacgaacactccaaccacaaccttccaggtgttgaaagaaatgtattatgacaccataggcatagttgacacacaagaaaattacacttcagttaataataaaagtacacgtaacacatacaaaacatttatggaaacattacaagacaagctatactccacaggatcatactggaactcctttcacacagcagaatacttaaacgccaatgtcacagacactcacaacaacaaaatatttaataaagcaaacgcatcactaacaacttggctctcaagtaaaggcaacgacaactttcaaactggtaacagcacccagtttggctacaactcatacaaacctaacgcaaccaacataaaatcagcaaacaactgctactgggaagcactaacaaaacaaaatgaccaagctacacaaatagggcaagcacgcgacaaacactttgagtatcacacgggcatttacagtcccatattccttagcagacacagaagcacactaaactttgccagggcctaccaggacgttacatacaacccaaactgtgacagaggaattaaaaacagggtgtgggtacagtccctaactaaggccaccacagaatttgacgagaaacgcagcaagtgcgttatctctaacttgcctctgtgggccgctctgtactgctaccacaactttgtagaagaggagctaggcatctcctcagagatctacaacacctgtatagtgtgtgtgcagtgcccttacacctttccccccatgtatgacaagaaaaacccaaacaaggggtacgtgttctatgacgccctgtttggaaacggaaagaccccagacggacgcggacaagtagacgtgttctggcagcagcggtggtacccccgcatggcctgccaggtgcaggttatgcacgacatcactatgacgggaccgttctcctaccacgacgaactagtgagtacacaactaactgctaagtacaaatttgacttcatgtggggtggaaacatgatctcctcacagatcatcaagaacccctgcaaagacacagacatggacaccacctatcccagtagacagcgtcgcgacttacaaattgttgacccacactccatggggccctccttcgcgttccacacgtgggactacagacgaggactgtttggtaaagatgctatcgacagagtgtcaaaagaacaagactatgctccagagtatcctaacccatacaaaaagcctagatattttcccccaacagacagagcagagctccaagggcaagaagaagactggagtttccaggtcgaaagcgaggggtcgtcgtcagaagagagcgatcaagaagcccaagaagaggaggtactccagttccagccaggacagcagctccagcaactccacctgcagctcgcgcagcagcagcagatcgggcagcagctccgattcctgttccaacaaatgctcaaaacccaggccaatctgcacctaaacccatatacatacacccagctataaacagggtgtttatgtttgaaccccagggccccaggcccataactaccagagaggggtgggaagacgagtacagcactgccagcatttggggccggcccgtccgctccttttacacagacacccccttctaccctgaggttcccaagatgccccctcaattctctgtaactttcaaactcggctggaaataaaaatgcaaggcctttcactgttcacttgtcggtgtctacctcttaaggtcactaagcactccgagcgccagcgaggagtgcgacccttccacctggtgcaacgccctcggcggccgcgcgctacgccttcggctgcgcgcggcacctcggacccccgctcgtgctgacacgcttgcgcgtgtcagaccacttcgggctcgcgggggtcaggaattttactaaacagactccgagttgccattggacactgtagccgtgaatcagtaacgaaagtgagtggggccagacttcgccataaggcctttatcttgtcgccattggtccgtcgggaggggtcgctccagacgcggaccccgttttcagcccttccggactacaaaatcggccattttagtgacgtcacggcggccattttaagtaaggcggaagcagctccactatacaaaatggcggcggagcacttccggcttgcccaaaatggcggccaaccttttccgggtcaaaggtcggcaactacgtcacaagtcacgtggggagggttggcgtataacccggaagtcaatcctcccacgtggcctgtcacgtgactgctacgtcacgaccgccattttagtatacaaaatggcggacttccttcctttttttcaaaaattaaccgtctgcgtcgcccccgtctcttcccccacctccgtctccttactctgcgtcccccccggccccccccccccgaagtacgtcactaaccacgtgattcccacaggccaatcagagtgtatgtcgtgcacttcctgggcatggtctacgtcctcatataagtaagtgcacttccgaatggctgagttttccacgcccgtccgcagcggcagcaccacggagggtgatccccgcgtcccgaggg

SEQ ID NO: 137 - protein, 768 aa, Alphatorquevirus sp.
MAWSWWWQRWRRRGWKPRRRRWRRLRWRRPRRPLRRRRRRRRVRRRRWGKRRGRRRRYTRRRKRRIKPRNFRKKLVLTQWHPSVVRRCFIRGIVPILICGHTKWNSNYALHSEDYTEEGRYPHGGSLSTTTWSLKVLYDEYLKHHNFWGYPNTELDLVRYRGCTFTFYRHKKTDFIVWWNRKPPFKLNKLSCPSFHPGMLMQQKHKVLIPSFDTKPGGRAKIRIKIKPPTLLEDKWYTQQDLCPVNLAQLVVTAADFQHPFCSPQTNTPTTTFQVLKEMYYDTIGIVDTQENYTSVNNKSTRNTYKTFMETLQDKLYSTGSYWNSFHTAEYLNANVTDTHNNKIFNKANASLTTWLSSKGNDNFQTGNSTQFGYNSYKPNATNIKSANNCYWEALTKQNDQATQIGQARDKHFEYHTGIYSPIFLSRHRSTLNFARAYQDVTYNPNCDRGIKNRVWVQSLTKATTEFDEKRSKCVISNLPLWAALYCYHNFVEEELGISSEIYNTCIVCVQCPYTFPPMYDKKNPNKGYVFYDALFGNGKTPDGRGQVDVFWQQRWYPRMACQVQVMHDITMTGPFSYHDELVSTQLTAKYKFDFMWGGNMISSQIIKNPCKDTDMDTTYPSRQRRDLQIVDPHSMGPSFAFHTWDYRRGLFGKDAIDRVSKEQDYAPEYPNPYKKPRYFPPTDRAELQGQEEDWSFQVESEGSSSEESDQEAQEEEVLQFQPGQQLQQLHLQLAQQQQIGQQLRFLFQQMLKTQANLHLNPYTYTQL

SEQ ID NO: 138 - protein, 167 aa, Alphatorquevirus sp.
LAGLWARLLGSSLLKMFFGRPYRRKKRALLLSELPDPKKKPPGDMSWRPPVHNAAGIDRQFFEACFRCHNSCCGCGSFINHLNVLAARYGFTGGPAPPGGPRPARQVRPALPAPEPDPEADNREPWRGAGGGNDGDAAAGNPGAAAGDAYDGEDLDALFAAVAEDAE

SEQ ID NO: 139 - protein, 138 aa, Alphatorquevirus sp.
LEFPGRKRGVVVRRERSRSPRRGGTPVPARTAAPATPPAARAAAADRAAAPIPVPTNAQNPGQSAPKPIYIHPAINRVFMFEPQGPRPITTREGWEDEYSTASIWGRPVRSFYTDTPFYPEVPKMPPQFSVTFKLGWK

SEQ ID NO: 140 - DNA, 3824 bp, Alphatorquevirus sp.
cgggtgccggaggtgagtttacacaccgcagtcaaggggcaattcgggctcgggactggccgggctatgggcaaggctcttaaagaatgcgtttttctcgaatttatcgtagaaagaagaggctactgccactgctttgcctgccagcagaaccgaaagaacaacctgtgatgagttggcgctgtccccttgaaaatgcctataagagggaacagtacttcctcaggggctgccaaatgcttcacactagtttttgtggttgcgatgattttattaatcatgttattcgcctacaaaaccttcacggcaatctacaccaacccaccgggccgtccacacctccagtaggccgtagagctctggccctgccggcagctccggaaccatggcgtggagatggtggtgggcccgaaggcgaccgaaccgccgatggacccgcagacgctggaggagactacgcacccggagacctagacgacctattcgccgccgccgccgccgaccaagagtaaggaggaaacggtggggcaggaaacgggggcgacgacgctattacagacgtagatttaaaaaaagacgcaggagacgcagaaaactgactcttaaaatgtggaatccatccacaattagagcatgtaacataaagggtgctatatctcttgtaatgtgcggacacactcaggccggtagaaactatgccattagaagtgaagactttatacctcaacttcagagctttggagggtcttttagcaccaccacctggagcctaaaagtactgtttgatgagtatcagaagttccacaacttctggacataccccaacacccagctagacctctgcagatacaaatgtagtatatttaccttttacagagaccccaaagtagactacattgttatatacaacacacagcctccttttaaaattaacaagtacagcagtcctttcctacatcctggccttatgatgctacagaaaaaaaaaatactagttcctagctttcaaactaaaccagggggcaaagctagaattaaagttaaaattaagccccctcctctatttgaggacaagtggtacactcagcaagacttgtgtccagtaaacctgttatcacttgcggtttccgcatgcagcttcttacatccgttctgctcaccagaaagtgacacaatatgtgtaaccttccaggtcttgcgagagttttactacacacacttaactgtcactccaaccacaactacctctttaccaccagaagaccaagctatatttgacaactacctgtataaaaatgcaaacttttatcagtctttacatgcaccagctataataaacctagcacaacaaccagctaaatggacacaaaacaacattaattcattacaaaccaaaatttctaacataacaacatatttaagtagcacagtaacacaaaactcatttaaaactggaaataacagcatttatggccaaccaaattacaaccccaacaaacaatatctacacccaatgagagaatggttttttgaacaaacaactacagtaaatgaaatacatggcacatatggaaagcctacatataatgcagtagagtatcacctaggaaagtatagtcctatatttcttagtccttatagaactaacactcaatttcccactgcataccaagacacaacttataaccctaatgtagacaaaggaaaaggcaataaaatatggcttcaaagcacaactaaaaaaacatcagactttgaagaacgcagctgccgctgtactatctcagacctcccactgtgggctatggtaaatggctatgcagactatgcagagtctgaactaggatcagaagtatttgctgtatatgtttgctgtgtaatatgtccttatacaaagccacctttgtttaacaagtctaaacctgaaatgggctacatattttatgatacactgtttggagatggtaaactacccacaggcacaggccttgtacccttttactggcaaagtagatggtatcctaaactagcctggcaactacaagtaatgcatgacctatatgtatcaggccccttcagctacaaagatgaccttaaaagctttactataaacacaacctacaagtttaaattcttatggggtggcaatatgattcctgaacaggttatcaaaaacccgtgcaaaacaacagatccaacattcaccctgcccggtagacagcctcgcgacctacaaattgttgacccacttaccatgggcccgcaatgggaattccacacctgggactggagacgcggactgtttggacagagtgctactagaagagtgtcagaaaaaccaggaaatgatgcagagtattatgcgcctccaaaaaaacctagatttttcccaccaacagacctccaagagcaagaaaaagactcagattcacaggaggagacgagactcttatggcacccgtcgccgccaaggagccaagaagagatccagcaagagcagcagcgagacctccacctcagactcggacaacaactcagaatcagacagcagctccagcaagtcttcttacaagtcctcaaaacgcaagcgaacctccacataaatccattattcttaaaccaacaataaacacagtgtacatgtttcccccagacacacctaggcccataaacacagcagaaggatggaaacaagagtatgaggcagctagaacctgggataggcctgttagaagctactacacagacaccccttactacccctgggcccccatacccaaacagcctttctctgtatcttttaaactcggctacaaataaaaattcaaggccgtgggagtttcacttgtcggtgtctacctcttaaagtcactaagcactccgagcgttagcgaggagtgcgaccctcccccctggtacaacgccctcggagtccggcgctacgccttcggctgcgccggacacctcggccccccccctccacccgaaacgcttgcgcgtttcggaccttcggcgtcggggggggcgggggctttactaaacagactccgagttgccattggacactgagtgggcgtacagcaacgaaagtgagtggggccagacttcgccataaggcctttatcttcttgccattggtccgtgtagggggtcgccataggcttcggcctagtttttaggccttccggactacaaaaatggcggattccgtgacgtcatgaccgccattttaagtaaggcggaacaggctgtaaccttgtgtcaaagttcaaaggtcagccttccgctttgcacaaaatggtggacaatatcttccgggtcaaaggttatgcctacgtcataagtcacgtgagggaggctgctgtaaacacggaagtagctgacccgcgtgacttgtcacgtggtgcatacgtcaccgccgccattttgttttacaaaatggccgacttccttccgcttttttgaaaaaaggcgccaaaaaaccgccggcggcggcgcgcgcgctacgcgcgcgcgccggggggctccgccccccccccctgcgcatgcgcggggcccccccccccgcggggggctccgcccccccggccccccccccccgaagatcgtccccccccccgcggggggctccgccccccggcccccccccccccgaagatcgtcactaaccacgtggtactccacaggccaatcagaaccttctacgtacacttcctgggctgggtctttgagtccatataactaactgcacttccgaatggctgagttttccacgcccgtccgcagcgagaacaccacggaggggagtccgagcgtcccgaggg

SEQ ID NO: 141 - protein, 747 aa, Alphatorquevirus sp.; identical to SEQ ID NO: 68

SEQ ID NO: 142 - protein, 141 aa, Alphatorquevirus sp.; identical to SEQ ID NO: 69

SEQ ID NO: 143 - protein, 122 aa, Alphatorquevirus sp.; identical to SEQ ID NO: 70

SEQ ID NO: 144 - DNA, 3820 bp, Alphatorquevirus sp.
cgggtgccgaaggtgagtttacacaccgcagtcaaggggcaattcgggctcgggactggccgggctatgggcaaggctcttaaagcttatcactctaaaaaatgtttcttggcaggccttacaggaaaaagaaaaggacgctgtcactgtctggcgtgccagctccaccggctaaacggtctcgggagatgacctggcgccccccggttcacaatgccgccggcattgataggcagttttttgaagcctgctttcgatgccacgctggttgctgtgggtgcggcagttttattaatcatcttaatgtactggctgctcgctatggctttactggggggccggcgccgccaggtggtcctgggccgcgtgcgcaagtgaggcccgcgcttccagcgccggagcccgacccccacgccgagaaccgtgagccatggcgtggagctggtggtggcaacgatggagacggcgccgctggaaacccaggaggcgccgctggagacgcctacgatggagaagacctagacgcgctgttcgccgccgtcgccgaggacgcagagtaaggaggcggaggtgggcgcgtagacgggggcgacgcagacgatacgctaccagacgaaagagacgtatcaggggtcgccgctatagaaagaaactagtactaactcagtggcaccccagtactatgagacgctgtctaataaagggcatagttccaatggtgatatgcggccacaccagatggaactacaactacgccctccacagcgaggactacaccgaggagggccgctaccctcacggagggtccctcagcaccactacgtggtcccttaaggttctctatgacgaataccttaaacaccgcaacctctggggctatcccaacaatcagctagaccttgccaggtacaaaggtgccaggttcaccttctacagacacaaaaagactgactttatagtgtactttaacagaaagcctccctttaaacttaacaaatacagctgcccttcctatcaccccggcatgcttatgcagcagagacacaagatactaatacccagctacgacaccaaacccaagggcaggccaaaaataactgttagaataaagccccccactctgttagaggacaagtggtacacccagcaggacctgtgtaacgttaacctgttgcaacttgtggtttctgcggctgactttcaacatccgttctgctcaccacaaacgaacactccaaccacaaccttccaggtgttgaaagacatatattatgacaccatgagcatatctgaccctacagacagctacagtagtgttaataatttaactgaaacaaacactttttccaacttttcaaccaagttagaaaatattttatacacacgggcgtcctactggaactcgttccacgccacagagtacgtaaacccaaacattatttacaaagatggagacaaactttttaaaaacaatgcagagttaacaaattggatgacacaaagtagcaaaacaggttttttaactaaaaacaacacttcatttggtaataatagttatagaccaaataaagacaagataacaacagcaagaaacatttactggaatgccctagtgggcaccaacgacctggccactaacataggccaggccagagcagaacggtttgagtaccacctaggctggtactcacctatatttctcagcagacacagaagcaacctgaactttgccagggcctaccaagacgttacatacaacccaaactgtgacaggggagttaaaaatagagtgtggattcagtctctcactaaacccaccacagagtttgacgagaaaaggtgcaagtgcgttgtagaaaacctgcctctgtggagcgccctgtactgctaccaggactttgtagaagaagagctaggtacatcttcggagatactcaactcatgcttactggtagtgcagtgcccgtacacttctccacccatgtatgacaaaaaactacctaacaagggattcgtattctacgactccctgtttggagacggcaaaatgtctgacggacgcggacaggtagacattttctggcaacagcgatggtaccctcgcttagccactcagatgcaagtaatgcatgacattaccaaaaccggacccttttcctaccgagacgacctagtatcaacacaactgactgcaaagtacacctttgactttatgtggggcggtaatatgatctccacacagatcatcaagaacccctgcaaagacagtggactggaacccgcctaccccagtagactccgtcgcgacttacaaattgttgacccatactccatgggcccccagttctcattccacaactgggactacagacatggtctatttggccaagacgctatcgacagagtgtcaaaacaaccaaaagatgctgcagactatcctaacccatacaaaaggcctagatattttccacccacagaccaagccgttcaagagcaagaagaagacttcaatttcctcaaaacagcaccgtcgtcctcagaagagagcgatcaagaagtcctcgaaaaaacgcaagtactccagttccagccagagcagcacaagcaactccacctgcagctcgcagagcagcagcgaatgggagaccaactcagattcctactccaacaaatgttcaaaacccaagccaatctgcacctaaacccatatacatacacccagctataaacaaagtgttcatgttccccccagagggtcccaggcctatcacaacccgggagggatgggaagacgagtactgcaccgccaaacactggggcagacccgtccgttcgtactacacggacatccccttctatccagaggttcctaaagtaccccctcaattctctgtaactttcaaactcggctggaaataaaaatacaaggcctttcactgttcacttgtcggtgtctacctcttaaggtcactaagcactccgagcgttagcgaggagtgcgacccttccccctgatgcaacgccctcggcggccgcgcgctacgccttcggctgcgcgcggcacctcggacccccgctcgtgctgacacgcttgcgcgtgtcagaccacttcgggctcgcgggggtcgggaattttactaaacagactccgagttgccattggacactggagctgtgaatcagtaacgaaagtgagtggggccagacttcgccataaggcctttatcttcttgccatttgtacgtctcgggggtcgctcaaagcgcggaccccgtttttaccccttccgaactacaaaatcggccattttagtgacgtcacggcggccattttaagtaaggcggaagcagctccactgtatacaaaatggcggcggagcacttccggcttgcccaaaatggcggccaattacatccgggtgaaaggtcgcacctacgtcacaagtcacgtgggaagggttgccgtgtaacccggaagtcaatcctctcacgtggcctgtcacgtgacgtgcacgtcacagcggccattttgttttacaaaatggcggacttccttccgcttttttaaaaattaaccgtcggcggcggcgcgcgcgctgcgcgcgcggggccccccccccgcggggggctccgccccccggtcccccccccgaagtccgtcactaaccacgtgacttccacaggccaatcagagtctatgtcgtgcacttcctgggcatggtctacgtcctcatataagtaagtgcacttccgaatggctgagttttccacgcccgtccgcagcggcagcaccacggagggtgatctccgcgtcccgaggg

SEQ ID NO: 145 - protein, 765 aa, Alphatorquevirus sp.
MAWSWWWQRWRRRRWKPRRRRWRRLRWRRPRRAVRRRRRGRRVRRRRWARRRGRRRRYATRRKRRIRGRRYRKKLVLTQWHPSTMRRCLIKGIVPMVICGHTRWNYNYALHSEDYTEEGRYPHGGSLSTTTWSLKVLYDEYLKHRNLWGYPNNQLDLARYKGARFTFYRHKKTDFIVYFNRKPPFKLNKYSCPSYHPGMLMQQRHKILIPSYDTKPKGRPKITVRIKPPTLLEDKWYTQQDLCNVNLLQLVVSAADFQHPFCSPQTNTPTTTFQVLKDIYYDTMSISDPTDSYSSVNNLTETNTFSNFSTKLENILYTRASYWNSFHATEYVNPNIIYKDGDKLFKNNAELTNWMTQSSKTGFLTKNNTSFGNNSYRPNKDKITTARNIYWNALVGTNDLATNIGQARAERFEYHLGWYSPIFLSRHRSNLNFARAYQDVTYNPNCDRGVKNRVWIQSLTKPTTEFDEKRCKCVVENLPLWSALYCYQDFVEEELGTSSEILNSCLLVVQCPYTSPPMYDKKLPNKGFVFYDSLFGDGKMSDGRGQVDIFWQQRWYPRLATQMQVMHDITKTGPFSYRDDLVSTQLTAKYTFDFMWGGNMISTQIIKNPCKDSGLEPAYPSRLRRDLQIVDPYSMGPQFSFHNWDYRHGLFGQDAIDRVSKQPKDAADYPNPYKRPRYFPPTDQAVQEQEEDFNFLKTAPSSSEESDQEVLEKTQVLQFQPEQHKQLHLQLAEQQRMGDQLRFLLQQMFKTQANLHLNPYTYTQL

SEQ ID NO: 146 - protein, 152 aa, Alphatorquevirus sp.
MFLGRPYRKKKRTLSLSGVPAPPAKRSREMTWRPPVHNAAGIDRQFFEACFRCHAGCCGCGSFINHLNVLAARYGFTGGPAPPGGPGPRAQVRPALPAPEPDPHAENREPWRGAGGGNDGDGAAGNPGGAAGDAYDGEDLDALFAAVAEDAE

SEQ ID NO: 147 - protein, 59 aa, Alphatorquevirus sp.
MFPPEGPRPITTREGWEDEYCTAKHWGRPVRSYYTDIPFYPEVPKVPPQFSVTFKLGWK

SEQ ID NO: 148 - DNA, 3819 bp, Alphatorquevirus sp.
cgggtgccggaggtgagtttacacaccgcagtcaaggggcaattcgggctcgggactggccgggctatgggcaaggctcttagggtcatcgctcttaaatatgtttttcggcaggccttacagacaaaagaaaagggcgctgtcactgcttggcgtgcgaactccacagaagaaacgggctcgtgacatgacctggcgcccaccggtacacaatgccgccggcatcgacaggcagttctttgaggcttgttttcgatgccacgcaggttgctgtggctgcggtaattttgttagccatattaatgtactggctgctcgctatggcttcacagggggtccggcgccgccaggtggtcctgggccggcgccccaagtgagacccgcgcttccagcgcctgagccggaccccgagggtcctgagcctcagccatggcgtggagctggtggtggcaacgatggaggcgccgccgttggaaacccaggcgccgccgctggagacgcctacgacggagacgacctagacgccctcttcgccgccgtcgccgaggacgcagagtaaggaggcggaggtggggcaggagacgggggcgacgcagacggtacaccaccaaacgaaagagacgcaccaggggtcgcaactttaaaaagaaactagtactgactcagtggcacccctctagcataagacgctgcttaattaagggcatagtccccctggtaatatgcgggcacaccaggtggaactggaactacgccctgcacagtgaggactatactgaagagggtcgctatgcccacggggggtccctcagcaccactacgtggtcgctcaaggtgctctacgacgagtacttaaagcaccacaacttctggggctatcccaacaaccagctagacctggccaggtacaagggggcaaaattcaccttctacagacagaaaaagactgactttatagtgttctttaacagaaagcctccctttaagctaaacaaatacagctgcgcctcttaccaccctggcatgcttatgcagcaaagacacaaggtgctcattcccagctatgacactaaacccaagggcaggccaaaaataactgttagaataaagccccccactctgttagaggacaagtggtacactcagcaggacctgtgcgacgttaacctgttgcaacttgtggttactgcggctgactttcaacatccgttctgctcaccacaaacgaacactccaaccacaacgttccaagtgttgaaagacatttattacaacactatgagcatctctgagcccccagaggcctacagtaacgttaataagccttctgaatctaaaaacttttcaagttactcacaagagctagagaacatattatatgcaaggggctcctactggaactctttccacgcccttgagtacctcaacccaggcatatcagacacatacaacaataaaatatttaatggcacctctgcaacattaaacagttggcttacaggaaagggcaattcaaaatttcaaactggagacagcacccagttcggccacaatagctacaaacccactactgaaaacataaaaacagccagatcagcctactggactgccttaaacaggcctaatgaccttgctgttaacatagcacaggcaaaggcagagagattcgagtaccacctaggctggtactctcccatactactaagcaaccacagaagcaacttaaactttgccagggcctaccaagacgtcacctacaaccctaactgtgacagaggtgtaaaaaacagactgtgggttcagcctctcactaaacccaccacagagtttgatgaaaagagatgcaagtgtgtggtagagaacctgcccctgtgggcagccttctactgctaccacaactttgtagaagaggagctaggcatctcctctgaaatctacaactcctgtatagtagtagtgcagtgtccttatacctttcctcctctttatgacaaaaaactacccaacaaggggtacatattctatgacaccctgtttggcaacggcaaaatgcccgacggacgcggacagatagacgtcttctggcagcagcggtggtacccccgcatggccacgcagactcaggtgatgcatgacatcaccatgacaggccccttctcctaccacgacgagctagtaagcacacaactgactgccaagtacacctttgactttatgtggggcggcaatatgatctccacacagatcatcaagaacccctgcaaagacagtggactggaacccgcctatcccggtagacagcgtcgcaacttacaaattgttgacccacactccatgggcccgcaattctcgttccacaactgggactacagacggggcctatttggccaagacgctatcgacagagtgtcaaaagaaccaagagatgctccagagtatcctaacccatacaaaaggcctagatatcttcctcccacagaccgcgcagaccaagagcaagaaaaagacttcaatttccaggaagaaagcggggcgtcctcgtcagaagagaccgatcaagaagtcctccaagagacgcaagtactccagttcaagccagagcagcagcagcaactccacctgcagctcgcgcagcagcagcgactcggagagcaactccgattcctactccaccagatgttcaaaacccaagccaatctgcacctaaacccatatacatacacccagctataaacaaggtgttcatgttcgaccctgagggtcccaagcccataaacaccagagagggctgggcagatgagtaccacactgcctcagtttggggcaggcccgtacgttcctactacacagacacccccttctacccagaggttcccaaggtgccccctcaattctctgtaagttttaaactcggctggaaataaaaatgcaaggcctttcactgttcacttgtcggtgtctacctcttaaggtcactaagcactccgagcgtcagcgaggagtgcgacccttccccctggtgcaacgccctcggcggccgcgcgctacgccttcggctgcgcgcggcacctcggacccccgctcgtgctgacacgcttgcgcgtgtcagaccacttcgggctcgcgggggtcggtaaatttgctaaacagactccaagttgccattggacactggagctgtgaatcagtaacaaaagtgagtggggccagacttcgccataaggcctttatcttcttgccatttgtccgtgtagggggtcgccataggcttcggcctccattttaggccttccgaactaccaaaatggccgattccgtgacgtcatggcggccattttaagtaagctccacccaggactgacgtcagtgtcaaaggtcatcctcggcggaagcttacatgaaatggcggccaatttcttccgggtcaaaggtcacgcctacgtcattcgtcacgtggggaggcatactgcgcaaacgcggaagtaggccccgtcacgtgacggtcacgtgggtgctgcgtcacagccgccattttagttcacaaaatggccgacttccttccgcttttttaaaaattaaccgtcagcggcggcgcgcgcgctacgcgcgcgcaccgggggactttgcccccccccccccccccccccccgaagatcgtcactaaccacgtgactcccgcaggccaaccacagtctatgtcgtacacttcctgggcatggtctacgtaataatataaagcggtgcacttccgaatggctgagttttccacgcccgtccgcagcggcagcaccacggagggtgatccccgcgtcccgaggg

SEQ ID NO: 149 - protein, 767 aa, Alphatorquevirus sp.
MAWSWWWQRWRRRRWKPRRRRWRRLRRRRPRRPLRRRRRGRRVRRRRWGRRRGRRRRYTTKRKRRTRGRNFKKKLVLTQWHPSSIRRCLIKGIVPLVICGHTRWNWNYALHSEDYTEEGRYAHGGSLSTTTWSLKVLYDEYLKHHNFWGYPNNQLDLARYKGAKFTFYRQKKTDFIVFFNRKPPFKLNKYSCASYHPGMLMQQRHKVLIPSYDTKPKGRPKITVRIKPPTLLEDKWYTQQDLCDVNLLQLVVTAADFQHPFCSPQTNTPTTTFQVLKDIYYNTMSISEPPEAYSNVNKPSESKNFSSYSQELENILYARGSYWNSFHALEYLNPGISDTYNNKIFNGTSATLNSWLTGKGNSKFQTGDSTQFGHNSYKPTTENIKTARSAYWTALNRPNDLAVNIAQAKAERFEYHLGWYSPILLSNHRSNLNFARAYQDVTYNPNCDRGVKNRLWVQPLTKPTTEFDEKRCKCVVENLPLWAAFYCYHNFVEEELGISSEIYNSCIVVVQCPYTFPPLYDKKLPNKGYIFYDTLFGNGKMPDGRGQIDVFWQQRWYPRMATQTQVMHDITMTGPFSYHDELVSTQLTAKYTFDFMWGGNMISTQIIKNPCKDSGLEPAYPGRQRRNLQIVDPHSMGPQFSFHNWDYRRGLFGQDAIDRVSKEPRDAPEYPNPYKRPRYLPPTDRADQEQEKDFNFQEESGASSSEETDQEVLQETQVLQFKPEQQQQLHLQLAQQQRLGEQLRFLLHQMFKTQANLHLNPYTYTQL

SEQ ID NO: 150 - protein, 167 aa, Alphatorquevirus sp.
LAGLWARLLGSSLLNMFFGRPYRQKKRALSLLGVRTPQKKRARDMTWRPPVHNAAGIDRQFFEACFRCHAGCCGCGNFVSHINVLAARYGFTGGPAPPGGPGPAPQVRPALPAPEPDPEGPEPQPWRGAGGGNDGGAAVGNPGAAAGDAYDGDDLDALFAAVAEDAE

SEQ ID NO: 151 - protein, 59 aa, Alphatorquevirus sp.
MFDPEGPKPINTREGWADEYHTASVWGRPVRSYYTDTPFYPEVPKVPPQFSVSFKLGWK

SEQ ID NO: 152 - DNA, 3818 bp, Alphatorquevirus sp.
cgggtgccggaggtgagtttacacaccgcagtcaaggggcaattcgggctcgggactggccgggctatgggcaaggctcttaaagcgtacgtcccccgctatgtttctcggcagggtgtggaggaaacagaaaaggaaagtgcttctgctggctgtgcgagctgcacagaagacatcttccatgagtatctggcgtccccccctcgggaatgtctcctacagggagagaaattggcttcaggccgtcgaaggatcccacagttctttttgtggctgtggtgattttattcttcaccttactaatttggctgcacgttttgctcttcaggggcccccaccggagggtgctccgcctcggccgaggccgccgctcctgagagcgctgccggcacccgaggtccgcagggagacgcgtacggagaacccgggcgcctccggtgagccatggcctggcgatggtggtggcagagacgatggcgccgccgcccgtggccccgcagacgatggagacgcctacgacgccggagacctcgacgacctgttcgccgccgtcgaagaagagcaacagtaaggaggcggaggtggaggggcagacgtgggcgacgcacatacacccgacgcgcggtcagacgcagacgcagacccagaaagagacttgtactcactcagtggagcccccagacagtcagaaactgctccatcaggggtatagtgcccatggtaatatgcggacacacaaaagggggtagaaactatgccatccacagcgaagactttactacacagatacaacctttcgggggcagttttagcacgaccacctggtcgctgaaagtactctgggacgaacaccaaaaatttcaaaacaggtggtcctatccaaacacacagctagacctcgccagatacaagggagtcaccttctggttctacagagaccaaaagacagactacatagtacagtggagcagaaatcccccttttaagctaaacaaatacagcagctccatgtaccacccaggcatgatgatgcaggcaaaaaagaaactagttgtacctagtttccagaccagacctaaaggcaaaaagagatacagagtcagaataagaccccccaacatgtttgctgacaagtggtacactcaagaggacctgtgtccggtacctcttgtgcaaattgtggtttctgcggccaacctgctacatccgttctgcccaccacaaacgaacaacccttgcatcaccttccaggttttgaaagacatatatgacaactgcataggagttaactctacacaagaaacatcttataatatacttacagacatattatataacacctgtacatactatgaaacagtacaagtattggctcaattatctcccaatttccagccagctctaaaacccagcagcggacattcaaacgtaacaaaaacactaggagacgcagtagatgacttgaaatacaactcaggaaagttttatacaaaacaaaacccagtatttggcatgtgtaaatacaacccaacaaaagatactatgacagctgctaatcagtggttctgggacaaccttatgcatacaaatgacttacactcctcatatggcaaggcaaacttaaaatgcatggagtaccacacaggcatatacagctccatattcctaagtccccagagaggaatagaattcccagcagcataccaagacgtcacatacaatccaaactgtgacagagcagtaggtaacagggtctggttccaatacagtacaaaaatgaacacacactacgatgccacccaatgcaaatgtgtcttagaaaacatacccctctgggcggccttccatggctactcagactttatagagcaggagctcagcataagctcagaaatccacaactttggcgtagtggtatttcaatgcccgtacacctttcccccctgctacgacaaaaacaggccaaacaaaggatacgtgttctatgacaccacctttggtaatggaaagatgccagacgggtcagggcacatacccgtctactggcaacagaggtggtggatcagactagccttccaggtacaagtcatgcacgactttgtactctgcggcccctttagctacaaagatgacctagcgaacaccacactcacagccagatacaaatttagattcaaatggggcggtaatatcatccccgaacagattatcaagaacccgtgtcaaagacagcagtccctcgcttcctaccccgatagacaacgtcgcgacctacaagttgttgacccatcaaccatgggcccgatctacaccttccacacatgggactggcgacgggggctttttggtgcagatgctatcaagagagtgtcacaaaaaccgggagatgctctccgctttacaaaccctttcaagagacccagatatcttcccccgacagacggagaagactaccgacaagaagaagacttcgctttacaggaaaaaagaaggcgcacatccacagaagaagtccaggacccggagagccccccgcaaagcgcgccgctcctacagcagcagcagcagcaccgggagctctcagtccagctcgcggagcagcagcgactcggagtccaactccgatacatcctccaagaagtcctcaaaacgcaagcgggtctccacctaaaccccctattattaggcccgccagaaacaaggtctatctctttgagccctccagaggcctacaccccatagtgggcagagaggcctgggaggacgaatacctgtgctgtaagtactgggatagacctcccagaaccaaccacctagacatgcccacctatccctggatgcccaccaacttcaaagtcagcttcaaacttggatttaaaccctaaataaaaatttcaaggccgtacactgttcacttgtcggtgtctacctcttaaggtcactaagcactccgagcgcagcgaggagtgcgacccttctgggtgggtgcaacgccctcggcggccgcgcgctacgccttcggctgcgcgcggcacctcggacccccgctcgtgctgacacgctcgcgcgtgtcagaccacttcgggctcgcgggggtcgggaattttgctaaacagactccgagttgccattggatactgtagctgtgaatcagtaacgaaagtgagtggggccagacttcgccataaggcctttatcttcttgccattggtcagtgtcgggggtcgccataggcttcgggctcggttttaggccttccggactaccaaaatggcggattccgtgacgtcatggccgccattttgagtaaggcggaacaggctgtcaccccgtgtcaaaggtcaggggtcagccttccgctttgcacaaaatggagggcaatatcttccgggtcagaggtcgctaccgcgtcataagtcacgtgggaacggctgctgtaaacccggaagtagctgacccacgtgacttgtcacgtgactagcacgtcacagccgccattttgtatcacaaaatggccgacttccttcctcttttttaaaaataacggcccggcggcggcgcgcgcgcttcgcgcgcggcccggccagtcccgagcccgaattgccccttgactgcggtgtgtaaactcacccccggcccccccccgtcgtggatcgtcactaaccacgtgactctcacaggccaaccacagtctatgtcgtacacttcctgggcatggtctacgtgataatataagacggcgcacttccgaatggctgagttttcgccgcccgtccgcagcgagatcgcgacggaggagcgatcgagcgtcccgaggg

SEQ ID NO: 153 - protein, 765 aa, Alphatorquevirus sp.
MAWRWWWQRRWRRRPWPRRRWRRLRRRRPRRPVRRRRRRATVRRRRWRGRRGRRTYTRRAVRRRRRPRKRLVLTQWSPQTVRNCSIRGIVPMVICGHTKGGRNYAIHSEDFTTQIQPFGGSFSTTTWSLKVLWDEHQKFQNRWSYPNTQLDLARYKGVTFWFYRDQKTDYIVQWSRNPPFKLNKYSSSMYHPGMMMQAKKKLVVPSFQTRPKGKKRYRVRIRPPNMFADKWYTQEDLCPVPLVQIVVSAANLLHPFCPPQTNNPCITFQVLKDIYDNCIGVNSTQETSYNILTDILYNTCTYYETVQVLAQLSPNFQPALKPSSGHSNVTKTLGDAVDDLKYNSGKFYTKQNPVFGMCKYNPTKDTMTAANQWFWDNLMHTNDLHSSYGKANLKCMEYHTGIYSSIFLSPQRGIEFPAAYQDVTYNPNCDRAVGNRVWFQYSTKMNTHYDATQCKCVLENIPLWAAFHGYSDFIEQELSISSEIHNFGVVVFQCPYTFPPCYDKNRPNKGYVFYDTTFGNGKMPDGSGHIPVYWQQRWWIRLAFQVQVMHDFVLCGPFSYKDDLANTTLTARYKFRFKWGGNIIPEQIIKNPCQRQQSLASYPDRQRRDLQVVDPSTMGPIYTFHTWDWRRGLFGADAIKRVSQKPGDALRFTNPFKRPRYLPPTDGEDYRQEEDFALQEKRRRTSTEEVQDPESPPQSAPLLQQQQQHRELSVQLAEQQRLGVQLRYILQEVLKTQAGLHLNPLLLGPPETRSISLSPPEAYTP

SEQ ID NO: 154 - protein, 171 aa, Alphatorquevirus sp.
LAGLWARLLKRTSPAMFLGRVWRKQKRKVLLLAVRAAQKTSSMSIWRPPLGNVSYRERNWLQAVEGSHSSFCGCGDFILHLTNLAARFALQGPPPEGAPPRPRPPLLRALPAPEVRRETRTENPGASGEPWPGDGGGRDDGAAARGPADDGDAYDAGDLDDLFAAVEEEQQ

SEQ ID NO: 155 - protein, 187 aa, Alphatorquevirus sp.
MGLATGAFWCRCYQESVTKTGRCSPLYKPFQETQISSPDRRRRLPTRRRLRFTGKKKAHIHRRSPGPGEPPAKRAAPTAAAAAPGALSPARGAAATRSPTPIHPPRSPQNASGSPPKPPIIRPARNKVYLFEPSRGLHPIVGREAWEDEYLCCKYWDRPPRTNHLDMPTYPWMPTNFKVSFKLGFKP

SEQ ID NO: 156 - DNA, 3817 bp, Alphatorquevirus sp.
cgggtgccgaaggtgagtttacacaccgcagtcaaggggcaattcgggctcgggactggccgggctatgggcaaggctcttaaaaagctatgtttctcggcaggtgctggagaaagaaaaggaaagtgcttctgcaagctgtgtcaactgcagcgcaaaaacctgctatgagtgcgtgggtccctcctatagataatgttacccagcgtgagaggaactggttcaacagcatttttcagtgccacagagctttttgtgggtgcaatgatgctatctatcatcttagcactctggctgctcgctttaatatgcagtcagggccgtcgccgggtgataattctaggccgccgcgacagccactgagacgcctgccagcgctccctgctccgcaaaactcccctaacagcagcaaccggaggtcatggcctggtggggatggtggcgccgccggtggccccgaaggagatggaggcgctggaggacccgccgtcgcagacgactaccagccagaagacctagacgacctgttcgccgctatcgaaggagaagagtaaggaggcgccgcggctgggggcggtatgggcgacgcaggcggagactgtacagacgcagatacagggtcagacgcaagagaaaaaagctaataattaaacaatggcagccagctaacatcagacgctgccgcatcaggggtcttttacccatagttatctgtggacacggacgcagtgccagaaactatgccctgcactctgatgacactgtacctcagagacaggccttcggaggggctctaagcaccacctccttcagcctaaaagtactgtatgatcagcacctcagattcctaaacaggtggtcttctagcaacgacgtactagaccttgccagatacctaggctgtagatttaccttttacagagacaaaaagactgactacattgtacagtatgatatcagtgctccctacaaactagacaaagacagcagtcccagctaccatccaggcataatgatgcagaccagacacaagatactagtacccagctttgacaccagacccaaggggcgagctaaaatctccattagactacccccacctaaaatgttcatagacaagtggtattcacaagaggacctctgtaccgttaatcttgtgtcacttgtggtcagcccagcttcctttctacatccgttctgcccaccactaactgacaatccttgcatcaccttccaggtgttgaaagacttctactaccccgttataggctactctagcgaccctgacaaagtacaagcagtatttgccaataaactttataaacatccatattactaccagcaaatacttacagactcttttattaaaaaactaatgaaaaatccagatggtacagacatatccacaaaacactcttcaggcacaacaacatgtcccgacatgactgcatacaactcatgggtagttaactttaaaaagccaaatgtaaatgtacatttcaactactgcacatacacaccagacagcactcacctagaatcactaagaaaatactacttttactgggaaacagtcactacaggaaaatgtgtcacagttaatatgatagccccctcacaaaattggtgggaatacaaaataggcctcttcagtcctatatttttaagccccttcagaactagcagtctagactttcccacagcctacagagacgtctcatacaaccccctaaatgacaagggagtgggcaacatgatgtggtaccagtacaacaccaaggcagacacacagtttgtaccctcttcctgtaaagttgtactgcaagacaaacccctctggtgcatggcctatggctactcagactttattcagagcaccataggagagtaccaagacacagaactcaatggctttgtctgtgtcatctgtccttatacaatacccccaatgtacaacaaagacaatccccagatggggtacgtgttctatgacagttcatttggtaatggcaaatggatagacggaaccgggtttgtcccactagaaatgcagagcagatggcgaccagaactgctgttccaagagcaagtactaactgacattagcatgactggaccgttcagctacaaagacgatgtaaagaacactactattaccatgaagtacagatttgactttaaatggggtggcaatatgctctatcagcagacgatcagaaacccgtgccggggcgacggacagccttccgactcccatagagacactagatcagtacaaatcgttgacccgcttaccatgggtccccgatacgccttccatcagtgggactggagacgcgggtggcttagtgacaaagctctcaaaagaatgttacaaaaaccgcttgattttgaagcgtatacaaaacctgcaaagagacctagactattcccccctacagacgaacaagattcagaccgaaggccaagagacgcctccacttcggaagaagaaagcatccttacccttcaagaagagagcccgccgaaccaagagatacaagtccacctccgaaagcagctcctcgagcagcgagcactccgacagcagctcaagctcatgttccagcaactcctcaaaacccaggcgggcatccaactcaacccattattattcaaccaagcataaatcaggtgctaatgtttccagaaagaggtccaaaacccgctcctagcacaggagactgggagacagaatacctagcctgtaagttctgggacaggcctgccagaaagtatctcacagatacccctttctacccctggatgccccctgcacctcctaagtactctgtaagcttcaaacttggctttaaaccctaaataaacaaggccatacactgttcacttgtcggtgtctacctcttaaggtcactaagcactccgagcgtaagcgaggagtgcgacccttccccctgactcaacttcttcggagccgcgcgctacgccttcggctgcgcgcggcacctcagacccccgctcgtgctgacacgctcgcgcgtgtcagaccacttcgggctcgcgggggtcgggaattttgctaaacagactccaggttgccattggacactggagctgtgaatcagtaacgaaagtgagtggggccagacttcgccataaggcctttatcttcttgccatttgtcagtgtccggggtcgccataggcttcggccccgttttcaggccttccggactacaaagatggcggattccgtgacgtcatggccgccattttgagtaggtgccatccaggactgccgttccgggtcaaagggcatcctcggcggaacctacacaaaatggtggacaacctcttctgggtcaaaggtcacacctacgtcacaagtcacgtggggagggcctgctgcgcatacacggaagtaggccccgccacgtgaccaatcacgtggttgcaacgtcatcgccgccattttgaatcacaaaatggccgacttccttcctcttttttaaaaataacggcccagcggcggcgcgcgcgcttcgcgcacgcgccgggggggctccgccccccaccttaagaggtagacaccgacaagtgaacagtgtatggcccccgcggggggctccgccccccggtcccccccccgaagtacgtcactaaccacgtgactcccacaggccaaccatatgctatgtcgtgcacttcctgggaggagtctacgtcctgatataagtaagtgcacttccgaatggctgagttttccacgcccgtccgcggcgagatcgcgacggaggagcgatcgagcgtcccgaggg

SEQ ID NO: 157 - protein, 748 aa, Alphatorquevirus sp.
MAWWGWWRRRWPRRRWRRWRTRRRRRLPARRPRRPVRRYRRRRVRRRRGWGRYGRRRRRLYRRRYRVRRKRKKLIIKQWQPANIRRCRIRGLLPIVICGHGRSARNYALHSDDTVPQRQAFGGALSTTSFSLKVLYDQHLRFLNRWSSSNDVLDLARYLGCRFTFYRDKKTDYIVQYDISAPYKLDKDSSPSYHPGIMMQTRHKILVPSFDTRPKGRAKISIRLPPPKMFIDKWYSQEDLCTVNLVSLVVSPASFLHPFCPPLTDNPCITFQVLKDFYYPVIGYSSDPDKVQAVFANKLYKHPYYYQQILTDSFIKKLMKNPDGTDISTKHSSGTTTCPDMTAYNSWVVNFKKPNVNVHFNYCTYTPDSTHLESLRKYYFYWETVTTGKCVTVNMIAPSQNWWEYKIGLFSPIFLSPFRTSSLDFPTAYRDVSYNPLNDKGVGNMMWYQYNTKADTQFVPSSCKVVLQDKPLWCMAYGYSDFIQSTIGEYQDTELNGFVCVICPYTIPPMYNKDNPQMGYVFYDSSFGNGKWIDGTGFVPLEMQSRWRPELLFQEQVLTDISMTGPFSYKDDVKNTTITMKYRFDFKWGGNMLYQQTIRNPCRGDGQPSDSHRDTRSVQIVDPLTMGPRYAFHQWDWRRGWLSDKALKRMLQKPLDFEAYTKPAKRPRLFPPTDEQDSDRRPRDASTSEEESILTLQEESPPNQEIQVHLRKQLLEQRALRQQLKLMFQQLLKTQAGIQLNPLLFNQA

SEQ ID NO: 158 - protein, 154 aa, Alphatorquevirus sp.
MFLGRCWRKKRKVLLQAVSTAAQKPAMSAWVPPIDNVTQRERNWFNSIFQCHRAFCGCNDAIYHLSTLAARFNMQSGPSPGDNSRPPRQPLRRLPALPAPQNSPNSSNRRSWPGGDGGAAGGPEGDGGAGGPAVADDYQPEDLDDLFAAIEGEE

SEQ ID NO: 159 - protein, 60 aa, Alphatorquevirus sp.
MFPERGPKPAPSTGDWETEYLACKFWDRPARKYLTDTPFYPWMPPAPPKYSVSFKLGFKP

SEQ ID NO: 160 - DNA, 3817 bp, Alphatorquevirus sp.
cgggtgccggaggtgagtttacacaccgcagtcaaggggcaattcgggctcgggactggccgggctatgggcaaggctcttaaagaatgcgtttttctcgaatttatcgtagaaagaagaggctactgccactgctttgcctgccagcagaaccgaaagaacaacctgtgatgagttggcgctgtccccttgaaaatgcctataagagggaacagtacttcctcaggggctgccaaatgcttcacactagtttttgtggttgcgatgattttattaatcatgttattcgcctacaaaaccttcacggcaatctacaccaacccaccgggccgtccacacctccagtaggccgtagagctctggccctgccggcagctccggaaccatggcgtggagatggtggtgggcccgaaggcgaccgaaccgccgatggacccgcagacgctggaggagactacgcacccggagacctagacgacctattcgccgccgccgccgccgaccaagagtaaggaggaaacggtggggcaggaaacgggggcgacgacgctattacagacgtagatttaaaaaaagacgcaggagacgcagaaaactgactcttaaaatgtggaatccatccacaattagagcatgtaacataaagggtgctatatctcttgtaatgtgcggacacactcaggccggtagaaactatgccattagaagtgaagactttatacctcaacttcagagctttggagggtcttttagcaccaccacctggagcctaaaagtactgtttgatgagtatcagaagttccacaacttctggacataccccaacacccagctagacctctgcagatacaaatgtagtatatttaccttttacagagaccccaaagtagactacattgttatatacaacacacagcctccttttaaaattaacaagtacagcagtcctttcctacatcctggccttatgatgctacagaaaaaaaaaatactagttcctagctttcaaactaaaccagggggcaaagctagaattaaagttaaaattaagccccctcctctatttgaggacaagtggtacactcagcaagacttgtgtccagtaaacctgttatcacttgcggtttccgcatgcagcttcttacatccgttctgctcaccagaaagtgacacaatatgtgtaaccttccaggtcttgcgagagttttactacacacacttaactgtcactccaaccacaactacctctttaccaccagaagaccaagctatatttgacaactacctgtataaaaatgcaaacttttatcagtctttacatgcaccagctataataaacctagcacaacaaccagctaaatggacacaaaacaacattaattcattacaaaccaaaatttctaacataacaacatatttaagtagcacagtaacacaaaactcatttaaaactggaaataacagcatttatggccaaccaaattacaaccccaacaaacaatatctacacccaatgagagaatggttttttgaacaaacaactacagtaaatgaaatacatggcacatatggaaagcctacatataatgcagtagagtatcacctaggaaagtatagtcctatatttcttagtccttatagaactaacactcaatttcccactgcataccaagacacaacttataaccctaatgtagacaaaggaaaaggcaataaaatatggcttcaaagcacaactaaaaaaacatcagactttgaagaacgcagctgccgctgtactatctcagacctcccactgtgggctatggtaaatggctatgcagactatgcagagtctgaactaggatcagaagtatttgctgtatatgtttgctgtgtaatatgtccttatacaaagccacctttgtttaacaagtctaaacctgaaatgggctacatattttatgatacactgtttggagatggtaaactacccacaggcacaggccttgtacccttttactggcaaagtagatggtatcctaaactagcctggcaactacaagtaatgcatgacctatatgtatcaggccccttcagctacaaagatgaccttaaaagctttactataaacacaacctacaagtttaaattcttatggggtggcaatatgattcctgaacaggttatcaaaaacccgtgcaaaacaacagatccaacattcaccctgcccggtagacagcctcgcgacctacaaattgttgacccacttaccatgggcccgcaatgggaattccacacctgggactggagacgcggactgtttggacagagtgctactagaagagtgtcagaaaaaccaggaaatgatgcagagtattatgcgcctccaaaaaaacctagatttttcccaccaacagacctccaagagcaagaaaaagactcagattcacaggaggagacgagactcttatggcacccgtcgccgccaaggagccaagaagagatccagcaagagcagcagcgagacctccacctcagactcggacaacaactcagaatcagacagcagctccagcaagtcttcttacaagtcctcaaaacgcaagcgaacctccacataaatccattattcttaaaccaacaataaacacagtgtacatgtttcccccagacacacctaggcccataaacacagcagaaggatggaaacaagagtatgaggcagctagaacctgggataggcctgttagaagctactacacagacaccccttactacccctgggcccccatacccaaacagcctttctctgtatcttttaaactcggctacaaataaaaattcaaggccgtgggagtttcacttgtcggtgtctacctcttaaagtcactaagcactccgagcgttagcgaggagtgcgaccctcccccctggtacaacgccctcggagtccggcgctacgccttcggctgcgccggacacctcggccccccccccctccacccgaaacgcttgcgcgtttcggaccttcggcgtcggggggggggcgggggctttactaaacagactccgagttgccattggacactgagtgggcgtacagcaacgaaagtgagtggggccagacttcgccataaggcctttatcttcttgccattggtccgtgtagggggtcgccataggcttcggcctagtttttaggccttccggactacaaaaatggcggattccgtgacgtcatgaccgccattttaagtaaggcggaacaggctgtaaccttgtgtcaaagttcaaaggtcagccttccgctttgcacaaaatggtggacaatatcttccgggtcaaaggttatgcctacgtcataagtcacgtgagggaggctgctgtaaacacggaagtagctgacccgcgtgacttgtcacgtggtgcatacgtcaccgccgccattttgttttacaaaatggccgacttccttccgcttttttgaaaaaaggcgccaaaaaaccgccggcggcggcgcgcgcgctacgcgcgcgcgccggaagatattgtccaccattttgtgcaaagcggaaggctgacctttgaacttccccccccccccccctgcgcatgcgcggggccccccccccgcgggggggctccgccccccggccccccccccgaagatcgtcactaaccacgtggtactccacaggccaatcagaaccttctacgtacacttcctgggctgggtctttgagtccatataactaactgcacttccgaatggctgagttttccacgcccgtccgcagcgagaacaccacggaggggagtccgagcgtcccgaggg

SEQ ID NO: 161 - protein, 747 aa, Alphatorquevirus sp.; identical to SEQ ID NO: 68

SEQ ID NO: 162 - protein, 141 aa, Alphatorquevirus sp.; identical to SEQ ID NO: 69

SEQ ID NO: 163 - protein, 122 aa, Alphatorquevirus sp.; identical to SEQ ID NO: 70

SEQ ID NO: 164 - DNA, 3810 bp, Alphatorquevirus sp.
cgggtgccgtaggtgagtttacacaccggagtcaaggggcaattcgggctcgggactggccggaccccgggcaaggctcttaaaaaagctatgtttctcggtaggccttggagaaagaaaagggcactgctactgtcttgcttgcgagctccaaagaaaaaaccacctgcaatgagccactggtgcccgcctgtacacagcgttcagggtcgcaaccaccagtggtatgaagcctgctatcgtggtcatgctgcttactgtggctgtggcgattttattaggcatcttgttgctctgggtgatcagtttggttttaggcctggtccccgtgctcccggcgcgcctggagtagggggacccccgcttccgctccgtagagcgctgcccgcacccccggcggccgctccggagccccagcagggcaacaacaacaacaaccagcagctggagagatggcctggggatggtggagacgacgccggcgagggtggctccggagcctatggaggagacgcaggactgccagaagacgacttagacggcctgctcgccgctatagacgacgaagagtaaggagaaagagacgatggaggagggggcgacccagacgcagactgtacagacgcaggagacgctttaagagacgcagacgcaggagacctaagataaaactgacacagtggcaacccagcacagttaaacgctgctttataatagggtacattcccgcagttatatgcggggctggtaaatggtcagaaaactttactagtcacatagaggacaagatagccgtgggcagctatggcggggggcacagtaccagtaggtggtccctaaaagtactgtacgaggagtttcagaagcaccacaacttctggaccaaaagcaataaggagctagacctggccaggttctttggcagcacctggacattttacagacacgaagatgtagactacatagtaacatataacagaaaggcccctctaggaggtaacatactaacagcacccagcatgcatccaggagtagctatgcttagcaaacacaagatagtagtacccagttttaagaccagaccagggggcaaacccacagttaaatttagaataaagccccccaccacctttatagacaagtggtactttcagaaggacatatgtgacctaacactactaaacatgaacgttgtagcttgcaacttgcggtttccgttctgctcaccacaaacgaacaacgttaacgtaaccttccagatattgcatgaggtttaccacaacttcctctctataactgatgaacaattaacattagatgcagaaagctggaaaaagcactataaaaacttcttaaagcaagtatttaaaacagacagagacgcaaacaaattaaacacatttgccactgagggagcctttcatgaacctaaagtagaaaagtacaaaaagccttttgctgacaacgagtactttaaaagtaaagacgcacagtggggagatgccatacacatactagcagcaggagacacaataagtaatcaaaaaacacaaaccaaagatgagcttatagacagaattgttaagaatgctgaaaactacttaaaaaaggtaacacaagaattaggaggagcaaacatacaaagatttatacacggaatgttcacacagtggacaggaatattcagtcctgcatttttagactacagcagaataagtccagaaataccaggtgtttataaagacattatatacaacccacttacagacagaggcataggcaacggagtgtggatagactactgcagcaaaaaagacaccaaatacgacccctcaaaaagtaaatgtggcatatttgacctaccgctatggatggccacctttggcctagtagactggtgcaaaaaagaaacaggacagtggggcataccttcctgggccagagtaataattaaatgcccttacacctttccaaaaatgatagactcaacagatgagtcagtgggctttgtcccaatagggtacaactttgccaaaggcctaatgccagacggcacaaagtacattcctatactaatgagacacaaatggtaccccaaccttctacaccagcagtctgtgctagaagacctaagcagaagcggcccctttagctatcaagagaaaaacatgagtgcaaacataacagcaaaatacaaatttagatggcattttgggggcaaccctgtatttgaacaggttgtcgcagacccctgccaacaaacaacctatgaaatgcccggagccggtacgatgcctcgcagagtacaagtcactgacccgaaactcatcgggccccactacaccttccacagctgggacctcagacgtgactattttagcagaaaaagtattaagagaatgtcagaacaacaagaaacttctgagtttcttttctcaggcccaaaaaaaccccgaatcgatttggacgcagtgcaaattgtcgaaaaaaactctttgcaccaagaaagaaaacaaaaaccctgggagagcagccagtcggaaacagagacagaagccccctcggaagaagaagaaacgagctcggtacaccagcagctccagcagcaactccgagagcaaaagcagctccggaggggaatcgagtgcctcttccagcagctgataaaaacccagcagggagtccacatagatccctcccttgtgtaggcccacagcagtggctctttcccgagagaaagcccaaaccccctcccagcaaaggagactgggagacagagtatgcagcttgcaaagcctttaatagaccccctagatccttcttaacagaccgaccttactacccttactgcaaaaaccaatacaatgtaacctttaagatcggtttcaaataaacaaggccgtgggagtttcacttgtcggtgtctacctcttaaggtcactaagcactccgagcgtcagcgaggagtgcgacccttcccccttactcaacttcttcggagccgcgcgctacgccttcggctgcgcgcggcacctcagacccccgctcgtgctgacacgctcgcgcgtgtcagaccacttcgggctcgcgggggtcgggaattttgctaaacagactccgagttgccattggacactgtagctgtgaatcagtaacgaaagtgagtggggccagacttcgccataaggcctttatcttcttgccattggtccgtctcgggggtcgtcgtaggcttcgggctcggttttaggccttccggactacaaatatggccgttttcgtgacgtcacggccgccattttaagtcagcgctggggaggcgtgacgttaagttcaaaggttatcctcaccggaactggcacaaaatggccgtcaatttcttccgggtcaaaggtcagcgctacgtcataggtgacgtagctggtgtctgctgtaaacgcggaagtaggacccgctacgtcacttgtcacgtgacgctgcgtcacagccgccattttgttttacaaaatggccgacttccttcctcttttttaaaaattaaccgttggcggcggcgcgcgcgctgcgcgcgcgcacaggcgcatgcgcgcggggcccccccccagcggggggctccgccccccggccccccccgtgctacgtcactaacctacgtgtccgtcttccataggccggacacagtctacgtcatccacttcctgggcatggtctacgtgattatataaggcgcggcacttccgaatggctgagttttttctgtccgtccgcagcgaggaacgaccacggagggcgatccgcgcgtcccgaggg

SEQ ID NO: 165 - protein, 751 aa, Alphatorquevirus sp.
MAWGWWRRRRRGWLRSLWRRRRTARRRLRRPARRYRRRRVRRKRRWRRGRPRRRLYRRRRRFKRRRRRRPKIKLTQWQPSTVKRCFIIGYIPAVICGAGKWSENFTSHIEDKIAVGSYGGGHSTSRWSLKVLYEEFQKHHNFWTKSNKELDLARFFGSTWTFYRHEDVDYIVTYNRKAPLGGNILTAPSMHPGVAMLSKHKIVVPSFKTRPGGKPTVKFRIKPPTTFIDKWYFQKDICDLTLLNMNVVACNLRFPFCSPQTNNVNVTFQILHEVYHNFLSITDEQLTLDAESWKKHYKNFLKQVFKTDRDANKLNTFATEGAFHEPKVEKYKKPFADNEYFKSKDAQWGDAIHILAAGDTISNQKTQTKDELIDRIVKNAENYLKKVTQELGGANIQRFIHGMFTQWTGIFSPAFLDYSRISPEIPGVYKDIIYNPLTDRGIGNGVWIDYCSKKDTKYDPSKSKCGIFDLPLWMATFGLVDWCKKETGQWGIPSWARVIIKCPYTFPKMIDSTDESVGFVPIGYNFAKGLMPDGTKYIPILMRHKWYPNLLHQQSVLEDLSRSGPFSYQEKNMSANITAKYKFRWHFGGNPVFEQVVADPCQQTTYEMPGAGTMPRRVQVTDPKLIGPHYTFHSWDLRRDYFSRKSIKRMSEQQETSEFLFSGPKKPRIDLDAVQIVEKNSLHQERKQKPWESSQSETETEAPSEEEETSSVHQQLQQQLREQKQLRRGIECLFQQLIKTQQGVHIDPSLV

SEQ ID NO: 166 - protein, 160 aa, Alphatorquevirus sp.
MFLGRPWRKKRALLLSCLRAPKKKPPAMSHWCPPVHSVQGRNHQWYEACYRGHAAYCGCGDFIRHLVALGDQFGFRPGPRAPGAPGVGGPPLPLRRALPAPPAAAPEPQQGNNNNNQQLERWPGDGGDDAGEGGSGAYGGDAGLPEDDLDGLLAAIDDEE

SEQ ID NO: 167 - DNA, 3808 bp, Alphatorquevirus sp.
cgggtgccgtaggtgagtttacacaccggagtcaaggggcaattcgggctcgggactggccggaccccgggcaaggctcttaaaaaaggcatgtttttcggtagggcttggagaaagaaaagggcactgctactgtctggcctgcgagctccaaagaaaaaaccacctgcaatgagccagtggtgcccgcctgtacacagtgttcagggtcgcaaccaccagtggtatgaagcctgctatcgtggtcatgctgcttactgtggctgtggcgattttattaggcaccttgttgctctgggtgatcagtttggtttcaggcctggtccccgtgctcccggcgcgcctggggtagggggacccccgcctccgctccgtagagcgctgcccgcacccccggcggccgctccggagccccagcagggcaacaacaacaacaaccagcagctggacagatggcctggggatggtggagacgacgccggcgagggtggctccggagcctatggaggagacgcaggactgccagaagacgatttagacggcctgctcgccgctatagacgacgaagagtaaggagaaaaagacgatggaggagggggcgacccagacgcagactgtacaaacgcaggagacgctttaagagacgcagacgcaggagacctaagataaaacttacacagtggcagcctagcactgtcaaacgctgctttataatagggtacattcccgggattatatgcggccccggaaaatggtcagagaactttaccagtcacatagaggacaagatagccgtgggaagctatggtggggggcacagtaccagtaggtggtccctaaaagtactgtacgaggagttccagaagcaccacaacttctggaccaaaagcaataaggagctagacctcgccaggttctttggcagcacatggacattttacagacacgaagatgtagactacatagtaacatataacagaaaagcccctctgggaggtaacatactaacagcacccagcatgcacccaggagtagccatgctaagcaaacacaaaatagtagtacccagttttaagaccagaccaggaggcaaacccacagttaaatttagaataaagccccccacaactttcatagataaatggtactttcagaaagacatatgtgaccttacactactaaacttgaacgttgtagcctgcaacttgcggtttccgttctgctcaccacaaacgaacaacattaacgtaaccttccaggtgttacatgaggtttaccacaacttcctctctataactgacgagcagttaacccaaagtagctcaagttgggaattgcactataaaaaatttttagatcaagtatttaaaacagagagagacgcaaacaaattaaacacatttgcaaccgagggagctttccatgcaccacagatagaaaagtataaaaaaccacttcaaaaagatgaatactttaaaacaaaagacgctctgtggggagatagcatacacatattaagtactggacaaacacaaggtacacaagaaacacaatccttagacgaactaaaaaaaaaaatagtagacaatgcaaaaaactatgttacaaaagtagtacaagaactaggaggtgaccaggtaaaaagattcatacatggaatgttcacacagtggacaggcatatttagccctgcattcttagactacagcagaataagcccagaaataccaggtttatataaagacattatttataacccacttactgacaaaggcataggaaacggagtatggatagactactgcagcaaaaaagacaccaaatatgaccctacaaagagcaaatgtggcatatttgacctacctctctggatgtgctgctttggcctggtagactggtgcaaaaaagagacaggacagtggggcataccttcctgggccagagtaattataaaaagtccttacacctttccaagacttataaactcagcagatgaaagtgagggctgggtaccaattggatacaacttttccaaaggttatatgccagacggcacaaagtacactcccatactaatgagacacaaatggtaccccaaccttttacaccagcaatcagtactagaagacatatccaggagcggtccctttagctaccaagagaaaaaccttagtgcaaacataacagcaaaatacaaatttagatggcattttgggggcaaccctgtgtttgaacaggttgtcgcagacccctgccaacaaacaacctatgaaatgcccggagccggtacgatgcctcgcagagtacaagtcactgacccgaaactcatcgggccacactacaccttccacagctgggacctcagacgtgactattttagcagaaaaagtattaagagaatgtcagaacaacaagaaacttctgagtttcttttctcaggcccaaaaaaaccccgaatcgatttggacgcagtgcaaattgtcgaaaaagactctttgcaccaagaaagaaaacaaaaaccctgggagagcagccagtcggaaacagagacagaagccccctcggaagaagaagaaacgagctcggtacaccagcagctccagcagcaactccgagagcaaaagcagctccggaggggaatcgagtgcctcttccagcagctgataaaaacccagcagggagtccacatagatccctcccttgtgtaggcccacaacagtggctgtttcccgagagaaagcctaagccccctcccagcaagggagactgggaaacagagtatgcagcatgcaaagcttttaacagaccgcctagattctttctaacagaccaacctttctacccttactgcaaaaacatgtacaatgtaacctttaagctcggttttaaataaacaaggccgtgggagtttcacttgtcggtgtctacctctaaaggtcactaagcactccgagcgtcagcgaggagtgcgacccttccccctgactcaacttcttcggagccgcgcgctacgccttcggctgcgcgcggcacctcagacccccgctcgtgctgacacgctcgcgcgtgtcagaccacttcgggctcgcgggggtcgggaaatttgctaaacagactccgagttgccattggacactgtagccgtgaatcagtaacgaaagtgagtggggccagacttcgccataaggcctttatcttcttgccattggtccgtgtcgggggtcgccgtaggcttcgggctcggttttaggccttccggactacaaatatggccgtttccgtgacgtcacggccgccattttaagtcagcgccggggagggtcacgtacagttcaaaggtcatcctcaccggaactgatacaaaatggccgccaattccttccgggtcaaaggtcagcgctacgtcataggtgacgtagctggtgtctgctgtaaacacggaagtaggccccgctacgtcacttgtcacgtgacgctacgtcacaaccgccattttgttttacaaaatggccgacttccttcctcttttttaaaaattaaccgttggcggcggcgcgcgcgctgcgcgcgcgctggaactcctcgtacagtacttttagggaccacctactggtactgtgcccccccccccgtgctacgtcactaacctacgtatccgtctcccataggccggacacagtctacgtcatccacttcctgggcatagtctacgtgattatataaggcgcggtacttccgaatggctgagtttttcccgtccgtccgcagcgaggaacgaccacggagggcgatccgcgcgtcccgaggg

SEQ ID NO: 168 - protein, 751 aa, Alphatorquevirus sp.
MAWGWWRRRRRGWLRSLWRRRRTARRRFRRPARRYRRRRVRRKRRWRRGRPRRRLYKRRRRFKRRRRRRPKIKLTQWQPSTVKRCFIIGYIPGIICGPGKWSENFTSHIEDKIAVGSYGGGHSTSRWSLKVLYEEFQKHHNFWTKSNKELDLARFFGSTWTFYRHEDVDYIVTYNRKAPLGGNILTAPSMHPGVAMLSKHKIVVPSFKTRPGGKPTVKFRIKPPTTFIDKWYFQKDICDLTLLNLNVVACNLRFPFCSPQTNNINVTFQVLHEVYHNFLSITDEQLTQSSSSWELHYKKFLDQVFKTERDANKLNTFATEGAFHAPQIEKYKKPLQKDEYFKTKDALWGDSIHILSTGQTQGTQETQSLDELKKKIVDNAKNYVTKVVQELGGDQVKRFIHGMFTQWTGIFSPAFLDYSRISPEIPGLYKDIIYNPLTDKGIGNGVWIDYCSKKDTKYDPTKSKCGIFDLPLWMCCFGLVDWCKKETGQWGIPSWARVIIKSPYTFPRLINSADESEGWVPIGYNFSKGYMPDGTKYTPILMRHKWYPNLLHQQSVLEDISRSGPFSYQEKNLSANITAKYKFRWHFGGNPVFEQVVADPCQQTTYEMPGAGTMPRRVQVTDPKLIGPHYTFHSWDLRRDYFSRKSIKRMSEQQETSEFLFSGPKKPRIDLDAVQIVEKDSLHQERKQKPWESSQSETETEAPSEEEETSSVHQQLQQQLREQKQLRRGIECLFQQLIKTQQGVHIDPSLV

SEQ ID NO: 169 - protein, 160 aa, Alphatorquevirus sp.
MFFGRAWRKKRALLLSGLRAPKKKPPAMSQWCPPVHSVQGRNHQWYEACYRGHAAYCGCGDFIRHLVALGDQFGFRPGPRAPGAPGVGGPPPPLRRALPAPPAAAPEPQQGNNNNNQQLDRWPGDGGDDAGEGGSGAYGGDAGLPEDDLDGLLAAIDDEE

SEQ ID NO: 170 - protein, 123 aa, Alphatorquevirus sp.
LGEQPVGNRDRSPLGRRRNELGTPAAPAATPRAKAAPEGNRVPLPAADKNPAGSPHRSLPCVGPQQWLFPERKPKPPPSKGDWETEYAACKAFNRPPRFFLTDQPFYPYCKNMYNVTFKLGFK

SEQ ID NO: 171 - DNA, 3807 bp, Alphatorquevirus sp.
cgggtgccggaggtgagtttacacaccggagtcaaggggcaattcgggctcgggactggccgggctatgggcaaggctcttaaaaatgcacttttctaggtgcagtagaaagaaaaggacactgtcactgctaccactgcaccattcacagaaagctaggccatctgtgagaggtatgtggagaccccccgtgcgaaatgacttcattattcaacgtaactggttctacagttgctttaactcccacgcttctatgtgtgggtgtgctgattttattggtcatttcaatcacatcgctgctatgctcggccgtccggaagaccagaaccctcctccgccacccggggctctgagacccctacccgctctcccggccgccgccgaggcgcccggtgatcgagcaccatggcctatgggtggtggtggaggcgacggaggcgcccgtggaggaggaggagatggcgccgctggagacgccgccggagaccccgcagacgccgacctcgtcgccgctatcgacgccgcagaacagtaaggagacgcggcagggggaggtggactaagagatatagacgatggcgccgcaagggcaaacgcagaggcaaaaaaaagattatcataaaacagtggcagcccaactacactcgcagatgcaacatagtcggctacctgcctctgctaatatgtggggaaaatactgttgctacaaactatgccacccactcagacgacagctactaccccggaccctttggggggggaatgactacagacaaatttactctaagaatactgtacgatgagtacaagaggtttatgaactactggaccgcctcaaacgaggacctagacctctgtagatacctaggagttactctgtatgtctttagacacccagaagtagactttatactaattataaacacctcccctccatttctagacacagaaataacagggcctagcatacacccaggtatgatggccctcaacaagagagccaggtggatacctagcttaaaaaacagaccaggcagaaagcactatgtaaagattaaagtgggagccccccgaatgttcacagataagtggtacccccagacagacctctgtgacatgacactcctaacgatctttgccagtgcggcggatatgcaatatccgttcggctcaccactaactgacactatagttgtgtcattccaagttctgcaatctatgttcaacgactgcctgagtgtacttccttctaactttacagaaacaacaggcaaaggaacacagttacatgagaccataagaaaacatttaccattctataatacaacacaaacacaagcacagtttaaaagatttatagaaaataaaaatgcaacaaacggagataatgtatgggcaaactaccttaactctacaaaatttaatacacaagaagcacctaagagcgacaccggtataggaggcccatactgctcatactcagactcatggtacaaaggcacagtatacaattcaaaaattacgagcattcccattcaagcaagtaaattatactacgaacaaaccaaaaaactaattggcgttacatttacaggatccacacacagactacactactgtggaggcctttactcctcagtatggctatccgcaggcagatcttactttgaaacaaaaggaccttacacagacattacttataaccccttttcagacagaggagaaggaaacatgctatggatagactggctaactaaagatgactcagtgtatgtaaaaacacaaagcaaatgccttatagaaaacctacccctgtgggcctcagtatacggatacaaagagtactgcagcaaagtaacaggagacacaaacatagaacacaactgtagatgtgttattagaagcccctacacagtaccacagttgttagaccacaacaatcccctcagaggttatgtaccctacagctttaactttggaaatggtaaaatgccaggcggtagcagcctagtacctatcagaatgagagccaagtggtaccccactcttttccaccaaaaagaagtactagaggccatagcacagtcgggcccctttgcataccactcagacattaaaaaagtatccctgggcataaagtacagatttaagtgggtgtggggtggcaaccccgtgtcccaacaggttgttagaaacccctgcaagaccacccaaggttcctcgggcaatagagtgcctcgatcaatacaagtcgttgacccgcggtacaacacgccagagctcaccatacacgcgtgggacttcagacatgggttctttggcagaaaagctattaagagaatgcaagaacaaccaatacctcatgaaactttttcagcagggttcaagcgcagtcgccgagatacagaagcactccaatccagccaagaagaacaacaaaaagaaaacttacttttcccagtccagcagctcaagcgagtccccccctgggagacctcgcaagagagcgaaagcgaggaagaaaactcgcaaaaacaggagaccctctcccagcaactcagagaccagctgcacaagcagcggctcatgggagaccaactccgatcgctcctctaccaaatgcagaggctccaacaaaatcaacacataaaccctatgttattgccaaagggtctggcattaacatctatttctcacaatgtaatatagatatgtttggtgaccccaaaccctacaacccctcctccaatgactggaaggaggagtacgaggccgcaaagtactgggacagaccccccagacgcgacctgaggagcacccccttctacccctgggcccccacccccaaaccatacaatgtcaactttgccctcaactacaaataaacggtggccgtgggagtttcacttgtcggtgtctacctcttaaagtcactaagcactccgagcgtaagcgaggagtgcgaccctctaccaaaaaacaactccctcgaagtccggcgctacgcgcttcgcgctgcgccggacatctcggaccccccctcgacccgaatcgcttgcgcgattcggacctgcggcctcgggggggtcgggagctttataaacggactccgaggcgccattggacactgagggggtgaacagcaacgaaagtgagtggggccagacttcgccatagggcctttatcttcttgccatttgtccgcgaccgggggtcgctcctaggcgcggaccccgtttcggggtccttccgggttcgtcggcgccgttccagtgacgtcacgggcgccatcttaagtggctgtcgccgaggattgacgtcacagttcaaaggtcatcctcggcggtaaccgcaaagatggcggtcaatctcttccgggtcaaaggtcgtacatacgtcataagtcacatgacaggggtccacttaaacacggaagtaggccccgacatgtgactcgtcacgtgtgtacacgtcacgaccgccattttgttttacaaaatggccgacttccttcctcttttttaaaaaaaggcgccaaaaaaccgtccccccccccccccccccccccccccccccgcgcgcatgcgcgcgggtcccccccccttcggggggctctgccccccggcccccccccgttatgctacgtcactaaccacgtgttccccacaggccaaccacagtgtatgtcgtgcacttcctgggcatggtctacgtgataatataagtagcagcacttccgaatggctgagttttccacgcccgtccgcagagagggagccacggaggggatcccgaacgtcccgaggg

SEQ ID NO: 172 - protein, 767 aa, Alphatorquevirus sp.
MAYGWWWRRRRRPWRRRRWRRWRRRRRPRRRRPRRRYRRRRTVRRRGRGRWTKRYRRWRRKGKRRGKKKIIIKQWQPNYTRRCNIVGYLPLLICGENTVATNYATHSDDSYYPGPFGGGMTTDKFTLRILYDEYKRFMNYWTASNEDLDLCRYLGVTLYVFRHPEVDFILIINTSPPFLDTEITGPSIHPGMMALNKRARWIPSLKNRPGRKHYVKIKVGAPRMFTDKWYPQTDLCDMTLLTIFASAADMQYPFGSPLTDTIVVSFQVLQSMFNDCLSVLPSNFTETTGKGTQLHETIRKHLPFYNTTQTQAQFKRFIENKNATNGDNVWANYLNSTKFNTQEAPKSDTGIGGPYCSYSDSWYKGTVYNSKITSIPIQASKLYYEQTKKLIGVTFTGSTHRLHYCGGLYSSVWLSAGRSYFETKGPYTDITYNPFSDRGEGNMLWIDWLTKDDSVYVKTQSKCLIENLPLWASVYGYKEYCSKVTGDTNIEHNCRCVIRSPYTVPQLLDHNNPLRGYVPYSFNFGNGKMPGGSSLVPIRMRAKWYPTLFHQKEVLEAIAQSGPFAYHSDIKKVSLGIKYRFKWVWGGNPVSQQVVRNPCKTTQGSSGNRVPRSIQVVDPRYNTPELTIHAWDFRHGFFGRKAIKRMQEQPIPHETFSAGFKRSRRDTEALQSSQEEQQKENLLFPVQQLKRVPPWETSQESESEEENSQKQETLSQQLRDQLHKQRLMGDQLRSLLYQMQRLQQNQHINPMLLPKGLALTSISHNVI

SEQ ID NO: 173 - protein, 159 aa, Alphatorquevirus sp.
LAGLWARLLKMHFSRCSRKKRTLSLLPLHHSQKARPSVRGMWRPPVRNDFIIQRNWFYSCFNSHASMCGCADFIGHFNHIAAMLGRPEDQNPPPPPGALRPLPALPAAAEAPGDRAPWPMGGGGGDGGARGGGGDGAAGDAAGDPADADLVAAIDAAEQ

SEQ ID NO: 174 - protein, 132 aa, Alphatorquevirus sp.
LGDLARERKRGRKLAKTGDPLPATQRPAAQAAAHGRPTPIAPLPNAEAPTKSTHKPYVIAKGSGINIYFSQCNIDMFGDPKPYNPSSNDWKEEYEAAKYWDRPPRRDLRSTPFYPWAPTPKPYNVNFALNYK

SEQ ID NO: 175 - DNA, 3800 bp, Alphatorquevirus sp.
cgggtgccggaggtgagtttacacaccgcagtcaaggggcaattcgggctcgggactggccgggctatgggcaaggctcttaaaaaagccatgtttctcggtcggccttacagaaagaagagggcactgtcactgctacgcgtgcgagctccagaggcgaaaccacctgctatgagctggagacccccggtgcacaaccccaatgggattgagagaaacctgtgggaggcattcttttgcatgcatgcttcagcttgtggttgtggcgatcttgttggccatcttactgtactggctaatcggtatggtgctcctcctcgtcccccggcccccggggctcccagaccaccgctgaatcgccagctggccctcccggcgccccccgctgatcctcagcaggccaacccgagatggcctggtggggacggtggagaagatggcgctggaggccccgccgctggcggcgccgtcgcagacgccgagtaccaagaagacgagctcaacgccctgttcgacgccgtcgaacaagaagagtaaggaggaggcgatgggggaggcggaggtggagacgggggtacagacgcagacttagactgagacgcagacgcagacgaaagaaaataagactgactcagtggaacccagctaaagtcaggagatgtactattaagggggtcctgcccatgatactgtgcggagcaggacgctcagggtttaactatggactacacagcgacgactgcaccatacaaaaaccccttggccagaacccccacgggggcggcatgagcacagtaacttttagcctacaggtgctatatgaccagtaccagagatttatgaacaagtggtcgtactccaacgaccagctagacctagccagatactttggctgcaccttctggttttacagacacccagaagtagactttgtcgctcagtttgacaacgttcccccaatgaaaatggacgagaacacagcccctaacactcacccgtcattcctactacaaaacaaacacagggttaaaatccccagctttaaaaccaagccttttggcagaaaaaaaattagagttacagtggggccccccaaactgtttgaagacaagtggtacagccagcatgacttgtgtaaggtgcccctagtcagttggcggttaaccgcagctgacttcaggtttccgttctgctcaccacaaactgacaacccttgctacaccttccaggtattgcatgaacactattacccagtaataggcacttctgctttagaagaaggaacaaattacgatataacaagcatacaagcattagaggaatttttatatacaaaatctacccactatcaaacatttgccacagacacaagactaaaccctcagagacccataacaccaaacagcaggaacacatataatcccagtggaaccgaagaacttattatgtggagtcaaaatgactttaacaagtttaaaaaacgcacagacagcaactatggctactgcagctactgccctgatactgagttagttaataaaattaaaagttacagagaccaaagattcaagtggctaactgaaatgccacaaaaaaacacctgccacataaatgccacctacgcccgaggaaaaattaaacagtgggaatatcacctaggttggtactcaaatatatttataggaaacctcagacacaacctagcattccgaacagcatacattgacattacctacaaccccattacagacaaaggagaaggtaacatagtgtggttccaatatgccaccaaacccaccacactgtacatagagtcacaggcaaaatgcactatcagaaacatacccctatatgctgctttttatggctacgaagactacatccaaagaacactaggcccctatcaagatgtagaaaccctaggcataatatgtgttaaatgtccctacacagatcccccactagttcacaaagacaagaataaggcagactggggctatgtattttacgacgttcactttggcaacggaaagaccccggagggcctgggccaagtgcacccttactggatgcagagatggagaccctatgtacagttccagaaagacactatgaacaagatagccagaaccggaccgttcagctacagagacgagacgccttccatcaccttgactgccgggtacaagtttcgttttaactgggggggcgactctatatttccacagattattaaaaacccctgcccaaatagcggggtacgaccttcaaccagtagagagcgtcgctcagtacaagtcgttagcccgctcacaatggggccagagtacatattccaccggtgggactggcgacgggggttctttaatacaaaaactctcaaaagaatgcttgaaaaatcaattaatgatgaagaatattcaacaggcccaaaggtccctcgatggtttcccccactcgaccaccaagagcaagaaggcgtctcagatacagaaacgacaacctcgcagtcctcgcaagaagaagccgctcaagaagccctccaagaagtccaagagacgtcgctacagcagcacctcctccagcagtaccgagagcagcgaagaatcggaaagcaactccaactcgtcatgctccaactcaccaagacgcagagcaacctgcacataaatccccgcgtccttggccatgcataaataaagtgtacatgtttccccccgaaaaaccaatgcccatatacggataccacgggtgggagacagagtatcaggcctgcaaagcttttgacagaccccctagaaactacctgtcagacaaacccatctatccctggcttccccgctcccaacctgaatttaaagtcagttttaagcttggttttcaataaacaaggccgtgggaatttcacttgtcggtgtctacctcttaaggtcactaagcactccgagcgtcagcgaggagtgcgacccttccccctggtgcaacgccctcggcggccgcgcgctacgccttcggctgcgcgcggcacctcggacccccgctcgtgctgacacgcttgcgcgtgtcagaccacttcgggctcgcgggggtcgggaattttgctaaacagactccgagttgccattggacactgtagctgtgaatcagtaacgaaagtgagtggggccagacttcgccataaggcctttatcttcttgccattggtccgtgtcgggggtcgccgtacgcttcgggctcggttttaggccttccggactacaaaaaacgccattttagtgacgtcacggcggccattttaagtaagcatggcgggcggtgacgtttaagttcaaaggtcaccgcacttccgtatttacacaaaatggtggccaacttcttccgggtcaaacatccacagctacgtcataagtcacgtgggcgagccgcgtcacaaacacggaagtggctgtctcacgtgacttgtcacgtgactgctacgtcacggccgccattttagttcacaaaatggcgaacttccttcctcttttttaaaaataacggccctgcggcggcgcgcgcgctgcgcgttattttctttcgtctgcgtctgcgtctcagtctaagtctgctccgccccccggccccccccccgaagatcgtcactaaccacgtgactcccgcaggccaaccatgtgctacgtcgtgcacttcctgggcggagtttacctcataatataagtagctgcacttccgaatggctgagttttccacgcccgtccgcagcgagaacaccacggaggggagtccgagcgtcccgaggg

SEQ ID NO: 176 - protein, 761 aa, Alphatorquevirus sp.
MAWWGRWRRWRWRPRRWRRRRRRRVPRRRAQRPVRRRRTRRVRRRRWGRRRWRRGYRRRLRLRRRRRRKKIRLTQWNPAKVRRCTIKGVLPMILCGAGRSGFNYGLHSDDCTIQKPLGQNPHGGGMSTVTFSLQVLYDQYQRFMNKWSYSNDQLDLARYFGCTFWFYRHPEVDFVAQFDNVPPMKMDENTAPNTHPSFLLQNKHRVKIPSFKTKPFGRKKIRVTVGPPKLFEDKWYSQHDLCKVPLVSWRLTAADFRFPFCSPQTDNPCYTFQVLHEHYYPVIGTSALEEGTNYDITSIQALEEFLYTKSTHYQTFATDTRLNPQRPITPNSRNTYNPSGTEELIMWSQNDFNKFKKRTDSNYGYCSYCPDTELVNKIKSYRDQRFKWLTEMPQKNTCHINATYARGKIKQWEYHLGWYSNIFIGNLRHNLAFRTAYIDITYNPITDKGEGNIVWFQYATKPTTLYIESQAKCTIRNIPLYAAFYGYEDYIQRTLGPYQDVETLGIICVKCPYTDPPLVHKDKNKADWGYVFYDVHFGNGKTPEGLGQVHPYWMQRWRPYVQFQKDTMNKIARTGPFSYRDETPSITLTAGYKFRFNWGGDSIFPQIIKNPCPNSGVRPSTSRERRSVQVVSPLTMGPEYIFHRWDWRRGFFNTKTLKRMLEKSINDEEYSTGPKVPRWFPPLDHQEQEGVSDTETTTSQSSQEEAAQEALQEVQETSLQQHLLQQYREQRRIGKQLQLVMLQLTKTQSNLHINPRVLGHA

SEQ ID NO: 177 - protein, 156 aa, Alphatorquevirus sp.
MGKALKKAMFLGRPYRKKRALSLLRVRAPEAKPPAMSWRPPVHNPNGIERNLWEAFFCMHASACGCGDLVGHLTVLANRYGAPPRPPAPGAPRPPLNRQLALPAPPADPQQANPRWPGGDGGEDGAGGPAAGGAVADAEYQEDELNALFDAVEQEE

SEQ ID NO: 178 - protein, 147 aa, Alphatorquevirus sp.
MVSPTRPPRARRRLRYRNDNLAVLARRSRSRSPPRSPRDVATAAPPPAVPRAAKNRKATPTRHAPTHQDAEQPAHKSPRPWPCINKVYMFPPEKPMPIYGYHGWETEYQACKAFDRPPRNYLSDKPIYPWLPRSQPEFKVSFKLGFQ

SEQ ID NO: 179 - DNA, 3800 bp, Alphatorquevirus sp.
cgggtgccgtaggtgagtttacacaccggagtcaaggggcaattcgggctcgggactggccggaccccgggcaaggctcttaaaaaagctatgtttctcggtaggccttggagaaagaaaagggcactgctactgtcttgcttgcgagctccaaagaaaaaaccacctgcaatgagccactggtgcccgcctgtacacagcgttcagggtcgcaaccaccagtggtatgaagcctgctatcgtggtcatgctgcttactgtggctgtggcgattttattaggcatcttgttgctctgggtgatcagtttggttttaggcctggtccccgtgctcccggcgcgcctggagtagggggacccccgcttccgctccgtagagcgctgcccgcacccccccggcggccgctccggagccccagcagggcaacaacaacaacaaccagcagctggagagatggcctggggatggtggagacgacgccggcgagggtggctccggagcctatggaggagacgcaggactgccagaagacgacttagacggcctgctcgccgctatagacgacgaagagtaaggagaaagagacgatggaggagggggcgacccagacgcagactgtacagacgcaggagacgctttaagagacgcagacgcaggagacctaagataaaactgacacagtggcaacccagcacagttaaacgctgctttataatagggtacattcccgcagttatatgcggggctggtaaatggtcagaaaactttactagtcacatagaggacaagatagccgtgggcagctatggcggggggcacagtaccagtaggtggtccctaaaagtactgtacgaggagtttcagaagcaccacaacttctggaccaaaagcaataaggagctagacctggccaggttctttggcagcacctggacattttacagacacgaagatgtagactacatagtaacatataacagaaaggcccctctaggaggtaacatactaacagcacccagcatgcatccaggagtagctatgcttagcaaacacaagatagtagtacccagttttaagaccagaccagggggcaaacccacagttaaatttagaataaagccccccaccacctttatagacaagtggtactttcagaaggacatatgtgacctaacactactaaacatgaacgttgtagcttgcaacttgcggtttccgttctgctcaccacaaacgaacaacgttaacgtaaccttccagatattgcatgaggtttaccacaacttcctctctataactgatgaacaattaacattagatgcagaaagctggaaaaagcactataaaaacttcttaaagcaagtatttaaaacagacagagacgcaaacaaattaaacacatttgccactgagggagcctttcatgaacctaaagtagaaaagtacaaaaagccttttgctgacaacgagtactttaaaagtaaagacgcacagtggggagatgccatacacatactagcagcaggagacacaataagtaatcaaaaaacacaaaccaaagatgagcttatagacagaattgttaagaatgctgaaaactacttaaaaaaggtaacacaagaattaggaggagcaaacatacaaagatttatacacggaatgttcacacagtggacaggaatattcagtcctgcatttttagactacagcagaataagtccagaaataccaggtgtttataaagacattatatacaacccacttacagacagaggcataggcaacggagtgtggatagactactgcagcaaaaaagacaccaaatacgacccctcaaaaagtaaatgtggcatatttgacctaccgctatggatggccacctttggcctagtagactggtgcaaaaaagaaacaggacagtggggcataccttcctgggccagagtaataattaaatgcccttacacctttccaaaaatgatagactcaacagatgagtcagtgggctttgtcccaatagggtacaactttgccaaaggcctaatgccagacggcacaaagtacattcctatactaatgagacacaaatggtaccccaaccttctacaccagcagtctgtgctagaagacctaagcagaagcggcccctttagctatcaagagaaaaacatgagtgcaaacataacagcaaaatacaaatttagatggcattttgggggcaaccctgtatttgaacaggttgtcgcagacccctgccaacaaacaacctatgaaatgcccggagccggtacgatgcctcgcagagtacaagtcactgacccgaaactcatcgggccccactacaccttccacagctgggacctcagacgtgactattttagcagaaaaagtattaagagaatgtcagaacaacaagaaacttctgagtttcttttctcaggcccaaaaaaaccccgaatcgatttggacgcagtgcaaattgtcgaaaaaaactctttgcaccaagaaagaaaacaaaaaccctgggagagcagccagtcggaaacagagacagaagccccctcggaagaagaagaaacgagctcggtacaccagcagctccagcagcaactccgagagcaaaagcagctccggaggggaatcgagtgcctcttccagcagctgataaaaacccagcagggagtccacatagatccctcccttgtgtaggcccacagcagtggctctttcccgagagaaagcccaaaccccctcccagcaaaggagactgggagacagagtatgcagcttgcaaagcctttaatagaccccctagatccttcttaacagaccgaccttactacccttactgcaaaaaccaatacaatgtaacctttaagatcggtttcaaataaacaaggccgtgggagtttcacttgtcggtgtctacctcttaaggtcactaagcactccgagcgtcagcgaggagtgcgacccttcccccttactcaacttcttcggagccgcgcgctacgccttcggctgcgcgcggcacctcagacccccgctcgtgctgacacgctcgcgcgtgtcagaccacttcgggctcgcgggggtcgggaattttgctaaacagactccgagttgccattggacactgtagctgtgaatcagtaacgaaagtgagtggggccagacttcgccataaggcctttatcttcttgccattggtccgtctcgggggtcgtcgtaggcttcgggctcggttttaggccttccggactacaaatatggccgttttcgtgacgtcacggccgccattttaagtcagcgctggggaggcgtgacgttaagttcaaaggttatcctcaccggaactggcacaaaatggccgtcaatttcttccgggtcaaaggtcagcgctacgtcataggtgacgtagctggtgtctgctgtaaacgcggaagtaggacccgctacgtcacttgtcacgtgacgctgcgtcacagccgccattttgttttacaaaatggccgacttccttcctcttttttaaaaattaaccgttggcggcggcgcgcgcgctgcgcgcgcggggggcccccccccccagcgggggggctccgccccccggcccccccccgtgctacgtcactaacctacgtgtccgtcttccataggccggacacagtctacgtcatccacttcctgggcatggtctacgtgattatataaggcgcggcacttccgaatggctgagttttttctgtccgtccgcagcgaggaacgaccacggagggcgatccgcgcgtcccgaggg

SEQ ID NO: 180 - protein, 751 aa, Alphatorquevirus sp.; identical to SEQ ID NO: 165

SEQ ID NO: 181 - protein, 149 aa, Alphatorquevirus sp.
MFLGRPWRKKRALLLSCLRAPKKKPPAMSHWCPPVHSVQGRNHQWYEACYRGHAAYCGCGDFIRHLVALGDQFGFRPGPRAPGAPGVGGPPLPLRRALPAPPRRPLRSPSRATTTTTSSWRDGLGMVETTPARVAPEPMEETQDCQKTT

SEQ ID NO: 182 - DNA, 3800 bp, Alphatorquevirus sp.
cgggtgccggaggtgagtttacacaccggagtcaaggggcaactcgggctcgggactggccgggctatgggcaaggctctgaaaaatgcacttttctaggtgtagcagaaagaaaaggacactgtcactgctaccactgcacccttcacagaaagctaggtcatctgtgagaggtatgtggagaccccccaggcgaaatgaattcactattcaacgtgactggttctacagttgctttcactcccactcttctatgtgtggctgtgctgattttattggtcatttcaatcatatcgctgctatgctcggccgtccggaagaccagaaccctcctccgccacccggggctgtaagacccctacccgctctcccggccgcccccgaggcgcccggtgatcgagcaccatggcctatgggtggtggcgcaggcgacgaaggcgcccgtggtggagcaggagatggcgccgctggagacgccgtcggagaccccgcagacgccgacctcgtcgccgctatcgacgccgcagaacagtaaggagacgcggcagggggaggtggactaagagatatagacgatggcgccgcaaaggcaaacgcagaggcaaaaaaaaaattattataaaacaatggcagcccaactacagacgcagatgcaacatagtgggctacatgcctctacttatatgtggggaaaatactgttgccagaaactatgccacccactcagacgacagctactaccctggaccctttggggggggaatgaccacagacaaattcactttaagaatcctatatgatgaatacaagagatttatgaattactggacagcctcaaacgaggacctagacctgtgtagatacctaggatgtactctatacgtatttagacacccagaagtagactttataattataataaacacatctcctccattcctagacacagagataacaggccctagcatacacccgggtatgatggccctcaacaaaagagccagatggatacctagcataaaaaacagaccaggcagaaaacactatgtgaaaattaaagtaggagccccccgaatgttcacagataagtggtacccccagacagacctctgtgacatgacactcctaacgatctttgccagtgcggcggatatgcaatatccgttcggctcaccactaactgacactatagttgtgtcattccaagttctgcaatccatgtacaacgactgcctcagtgtacttcctactaactttacagaaacatcaagcaaaggcacacaattacatgagaaaattattgatcatttaccctactacaacaccacacaaacacaagcacaatttaagagatttatagaaaaccaacaaggaacaaatgtagacaatgtatgggcaaactacctaaacagcaggaaatttaacaaacaagaaacacctaaaactaacaatggcataggaggcccatactgctcatactcagatacatggtacaaaggcacagcatacaatgaaaaaattaaaaaaatacctacagaagcaagccgactatactatgaagaaactaaaaaattaattggcattacattcacaggatcctcacacaggttgcactactgcggaggcctgtactcctcagtatggctatctgcaggcagatcatactttgaaaccaagggtccctacacagacataacatacaacccattctcagacagaggcgaaggaaacatgctgtggatagactggctaactaaagatacctcagtatatgagaaaacacagagtaaatgtcttatacaagacatgcccttgtgggcctctgtatacggattctccgagtactgcagtaaagtaacaggagacacaaacatagaacacaactgcagatgtgttattaggagcccctacacagtgccacaactgttagatcacaacaaccccctcaggggatacgtaccctacagttttaactttggaaatggaaagatgccgggcggcagcagccaggtacccattagaatgagagcaaagtggtaccctaccctttttcaccaaaaagaagtactagaagccatagcacagtcgggcccctttgcatatcactcagatattaaaaaagtctcactgggcttaaaatacagatttaagtgggtgtggggtggcaaccccgtgtcccaacaggttgttagaaacccctgcaagaccacccaaggttcctcgggcagtagagtgcctcgatcaatacaagtcgttgacccgcggtacaacacaccagagctcaccattcacgcgtgggacttcagacatgggttctttggcaaaaaagctattaagcgaatgcaagaacaaccaatacctcatgacactttttcagcagggttcaagcgcagtcgccgagatacagaagcactccaatccagtcaagaagagctccaaaaagaaaacttacttttcccagtccagcagctcaagcgagtccccccgtgggagacctcgcaagagacccaaagcgaggaagaaaactcgcaaaaacaggagaccctctcccagcaactcagagaccagctgcacaagcagcggctcatgggagagcaactccgatcgctcctctaccaaatgcagagggtccaacaaaatcaacacataaaccctatgttattgccaaagggtatggcactaacttctatttctcacaatgtaatatagatatgtttggcgaccccaaaccctacaacccctcctccaatgactggaaggaggagtaccaggccgcaaagtactgggacagaccccccagacgcgacctcaggagcacccccttctacccctgggcccccacccccaaaccattcaatgtcagctttgccctcaactacaaataaacggtggccgtgggagtttcacttgtcggtgtctacctcttaaggtcactaagcactccgagcgtaagcgaggagtgcgaccctctaccaaggggcaactccctcgaagtccggcgctacgcgcttcgcgctgcgccggacatctcggaccccccctcgacccgaatcgcttgcgcgattcggacctgcggcctcgggggggtcgggatctttattaaacggactccgaggtgccattggacactgagggggtgaacagcaacgaaagtgagtggggccagacttcgccatagggcctttatcttcttgccatttgtccgcgaccgggggtcgctcctaggcgcggaccccgtttcggggtccttccgggtccgtcggcgccgttccagtgacgtcacgggcgccatcttaagtggctgtcgccgaggattgacgtcacagttcaaaggtcatcctcggcggtaaccgcaaagatggcggtcaatctcttccgggtcaaaggtcgtgcatgcgtcataagtcacatgacaggggtccacttaaacacggaagtaggccccggcatgtgactcgtcacgtgtgtacacgtcacggccgccattttgttttacaaaatggccgacttccttcctcttttttaaaaaaaggcgcgaaaaaaccgtcggcgggggggccgcgcgcctggcacatgcgcgcgggtccccccccctccggggggctccgccccccggcccccccccgtgctacgtcactaacttacgtgtccgtctcccataggccggacactgtctacgtcatacacttcctgggcatggtctacgtgataatataagtagcagcacttccgaatggctgagttttccacgcccgtccgcggagagggagccacggagaggatcccgaacgtcccgaggg

SEQ ID NO: 183 - protein, 767 aa, Alphatorquevirus sp.
MAYGWWRRRRRRPWWSRRWRRWRRRRRPRRRRPRRRYRRRRTVRRRGRGRWTKRYRRWRRKGKRRGKKKIIIKQWQPNYRRRCNIVGYMPLLICGENTVARNYATHSDDSYYPGPFGGGMTTDKFTLRILYDEYKRFMNYWTASNEDLDLCRYLGCTLYVFRHPEVDFIIIINTSPPFLDTEITGPSIHPGMMALNKRARWIPSIKNRPGRKHYVKIKVGAPRMFTDKWYPQTDLCDMTLLTIFASAADMQYPFGSPLTDTIVVSFQVLQSMYNDCLSVLPTNFTETSSKGTQLHEKIIDHLPYYNTTQTQAQFKRFIENQQGTNVDNVWANYLNSRKFNKQETPKTNNGIGGPYCSYSDTWYKGTAYNEKIKKIPTEASRLYYEETKKLIGITFTGSSHRLHYCGGLYSSVWLSAGRSYFETKGPYTDITYNPFSDRGEGNMLWIDWLTKDTSVYEKTQSKCLIQDMPLWASVYGFSEYCSKVTGDTNIEHNCRCVIRSPYTVPQLLDHNNPLRGYVPYSFNFGNGKMPGGSSQVPIRMRAKWYPTLFHQKEVLEAIAQSGPFAYHSDIKKVSLGLKYRFKWVWGGNPVSQQVVRNPCKTTQGSSGSRVPRSIQVVDPRYNTPELTIHAWDFRHGFFGKKAIKRMQEQPIPHDTFSAGFKRSRRDTEALQSSQEELQKENLLFPVQQLKRVPPWETSQETQSEEENSQKQETLSQQLRDQLHKQRLMGEQLRSLLYQMQRVQQNQHINPMLLPKGMALTSISHNVI

SEQ ID NO: 184 - protein, 149 aa, Alphatorquevirus sp.
MHFSRCSRKKRTLSLLPLHPSQKARSSVRGMWRPPRRNEFTIQRDWFYSCFHSHSSMCGCADFIGHFNHIAAMLGRPEDQNPPPPPGAVRPLPALPAAPEAPGDRAPWPMGGGAGDEGARGGAGDGAAGDAVGDPADADLVAAIDAAEQ

SEQ ID NO: 185 - protein, 57 aa, Alphatorquevirus sp.
MFGDPKPYNPSSNDWKEEYQAAKYWDRPPRRDLRSTPFYPWAPTPKPFNVSFALNYK

SEQ ID NO: 186 - DNA, 3799 bp, Betatorquevirus sp.
cgggtgccgaaggtgagtgaaaccaccgaagtcaaggggcaattcgggctagttcagtctagcggaacgggcaagaaacttaaaattattttatttttcagatgagcgactgctttaaaccaacatgctacaacaacaaaacaaagcaaactcactggattaataacctgcatttaacccacgacctgatctgcttctgcccaacaccaactagacacttattactagctttagcagaacaacaagaaacaattgaagtgtctaaacaagaaaaagaaaaaataacaagatgccttattactacagaagaagacggtacaactacagacgtcctagatggtatggacgaggttggattagacgcccttttcgcagaagatttcgaagaaaaagaagggtaagacctacttatactactattcctctaaagcaatggcaaccgccatataaaagaacatgctatataaaaggacaagactgtttaatatactatagcaacttaagactgggaatgaatagtacaatgtatgaaaaaagtattgtacctgtacattggccgggagggggttctttttctgtaagcatgttaactttagatgccttgtatgatatacataaactttgtagaaactggtggacatccacaaaccaagacttaccactagtaagatataaaggatgcaaaataacattttatcaaagcacatttacagactacatagtaagaatacatacagaactaccagctaacagtaacaaactaacatacccaaacacacatccactaatgatgatgatgtctaagtacaaacacattatacctagtagacaaacaagaagaaaaaagaaaccatacacaaaaatatttgtaaaaccacctccgcaatttgaaaacaaatggtactttgctacagacctctacaaaattccattactacaaatacactgcacagcatgcaacttacaaaacccatttgtaaaaccagacaaattatcaaacaatgttacattatggtcactaaacaccataagcatacaaaatagaaacatgtcagtggatcaaggacaatcatggccatttaaaatactaggaacacaaagcttttatttttacttttacaccggagcaaacctaccaggtgacacaacacaaataccagtagcagacctattaccactaacaaacccaagaataaacagaccaggacaatcactaaatgaggcaaaaattacagaccatattactttcacagaatacaaaaacaaatttacaaattattggggtaacccatttaataaacacattcaagaacacctagatatgatactatactcactaaaaagtccagaagcaataaaaaacgaatggacaacagaaaacatgaaatggaaccaattaaacaatgcaggaacaatggcattaacaccatttaacgagccaatattcacacaaatacaatataacccagatagagacacaggagaagacactcaattatacctactctctaacgctacaggaacaggatgggacccaccaggaattccagaattaatactagaaggatttccactatggttaatatattggggatttgcagactttcaaaaaaacctaaaaaaagtaacaaacatagacacaaattacatgttagtagcaaaaacaaaatttacacaaaaacctggcacattctacttagtaatactaaatgacacctttgtagaaggcaatagcccatatgaaaaacaacctttacctgaagacaacattaaatggtacccacaagtacaataccaattagaagcacaaaacaaactactacaaactgggccatttacaccaaacatacaaggacaactatcagacaatatatcaatgttttataaattttactttaaatggggaggaagcccaccaaaagcaattaatgttgaaaatcctgcccaccagattcaatatcccataccccgtaacgagcatgaaacaacttcgttacagagtccaggggaagccccagaatccatcttatactccttcgactatagacacgggaactacacaacaacagctttgtcacgaattagccaagactgggcacttaaagacactgtttctaaaattacagagccagatcgacagcaactgctcaaacaagccctcgaatgcctgcaaatctcggaagaaacgcaggagaaaaaagaaaaagaagtacagcagctcatcagcaacctcagacagcagcagcagctgtacagagagcgaataatatcattattaaaggaccaataacttttaactgtgtaaaaaaggtgaaattgtttgatgataaaccaaaaaaccgtagatttacacctgaggaatttgaaactgagttacaaatagcaaaatggttaaagagacccccaagatcctttgtaaatgatcctcccttttacccatggttaccacctgaacctgttgtaaactttaagcttaattttactgaataaaggccagcattaattcacttaaggagtctgtttatttaagttaaaccttaataaacggtcaccgcctccctaatacgcaggcgcagaaagggggctccgccccctttaacccccagggggctccgccccctgaaacccccaagggggctacgcccccttacaccccctatgagacgcacgcttcctcgctcactgactcgctgcgctcggtcgttcggctgcggcgagcggtatcagctcactcaaaggcggtaatacggttatccacagaatcaggggataacgcaggaaagaacatgtgagcaaaaggccagcaaaaggccaggaaccgtaaaaaggccgcgttgctggcgtttttccataggctccgcccccctgacgagcatcacaaaaatcgacgctcaagtcagaggtggcgaaacccgacaggactataaagataccaggcgtttccccctggaagctccctcgtgcgctctcctgttccgaccctgccgcttaccggatacctgtccgcctttctcccttcgggaagcgtggcgctttctcatagctcacgctgtaggtatctcagttcggtgtaggtcgttcgctccaagctgggctgtgtgcacgaaccccccgttcagcccgaccgctgcgccttatccggtaactatcgtcttgagtccaacccggtaagacacgacttatcgccactggcagcagccactggtaacaggattagcagagcgaggtatgtaggcggtgctacagagttcttgaagtggtggcctaactacggctacactagaagaacagtatttggtatctgcgctctgctgaagccagttaccttcggaaaaagagttggtagctcttgatccggcaaacaaaccaccgctggtagcggtggtttttttgtttgcaagcagcagattacgcgcagaaaaaaaggatctcaagaagatcctttgatcttttctacggggtctgacgctcagtggaacgaaaactcacgttaagggattttggtcatgagatcatgtaactcgccttgatcgttgggaaccggagctgaatgaagccataccaaacgacgagcgtgacaccacgatgcctgtagcaatggctaaccacaaactgatatgctaattaacttccacaaaacaacttccccttttaaaaccacacctacaaattaattattaaacacagtcacatcctgggaggtactaccacactataataccaagtgcacttccgaatggctgagtttatgccgctagacggagaacgcatcagttactgactgcggactgaacttggg

SEQ ID NO: 187 - protein, 666 aa, Betatorquevirus sp.
MPYYYRRRRYNYRRPRWYGRGWIRRPFRRRFRRKRRVRPTYTTIPLKQWQPPYKRTCYIKGQDCLIYYSNLRLGMNSTMYEKSIVPVHWPGGGSFSVSMLTLDALYDIHKLCRNWWTSTNQDLPLVRYKGCKITFYQSTFTDYIVRIHTELPANSNKLTYPNTHPLMMMMSKYKHIIPSRQTRRKKKPYTKIFVKPPPQFENKWYFATDLYKIPLLQIHCTACNLQNPFVKPDKLSNNVTLWSLNTISIQNRNMSVDQGQSWPFKILGTQSFYFYFYTGANLPGDTTQIPVADLLPLTNPRINRPGQSLNEAKITDHITFTEYKNKFTNYWGNPFNKHIQEHLDMILYSLKSPEAIKNEWTTENMKWNQLNNAGTMALTPFNEPIFTQIQYNPDRDTGEDTQLYLLSNATGTGWDPPGIPELILEGFPLWLIYWGFADFQKNLKKVTNIDTNYMLVAKTKFTQKPGTFYLVILNDTFVEGNSPYEKQPLPEDNIKWYPQVQYQLEAQNKLLQTGPFTPNIQGQLSDNISMFYKFYFKWGGSPPKAINVENPAHQIQYPIPRNEHETTSLQSPGEAPESILYSFDYRHGNYTTTALSRISQDWALKDTVSKITEPDRQQLLKQALECLQISEETQEKKEKEVQQLISNLRQQQQLYRERIISLLKDQ

SEQ ID NO: 188 - protein, 99 aa, Betatorquevirus sp.
MSDCFKPTCYNNKTKQTHWINNLHLTHDLICFCPTPTRHLLLALAEQQETIEVSKQEKEKITRCLITTEEDGTTTDVLDGMDEVGLDALFAEDFEEKEG

SEQ ID NO: 189 - protein, 108 aa, Betatorquevirus sp.
MPANLGRNAGEKRKRSTAAHQQPQTAAAAVQRANNIIIKGPITFNCVKKVKLFDDKPKNRRFTPEEFETELQIAKWLKRPPRSFVNDPPFYPWLPPEPVVNFKLNFTE

SEQ ID NO: 190 - DNA, 3799 bp, Alphatorquevirus sp.
cgggtgccggaggtgagtttacacaccgaagtcaaggggcaattcgggctcaggactggccgggctttgggcaaggctcttaaaaatgcacttttctcgaataaccagaaagaaaaacaaagtgctactgctttgcgtgccagcagctaagaaaaaaccaactgctatgagcttctggagacctccggtgcacaatgtcacggggatccagcgcctgtggtacgagtcctttcaccgtggccatgcttctttttgtggttgtggggatcctatacttcacattactgcacttgctgagacatatggccatccaacaggcccgagaccttctgggccaccgggagtagaccccaacccccacatccgtagagccaggcctgccccggccgctccggagccctcacaggttgattccagaccggccctgacatggcatggggatggtggaagcgacggaggcgctggtggttccggaagcggtggacccgtggcagacttcgcagacgatggcctcgaccagctcgtcgccgccctagacgacgaagagtaaggaggcgcagacggtggaggagggggagacgaaaaacaaggacttacagacgcaggagacgctttagacgcaggagacgaaaagcaaaacttataataaaactgtggcaacctgcagtcattaaaagatgcagaataaaggggtacataccactgattataagtgggaacggtacctttgccacaaactttaccagtcacataaatgacagaataatgaaaggccccttcgggggaggacacagcactatgaggttcagcctctacattttgttcgaggaacacctcagacacatgaacttctggaccagaagcaacgacaacctagaactaaccagatacttgggggcttcagtaaaaatatacaggcacccagaccaagactttatagtaatatacaacagaagaacccctctaggaggcaacatctacacagcaccctctctacacccaggcaatgccattctagcaaaacacaaaatattagtaccaagtttacagacaagaccaaagggtaaaaaagcaattagaataagaatagcaccccccacactctttacagacaagtggtactttcaaaaggacatagccgacctcacccttttcaacatcatggcagttgaggctgacttgcggtttccgttctgctcaccacaaactgacaacacttgcgtcagcttccaggtccttagttccgtttacaacgactacctcagtattaatgcctttaataatgactccggagacacaaatttaaaatcatttttaagtaaagcatttccagaaagaggcgaaaaaggaacaagtttaaatgcactaaatacatttagaacagaaggatgcataagtcacccaccactaaaaaaaccaaacccacaaacaaacaaagtacaagactcagaatactttgcacctttagatgccctctggggagaccccatatactataatcagttaaatgaaaataaaagtttatctaacatccttaataacatactattaaaaaacatgactacataccataaaaaactaacagattttccagcttcataccagggaaacaaagccttttgccacctaacaggcatatatagcccaccatacctcaaccaaggcagaatagctccagaaatatttggactgtacacagaaataatttacaacccttacacagacaaaggaactggaaacaaagtatggatggacccactgactaaagacaacaacatatataaagaaggacagagcaaatgcctactgactgacatgcccctgtggactttactttttggatatacagactggtgtaaaaaggacactaataactgggacttaccactaaactacagactagtactaatatgcccttataccttcccaaaattgtacaatgaaaaggtaaaagactatgggtacattccgtactcctacaaattcggggcgggtcagatgccagacggcagtaactacataccctttcagttcagagcaaaatggtaccccacagtactacaccagcaacaggtaatggaggacataagcaggagcgggccctttgcacctaagatagaaaaaccaagcactcagctggtaatgaaatactcttttaactttaactggggcggtaaccctatcattgaacagattgttaaagaccccagcttccagcccacctatgaaatacccggtaccggtaacctccctagaagaatacaagtcatcgacccgcgggtcctgggaccgcactactcgttccggtcgtgggacatgcgcagacacacatttagcagagcaagtattaagagagtgtcagaacaacaagaaacttctgaccttgtattctcaggcccaaaaaagcctcgggtcgacatcccaaaacaagaaacccaagaagaaagctcacattcactccaaagagaatcgagaccgtgggagaccgaggaagaaagcgagacagaagccctctcgcaagagagccaagaggtccccttccaacagcagttgcagcagcagtaccaagagcagctcaagctcagacagggaatcaaagtcctcttcgagcagctcataaggacccaacaaggggtccatgtaaacccatgcctacagtaggtcccaggcagtggctgtttccagagagaaagccagccccagctcctagcagtggagactgggccatggagtttctcgcagcaaaaatatttgacaggccagttagaagcaaccttaaagataccccttactacccatatgttaaaaaccaatacaatgtctactttgaccttaaatttgaataaagagcagtttcaaacttgcaaggccgtgggagtttcactggtcggtgtctacctctaaaggtcactaagcactccgagcgtaagcgaggagtgcgaccctcccccctgggacaacttcttcggagtccggcgctacgccttcggctgcgccggacacctcagaccccccctccacccgaaacgcttgcgcgtttcggaccttcggcgtcgggggggtcgggagctttattaaacagactccgaggtgctcttggacactgagggggtgaacagcaacgaaagtgagtggggccagacttcgccatagggggtgaacagcaacgaaagtgagtggggccagacttcgccataaggcctttatcttcttgccatttgtcagtgttcggggtcgccataggcttcgggctcctttttaggccttccggactacaaaaatcgccattttggtgacgtcacggccgccatgttaagtagttgaggcggacggtggcgtaagttcaaaggtcaccatcagccacacctactcaaaatggtgggcaatttcttccgggtcaaaggtcatcaccgccatatttaaccacgtgacatgtgacgtcacggccgccattttgtgacacaagatggccgacttccttcctctttttcaaaaaaaagcggaagtgccgccgcggcggcgggggggggggcgcgctgcgcgcgccgcccagtagggggcgccatgcgcccccccccgcgcatgcgcggggcccccccccgcgggggctctgccccccggccccccccgtgctacgtcactaacccacgtgtcctccacaggccaatcacagtctatgtcgtgcacttcctgggcatggtctacataattatataaatgcttgcacttccgaatggctgagtttttgctgcccgtccgcggagaggagccacggcaggggatccgaacgtcctgaggg

SEQ ID NO: 191 - protein, 743 aa, Alphatorquevirus sp.
MAWGWWKRRRRWWFRKRWTRGRLRRRWPRPARRRPRRRRVRRRRRWRRGRRKTRTYRRRRRFRRRRRKAKLIIKLWQPAVIKRCRIKGYIPLIISGNGTFATNFTSHINDRIMKGPFGGGHSTMRFSLYILFEEHLRHMNFWTRSNDNLELTRYLGASVKIYRHPDQDFIVIYNRRTPLGGNIYTAPSLHPGNAILAKHKILVPSLQTRPKGKKAIRIRIAPPTLFTDKWYFQKDIADLTLFNIMAVEADLRFPFCSPQTDNTCVSFQVLSSVYNDYLSINAFNNDSGDTNLKSFLSKAFPERGEKGTSLNALNTFRTEGCISHPPLKKPNPQTNKVQDSEYFAPLDALWGDPIYYNQLNENKSLSNILNNILLKNMTTYHKKLTDFPASYQGNKAFCHLTGIYSPPYLNQGRIAPEIFGLYTEIIYNPYTDKGTGNKVWMDPLTKDNNIYKEGQSKCLLTDMPLWTLLFGYTDWCKKDTNNWDLPLNYRLVLICPYTFPKLYNEKVKDYGYIPYSYKFGAGQMPDGSNYIPFQFRAKWYPTVLHQQQVMEDISRSGPFAPKIEKPSTQLVMKYSFNFNWGGNPIIEQIVKDPSFQPTYEIPGTGNLPRRIQVIDPRVLGPHYSFRSWDMRRHTFSRASIKRVSEQQETSDLVFSGPKKPRVDIPKQETQEESSHSLQRESRPWETEEESETEALSQESQEVPFQQQLQQQYQEQLKLRQGIKVLFEQLIRTQQGVHVNPCLQ

SEQ ID NO: 192 - protein, 164 aa, Alphatorquevirus sp.
LAGLWARLLKMHFSRITRKKNKVLLLCVPAAKKKPTAMSFWRPPVHNVTGIQRLWYESFHRGHASFCGCGDPILHITALAETYGHPTGPRPSGPPGVDPNPHIRRARPAPAAPEPSQVDSRPALTWHGDGGSDGGAGGSGSGGPVADFADDGLDQLVAALDDEE

SEQ ID NO: 193 - protein, 65 aa, Alphatorquevirus sp.
MPTVGPRQWLFPERKPAPAPSSGDWAMEFLAAKIFDRPVRSNLKDTPYYPYVKNQYNVYFDLKFE

SEQ ID NO: 194 - DNA, 3797 bp, Alphatorquevirus sp.
cgggtgccggaggtgagtttacacaccgcagtcaaggggcaattcgggctcgggactggccgggccccgggcaaggctcttaaaaaatgcactttcgcagagtgcgagcgaaaaggaaactgctactgcaaactgtgcgagctccaccgaaggcacctgccatgagcttcaccacacctactattaatgccgggatccgagagcagcaatggttcgagtccatccttagatcccaccactcgttctgtggctgtggtgatcccgtgcttcattttactaaccttgctactcgctttaactatctgcctactacctcttcgcctctggaccctcccggcccagcgccgcgaggccgcccggcgctccgccgtctcccggcactcccttcagcccccgcgaccccctctagagatccagtatggcctactggttccgagggtggggctggaggccgaggcgccggtggagaaggtggcgccgccgtcgaaggagactaccgagaagaagagttagacgagctgttcgcggccttggaagaagacgcaaaccaagggtaaggaggcgccgcagacgccgcagacgtgtctacaaacgggggtggagacgcaggaggtacataagacgtgggcgacgcaaaaagaaactcgtactgactcagtggaacccggcagtagttaagaggtgcaacattaagggcggacttccaataatcatatgcggagagcccagggcagcctttaactatggctaccacatggaggactacactccccaacctttccccttcggagggggaatgagcacagtgactttctctctgaaagccttatatgatcagtacgtcaaacaccaaaacaggtggactttctcaaacgaccagctagacctggccagatacaggggctgtaaactaaggttttacagaagccccgtctgtgactttatagtacactacaacctaatacctccactaaaaatgaaccagtttacaagtcccaacacgcacccgggactactcatgctcagcaaacacaaaataataattcccagcttccaaacaagaccggggggcaaacgctttgttaaaataagacttaatccccccaaactatttgaagacaagtggtacactcaacaagacctatgcaaagttccgctcgttagtattacagcaactgcggctgacttgcggtatccgttctgctcaccacaaacgaacaacccttgcaccaccttccaggtgctgcgcaagaactacaacacagttataggaacttccgtaaaagaccaagagtccacacaagagtttgaaaaatggctatatggcacagactcacactatcaaacatttgccacagaagctcaactaggtagaatacctgcatttaaccctgatggcaccacaaactcacaaaaagactcctggcaacaaagctggagcaaaaaaaatgaacaatggtcaggatcagaaacatacccacagactactacacaaatgtacaaaattccatatgacagcaactttggctaccctacatacagagcacaacctgaatatattaaaaaaagaagagcctcaaactttaaatatgaaatagaaaaccctgtcagtaaaaaagtatggccacaaccaagtacaacaactcccacagtagactactatgaataccactgtggatggttcagtaacatatttataggcccaaacagatacaatttacaatttcaaacagcatacgtagacaccacatataacccactcatggacaaaggaaaaggcaacaaaatatggttccagtacctttctaaaaaaggcacagactataacgaaaaacaatgctactgccttctagaagacatgcccctgtgggcaatgtgctttggatacacagactatgtagaaactcaattaggcccaaatgtagaccatgaaacagcaggccttctaataataatatgtccttacactcaaccacctatgtatgacaaaactagacccaactggggatacgtagcctatgacacaaactttggcaatggaaaaatgccctccggaacaggccaagttccagtatactggcaatgcagatggagacccatgctgtggttccaagaacaagtactaaatgacatctcaaagactggaccgtacgcctacagagacgaatataaaaatgtacagctgactctctactacaactttatttttaactgggggggcgacatgtattacccacaggtcgttaaaaacccctgtggagactccggaatcgttcccggttccggtagattcactcgagaagtacaagtcgttagcccgctttccatgggaccggcctacatcttccactacttcgacagcagaaggggcttctttagtgaaaaagctcttaaaagaatgcaacaacaacaagaatttgatgaatcttttacattcaaacctaagagacccaaactttctacagcagccacagaaatcctccagctcgaagaagactcgtcttcaggggaaggaaaatcgccactacagcaagaagagaaagaagcagaagtcctccaaacgccacaagtacagctccagctccagcggaacatccaggagcagctcgcaatcaagcagcagctccaattcctcctgctccaactcctcaagacccaatccaatttgcatttaaacccacaatttttaagcccttcataaaatatgacatgtttggggacccccttcctcaccccccaacagcccaagactgggccacagaatatgagtgctgtaaggcctttaacaggccacctagaaccaacctaaaagacacccccttttacccctgggtccctaaacctaaacctcaattccgtgtatcttttaaacttggttttcaataaacaaggccgtgggagtttcacttgtcggtgtcaacctcttaaggtcactaagcactccgagcgtaagcgaggagtgcgaccctcccccctggggcaactccctcgaagtccggcgctacgcgcttcgcgctgcgccggacatctcggaccccccctccacccgaaacgcttgcgcgtttcggaccttcggcgtcgggggggtcgggggctttactaaacagactccgagatgccattggacactgagggggtgaacagcaacgaaagtgagtggggccagacttcgccataaggcctttatcttcttgccatttgtcagtgtccggggtcgccataggcttcggcctcggttttaggccttccggactaccaaaatggcggattccgtgacgtcatggccgccattttaggctgttgcccggcgtttgacttccgtgttaaaggtcaaacacccggcggcaccacaaaatggccgtcaattacttccgaggtcaaaggttaccgctacgtcataagtcacgtgacagggaggagcgacaaacccggaagtcatcctcacccacgtgacttaccacgtggtgtgtacgtcacacgccgccattttaaatcacaaaatggcggacttccttccgcttttttaaaaaaaacggccctgcggcggcgcgcgcgcttcgcgctgtctcagtacgagtttctttttgcgtcgcccacgtcttatgtacctcctgcgtctccccccccgaagtccgtcactaaccacgtgactcccgcaggccaaccgagtgctatgtcgtgcacttcctgggcggagtctacgtcctcatataagtaagtgtacttccgaatggctgagttttccacgcccgtccgcagcggcagcaccacggagggtgatccccgcgtcccgaggg

SEQ ID NO: 195 - protein, 760 aa, Alphatorquevirus sp.
MAYWFRGWGWRPRRRWRRWRRRRRRLPRRRVRRAVRGLGRRRKPRVRRRRRRRRRVYKRGWRRRRYIRRGRRKKKLVLTQWNPAVVKRCNIKGGLPIIICGEPRAAFNYGYHMEDYTPQPFPFGGGMSTVTFSLKALYDQYVKHQNRWTFSNDQLDLARYRGCKLRFYRSPVCDFIVHYNLIPPLKMNQFTSPNTHPGLLMLSKHKIIIPSFQTRPGGKRFVKIRLNPPKLFEDKWYTQQDLCKVPLVSITATAADLRYPFCSPQTNNPCTTFQVLRKNYNTVIGTSVKDQESTQEFEKWLYGTDSHYQTFATEAQLGRIPAFNPDGTTNSQKDSWQQSWSKKNEQWSGSETYPQTTTQMYKIPYDSNFGYPTYRAQPEYIKKRRASNFKYEIENPVSKKVWPQPSTTTPTVDYYEYHCGWFSNIFIGPNRYNLQFQTAYVDTTYNPLMDKGKGNKIWFQYLSKKGTDYNEKQCYCLLEDMPLWAMCFGYTDYVETQLGPNVDHETAGLLIIICPYTQPPMYDKTRPNWGYVAYDTNFGNGKMPSGTGQVPVYWQCRWRPMLWFQEQVLNDISKTGPYAYRDEYKNVQLTLYYNFIFNWGGDMYYPQVVKNPCGDSGIVPGSGRFTREVQVVSPLSMGPAYIFHYFDSRRGFFSEKALKRMQQQQEFDESFTFKPKRPKLSTAATEILQLEEDSSSGEGKSPLQQEEKEAEVLQTPQVQLQLQRNIQEQLAIKQQLQFLLLQLLKTQSNLHLNPQFLSPS

SEQ ID NO: 196 - protein, 156 aa, Alphatorquevirus sp.
MHFRRVRAKRKLLLQTVRAPPKAPAMSFTTPTINAGIREQQWFESILRSHHSFCGCGDPVLHFTNLATRFNYLPTTSSPLDPPGPAPRGRPALRRLPALPSAPATPSRDPVWPTGSEGGAGGRGAGGEGGAAVEGDYREEELDELFAALEEDANQG

SEQ ID NO: 197 - protein, 58 aa, Alphatorquevirus sp.
MFGDPLPHPPTAQDWATEYECCKAFNRPPRTNLKDTPFYPWVPKPKPQFRVSFKLGFQ

SEQ ID NO: 198 - DNA, 3794 bp, Alphatorquevirus sp.
cgggtgccggaggtgagtttacacaccggagtcaaggggcaattcgggctcgggactggccgggctatgggcaaggctcttaaaaatgcacttttctaggatatccagaaagaaaaggctactgctactgcaaacagtgccagctccacagaaaactgtcaaacttttaagaggtatgtggagtcctcccactgacgatgaacatatccgcgagcgaaaatggttcctcgccactgtttattctcactctgctttctgtggctgcaatgatcctgtcggtcacctctgtcgcttggctactctttctaaccgtccggagaacccgggaccctccgggggacgtcgtgctcctttcatcggggtcctacccgctctcccggctgctaccgagcagcccggtgatcgagcaccatggcctatgggtggtggaggagacgccgcaggagatggaagagatggaggagaaggcccaggtggagacgcccatggaggacccgcagacgcagacctgctagacgccgtggacgccgcagaacagtaaggagacgcaggcgcgggaggtggaggaggcgttatagaaagtggaggagaaagggcagacgcaggagaaaaaagaaacttataataagacaatggcagccaaactacaccagaaaatgcaacatagtaggctacatgccagtaattatgtgtggagaaaacactctaataagaaactatgccacacacgcagacgactgctactatccgggaccctttgggggcggcatggccacccagaaatttacactcagaatcctgtacgatgactacaaaaggtttatgaactactggacctcctcaaacgaggacctagacctctgtagatacaggggagtcaccctatacttcttcagacacccagaagtagactttataataattataaacaccacacctccgtttacagacacagagatcacaggacctagcatacatccgggcatgatggccctaaacaagagagccaggttcattcccagcctaaagactagacctagcagaagacacatagttaaaattaaagtgggggcccccaaactgtacgaggacaagtggtacccccagtcagaactctgtgacatgcccctcctaaccgtctacgctaccgcagcggatatgcaatatccgttcggctcaccactaactgacactcctattgtaagcttccaagtattgcgcagcatgtacaacgacgcccttagcatacttccctctaactttgaaaatgccaatagtgcaggcacaaaactttacaatgaaatatctaattatttaccatactacaacacaacagaaacaatagcacagctaaagagatatgtagaaaatactcaaaaaagtgcaacagtgcccaatccatggcaatcaaagtatgttaatactactccctttaccactgcagtagatattactacatcaataccacacaccacattttcagacacctggtacaggggcacagcatacacaaaatctatcactactgtgccactcgccgcagcaacattatatgaaaaccaaacaaaaaaactgctgtctacaacattcacaggagggtccccgtacctagagtaccacggaggcctgtacagctccatatggctatcagcaggccgatcctactttgaaacaaagggagcatacacagacatctgctacaacccctacacagacagaggagaaggcaacatggtgtggatagactggctatcaaaaacagactccatttatgacaagaaccgcagcaaatgccttatagaaaagctacccctatgggcagcagtatacgggtacgcagaatactgtgccaagagcaccggagactcaaacatagacatgaacgccagagtagtgataaggtgcccctacaccaccccccagatgatagacaccagcaacgaactgaggggcttcatagtatacagctttaactttggcaagggcaaaatgcccggaggcagcagcgaggtacccataagaatgagagccaagtggtacccctgtctctttcaccaaaaagaggttctagaagccatagggcagtcgggccccttcgcctaccactgtgaccaaaagaaagcagtgctaggtctaaaatacaggtttcactggatatggggcggaaaccccgtgtttccacaggttgttagaaacccctgcaaagacacacacggttcctcgggccctagaaagcctcgctcagtacaaatcattgacccgaagtacaacacaccagagctcacaatccacgcgtgggatttcagacgtggcttctttggcccaaaagctattaagagaatgcaacaacaaccaacagatgctgaacttcttccaccaggccgcaagaggagcaggcgagacaccgaagccctccaaagcagccaagaaaagcaaaaagaaagcttacttttcaaacagctcaagctccagcgacgagtacccccgtgggaaagctcgcaggcctcgcagacagaggcagagagcgaaaaagagcaagagggaaccctctcccagcagctccgagagcagcttcaccagcaaaagctcctcggcaagcagctcagggaaatgttcctacaactccacaaaatccaacaaaatcaacacgtcaaccctaccttattgccaagggatcaggctttaatttgctggtctcagattcagtaattaacatgtttggagaccctaaaccctacaaaccctccagcaacgactggaaagaagagtacgaggccgctagatattgggacagaccccccagatctaaccttagagacaaacccttttatccctgggccccccccaaacaatccctacaaagtaaactttaaactaggcttccaataaagctaggccgtgggagtttcacttgtcggtgtctgcttcttaaagtcgccaagcactccgagcgtaagcgaggagtgcgaccctccccccccggtagcaacttcttcggagtccggcgctacgccttcggctgcgccggacacctcagaccccccctccacccgaaacgcttgcgcgtttcggaccttcggcgtcgggggggggtcgggagctttattaaacagactccgagttgccattggacactggagctgtgaatcagtaacgaaagtgagtggggccagacttcgccataaggcctttatcttcttgccatttgtccgtgtcgggggtcgccgtaggcttgggggtcgccgtcagggccttccggactacaaacatggcgaatccgtgacgtcacggccgccattttaagtaggtgacgtccaggactgacgtaaagttcaaaggtcatcctcggcggaacctatacaaaatggcggacaacatcttccgggtcaaaggtcatcactacgtcataagtcacgtggggacggctgtacttaaacacggaagtaggccccgccacgtgatttaacacgtggtgcatgcgtcacggcggccattttattttacaaaatggcgaacaacttcctcttttttaaaaaaaggcgccaaaaaaccgtcggcgggggggccgcgcgctgcgcgcgcggcccccccccctccggggggctccgccccccggccccccccgtgctacgtcactaaccacgtgaccccacccacccaaccagagtctacttcgtgcacttcctgggaggagtcatccgcctgatataagtaacagcacttccgaatggctgagttttccacgcccgtccgcagcggtgaagccacggagggagctcagcgcgtcccgaggg

SEQ ID NO: 199 - protein, 765 aa, Alphatorquevirus sp.
MAYGWWRRRRRRWKRWRRRPRWRRPWRTRRRRPARRRGRRRTVRRRRRGRWRRRYRKWRRKGRRRRKKKLIIRQWQPNYTRKCNIVGYMPVIMCGENTLIRNYATHADDCYYPGPFGGGMATQKFTLRILYDDYKRFMNYWTSSNEDLDLCRYRGVTLYFFRHPEVDFIIIINTTPPFTDTEITGPSIHPGMMALNKRARFIPSLKTRPSRRHIVKIKVGAPKLYEDKWYPQSELCDMPLLTVYATAADMQYPFGSPLTDTPIVSFQVLRSMYNDALSILPSNFENANSAGTKLYNEISNYLPYYNTTETIAQLKRYVENTQKSATVPNPWQSKYVNTTPFTTAVDITTSIPHTTFSDTWYRGTAYTKSITTVPLAAATLYENQTKKLLSTTFTGGSPYLEYHGGLYSSIWLSAGRSYFETKGAYTDICYNPYTDRGEGNMVWIDWLSKTDSIYDKNRSKCLIEKLPLWAAVYGYAEYCAKSTGDSNIDMNARVVIRCPYTTPQMIDTSNELRGFIVYSFNFGKGKMPGGSSEVPIRMRAKWYPCLFHQKEVLEAIGQSGPFAYHCDQKKAVLGLKYRFHWIWGGNPVFPQVVRNPCKDTHGSSGPRKPRSVQIIDPKYNTPELTIHAWDFRRGFFGPKAIKRMQQQPTDAELLPPGRKRSRRDTEALQSSQEKQKESLLFKQLKLQRRVPPWESSQASQTEAESEKEQEGTLSQQLREQLHQQKLLGKQLREMFLQLHKIQQNQHVNPTLLPRDQALICWSQIQ

SEQ ID NO: 200 - protein, 161 aa, Alphatorquevirus sp.
LAGLWARLLKMHFSRISRKKRLLLLQTVPAPQKTVKLLRGMWSPPTDDEHIRERKWFLATVYSHSAFCGCNDPVGHLCRLATLSNRPENPGPSGGRRAPFIGVLPALPAATEQPGDRAPWPMGGGGDAAGDGRDGGEGPGGDAHGGPADADLLDAVDAAEQ

SEQ ID NO: 201 - protein, 61 aa, Alphatorquevirus sp.
LLVSDSVINMFGDPKPYKPSSNDWKEEYEAARYWDRPPRSNLRDKPFYPWAPPKQSLQSKL

SEQ ID NO: 202 - DNA, 3794 bp, Alphatorquevirus sp.
cgggtgccggaggtgagtttacacaccggagtcaaggggcaattcgggctcgggactggccgggctatgggcaaggctcttaaaaatgcacttttctaggatacgcagaaagaaaaggctactgctactgcagacactgccagcttcaaagaaaactaggcaacttctgagaggtatgtggagcccacccacagacaatgaacgtgtccgtgagcgtcaatggctcctctcagtatttcagtctcacagtgctttctgtggctgcaatgatcctatcggtcacctttgtcgcttggctactctgtctaaccgcccggagaacccgggaccctccggaggaccccgtactcctcagatccggaacctacccgctctcccggctgctccccaagagcccggtgatcgagcaccatggcctatggctggtgggcccggagacgcagacgctggcgccgctggaaacgcaggccttggagacgccgatggaggacccgcagacgcagacctcgtcgccgctatagacgccgcagacatgtaaggagacggaggcgcgggaggtggaggaggaggtacagaaaatggcgcagaaaaggcaggagaaggggcaaaaaaaagattataataagacagtggcagcccaactacaggagacgctgcaacatagtgggctacatgcctgtacttatttgtggcaacaatactgtatccagaaactatgccacacactcagatgactcctacctgccgggaccctttggagggggcatgactacagacaaattcaccctaagaatactctatgacgagtacaaaaggtttatgaaccactggacagcctctaacgaggacctggacctttgtagatacagaggatgcaccctgtggttctttagacacccagaagtagactttattatactaataaatactatgccgccgttcttagacacccagctaacgggacccagcatacacccgggacttatggcactaaacaaaagagccagatggatacccagcctaaagagcagacccggtagaaaacacgtagtaaaaattagagtaggggccccaagaatgttcacagacaaatggtacccccagtcagatctgtgtgacctgcccctcctcactatctttgccagtgcagctgacatgcaatatccgttcggctcaccactaactgacactgtggttgtgggtttccaggttctgcaatccatgtacaacgactgccttagcatacttcctgaaaattttacggacagaggcaaaggcaaaaccctacatgagacaataactgcttatctcccaaactataatactacacaaacactagcacaactaaaaccatacgtagacaacatgcagtctgtaaatacaactaaaacatggagttcaatggtaaataccacaaaatttacaacaagttccacacccactaccacaaatgcccaagccccatactacacatttgcagatacctggtatagaggcacagcatacaccaataacataacacaagtccccttaaaggctgcagaactatatctagaaacaacaaaaaaactattaggcacaacatttacaggaggctctccctacttagaataccatggaggactttactcctcaatctggctgtcagcaggccgctcttactttgaaaccaaaggaacatacacagatgttacctacaacccatttacagatagaggagaaggtaacatggtatggatagactgggtatctaaatatgactctgtgtactcaaaaacacagagcaaatgcttaatagaaggcctacctctgtgggccgcagtctatggatatgcagaatactgcagcaaagccacaggagacacaaacatagaacaaaactgcagagtagttattagaagccccttcactaaccctcagctactagaccataacaaccctctaagagggtacgtcccctactcaataaactttggcaacggaaaaatgccggggggaagcagtcaagtacccataagaatgagaagcaagtggtaccccactctgtttcatcaaaaagaggtgttagaggccatagctcagggaggccccttcgcctaccacagtgatcaaatgaaagtgtcactaggtatgaaatacgcctttaagtgggtgtggggtggaaaccccgtatcccaacaggttgttagaaacccctgcaaggacaccggtgtttcctcgggcaatagagtccctcgatcagtacaaatcgttgacccgaagtacaacactccagaacttgccatacatgcctgggacttcagacgtggcctctttggcccaaaagctattaagagaatgcaaacagaaccgtaccctactgaacttctttcgccagggcgaaaaagatacaggagagacacagaagctctactccccagccaagaagagcaacaaaaagaaaacttatttttcctcccagtcaagcagctccgacgaatccccccgtgggaggagtcggaccaaacgcaaagcgaggaagagggggtccaacaagagacgcagacgctctcccagcagctccagcagcagctcaaagagcaacagctcatgggagtccaactgcgagccctataccaacaattacaacgggtccaacaaaacacacatatcgaccctacctttttgccaaggggggcgggcgtaacatctttatttcaaacagcgtagttgatatgtttggagaccccataccccacccggctacaagccaagactggcagtgtgagtacgagacctgcaaagtctgggacagacctgccagaacagacctaaacgatacccctttttacccctgggcccccagacacaaaaatccatactctgtgtgctttcgcttaggcttccaataaacgttggccgtgggactttcacttgtcggtgtctacctcttaaagtcactaagcactccgagcgtaagcgaggagtgcgaccctcccccccggtagcaacttcttcggagtccggcgctacgccttcggctgcgccggacacctcagaccccccctccacccgaaacgcttgcgcgtttcggaccttcggcgtcgggggggtcgggggctttactaaacagactccgagttgctcttggacactgagggggcatacagcaacgaaagtgagtggggccagacttcgccataaggcctttatcttcttgccatttgtcagtgtcgtgggtcgccataggcttcggggtcagttttagggccttccggactacaaaaatggcggatctgtgacgtcacggccgccattttaagtaggtgacgtccaggactgacgtaaagttcaaaggtcatcctcggcggaacctatacaaaatggcggacaacatcttccgggtcaaaggtcattgctacgtcataagtcacgtggggacggctgtacttaaacacggaagtaggccccgccacgtgatttactacgtggtacatgcgtcacggcggccattttgttttacaaaatggcgcacaacttccgcttttttgaaaaaaggcgcgaaaaaaccgtcggcgggggggccgcgcgctgcgcgcgcggccccccccccccaccggggggctccgccccccggccccccccgtgctacgtcactaaccatgtgatccctcccacccaaccagcgtttactacgtacacttcctgggagtggcaatacgcctaatataagtagctgcacttccgaatggctgagttttccacgcccgtccgcagcggtgaagccacggagggagctcagcgcgtcccgaggg

SEQ ID NO: 203 - protein, 765 aa, Alphatorquevirus sp.
MAYGWWARRRRRWRRWKRRPWRRRWRTRRRRPRRRYRRRRHVRRRRRGRWRRRYRKWRRKGRRRGKKKIIIRQWQPNYRRRCNIVGYMPVLICGNNTVSRNYATHSDDSYLPGPFGGGMTTDKFTLRILYDEYKRFMNHWTASNEDLDLCRYRGCTLWFFRHPEVDFIILINTMPPFLDTQLTGPSIHPGLMALNKRARWIPSLKSRPGRKHVVKIRVGAPRMFTDKWYPQSDLCDLPLLTIFASAADMQYPFGSPLTDTVVVGFQVLQSMYNDCLSILPENFTDRGKGKTLHETITAYLPNYNTTQTLAQLKPYVDNMQSVNTTKTWSSMVNTTKFTTSSTPTTTNAQAPYYTFADTWYRGTAYTNNITQVPLKAAELYLETTKKLLGTTFTGGSPYLEYHGGLYSSIWLSAGRSYFETKGTYTDVTYNPFTDRGEGNMVWIDWVSKYDSVYSKTQSKCLIEGLPLWAAVYGYAEYCSKATGDTNIEQNCRVVIRSPFTNPQLLDHNNPLRGYVPYSINFGNGKMPGGSSQVPIRMRSKWYPTLFHQKEVLEAIAQGGPFAYHSDQMKVSLGMKYAFKWVWGGNPVSQQVVRNPCKDTGVSSGNRVPRSVQIVDPKYNTPELAIHAWDFRRGLFGPKAIKRMQTEPYPTELLSPGRKRYRRDTEALLPSQEEQQKENLFFLPVKQLRRIPPWEESDQTQSEEEGVQQETQTLSQQLQQQLKEQQLMGVQLRALYQQLQRVQQNTHIDPTFLPRGAGVTSLFQTA

SEQ ID NO: 204 - protein, 160 aa, Alphatorquevirus sp.
LAGLWARLLKMHFSRIRRKKRLLLLQTLPASKKTRQLLRGMWSPPTDNERVRERQWLLSVFQSHSAFCGCNDPIGHLCRLATLSNRPENPGPSGGPRTPQIRNLPALPAAPQEPGDRAPWPMAGGPGDADAGAAGNAGLGDADGGPADADLVAAIDAADM

SEQ ID NO: 205 - protein, 58 aa, Alphatorquevirus sp.
MFGDPIPHPATSQDWQCEYETCKVWDRPARTDLNDTPFYPWAPRHKNPYSVCFRLGFQ

SEQ ID NO: 206 - DNA, 3791 bp, Alphatorquevirus sp.
cgggtgccgaaggtgagtttacacaccgaagtcaaggggcaattcgggctcgggactggccgggctatgggcaaggctctgaaaaagctatgttttttggaaggtgctggagaaagaaaaggcaactgcttctgctacctgtgcagtctccacaggcgacaccttccatgagccgctggcaaccacccgtccacaatgcccccggcattgagagacagtggtatgactccgtttggcgcagtcacgctgcttgctgtggttgtggcgatgttattggtcaccttaatgatctggcggctcgttttggacgtcctgggaaccccagacccccgggcgctcctcagccgccgccagtgaggcccctgccggccctgccggctccggagcccccggctgaccgagcgccatggcctatggctggtggaggagacgacggtggcgccgccggaggtggccgcgacggaggagatggaggacccgccgccgcagaagaagacgacctagacgcccttttcgccgccgccgaagagtaaggagacggaggggtcggtggaggagggcttataagagatggcgcagacgcagggggcgacgcaaacacaaaaagagacttgtactgactcagtggcaaccctctgttgttaaaaaatgttatatagtgggctacgaccccataatagtatgtggacgaaacagaactagcagtaactacagcagccacatagatgactttacatttaacaacgaggcctacggaggaggcctctgcacccacagatacactttaaggactctatttcaagactttttactacaccacaactattggacctcctctaacaaagacctagacctgggaaggtacctaggatgcaatataatattttttagacaccccactgtagactttatagccagaataagaaacatgcctccctttgaagacactgacgccacagcaatgacactacacccaggcatgctagtactctctaaaaagagaataatgattcccagcttaaagtctaggcctagcagaaaacactatgtaaaagttaaagtagggcccccaaaactgtttgaagacaagtggtacccccagagcgagttatgtgatgtaacattactaactgtacaggcaaccgcagcggacttgcaatatccgttcggctcaccactaacgaactcagtatgctgcaacttccaggttttagacagcaactatgacaacatactaaccgtcttagaggacaccacagaggccgagaacagaaatagaatctataataaaatacttaactttattacagtatataacaccacagaaacagcagcacaactaaacaaatttttacctaccataaatacaaatcaactaaattcacaaaatgctagtgacaataccatagaagttaacacgacacaaggcacacaagcaaactcattttcaatttggaactcaaaaaacccacatcaaaataccctgtacgcaggcagtgcatatataacttatccacaacagcaaaagaaaacaccaccagaacaaatgaaagaagcaaacaaagcatatataaatgcagccaaacaaaacctaccaaactggggaataagcacacagtacacagaaggtacaacaccatacccatttgaatactacacaggactatacagcagtatatttttaagtgcaggaagatctaactgggaactaaaaggctgctacacagacattagttacaatcccctaacagacaaaggaataggtaacatgatatggctagatataataaccaaatcagatagtaaatacacagaaaacaaatctaaatgtttaatggccaactacccactatgggctatgtgctatggatacctagactggtgtgataaagtactagaccacataaacatagactcagagtacagagtatgcataagatgcccatacacacaccctatgatgaccaaggcctcagacccactgtgggggtttgtaccctacagctacaactttggaaagggcaaaatgcccggaggaaacccagtaccatctctctggatgagagtacactggtaccccacagtttttcaccaaagagaggtacttgaatgcttatcacagaccggaccgtttgcatacaagagtgacgaaaataaagctgtactgactataaaatattcattcagatggaaatggggaggaaatcctatatttcaacaggtggtcagagacccctgcaaacatccacaaggacccagtccccatagacagcctcgtgagctacaaatcgctgacccgaagtaccagaccccacaactcatctggcacgcgtgggacttcagacgtggactgtttagcaagacaggtattaaaagaatgtcagaacaaccagcttatgatgaattttctgcagacaggagcaagagacccaagaaagacacagacgtccagcacagccaagagcaaaaagaagactcgcatacccaccagcgagtcctccagccctggctccactcctcccaagaggagcaaacggagtcgcaaagcgagcaagaagaagcgacgatacaagagcagctacaaaaacaactcctccagcagcgactcatgggagacaaactccgagtcgtctgccagcagatcgccagtctccaagccgggcacggccttcatcccctactccaatgccatgtataaataaagtatacatgtttcctgatatattccctaaacctgctccttccagcaacgactggaaagaggagtatatggcctgcagatattgggacaggcctccccgctctgacctaaccaaaccccctttttacccctggatgcctcctacatacaatgtaaaatttaaccttaacttcaaataaatgttggccgtgggagtttcacttgtcggtgtctacctcttaaggtcactaagcactccgagcgacagcgaggagtgcgaccctaccccctgggcccacttcttcggagccgcgcgctacgccttcggctgcgcgcggcacctcagacccccgctcgtgctgacacgcttgcgcgtgtcagaccacttcgggctcgcgggggtcgggaaatttgctaaacagactccaagttgccattggatactgtagctatgaatcagtaacgaaagtgagtggggccagacttcgccataaggcctttatcttcttgccattggatagtgtagggggttgccataggcttcggcctcgtttttaggccttccggactacaaaaatggcgcattccgtgacgtcatggccgccattttaagtaaggcggaagcaggctgtcactataacaaaatggcggcgacagccttccgctttacacaaaatggaggtgtttatcttccgggtcaaaggtcaccgctacgtcatcagtcacgtgggaagggttcgctgtaaacccggaagcaatcctctcacgtggttggtcacgtggtgcgtgcgtcacggtcgccattttagttcacaaaatggccgacttccttccgcttttttaaaagctaacggcccagcggcggcgcgcgcgctacgcgcgcgccttgcccatagcccggccagtcccgagcccgaattgcccccccggcccccccccccgaagtccgtcactaaccacgtgactcccacaggccaaccgacgtgtacgtgatacacttcctgggcgtgacttacatcctaatataactaacagcacttccgaatggctgagttttccacgcccgtccgcagcgagaacaccacggaggggagtccgagcgtcccgaggg

SEQ ID NO: 207 - protein, 763 aa, Alphatorquevirus sp.
MAYGWWRRRRWRRRRWPRRRRWRTRRRRRRRPRRPFRRRRRVRRRRGRWRRAYKRWRRRRGRRKHKKRLVLTQWQPSVVKKCYIVGYDPIIVCGRNRTSSNYSSHIDDFTFNNEAYGGGLCTHRYTLRTLFQDFLLHHNYWTSSNKDLDLGRYLGCNIIFFRHPTVDFIARIRNMPPFEDTDATAMTLHPGMLVLSKKRIMIPSLKSRPSRKHYVKVKVGPPKLFEDKWYPQSELCDVTLLTVQATAADLQYPFGSPLTNSVCCNFQVLDSNYDNILTVLEDTTEAENRNRIYNKILNFITVYNTTETAAQLNKFLPTINTNQLNSQNASDNTIEVNTTQGTQANSFSIWNSKNPHQNTLYAGSAYITYPQQQKKTPPEQMKEANKAYINAAKQNLPNWGISTQYTEGTTPYPFEYYTGLYSSIFLSAGRSNWELKGCYTDISYNPLTDKGIGNMIWLDIITKSDSKYTENKSKCLMANYPLWAMCYGYLDWCDKVLDHINIDSEYRVCIRCPYTHPMMTKASDPLWGFVPYSYNFGKGKMPGGNPVPSLWMRVHWYPTVFHQREVLECLSQTGPFAYKSDENKAVLTIKYSFRWKWGGNPIFQQVVRDPCKHPQGPSPHRQPRELQIADPKYQTPQLIWHAWDFRRGLFSKTGIKRMSEQPAYDEFSADRSKRPKKDTDVQHSQEQKEDSHTHQRVLQPWLHSSQEEQTESQSEQEEATIQEQLQKQLLQQRLMGDKLRVVCQQIASLQAGHGLHPLLQCHV

SEQ ID NO: 208 - protein, 147 aa, Alphatorquevirus sp.; identical to SEQ ID NO: 81

SEQ ID NO: 209 - protein, 124 aa, Alphatorquevirus sp.; identical to SEQ ID NO: 82

SEQ ID NO: 210 - DNA, 3790 bp, Alphatorquevirus sp.
cgggtgccgtaggtgagtttacacaccggagtcaaggggcaattcgggctcgggactggccggaccccgggcaaggctcttaaaaaaggcatgtttttcggtagggcttggagaaagaaaagggcactgctactgtctggcctgcgagctccaaagaaaaaaccacctgcaatgagccagtggtgcccgcctgtacacagtgttcagggtcgcaaccaccagtggtatgaagcctgctatcgtggtcatgctgcttactgtggctgtggcgattttattaggcaccttgttgctctgggtgatcagtttggtttcaggcctggtccccgtgctcccggcgcgcctggggtagggggacccccgcctccgctccgtagagcgctgcccgcacccccggcggccgctccggagccccagcagggcaacaacaacaacaaccagcagctggacagatggcctggggatggtggagacgacgccggcgagggtggctccggagcctatggaggagacgcaggactgccagaagacgatttagacggcctgctcgccgctatagacgacgaagagtaaggagaaaaagacgatggaggagggggcgacccagacgcagactgtacaaacgcaggagacgctttaagagacgcagacgcaggagacctaagataaaacttacacagtggcagcctagcactgtcaaacgctgctttataatagggtacattcccgggattatatgcggccccggaaaatggtcagagaactttaccagtcacatagaggacaagatagccgtgggaagctatggtggggggcacagtaccagtaggtggtccctaaaagtactgtacgaggagttccagaagcaccacaacttctggaccaaaagcaataaggagctagacctcgccaggttctttggcagcacatggacattttacagacacgaagatgtagactacatagtaacatataacagaaaagcccctctgggaggtaacatactaacagcacccagcatgcacccaggagtagccatgctaagcaaacacaaaatagtagtacccagttttaagaccagaccaggaggcaaacccacagttaaatttagaataaagccccccacaactttcatagataaatggtactttcagaaagacatatgtgaccttacactactaaacttgaacgttgtagcctgcaacttgcggtttccgttctgctcaccacaaacgaacaacattaacgtaaccttccaggtgttacatgaggtttaccacaacttcctctctataactgacgagcagttaacccaaagtagctcaagttgggaattgcactataaaaaatttttagatcaagtatttaaaacagagagagacgcaaacaaattaaacacatttgcaaccgagggagctttccatgcaccacagatagaaaagtataaaaaaccacttcaaaaagatgaatactttaaaacaaaagacgctctgtggggagatagcatacacatattaagtactggacaaacacaaggtacacaagaaacacaatccttagacgaactaaaaaaaaaaatagtagacaatgcaaaaaactatgttacaaaagtagtacaagaactaggaggtgaccaggtaaaaagattcatacatggaatgttcacacagtggacaggcatatttagccctgcattcttagactacagcagaataagcccagaaataccaggtttatataaagacattatttataacccacttactgacaaaggcataggaaacggagtatggatagactactgcagcaaaaaagacaccaaatatgaccctacaaagagcaaatgtggcatatttgacctacctctctggatgtgctgctttggcctggtagactggtgcaaaaaagagacaggacagtggggcataccttcctgggccagagtaattataaaaagtccttacacctttccaagacttataaactcagcagatgaaagtgagggctgggtaccaattggatacaacttttccaaaggttatatgccagacggcacaaagtacactcccatactaatgagacacaaatggtaccccaaccttttacaccagcaatcagtactagaagacatatccaggagcggtccctttagctaccaagagaaaaaccttagtgcaaacataacagcaaaatacaaatttagatggcattttgggggcaaccctgtgtttgaacaggttgtcgcagacccctgccaacaaacaacctatgaaatgcccggagccggtacgatgcctcgcagagtacaagtcactgacccgaaactcatcgggccacactacaccttccacagctgggacctcagacgtgactattttagcagaaaaagtattaagagaatgtcagaacaacaagaaacttctgagtttcttttctcaggcccaaaaaaaccccgaatcgatttggacgcagtgcaaattgtcgaaaaagactctttgcaccaagaaagaaaacaaaaaccctgggagagcagccagtcggaaacagagacagaagccccctcggaagaagaagaaacgagctcggtacaccagcagctccagcagcaactccgagagcaaaagcagctccggaggggaatcgagtgcctcttccagcagctgataaaaacccagcagggagtccacatagatccctcccttgtgtaggcccacaacagtggctgtttcccgagagaaagcctaagccccctcccagcaagggagactgggaaacagagtatgcagcatgcaaagcttttaacagaccgcctagattctttctaacagaccaacctttctacccttactgcaaaaacatgtacaatgtaacctttaagctcggttttaaataaacaaggccgtgggagtttcacttgtcggtgtctacctctaaaggtcactaagcactccgagcgtcagcgaggagtgcgacccttccccctgactcaacttcttcggagccgcgcgctacgccttcggctgcgcgcggcacctcagacccccgctcgtgctgacacgctcgcgcgtgtcagaccacttcgggctcgcgggggtcgggaaatttgctaaacagactccgagttgccattggacactgtagccgtgaatcagtaacgaaagtgagtggggccagacttcgccataaggcctttatcttcttgccattggtccgtgtcgggggtcgccgtaggcttcgggctcggttttaggccttccggactacaaatatggccgtttccgtgacgtcacggccgccattttaagtcagcgccggggagggtcacgtacagttcaaaggtcatcctcaccggaactgatacaaaatggccgccaattccttccgggtcaaaggtcagcgctacgtcataggtgacgtagctggtgtctgctgtaaacacggaagtaggccccgctacgtcacttgtcacgtgacgctacgtcacaaccgccattttgttttacaaaatggccgacttccttcctcttttttaaaaattaaccgttggcggcggcgcgcgcgctgcgcgcgcggcccccccccctgcggggggctccgccccccggccccccccgtgctacgtcactaacctacgtatccgtctcccataggccggacacagtctacgtcatccacttcctgggcatagtctacgtgattatataaggcgcggtacttccgaatggctgagtttttcccgtccgtccgcagcgaggaacgaccacggagggcgatccgcgcgtcccgaggg

SEQ ID NO: 211 - protein, 751 aa, Alphatorquevirus sp.; identical to SEQ ID NO: 168

SEQ ID NO: 212 - protein, 160 aa, Alphatorquevirus sp.; identical to SEQ ID NO: 169

SEQ ID NO: 213 - protein, 123 aa, Alphatorquevirus sp.; identical to SEQ ID NO: 170

SEQ ID NO: 214 - DNA, 3789 bp, Alphatorquevirus sp.
cgggtgccggaggtgagtttacacaccgcagtcaaggggcaattcgggctcgggactggccgggctatgggcaaggctcttaaaaaagccatgtttcttggtcggccttacagaaagaagagggcactgtcattgctacgcgtgcgagctccagagacgaaaccacctgctatgagctggagacccccggtgcacaaccccaatgggatcgagagaaacctgtgggaggcattctttcgcatgcatgcttcagcttgtggttgtggcgatcttgttggccatcttactgtactggctggtcggtatggtgctcctcctcgtcccccggcccccggggctcccagaccaccgctgaatcgccagctggcccttccggcgccccccgctgatcctcagcaggccagcccgagatggcctggtggggacggtggagaagatggcgctggaggccccgccgctggcggcgccgtcgcagacgccgactaccaaaaagacgaactcaacgccctattcgacgccgtcgaacaagaagagtaaggaggaggcgatgggggaggcggaggtggagacgggggtacagacgcagacttagactaagacgcagacgcagacgaaagaaaataagactgactcagtggaacccagctaaagtcaggagatgtactattaagggggttctgcccatgatactgtgcggagcaggacgctcagggtttaactatggactacacagcgacgactataccatacagaaacccgttggccagaaccctcacggtggcggcatgagcacagtaacttttagcctacaagtgctatatgaccagtaccagaggtttatgaacaagtggtcgtactccaacgaccagctagacctagccagatacttcggctgcaccttctggttttacagacacccagaagtagactttgtcgctcagtttgacaacgttcccccaatgaaaatggacgagaacacagcccctaatactcacccgtcattcctactacaaaacaaacacaaggttaaaatccccagctttaaaaccaagccttttggcagaaaaaaagttagagttacagtggggccccccaaactgtttgaagacaagtggtacagccagcatgacttgtgtaaggtgcccctagtcagttggcggttaaccgcagctgacttcaggtttccgttctgctcaccacaaactgacaacccttgctacaccttccaggtattgcatgaagagtattacccagtaataggcacttctgctttacaacaaggatcaaattacaatttaacagccatacaaaaattagaaaagtttttatataacaaatgcacccactatcaaacatttgccacagacacaagactaaaccctcagagacccataggaccaaacaatcaacaaacatataaccccagtggtacacaagaaaacataatatggagtagtactgattttaacttattcaaaaagcagacagacagcaactatggctactgcacctactgccctactgacacgttagttaaaaaaattaaaaattacagagacaaaagattcgaatggctaactcaaatgtcagaaacaaacacctgccacataaatgccacctatgctcgaggcaaaattaaagagtgggaatatcacctaggatggtactcaaatatatttataggcaacctcagacacaacctggcattccgaacagcatacatagacattacctacaatcctataacagacaaaggagaaggcaacatagtgtggttccaatatgccaccaaacccaccacacagtacatagagtcacaggcaaaatgcaccatcacaaacatacccctatatgctgctttttatggctacgaagactatatccaaagaacactaggcccctatcaagatgtagaaaccctaggcataatatgtgttaaatgtccctacacagatcccccactagttcacaaagacaaggataaggcagactggggctatgtattctacgacgttcactttggcaacggaaagaccccggagggcctgggccaagtgcacccttactggatgcagagatggagaccctatgtacagttccagaaagacactatgaacaagatagccagaaccggaccgttcagctacagagacgagacgccttccatcaccttgactgccgggtacaagtttcgttttaactgggggggcgactctatatttccacagattattaaaaacccctgcccagacagcggggtacgaccttcaaccagtagagagcgtcgctcagtacaagtcgttagcccgctcacaatggggccagagtacatattccaccgatgggactggcgacgggggttctttaatacaaaaactctcaaaagaatgcttgaaaaatcaattaatgatgaagagtattcaacaggcccaaaggtccctcgatggtttcccgcactcgaccaccaagagcaagaaggcgtctcagatacagagacgacaacctcgcagtcctcgcaagaagaagccgctcaagaagccctccaagaagtccaagaggcgtcgctacagcagcacctcttccagcagtaccgagagcagcgaagaatcggaaagcaactccaactcgtcatgctccaactcaccaagacgcagagcaatctgcacataaatccccgtctccttggccatgcataaataaagtgtacatgtttccccccgaaaaaccaatgcccatacacgggtaccacgggtgggaaacagagtatcaggcctgcaaagcctttgacaggccccctagaaactacctgtcagacaaacccatctatccctggcttccccgctcccaacctgaattcaaagtcagttttaagcttggttttcaataaacaaggccgtgggagtttcacttgtcggtgtctacctcttaaagttactaagcactccgagcgtcagcgaggagtgcgacccttccccctggtgcaacgccctcggcggccgcgcgctacgccttcggctgcgcgcggcacctcggacccccgctcgtgctgacacgctcgcgcgtgtcagaccacttcgggctcgcgggggtcgggaattttgctaaacagactccgagttgccattggacactgtagctgtgaatcagtaacgaaagtgagtggggccagacttcgccataaggcctttatcttcttgccattggtccgtctcgggggtcgccgtaggcttcgggctcggttttaggccttccggactacaaaaaccgccattttagtgacgtcacggcggccattttaagtaagcatggcgggcggtgacgtataagttcaaaggtcaccgcgcttccgtgtttacacaaaatggtggccaacttcttccgggtcagaggtcggcagctacgtcataagtcacgtaggagggctgcgtcacaaacacggaagtggctgtcccacgtgacttgtcacgtgtctgctacgtcacggccgccattttagttcacaaaatggcggacttccttcctcttttttaaaaataacggccctgcggcggcgcgcgcgctgcgcgcgcgcggggccccccccccccgcgggggggctccgccccccggccccccccccgaaaatcgtcactaaccacgtgactcccgcaggccaaccatgtgctacgtcgtgcacttcctgggcggagtctacctcataatataagtagctgcacttccgaatggctgagttttttacgcccgtccgcagcgagatcgcgacggaggagcgatcgagcgtcccgaggg

SEQ ID NO: 215 - protein, 761 aa, Alphatorquevirus sp.
MAWWGRWRRWRWRPRRWRRRRRRRLPKRRTQRPIRRRRTRRVRRRRWGRRRWRRGYRRRLRLRRRRRRKKIRLTQWNPAKVRRCTIKGVLPMILCGAGRSGFNYGLHSDDYTIQKPVGQNPHGGGMSTVTFSLQVLYDQYQRFMNKWSYSNDQLDLARYFGCTFWFYRHPEVDFVAQFDNVPPMKMDENTAPNTHPSFLLQNKHKVKIPSFKTKPFGRKKVRVTVGPPKLFEDKWYSQHDLCKVPLVSWRLTAADFRFPFCSPQTDNPCYTFQVLHEEYYPVIGTSALQQGSNYNLTAIQKLEKFLYNKCTHYQTFATDTRLNPQRPIGPNNQQTYNPSGTQENIIWSSTDFNLFKKQTDSNYGYCTYCPTDTLVKKIKNYRDKRFEWLTQMSETNTCHINATYARGKIKEWEYHLGWYSNIFIGNLRHNLAFRTAYIDITYNPITDKGEGNIVWFQYATKPTTQYIESQAKCTITNIPLYAAFYGYEDYIQRTLGPYQDVETLGIICVKCPYTDPPLVHKDKDKADWGYVFYDVHFGNGKTPEGLGQVHPYWMQRWRPYVQFQKDTMNKIARTGPFSYRDETPSITLTAGYKFRFNWGGDSIFPQIIKNPCPDSGVRPSTSRERRSVQVVSPLTMGPEYIFHRWDWRRGFFNTKTLKRMLEKSINDEEYSTGPKVPRWFPALDHQEQEGVSDTETTTSQSSQEEAAQEALQEVQEASLQQHLFQQYREQRRIGKQLQLVMLQLTKTQSNLHINPRLLGHA

SEQ ID NO: 216 - protein, 156 aa, Alphatorquevirus sp.
MGKALKKAMFLGRPYRKKRALSLLRVRAPETKPPAMSWRPPVHNPNGIERNLWEAFFRMHASACGCGDLVGHLTVLAGRYGAPPRPPAPGAPRPPLNRQLALPAPPADPQQASPRWPGGDGGEDGAGGPAAGGAVADADYQKDELNALFDAVEQEE

SEQ ID NO: 217 - protein, 147 aa, Alphatorquevirus sp.
MVSRTRPPRARRRLRYRDDNLAVLARRSRSRSPPRSPRGVATAAPLPAVPRAAKNRKATPTRHAPTHQDAEQSAHKSPSPWPCINKVYMFPPEKPMPIHGYHGWETEYQACKAFDRPPRNYLSDKPIYPWLPRSQPEFKVSFKLGFQ

SEQ ID NO: 218 - DNA, 3788 bp, Alphatorquevirus sp.
cgggtgccgtaggtgagtttacacaccggagtcaaggggcaattcgggctcgggactggccggaccccgggcaaggctcttaaaaaaggcatgtttttcggtagggcttggagaaagaaaagggcactgctactgtctggcctgcgagctccaaagaaaaaaccacctgcaatgagccagtggtgcccgcctgtacacagtgttcagggtcgcaaccaccagtggtatgaagcctgctatcgtggtcatgctgcttactgtggctgtggcgattttattaggcaccttgttgctctgggtgatcagtttggtttcaggcctggtccccgtgctcccggcgcgcctggggtagggggacccccgcctccgctccgtagagcgctgcccgcacccccggcggccgctccggagccccagcagggcaacaacaacaacaaccagcagctggacagatggcctggggatggtggagacgacgccggcgagggtggctccggagcctatggaggagacgcaggactgccagaagacgatttagacggcctgctcgccgctatagacgacgaagagtaaggagaaaaagacgatggaggagggggcgacccagacgcagactgtacaaacgcaggagacgctttaagagacgcagacgcaggagacctaagataaaacttacacagtggcagcctagcactgtcaaacgctgctttataatagggtacattcccgggattatatgcggccccggaaaatggtcagagaactttaccagtcacatagaggacaagatagccgtgggaagctatggtggggggcacagtaccagtaggtggtccctaaaagtactgtacgaggagttccagaagcaccacaacttctggaccaaaagcaataaggagctagacctcgccaggttctttggcagcacatggacattttacagacacgaagatgtagactacatagtaacatataacagaaaagcccctctgggaggtaacatactaacagcacccagcatgcacccaggagtagccatgctaagcaaacacaaaatagtagtacccagttttaagaccagaccaggaggcaaacccacagttaaatttagaataaagccccccacaactttcatagataaatggtactttcagaaagacatatgtgaccttacactactaaacttgaacgttgtagcctgcaacttgcggtttccgttctgctcaccacaaacgaacaacattaacgtaaccttccaggtgttacatgaggtttaccacaacttcctctctataactgacgagcagttaacccaaagtagctcaagttgggaatcgcactatagaaaatttttagatcaagtatttaaaacagagagagacgcaaacaaattaaacacatttgcaaccgagggagctttccatgcaccacagatagaaaagtataaaaaaccacttcaaaaagatgaatactttaaaacaaaagacgctctgtggggagatagcatacacatattaagtactggacaaacacaaggtacacaagaaacacaatccttagacgaactaaaaaaaaaaatagtagacaatgcaaaaaactatgttacaaaagtagtacaagaactaggaggtgaccaggtaaaaagattcatacatggaatgttcacacagtggacaggcatatttagccctgcattcttagactacagcagaataagcccagaaataccaggtttatataaagacattatttataacccacttactgacaaaggcataggaaacggagtatggatagactactgcagcaaaaaagacaccaaatatgaccctacaaagagcaaatgtggcatatttgacctacctctctggatgtgctgctttggcctggtagactggtgcaaaaaagagacaggacagtggggcataccttcctgggccagagtaattataaaaagtccttacacctttccaagacttataaactcagcagatgaaagtgagggctgggtaccaattggatacaacttttccaaaggttatatgccagacggcacaaagtacactcccatactaatgagacacaaatggtaccccaaccttttacaccagcaatcagtactagaagacatatccaggagcggtccctttagctaccaagagaaaaaccttagtgcaaacataacagcaaaatacaaatttagatggcattttgggggcaaccctgtgtttgaacaggttgtcgcagacccctgccaacaaacaacctatgaaatgcccggagccggtacgatgcctcgcagagtacaagtcactgacccgaaactcatcgggccacactacaccttccacagctgggacctcagacgtgactattttagcagaaaaagtattaagagaatgtcagaacaacaagaaacttctgagtttcttttctcaggcccaaaaaaaccccgaatcgatttggacgcagtgcaaattgtcgaaaaagactctttgcaccaagaaagaaaacaaaaaccctgggagagcagccagtcggaaacagagacagaagccccctcggaagaagaagaaacgagctcggtacaccagcagctccagcagcaactccgagagcaaaagcagctccggaggggaatcgagtgcctcttccagcagctgataaaaacccagcagggagtccacatagatccctcccttgtgtaggcccacaacagtggctgtttcccgagagaaagcctaagccccctcccagcaagggagactgggaaacagagtatgcagcatgcaaagcttttaacagaccgcctagattctttctaacagaccaacctttctacccttactgcaaaaacatgtacaatgtaacctttaagctcggttttaaataaacaaggccgtgggagtttcacttgtcggtgtctacctctaaaggtcactaagcactccgagcgtcagcgaggagtgcgacccttccccctgactcaacttcttcggagccgcgcgctacgccttcggctgcgcgcggcacctcagacccccgctcgtgctgacacgctcgcgcgtgtcagaccacttcgggctcgcgggggtcgggaaatttgctaaacagactccgagttgccattggacactgtagccgtgaatcagtaacgaaagtgagtggggccagacttcgccataaggcctttatcttcttgccattggtccgtgtcgggggtcgccgtaggcttcgggctcggttttaggccttccggactacaaatatggccgtttccgtgacgtcacggccgccattttaagtcagcgccggggagggtcacgtacagttcaaaggtcatcctcaccggaactgatacaaaatggccgccaattccttccgggtcaaaggtcagcgctacgtcataggtgacgtagctggtgtctgctgtaaacacggaagtaggccccgctacgtcacttgtcacgtgacgctacgtcacaaccgccattttgttttacaaaatggccgacttccttcctcttttttaaaaattaaccgttggcggcggcgcgcgcgctgcgcgcggccccccccccgcgggggcctccgccccccggcccccccccgtgctacgtcactaacctacgtatccgtctcccataggccggacacagtctacgtcatccacttcctgggcatagtctacgtgattatataaggcgcggtacttccgaatggctgagtttttcccgtccgtccgcagcgaggaacgaccacggagggcgatccgcgcgtcccgaggg

SEQ ID NO: 219 - protein, 751 aa, Alphatorquevirus sp.
MAWGWWRRRRRGWLRSLWRRRRTARRRFRRPARRYRRRRVRRKRRWRRGRPRRRLYKRRRRFKRRRRRRPKIKLTQWQPSTVKRCFIIGYIPGIICGPGKWSENFTSHIEDKIAVGSYGGGHSTSRWSLKVLYEEFQKHHNFWTKSNKELDLARFFGSTWTFYRHEDVDYIVTYNRKAPLGGNILTAPSMHPGVAMLSKHKIVVPSFKTRPGGKPTVKFRIKPPTTFIDKWYFQKDICDLTLLNLNVVACNLRFPFCSPQTNNINVTFQVLHEVYHNFLSITDEQLTQSSSSWESHYRKFLDQVFKTERDANKLNTFATEGAFHAPQIEKYKKPLQKDEYFKTKDALWGDSIHILSTGQTQGTQETQSLDELKKKIVDNAKNYVTKVVQELGGDQVKRFIHGMFTQWTGIFSPAFLDYSRISPEIPGLYKDIIYNPLTDKGIGNGVWIDYCSKKDTKYDPTKSKCGIFDLPLWMCCFGLVDWCKKETGQWGIPSWARVIIKSPYTFPRLINSADESEGWVPIGYNFSKGYMPDGTKYTPILMRHKWYPNLLHQQSVLEDISRSGPFSYQEKNLSANITAKYKFRWHFGGNPVFEQVVADPCQQTTYEMPGAGTMPRRVQVTDPKLIGPHYTFHSWDLRRDYFSRKSIKRMSEQQETSEFLFSGPKKPRIDLDAVQIVEKDSLHQERKQKPWESSQSETETEAPSEEEETSSVHQQLQQQLREQKQLRRGIECLFQQLIKTQQGVHIDPSLV

SEQ ID NO: 220 - protein, 160 aa, Alphatorquevirus sp.; identical to SEQ ID NO: 169

SEQ ID NO: 221 - protein, 123 aa, Alphatorquevirus sp.; identical to SEQ ID NO: 170

SEQ ID NO: 222 - DNA, 3788 bp, Alphatorquevirus sp.
caatttgttcatcatgcattcgtttgatagctcaaggggcaattcgggctcgggactggccgggccccgggcaaggctcttaaaaagcatgtttctcggtaaactgtacagaaagaaaaggaaagtgccactgcaagctctgccagtaccaccgcctaaacggactagcatgagctgggtacaaccggtatctaacgcccatgttcgacaacaacaatggttcgagtccaccgttaaaagccacgacgctttctgtggctgtggtgattccgtgcttcattttactaaccttgctactcgctttaaccgtctgcatgctgccccttcgcctctggatccgccctacccccctcccccgaggcgggcgcgtgtgagaggcctgccggccctccccgctcctgagaacccaccggcgccatggcctggcgctggtggagacgccgctggaaacccagaaggcggcccgcgtggacaaagtaccggagacgccgctggagacgatttcgaccccgcagacctagaagatctactcgccgccgtggaagaagacgaacagtaaggaggcgccgcgttaggcgactgaggcggaggagggggtggactaggagacggtacttgagacgcagaaagagacgaaagctagtactgactcaatggaaccccagcactgttagacgctgcaatatcaggggcataataccccttatcatgtgcggggcaaacactgccagttttaactatggcatgcacagcgacgacagcactcctcagccagagacatttgggggcggcatgagcacagtgacttttagcctatatgtactgtatgaccagttcaccagacacatgaacaggtggtcgtaccccaacgaccagctagacctcgccagatacaaaggctgctcttttaaaatgtacagacaccccacaactgactttatactgacttatgacaacaatccccccatgaaaaacactatatacagctctcctaacacgcacccaggcatcctcatgcaacagaaacacagagtactaatacccagctggctcacctttcctaaaggcagaaaatatgtaaaggttaaaatacctccacctaagttatttgaagaccactggtacactcagcctgacttatgcaaagtaccgctcgttactctgcggtcaaccgcagctgacttcagacatccgttctgctcaccacaaacgaacaacccttgcaccaccttccaggtgttgcgagacaagtacaacgaagttattggacttccttttgcaaacactggctctaatccaactgttactgaacaaattaagtcctttgagacttggctatatgaatccagcacacactatcaaacatttcaaacagagcaaatgtttagaccaaaacaatacaatgcagatggctcacagtggaaccaataccaacaaatgctttctgactggactacaaaaatttaccacaaaaaaacagacagtaactatggatattcctcctatgactttagtaacaatgcaggaggctacaactatgctacaaagatgagacaacactactggacacaactaacaacactcacaagcacagtaccacacataaactctacctttgctgatgctaccactccagaatatgaataccacacaggctggttttcaccagtatttataggcccaaacagacacaacatacaatttagaacagcatacatggatgttacatacaaccctctaaatgacaaaggtcaatttaacagagtatggttccaatacagcactaaacctacaacacagtttaaccctatgcaatgcaaatgtgtattacaaaacatcccactgtggtcagctttatttggctacagtgaatatgtagaaagccaactaggcccctttcaagaccatgaaacagtaggcctagtagtagtacaatgcccctacacagtgccatcactatatgacaaagacagaaaagacatgggctacatattctatgacacaaactttggcaatggaaaactgggcaatggcagcggccaggtgcccagatactggcaacagagatggtaccccatactcaaaagacaaaaacaagtaatgaatgacatctgcaagactggacctttcagctacagagacgaactgcttcaggtggacttggcagcctcttacaccttcagatttaactgggggggcgacttactctaccaccaggtcatcaaaaacccgtgcgactcctcaggactggcacccaccgactccggtagattcaagcgggacgtacaagttgttagcccgctcaccatgggtcccagactcctcttccactcgtttgaccaaagacgggggttctttactgaaagagctatcaaacgaatgcatgatgaacaaattgatgttccagactttacacagcagcctaaaatcccccgcattttcccaccagtcgagctccaagaccaaagagaacaagcagaagaagactcgcgttcggaggcgctctcactcacctcctcccaagaaaaagaagcagaagcccaagaaagtctaccgatacagcagcagctcagaaaacaactcagacagcaacagcagttgcgagtccacttgcagcacctcttcctccaactccaaaaaacaaaagcccatttacatttaaacccactatttttcccccaagagaacatgtagacatgttcggtaactactatgatagaaagccaacagcctcagactggcaaactgaatatgagtgctgtagggcctttgatagaccccctagaagcaaccttaaagacagccccttctacccctggatgccaaaacagtctcagtttcgtgtaaccttcaaacttggcttctaataaaatttgctaggccgtgcaactttcacttgtcggtgtctacctctaaaggtcactaagctctccgagcgcagcgaggagagcgacccttccccctgactcaacttcttcggagccgcgcgctacgccttcggctgcgcgcggcacctcagacccccgctcgtgctgacacgcttgcgcgtgtcagaccacttcgggctcgcgggggtcgggagctttattaaacagactccaggttgccatttgacactggagctgtgaatcagtaacgaaagtgagtggggccaaacttcgccataaggcctttatcttcttgccatttgtccgtgtcgggggtcgccataggcttcggcctccattttaggccttccggactaccaaaatggccgattccgtgacgtcatggcggccattttagattggcgcagaggatctgacgttaaagttcaaaggtcaggccctcggcgtcatcacaaaatggcggcaattctcttccgggtcaaaggtcacttcatacgtcataagtcacgtgggagagggagtgcctaaacccggaagcatcctcgtccacgtgactgtgacgtgtgtgacacgtcaccgccgccattttagttcacaaaatggcggacttccttccgcttttttaaaaaaaacggccctgcggcggcgcgcgcgcttcgcgcgcgcgctggggggctgccgcccccccccccccccgcgcatgcgcggggccccttgtgggtgtggggaatgggtgtgtgtctgtgtgtgtgggaatgggtgtgagagtgtgtgtgtctgtgggggaatgggtgtgtgtgtgtgtatgagtgtgtctagtgtgggaatgggtgtgagtgtgtgtggggaatgagtgtgtctgtggggaatgggtgtgagtgtgtgtaaagtctggaacat

SEQ ID NO: 223 - protein, 758 aa, Alphatorquevirus sp.
MAWRWWRRRWKPRRRPAWTKYRRRRWRRFRPRRPRRSTRRRGRRRTVRRRRVRRLRRRRGWTRRRYLRRRKRRKLVLTQWNPSTVRRCNIRGIIPLIMCGANTASFNYGMHSDDSTPQPETFGGGMSTVTFSLYVLYDQFTRHMNRWSYPNDQLDLARYKGCSFKMYRHPTTDFILTYDNNPPMKNTIYSSPNTHPGILMQQKHRVLIPSWLTFPKGRKYVKVKIPPPKLFEDHWYTQPDLCKVPLVTLRSTAADFRHPFCSPQTNNPCTTFQVLRDKYNEVIGLPFANTGSNPTVTEQIKSFETWLYESSTHYQTFQTEQMFRPKQYNADGSQWNQYQQMLSDWTTKIYHKKTDSNYGYSSYDFSNNAGGYNYATKMRQHYWTQLTTLTSTVPHINSTFADATTPEYEYHTGWFSPVFIGPNRHNIQFRTAYMDVTYNPLNDKGQFNRVWFQYSTKPTTQFNPMQCKCVLQNIPLWSALFGYSEYVESQLGPFQDHETVGLVVVQCPYTVPSLYDKDRKDMGYIFYDTNFGNGKLGNGSGQVPRYWQQRWYPILKRQKQVMNDICKTGPFSYRDELLQVDLAASYTFRFNWGGDLLYHQVIKNPCDSSGLAPTDSGRFKRDVQVVSPLTMGPRLLFHSFDQRRGFFTERAIKRMHDEQIDVPDFTQQPKIPRIFPPVELQDQREQAEEDSRSEALSLTSSQEKEAEAQESLPIQQQLRKQLRQQQQLRVHLQHLFLQLQKTKAHLHLNPLFFPQENM

SEQ ID NO: 224 - protein, 184 aa, Alphatorquevirus sp.
LFIMHSFDSSRGNSGSGLAGPRARLLKSMFLGKLYRKKRKVPLQALPVPPPKRTSMSWVQPVSNAHVRQQQWFESTVKSHDAFCGCGDSVLHFTNLATRFNRLHAAPSPLDPPYPPPPRRARVRGLPALPAPENPPAPWPGAGGDAAGNPEGGPRGQSTGDAAGDDFDPADLEDLLAAVEEDEQ

SEQ ID NO: 225 - protein, 56 aa, Alphatorquevirus sp.
MFGNYYDRKPTASDWQTEYECCRAFDRPPRSNLKDSPFYPWMPKQSQFRVTFKLGF

SEQ ID NO: 226 - DNA, 3786 bp, Alphatorquevirus sp.
cgggtgccggaggtgagtttacacaccgcagtcaaggggcaattcgggcacgggactggccgggctctgggcaagtgtcttaaaaatgtacttttccagaaaaagaagacccaagaaggagaggccgctgccactgcgatacgtgtgtggcctaccgcctagcaggcctgatccgatgagctggcgtccacctgcccacgatgtcccaggacaagagggcctgtggtaccgatccgtttttacttctcatggcgctttttgtggttgcggtgattttgtgggtcatcttcagagacttagcgaacgcctgggtagaccccaaccaccaagacccccgggcggaccgccgggccctgctgtgagagctctgcctgcgctgccgcctccggagcctgaaccaagaagacacgtccagagagagaacccaggatgtggtggtggagacgccgcagatggagggccccatggagaaggaggcgatggagacgacgcagacctcggaccagaagatttagacgagctgctcgacgtcctagacgccccagagtaaggagacctcggcgccgcagggggtgggctcgtagatatagacttagaaggaggcgtaggaggagaagaaggagaaagcttatactaacacaatggcagccagcaaaaataagaaaatgtctagtaataggttatcttgctctagtactgtgtgggaacgggacattcagtaaaaattatgcctcccactcagatgactatgtacagaaaggaccctttggagggggactaagcagcatgagatttaacatgagaatactatatgatcaatttaaaagacaccttaacttctggacacacacaaaccaagacctagacctagttagatacagaggctgcaccatgacattttatagacacccagaggtggacttcatagtaaaatttaacagaaaacctccattcctagacacaatagtatcagctccagccatgcacccaggcatgctaatgacaacaaaacacaaaatactagtaaaaagctttaaaacaaaacccaaaggaaaaggcacagtaaaggtgcgcattcgcccccccacactgtttgacgaccgttggtactttcaacatgacatctgcaaaaccacactattcaccattagcgcaacaccatgtgacctgcggtttccgttctgcccaccacaaactgacaacccttgcgtcaacttcctagttcttgcaggagtgtataacggcaaacttagcatagaagccacaaaggtacaatcacaatataatgcactaactgaagctataaatataaccacgcaaggcactctatttaatacattcaaaaccccagaaatgataaagtgccccccagcagtaaaagcccaagatcctacagatgcagccacaaactgctacaaaaaactagacagcgcctggggagacactatatggaatcaacaaaccataaacagctttaaatctaacacagaaaacctgtggaatgcaagaggcaaccaaacaatgactggtagcaaatacctaaactacaaaacaggaatatacagtgccatattcctttcaccaggcagactgtcaccagactttgggggactatacaatgacatagtatacaatcccaccacagacgaaggcataggaaacattgtatggatagactggtgcacaaaagcagactgcaacttcaatgacacacagtccaaaggagtaataaaagacgttccactgtgggcagcactgtttggctatgtagactttctaaaaaagacatttaaagacgaccagctagacaaaactgccagactcactctcataagcccctatacaaagcctcaactaataggacctacacaacccaacaaagggtttgtcccttacgactacaactttggcagagcacacatgccctccggagaatcctacatacctatgtactacagattcagatggtacatctgcctatttcaccaacaaaagtttatagaggacattgtaagcagcgggcccttcgcataccacggttcacagccgtcagcaactctcaccactaaatacaaattccactttctctttgggggcaaccccgttccccaacagactgtcagagacccttgtaaccaaccagtctttgacattcccggagccggtggactccctcgtgcgatacaagtcgttgacccgaaatacgtcaacgaaggctacacgttccacgcctgggacttccgtagagggctctttggccaagcagctattaaaagagtgtcgggagaacaaacaaatgcttcactttattcatcaggtccaaaacggccaagaacagaaattcctccacaaaatgcagaagaaggctcatattcccgggaaggaaaactgcagccctggctcgactcgagcgaccaggaagagagcgagacagaagccccagaagaagaagcgacctcgccgccgtcgctacagctccagctcaagcagcagatcagggagcagcgacaactcagatgtggaatccaacacctcttccagcaactagtgaaaactcagcaaaacttgcatatcaacccatgcctacagtagggcctaaagcttatctgttcccagaacgcttaccacccatgtggaccaagcaagattgggaaacagaatatcaagtcgcggcagccttcaacaggcctgcgcgaacaaacctaaatgatactcctttttacccttacatacccagaaacccaggcttcagagtgtcctttaagctaggatttaaaccctaataaaattaccaggccgtgggagtttcacttgtcggtgtctacctctataagtcactaagcactccgagcgcagcgagggtgtctacctctataagtcactaagcactccgagcgcagcgaggagtgcgaccctcccccctggggcaactccctcgaagtccggcgctacgcgcttcgcgctgcgccggacatctcggaccccccctccacccgaaacgcttgcgcgtttcggaccttcggcgtcgggggggggtcgggggctttattaaacagactccgagatgccattggacactgagggggcatacagcaacgaaagtgagtggggccagacttcgccataaggcctttatcttcttgccattggtcagtatctggggttgccataggcttcggcctccattttaggccttccgcactaccaaaatggcgcattccgtgacgtcatggccgccattttaagtaagcaccgcctaggactgacgtataagttcaaaggtcatcctcagccggaacttacacaaaatggtggtgtttttcttccgggtcaaaggtcacacccacgtcacatgtcacgtggggaggccctactgcgcaaacacggaagtaggccccgtcacgtggcataccacgtgggcagtgcgtcacagccgccattttgtaaaacaaaatggccgacttccttcctcttttttaacaaaaaagcggaagtaccccgcagcggcgggggggcggcgcgcttcgcgcgccgcccagtagggggcgcaagcgcccccccccgcgcatgcgcggggccccccccccggggggctccgccccccggccccccccgagaagtccgtcactaaccacgtgactcccacaggccacccatatgctacgtcgtgcacttcctgggcggagtttatgtcctcatataactagctgcacttccgaatggctgagttttccacgcccgtccgcagcgagtgagccacggagggactcccgcgcgtcccgtggg

SEQ ID NO: 227 - protein, 720 aa, Alphatorquevirus sp.
MWWWRRRRWRAPWRRRRWRRRRPRTRRFRRAARRPRRPRVRRPRRRRGWARRYRLRRRRRRRRRRKLILTQWQPAKIRKCLVIGYLALVLCGNGTFSKNYASHSDDYVQKGPFGGGLSSMRFNMRILYDQFKRHLNFWTHTNQDLDLVRYRGCTMTFYRHPEVDFIVKFNRKPPFLDTIVSAPAMHPGMLMTTKHKILVKSFKTKPKGKGTVKVRIRPPTLFDDRWYFQHDICKTTLFTISATPCDLRFPFCPPQTDNPCVNFLVLAGVYNGKLSIEATKVQSQYNALTEAINITTQGTLFNTFKTPEMIKCPPAVKAQDPTDAATNCYKKLDSAWGDTIWNQQTINSFKSNTENLWNARGNQTMTGSKYLNYKTGIYSAIFLSPGRLSPDFGGLYNDIVYNPTTDEGIGNIVWIDWCTKADCNFNDTQSKGVIKDVPLWAALFGYVDFLKKTFKDDQLDKTARLTLISPYTKPQLIGPTQPNKGFVPYDYNFGRAHMPSGESYIPMYYRFRWYICLFHQQKFIEDIVSSGPFAYHGSQPSATLTTKYKFHFLFGGNPVPQQTVRDPCNQPVFDIPGAGGLPRAIQVVDPKYVNEGYTFHAWDFRRGLFGQAAIKRVSGEQTNASLYSSGPKRPRTEIPPQNAEEGSYSREGKLQPWLDSSDQEESETEAPEEEATSPPSLQLQLKQQIREQRQLRCGIQHLFQQLVKTQQNLHINPCLQ

SEQ ID NO: 228 - protein, 164 aa, Alphatorquevirus sp.
LAGLWASVLKMYFSRKRRPKKERPLPLRYVCGLPPSRPDPMSWRPPAHDVPGQEGLWYRSVFTSHGAFCGCGDFVGHLQRLSERLGRPQPPRPPGGPPGPAVRALPALPPPEPEPRRHVQRENPGCGGGDAADGGPHGEGGDGDDADLGPEDLDELLDVLDAPE

SEQ ID NO: 229 - protein, 128 aa, Alphatorquevirus sp.
LARLERPGRERDRSPRRRSDLAAVATAPAQAADQGAATTQMWNPTPLPATSENSAKLAYQPMPTVGPKAYLFPERLPPMWTKQDWETEYQVAAAFNRPARTNLNDTPFYPYIPRNPGFRVSFKLGFKP

SEQ ID NO: 230 - DNA, 3786 bp, Alphatorquevirus sp.
cgggtgccggaggtgagtttacacaccgcagtcaaggggcaattcgggctcgggactggccgggctatgggcaaggctcttaaagaatgcgtttttctcgaatttatcgtagaaagaagaggctactgccactgctttgcctgccagcagaaccgaaagaacaacctgtgatgagttggcgctgtccccttgaaaatgcctataagagggaacagtacttcctcaggggctgccaaatgcttcacactagtttttgtggttgcgatgattttattaatcatgttattcgcctacaaaaccttcacggcaatctacaccaacccaccgggccgtccacacctccagtaggccgtagagctctggccctgccggcagctccggaaccatggcgtggagatggtggtgggcccgaaggcgaccgaaccgccgatggacccgcagacgctggaggagactacgcacccggagacctagacgacctattcgccgccgccgccgccgaccaagagtaaggaggaaacggtggggcaggaaacgggggcgacgacgctattacagacgtagatttaaaaaaagacgcaggagacgcagaaaactgactcttaaaatgtggaatccatccacaattagagcatgtaacataaagggtgctatatctcttgtaatgtgcggacacactcaggccggtagaaactatgccattagaagtgaagactttatacctcaacttcagagctttggagggtcttttagcaccaccacctggagcctaaaagtactgtttgatgagtatcagaagttccacaacttctggacataccccaacacccagctagacctctgcagatacaaatgtagtatatttaccttttacagagaccccaaagtagactacattgttatatacaacacacagcctccttttaaaattaacaagtacagcagtcctttcctacatcctggccttatgatgctacagaaaaaaaaaatactagttcctagctttcaaactaaaccagggggcaaagctagaattaaagttaaaattaagccccctcctctatttgaggacaagtggtacactcagcaagacttgtgtccagtaaacctgttatcacttgcggtttccgcatgcagcttcttacatccgttctgctcaccagaaagtgacacaatatgtgtaaccttccaggtcttgcgagagttttactacacacacttaactgtcactccaaccacaactacctctttaccaccagaagaccaagctatatttgacaactacctgtataaaaatgcaaacttttatcagtctttacatgcaccagctataataaacctagcacaacaaccagctaaatggacacaaaacaacattaattcattacaaaccaaaatttctaacataacaacatatttaagtagcacagtaacacaaaactcatttaaaactggaaataacagcatttatggccaaccaaattacaaccccaacaaacaatatctacacccaatgagagaatggttttttgaacaaacaactacagtaaatgaaatacatggcacatatggaaagcctacatataatgcagtagagtatcacctaggaaagtatagtcctatatttcttagtccttatagaactaacactcaatttcccactgcataccaagacacaacttataaccctaatgtagacaaaggaaaaggcaataaaatatggcttcaaagcacaactaaaaaaacatcagactttgaagaacgcagctgccgctgtactatctcagacctcccactgtgggctatggtaaatggctatgcagactatgcagagtctgaactaggatcagaagtatttgctgtatatgtttgctgtgtaatatgtccttatacaaagccacctttgtttaacaagtctaaacctgaaatgggctacatattttatgatacactgtttggagatggtaaactacccacaggcacaggccttgtacccttttactggcaaagtagatggtatcctaaactagcctggcaactacaagtaatgcatgacctatatgtatcaggccccttcagctacaaagatgaccttaaaagctttactataaacacaacctacaagtttaaattcttatggggtggcaatatgattcctgaacaggttatcaaaaacccgtgcaaaacaacagatccaacattcaccctgcccggtagacagcctcgcgacctacaaattgttgacccacttaccatgggcccgcaatgggaattccacacctgggactggagacgcggactgtttggacagagtgctactagaagagtgtcagaaaaaccaggaaatgatgcagagtattatgcgcctccaaaaaaacctagatttttcccaccaacagacctccaagagcaagaaaaagactcagattcacaggaggagacgagactcttatggcacccgtcgccgccaaggagccaagaagagatccagcaagagcagcagcgagacctccacctcagactcggacaacaactcagaatcagacagcagctccagcaagtcttcttacaagtcctcaaaacgcaagcgaacctccacataaatccattattcttaaaccaacaataaacacagtgtacatgtttcccccagacacacctaggcccataaacacagcagaaggatggaaacaagagtatgaggcagctagaacctgggataggcctgttagaagctactacacagacaccccttactacccctgggcccccatacccaaacagcctttctctgtatcttttaaactcggctacaaataaaaattcaaggccgtgggagtttcacttgtcggtgtctacctcttaaagtcactaagcactccgagcgttagcgaggagtgcgaccctcccccctggtacaacgccctcggagtccggcgctacgccttcggctgcgccggacacctcggcccccccctccacccgaaacgcttgcgcgtttcggaccttcggcgtcggggggggcgggggctttactaaacagactccgagttgccattggacactgagtgggcgtacagcaacgaaagtgagtggggccagacttcgccataaggcctttatcttcttgccattggtccgtgtagggggtcgccataggcttcggcctagtttttaggccttccggactacaaaaatggcggattccgtgacgtcatgaccgccattttaagtaaggcggaacaggctgtaaccttgtgtcaaagttcaaaggtcagccttccgctttgcacaaaatggtggacaatatcttccgggtcaaaggttatgcctacgtcataagtcacgtgagggaggctgctgtaaacacggaagtagctgacccgcgtgacttgtcacgtggtgcatacgtcaccgccgccattttgttttacaaaatggccgacttccttccgcttttttgaaaaaaggcgccaaaaaaccgccggcggcggcgcgcgcgctacgcgcgcgggtcagctacttccgtgtttacagcagcctccctcacgtgacttatgacgtcagtgtccaatggcaactcggagtctgtttagtaaagcccccgccccccccgaagatcgtcactaaccacgtggtactccacaggccaatcagaaccttctacgtacacttcctgggctgggtctttgagtccatataactaactgcacttccgaatggctgagttttccacgcccgtccgcagcgagaacaccacggaggggagtccgagcgtcccgaggg

SEQ ID NO: 231 - protein, 747 aa, Alphatorquevirus sp.; identical to SEQ ID NO: 68

SEQ ID NO: 232 - protein, 141 aa, Alphatorquevirus sp.; identical to SEQ ID NO: 69

SEQ ID NO: 233 - protein, 122 aa, Alphatorquevirus sp.; identical to SEQ ID NO: 70

SEQ ID NO: 234 - DNA, 3785 bp, Alphatorquevirus sp.
cgggagccgaaggtgagtttacacaccgcagtctaggggcaattcgggcacgggtctggccgggctatgggcaagattcttaaaaaatttcccacctctgttgttcgccaggacaccaagacatgccgtggtctccgccgagagctaacattagccagagagaggacctgtggatccagtcagttctttactcgcatgatactttttgcggctgtactgacatttctgggcatcttactagcctcctggcttgcatacaaccagctccacctcgagaccctccaccccgtctcgtccggaggctgccggcactgccagcggctccggaacccggtgagcagccacggcctggtggagatacagaagaagaccctggaaacgctggagaaggcgccggtggggcctaccgagaagaagacttagaagaacttttcgccgccgccgaggaagacgatatgtgagtagagggcggcgccgccgatacaggcgcagacggagacgggggcgacgcagaaagggacgcagacgcaggcacagaaaaacccttatcctaagacaatggcagccagacgttgtaaaaagatgcttcatcactggatggctgcccctgatcatctgtggggctggacatactcaattcaactttattacccacatggacgatattcccccaagaaatgcctcctatggaggcaatttcaccaacctaacctttaacctagcctgtttctatgatgaatttatgcaccacagaaacagatggtcagcctcaaaccacgacctagaactagtaaggtacataaaaaccagcataaaactatacagacacgagtcagtagactatgtagtgtcctacaccaccacaggccccttcgagactaatgaaatgtcttacatgctcactcaccctctggccatgcttctcagcaaaaaacacgtagttgtgcccagtttaaaaacaaaggcacatggcagaaagtacaaaagactaactatcaagccccccaaacttatgacaaacaagtggtactttgccaaagacttctgcaacataggcctgttccaaatgtgggccacgggcctagaactaagaaacccctggctcagatcaggcactaacagtccagtcataggattctatgtccttaaaaaccaagtgtaccaaaacaggtacagcaacctcgccacagaaacacaaaaaagaaaagaagcatatgatgaactaaccaaaaaaaatggcacaaagtggtacaattggcagtacacctacactaaagttatgagacctatatactatgccgctgccaatgaacctacaaatacatcatttaaaaacaaaccatataactggaaaaactataaagacaatttctcggcagtacaacaaaaatggacaaacactgtaaaagacgcctacgaattagttgcacaggaatacagacaaatatataccaccacagtcacatatccacctccatgggaacccactgcacaatcagacataaacacaggcagacagtacctagaacatgactgtggtatttacagtccatactttttaacaccacaaatatacagcccagagtggcacacagcatggtcctacataagatataatcccctcacagacaaaggcataggcaacagagtctgcgtacaatactgcagcgaggcctcctctgaatacaacccagtaaaaagcaagtgcatgttacaggacatgccactgtggatgatgctgtatggatacgcagactatgtaattaagagcacaggcatacagtctgcctggacagacatgagagtagcaatcaggagcccctacacagaccccaagcttacaggtagctcagaaaacaccatgtttattccaataggcctagaattcatgaacggagacatgccagacaagaggccctacattccgttaaagtggtggtttaagtggtaccccatgattacacaccaaaaaaccgcacttgaggcaatagtttcctgcagccccttcatgcccagagatcaggaagctgccagttgggacataactgtaggttacaaagcaaccttcttatggggtggctcccccttacctccacagcccatcgacgacccctgccaaaaacccacacacgaacttcccgaccccgatagaaaccctcctagaatacaaatctcagacccgcagcacctcggaccggcgacgctcttccactcgtgggacctcagacgtggatacattagtacaaaaagtattaaaagagtgtcagaacacctcgacactaatgaatatttttcgacaggcgtcgaatccaaaaaaccccgcttcgatactccccaccacgggcagctatcaaaccaagaagaagacgccttacatattctcagacaactccagaaagagcaagaggaaagcagcaccgaagaagaacaagcactccaaaaggaagaagaacaaaaagaaaagctcctacagcaactccgagtccagcgacagcaccagcgagtcctcacacaggggatcaagcacctcatgggagacgtcctccgactcagacagggagtccactggaaccccatcctgtagtgctgccaccggagccaataccagacctacttttccccaatactggtaaaaaaaaaaagttttctcccttcgaatggcagtgcgagcaagaaatagcctgctggatgaagcgacctatgcgtttctttccctcagacaaccccttctacccgtggttaccccccaagcgagatatcccaaatatatgtaaagtaaacttcaaaataaaactcagtgattaacattcgaggccccgggaatttcacttagcggtgtctacctctaaaagtcaccaagcactccgagcgcaagcgaggagtgcgacccccctgcccggtagcaacttcctcggggtccggcgctacgccttcggctgcgccggacgcctcggaccccccctcgacccgaatcgctcgcgcgattcggacctgcggcctcgggggggtcgggagctttactaaacagactccgagtcgctcttggactctgagggggcgtacagcaacgaaagtgagtggggccagacttcgccatagggcctttaacttccgggtgcgtaagggggtcgccattttagcttcggccgccattttagaccctcgcgggcctccgtagtcgcgtattagtgacgtcacaaacgccatcttgactgtgacgtcaaagtcacgtgggcagggcgtgcctaaacccggaagcatccctggtcacgtgacctgacgtcacggccgccatcttgtgcgtccgccattttgtgacttccttccgctttttcaaaaaaaaagaggaagtatgacgtagcggcgggggggcggcgcgcttcgcgcgccgcccactagggggcgctttgcgcccccccccgcgcatgcgcggggcccccccccctcgggggggctcgggggcggcgcgcttcgcgcgccgcccactagggggcgctttgcgccccccccccgcgcatgcgcggggcccccccctcgggggggctccgccccccccggccccccccccgggttaaatccaccgcgcatgcgcggccacgccccagccgccattttctgcagcccgccaaaatattttcaaacagaccaatccagtactactacgtacacttcctggggtgtgttctgccactaaatataaccaacagcggtgacgaatggtagagttttccacgcccgtccgcggcgaggacgcgagcgcagcgagcggccgagcgacccgtggg

SEQ ID NO: 235 - protein, 660 aa, Alphatorquevirus sp.
LPLIICGAGHTQFNFITHMDDIPPRNASYGGNFTNLTFNLACFYDEFMHHRNRWSASNHDLELVRYIKTSIKLYRHESVDYVVSYTTTGPFETNEMSYMLTHPLAMLLSKKHVVVPSLKTKAHGRKYKRLTIKPPKLMTNKWYFAKDFCNIGLFQMWATGLELRNPWLRSGTNSPVIGFYVLKNQVYQNRYSNLATETQKRKEAYDELTKKNGTKWYNWQYTYTKVMRPIYYAAANEPTNTSFKNKPYNWKNYKDNFSAVQQKWTNTVKDAYELVAQEYRQIYTTTVTYPPPWEPTAQSDINTGRQYLEHDCGIYSPYFLTPQIYSPEWHTAWSYIRYNPLTDKGIGNRVCVQYCSEASSEYNPVKSKCMLQDMPLWMMLYGYADYVIKSTGIQSAWTDMRVAIRSPYTDPKLTGSSENTMFIPIGLEFMNGDMPDKRPYIPLKWWFKWYPMITHQKTALEAIVSCSPFMPRDQEAASWDITVGYKATFLWGGSPLPPQPIDDPCQKPTHELPDPDRNPPRIQISDPQHLGPATLFHSWDLRRGYISTKSIKRVSEHLDTNEYFSTGVESKKPRFDTPHHGQLSNQEEDALHILRQLQKEQEESSTEEEQALQKEEEQKEKLLQQLRVQRQHQRVLTQGIKHLMGDVLRLRQGVHWNPIL

SEQ ID NO: 236 - DNA, 3785 bp, Alphatorquevirus sp.
cgggtgccggaggtgagtttacacaccgcagtcaaggggcaattcgggctcgggactggccgggccctgggcaaggctcttaaaaaatgcgcttttccaggattgctcgctcgaaaaggaaagtgccactgccaacggtgccagtactaccgctgcctgggactatgagctggcgtcctccggtacacaatgccgctggaatcgaccgtaactggtacgaatcctgttacagatctcacgccagcagttgcggctgcggaaattttattgaccatcttaatactctggctactcgttacggctttactcctgggcccgcgccgccgcctggtggtccaggcccgcggccgccagtaccagtaaggccccggcacccggccggagacggtaaccagcccagggccctgccatggcgtggggatggtggagacggagacgctggcccacctaccgaaggtggcgccgctggagacgccgcagaagagtaccgcgaagaagacctcgacgagctgttcgccgctatggaaagagacgagtaaggaggcgccggtgggggaggcggcggtaccgaaggggctacagacgcaggggcgcgatcagactcagacgcagacgcagacggggacgtaagaaacttatactaactcagtggcagccccagacccgtagaaagtgcaccatcaccgggtacctcccggtagtctggtgcgggtacctgcgggccgccagaaactatgcctaccactctgacgactccacaaagcagccggacccctttgggggcgcgctcagcactacctcatttaacctaaaggtgctgtacgaccagcaccagaggggactcaacaggtggtcgttccctaacgaccagcttgacctcgctcgctacaaggggtgttcactaacattttacagacagaaaaccacagactttatagctgtgtatgacatctctgccccctacaaactagacaagtacagctctcccagctaccaccctggcaacatgataatgcaaaaaaagaaaatcctaattcccagctatgacactaaccccaggggtcgccaaaaagtaaaagttaacattcccccccctaaactgttcgttgataagtggtatgcacaggaggacctgtgcgacgttaatcttgtgacacttgcggttagcgcagcttccttcacacatccgttcggctcaccactaacgaacaacccttgtgtaaccttccaagtgcttgacacaatatactattccgtaataggttacagttcctcagatgacaaaaaaaaacaggtactagaaaaattatataaccaaaatgcatactggtcctcacacttaaccccttactttacaactggccttaaaaatccatatccaaactccagtaacgctacaactactgcaactgaacatgtaattacacttagtacaacaggtgacaaaaccacaaacattaaaatagcaggagacagcaactacaactggtacccctataaccttaaagacaaagttacaaaactccatgaaataagagagcagtactttaagtgggaaacagataagggcccagaggccacatctgactatggcaaacatcacacgtggactaaacccaccaataactactacgagtaccacctgggcctattcagtcccatattcataggacccaccagaagcaacaaagtgtttgccaccgcctaccaagacgtcacttacaaccccctaaacgacaaggcggtgggaaacaagttctggtttcagtacaacacaaaagcagacacccaagtggccaaacaaggctgctactgcatgttagaggacattcccttttgggccgccatgtatggctactctgactttatagagagcgagctaggccccttccaggacgcagaaaccgtgggctttatctgtgtaatatgcccctacaccgagccacccatgtacaacaaacaaaaccccatgcagggctacgtgttttatgactcattttttggcaatggcaagtggatagacggacggggacacatagagccttactggctgtgccgctggaggccagagatgcttttccagcagcaagtcatgagagacattgtgcagaccgggccctggagctataaagacgaaagtaaaaactgtgttctgcccatgaagtataaattcagatttacatggggcggcaatatggtctcccaacagacgatcagaaacccctgcaagactgacggacaacttgccccatccggtagacagcctagagaagtacaaattgttgacccgctcaccatgggtccccgatgggttttccactcctgggattggcgacgtggctaccttagtgagacagctatcagacgcctgcgagaaaaaccactcgactatgaggcgtatatgcaaaaatcaaaaagacctagactgttccctgttacagagggcgacgaccagtccccccagcaaggcgacgactcgtattcagaggaagaaaagtcgccgcaattcaccgaagagacgacggagacgctacagctccagctccagcggcagctcaggcgacagcagcgcctcggagagcagctccagttcctccaacaccacctcctcaaaacgcaagcgggtctccaaataaacccattattgttggtccgccagtaaacagggtgtaccttttcccccccgagggtccccgtcccataaccacctctcagggctgggcagatgaatactgcaccgccaaatactggaataggcccactcgcaccaactacacagacacccctacctatccctggatgcccactgcgttcagagtgtcttttaaacttggctttcaataaaatgtgctcaacttcaacttgctaggccgtgggagtttcactggtcggtgtctacctcttaaagtcaccaagcactccgagcgcagcgaggagtgcgacccttctctttgtgcgccccccctgcccggtagcaacgccctcggagtccggcgctacgcgctgcgcgctgcgccggacacctcggaccccccctccacccgaaacgcttgcgcgtttcggaccttcggcgtcgggggggtcgggagctttattaaacagactccgagttgccattggacacagtagctgtgaatcagtaacgaaagtgagtggggccagacttcgccataaggcctttatcttcttgccattggatagtgtagggggtcgctccaagcgcggaccccgttttaggccttccggactacaaaaaccgccattttagtgacgtcacggcggccattttaagtaaggcggaagtttctccactatacaaaatggcggcggagcacttccggcttgcccaaaatggcggccaacaacatccgggtcaaagtttgcactacgtcacaagtcacgtgggaagggttggcgtataacccggaagccaatcctcccacgtggcctgtcacgtgactgctacgtcacggcggccattttgttttacaaaatggcggacttccttcctcttttttaaaaataacggcccggcggcggcgcgcgcgcttcgcgcgcgcgccgggccccccccccccccccccccggggggctccgccccccgacaccccccccgaagtccgtcacttaccatgtgactcccacaggccaatcagagtgtatgtcgtgcacttcctgggcatggtctatgtgctcatataaagccgtgcacttccgaatggctgagttttccacgcccgtccgcagcgagaacgccacggagggagatcctcgcgtcccgaggg

SEQ ID NO: 237 - protein, 750 aa, Alphatorquevirus sp.
MAWGWWRRRRWPTYRRWRRWRRRRRVPRRRPRRAVRRYGKRRVRRRRWGRRRYRRGYRRRGAIRLRRRRRRGRKKLILTQWQPQTRRKCTITGYLPVVWCGYLRAARNYAYHSDDSTKQPDPFGGALSTTSFNLKVLYDQHQRGLNRWSFPNDQLDLARYKGCSLTFYRQKTTDFIAVYDISAPYKLDKYSSPSYHPGNMIMQKKKILIPSYDTNPRGRQKVKVNIPPPKLFVDKWYAQEDLCDVNLVTLAVSAASFTHPFGSPLTNNPCVTFQVLDTIYYSVIGYSSSDDKKKQVLEKLYNQNAYWSSHLTPYFTTGLKNPYPNSSNATTTATEHVITLSTTGDKTTNIKIAGDSNYNWYPYNLKDKVTKLHEIREQYFKWETDKGPEATSDYGKHHTWTKPTNNYYEYHLGLFSPIFIGPTRSNKVFATAYQDVTYNPLNDKAVGNKFWFQYNTKADTQVAKQGCYCMLEDIPFWAAMYGYSDFIESELGPFQDAETVGFICVICPYTEPPMYNKQNPMQGYVFYDSFFGNGKWIDGRGHIEPYWLCRWRPEMLFQQQVMRDIVQTGPWSYKDESKNCVLPMKYKFRFTWGGNMVSQQTIRNPCKTDGQLAPSGRQPREVQIVDPLTMGPRWVFHSWDWRRGYLSETAIRRLREKPLDYEAYMQKSKRPRLFPVTEGDDQSPQQGDDSYSEEEKSPQFTEETTETLQLQLQRQLRRQQRLGEQLQFLQHHLLKTQAGLQINPLLLVRQ

SEQ ID NO: 238 - protein, 150 aa, Alphatorquevirus sp.
MRFSRIARSKRKVPLPTVPVLPLPGTMSWRPPVHNAAGIDRNWYESCYRSHASSCGCGNFIDHLNTLATRYGFTPGPAPPPGGPGPRPPVPVRPRHPAGDGNQPRALPWRGDGGDGDAGPPTEGGAAGDAAEEYREEDLDELFAAMERDE

SEQ ID NO: 239 - DNA, 3782 bp, Alphatorquevirus sp.
cgggagccggaggtgagtttacacaccgcagtctaggggcaattcgggcacgggtctggccgggctatgggcaagattcttaaaaagtttccccgctgtgtcctacgccaggacacaaaaacatgccgtggagaccgccggcgcacgacgtccaaggcagagagaaccaattctttgcgggatgttttcacatgcatgctgctttctgcgggtgcggtgacgttgtcggccatcttgctagcattgctgctcgctttcctgctgccggaccccctgctccgccgggcctcagacctccaagaccccctgccccggccggtccgggcggtccccccggctaccttcccgctctcccggctccggcaccggagccgcctaatccagcaccacgccgtggtggtggggaagatggcgccgccgcgggtggcgccgccgatgggggagaagaagaggccgccgcgtacggcgaggaagaactagaagagcttttccgcgccgccgccgaggacgatatgtaagtaggagatggcgccggccttacaggcgcagacggagaaaggggcgacggagacgcagacgcagacggactcacaaacccaccctagtaatgagacagtggcaaccggacgttgttaggacctgctacatcacagggtggatgcccctcatcatctgtggccaaggacagacccagtttaactttataatgcacatggacgatatcaccccccggggagcctcctatggaggcaacctcactaacataacatggaccctagagggcctgtgggaacagttccagtaccacagaaacaggtggtcgcgcagcaaccacgacctagacctagccaggtacatattcaccacccttaagctctacagacacgacactgtagactacatagtcagctacaccagaacaggacctttccaaatggggcacctcactcacctcagcactcaccctcttctaatgctactctcaaaacaccacatagtagtgcccagcctaaaaacaaaacctgggggcagaaaatacaaaaaaatcagaatcaagcccccaaaactcatgttaaacaagtggtacttcaccaaagacatctgtgacctgggcctcttccaactgtgggccacgggagcagagctcagaaacccctggttaagatcaggcacacaaagcccctgcataggcttctgtgtactaaacaactcctactacaccaacctcagcaaccttccacaatacgaacaggctagaacacagatacaactgtcttttcacccctcagacatacaaataaaccaagaaaaaaatctatggcagtacacatacacaggccttatgtctaagtactactacaaaggcaaccaggccagcacctatgactttcaaaattacagcactccactaaactacaaaaacacatatacaaaatggttagaggagaaacaaagcagacttactaaacttcaacaacagtggcaaaaagtgtacccacaactagtcacacaacaaccaacagacacaacactcttacaagactttggcatatacagccccttctatctcacacccgtcagaatcagcctagactggcgcaccacctacacacacgttaggtacaacccactcacagacaaaggcataggcaacagaatatacctacagtggtgctcagagtctagctgcaaatacagctccacaaagagtaagtgccccatagtagacatgccactatacatagccttctatggctacatagactggtgcatcaaatgcacaggcaactctggcctcgtaaaagacgccagaatcatggtcaggtgtccctacaccgagccccaactagtgggggccacagaggacgtgggcttttgcctcctcagtaacaccttcatgaacggagacatgcccgtgctggccccctatatcccaatttcctggttcgttaagtggtaccccatgattgcacaccaaaaggaaaccgttgaagccatagtttcctgtggaccgttcatgcccagagatcaggaagccaagagttgggacataaccttgggttacagatcctgtttcaaatggggcgggtcgcctctgcccacacaggccatcgacgacccctgccagaagcccacgcacccacttcccgaccccgatagacaccctcgcctcctacaagtctcagacccgacaaagctcggccccaagaccatattccacagttgggacatgcgacgcggacaatttagcaaaagaagtattgagagaatgtcagaatacacagagtatgatgaatattttgaaacaggtctaccatcaaaaagaaaaaagttcgacacgccggcagaaggactccaaggagagcaaagaaaagcctacaatttactccaagccctcgaggcgagccaagaagagtcggggtcagaagaccaagaacaagtacccccacaagagacggagacgcaacaactcctccagcagctgcagctccagaaacaccaccagcgagtcctcagacagggcctcaaacacctcctcggggacgtcctccgactccgacgaggagtccactgggaccccctccttacatagagccgcccccgttcattcccgatcttctttttccttctactaacaaaaaaaaaaaattctccaaattcgactgggaaacggaggctcagctagggcagatattcaagcgtcctatgcgcttctatccctcagacaaccctcactacccgtggttaccccccaagcgagatatccccaaaatatgtaacgtaaacttccaaataaaacttgcagagtaacacattcgaggccctcctctgttcacttagcggtgtctacctcttaaggtcaccaagcactccgagcgcaagcgaggagtgcgaccctccgccctggggcaacttcctcggggtccggcgctacgcgcttcgcgctgcgccggacgcctcggaccccccctcgacccgaatcgctcgcgcgattcggacctgcggcctcggggggggaccccccctcgacccgaatcgctcgcgcgattcggacctgcggcctcgggggggtcgggggctttattaaacagactccgagttgccattggacactggagctgtgaatcagtaacgaaagtgagtggggccagacttcgccataaggcctttaactttgggtcgcttgtcagcggcttccgggtccgcgtgggggccgccattttacctttggccgccattttaggccctcgcgggcctccgtagacgcgttttaatgacgtcacaggcgccatcttgactgtgacgtatcagtcacgtgtgcggggcgtgcctaaacccggaagcatccctggtcacgtgactgtgacgtcgcggccgccattttgtacgtccgccattttgtgacttccttccgctttttcaaaaaaaaagaggaagtatgacgtagcggcgggggggcggcgcgcttcgcgcgccgcccaccagggggcgctgcgcgcccccccccgcgcatgcgcggggccccccccgggggggggctccgcccccccggcccccccccgtgtctaaatccaccgcgcatgcgcggccacgcccccgccgccattttgtgcggcccgccaatttctgtttcaaacagaccaatcagaagactctacgtgcacttcctggggtgtgtcttcgaagagtatataagcagagacggttacgaatggtagagttttttctggcccgtccgcggcgagagcgcgagcgaagcgagcgatcgagcgacccgtggg

SEQ ID NO: 240 - protein, 661 aa, Alphatorquevirus sp.
MRQWQPDVVRTCYITGWMPLIICGQGQTQFNFIMHMDDITPRGASYGGNLTNITWTLEGLWEQFQYHRNRWSRSNHDLDLARYIFTTLKLYRHDTVDYIVSYTRTGPFQMGHLTHLSTHPLLMLLSKHHIVVPSLKTKPGGRKYKKIRIKPPKLMLNKWYFTKDICDLGLFQLWATGAELRNPWLRSGTQSPCIGFCVLNNSYYTNLSNLPQYEQARTQIQLSFHPSDIQINQEKNLWQYTYTGLMSKYYYKGNQASTYDFQNYSTPLNYKNTYTKWLEEKQSRLTKLQQQWQKVYPQLVTQQPTDTTLLQDFGIYSPFYLTPVRISLDWRTTYTHVRYNPLTDKGIGNRIYLQWCSESSCKYSSTKSKCPIVDMPLYIAFYGYIDWCIKCTGNSGLVKDARIMVRCPYTEPQLVGATEDVGFCLLSNTFMNGDMPVLAPYIPISWFVKWYPMIAHQKETVEAIVSCGPFMPRDQEAKSWDITLGYRSCFKWGGSPLPTQAIDDPCQKPTHPLPDPDRHPRLLQVSDPTKLGPKTIFHSWDMRRGQFSKRSIERMSEYTEYDEYFETGLPSKRKKFDTPAEGLQGEQRKAYNLLQALEASQEESGSEDQEQVPPQETETQQLLQQLQLQKHHQRVLRQGLKHLLGDVLRLRRGVHWDPLLT

SEQ ID NO: 241 - DNA, 3781 bp, Alphatorquevirus sp.
cgggtgccggaggtgagtttacacaccgcagtcaaggggcaattcgggctcgggactggccgggctatgggcaaggctcttaaaaaagacatggttttcttgggtcgcccctacagaaagaaaaggacactgctactgtctggcctgccagattcaaagaagaaaccacctatgagctggcgtcctccggttcacaatgccccgggcattgagagaaacctctacgaggcctggtatcgcacacacgcggctagctgtggctgtggggatctgcttggccatcttactcgcctggttgatcggtatggcactccgccacgccctgggcctcccgccgacccgccacctcgcctgagagccctgcccgcgccgcctcctcctccgtcccgtaaccgtgacccagtatggcctggtggggatggaggagacgctggcggcgccgcccctggtggagacgccgccgccgacgaccagtacgccgcagacgaaatcgagcagcttatggccgccgccgaggaagacgcacagtaaggagaaaaacatgggggaggcggaggagacgcagacgcacttacagacgcaggcggactgtcagactcagacgcagacgcaaaaaaaagttaatactgactatgtggaaccccccctttgtaagacgctgctacataaaaggtgtaatgcctgtaattatctgtggacagcacaaagcctcctttaactatgctatacatgcagatgactgcctaaaacagggacttagctttgggggcggcatgagtaccataaccatgtccctacaagtactgtacgacgagtacaccaggagcctaaacaggtggtcttatagcaatgaacagctagacctctgtagatacagaggctgcacactaagaatatacagagacccaaaaacagactttataatgacatttgacaccatacctcccatgaaaatggaccagctcacaggccctaaccaccaccctggtctgttaatgctaagaaaacaaaaaatactaatccctagctttttaacaagaccaaaaggaagaaaatacagaaaagtaagaattctacctcctaaaatgtttgaagacaaatggtatgcacagcacgacttgtgcaaagttcctcttgtcagtttgcggtttaccgcagctagcttccaatatccgttctgctcaccacaaacgaacactaacgcaaccaccttccaggtgttgcaaagaaactacaatgaagtaataggttaccccatagcctacggaactgacaaactgacaaactttgaaacctggctctatgggtcctgcacccactatcaggcatttgccacagaagcccaccttagaccacgcacacacactcctacaggacaacccataactaatgcaaatacacctgctgtgcccactacctggtcacccacaacaacaacctatacagtaggaggctcaccaccatcaacaactgcataccaaaactgggacctgtggtggagatatgacttctatgctaacaaggcagatagtcactatggctattgctcttttactcccaaagatgacaaaggacgaaaaaatataacaacaattagagacaacaacttttactacctaacacactgggatacagcaaacaataaccatataaatgccacctacacaaatgcaaaatacccacaatatgagtaccacgcaggctggttctcatctatgtttctaagccccatgagataccaactacagcacagaacagcttactttgactgcacttacaatcccctaaatgaccacggacagggtaacagaatgtggttccaatacctaacaaaagcagacaccacattcaaccccacccagtgtagatacgtgctacaagacatccctctgtgggccatggcaaacggatacgcagactacataagcacccagctaggaaacattcaagatcatgaaacagtaggccttatatgtgtacagtgcccttacacccgcccaccgctatttgtaaaagaggctccagacgaaggctttgtattttatgacggactgtttggtcagggaaaaatgccagacggaacctcgcagataaccaggttttgggcagccagatggagagtgtacctaggagtacaacaacaagttctaaatgacatccacaactgcggaccgtgggcctacagagacgagcacctaagtaccaccctgacaatgggctacacctttaaatttaactgggggggcgacatgatgtttccacaggttatcaaaaacccctgccccgacagtggactggctcccagttccggtagacagcaacgcgacgtacaaatcgttgacccgctcacagtgggaccccaatggatattccacccctttgacatcaggcgcgggttctataatccaaaagctatcaaacgagtgtctcaaaaaccaacaaatgatgaactctttattcagcctccaaaacgacctcgtttccttacagccacagagtaccaagagcaagaaagcagcttatatttcagggaaggaaaatcagaagtctcggaagaagagaaagaagccgaagtccaagaggggtcgatacaaagacagctcacagtccagctccgagagcagcagctcctcggacagcagctccgagagctgtggatccaactcgccaagacccagagcaatacgcacctaaaccccctattattttcccgagcataaataaagtgtacatgtttcccccacaagttaagaggcctcctagcaccggagactgggagaccgagtacgcggcctgcaaggcctttgatagaccccctcgctcagacctgtcccgtcccccctgctacccctggatgcctgcacctttcaatgtaaagtttagccttaaattcaaataaatgttggccgtgggagttacgctggtcggtgtctacctctataagtcaccaagcactccgagcgttagcgaggagtgcgacccttgggggtgggtgcaacgccctcggcggccgcgcgctacgccttcggctgcgcgcggcacctcggacccccgctcgtgctgacacgctcgcgcgtgtcagaccacttcgggctcgcgggggtcgggaattttattaaacagactccaggttgccattggacactggagctgtgaatcagtaacgaaagtgagtggggccagacttcgccataaggcctttatcttcttgccattggatagtgtagggggtcgccataggcttcggcctcggttttaggccttccggactacaaaaatggcgaattccgtgacgtcatagccgccattttaagtaaggcggaagcgcacccgctttctcacaaaatggcggcggagcacttccggcttgcccaaaatggcggacaagctcttccgggttaaagttcagcaactacgtcacaagtcacgtggggagggttggcgtcacaacccggaagccaatcctctcacgtggcctgtcacgtgactgctacgtcaccgacgccattttgttttacaaaatggccgacttccttccgcttttttaaaaaaaggcgatgcgcgcggggccccccccccgcggggggctccgccccccggccccccccgtcaaagtccgtcactcaccacgtgacccttttccgccaatcagggtctacgtggtgcacttcctgggcgtggtttacatcctaatataaagcgcagcacttccgaatggctgagttttccacgcccgtccgcagccagatcgccacggagggagatcagcgcgtcccgaggg

SEQ ID NO: 242 - protein, 771 aa, Alphatorquevirus sp.
MAWWGWRRRWRRRPWWRRRRRRPVRRRRNRAAYGRRRGRRTVRRKTWGRRRRRRRTYRRRRTVRLRRRRKKKLILTMWNPPFVRRCYIKGVMPVIICGQHKASFNYAIHADDCLKQGLSFGGGMSTITMSLQVLYDEYTRSLNRWSYSNEQLDLCRYRGCTLRIYRDPKTDFIMTFDTIPPMKMDQLTGPNHHPGLLMLRKQKILIPSFLTRPKGRKYRKVRILPPKMFEDKWYAQHDLCKVPLVSLRFTAASFQYPFCSPQTNTNATTFQVLQRNYNEVIGYPIAYGTDKLTNFETWLYGSCTHYQAFATEAHLRPRTHTPTGQPITNANTPAVPTTWSPTTTTYTVGGSPPSTTAYQNWDLWWRYDFYANKADSHYGYCSFTPKDDKGRKNITTIRDNNFYYLTHWDTANNNHINATYTNAKYPQYEYHAGWFSSMFLSPMRYQLQHRTAYFDCTYNPLNDHGQGNRMWFQYLTKADTTFNPTQCRYVLQDIPLWAMANGYADYISTQLGNIQDHETVGLICVQCPYTRPPLFVKEAPDEGFVFYDGLFGQGKMPDGTSQITRFWAARWRVYLGVQQQVLNDIHNCGPWAYRDEHLSTTLTMGYTFKFNWGGDMMFPQVIKNPCPDSGLAPSSGRQQRDVQIVDPLTVGPQWIFHPFDIRRGFYNPKAIKRVSQKPTNDELFIQPPKRPRFLTATEYQEQESSLYFREGKSEVSEEEKEAEVQEGSIQRQLTVQLREQQLLGQQLRELWIQLAKTQSNTHLNPLLFSRA

SEQ ID NO: 243 - protein, 154 aa, Alphatorquevirus sp.
MGKALKKDMVFLGRPYRKKRTLLLSGLPDSKKKPPMSWRPPVHNAPGIERNLYEAWYRTHAASCGCGDLLGHLTRLVDRYGTPPRPGPPADPPPRLRALPAPPPPPSRNRDPVWPGGDGGDAGGAAPGGDAAADDQYAADEIEQLMAAAEEDAQ

SEQ ID NO: 244 - protein, 55 aa, Alphatorquevirus sp.
MFPPQVKRPPSTGDWETEYAACKAFDRPPRSDLSRPPCYPWMPAPFNVKFSLKFK

SEQ ID NO: 245 - DNA, 3779 bp, Alphatorquevirus sp.
cgggtgccgaaggtgagtttacacaccgaagtcaaggggcaattcgggcacgggactggccgggctatgggcaaggctcttaaaaaattcccccgctgtgttctccggcaggacacaaagtcatgccgtggagaccgccggttcataacgttccaggcagagaaaaccaatggtttgcatcgatttttcacggtcatgcttctttctgcgggtgcggtgaccctgttgggcatcttaacggcattgctcctcgctttcctaacgccggtccaccgagaccacctccagggctagaccagctgaatcccgagggcccggcgggtcccggaggtccccccgccatcttgccagctctgccggccccggcagaccctgatccggcaccacggcgtggtggtggggcagatggaggcgccgccgctggggccgccgccgccgcagaccataccgggtacgaagaaggagacctagaagatcttttcgccgccgcggccgaggacgatatgtgagtaggcggaggcgccgccgctactacaggcgcagactaagacggggcagacgcagagggcgacgaaagagacacagacagactctagtagtgaggcagtggcaacctgacgttgttaaaaagtgtaagataacaggatggatgcccctcataatctgtggctctggcagcacacagatgaactttataactcacatggacgacaccccccctatggggtacacgtacgggggcaactttgtaaatatgacttttactctagaggccatctatgaacaattcctgtaccacagaaacaggtggtccagatctaaccatgacttagaccttgccaggtacctagggatcactctaaaagcctacagacacaccacagtagactacatactcagctacaacagaacaggccccttcaacataagtgaaatgacctacatgagcacacaccctgcactcatgctactgcaaaagcacagaatagtagtgcccagcttaagaacaaagccaaggggcaaaagagccataaaaatcagaataagacccccaaaactaatgctaaccaagtggtacttcaccaaagacatctgctccatgggcctcttccagttaatggcaacaggggcagaactcacaaacccctggctcagagacaccacaaaaagcccagtaataggcttcagagtcctaaaaaacagcatatacaccaatctatctaacctaaaagagacaagcatatcaggagaaagaaaatcaatactaaacaaactacacccattatctctaacaggctctggaaacacagccaaagggtgggaatactcctacactaaactaatggcacctatatactactcatcagtcagaaacagcacatacaactggcaaaactaccaaactaactatgcaaccacagcagcaaaatttaaggaaaagcaaacacaaagtctaactttaattaaatcagaatacctgtaccactacccaaacaatgtcacacaagtagacttcatagccgaccccactcttacacatgactggggtatatacagcccatactggctaactccaacaagaatcagcctagactgggacacaccatggacatatgtcagatacaacccactgtcagacaagggcttaggcaacagaatatatgcacagtggtgctcagaaaaaaccagtaaattagacatcacaaaaagcaagtgcatactaaaagactttccactgtgggccatggcctatggctactgtgactgggtagtaaagtgcacaggagtatccagtgcatggacagacatgagaatagcaatcatatgtccatacacagaaccggcacttgtagggtcaacagcagatgtaggcttcattccagtaagtgacaccttttgcaacggagatatgccgtttcttgcaccatacatacctattacatggtggatcaagtggtaccccatgattacacaccaaaaggaagttcttgaggcaatagttaactgtggaccgtttgtacctcgagaccagagctccccagcttgggaaataactctgggttacaaaatggattggaaatggggtggctctcccctgccttcacaggcaatcgacgacccctgccagaagtccacccacgagctacccgaccccgatagacaccctcgcatgttacaagtctctgacccgacaaagctcggaccgaagacagtttttcacaaatgggactggagacgtgggatgcttagcaaaagaagtattaaaagagtccaagaagactcaacagatgatgaatatgttgcaggacctctaccaagaaaaagaaacaagttcgatactcgagtccaaggccctccaaccccagaaaaagaaagttacagtttactccaagccctccaagagtcggggcaagagagcagctcagaggaccaagaacaagcaccccaagaaaaagaggaccagaaggaagcgctcatggagcagctccagctccagaaacaccaccagcgagtcctcaagcgaggcctcaaactcctcctcggagacgtgctccgactccggagaggagtccactgggaccccctcctgtcctaatccaaggtcccagtatcccagacctgcttttccctaacacacaaaaaaaaaagaaattttccaactacgactgggtgtgcgagtacgagctggccagatggatggatcgtcctttgcggcactacccatcagacccccctcactacccctggctaccaaaaaagcctgctacccagcctacatgtaaagtaagtttcaaattaaagcttgatgcctaaaattcaaggccgtgggtgtttcacttcatcggtgttaacctctataagtcactaagcactccgagcgaagcgaggagtgcgacccccctgcccggtagcaacttcctcggggtccggcgctacgccttcggctgcgccggacgcctcggaccccccctcgacccgaatcgctcgcgcgattcggacctgcggcctcgggggggtcgggagctttattaaacagactccgagatgccattggacactgaggggatgaacagcaacgaaagtgagtggggccagacttcgccataaggcctttatcttcttgccatttgtcagagtgagtggggccagacttcgccataaggcctttatcttcttgccatttgtcagtgtcttccgggttcgcgtgggggccgccattttagcttcggccgccattttaggccctcacgggcctccgtagtcgcgcaccagtgacgtcacggcagccatattggtcctgacgtcacagtcacgtggggagggcacacgtgatcccggaagtgtccctgctcacgtgatctgacgtcacggccgccattttgtgctgtccgccattttgtgacttccttccgctttttgtaaaaaaaagaggaagtgtgacgtagcggcgggggggcggcgcgcttcgcggccgcccaccagggggcgctgcgcgcccccccccgcgcatgcgcgggtccccccccgcggggggggttccgcccccccggccccccccccgtgctatgtccaccgcgcatgcgcggccacgcccccgccgccattttctacagcccgccaatttctattcaaacagaccaatcagaaccttctacgtgcacttcctggggcgtgtctacgaggtctatataagcaacagcggtgacgaatggtagagttttttctcgcccgtccgcggcgagagcgcgagcgaagcgagcgatcgagcgtcccgtggg

SEQ ID NO: 246 - protein, 648 aa, Alphatorquevirus sp.
MPLIICGSGSTQMNFITHMDDTPPMGYTYGGNFVNMTFTLEAIYEQFLYHRNRWSRSNHDLDLARYLGITLKAYRHTTVDYILSYNRTGPFNISEMTYMSTHPALMLLQKHRIVVPSLRTKPRGKRAIKIRIRPPKLMLTKWYFTKDICSMGLFQLMATGAELTNPWLRDTTKSPVIGFRVLKNSIYTNLSNLKETSISGERKSILNKLHPLSLTGSGNTAKGWEYSYTKLMAPIYYSSVRNSTYNWQNYQTNYATTAAKFKEKQTQSLTLIKSEYLYHYPNNVTQVDFIADPTLTHDWGIYSPYWLTPTRISLDWDTPWTYVRYNPLSDKGLGNRIYAQWCSEKTSKLDITKSKCILKDFPLWAMAYGYCDWVVKCTGVSSAWTDMRIAIICPYTEPALVGSTADVGFIPVSDTFCNGDMPFLAPYIPITWWIKWYPMITHQKEVLEAIVNCGPFVPRDQSSPAWEITLGYKMDWKWGGSPLPSQAIDDPCQKSTHELPDPDRHPRMLQVSDPTKLGPKTVFHKWDWRRGMLSKRSIKRVQEDSTDDEYVAGPLPRKRNKFDTRVQGPPTPEKESYSLLQALQESGQESSSEDQEQAPQEKEDQKEALMEQLQLQKHHQRVLKRGLKLLLGDVLRLRRGVHWDPLLS

SEQ ID NO: 247 - DNA, 3773 bp, Alphatorquevirus sp.
cgggtgccgaaggtgagtttacacaccgaagtcaaggggcaattcgggctcgggactggccgggctatgggcaaggctcttaaaaaagcatgtttctcggcaggcattggagaaagaaaagggcactgctactgctaccggtgccagctaaaccgaaagcactttctcaacagatgagctggagcagacccgtgcacgatgagcgcggaatacagcgcaactggttcgagggggtcattcgcacccacgctgcttgctgtggttgtggtaatgcttgtactcatctggctgctctggcccagaggtatgggtacccctccctaccttcgcataccccgcgacccggcacctcgacacctgtgagcaccccagagcagatccgtagagcccgggccctgcccgcggctccggaccaccctccagccctgccatggcatggggatggtggaagagacggcggcgcggctggttccgacggcggtggacccgtggcagagttcgcagaagatggcctagacggacttatcgccgccctcgacgacgaacagtaaggaggcgcagacggaggaggagggggagacgaaaattcagacggtacagatttaagagacgctaccgcagacgtaaaaagactcaaaagattaaactgacacaatggcaaccagccaaaacaaaacgctgctttatgataggatattttcctactgttattcagggacaaggacggtggtcagaaaactttaccagtcacatagaagataaagtggccaagggaccctttgggggcgggcacagcaccagtaggtggtctctaaaagtactgtacgaggagaaccagagacaccacaacttttggacagccagtaacagtgatctagaactagccaggttctttggcagctcctggaggttttacagacacgacacacaagactacatagtcacctggaacagaaaggctcccctgggaggcaatatactgacatcacctaacatgcacccgggaatagccatgctaagcaaacacaaggtggtagtcccaagtaaactgaccagacccaggggcaaaaagagcattaaagttaatataaaaccccccactacattcatagacaagtggtacttccaaaaggacatatgtgacctaacattactaaacttaaacgttgtaacatgtgaccttcggtttccgttctgctcaccacaaactgacaacgtttgtgtaaccttccaggtgcttgcaccaatttataacgattacatgtccatcacttccccaaaactgacttcagcattatggaaagagtactatagagaatttttaaataaagctataccaccaaacaaagacagaaaagcaaacattttaaacaccttcttaacagaaggatcatacagaaaaccacaagtagacaaatacagaaaaccattaaatgaaaaccaatactactcacccaaagatgcacagtggggagaccccattcacataataacacacacagaaataacaggcaaccaaaaaaaacaagacagaggcgacttaattgataaaatcattaacaatgccgaaaacgttttaacaaaagttaaccaagaactaaaggaatatgaagccagagaaacagaacacgcattattcacacactggacaggaatatttggacctccatttctagactacaacagaataagtccagaaattaaaggcctctacaaagacatcatatacaaccccctaatagacaaaggagtaggcaatcacatatgggtggactactgcagcaaaacaaacaacgaatactcagaaacccagagcaaatgtcacttaacagacctccccttatggtgcatgacgtttggatatgcagactgggtaaaaaaagacacaggcaactggggaatagtagactgggccagagtacttataatatgcccttacacctttccaaagctatacaaccctgacaaacccaacacaggctttgtagtatacagctccaactttgccatgggacgaatgcccgatggaagcaaatacgtccccataggcataagacacaagtggtacccaacaatgctaaaccaacagccagtactagaagacattagtctaagcggaccgttcgctcccagagagaaagtacctagcgtccaactgactgccaagtacaagttccgatggcattttggtggcaatcctgtttccgaacaggttattaaagacccgtgccaacagcccaccttccaaatgcccggaaccggtacactccctcgcagaatacaagtggcggacccgaaatacctcgggccccagtacaccttccactcgtgggactacagacgtgacttctttaacagaaagactattaagagaatgtcagaacaaccagaaacttttgagtctatattctcaggcccaaaaaaaccaagggtggacctcgacaaaatccagctgcaagaaggcaactattcccaagaccaaagaaaacagaaaccgtgggaagacagcgagacccagacagagagcgaagtcccatcagaagaagagacgcagaacctacagcagcagctccaacagcagctccgagaacaaaagcagctcagacagggaatcaactgcctcttcgagcagctaataaaaacccagcagggagtccatatagatccttcccttgtataggcccaaaagtcttacttttcccagagagagcacctaaaacctactctaagggagactgggaaacagagtatcaggcctgcagagcgtttgacagaccccctagaagcaacctgtcagactcaccctactatccttaccttccaccaccccccgaaaaattctatgtaacctttaagctcggcttcaaataaacaaggccgtgggagtttcacttgtcggtgtctgcttataaaggtcactaagcactccgagcgaagcgaggagtgcgaccccctgccctgggcccacttcttcggagccgcgcgctacgccttcggctgcgcgcggcacctcagacccccgctcgtgctgacacgctcgcgcgtgtcagaccacttcgggctcgcgggggtcgagaaatttgctaaacagactccgagttgcctttggatactgtagctgtgaatcagtaacgaaagtgagtggggccagacttcgccataaggcctttatcttctcgccatttgtccgtgtcaggggtcgccataggcttcggcctccgttttaggccttccggactacaaatatggccgattcagtgacgtcacggcagccattttaagtagttgaggcggacggtggcgtgagttcaaaggtcaccatcagcgtcacctactaagatggcggtcaatatcttccgggtcaaaggtcagcgctacgtcataagtcacgtgggcacggcttgcttaaacacggaagtagctgacccgcgtgacttgtcacgtgacgtgtgcgtcacggccgccattttgttttacaaaatggccgacttccttcctcttttttaaaaataacggttcggcggcggcgcgcgcgctgcgcgcgcgcgcaggggggcccccccccccgcgggggggctccgccccccggccccccccccgtgctacgtcacaaactacgtgtcaattctccataggccagacacgatctacgtcatacacttcctgggcatggtctacatcataatataagacgccgcacttccgaatggctgagttttccacgcccgtccgcagcggtgaagccacggagggagatcagcgcgtcccgaggg

SEQ ID NO: 248 - protein, 749 aa, Alphatorquevirus sp.
MAWGWWKRRRRGWFRRRWTRGRVRRRWPRRTYRRPRRRTVRRRRRRRRGRRKFRRYRFKRRYRRRKKTQKIKLTQWQPAKTKRCFMIGYFPTVIQGQGRWSENFTSHIEDKVAKGPFGGGHSTSRWSLKVLYEENQRHHNFWTASNSDLELARFFGSSWRFYRHDTQDYIVTWNRKAPLGGNILTSPNMHPGIAMLSKHKVVVPSKLTRPRGKKSIKVNIKPPTTFIDKWYFQKDICDLTLLNLNVVTCDLRFPFCSPQTDNVCVTFQVLAPIYNDYMSITSPKLTSALWKEYYREFLNKAIPPNKDRKANILNTFLTEGSYRKPQVDKYRKPLNENQYYSPKDAQWGDPIHIITHTEITGNQKKQDRGDLIDKIINNAENVLTKVNQELKEYEARETEHALFTHWTGIFGPPFLDYNRISPEIKGLYKDIIYNPLIDKGVGNHIWVDYCSKTNNEYSETQSKCHLTDLPLWCMTFGYADWVKKDTGNWGIVDWARVLIICPYTFPKLYNPDKPNTGFVVYSSNFAMGRMPDGSKYVPIGIRHKWYPTMLNQQPVLEDISLSGPFAPREKVPSVQLTAKYKFRWHFGGNPVSEQVIKDPCQQPTFQMPGTGTLPRRIQVADPKYLGPQYTFHSWDYRRDFFNRKTIKRMSEQPETFESIFSGPKKPRVDLDKIQLQEGNYSQDQRKQKPWEDSETQTESEVPSEEETQNLQQQLQQQLREQKQLRQGINCLFEQLIKTQQGVHIDPSLV

SEQ ID NO: 249 - protein, 153 aa, Alphatorquevirus sp.
MFLGRHWRKKRALLLLPVPAKPKALSQQMSWSRPVHDERGIQRNWFEGVIRTHAACCGCGNACTHLAALAQRYGYPSLPSHTPRPGTSTPVSTPEQIRRARALPAAPDHPPALPWHGDGGRDGGAAGSDGGGPVAEFAEDGLDGLIAALDDEQ

SEQ ID NO: 250 - protein, 84 aa, Alphatorquevirus sp.
LPLRAANKNPAGSPYRSFPCIGPKVLLFPERAPKTYSKGDWETEYQACRAFDRPPRSNLSDSPYYPYLPPPPEKFYVTFKLGFK

SEQ ID NO: 251 - DNA, 3769 bp, Alphatorquevirus sp.
cgggtgccgaaggtgagtttacacaccgaagtcaaggggcaattcgggcacgggactggccgggctatgggcaaggctcttaaaaaattcccccgctgtgttctccggcaggacacaaagtcatgccgtggagaccgccggttcataacgttccaggcagagaaaaccaatggtttgcatcgatttttcacggtcatgcttctttctgcgggtgcggtgaccctgttgggcatcttaacggcattgctcctcgctttcctaacgccggtccaccgagaccacctccagggctagaccagctgaatcccgagggcccggcgggtcccggaggtccccccgccatcttgccagctctgccggccccggcagaccctgatccggcaccacggcgtggtggtggggcagatggaggcgccgccgctggggccgccgccgccgcagaccataccgggtacgaagaaggagacctagaagatcttttcgccgccgcggccgaggacgatatgtgagtaggcggaggcgccgccgctactacaggcgcagactaagacggggcagacgcagagggcgacgaaagagacacagacagactctagtagtgaggcagtggcaacctgacgttgttaaaaagtgtaagataacaggatggatgcccctcataatctgtggctctggcagcacacagatgaactttataactcacatggacgacaccccccctatggggtacacgtacgggggcaactttgtaaatatgacttttactctagaggccatctatgaacaattcctgtaccacagaaacaggtggtccagatctaaccatgacttagaccttgccaggtacctagggatcactctaaaagcctacagacacaccacagtagactacatactcagctacaacagaacaggccccttcaacataagtgaaatgacctacatgagcacacaccctgcactcatgctactgcaaaagcacagaatagtagtgcccagcttaagaacaaagccaaggggcaaaagagccataaaaatcagaataagacccccaaaactaatgctaaccaagtggtacttcaccaaagacatctgctccatgggcctcttccagttaatggcaacaggggcagaactcacaaacccctggctcagagacaccacaaaaagcccagtaataggcttcagagtcctaaaaaacagcatatacaccaatctatctaacctaaaagagacaagcatatcaggagaaagaaaatcaatactaaacaaactacacccattatctctaacaggctctggaaacacagccaaagggtgggaatactcctacactaaactaatggcacctatatactactcatcagtcagaaacagcacatacaactggcaaaactaccaaactaactatgcaaccacagcagcaaaatttaaggaaaagcaaacacaaagtctaactttaattaaatcagaatacctgtaccactacccaaacaatgtcacacaagtagacttcatagccgaccccactcttacacatgactggggtatatacagcccatactggctaactccaacaagaatcagcctagactgggacacaccatggacatatgtcagatacaacccactgtcagacaagggcttaggcaacagaatatatgcacagtggtgctcagaaaaaaccagtaaattagacatcacaaaaagcaagtgcatactaaaagactttccactgtgggccatggcctatggctactgtgactgggtagtaaagtgcacaggagtatccagtgcatggacagacatgagaatagcaatcatatgtccatacacagaaccggcacttgtagggtcaacagcagatgtaggcttcattccagtaagtgacaccttttgcaacggagatatgccgtttcttgcaccatacatacctattacatggtggatcaagtggtaccccatgattacacaccaaaaggaagttcttgaggcaatagttaactgtggaccgtttgtacctcgagaccagagctccccagcttgggaaataactctgggttacaaaatggattggaaatggggtggctctcccctgccttcacaggcaatcgacgacccctgccagaagtccacccacgagctacccgaccccgatagacaccctcgcatgttacaagtctctgacccgacaaagctcggaccgaagacagtttttcacaaatgggactggagacgtgggatgcttagcaaaagaagtattaaaagagtccaagaagactcaacagatgatgaatatgttgcaggacctctaccaagaaaaagaaacaagttcgatactcgagtccaaggccctccaaccccagaaaaagaaagttacagtttactccaagccctccaagagtcggggcaagagagcagctcagaggaccaagaacaagcaccccaagaaaaagaggaccagaaggaagcgctcatggagcagctccagctccagaaacaccaccagcgagtcctcaagcgaggcctcaaactcctcctcggagacgtgctccgactccggagaggagtccactgggaccccctcctgtcctaatccaaggtcccagtatcccagacctgcttttccctaacacacaaaaaaaaaagaaattttccaactacgactgggtgtgcgagtacgagctggccagatggatggatcgtcctttgcggcactacccatcagacccccctcactacccctggctaccaaaaaagcctgctacccagcctacatgtaaagtaagtttcaaattaaagcttgatgcctaaaattcaaggccgtgggtgtttcacttcatcggtgttaacctctataagtcactaagcactccgagcgaagcgaggagtgcgacccccctgcccggtagcaacttcctcggggtccggcgctacgccttcggctgcgccggacgcctcggacccccccctcgacccgaatcgctcgcgcgattcggacctgcggcctcgggggggtcgggagctttattaaacagactccgagatgccattggacactgaggggatgaacagcaacgaaagtgagtggggccagacttcgccataaggcctttatcttcttgcgagtggggccagacttcgccataaggcctttatcttcttgccatttgtcagtgtcttccgggttcgcgtgggggccgccattttagcttcggccgccattttaggccctcacgggcctccgtagtcgcgcaccagtgacgtcacggcagccatattggtcctgacgtcacagtcacgtggggagggcacacgtgatcccggaagtgtccctgctcacgtgatctgacgtcacggccgccattttgtgctgtccgccattttgtgacttccttccgctttttgtaaaaaaaagaggaagtgtgacgtagcggcggggggggcggcgcacttcgcgcgccgcccaccagggggcgctgcgcgcccccccccgcgcatgcgcgggtccccccccgcggggggggctccgcccccccggccccccccccgtgctatgtccaccgcgcatgcgcggccacgcccccgccgccattttctacagcccgccaatttctattcaaacagaccaatcagaaccttctacgtgcacttcctggggcgtgtctacgaggtctatataagcaacagcggtgacgaatggtagagttttttctcgcccgtccgcggcgagagcgcgagcgaagcgagcgatcgagcgtcccgtggg

SEQ ID NO: 252 - protein, 648 aa, Alphatorquevirus sp.; identical to SEQ ID NO: 246

SEQ ID NO: 253 - DNA, 3764 bp, Alphatorquevirus sp.
cgggtgccgtaggtgagtttacacaccgcagtcaaggggcaattcgggctcgggactggccgggccctgggcaaggctcttaaaaatgcacttttctaaaataagcagaaagaaaaggaaactgctactgcaaactgtgccgcttgcagagagccaacggactaccatgagctggtccagacccctccaaaatgttagtgtttgcgaacaaaactggcttcagtcctgcatcagatcacacgcaagcttttgtggctgtaataatcctattattcattttaacaacattgctactcgctttaactatctgcctgcttccaatccgcctgtggaacccccccaaccgcccacacgccccccgtcgcgcttaagaccactccccgcgctccccgcacctcccgctgatccacaagcgccatggcctggggctggtggctcaagcggtggaggagaagaaagaagccagcgtggaagaagtggagaacgcgcagatggagaagatttcgacacagaagacctaaacgcacttatggccgccgtcgaagaagacgaacagtaaggaggcgccgcggtagacgactgaggaggagggggtggactaggagacggtatataagacgcagacgcagaaagaaaaagctagtactgactcagtggaacccccaagatgtcaggagatgcacaataaggggcataataccccttatcatgtgcggtgcaaacactgccagttttaactatggcatgcacagcgatgacagcactccccagccagagaaattcgggggaggaatgagcacagtaacattcagcctgtttgtgctctatgaccagtacaccaggcacctaaacaggtggtcgtatcccaacgaccagttagaccttgccagatacagggggtgtaaatttaaactatacagagacaccaacacagactttatagtaacctatgacataaatccacccatgaaaaacacagaactcagcggtcccaacactcatccaggcatgctaatgcagcaaaagagaaagatactagtacccagctgggacacctatcctagaggcaaaaaatatgtcctagttaagataccaccccccaaactgtttgaagaccactggtacacccagccagacttatgcaaagttcctcttgtaactttgcggtcaacggctgctgacctcaaacatccgttctgctcaccacaaacgaacaacccttgcaccaccttccaggtgttgcgcagccagtacaacgctatgataggcttcccctttaactataatccacaaaactcccaacaacaaacacaattaaaaacctttgaaacctggctatacagctctagcacacactaccaaacatttgcaactgaggccaatcttagacccagacagtactgtgcagacggatcactaaatacaaagtatgcagaccttcattcccaatggaccactagtatatatgccaaaaagacagacagcaactttggatacactagctacaatttcagtggtgagacgggctataagtatgtaacacaaataagacagttttactggacacaactaacatcctggacacaagcagtccctcacataaacaccacttttgccaatgccatacaccctgaattcgagtaccacgcgggctggtactcaaacattttcataggccctaacagattcaacatacagtttagagcagcttacatggatgtcacctacaaccccataaatgacaaaggccaccttaacaaagtgtggttccagtacagcacaaaacccaccacagactttgtagaaaaacaagccaaatgtctcctacaaaacctacctttgtgggccatgctatttggctactcagaatacgtagagagccagctaggcccctttcaggaccatgaaacagtaggcctagtaatagtacagtgcccatacacagtaccccccctgtatgacaaagaccaaccagacatgggtttcgtgttctatgacacacactttggcaacggaaaactgagcaacggactgggccaggtacccaggtactggcagcagagatggtaccccatcttaaagagacagaaacaggtaatgaatgacatctgcaagacgggaccttttgcctacagagacgagagactccaagctgacttgactgcagtatactcatttaagtttaactggggtggtgacttaatctaccaccaggttgtcaaaaacccgtgtgactcaggcggactggtgccttccgactccagtagactcaagcgggacgtacaagttgttagcccgctcaccatgggacccagactcatcttccactcgttcgaccaaagacgggggctctttactaacagagctatcaaaagaatgtacaatgaacagattaatgttccagactttacagaacagcctaaaatcccccgacttttccccccagtcgagctcaaagaaaaggaagaaaaagactcagattcggagacagagacgatcagcagctcccaggaaaaagaagcagaaaagcaagcagcgctaccagtccagcagcagctccgactccaactgcgagaacaacagcgactcagagtccacttgcagcacctcttcctgcaactccagaaaacaaaagcaaatctacatttaaacccactatctttccagcaagagataagctagacatgtttggaaacgtagtagatagaaagcctacctcccaggactgggagacagagtatatcacatgtaggatatttaacaggccccccagaacacacctatcagacactcctttctacccttggctgcctaaacccaaacctgcttgccgtgtaacctttaagcttggctttcaataaacaaggccgtgggagtttcacttgtcggtgtcaacctctataagtcactaagctctccgagcgcagcgaggagagcgaccctacaacaaggggcaactccctcgaagtccggcgctacgcgcttcgcgctgcgccggacatctcggaccccccctcgacccgaatcgcttgcgcgattcggacctgcggcctcggggggggtcgggggctttactaaacagactccgaggtgccattggacactgagggggcgaacagcaacgaaagtgagtggggccagacttcgccatagggcctttatcttcttgccattggtccgtgtccggggtcgccgtaggcttcggcctccgttttaggccttccggactaccaaaatggccgattctgtgacgtcatggcagccattttagattggcgcagaggatctgacgtcaaagttcaaaggtcaggccctcggcgtcatcacaaaatggctgacaacttcttccgggtcaaaggtcaccttatacgtcataagtcacgtgggtaaggtcgtgcctaaacccggaagcatcctcgtccacgtgactgtgacgtgtgtgacacgtcaccgccgccattttagttcacaaaatggcggacttccttccgcttttttaaaaaaaaacggcctgcggcggcgcgcgcgcttcgcgctgtctcttatacacacagccccccccgcggggggctccgccccccggcccccccccccgaagtacgtcactaaccacgtgactcccgcaggccaaccacagtgtatgtcgtgcacttcctgggcatggtctacgtgataatataaacaacagcacttccgaatggctgagttttccacgcccgtccgcagcgaggagcaccggcagggacatccgcgcgtcccgaggg

SEQ ID NO: 254 - protein, 754 aa, Alphatorquevirus sp.
MAWGWWLKRWRRRKKPAWKKWRTRRWRRFRHRRPKRTYGRRRRRRTVRRRRGRRLRRRGWTRRRYIRRRRRKKKLVLTQWNPQDVRRCTIRGIIPLIMCGANTASFNYGMHSDDSTPQPEKFGGGMSTVTFSLFVLYDQYTRHLNRWSYPNDQLDLARYRGCKFKLYRDTNTDFIVTYDINPPMKNTELSGPNTHPGMLMQQKRKILVPSWDTYPRGKKYVLVKIPPPKLFEDHWYTQPDLCKVPLVTLRSTAADLKHPFCSPQTNNPCTTFQVLRSQYNAMIGFPFNYNPQNSQQQTQLKTFETWLYSSSTHYQTFATEANLRPRQYCADGSLNTKYADLHSQWTTSIYAKKTDSNFGYTSYNFSGETGYKYVTQIRQFYWTQLTSWTQAVPHINTTFANAIHPEFEYHAGWYSNIFIGPNRFNIQFRAAYMDVTYNPINDKGHLNKVWFQYSTKPTTDFVEKQAKCLLQNLPLWAMLFGYSEYVESQLGPFQDHETVGLVIVQCPYTVPPLYDKDQPDMGFVFYDTHFGNGKLSNGLGQVPRYWQQRWYPILKRQKQVMNDICKTGPFAYRDERLQADLTAVYSFKFNWGGDLIYHQVVKNPCDSGGLVPSDSSRLKRDVQVVSPLTMGPRLIFHSFDQRRGLFTNRAIKRMYNEQINVPDFTEQPKIPRLFPPVELKEKEEKDSDSETETISSSQEKEAEKQAALPVQQQLRLQLREQQRLRVHLQHLFLQLQKTKANLHLNPLSFQQEIS

SEQ ID NO: 255 - protein, 167 aa, Alphatorquevirus sp.
LAGPWARLLKMHFSKISRKKRKLLLQTVPLAESQRTTMSWSRPLQNVSVCEQNWLQSCIRSHASFCGCNNPIIHFNNIATRFNYLPASNPPVEPPQPPTRPPSRLRPLPALPAPPADPQAPWPGAGGSSGGGEERSQRGRSGERADGEDFDTEDLNALMAAVEEDEQ

SEQ ID NO: 256 - protein, 58 aa, Alphatorquevirus sp.
MFGNVVDRKPTSQDWETEYITCRIFNRPPRTHLSDTPFYPWLPKPKPACRVTFKLGFQ

SEQ ID NO: 257 - DNA, 3761 bp, Alphatorquevirus sp.
cgggtgccggaggtgagtttacacaccgaagtcaaggggcaattcgggctcaggactggccgggctttgggcaaggctcttaaaaatgcacttttctcgaataagcagaaagaaaaggaaagtgctactgctttgcgtgccagcagctaagaaaaaaccaactgctatgagcttctggagacctccggtgcacaatgtcacggggatccagcgcctgtggtacgagtcctttcaccgtggccatgctgctttttgtggttgtggggatcctatacttcacattactgcacttgctgagacatatggccatccaacaggcccgagaccttctgggtcatcgggaatagaccccactccgcccatccgtagagccaggcctgccccggccgctccggaaccctcacaggttgactccagaccggccctgccatggcatggagatggtggaagcgacggaggcgctggtggctccgcaagcggtggacccgtggcagacttcgcagacgatggcctcgaccagctcgtcgccgccctagacgacgaagagtaaggagacgcagacgttggaggagggggcgacccagacgcagactgtaccgacgctacagacgcaaaaaacgtaggagacgaaagcccaaaataatcttaaaacaatggcagccagacattgtaaagaggtgctacatagtgggctacattcctgccataatatgtggggcgggcacctggtctcataactacaccagccaccttttagacattatccctaagggaccctttggaggagggcacagcactatgaggttctccctaaaagtactctttgaagaacacttgagacacttaaacttttggacaaagagcaaccaagacctagaactcataagatactttagatgctcctttaaattttatagagaccaggaaacagactacatagtacactacagcagaaaaactcccctgggaggcaacagactgacagcacctagcctgcacccaggggtacaaatgcttagcaaaaacaaaataatagtacccagctatactacaaaacccaagggtcctagctatgtaaaaataactatagcaccccccacactactaactgacaagtggtactttgccaaagacgtttgtgacacaaccttggttaacttagacgttgtactctgcaacctgcggtttccgttctgctcaccacaaactgacaacccttgcatcacattccaagttctgcattcttactacaacgactacctgtctatagtagacaccaccttatacacaacaaactttataaacaatttaaatacaaaactaggtccaacatggggaaacagactaaacacatttagaacagaaggctgctactcacatccaaaattgcccaaaaaacagttaatacctgcagatgacaataaatatttcacctcaccagacggactctggggagatgcagtatttgatgtttcaaatttaaagaaactatctgaaaacatgcagtcttatagtaattctgctaaagacagaggaatacaaggagaccctgccttttgccacctaacaggcatattttcacctccctggctaacaccaggcagaatatctcctgaaaccccaggactttacacagacgtgacttacaatccatacgctgacaaaggagtaggcaacagaatatgggttgactactgcagtaaaaaaggcaacaaatatgacaatacaagtaaatgccttctagaagacatgccactatggatgatatcctttggatacgtagactgggtaaaaaaagagactggcaactggggtattccactgtgggccagagtacttataagaagcccatatactgtaccaaaactataccatgaaaacgaccctgattatggatgggtacctatttcttactattttggagaaggcaaaatgccaaacggagacacgtatgtaccatttaaagtaagaatgaaatggtacccttcaatgtggaaccaagagccagtgttaaatgacttagcaaagagcggaccgtttgcatacaaaaacaccaaaacaagtgtgactgttactgccaaatataaattcacatttaacttcgggggcaaccccgtaccctcacagattgtacaagatccctgcacacagcccacctacgacatccccggcaccggtaacctgcctcgcagaatacaagtcattgacccgaaagtcctcggtccccactattccttccaccggtgggacttcagacgtggcctctttggctcacaagctattaagagagtgtcagaacaatcaacaacttctgagtttttattctcaggcccaaagaaaccaagaatcgatcaaggcccttacatcccgccagaaaaaagctcaggttcactccaaagagaaccgagaccgtggagcagctcggagaccgaggcagagacagaagccccctcagaagaagagccggagaaccaagaagaacaagtactccagttgcagctcagacagcagctccgagaacagcgaaaactcagacagggaatccagtgcctattcgagcaactgataacaactcagcagggggtccacaaaaacccattgttagagtaggccccgagcagtggctgtttcccgaaaggaagcctaagccaccgccctcagcccaggactgggccgaggagtacactgcctgtaaatactggggcagaccacctagaaaattccttacagacatgccattctatactcactgcaaaaccaattacaatgtaacctttatgctaaactatcaataaacacgccagtttcactgttctaggccgtgggagtttcactggtcggtgtctacctctaaaggtcaccaagcactccgagcgcaagcgaggagtgcgaccctccccccggtagcaacttcttcggagtccggcgctacgccttcggctgcgccggacacctcagaccccccctccacccgaaacgcttgcgcgtttcggaccttcggcgtcgggggggtcgggagctttattaaacagactccgaggtgctcttggacactgaggggggggggtcgggagctttattaaacagactccgaggtgctcttggacactgagggggtgaacagcaacgaaagtgagtggggccagacttcgccataaggcctttatcttcttgccatttgtcagtgtccggggtcgccataggcttcggcctcggttttaggccttccggactacaaaaatcgccattttggtgacgtcacggccgccatcttaagtagttgaggcggacggtggcgtgagttcaaaggtcaccatcagccacacctactgaaaatggaggacaacttcttccgggtcaaaggtcaccggcgccatcttaagtcacgtgacctgtgacgtcacgggcgccattttgtataacaaaatggccgacttccttcctctttttcaaaaaaaaagcggaagtaccgccgcggcggcgggggggcggcgcgctgcgcgcgccgcccagtagggggcgccatgcgcccccccccgcgcatgcgcggggccccccccccgcggggggctctgccccccggcccccccccatgctacgtcactaaccacgtgcactccgcaggccactcgaagtctacgtcgtgcacttcctgggcgtggtttacatcctcatataagtaactgcacttccgaatggctgagttttccacgcccgtccgcggagaggagccacggcaggggatccgaacgtcctgaggg

SEQ ID NO: 258 - protein, 726 aa, Alphatorquevirus sp.
MAWRWWKRRRRWWLRKRWTRGRLRRRWPRPARRRPRRRRVRRRRRWRRGRPRRRLYRRYRRKKRRRRKPKIILKQWQPDIVKRCYIVGYIPAIICGAGTWSHNYTSHLLDIIPKGPFGGGHSTMRFSLKVLFEEHLRHLNFWTKSNQDLELIRYFRCSFKFYRDQETDYIVHYSRKTPLGGNRLTAPSLHPGVQMLSKNKIIVPSYTTKPKGPSYVKITIAPPTLLTDKWYFAKDVCDTTLVNLDVVLCNLRFPFCSPQTDNPCITFQVLHSYYNDYLSIVDTTLYTTNFINNLNTKLGPTWGNRLNTFRTEGCYSHPKLPKKQLIPADDNKYFTSPDGLWGDAVFDVSNLKKLSENMQSYSNSAKDRGIQGDPAFCHLTGIFSPPWLTPGRISPETPGLYTDVTYNPYADKGVGNRIWVDYCSKKGNKYDNTSKCLLEDMPLWMISFGYVDWVKKETGNWGIPLWARVLIRSPYTVPKLYHENDPDYGWVPISYYFGEGKMPNGDTYVPFKVRMKWYPSMWNQEPVLNDLAKSGPFAYKNTKTSVTVTAKYKFTFNFGGNPVPSQIVQDPCTQPTYDIPGTGNLPRRIQVIDPKVLGPHYSFHRWDFRRGLFGSQAIKRVSEQSTTSEFLFSGPKKPRIDQGPYIPPEKSSGSLQREPRPWSSSETEAETEAPSEEEPENQEEQVLQLQLRQQLREQRKLRQGIQCLFEQLITTQQGVHKNPLLE

SEQ ID NO: 259 - protein, 164 aa, Alphatorquevirus sp.
LAGLWARLLKMHFSRISRKKRKVLLLCVPAAKKKPTAMSFWRPPVHNVTGIQRLWYESFHRGHAAFCGCGDPILHITALAETYGHPTGPRPSGSSGIDPTPPIRRARPAPAAPEPSQVDSRPALPWHGDGGSDGGAGGSASGGPVADFADDGLDQLVAALDDEE

SEQ ID NO: 260 - protein, 56 aa, Alphatorquevirus sp.
LFPERKPKPPPSAQDWAEEYTACKYWGRPPRKFLTDMPFYTHCKTNYNVTFMLNYQ

SEQ ID NO: 261 - DNA, 3759 bp, Alphatorquevirus sp.
cgggagccgaaggtgagtttacacaccgcagtctaggggcaattcgggcacgggtctggccgggctatgggcaagactcttaaaaaatttccccgctgtgttcttcggcaggacatcaagtcatgccgtggcgaccgccggtgcataacgtcccgggcagggaaagccagtggtttgcaagcgtttttcactcgcatgcagctttttgcggctgcggtgacgttgtcgggcatcttactagcattgttcctcgctttcctaacgccggtcctccgagaccacctccaggactagaccagcccaacctgggagggccggaaggtcccggaggtccccccagagccctgccagctctgccggccccggcagagcctgagccggcaccacgccgtggtggtggggaagatggaggcggcgccgctggggccgccgccgtcggagaccatggaggatacgaagaaggagatctagaagatcttttcgccgcggccgccgaagacgatatgtgagtaggcggtggcgccgccgcaatttcaggcgcagacgcagacggggcagacgcagggggcgacgaaagagacataaacccacccttgtactcagacagtggcaacctgacgtagtcagaccctgcaaaataacaggatggatgcccctaattatctgtgggtcaggaagcacccagttcaactttataacccacatggatgactttcctcctatggggtccacctacgggggcaacttcaccaaccttaccttctcgttagaagcagtatatgaacagtttttgtaccacagaaacaggtggagctcctctaaccatgacctagacctggcaagataccagggaaccaccctaaaactgtacaggcacgaatacctagactacataattagctacaacagaacaggcccttttcagatcagtgacatgacctacctcagcactcaccctgccttcatgctactacaaaaacacagaatagtagtgcccagctttaagaccaagccacacgggcgcaggtccataaaagttagaataaagcccccaaaactcatgctaaacaagtggtacttcacaaaagacatatgcagcatgggcctcttccagctacaggccacagcatgcaccttaaacaacccctggctcagagacaccacaaaaagcccagtcataggcttcagagtacttaaaaacagcatatacacaaacctcagcaacctacctgaccatgaaggtgccagacaatccattagaaatagactacacccagatagtctcacaggctcatctccaaaccaaaaaggttgggagataagctacacaaaactaatggctccaatatattaccaagccaacagaaacagcacatacaactggctaaactaccaagacaactacaaaactacccacgaagcatttaaaaaaaaaaggaatgaaaatttaactctaatacaaaaagaatacacataccactatcccaacaatgttaccatagacataataggtaaaagcacacttacacatgactggggcatatacagtccctactggctaactccaacaagaatcagcctagactgggaaacaccctggacatatgttagatacaacccactagcagacaaaggcataggcaatgttgtatacgcacagtggtgctcagaacagagctgcaaagtagaccaaaaaaagagcaagtgcataatgagagacctgccactgtgggtaatattttatggctacgtagactggttagtgaaatccacaggcgtcagcagcgcagtcactgacatgagaatagccattataagtccctacaccgagccggcacttatagggtcaacaccagacgtaggcttcattccagtaagtgacaccttttgcaacggagacatgccgtttcttgctccatacatccctgtgggctggtggatcaagtggtaccccatgattgcacaccaaaaggaagtgtttgaagcaatagttaactgtggaccgtttgtcccacgagaccagacgaaaccctcttgggaaattaccatgggttacaaaatgaactggaaatggggcggctctcccctgccttcacaggcaatcgacgacccctgtcagaagcccacccatgagctacccgatcccgatagacaccctcgcatgctacaagtctcagacccgacaaagctcggaccgaagacagttttccacaagtgggactggagacgtgggatgcttagcaaaagaagtattaaaagagtccaagaagactcaagcgatgatgaatatgttgcaggacctttgcaaagaaaaagacacaagatggataccagagccgcaggcctccaaacccccgaaaaagaaagctacactttactccaagccctccaagactcggcagaagagaccctctcgagccaagaacaagcaccccaagaaaaagaggtccaagaagaagcgctcctggagcagctccagctccagaaacagcaccagcgagtcctcaaacgaggcctcaaactcctcctgggagacgtcctccgactccgccgaggagtccactgggaccccctcctgtcataattcagggtccctctatcccagacctgcttttccctaacacacaaaaaaaaaacaaattttccaactacgactggtcagtagagtacgagctggccaaatggatggatcgtcctttgcggcactacccatccgacctccctcactacccctggctaccaaaaaagccacctacccctcctacatgtagagtaagtttcaaattaaaactagattcctaactttcaaggccgtgggtgtttcacttcatcggtgtctacctctataagtcactaagcactccgagcgaagcgaggagtgcgacccccctgcccggtagcaacttcctcggggtccggcgctacgccttcggctgcgccggacgcctcggaccccccctcgacccgaatcgcttgcgcgattcggacctgcggcctcggggggggtcggggcctttattaaacagactccgagatgccattggacactgagggggtgaacagcaacgaaagtgagtggggccagacttcgccatagggggtgaacagcaacgaaagtgagtggggccagacttcgccataaggcctttaactttgggtcgtatgtcagtgtcttccgggttcgcctgggggccgccattttagcttcggccgccattttaggccctcgagggcctccgtagtcgcgttttagtgacgtcacggcagccatcttggtcctgacgtcacagtcacgtgggaagggaacacgtgatcccggaagtgtccctggtcacgtgacttgacgtcacggccgccattttgtgctgtccgccatcttgtgacttccttccgctttttgtaaaaaaaagaggaagtatgacgtagcggcggggggggcggcgcgcttcgcgcgccgcccaccagggggcgctgcgcgcccccccccgcgcatgcgcgggtccccccccgcgggggggctccgcccccccggcccccccccgtgcttaatccaccgcgcatgcgcggccacgcccccgccgccattttgtacagcccgccaatttctcttcaaacagaccaatcacaatctactacgtgcacttcctggggcgtgtcttcccagtctatataagcagaggcggtgacgaatggtagagttttttctcgcccgtccgcggcgagagcgcgagcgaagcgagcgatcgagcgacccgtggg

SEQ ID NO: 262 - protein, 644 aa, Alphatorquevirus sp.
MPLIICGSGSTQFNFITHMDDFPPMGSTYGGNFTNLTFSLEAVYEQFLYHRNRWSSSNHDLDLARYQGTTLKLYRHEYLDYIISYNRTGPFQISDMTYLSTHPAFMLLQKHRIVVPSFKTKPHGRRSIKVRIKPPKLMLNKWYFTKDICSMGLFQLQATACTLNNPWLRDTTKSPVIGFRVLKNSIYTNLSNLPDHEGARQSIRNRLHPDSLTGSSPNQKGWEISYTKLMAPIYYQANRNSTYNWLNYQDNYKTTHEAFKKKRNENLTLIQKEYTYHYPNNVTIDIIGKSTLTHDWGIYSPYWLTPTRISLDWETPWTYVRYNPLADKGIGNVVYAQWCSEQSCKVDQKKSKCIMRDLPLWVIFYGYVDWLVKSTGVSSAVTDMRIAIISPYTEPALIGSTPDVGFIPVSDTFCNGDMPFLAPYIPVGWWIKWYPMIAHQKEVFEAIVNCGPFVPRDQTKPSWEITMGYKMNWKWGGSPLPSQAIDDPCQKPTHELPDPDRHPRMLQVSDPTKLGPKTVFHKWDWRRGMLSKRSIKRVQEDSSDDEYVAGPLQRKRHKMDTRAAGLQTPEKESYTLLQALQDSAEETLSSQEQAPQEKEVQEEALLEQLQLQKQHQRVLKRGLKLLLGDVLRLRRGVHWDPLLS

SEQ ID NO: 263 - DNA, 3759 bp, Alphatorquevirus sp.
cgggtgccggaggtgagtttacacaccgcagtcaaggggcaattcgggctcgggactggccgggctatgggcaaggctcttaaaaaagctatgtttctcggtcgcgtttacagaaagaaaaggcgcctgccactgtcctcactgcactctccacagaaagctcgcaaactactaagaggtatgtggaggccccctactcaaaatgtatcaggacaggagagaaactggtacgactctgtgttttattcgcatgctgccttttgtggctgtggggactgtgttggccatcttagctatctggctactcacctgggccgaccacctagtgcacaacccccgccgcaacaacagccacctgtcataagacgcctgcctgctctcccggcacccccaaacccctccggtgatcgagcggcatggcctactggtggtggagacgccggagaagacggccctggagaaggaggcgccgctggaggcttcgcagacctcgcagacgaagagctacttaccgccgccgtcgaggccgccgaagagtaagaaagaggagggggaggtggagacggacttacagacgctggcgtagaaagagggggcgacgcaaacacagacctaaaataattcttaaacagtggcaaccaaactttattagaaactgttttattgtgggttatatgccactgatcttttgtggtgagaacactgtaagccaaaactatgccacccactctgatgacctggtggctaagggaccctacgggggcggcatgaccaccacaaaattcactctcagaatcctgtttgacgaacaccttagatggatgaactactggactgtcagtaacgaggacttagatctctgtagatacgtaggagccaggttttacttttacagacaccccacagtagactttatggtacagatacacacacaggccccatttctagacacagaactcacaggccccagcatacatccaggcatgatgatacttaataagagaaagatatttgtgcccagtttaaaaaccaggcctaacagaaagcacaaagtaagagttaaagtaggggccccccgcttgtttgaggacaagtggtacccccagtcagagctctgtgacaccaccctagtggccatctatgcaacggcctgtgacttgcaatttccgttcggctcaccactaactgaaaacccttgcgtcaacttccaggttttaggttccgcttacaaacagcaccttagtatcctaaccacagaaaccacaaaaaacaaaacacactatgatgaagcactatataaaaaaataccatactacaatacattccaaactatagcacacctcagagaaacaggcaaacaagatgcagcaaaccctacatggggtcaatgcttaaatactaccacacttacattctctggcaataatcaaacaacatgtaatgacacctggtactatggcaatgcatacacagacaaaatagcagacctatgtaaaaaaactaaagaaaaatactttaatgctaccaaatctgctttccctgcctatgctacacttgtagatgacttatatgagtaccatggaggtatttactcctctatattcctatctgcaggcagatcctactttgaaactctaggtgcttactctgacattatatataacccctttgtagacaaaggcctaggtaatatagtgtggatagactacctctcaaagtcagacgccgtctggaaaccccctcaaagcaaatgcaccattaaagaccagcccctgtgggcagcctttaatggctacagtgaattttgtgctaagagcacaggagacggagcagtaaacataaactgcagggtagttattaggtgcccctacacaactcccatgttaatagacaacaaagaccccaatcaaggctttgtaccctactcaaaaaactttggcaatgcaaaaatgaaaggcggctcagcagacgtacccctcagctggagggtaaagtggtacgttatgatgtaccaccaacaagaatttatggaagagatagtacagagcggaccgtgggcctacaagggcgacgaaaagagtgctgcacttaacatgaaatatgtctttaagtggaaatggggcggtaaccctatatctggacaggttgtcagaaatccctgcaagacgtccagttccagtcgacagcctcgttcaatacaagcagttgacccgaagagagtcgcgccaccgctcgtattccacagctgggactaccgacgagggtactttggccacgcaagtattaaaagaatgtcagaagaatcagaacctcctacgctttttacaggaccatcaggcaaacgcccccgcaaggacaccaacgtccagcaggcggaagaagaacagcaaaaagaaaactccactttcagactccagcgccagctccagccctggatcaactccagtcaagaaacgcaaagcagccaagaagagatccaggcgcaggggtcgatacaagaacaactcctccagcagctcggagaacagcgagccctccgaaagcagctggagctcgtcgccagacaagtcctcaaagtccaagcaggcacccacctacacccccttttatcttcccaagcataaacaaagtctttatgtttgagcctaaaggccccaaacccatacaaggctatgaggcctggctagatgagtaccagacagcaggtatctgggataggccagtcagaaactaccacacagacacccccttctacccctggatgcctaagcccccagaccaattccgtgtcagctttaaacttggctttcaataaaatttcaaggcagtacactgttcacctgtcggtgtctacctctataagtcactaagcactccgagcgttagcgaggagtgcgaccctagggggggactcaacgccttcggagccgcgcgctacgccttcggctgcgcgcggcacctcagacccccgctcgtgctgacacgctcgcgcgtgtcagaccacttcgggctcgcgggggtcgggaattttgctaaacagactccgagttgccattggacactgaagctgtgaatcagtaacgaaagtgagtggggccagacttcgccataaggcctttatcttcttgccatttgtccgtgtcgggggtcgccataggcttcgggttccattttagaccttccggactacaaatatggccgttccagtgacgtcacggccgccattttgagtaggtgccgtccaggactgccgttccgggtgaaagggcatcctcggcgggacctacataaaatggtggacaatatcttccgggtcaaaggtcgcgcctacgtcacaagtcacgtgggggggacccgctacgtcatatgcggaagtaggccccgccacgtgactcaccacgtgagtgctacgtcacagccgccattttagttcacaaaatggccgacttccttcctcttttttaaaaataacggcccagcggcggcgcgcgcgctgcgcgcgcgccgggggctgccgcccccccccgcgcatgcgcgcggggggcccccccccccgcggggggggctccgccccccggcccccccccccgaagtccgtcactaaccacgtgactcccacaggccaaccacagtgtatgtcgtgcacttcctgggaggggtctacgttctaatataagtaagtgtacttccgaatggctgagttttccacgcccgtccgcagcgagaacaccacggaggggagtccgcgcgtcccgaggg

SEQ ID NO: 264 - protein, 735 aa, Alphatorquevirus sp.
MAYWWWRRRRRRPWRRRRRWRLRRPRRRRATYRRRRGRRRVRKRRGRWRRTYRRWRRKRGRRKHRPKIILKQWQPNFIRNCFIVGYMPLIFCGENTVSQNYATHSDDLVAKGPYGGGMTTTKFTLRILFDEHLRWMNYWTVSNEDLDLCRYVGARFYFYRHPTVDFMVQIHTQAPFLDTELTGPSIHPGMMILNKRKIFVPSLKTRPNRKHKVRVKVGAPRLFEDKWYPQSELCDTTLVAIYATACDLQFPFGSPLTENPCVNFQVLGSAYKQHLSILTTETTKNKTHYDEALYKKIPYYNTFQTIAHLRETGKQDAANPTWGQCLNTTTLTFSGNNQTTCNDTWYYGNAYTDKIADLCKKTKEKYFNATKSAFPAYATLVDDLYEYHGGIYSSIFLSAGRSYFETLGAYSDIIYNPFVDKGLGNIVWIDYLSKSDAVWKPPQSKCTIKDQPLWAAFNGYSEFCAKSTGDGAVNINCRVVIRCPYTTPMLIDNKDPNQGFVPYSKNFGNAKMKGGSADVPLSWRVKWYVMMYHQQEFMEEIVQSGPWAYKGDEKSAALNMKYVFKWKWGGNPISGQVVRNPCKTSSSSRQPRSIQAVDPKRVAPPLVFHSWDYRRGYFGHASIKRMSEESEPPTLFTGPSGKRPRKDTNVQQAEEEQQKENSTFRLQRQLQPWINSSQETQSSQEEIQAQGSIQEQLLQQLGEQRALRKQLELVARQVLKVQAGTHLHPLLSSQA

SEQ ID NO: 265 - protein, 157 aa, Alphatorquevirus sp.
MGKALKKAMFLGRVYRKKRRLPLSSLHSPQKARKLLRGMWRPPTQNVSGQERNWYDSVFYSHAAFCGCGDCVGHLSYLATHLGRPPSAQPPPQQQPPVIRRLPALPAPPNPSGDRAAWPTGGGDAGEDGPGEGGAAGGFADLADEELLTAAVEAAEE

SEQ ID NO: 266 - protein, 127 aa, Alphatorquevirus sp.
LDQLQSRNAKQPRRDPGAGVDTRTTPPAARRTASPPKAAGARRQTSPQSPSRHPPTPPFIFPSINKVFMFEPKGPKPIQGYEAWLDEYQTAGIWDRPVRNYHTDTPFYPWMPKPPDQFRVSFKLGFQ

SEQ ID NO: 267 - DNA, 3758 bp, Alphatorquevirus sp.
cggatgccggaggtgagtttacacaccgcagtcaaggggcaattcgggctcgggactggccgggccccgggcaaggctcttaaaaaatgcgctttcgcagggttgccgagaaaaggaaagtgcttctgcaaactgtgcgagctacacagacgtctaggcagcttctaggtatgtggcagcctcccgtgcacaatgtccccggcatcgagagaaactggtacgagagctgtttcagatcccatgctgctgtttgtggttgtggcgactttattggccatcttaattatctggcaactactctgggtcgccctccgcgtcctcagcccccaggcggaccccgcacgccgcagataagaaacctgccagcgctcccggcgcccgagggcgagcccggtgacagagcgccatggcgtggggcttctggggccgacgccggcggtggagacggtggagagcgcggcgcagacggtggagaccccgcagacgtaggagacgacgccctgctcgccgctttcgagctcgtcgaagagtaaggagacgcggggggcggtggcgcagacgctacagaaaatggcgacggggcagacgcagacggactcacagaaaaaagataatcataaaacagtggcaaccaaactttattagacgctgctacattatagggtacctaccgctaatattctgtggcgaaaacacaaccgcccagaactatgccactcactcagacgatatgataagcaaaggaccgtacggggggggcatgactactacaaaatttactctgagaatactgtacgacgagtttaccaggtttatgaacttttggactgtcagtaacgaagacctagacctgtgtagatacgtgggctgcaaactcatattttttaaacatcccacggtagactttatagtacagataaacactcagcctcctttcttagacacgtccctcaccgcggccagcatacacccgggcatcatgatgctcagcaaaagacacatactaataccctctctaaagacccggcccagcagaaaacacagggtggtcgtcagggtgggcgccccaagactttttcaagacaagtggtacccccagtcagacctgtgtgacacagttctgctttccatattcgcaaccgcctgtgacttgcaatatccgttcggctcaccactaactgacaacccttgcgtcaacttccagattttggggccccagtacaaaaaacaccttagtattagctccactatggatactactaacgaaacacattataaaaacaacttatttaaccaaactgcactatacaacacctttcaaacaatagctcagcttaaagagacaggacaaactacaagtataacaccaacttggaatgcggtacaaaatactattgcacttaattctttaggtaataatgcaactactagcaaagacacttggtacaaaggaaacacatacacaaaagatatagaaaaattagcagagaaaacaagagaaagattcacagctgcaacaaaagcagcactaccaaactaccccacaataatgtccacaaacttatatgaataccactcaggaatatactccagcatatttctatcagctggcaggagctactttgaaaccaccggggcctactctgacattatatacaaccctttcacagacaaaggcacaggcaacataatttggatagactaccttacaaaagaagacaccatttttgtaaaaaacaaaagcaaatgcgagataatggacatgcccctgtgggcggcctgcacaggatacacagagttctgtgcaaagtacacaggcgactctgccattatctacaatgccagaatactaataagatgcccatacactgaacccatgctaatagaccactcagaccctaacaaaggcttcgtaccctactcatttaactttggcaacggaaagatgccgggaggcagctccaacgtgcccataagaatgagagccaagtggtacgtgaacatattccaccaaaaagaagtcttggagagcatagtacaatccggaccgtttgggtacaagggcgacataaaatcagctgtactgtctatgaaatacagatttcactggaagtggggcggaaaccctatatccaaacaggtcgtcaggaatccctgctccaactccagctcctccgcggcccatagaggacctcgcagcgtacaagcggttgacccgaaatacaataccccagacgtcacgtggcactcgtgggacatcagacgaggactctttggcaaagcaggtattaaaagaatgcagcaggaatcagatgctttttacattcctgcaggaccactcaagaggcctcggagagacacgaacaccgaaaacccagaagggcaaaacgaaagctcaggtttcagagtccagcagcgactcccgtgggtccactccagccaagagacgcaaagctccgaagaagagacgcaggcgcaggggtcggtacaagaccaactactcctccagctccgagagcagcgagtactccgactccagctccagcaactcgcaacccaagtcctcaaagtccaagcagggcacggcctacaccccctattatcttcccaagcataaacaaagcctttatgtttgagccccagggtcctaaacccatacaaggctacaacgattggctagaggagtacacttgctgtaaattctgggacagacccccaagaaaactacacacagatacaccattctacccctgggcaccaaaacccgaaaaccaagtcaaggtaacctttaaactcaactttaaataaaaattctaggccgtgggagtttcacttgtcggtgtctgcttcttaaggtcgccaagcactccgagcgctagcgaggagtgcgaccccccctccggtagcaacgccttcggagccgcgcgctacgccttcggctgcgcgcggcacctcagaccccccctccacccgaaacgcttgcgcgtttcggaccttcggcgtcggggggggtcgggagctttattaaacagactccgagttgccattggacactgcagctgtgaatcagtaacgaaagtgagtggggccagacttcgccatagggcctttatcttctcgccattggatagtgtcaggggtcgccgtaggcttcggcctggtttttaggccttccgaactacaaaaatggcggatttagtgacgtcacggccgccattttaagtaaggcggaagcagctccactttttcacaaaatggcggcggagcacttccggcttgcccaaaatggcgggcaagctcttccgggtcaaagatcaccaactacgtcacaagtcacctgactggggagaagtcacaacccggaagttctcctcggtcacgtgactgatcacgtggttgctacgtcatcggcgccatcttgtgtctcaaaatggcgggcaacttccgcttttttaaaaaaaggcgcgaaaaaacggcggcggcggccccagaagccccacgccatggcgctctgtcaccgggctcgccctcgggcggcagtgtccaatggcaactcggagtctgtttaataaagctcccgacccccccgaagtacgtcactaaccacgtgactcccgcaggccaaccagagtctacgtcgtgcacttcctgggcatggtctacatcataatataagaaggcgcacttccgaatggctgagttttccacgcccgtccgcagcgagaacgccacggagggagatcctcgcgtcccgaggg

SEQ ID NO: 268 - protein, 736 aa, Alphatorquevirus sp.
MAWGFWGRRRRWRRWRARRRRWRPRRRRRRRPARRFRARRRVRRRGGRWRRRYRKWRRGRRRRTHRKKIIIKQWQPNFIRRCYIIGYLPLIFCGENTTAQNYATHSDDMISKGPYGGGMTTTKFTLRILYDEFTRFMNFWTVSNEDLDLCRYVGCKLIFFKHPTVDFIVQINTQPPFLDTSLTAASIHPGIMMLSKRHILIPSLKTRPSRKHRVVVRVGAPRLFQDKWYPQSDLCDTVLLSIFATACDLQYPFGSPLTDNPCVNFQILGPQYKKHLSISSTMDTTNETHYKNNLFNQTALYNTFQTIAQLKETGQTTSITPTWNAVQNTIALNSLGNNATTSKDTWYKGNTYTKDIEKLAEKTRERFTAATKAALPNYPTIMSTNLYEYHSGIYSSIFLSAGRSYFETTGAYSDIIYNPFTDKGTGNIIWIDYLTKEDTIFVKNKSKCEIMDMPLWAACTGYTEFCAKYTGDSAIIYNARILIRCPYTEPMLIDHSDPNKGFVPYSFNFGNGKMPGGSSNVPIRMRAKWYVNIFHQKEVLESIVQSGPFGYKGDIKSAVLSMKYRFHWKWGGNPISKQVVRNPCSNSSSSAAHRGPRSVQAVDPKYNTPDVTWHSWDIRRGLFGKAGIKRMQQESDAFYIPAGPLKRPRRDTNTENPEGQNESSGFRVQQRLPWVHSSQETQSSEEETQAQGSVQDQLLLQLREQRVLRLQLQQLATQVLKVQAGHGLHPLLSSQA

SEQ ID NO: 269 - protein, 148 aa, Alphatorquevirus sp.
MRFRRVAEKRKVLLQTVRATQTSRQLLGMWQPPVHNVPGIERNWYESCFRSHAAVCGCGDFIGHLNYLATTLGRPPRPQPPGGPRTPQIRNLPALPAPEGEPGDRAPWRGASGADAGGGDGGERGADGGDPADVGDDALLAAFELVEE

SEQ ID NO: 270 - protein, 59 aa, Alphatorquevirus sp.
MFEPQGPKPIQGYNDWLEEYTCCKFWDRPPRKLHTDTPFYPWAPKPENQVKVTFKLNFK

SEQ ID NO: 271 - DNA, 3755 bp, Alphatorquevirus sp.
cgggtgccggaggtgagtttacacaccgcagtcaaggggcaattcgggctcgggactggccgggctatgggcaaggctcttaaaaaagccatgtttctcggtcggccttacagaaagaaaagggcactgtcactgctacgcgtgcgagctccagaggcgaaaccacctgctatgagctggagacccccggtacacaaccccaatgggatcgagagaaacctgtgggaggcattctttcgcatgcatgcttcagcttgtggttgtggcgatcttgttagccatcttactgtactggctggtcggtatggtgctcctcctcgtcccccggcccccggggctcccagaccaccgctgaaccggcagctggcccttccggcgccccccgctgatcctcagcaggccaacccgagatggcctggtggggacggtggagaagatggcgctggaggccccgccgctggcggcgccgtcgcagacgccgactaccaagaagacgagctcaacgccctgttcgacgccgtcgagcaagaagagtaaggaggaggcgatgggggaggcggaggtggagacgggggtacagacgcagacttagactgagacgcagacgcagacgaaagaaaataagactgactcagtggaacccagctaaagtcaggagatgtaatattaagggggtcctgcccatgatactgtgcggagcaggacgctcagggtttaactatggactgcacagcgacgactacaccatacagaaaccccttggccagaacccccacgggggcggcatgagcacagtaacgtttagcctacaggtgctatatgaccagtaccagaggtttatgaacaagtggtcgtattccaacgaccagctagacctagccagatactttggctgcaccttctggttttacagacacccagaagtagactttgtcgctcagtttgacaacgttcccccaatgaaaatggacgagaacacagcccctaacactcacccgtcattcctactacaaaacaaacacagggttaaaatccccagctttaaaaccaagccttttggcagaaaaaaagttagagttacagtggggccccccaaactgtttgaagacaagtggtacagccagcatgacttgtgtaaggtgcccctagtcagttggcggttaaccgcagctgacttcaggtttccgttctgctcaccacaaactgacaacccttgctacaccttccaggtattgcatgaagagtattacccagtaataggcacttctgctttagaacaaggaacacattacaatttatcagccataaacaaattagagaactttttatatggcaaatgtacccactatcaaacatttgccacagacacaagactaaaccctcaaagacccataacaagcgacaagcaacaaacatataatccaagcggagacactgaaagcattacatggtcactaactgattttaataattttaaaaagcacacagacagcaactatggctactgcacctactgccctactgatgacttaattaccaaaattaaaaaatacagagacaaaagattccaatggctaactgaaataccacaaacaaacacctgccacataaatgccacgtacgctcgaggaaaaattaaagagtgggaatatcacctaggatggtactcaaatatatttataggcaacctcagacacaacctggcattccgaacagcatacatagacattacctacaatcctataacagacaaaggagaaggcaacatagtgtggtttcaatatgccaccaaacccaccacacagtacgtagagtcacaggcaaaatgcactatcacaaacatacccctatatgctgctttttatggctacgaagactatatacaaagaacactaggcccctatcaagatgtagaaaccctaggcataatatgtgttaaatgtccctacacagatcccccactagttcacaaagacaagagtaagtcagactggggctatgtattctacgacgttcactttggcaacggaaagaccccggagggcctgggccaagtgcacccttactggatgcagagatggagaccgtatgtacagttccagaaagacactatgaacaagatagccagaaccggaccgttcagctacagagacgagacgccttccatcaccttgactgccgggtacaagtttcgttttaactgggggggcgactctatatttccacagattattaaaaacccctgcccagacagcggggtacgaccttcaaccagtagagagcgtcgctcagtacaagtcgttagcccgctcacaatggggccagagtacatattccaccggtgggactggcgacgggggttctttaatacaaaaactctcaaaagaatgcttgaaaaatcaattaatgatgaagaatatccaacaggctcaaaggtccctcgatggtttcccccactcaacaaccaagagcaagaaggcgtctcagatacagagacgacaacctcgcagtcctcgcaagaagaagccgctcaagaagccctccaagaagttcaagaggcgtcgctacagcagcacctcctccagcagtaccgagagcagcgaagaatcggaaagcaactccaactcgtcatgctccaactcaccaagacgcagagcaacctgcacataaatccccgtgtccttggccatgcataaataaagtgtacatgtttcccccagaaaaacccatgcccatacacgggtaccacgggtgggagacagagtatcaggcctgcaaggccttcgacaggccccctagaaactacctgtcagacaaacccatctatccctggcttccccgctctcaaccagaatttaaagtcagttttaagcttggttttcaataaacaaggccgtgggaatttcacttgttggtgtctacctcttaaggtcactaagcactccgagcgtcagcgaggagtgcgacccttccccctggtgcaacgccctcggcggccgcgcgctacgccttcggctgcgcgcggcacctcggacccccgctcgtgctgacacgctcgtgcgtgtcagaccacttcgggctcgcgggggtcgggaattttgctaaacagactccgagttgccattggacactgtagctgtgaatcagtaacgaaagtgagtggggccagactttgccataaggcctttatcttcctgccatttgtcagtgttgggggttgccataggcttcggactcggttttaggccttccggactacaaaaagcgccattttagtgacgtcacggcggccattttaagtaagcatggcgggcggtgacgtataagttcaaaggtcaccgcgcttccgtgtttacacaaaatggtggccaacttcttccgggtcaaaggttggcagctacgtcataagtcacgtgggagggctgcgtcacaaacacggaagtggctgtcccacgtgacttgtcacgttactgctacgtcacggccgccattttagttcacaaaatggcggacttccttcctcttttttaaaaataacgtccctgcggcggcgcgcgcgctgcgcgggacagccacttccgtgtttgtgacgcagccctcccacgtgacttccgcaggccaaccatgtgctacgtcgtgcatttcctgggcggagtgtacctcataatataagtagctgcacttccgaatggctgagttttccacgcccgtccgcggcaagatcgcgacggaggagcgatcgagcgtcccgaggg

SEQ ID NO: 272 - protein, 761 aa, Alphatorquevirus sp.
MAWWGRWRRWRWRPRRWRRRRRRRLPRRRAQRPVRRRRARRVRRRRWGRRRWRRGYRRRLRLRRRRRRKKIRLTQWNPAKVRRCNIKGVLPMILCGAGRSGFNYGLHSDDYTIQKPLGQNPHGGGMSTVTFSLQVLYDQYQRFMNKWSYSNDQLDLARYFGCTFWFYRHPEVDFVAQFDNVPPMKMDENTAPNTHPSFLLQNKHRVKIPSFKTKPFGRKKVRVTVGPPKLFEDKWYSQHDLCKVPLVSWRLTAADFRFPFCSPQTDNPCYTFQVLHEEYYPVIGTSALEQGTHYNLSAINKLENFLYGKCTHYQTFATDTRLNPQRPITSDKQQTYNPSGDTESITWSLTDFNNFKKHTDSNYGYCTYCPTDDLITKIKKYRDKRFQWLTEIPQTNTCHINATYARGKIKEWEYHLGWYSNIFIGNLRHNLAFRTAYIDITYNPITDKGEGNIVWFQYATKPTTQYVESQAKCTITNIPLYAAFYGYEDYIQRTLGPYQDVETLGIICVKCPYTDPPLVHKDKSKSDWGYVFYDVHFGNGKTPEGLGQVHPYWMQRWRPYVQFQKDTMNKIARTGPFSYRDETPSITLTAGYKFRFNWGGDSIFPQIIKNPCPDSGVRPSTSRERRSVQVVSPLTMGPEYIFHRWDWRRGFFNTKTLKRMLEKSINDEEYPTGSKVPRWFPPLNNQEQEGVSDTETTTSQSSQEEAAQEALQEVQEASLQQHLLQQYREQRRIGKQLQLVMLQLTKTQSNLHINPRVLGHA

SEQ ID NO: 273 - protein, 156 aa, Alphatorquevirus sp.
MGKALKKAMFLGRPYRKKRALSLLRVRAPEAKPPAMSWRPPVHNPNGIERNLWEAFFRMHASACGCGDLVSHLTVLAGRYGAPPRPPAPGAPRPPLNRQLALPAPPADPQQANPRWPGGDGGEDGAGGPAAGGAVADADYQEDELNALFDAVEQEE

SEQ ID NO: 274 - protein, 147 aa, Alphatorquevirus sp.
MVSPTQQPRARRRLRYRDDNLAVLARRSRSRSPPRSSRGVATAAPPPAVPRAAKNRKATPTRHAPTHQDAEQPAHKSPCPWPCINKVYMFPPEKPMPIHGYHGWETEYQACKAFDRPPRNYLSDKPIYPWLPRSQPEFKVSFKLGFQ

SEQ ID NO: 275 - DNA, 3751 bp, Alphatorquevirus sp.
cgggagccgaaggtgagtttacacaccgcagtctaggggcaattcgggcacgggtctggccgggctatgggcaagattcttaaaaaatttcccacctctgttgttcgccaggacaccaagacatgccgtggtctccgccgagagctaacattagccagagagaggacctgtggatccagtcagttctttactcgcatgatactttttgcggctgtactgacatttctgggcatcttactagcctcctggcttgcatacaaccagctccacctcgagaccctccaccccgtctcgtccggaggctgccggcactgccagcggctccggaacccggtgagcagccacggcctggtggagatacagaagaagaccctggaaacgctggagaaggcgccggtggggcctaccgagaagaagacttagaagaacttttcgccgccgccgaggaagacgatatgtgagtagagggcggcgccgccgatacaggcgcagacggagacgggggcgacgcagaaagggacgcagacgcaggcacagaaaaacccttatcctaagacaatggcagccagacgttgtaaaaagatgcttcatcactggatggctgcccctgatcatctgtggggctggacatactcaattcaactttattacccacatggacgatattcccccaagaaatgcctcctatggaggcaatttcaccaacctaacctttaacctagcctgtttctatgatgaatttatgcaccacagaaacagatggtcagcctcaaaccacgacctagaactagtaaggtacataaaaaccagcataaaactatacagacacgagtcagtagactatgtagtgtcctacaccaccacaggccccttcgagactaatgaaatgtcttacatgctcactcaccctctggccatgcttctcagcaaaaaacacgtagttgtgcccagtttaaaaacaaaggcacatggcagaaagtacaaaagactaactatcaagccccccaaacttatgacaaacaagtggtactttgccaaagacttctgcaacataggcctgttccaaatgtgggccacgggcctagaactaagaaacccctggctcagatcaggcactaacagtccagtcataggattctatgtccttaaaaaccaagtgtaccaaaacaggtacagcaacctcgccacagaaacacaaaaaagaaaagaagcatatgatgaactaaccaaaaaaaatggcacaaagtggtacaattggcagtacacctacactaaagttatgagacctatatactatgccgctgccaatgaacctacaaatacatcatttaaaaacaaaccatataactggaaaaactataaagacaatttctcggcagtacaacaaaaatggacaaacactgtaaaagacgcctacgaattagttgcacaggaatacagacaaatatataccaccacagtcacatatccacctccatgggaacccactgcacaatcagacataaacacaggcagacagtacctagaacatgactgtggtatttacagtccatactttttaacaccacaaatatacagcccagagtggcacacagcatggtcctacataagatataatcccctcacagacaaaggcataggcaacagagtctgcgtacaatactgcagcgaggcctcctctgaatacaacccagtaaaaagcaagtgcatgttacaggacatgccactgtggatgatgctgtatggatacgcagactatgtaattaagagcacaggcatacagtctgcctggacagacatgagagtagcaatcaggagcccctacacagaccccaagcttacaggtagctcagaaaacaccatgtttattccaataggcctagaattcatgaacggagacatgccagacaagaggccctacattccgttaaagtggtggtttaagtggtaccccatgattacacaccaaaaaaccgcacttgaggcaatagtttcctgcagccccttcatgcccagagatcaggaagctgccagttgggacataactgtaggttacaaagcaaccttcttatggggtggctcccccttacctccacagcccatcgacgacccctgccaaaaacccacacacgaacttcccgaccccgatagaaaccctcctagaatacaaatctcagacccgcagcacctcggaccggcgacgctcttccactcgtgggacctcagacgtggatacattagtacaaaaagtattaaaagagtgtcagaacacctcgacactaatgaatatttttcgacaggcgtcgaatccaaaaaaccccgcttcgatactccccaccacgggcagctatcaaaccaagaagaagacgccttacatattctcagacaactccagaaagagcaagaggaaagcagcaccgaagaagaacaagcactccaaaaggaagaagaacaaaaagaaaagctcctacagcaactccgagtccagcgacagcaccagcgagtcctcacacaggggatcaagcacctcatgggagacgtcctccgactcagacagggagtccactggaaccccatcctgtagtgctgccaccggagccaataccagacctacttttccccaatactggtaaaaaaaaaaagttttctcccttcgaatggcagtgcgagcaagaaatagcctgctggatgaagcgacctatgcgtttctttccctcagacaaccccttctacccgtggttaccccccaagcgagatatcccaaatatatgtaaagtaaacttcaaaataaaactcagtgattaacattcgaggccccgggaatttcacttagcggtgtctacctctaaaagtcaccaagcactccgagcgcaagcgaggagtgcgacccccctgcccggtagcaacttcctcggggtccggcgctacgccttcggctgcgccggacgcctcggacccccccctcgacccgaatcgctcgcgcgattcggacctgcggcctcgggggggtcgggagctttactaaacagactccgagtcgctcttggactctgagggggcgtacagcaacgaaagtgagtggggccagacttcgccatagggcctttaacttccgggtgcgtaagggggtcgccattttagcttcggccgccattttagaccctcgcgggcctccgtagtcgcgtattagtgacgtcacaaacgccatcttgactgtgacgtcaaagtcacgtgggcagggcgtgcctaaacccggaagcatccctggtcacgtgacctgacgtcacggccgccatcttgtgcgtccgccattttgtgacttccttccgctttttcaaaaaaaaaagaggaagtatgacgtagcggcgggggggcggcgcgcttcgcgcgccgcccactagggggcgctttgcgcccccccccgcgcatgcgcggggcccccccctcgggggggctccgcccccccccggcccccccccgggttaaatccaccgcgcatgcgcggccacgccccagccgccatttcccccccccgggttaaatccaccgcgcatgcgcggccacgccccagccgccattttctgcagcccgccaaaatattttcaaacagaccaatccagtactactacgtacacttcctggggtgtgttctgccactaaatataaccaacagcggtgacgaatggtagagttttccacgcccgtccgcggcgaggacgcgagcgcagcgagcggccgagcgacccgtggg

SEQ ID NO: 276 - protein, 660 aa, Alphatorquevirus sp.; identical to SEQ ID NO: 235

SEQ ID NO: 277 - DNA, 3751 bp, Alphatorquevirus sp.
cgggtgccggaggtgagtttacacaccgaagtcaaggggcaattcgggctcaggactggccgggctttgggcaaggctcttaaaaatgcacttttctcgaataagcagaaagaaaaggaaagtgctactgctttgcgtgccaacagctaagaaaaaaccaactgctatgagcttctggaggcctccggtgcacaatgtcacggggatccaacgcctgtggtacgagtcctttcaccgtggccatgcttctttttgtggttgtggggatcctatacttcacattactgcacttgctgagacatatggccatccaacaggcccgagaccttctgggccaccagcagtagaccctaaccccaacatccgtagagccaggcctgccccggccgctccggagcccccacaggttgatcccagaccggccctgacatggcatggggatggtggaagcgacggaggcgctggtggttccggaagcggtggacccgtggcagacttcgcagacgatggcctagaccagctcgtcgccgccctagacgacgaagagtaaggaggcgcagacggtggaggagggggagacgaaaagcaaggacttacagacgcaggagacgctttagacgtaggagacgaaaagcaaaacttataataaaactgtggcaacctgcagttattaaaagatgcagaataaagggctacataccactgattataagtgggaacggcacctttgccacaaactttaccagtcacataaatgacagaataatgaaaggccccttcgggggaggacacagcactatgaggttcagcctctacattttgtttgaggagcacctcagacacatgaacttctggaccagaagcaacgataacctagagctaaccagatacttgggagcttcagtaaaaatatacagacacccagaccaagactttatagtaatatacaacagaagaacccctctaggaggcaacatctacacagcaccctctctacacccaggcaatgccattctagcaaaacacaaaatattagtaccaagtttacagacaagaccaaagggtaaaaaagcaattagactaagaatagcaccccccacactctttacagacaagtggtactttcaaaaggacatagccgacctcacccttttcaacatcatggcagttgaggctgacttgcggtttccgttctgctcaccacaaactgacaacacttgcgtcagcttccaggtccttagttccgtttacaacaactacctcagtattaatgcctttaataatgacaatacagacagcaatttaaaagcatttttaaggaaagcatttccaacaacaggcacaaaaggaacaagtttaaatgcactaaatacatttagaacagaaggatgcataagtcacccacaactaaagaaaccaaccgcacaagcaaacaaaccatcagacttagagtactttgcacctttagatgccctctggggagaccccatatactataatgagcttaatgaaaagaaaagcatagaaaacattattgataaaatactaataacaaacatgactacataccatgcgaaacttaaagactttccactttcataccaaggaaacaaggccttttgccacttaacaggcatatatagcccaccatacctcaaccaaggcagaatagctccagaaatatttggactgtacacagaaataatttacaacccttacacagacaaaggaactggaaacaaagtatggatggacccactgactaaagacaacaacatatataaagaaggacagagtaaatgcctactgactgacatgcccctatggactttactttttggatatacagactggtgtaaaaaggacactaacaactgggacttaccactaaactacagactagtactaatatgcccttatacctttccaaagttgtacaatgaaaacgtaaaagactatgggtacattccgtactcctacaaattcggggcaggtcagatgccagacggcagtaactacataccctttcaatttagagcaaagtggtaccccacagtaatacaccagcaacaggtaatggaggacataagcaggagcgggccctttgcacctaaggtagagaaaccaagcactcagctagtcatgaagtactcttttaactttaactggggtggtaaccctatcattgaacagattgttaaagaccccagcttccagcccacctatgaaatacccggtaccggtaacctccctagaagaatacaagtcatcgacccgcgggtcctgggaccgcactactcgttccgctcgtgggacatgcgcagacacacatttagcagagcaagtattaagagagtgtcagaacaacaagaaacttctgaccttgtattctcaggcccaaaaaagcctcgggtcgacatcccaaaacaagaaacccaagaagaaagctcacattcactccaaagagaatcgagaccgtgggagaccgaggaagaaagcgagacagaagccctctcgcaagagagccaagaggtccccttccaacagcagttgcagcagcagtaccaagagcagctcaagctcagacagggaatcaaagtcctcttcgagcagctcataaggacccaacaaggggtccatgtaaacccatgcctacagtaggtcccaggcagtggctgtttccagagagaaagccagccccacctcctaccagtggagactgggccatggagtttctcgcagcaaaaatatttgacaggccagttagaggcaaccttaaagataccccttactacccatatgttaaaaaccaatacaatgtgtactttgaccttaaatttcaataaagagcagcttcaaacttgcaaggccgtgggaatttcactggtcggtgtctacctctaaaggtcactaagcactccgagcgtaagcgaggagtgcgaccctcccccctgggacaacttcttcggagtccggcgctacgccttcggctgcgccggacacctcagaccccccctccacccgaaacgcttgcgcgtttcggaccttcggcgtcgggggggtcgggaactttattaaacagactccgaggtgctcttggacactgagggggtgaacagcaacgaaagtgagtggggccagacttcgccataaggcctttatcttcttgccatttgtcagtgtccggggtcgccataggcttcggactggtttttaggccttccggactacaaaaaccgccattttagtgacgtcacggccgccatattaagtagttgaggcggacggtggcgtgagttcaaaggtcaccatcagccacacctactcaaaatggtgggcaatttcttccgggttaaaggttacggccgccatatttaatcacgtgacatgtgacgtcacggccgccattttgcagcacaacatggccgacttccttcctctttttcaaaaaaaaagcggaagtgccgccgcggcggcggggggcggcgcgctgcgcgcgccgcccagtagggggcgccatgcgcccccccgcatgcgcggggcccccccccgcgggggggctctgccccccggccccccccgtgctacgtcactaacccacgtgtctttcacagaccaatcgcagtctatgtcgtgcacttcctgggcatggtctacataatcatataaacgcttgcacttccgaatggctgagtttttgctgcccgtccgcggagaggagccacggcaggggatccgaacgtcctgaggg

SEQ ID NO: 278 - protein, 743 aa, Alphatorquevirus sp.
MAWGWWKRRRRWWFRKRWTRGRLRRRWPRPARRRPRRRRVRRRRRWRRGRRKARTYRRRRRFRRRRRKAKLIIKLWQPAVIKRCRIKGYIPLIISGNGTFATNFTSHINDRIMKGPFGGGHSTMRFSLYILFEEHLRHMNFWTRSNDNLELTRYLGASVKIYRHPDQDFIVIYNRRTPLGGNIYTAPSLHPGNAILAKHKILVPSLQTRPKGKKAIRLRIAPPTLFTDKWYFQKDIADLTLFNIMAVEADLRFPFCSPQTDNTCVSFQVLSSVYNNYLSINAFNNDNTDSNLKAFLRKAFPTTGTKGTSLNALNTFRTEGCISHPQLKKPTAQANKPSDLEYFAPLDALWGDPIYYNELNEKKSIENIIDKILITNMTTYHAKLKDFPLSYQGNKAFCHLTGIYSPPYLNQGRIAPEIFGLYTEIIYNPYTDKGTGNKVWMDPLTKDNNIYKEGQSKCLLTDMPLWTLLFGYTDWCKKDTNNWDLPLNYRLVLICPYTFPKLYNENVKDYGYIPYSYKFGAGQMPDGSNYIPFQFRAKWYPTVIHQQQVMEDISRSGPFAPKVEKPSTQLVMKYSFNFNWGGNPIIEQIVKDPSFQPTYEIPGTGNLPRRIQVIDPRVLGPHYSFRSWDMRRHTFSRASIKRVSEQQETSDLVFSGPKKPRVDIPKQETQEESSHSLQRESRPWETEEESETEALSQESQEVPFQQQLQQQYQEQLKLRQGIKVLFEQLIRTQQGVHVNPCLQ

SEQ ID NO: 279 - protein, 164 aa, Alphatorquevirus sp.
LAGLWARLLKMHFSRISRKKRKVLLLCVPTAKKKPTAMSFWRPPVHNVTGIQRLWYESFHRGHASFCGCGDPILHITALAETYGHPTGPRPSGPPAVDPNPNIRRARPAPAAPEPPQVDPRPALTWHGDGGSDGGAGGSGSGGPVADFADDGLDQLVAALDDEE

SEQ ID NO: 280 - protein, 65 aa, Alphatorquevirus sp.
MPTVGPRQWLFPERKPAPPPTSGDWAMEFLAAKIFDRPVRGNLKDTPYYPYVKNQYNVYFDLKFQ

SEQ ID NO: 281 - DNA, 3748 bp, Alphatorquevirus sp.
cgggtgccggaggtgagtttacacaccgcagtcaaggggcaattcgggctcgggactggccgggctatgggcaaggctcttaaagcgtacgttcctcgctatgtttctcggcagagtgtggaggaaacagaaaaggaaagtgcttctgctggctgtgcgagctacagagaaaacatcttccatgagtatctggcgtcccccccttgggaatgtcccctacagagagagaaattggcttcaggccgtcgaaggatcccacagttctttttgtggctgtggtgattttattcttcatattactaatttggctgcacgctttgctattcaggggcccccgccggagggtggtccgcctcggccgaggccgccgctcctgagagcgctgccggcccccgaggtccgcagggagacgcgcacagagaacccgggcgcctccggtgagccatggcctggcgatggtggtggcagagacgatggcgccgccgcccgtggccccgcagacggtggagacgcctacgacgccggagacctcgacgacctgttcgccgccgtcgaagaagagcaacagtaaggaggcggaggtggaggggcagacgtgggcgacgcacatacacccgacgcgcagtcagacgcagacgcagacccagaaaaagacttatactcactcagtggagcccccagacagtaagaaactgctccatcaggggtatagtgcccatggtaatatgcggacacacaaaagggggtagaaactatgccatccacagcgaagacttcactacacagatacaacccttcgggggcagcttcagcacgaccacctggtcgctaaaagtactctgggacgaacaccaaaaatttcagaacaggtggtcctatccaaacacacagctagaccttgccaggtacaagggagtcaccttctggttctacagagaccagaaaacagactacatagtacaatggagcagaaatcctccctttaagctaaacaaatacagcagctccatgtaccatcctggaatgatgatgcaggcaaaaaaaaaactagtagtgcctagttttcaaactagacctaaaggcaaaaagagatacagagtaagaataagaccccccaacatgtttgctgacaagtggtacactcaagaggacctgtgtccggtacctcttgtgcaaattgtggtttctgcggccagcctgctacatccgttctgcccaccacaaacgaacaacccttgcatcaccttccaggttttgaaagacatctatgacaattgcataggagttaactctgcccaagtaacagcatatacaacacttcaagaaaaattatacactaactgcacatactttgaaacaacacaagtactagcccaactatctccacactttcaacctgcgttaaaagccaccaatacaacacttaacataaaccctaccacaacaacactaggaaactatgaaccaaagctaaaaaccacaggtagcttttacacaggtaacaatccagtttttggcatgtgtaaataccaaccaactaaggaaatactacagcacgccaacaagtggttctgggataatctaatgcacaaaaatgacttacattccagctatggcaaagccaacctaccctatatggagtaccacacaggcatatacagctccatatttctaagtccccaaaggtcactagaattcccagcagcataccaagacgtcacctacaaccccaactgtgacagagcagcaggtaacaaagtctggtttcagtacagtacaaaaatgaacacagacttcgatgccactcaatgcaaatgcgtgttagaaaacattcccctgtgggcggccttccatggctacgcagactttatagagcaagaactgtccataagctcagaaatacgcaactttggcatagtttgctttcagtgcccctacactttccccccttgctttaacaaacaaaaaccagacaaaggctacgtgttctatgacaccacctttggtaatggaaagatgccagatggatcagggcacatacccatctactggcaacagaggtggtggatcagactagccttccaggtacaagtcatgcacgactttgtgctctgcggtccctttagctacaaagatgacctagccaacaccacacttacagccaggtacaagttcagattcaaatggggcggtaatatcatccccgaacagattatcaagaacccgtgtcagagagagcagtccctcgcctcctacccccatagagaacgtcgcgacctacaagttgttgacccatcaaccatgggcccgatctacaccttccacacatgggactggcgacgggggctttttggtaaagatgctatccagagagtgtcacaaaaaccgggagatgctttccgctttacaaaccctttcaagagacccagatatcttcccccgacagagggagaagactaccgacaagaagaagacttcgctttccaggaaaaaagacggcgcacatccacagaagaagtccaggacccggagagccccccgcaaagcgcgccgctcctacagcagcagcagcagcagcgagagctctcagtccagctcgcagagcagcagcgactcggagtccaactccgatacatcctccaagaagtcctcaaaacgcaagcgggtctccacctaaaccccctattattaggcccgccacaaacaaggtctatctctttgagccccccagaggcctactcccaataatgggcagagaggcatgggaggacgaatacacctcctgcaagtactgggatcgccctcccagaaccaaccacctagacatgcccacctatccctggatgcccacaaacttcaaagtcagcttcaaacttggatttaaaccctaaataaaaatttcaaggccgtacactgtccacttgtcggtgtctacctctataagtcactaagcactccgagcgtagcgaggagtgcgaccctagggggtgggtgcaacgccctcggcggccgcgcgctacgccttcggctgcgcgcggcacctcggacccccgctcgtgctgacacgctcgcgcgtgtcagaccacttcgggctcgcgggggtcggaaattttgctaaacagactccgagttgctcttggacactgtagctgtgaatcagtaacgaaagtgagtggggccagacttcgccataaggcctttatcttcttgccatttgtccgtgtcgggggtcgccataggcttcgggctcggttttaggccttccggactaccaaaatggcgcattccgtgacgtcacggccgccattttgagtaaggcggaacaggctgtcaccccgtgtcaaaggtcaggggtcagccttccgctttgcacaaaatggaggacaatatcttccgggtcagaggtcgctaccgcgtcataagtcacgtggggacggctgctgtgaacccggaagtagctgacccacgtgacttgtcacgtgactagcacgtcacggccgccattttgtatcacaaaatggtcgacttccttcctcttttttgaaaataacggcccggcggcggcgcgcgcgcttcgcgcggatcgtcactaaccacgtgactcctctcgcccaatcagagtctatgtcgtccatttcctgggcatggtctacatcctgatataatacgctgcacttccgaatggctgagttttccacgcccgtccgcggcgagatcgcgacgaaggagcgatcgagcgtcccgaggg

SEQ ID NO: 282 - protein, 767 aa, Alphatorquevirus sp.
MAWRWWWQRRWRRRPWPRRRWRRLRRRRPRRPVRRRRRRATVRRRRWRGRRGRRTYTRRAVRRRRRPRKRLILTQWSPQTVRNCSIRGIVPMVICGHTKGGRNYAIHSEDFTTQIQPFGGSFSTTTWSLKVLWDEHQKFQNRWSYPNTQLDLARYKGVTFWFYRDQKTDYIVQWSRNPPFKLNKYSSSMYHPGMMMQAKKKLVVPSFQTRPKGKKRYRVRIRPPNMFADKWYTQEDLCPVPLVQIVVSAASLLHPFCPPQTNNPCITFQVLKDIYDNCIGVNSAQVTAYTTLQEKLYTNCTYFETTQVLAQLSPHFQPALKATNTTLNINPTTTTLGNYEPKLKTTGSFYTGNNPVFGMCKYQPTKEILQHANKWFWDNLMHKNDLHSSYGKANLPYMEYHTGIYSSIFLSPQRSLEFPAAYQDVTYNPNCDRAAGNKVWFQYSTKMNTDFDATQCKCVLENIPLWAAFHGYADFIEQELSISSEIRNFGIVCFQCPYTFPPCFNKQKPDKGYVFYDTTFGNGKMPDGSGHIPIYWQQRWWIRLAFQVQVMHDFVLCGPFSYKDDLANTTLTARYKFRFKWGGNIIPEQIIKNPCQREQSLASYPHRERRDLQVVDPSTMGPIYTFHTWDWRRGLFGKDAIQRVSQKPGDAFRFTNPFKRPRYLPPTEGEDYRQEEDFAFQEKRRRTSTEEVQDPESPPQSAPLLQQQQQQRELSVQLAEQQRLGVQLRYILQEVLKTQAGLHLNPLLLGPPQTRSISLSPPEAYSQ

SEQ ID NO: 283 - protein, 171 aa, Alphatorquevirus sp.
LAGLWARLLKRTFLAMFLGRVWRKQKRKVLLLAVRATEKTSSMSIWRPPLGNVPYRERNWLQAVEGSHSSFCGCGDFILHITNLAARFAIQGPPPEGGPPRPRPPLLRALPAPEVRRETRTENPGASGEPWPGDGGGRDDGAAARGPADGGDAYDAGDLDDLFAAVEEEQQ

SEQ ID NO: 284 - DNA, 3741 bp, Alphatorquevirus sp.
cgggtgccggaggtgagtttacacaccggagtcaaggggcaattcgggctcgggactggccgggctatgggcaaggctcttaaaaatgcacttttctaggtgcagtagaaagaaaaggacactgtcactgttaccactgcaccattcacagaaaactaggccatctgtgaaaggtatgtggagacccccgactcgaaatgcatttactattcaacgtgactggttctacagttgctttcactcccacgcttctatgtgtggctgtgctgattttattagtcatttcaatcatatcgctgctatgctcggccgtccggaagaccagaaccctcctccgccacccggggctctgagacccctacccgctctcccggcctcctccgagacacccggtgatcgagcaccatggcctatgggtggtggtggaggcgacggaggcgcccatggaggaggaggagatggcgccgctggagacgtcgccggagaccccgcagacgccgacctcgtcgccgctatcgacgccgcagaacagtaaggagacgcggcagggggaggtggactaggagatatagacgatggcgccgcaagggcaaacgaagaggcaaaaaaaagattatcataaaacagtggcagcccaactacactcgcagatgcaacatagtgggctacatgcctctcctaatctgtggggaaaatactgttgctacaaactatgccactcactcagacgacagctactaccccggaccctttggggggggaatgactacagacaaatttactctaagaatactgtatgatgagtacaagaggtttatgaactactggaccgcctcaaacgaggacctagacctctgtagatacctaggagctactctatatgtgtttagacacccagaagtagactttatactaattataaacacctcccctccatttctagacacagaaataacagggcccagcatacacccaggcatgatggccctcaacaaaagagccaggtggatacctagcttaaaaaacagaccaggcagaaagcactatgtaaagattaaagtaggagccccccgaatgttcacagataagtggtacccccagacagacctctgtgacatgacactcctaacgatttttgccagtgcggcggatatgcaatatccgttcggctcaccactaactgacactatagttgtgtcattccaagttctgcaatccatgtacaacgactgcctaagtgtacttcctgaaaattttacagagtcaacaggcaaaggcgcccagctatataaaaaaataattaatcatttaccctactacaacaccacacaaacacaagcacaatttaaaagatttgtagaaaacagtgcagcaaccaacggtgacaatatatgggcaaactacataaatactagtaagttctcaaaaattgaagaatcaaagaatgatacaaacataggaggcccttacacctgttattcagactcatggtacaaaggcacagtatacaatgacaaaattaaacacatacctgaaaaagcaagtaaattatactacgaacaaaccaaaaaacttattggcattacatttacaggatccacacacatactacactactgtggaggcctatattcttccgtatggctatcagcaggtagatcctactttgaaaccaaaggcccatacacagacatcacttacaaccccttttcagacagaggagagggtaatatgctatggatagactggctaactaaagatgactcagcttactcaaaaacaagtagcaagtgcctcatagaacacttgcccctgtgggccgcagtatacggatacaaagaatactgcagcaaagtcacaggagacacaaacatagaacacaactgtagatgtgttataagaagcccctacacagtaccacagctattagaccacaacaatcccctcagaggttacgtgccttatagcataaactttggaaatggtaaaatgccaggcggtagcagcctagtacccattagaatgagagccaagtggtaccccactcttttccaccaaaaagaagtactagaggccatagcgcaggcgggcccctttgcataccactcagacattaaaaaagtgtccctgggcataaagtacagatttaagtgggtatggggtggcaaccccgtgtcccaacaggttgttaaaaacccctgcaagaccacccaaggttcctcgggcaatagagtgcctcgatcaatacaagtcgttgacccgcggtacaacgcgccagagctcaccatacacgcgtgggacttcagacatgggttctttggcagaaaagctattaagagaatgcaagaacaaccaatacctcatgacactttttcagcagggttcaaacgcagtcgccgagacacagaagcactccaatccagtcaagaagagcaacaaaaagaaaacttacttttcccagtccagcagctcaagcgagtccccccgtgggagacctcgcaagagagccaaagcgaggaagaaaactcgcaaaaacaggagaccctctcccagcaactcagagaccagctgcacaagcagcggctcatgggagagcaactccgatcgctcctctaccaaatgcagagggtccaacaaaatcaacacataaaccctatgttattgccaaagggtctggcattaacttctatttctcacaatgtaatatagatatgtttggtgaccccaaaccctacaagccctcctccaatgactggaaggaggagtacgaagccgcaaagtactgggacagaccccccagacacgacctgagaagcacccccttctacccctgggcccccacccccaaaccatacaatgtcaactttgccctcaactacaaataaacggtggccgtgggagtttcacttgtcggtgtctacctcttaaggtcactaagcactccgagcgtaagcgaggagtgcgaccctctaccaaggggcaactccctcgaagtccggcgctacgcgcttcgcgctgcgccggacatctcggaccccccctcgacccgaatcgcttgcgcgattcggacctgcggcctcgggggggtcgggggctttattaaacggactccgaggtgccattggacactgagggggtgaacagcaacgaaagtgagtggggccagacttcgccatagggcctttatcttcttgccatttgtccgcgaccgggggtcgctcctaggcgcggaccccgtttcggggtccttccgggttcgtcggcgccgttccagtgacgtcacgggcgccatcttaagtggctgtcgccaaggattgacgtcacagttcaaaggtcatcctcggcggtaaccgcaaagatggcggtcaatctcttccgggtcaaaggtcgtacatacgtcataagtcacatgacaagggtccacttaaacacggaagtaggccccgacatgtgactcgtcacgtgtgtacacgtcacggccgccattttgttttacaaaatggccgacttccttcctcttttttaaaaaaaggcgcgaaaaaaccgtcggcgggggggccgcgcgcccgttgtgctacgtcactaaccacgtgttccccgcaggccaaccacagtctatgtcgtgcacttcctgggcatggtctacgtgataatataagtaacagcacttccgaatggctgagttttccacgcccgtccgcagagagggagccacggaggggatcccgaacgtcccgaggg

SEQ ID NO: 285 - protein, 767 aa, Alphatorquevirus sp.
MAYGWWWRRRRRPWRRRRWRRWRRRRRPRRRRPRRRYRRRRTVRRRGRGRWTRRYRRWRRKGKRRGKKKIIIKQWQPNYTRRCNIVGYMPLLICGENTVATNYATHSDDSYYPGPFGGGMTTDKFTLRILYDEYKRFMNYWTASNEDLDLCRYLGATLYVFRHPEVDFILIINTSPPFLDTEITGPSIHPGMMALNKRARWIPSLKNRPGRKHYVKIKVGAPRMFTDKWYPQTDLCDMTLLTIFASAADMQYPFGSPLTDTIVVSFQVLQSMYNDCLSVLPENFTESTGKGAQLYKKIINHLPYYNTTQTQAQFKRFVENSAATNGDNIWANYINTSKFSKIEESKNDTNIGGPYTCYSDSWYKGTVYNDKIKHIPEKASKLYYEQTKKLIGITFTGSTHILHYCGGLYSSVWLSAGRSYFETKGPYTDITYNPFSDRGEGNMLWIDWLTKDDSAYSKTSSKCLIEHLPLWAAVYGYKEYCSKVTGDTNIEHNCRCVIRSPYTVPQLLDHNNPLRGYVPYSINFGNGKMPGGSSLVPIRMRAKWYPTLFHQKEVLEAIAQAGPFAYHSDIKKVSLGIKYRFKWVWGGNPVSQQVVKNPCKTTQGSSGNRVPRSIQVVDPRYNAPELTIHAWDFRHGFFGRKAIKRMQEQPIPHDTFSAGFKRSRRDTEALQSSQEEQQKENLLFPVQQLKRVPPWETSQESQSEEENSQKQETLSQQLRDQLHKQRLMGEQLRSLLYQMQRVQQNQHINPMLLPKGLALTSISHNVI

SEQ ID NO: 286 - protein, 159 aa, Alphatorquevirus sp.
LAGLWARLLKMHFSRCSRKKRTLSLLPLHHSQKTRPSVKGMWRPPTRNAFTIQRDWFYSCFHSHASMCGCADFISHFNHIAAMLGRPEDQNPPPPPGALRPLPALPASSETPGDRAPWPMGGGGGDGGAHGGGGDGAAGDVAGDPADADLVAAIDAAEQ

SEQ ID NO: 287 - protein, 57 aa, Alphatorquevirus sp.
MFGDPKPYKPSSNDWKEEYEAAKYWDRPPRHDLRSTPFYPWAPTPKPYNVNFALNYK

SEQ ID NO: 288 - DNA, 3739 bp, Gammatorquevirus sp.
cgggagcccgaggtgagtgaaaccaccgaggtctaggggcaattcgggctagggcagtctagcggaacgggcaagaaacttaaatagtatttttttttttagaatgaacaacattactgctgcagactttcacaaacctacaacctacaatgttgataccttaaatcaaatatggatgtctcagataagtgattcccatgacatttggtgcaactgctcaggtccttttgctcatttgcttgcttctatttttcctcctggtcataaagaccgtgatctcacagttaatcaaattattaaaagagactacaaagcatcatgccattctggtgggccagaagaaagaaaccctggtacaacaactggattcgctaccggcgcaaatataaaagaagaagatggcccagaagacgacgtagaaggcctacttttcgccgccgccgccgccgccgcagaagaaaaagacaggtaagaagaaaaagacaaaaaataatagttaaacaatggcaaccagaatctattgttaaatgtaaaataaaaggactaggatgtttagttgctggggctcaaggtagacaagctttttgctatacaaacagtaaatatgattatccacaacctaaagctccaggcggcggtggctttggagctgaactgttttctctacaatatttatatgatgaatggatagctagaagaaatatatggactaaaagcaatgactataaagaccttgttagatttacaggagcaacattttacttatacaaacatcctacaacagactttgtttttaactacaataatcaaccaccttttttactagaaaaagatttttacaatgacttacacccacaatcactgttacttgcaaaacatcacagagttatacccagcagagaaagaaaaccactaggaaaaccatatgtaaaagttaaaattaaaccacctaaacaaatgctcactaagtggtttttccaacaagactttgccacacaaggcttattttcaatacatgcagcagctgcaaacatgcaatgggcatactataatccagaccaacagagcagatgccttacactttactcattaaatactaaattttttgctaacactgactgggcagccacacatacaggcacacagttatacctgccttacaaccagtggccacacacagcaggactaaccttctggacaatagataacaaaggtaataaacatccacataaaattaaccctcaaaactatctccaaagtgttaattacaatgaaggctttttttctcaatatgtattgcaagctcagaaaattactaaggccacagaaaatacacctaccgagtatgacagatatccaccagctatggccaccttacctatagctgcttttagatataatccagaagaagatacaggacaaggaaatgtagtttggctaaccagtactctttcaaacacacactgggacagaccacaactatcagacttagtaatagtaggcaaacctctttggatggccttctatggctttgaaagctttatacaaaaaactaagcatgacaaaggttggctactatcaggattttatgtatgtaaatgcccatacttaaaaactttatcaacaacaactcaacaaacatttgcctttatagacctcgattttatacaaggaaaactaccctatggagaaacagttacagaccaaaaaaaagctctatggtaccctaatgtagaaaaccaagttaatactattgcatccctagtacagtgtggaccctatatacctaaatatgcctatcaagatcaaagtacctgggaactaacctacaaatatatcttttattttaagtggggaggcccatatgtgtcagaccagcctgttcaaaatcccaaaacacaaggaaagtaccccgtacccgatacagtcacacaagcaatacaaattagcaacccgctcaaacaaacctgtaaagcaatgcttagagactgggactacagaaggggtattgttacaacaacagctcttaaaagaatgtcagaacacctcccaactgattcatctgtccaatctgatgacacagaaactccaaaaaaaaagaaaaaaacaacagcagaaataccctactaccaggaaaagacagaagagatgcagagctgtctcctctcgctcttcgaagaaagtacatgccaagaaccagaaaacctccagcagctcatcctccaccagcagcagcagcagcaaaagctcaagtcaaacatcctcaagctcctaatggacctaaaacaccaacaaagaattctacaacatcacacaggcatagaataactgaatttaaacctggttttgaacaagaaacagaaaaacagttagcagaagcatttaaaagacccataagaaaatttaaagaagaccccccattttatccctggttacccattacccccattgtttgctttaaccttaattataaatgctaggccgacactgttcacttagcggtgtttgtttatataagtttacaccccaaaaaaattgtaaaataaaaaaaaaaaaaaaaaaaaataaaaaattgcaaaaattcggcgctcgcgcgcgctgcgcgcgcgcgagcgccgtcacgcgccggcgctcgcgcgccgcgcgtatgtgctaacacaccacgcacctagattggggtgcgcgcgctagcgcgcgcaccccaatgcgccccgccctcgttccgacccgcttgcgtgggtcggaccacttcgggctcgggggggcgcgcctgcggcgcttatttactaaacagactccgagtcgccatttgcccccccccctaagctccgcccccctcatgaatattcataaaggaaaccacaaaattagaattgccgaccacaaactgccatatgctaattagttccccttttacacagtaaaaaggggaagtggggggggcatagcccccccacaccccccgcgggggggggcaaacccccccccgcaccccccctacgtcacaaaccacgcccccgccgccatcttgggtgcggcagggcggagactaaaatggcggcaaccaatcactttatactttcactttccaattaaaacatgccacgtcacactaacagggcgaagactaaaaactatatattaaactactgtgacgaatggctgagtttaccccgctagacggtgcagggaccggatcgagcgcagcgaggaggtccccggctgcccttgggcgggagcccgaggtgagtgaaaccaccgaggtctaggggcaattcgggctagggcagtctagcggaacgggcaagaaacttaaagcccccccccctaagctccgcccccctcatgaatattcataaaggaaaccacaaaattagaattgccgaccacaaactgccatatgctaattagttccccttttacacagtaaaaaggggaagtggggggggcatagcccccccacaccccccgcgggggggggcaaacccccccccgcaccccccctacgtcacaaaccacgcccccgccgccatcttgggtgcggcagggcggagactaaaatggcggcaaccaatcactttatactttcactttccaattaaaacatgccacgtcacactaacagggcgaagactaaaaactatatattaaactactgtgacgaatggctgagtttaccccgctagacggtgcagggaccggatcgagcgcagcgaggaggtccccggctgcccttggg

SEQ ID NO: 289 - protein, 669 aa, Gammatorquevirus sp.
MPFWWARRKKPWYNNWIRYRRKYKRRRWPRRRRRRPTFRRRRRRRRRKRQVRRKRQKIIVKQWQPESIVKCKIKGLGCLVAGAQGRQAFCYTNSKYDYPQPKAPGGGGFGAELFSLQYLYDEWIARRNIWTKSNDYKDLVRFTGATFYLYKHPTTDFVFNYNNQPPFLLEKDFYNDLHPQSLLLAKHHRVIPSRERKPLGKPYVKVKIKPPKQMLTKWFFQQDFATQGLFSIHAAAANMQWAYYNPDQQSRCLTLYSLNTKFFANTDWAATHTGTQLYLPYNQWPHTAGLTFWTIDNKGNKHPHKINPQNYLQSVNYNEGFFSQYVLQAQKITKATENTPTEYDRYPPAMATLPIAAFRYNPEEDTGQGNVVWLTSTLSNTHWDRPQLSDLVIVGKPLWMAFYGFESFIQKTKHDKGWLLSGFYVCKCPYLKTLSTTTQQTFAFIDLDFIQGKLPYGETVTDQKKALWYPNVENQVNTIASLVQCGPYIPKYAYQDQSTWELTYKYIFYFKWGGPYVSDQPVQNPKTQGKYPVPDTVTQAIQISNPLKQTCKAMLRDWDYRRGIVTTTALKRMSEHLPTDSSVQSDDTETPKKKKKTTAEIPYYQEKTEEMQSCLLSLFEESTCQEPENLQQLILHQQQQQQKLKSNILKLLMDLKHQQRILQHHTGIE

SEQ ID NO: 290 - protein, 122 aa, Gammatorquevirus sp.
MNNITAADFHKPTTYNVDTLNQIWMSQISDSHDIWCNCSGPFAHLLASIFPPGHKDRDLTVNQIIKRDYKASCHSGGPEERNPGTTTGFATGANIKEEDGPEDDVEGLLFAAAAAAAEEKDR

SEQ ID NO: 291 - protein, 107 aa, Gammatorquevirus sp.
LSPLALRRKYMPRTRKPPAAHPPPAAAAAKAQVKHPQAPNGPKTPTKNSTTSHRHRITEFKPGFEQETEKQLAEAFKRPIRKFKEDPPFYPWLPITPIVCFNLNYKC

SEQ ID NO: 292 - DNA, 3736 bp, Alphatorquevirus sp.
cgggtgccggaggtgagtttacacaccgcagtcaaggggcaattcgggcacgggactggccgggctatgggcaagattcttaaaaaattcccccgatccctctgccgccaggacataaaaacatgccgtggagaccgccggtgcatagtgtccaggggcgagaggatcagtggttcgcgagcttttttcacggccacgcttcattttgcggctgcggtgactctgttgggcatcttaatagcattgctcatcgctttcctcacgccggtccaccaagaccccctccggggctagaccagcccaacccccctgagcaaggcccggccgggcccggagggccgcccgccatcttagccctgccggctccgcccgcggagcctgacgacccgcagccacgccgtggtggtggggacggtggcgccgccgctggcgccgcaggcgaccgtggagaccgagactacgacgaagaagagctagacgagcttttccgcgccgccgccgaagacgatttgtaagtaggagatggcgccggccttacaggcgcaggaggagacgcgggcgacgcagacgcagacgcagacgcagacataagccaaccctagtactcaggcagtggcaacccgacgttatcagacactgtaagataacaggatggatgcccctcattatctgtggaaaggggtccacccagttcaactacatcacccacgccgacgatatcacccccaggggagcctcctacgggggcaacttcacaaacatgactttctccctagaggccatatatgaacagtttctgtaccacagaaacaggtggtcggcctccaaccacgacctagaactctgcagatacaagggtaccaccctaaaactgtacagacacccagaagtagactacatagtcacctacagcaggacaggaccctttgagatcagccacatgacctacctcagcactcaccccctactaatgctgctaaacaaacaccacatagtggtgcccagtctaaagactaagcccaggggcagaaaggccataaaagtcagaataagacccccaaaactaatgaacaacaagtggtacttcaccagagacttctgtaacataggcctcttccagctctgggccacaggcttagaactcagaaacccctggctcagaatgagcaccctgagcccctgcataggcttcaatgtccttaaaaacagcatatacacaaacctcagcaacctgccacaacacaaacaggcgagacttgacattattgacaaaacacttcacccacaagacattacaggagcaaacaacaaaaagtggcagtacacatacaccaaactcatggcccctatctactattctgcaaacagggccagcacctatgactgggaaaactacagcaacgaaacaaactaccataacacatatctcaaatttcatcaaaaaagacaagagaaactaacaaaaatcaaaaaagagtggcagatgctctatccacaacaacctacttcactgccagactcctatgacctgttacaggagtatggcctttacagcccatactacctaaaccccacaagaataaacctagactggatgaccccctacacacacgtgaggtacaacccccttgtagacaagggctttggaaacagaatatacatccagtggtgctccgaggcagatgttagctacaacagaacaaagtccaagtgtctgttacaagacatgcccctgtttttcatggcctatggctacatagactgggcaataaaaaacacaggggtctcctctctagttagagacgccagaatatgcatcaggtgtccctacaccgagccacagctggtggggtccacagaagacataggctttgtacccatctcagagaccttcatgaggggcgacatgccggtacttgcaccatacataccgttgagctggttttgcaagtggtatcccaacatagctcaccagaaggaagtccttgaggcaatcatttcctgcagccccttcatgccccgtgaccaggacatgaacggttgggatatcacaatcggttacaaaatggacttcttatggggcggttcccctctcccctcacagccaatcgacgacccctgccagcagggaacccacccgattcccgaccccgataagcaccctcgcctcctacaagtctcgaacccgaaactactcggaccgaggacagtattccacaagtgggacatcagacgtgggcagtttagcaaaagaagtattaaaagagtgtcagaatactcaagcgatgatgaatctcttgcgccaggtctcccatcaaagcgaaacaagctcgactcggcgttcagaggagaaaatccagagcaaaaagagtgctattccctcctcaaagcactcgaggaagaagagaccccagaagaagaagaaccagcaccccaagaaaaagcccagaaagaggagctactccaccagctccagctccagagacgccaccagcgagtcctcagacgagggctcaagctcgtctttacagacatcctccgactccgccagggagtccactggaatcccgaactcacatagagcccccaccttacatcccagacctactttttcccaatactggtaaaaaaaaaaaattctctaccttcgactgggagacagaggccgagctagcggggtggatgcggcggcctatgcgcttctttccctcagacaccccttactacccgtggctaccccccgagcgagatatccccaaaatatgtaacataaacttcaaaataaagcttcaagagtaagtgattcgaggccctcctctgttcacttagcggtgtctacctcttaaggtcaccaagcactccgagcgccagcgaggagtgcgaccctttaccaaggggcaacttcctcggggtccggcgctacgcgcttcgcgctgcgccggacgcctcggaccccccctcgacccgaatcgctcgcgcgattcggacctgcggcctcgggggggtcgggggctttattaaacagactccgagatgccattggacactgagggggtgaacagcaacgaaagtgagtggggccagacttcgccataaggcctttaactttgggtcgcttgtcggtggcttccgggtccgcctgggggccgccattttagcttcggccgccattttaggccctcgcgggcctccgtaggcgcgttttaatgacgtcacggcagccattttgtcgtgacgtttgagacacgtgatgggggcgtgcataaacccggaagcatccctggtcacgtgactctgacgtcacggcggccattttgtgctgtccgccatcttgtgacttccttccgctttttcaaaaaaaaagaggaagtatgacgtagtttgtttcgttgctgtagttttcccagtcataggtgctggccctgtttgcccccccaccagggggcgctgcgcgcccccccccgcgcatgcgcggggccccccccgcgggggggctctgcccccccggcccccccccgtgctatatccaccgcgcatgcgcgaccacgcccccgccgccattttgtgcagcccgccaatttctcgttcaaacaggccaatcagctactacttcgtgcacttcctggggcgtgtcctaccactctatataagcagaagcggtgacgaatggtagagtttttcctggcccgtccgcggcgagagcgcgagcgaagcgagcgatcgagcgtcccgtggg

SEQ ID NO: 293 - protein, 641 aa, Alphatorquevirus sp.
MPLIICGKGSTQFNYITHADDITPRGASYGGNFTNMTFSLEAIYEQFLYHRNRWSASNHDLELCRYKGTTLKLYRHPEVDYIVTYSRTGPFEISHMTYLSTHPLLMLLNKHHIVVPSLKTKPRGRKAIKVRIRPPKLMNNKWYFTRDFCNIGLFQLWATGLELRNPWLRMSTLSPCIGFNVLKNSIYTNLSNLPQHKQARLDIIDKTLHPQDITGANNKKWQYTYTKLMAPIYYSANRASTYDWENYSNETNYHNTYLKFHQKRQEKLTKIKKEWQMLYPQQPTSLPDSYDLLQEYGLYSPYYLNPTRINLDWMTPYTHVRYNPLVDKGFGNRIYIQWCSEADVSYNRTKSKCLLQDMPLFFMAYGYIDWAIKNTGVSSLVRDARICIRCPYTEPQLVGSTEDIGFVPISETFMRGDMPVLAPYIPLSWFCKWYPNIAHQKEVLEAIISCSPFMPRDQDMNGWDITIGYKMDFLWGGSPLPSQPIDDPCQQGTHPIPDPDKHPRLLQVSNPKLLGPRTVFHKWDIRRGQFSKRSIKRVSEYSSDDESLAPGLPSKRNKLDSAFRGENPEQKECYSLLKALEEEETPEEEEPAPQEKAQKEELLHQLQLQRRHQRVLRRGLKLVFTDILRLRQGVHWNPELT

SEQ ID NO: 294 - DNA, 3732 bp, Alphatorquevirus sp.
cgggagccggaggtgagtttacacaccgcagtctaggggcaattcgggcacgggtctggccgggctatgggcaagattcttaaaaagtttccccgctgtgtcctacgccaggacacaaaaacatgccgtggagaccgccggcgcacgacgtccagggcagagagaaccagttctttgcgggatgttttcacatgcatgctactttctgcgggtgcggtgaccttgtcggccatcttgctagcattgctgctcgctttcctgctgccggaccccccgctccgccgggcctcagacctccgagaccccctgccccggccggtccgggcggtccccccggctaccttcccgctctcccggctccggcaccggagccgcctaatccagcaccacgccgtggtggtggggaagatggcgccgccgcgggtggcgccgccgatgggggagaagaagaggccgccgcgtacggcgaggaagaactagaagagcttttccgcgccgccgccgaggacgatatgtaagtaggagatggcgccggccttacaggcgcagacggaggaaggggcgacggagacacagacgcagacggactcacaaacccaccctaataatgagacagtggcaaccggacgttgttaggacgtgctacattacagggtggatgcccctcatcatctgtggccaaggacagacccagtttaactttatcatgcacatggacgatatcaccccccggggagcttcctacgggggcaacctcactaacataacatggaccctagagggcctgtgggaacagttccagtaccacagaaacaggtggtcgcgcagcaaccacgacctagacctaaccaggtacatgttcaccacccttaagttttacagacacgaaagtgtagactatatagtcagctacaccagaacaggacctttccaaatggggcacctcactcacctcagcactcaccctcttttaatgctactctcaaaacaccacgtagtagtgcccagcctaaagacaaaacctgggggcaaaaagtacaaaaaacttagaatcaagcccccaaaactaatgttaaacaagtggtacttcaccaaagacatctgtgacctaggcctgtttcaactgtgggccacgggagcagagctcagaaacccctggttaagatcaggcacacagagcccctgcataggcttctctgtactcaacaactcctactacaccaacctcagcaaccttccagactacaaaacagaaagagaaaacattcaaaagtcatttcatccagacaatatatctacagaaacaaacaaaaacctttggcaatacacatatacaggcctcatgtcaaagtactaccacaaagccaaccaaaacagcacatatgacttccaaaattacagtaacaatgagaattattcaaaaacatttatccaatggtcaaacgataaaaaatcaagacttactaagctacaaaaccaatggcaaaaagtgtacccacaactagtcacacaaaaacccacagacacaacactcctacaagactttggcatatacagccccttctacctcacacccgtcagaatcagcctagactggcgcaccacctacacacacgtcaggtacaacccactcacagacaagggcataggcaacagagtgtacctacagtggtgctcagaaactagctgcaaatacagcgccacaaagagcaagtgccccatagtagacatgccactatttatagccttctatggctacatagactggtgcatcaaatgcacaggcaactctggcctcgtaaaagacgccagaatcatggtgaggtgtccctacaccgagccccaattagtgggggccacagaagacgtgggattctgcctcctcagtaataccttcatgaacggagacatgcccgtgctggccccctatatcccaatttcctggttcgttaaatggtaccccatgattgcacaccaaaaggaaaccgttgaggccatagtttcctgtggaccgttcatgcccagagatcaggaagccaaaagttgggacataaccatgggttacagatcctgtttcaaatggggcgggtcgcctctgcccacacaggccatcgacgacccctgccagaagcccacgcaccctcttcccgatcccgatagacaccctcgcctcctacaagtctcagacccgacaaagcttggccccaagaccatattccacagatgggacatgcgacgcggacagtttagcaaaagaagtattgaaagaatgtcagaacacacagagtatgatgaatattttgaaacaggtctaccatcaaaaagaaaaaagttcgacacgccaccagaaggactccaaggagagcaaagaaaagcctacgatttactccaagccctcgaggcgagccaagaagggtcggggtcagaagaccaagaacaagcacccccacaagagacgcagacgcagcaactcctccagcagctccagctccagaaacaccaccagcgagtcctcagacagggcctcaaacacctcctcggggacgtcctccgactccgacgcggagtccactgggaccccctccttacatagaaccacccccgtttatccccgatcttctgtttccttctactaacaaaaaaaaaaaattctccaaattcgactgggaaacggaggctcagctagggcagatattcaggcgtcctatgcgcttctatccctcagacaaccctcactacccatggttaccccccaagcgagatatccccaaaatatgtaaggtaaacttccaaataaagcttgcagagtgacacattcgaggccctcctctgttcacttagcggtgtctacctctttaggtcaccaagcactccgagcgctagcgaggagtgcgaccctctgccctggggcaacttcctcggggtccggcgctacgcgcttcgcgctgcgccggacgcctcggaccccccctcgacccgaatcgcttgcgcgattcggacctgcggcctcggggggggtcgggagctttattaaacagactccgagttgccattggacactggagctgtgaatcagtaacgaaagtgagtggggccagacttcgccataaggcctttaactttgggggtacagtcagaggcttccgggttcgcctgggggccgccattttatcttccgccgccattttaggccctcgcgggcctccgtaggcgcgtttttatgacgtcacggacgccatcttggctgtgacgtgtcagtcacgtgagaagggcgtgccttaacccggaagcatccctggtcacgtgactgtgacgtcgcggccgccattttgtgcgtccgccattttgtgacttccttccgctttttttaaaaaaaagaggaagtatgacgtagcggcggggggggcggcgcgcttcgcgcgcccccccccaccagggggcgctgcgcgccccccccccgcgcatgcgcggggccccccccggggggggctccgcccccccggcccccccccgtgtctaaatccaccgcgcatgcgcggccacgcccccgccgccattttgtgcagcccgccaatttctatttcaaacagaccaatcagaagactctacgtgcacttcctggggtgtgtcttcgaagactatataagcacaggtagtgacgaatggtagagttttttctggcccgtccgcggcgagagcgcgagcgaagcgagcgatcgagcgacccgtggg

SEQ ID NO: 295 - protein, 661 aa, Alphatorquevirus sp.
MRQWQPDVVRTCYITGWMPLIICGQGQTQFNFIMHMDDITPRGASYGGNLTNITWTLEGLWEQFQYHRNRWSRSNHDLDLTRYMFTTLKFYRHESVDYIVSYTRTGPFQMGHLTHLSTHPLLMLLSKHHVVVPSLKTKPGGKKYKKLRIKPPKLMLNKWYFTKDICDLGLFQLWATGAELRNPWLRSGTQSPCIGFSVLNNSYYTNLSNLPDYKTERENIQKSFHPDNISTETNKNLWQYTYTGLMSKYYHKANQNSTYDFQNYSNNENYSKTFIQWSNDKKSRLTKLQNQWQKVYPQLVTQKPTDTTLLQDFGIYSPFYLTPVRISLDWRTTYTHVRYNPLTDKGIGNRVYLQWCSETSCKYSATKSKCPIVDMPLFIAFYGYIDWCIKCTGNSGLVKDARIMVRCPYTEPQLVGATEDVGFCLLSNTFMNGDMPVLAPYIPISWFVKWYPMIAHQKETVEAIVSCGPFMPRDQEAKSWDITMGYRSCFKWGGSPLPTQAIDDPCQKPTHPLPDPDRHPRLLQVSDPTKLGPKTIFHRWDMRRGQFSKRSIERMSEHTEYDEYFETGLPSKRKKFDTPPEGLQGEQRKAYDLLQALEASQEGSGSEDQEQAPPQETQTQQLLQQLQLQKHHQRVLRQGLKHLLGDVLRLRRGVHWDPLLT

SEQ ID NO: 296 - DNA, 3730 bp, Alphatorquevirus sp.
cgggtgccggaggtgagtttacacaccgaagtcaaggggcaattcgggctcaggactggccgggctttgggcaaggctcttaaaaatgcacttttctcgaataaccagaaagaaaaacaaagtgctactgctttgcgtgccagcagctaagaaaaaaccaactgctatgagcttctggagacctccggtgcacaatgtcacggggatccagcgcctgtggtacgagtcctttcaccgtggccatgcttctttttgtggttgtggggatcctatacttcacattactgcacttgctgaaacatatggccatccaacaggcccgagaccttctgggccaccgggagtagaccccaacccccacatccgtagagccaggcctgccccggccgctccggagccctcacaggttgattccagaccggccctgacatggcatggggatggtggaagcgacggaggcgctggtggttccggaagcggtggacccgtggcagacttcgcagacgatggcctcgaccagctcgtcgccgccctagacgacgaagagtaaggaggcgcagacggtggaggagggggagacgaaaaacaaggacttacagacgcaggagacgctttagacgcaggagacgaaaagcaaaacttataataaaactgtggcaacctgcagtcattaaaagatgcagaataaaggggtacataccactgattataagtgggaacggtacctttgccacaaactttaccagtcacataaatgacagaataatgaaaggccccttcgggggaggacacagcactatgaggttcagcctctacattttgttcgaggaacacctcagacacatgaacttctggaccagaagcaacgacaacctagaactaaccagatacttgggggcttcagtaaaaatatacaggcacccagaccaagactttatagtaatatacaacagaagaacccctctaggaggcaacatctacacagcaccctctctacacccaggcaatgccattctagcaaaacacaaaatattagtaccaagtttacagacaagaccaaagggtaaaaaagcaattagaataagaatagcaccccccacactctttacagacaagtggtactttcaaaaggacatagccgacctcacccttttcaacatcatggcagttgaggctgacttgcggtttccgttctgctcaccacaaactgacaacacttgcgtcagcttccaggtccttagttccgtttacaacaactacctcagtattaatgcctttaatgactccgcagacgcaaatttaaaatcatttttaagtaaagcatttccagaaagagacgcaaaaggaacaagtttaaatgcactaaatacatttagaacagaaggatgcataagtcacccacaactaaaaaaaccaaacccacaagcaaacaaagtaccagactcagaatactttgcacctttagatgccctctggggagaccccatatactataatgacttaaatcaaggtaaagatttaagtaacatccttgaaaacatactattaaaaaacatgactacataccataataaactaaaagattttccagcttcataccagggaaacaaagccttttgccacctaacaggcatatatagcccaccatacctcaaccaaggcagaatagctccagaaatatttggactgtacacagaaataatttacaacccttacacagacaaaggaactggaaacaaagtatggatggacccactgactaaagacaacaacatatataaagaaggacagagcaaatgcctactgactgacatgcccctgtggactttactttttggatatacagactggtgtaaaaaggacactaataactgggacttaccactaaactacagactagtactaatatgcccttataccttcccaaaattgtacaatgaaaaggtaaaagactatgggtacattccgtactcctacaaattcggggcgggtcagatgccagacggcagtaactacataccctttcagttcagagcaaaatggtaccccacagtactacaccagcaacaggtaatggaagacataagcaggagcgggccctttgcacctaagatagaaaaaccaagcactcagctggtaatgaaatactcttttaactttaactggggcggtaaccctatcattgaacagattgttaaagaccccagcttccagcccacctatgaaatacccggtaccggtaacctccctagaagaatacaagtcatcgacccgcgggtcctgggaccgcactactcgttccggtcgtgggacatgcgcagacacacatttagcagagcaagtattaagagagtgtcagaacaacaagaaacttctgaccttgtattctcaggcccaaaaaagcctcgggtcgacatcccaaaacaagaaacccaagaagaaagctcacattcactccaaagagaatcgagaccgtgggagaccgaggaagaaagcgagacagaagccctctcgcaagagagccaagaggtccccttccaacagcagttgcagcagcagtaccaagagcagctcaagctcagacagggaatcaaagtcctcttcgagcagctcataaggacccaacaaggggtccatgtaaacccatgcctacagtaggtcccaggcagtggctgtttccagagagaaagccagccccagctcctagcagtggagactgggccatggagtttctcgcagcaaaaatatttgacaggccagttagaagcaaccttaaagatacaccttactacccatatgttaaaaaccaatacaatgtctactttgaccttaaatttgaataaagagcagtttcaaacttgcaaggccgtgggagtttcactggtcggtgtctacctctaaaggtcactaagcactccgagcgtaagcgaggagtgcgaccctcccccctgggacaacttcttcggagtccggcgctacgccttcggctgcgccggacacctcagaccccccctccacccgaaacgcttgcgcgtttcggaccttcggcgtcgggggggtcgggagctttattaaacagactccgaggtgctcttggacactgagggggtgaacagcaacgaaagtgagtggggccagacttcgccataaggcctttatcttcttgccatttgtcagtgttcggggtcgccataggcttcgggctcctttttaggccttccggactacaaaaatcgccattttggtgacgtcacggccgccatgttaagtagttgaggcggacggtggcgtaagttcaaaggtcaccatcagccacacctactcaaaatggtgggcaatttcttccgggtcaaaggtcatcaccgccatatttaaccacgtgacatgtgacgtcacggccgccattttgtgacacaagatggccgacttccttcctctttttcaaaaaaaagcggaagtgccgccgcggcggcggggggcggcgcgctgcgcgcgccgcccagtagggggcgccatgcgcacccccccccgcgcatgcgcggggccccccggccccccccgtgctacgtcactaacccacgtgtcctccacaggccaatcacagtctatgtcgtgcacttcctgggcatggtctacataattatataaatgcttgcacttccgaatggctgagtttttgctgcccgtccgcggagaggagccacggcaggggatccgaacgtcctgaggg

SEQ ID NO: 297 - protein, 742 aa, Alphatorquevirus sp.
MAWGWWKRRRRWWFRKRWTRGRLRRRWPRPARRRPRRRRVRRRRRWRRGRRKTRTYRRRRRFRRRRRKAKLIIKLWQPAVIKRCRIKGYIPLIISGNGTFATNFTSHINDRIMKGPFGGGHSTMRFSLYILFEEHLRHMNFWTRSNDNLELTRYLGASVKIYRHPDQDFIVIYNRRTPLGGNIYTAPSLHPGNAILAKHKILVPSLQTRPKGKKAIRIRIAPPTLFTDKWYFQKDIADLTLFNIMAVEADLRFPFCSPQTDNTCVSFQVLSSVYNNYLSINAFNDSADANLKSFLSKAFPERDAKGTSLNALNTFRTEGCISHPQLKKPNPQANKVPDSEYFAPLDALWGDPIYYNDLNQGKDLSNILENILLKNMTTYHNKLKDFPASYQGNKAFCHLTGIYSPPYLNQGRIAPEIFGLYTEIIYNPYTDKGTGNKVWMDPLTKDNNIYKEGQSKCLLTDMPLWTLLFGYTDWCKKDTNNWDLPLNYRLVLICPYTFPKLYNEKVKDYGYIPYSYKFGAGQMPDGSNYIPFQFRAKWYPTVLHQQQVMEDISRSGPFAPKIEKPSTQLVMKYSFNFNWGGNPIIEQIVKDPSFQPTYEIPGTGNLPRRIQVIDPRVLGPHYSFRSWDMRRHTFSRASIKRVSEQQETSDLVFSGPKKPRVDIPKQETQEESSHSLQRESRPWETEEESETEALSQESQEVPFQQQLQQQYQEQLKLRQGIKVLFEQLIRTQQGVHVNPCLQ

SEQ ID NO: 298 - protein, 164 aa, Alphatorquevirus sp.; identical to SEQ ID NO: 192

SEQ ID NO: 299 - protein, 65 aa, Alphatorquevirus sp.; identical to SEQ ID NO: 193

SEQ ID NO: 300 - DNA, 3727 bp, Alphatorquevirus sp.
cgggtgccggaggtgagtttacacaccgcagtcaaggggcaattcgggctcgggactggccgggctatgggcaaggctcttaaaaaagcatgttcctcggtaaactttacagaaagaaaaggcaagtgctactgcaccagctgtaccctgcagagaaaacacctcctgctatgagctactggcgaccacccaccagaaatgtaccgggacaagagcagggctggtacgacgccattttcagttctcacaatgctttttgtggttgtggtgatcctattggtcatgctaacaatctggcggctcgttttggacgttctggacgatccagacacccagcgacgcctgacacaccaccaccaataaggcctctgccagccctgcccgcgccggaccctccggcgcccccaagacgccacgctagaacggagaaccagccatggcctggtactggtggcgccgcaggcgaccgtggagatggagacggcggcgccgccggaggaggagacgacctcggttccgacgccgtagaagagctgctcgacctgctcgacgacccagagtaaggaggcgaaaatggaggggagggtactggagacgaaagactgtaagacgcaggagacggagaaagagacagaaaaagattaaactgactcagtggaaccccgccactgttaaaaaatgcataatcaagggctacatacccttgataatatgcggtaccggcagcaccggcaccacctacagaaactttgcctcccacatgaacgactatacaaagtacgacccctttgggggaggcatgagcaccatgatgttcaccctgcagggtctgtacgaggagtacgaaaaacaccacaacagctggtccagaagcaacctggacctagaactgtgtagatataaagggtgcaagtttaccatgtacaggcaccccgagactgactttattttctggtacaacagaaagctgccctttaatgacactcagctgacgggtccagaaatgcagccgggaatagccatgtgcagtagaaaaaagaaaatactaattaagagctttaaaacaaagcctaaggggcccatgacagtgtcagttaagattcccccccccaccctgttctctgaccgttggtactttcaaaaggacttggccaacgttccgttgctaaccacaaaagccatagcttgcagtttgcggtttccgttctgccgaccacaaactgacaacagttgcgtatacttccttgtactgcaagactggtacaaccagtgcctaagcatagcccccacccatgtagacaataactggttagcattaaaaaaccgaatacaaacacaatataacgccactacgggcacaactataccaacacacggctggatgggcactgtgtttaatacttttaaaacagaagaacacataaaatgccctcctgccaaagaccaaaaacaaccaaatcccggtgacgctactcaaaactgctataaaaatgtaagcagtttatggggagaccacgtatatgacaaagaaaaaataataaaggcatgggaagataaccataacaagtactgggatgccagaaagactcaaacatttagcgagtcaaaggcactcagtcacaaaactggactttacagctctatgttcctgtcaaacagtagattaagtccagactttccaggcctatacaaagaaataatttacaacccatacctagacaaaggcacaggaaacagagtatggatagactggtgcactaaaaatgactctcaattcagagacacaccggggagagtccccatagtagacgtgcccctgtacgcggccttcctggggtactcagactactgcaaaaagtattaccacgacccgggcataatgaaagaggttaggttaactatccagtgcccctacacgaacccacctctgtatgacaaagacaacacagacatgggatacgtgccctacgactacaactttggggacgggaagatgcccgacggagcggggtacatacccatagcctacagatttaagtggtacgtttgcatgttccaccaacaaaactttatgaatgacatagtgcagtgcggaccgttcgcgtacccgggcgaccagaaaaactgtgtgcttgcctgcaaatacagcttcaaattcttatttggaggcaaccctattccccaacagactatcaaagatcccaagacgcagcccgactttccagtgcccggtaccggtcaattcccttttcgagtacaagtcgttaacccgaggcacatcgacgaaggggcgctcttccgacgctgggatatcaggcggggatggtacagcaataaagctattaaaagaatgcaagaaaaacagagagatgctgactttattgcaggacctccaaaaaaaccaagattcgaggtccccgccgcgcagcaagaagaaaactcgccttcacaggagcgaagattggagctctggtacggatcgacaacggaaaccgagaccgaagcagaagcccaagaagaagagacgcaaacggtccagcagcagctcaaccagcagctccgagaacaaagaaaactggggaaggcgatcaacaacatcttcaaacagctcataaagacccagcaacacctccacgcccccattatccactagtgggtggtcccaaatacctctttccagagaggctgcccaaaccttacaccacccaagactgggagaccgagtaccagtgctgcaaggcctgggacagacctcccagaaataatctttcagacccccctttctatccctggatgccccgagatcagtaccgtgtaacctttaagctaggcttccaataaactaggccgtgggagtttcacttgtcggtgtctgcttcttaaggtcaccaagcactccgagcgtagcgaggagtgcgaccctctctctgtggggcccacttcttcggagccgcgcgctacgccttcggctgcgcgcggcacctcagacccccgctcgtgctgacacgcttgcgcgtgtcagaccacttcgggctcgcgggggtcgggaattttactaaacagactccgagttgccattggacactggagctgtgaatcagtaacgaaagtgagtggggccagacttcgccatagggcctttatcttcttgccattggatggtgtcgggggggcggcataggcttcgggctcggttttaggccttccggactaccaaaatggcggttttggtgacgtcacggcggccattttaagtaaggcggaaaggcttcagccttgtacaaaatggcggcggagcacttccggcttgcccaaaatggcggccaaaaacatccgggttaaaggtagcgggtacgtcatgattcacgtgaccggccagctaccaaaacacggaagtagctgacccacgtgagtcgtcacgtgactgctacgtcacggcggccattttgttttacaaaatggcgcacttccttccgctttttttaaaaaaaacggctcggcggcggcgcgcgcgctgcgcgcgcgcccgcggggggctccgccccccggccccccccgtgctacgtcactaaccacgtgcactccgcaggccaaccaccgtgtatgtcgtgcacttcctgggcgtggtctacgtcataatataagtaacagcacttccgaatggctgagttttccacgcccgtccgcagcggtagcaccacggagggatacaaccgcgtcccgaggg

SEQ ID NO: 301 - protein, 738 aa, Alphatorquevirus sp.
MAWYWWRRRRPWRWRRRRRRRRRRPRFRRRRRAARPARRPRVRRRKWRGGYWRRKTVRRRRRRKRQKKIKLTQWNPATVKKCIIKGYIPLIICGTGSTGTTYRNFASHMNDYTKYDPFGGGMSTMMFTLQGLYEEYEKHHNSWSRSNLDLELCRYKGCKFTMYRHPETDFIFWYNRKLPFNDTQLTGPEMQPGIAMCSRKKKILIKSFKTKPKGPMTVSVKIPPPTLFSDRWYFQKDLANVPLLTTKAIACSLRFPFCRPQTDNSCVYFLVLQDWYNQCLSIAPTHVDNNWLALKNRIQTQYNATTGTTIPTHGWMGTVFNTFKTEEHIKCPPAKDQKQPNPGDATQNCYKNVSSLWGDHVYDKEKIIKAWEDNHNKYWDARKTQTFSESKALSHKTGLYSSMFLSNSRLSPDFPGLYKEIIYNPYLDKGTGNRVWIDWCTKNDSQFRDTPGRVPIVDVPLYAAFLGYSDYCKKYYHDPGIMKEVRLTIQCPYTNPPLYDKDNTDMGYVPYDYNFGDGKMPDGAGYIPIAYRFKWYVCMFHQQNFMNDIVQCGPFAYPGDQKNCVLACKYSFKFLFGGNPIPQQTIKDPKTQPDFPVPGTGQFPFRVQVVNPRHIDEGALFRRWDIRRGWYSNKAIKRMQEKQRDADFIAGPPKKPRFEVPAAQQEENSPSQERRLELWYGSTTETETEAEAQEEETQTVQQQLNQQLREQRKLGKAINNIFKQLIKTQQHLHAPIIH

SEQ ID NO: 302 - protein, 157 aa, Alphatorquevirus sp.
MFLGKLYRKKRQVLLHQLYPAEKTPPAMSYWRPPTRNVPGQEQGWYDAIFSSHNAFCGCGDPIGHANNLAARFGRSGRSRHPATPDTPPPIRPLPALPAPDPPAPPRRHARTENQPWPGTGGAAGDRGDGDGGAAGGGDDLGSDAVEELLDLLDDPE

SEQ ID NO: 303 - protein, 123 aa, Alphatorquevirus sp.
LVRIDNGNRDRSRSPRRRDANGPAAAQPAAPRTKKTGEGDQQHLQTAHKDPATPPRPHYPLVGGPKYLFPERLPKPYTTQDWETEYQCCKAWDRPPRNNLSDPPFYPWMPRDQYRVTFKLGFQ

SEQ ID NO: 304 - DNA, 3726 bp, Alphatorquevirus sp.
cgggagccggaggtgagtttacacaccgcagtctaggggcaattcgggcacgggtctggccgggctatgggcaagattcttaaaaagtttccccgctgtgtcctacgccaggacacaaaaacatgccgtggagaccgccggcgcacgacgtccagggcagagagaaccagttctttgcgggatgttttcacatgcatgctgctttctgcgggtgcggtgaccttgtcggccatcttggtagcattgctgctcgctttcctgctgccggaccccccgctccgccgggcctcagacctccgagaccccctgccccggccggtcccggcggtccccccggctaccttctcgctctcccggctccggcaccggagccgcctaatccagcaccacgccgtggtggtggggaagatggcgccgccgcgggtggcgccgcagatggagcagaagaagaggccgccgcgtacggcgaggaagaactagaagagcttttccgcgccgccgccgaggacgatatgtaagtaggagatggcgccgaccttacaggcgcaggaggaggaaggggcgacggagacgcagacgcagacggactcacaaacccaccctagtaatgagacagtggcaaccggacgttgttaggacctgctacatcacagggtggatgcccctcatcatctgtggccaaggacagacccagtttaactttatcatgcacatggacgatatcaccccccggggagcctcctacgggggcaacctcactaacataacatggaccctagagggcctgtgggaacagttccagtaccacagaaacaggtggtcgcgcagcaaccacgacctagacctagccaggtacatttttaccacccttaagttttacagacacgaaactgtagactacatagtaagctacaccagaacaggacctttccaaatgggacacctcactcacctcagcactcaccctctcctaatgctactctcaaaacaccacatagtagtacccagcctaaagacaaaacctgggggcagaaagtacaaaaaaatcagaattaagcccccaaaactaatgttaaacaagtggtacttcaccaaagacatctgtgacctaggcctctttcaactgtgggccacgggagcagagctcagaaacccctggttaagatcaggcacacagagcccctgcataggcttcagtgtactcaacaactcctactacaccaacctcagcaacctgccagaacacaataacgccagaacacaaatacaaatgtcatttcacccatcaagcttaataactgacacaggcaaaaacttgtggcagtacacatacacaggcctcatgtcaaaatactactacaaaggcaacccaaacagcacatatgacttccaaaattatagcaataatgagaactatgtaaacacatatcaaaaatggaatcaggaaaaatcagcaagactaataaaactacaagaacagtggaacaaagtatacccacaactaccaacacaaaaacccacagacagcacactcctacaggactttggcatatacagccccttctatctaacacccaccagaatcagcctagactggcgcaccacctacacacacgtgaggtacaacccactcacagacaagggcataggcaacagagtgtacctacagtggtgctcagagactagctgcaagtacaaccccacaaagagcaagtgccccatagtagacatgccactattcatagccttctatggctacatagactggtgcatcaaatgcacaggcaactctggcctcgtaaaagacgccagaatcatggtgaggtgtccctacaccgagccccaactagtaggggccacagaggacgtgggcttctgcctcctcagtaataccttcatgaacggagacatgcccgtactagccccctatatcccaatttcctggttcgttaagtggtaccccatgattgcacaccaaaaggaaaccgttgaggccatagtttcctgtggaccgttcatgcccagagatcaggaagccaaaagttgggacataaccatgggttacagatcctgtttcaaatggggcgggtcgcctctgcccacacaggccatcgacgacccctgccagaagcccacgcaccctcttcccgaccccgatagacaccctcgcctcctacaagtctcagacccgacaaaactcggccccaagaccatattccacagatgggacatgcgtcgaggacagtttagcaaaagaagtattgaaagaatgtcagaatacacagaatatgatgaatattttgaaacaggtctaccatcaaaaagaaaaaagttcgacacgccggcagaaggactccaaggagagcaaagaaaagcctacgatttactccaagccctcgaagcgagtcaagaagggtcggggtcagaagaccaagaacaagcacccccacaagagacggagacgcagcaactcctccagcagctccagctccagaaacaccaccagcgagtcctcagacagggcctcaaacacctcctcggggacgtcctccgactccgacgaggagtccactgggaccccctccttacatagaaccgccgccattcatccccgatcttctttttccttctactaacaaaaaaaaaaaattctccaaattcgactgggaaacggaggctcagctagggcaggcattcaagcgtcctatgcgcttctatccctcagacaacccttactacccgtggttgccccccaagcgagatatccccaaaatatgtaaagtaaacttccaaataaagcttgcagagtaacacattcgaggccctcctctgctcacttagcggtgtctacctcttaaggtcaccaagcactccgagcgcaagcgaggagtgcgaccctctgccctggggcaaattcctcggggtccggcgctacgcgcttcgcgctgcgccggacgcctcggaccccccctcgacccgaatcgctcgcgcgattcggacctgcggcctcgggggggtcggggactttattaaacagactccgagttgccattggacactggagctgtgaatcagtaacgaaagtgagtggggccagacttcgccataaggcctttaacttggggtcgcttgtcagcggcttccgggtgcgcgtgggggccgccattttagcttcggccgccattttaggccgtcgcgggcctccgtagtcgcgtcttactgacgtcacaggcgccatcttggctgtgacgtatcagtcacgtgattggggcgtgccttaacccggaagcatccctggtcacgtgactgtgacgtcgcggccgccattttgtgcgtccgccatcttgtaacttccttccgctttttcaaaaaaaagaggaagtgtgacgtagcggcgggggggcggcgcgcttcgcgcgctgcccaccagggggcgctgcgcgcccccccccgcgcatgcgcggggccccccccggggggggctccgcccccccggccccccccccgtgtctaaatccaccgcgcatgcgcggccacgcccccgccgccattttgtgcagcccgccaatttctctttcaaacagaccaatcagaagactctacgtgcacttcctggggtgtgtcttcgaagactatataggcacaggcggtgacgaatggtagagtttttcctggcccgtccgcggcgagagcgcgagcgaagcgagcgatcgagcgacccgtggg

SEQ ID NO: 305 - protein, 661 aa, Alphatorquevirus sp.
MRQWQPDVVRTCYITGWMPLIICGQGQTQFNFIMHMDDITPRGASYGGNLTNITWTLEGLWEQFQYHRNRWSRSNHDLDLARYIFTTLKFYRHETVDYIVSYTRTGPFQMGHLTHLSTHPLLMLLSKHHIVVPSLKTKPGGRKYKKIRIKPPKLMLNKWYFTKDICDLGLFQLWATGAELRNPWLRSGTQSPCIGFSVLNNSYYTNLSNLPEHNNARTQIQMSFHPSSLITDTGKNLWQYTYTGLMSKYYYKGNPNSTYDFQNYSNNENYVNTYQKWNQEKSARLIKLQEQWNKVYPQLPTQKPTDSTLLQDFGIYSPFYLTPTRISLDWRTTYTHVRYNPLTDKGIGNRVYLQWCSETSCKYNPTKSKCPIVDMPLFIAFYGYIDWCIKCTGNSGLVKDARIMVRCPYTEPQLVGATEDVGFCLLSNTFMNGDMPVLAPYIPISWFVKWYPMIAHQKETVEAIVSCGPFMPRDQEAKSWDITMGYRSCFKWGGSPLPTQAIDDPCQKPTHPLPDPDRHPRLLQVSDPTKLGPKTIFHRWDMRRGQFSKRSIERMSEYTEYDEYFETGLPSKRKKFDTPAEGLQGEQRKAYDLLQALEASQEGSGSEDQEQAPPQETETQQLLQQLQLQKHHQRVLRQGLKHLLGDVLRLRRGVHWDPLLT

SEQ ID NO: 306 - DNA, 3725 bp, Alphatorquevirus sp.
cgggtgccgaaggtgagtttacacaccgcagtcaaggggcaattcgggctcgggactggccgggccctgggcaaggctcttaaaaaagccatgtttcttggtaaactttacagaaagaaaagggcactgtcactgcgcagcctgcgaactccagaggcgaaaccacctgctatgagttggaggcccccggtgcacaaccgcaatgggatcgaaagaaacctatgggaggcgttctttcgcatgcatgctgcagcttgtggttgtggcgatcttgttggccatattactgtactggctggtcggtatggtgctcctcctcgtcccccggcccccggagctgctacaccaccgctgagacaccagctggcccttccggcgccccccgccgatcctcaacaggctaacccacaatggcctggtggggacggtggagaagatggcgctggaggccccgccgctggcggcgccgtcgcagacgccgagtaccaagaagaagagctcaacgccctgttcgacgccgtcgagcaagaagagtaaggaggaggcaatgggggaggcggaggtggagacgggggtacagacgcagactaagactgagacgcagacgcagacgaaaaaaaataagactgactcagtggaacccagccaaagtcaggagatgtactattaagggggtgctgcccatgatcttgtgcggggccggccgctcggggtttaactatggactgcacagcgacgactacacggtgcagaaacccttgggacagaacccccacgggggcagtatgagcacagtgacttttagcctacaagtactatttgaccagtatcagaggtttatgaaccggtggtcgtactccaacgaccagctagacctcgccaggtactttggctgcaccttctgcttctacagacaccctgaaattgactttgtagctcagtatgacaacgtaccccccatgaaaatggacgagaacacggctcctaacactcacccctgcttcttactacaaaacaaacgcaaagttaaaattcccagctttaaaactaagccatttggcaaaaaaaaagtaagagttacagtggggccccccaaactgtttgaagataagtggtacagccagcatgacttgtgtaaggtgcccctagtcagttggcggttaaccgcatgtgacttcaggtttccgttctgctcaccacaaactgacaacccttgcttcaccttccaggtattgcatgaaaactattacccagtaataggcacttcctctttagaaaacggtacaaactacaatagctcagctataactaccttagagacatggctatatggaaaatgcacacactatcaaacatttgctacagacacaagacttaatccacaaagacccgcctcttcaagtaatccaacacaaactcatgctcccagtggcacattagaagaaataatttggggacaacaagactggcaaaactttaaaaagaacacagacagcaactatggtttctgtacattctgcccctcaaacggcaaaaataccttagtagacaaaattaaaaagtacagagaccaaagatttaaatggcttactgaaatgccagtaagtaacacctgtcacataaatgccaccttcgccaaaagcactataaagtactgggagtaccacctgggctggtactcaaacatatttataggcaacctgagacacaacttagccttcagaccagcctacatagacatcacctacaaccccatcactgacaaaggagagggcaacattatctggtttcagtacctcacaaaacccactacagaatttatagaaacccaggccaaatgctccatcactaacattcccctatatgctgctttctatggctacgaagactacctccagagaacactaggcccctaccaagatgtagagaccctaggcataatttgtgttaaatgtccttacacagatccccctctagttcacaaagaaaaaagcaagagtaactggggctacgtattctatgacgcccactttggcaacggaaaaaccccagaaggactgggccaagtacacccctactggatgcagagatggagaccctacgtacagtttcaaaaagacactatgcacaaaatatccagaacaggacccttcagctacagagacgagacgccctccattaccctgactgcccaatacaagtttcgttttaactgggggggcgactctatatttccacagattattaaaaacccctgcccagacaccggggttcgaccttcgaccggtagagaccgtcgctcagtacaagtcgttagcccgctcacaatgggaccccagtttatattccactcatgggactggagacggggattctttaatcaaaaaactctcaaaagaatgcttgaaaaaccagttaatgatgcagaatatccaacaggcccaaaggtgcctcgatggtttcccccactcaacaaccaagagcaagaaggcgtctcagatacagagacgacaacctcgcagtcctcacaagaagaagctgctcaagaagccctccaagaagtccaagaggcgtcgctacagcagcacctcttcaagcagtaccgagagcagcgaagaatcggaaagcaactccaactcgtcatgctccaactcaccaagacgcagagcaacctgcacataaatccccgtgtccttggccatgcataaataaagtatacatgtttcctcccgaaaagcccatgcccatacacggataccacgggtgggagacagagtatcaggcctgcaaggcctttgacaggccccctagaaactacctgtcagacaaacccatttatccctggcttccccgctcccaaccagaattcaaagtgagttttaagcttggttttcaataaacaaggccgtgggaatttcacttgtcggtgtctacctcttaaggtcactaagcactccgagcgttagcgaggagtgcgacccttccccctggtgcaacgccctcggcggccgcgcgctacgccttcggctgcgcgcggcacctcggacctaacgaaagtgagtggggccagacttcgccataaggcctttatcttcttgccattagttcgtgtcgggggtcgccataggcttcgagctcggttttaggccttccgaactacaaaaaccgccattttagtgacgtcacggcggccattttaagtaagcatggggggcggtgacgtacaagttcaaaggtcaccgcacttccgtgtttacacaaaatggtggccaactccttccgggtcaaaggttgtcggctacgtcataagtcacgtggggagggctgcgtcacaacccggaagcaatcctcaccacgtgatttgtaacgtgaccgctacgtcacagccgccattttagttcacaaaatggcggacttccttcctcttttttgaaaataacggccctgcggcggcgcgcgcgctgcgcgcgcgcgccgggggctgctgccccccccccgcgcatgcgcgcggggccccccccccgcggggggctccgccccccggcccccccccccgaagatcgtcactaaccacgtgactcccgcaggccaaccacagtctatgtcgtgcacttcctgggcatggtctacgtgataatataaagcgcttcacttccgaatggctgagttttccacgcccgtccgcggcgagatcgcgacggaggagcgatcgagcgtcccgaggg

SEQ ID NO: 307 - protein, 765 aa, Alphatorquevirus sp.
MAWWGRWRRWRWRPRRWRRRRRRRVPRRRAQRPVRRRRARRVRRRQWGRRRWRRGYRRRLRLRRRRRRKKIRLTQWNPAKVRRCTIKGVLPMILCGAGRSGFNYGLHSDDYTVQKPLGQNPHGGSMSTVTFSLQVLFDQYQRFMNRWSYSNDQLDLARYFGCTFCFYRHPEIDFVAQYDNVPPMKMDENTAPNTHPCFLLQNKRKVKIPSFKTKPFGKKKVRVTVGPPKLFEDKWYSQHDLCKVPLVSWRLTACDFRFPFCSPQTDNPCFTFQVLHENYYPVIGTSSLENGTNYNSSAITTLETWLYGKCTHYQTFATDTRLNPQRPASSSNPTQTHAPSGTLEEIIWGQQDWQNFKKNTDSNYGFCTFCPSNGKNTLVDKIKKYRDQRFKWLTEMPVSNTCHINATFAKSTIKYWEYHLGWYSNIFIGNLRHNLAFRPAYIDITYNPITDKGEGNIIWFQYLTKPTTEFIETQAKCSITNIPLYAAFYGYEDYLQRTLGPYQDVETLGIICVKCPYTDPPLVHKEKSKSNWGYVFYDAHFGNGKTPEGLGQVHPYWMQRWRPYVQFQKDTMHKISRTGPFSYRDETPSITLTAQYKFRFNWGGDSIFPQIIKNPCPDTGVRPSTGRDRRSVQVVSPLTMGPQFIFHSWDWRRGFFNQKTLKRMLEKPVNDAEYPTGPKVPRWFPPLNNQEQEGVSDTETTTSQSSQEEAAQEALQEVQEASLQQHLFKQYREQRRIGKQLQLVMLQLTKTQSNLHINPRVLGHA

SEQ ID NO: 308 - protein, 156 aa, Alphatorquevirus sp.
LGKALKKAMFLGKLYRKKRALSLRSLRTPEAKPPAMSWRPPVHNRNGIERNLWEAFFRMHAAACGCGDLVGHITVLAGRYGAPPRPPAPGAATPPLRHQLALPAPPADPQQANPQWPGGDGGEDGAGGPAAGGAVADAEYQEEELNALFDAVEQEE

SEQ ID NO: 309 - protein, 147 aa, Alphatorquevirus sp.
MVSPTQQPRARRRLRYRDDNLAVLTRRSCSRSPPRSPRGVATAAPLQAVPRAAKNRKATPTRHAPTHQDAEQPAHKSPCPWPCINKVYMFPPEKPMPIHGYHGWETEYQACKAFDRPPRNYLSDKPIYPWLPRSQPEFKVSFKLGFQ

SEQ ID NO: 310 - DNA, 3722 bp, Alphatorquevirus sp.
cgggtgccgaaggtgagtttacacaccgcagtcaaggggcaattcgggctcgggactggccgggccctgggcaaggctcttaaaaaagccatgtttcttggtaaactttacagaaagaaaagggcactgtcactgcgcagcctgcgaactccagaggcgaaaccacctgctatgagttggaggcccccggtgcacaaccgcaatgggatcgaaagaaacctatgggaggcgttctttcgcatgcatgctgcagcttgtggttgtggcgatcttgttggccatattactgtactggctggtcggtatggtgctcctcctcgtcccccggcccccggagctgctacaccaccgctgagacaccagctggcccttccggcgccccccgccgatcctcaacaggctaacccacaatggcctggtggggacggtggagaagatggcgctggaggccccgccgctggcggcgccgtcgcagacgccgagtaccaagaagaagagctcaacgccctgttcgacgccgtcgagcaagaagagtaaggaggaggcaatgggggaggcggaggtggagacgggggtacagacgcagactaagactgagacgcagacgcagacgaaaaaaaataagactgactcagtggaacccagccaaagtcaggagatgtactattaagggggtgctgcccatgatcttgtgcggggccggccgctcggggtttaactatggactgcacagcgacgactacacggtgcagaaacccttgggacagaacccccacgggggcagtatgagcacagtgacttttagcctacaagtactatttgaccagtatcagaggtttatgaaccggtggtcgtactccaacgaccagctagacctcgccaggtactttggctgcaccttctgcttctacagacaccctgaaattgactttgtagctcagtatgacaacgtaccccccatgaaaatggacgagaacacggctcctaacactcacccctgcttcttactacaaaacaaacgcaaagttaaaattcccagctttaaaactaagccatttggcaaaaaaaaagtaagagttacagtggggccccccaaactgtttgaagataagtggtacagccagcatgacttgtgtaaggtgcccctagtcagttggcggttaaccgcatgtgacttcaggtttccgttctgctcaccacaaactgacaacccttgcttcaccttccaggtattgcatgaaaactattacccagtaataggcacttcctctttagaaaacggtacaaactacaatagctcagctataactaccttagagacatggctatatggaaaatgcacacactatcaaacatttgctacagacacaagacttaatccacaaagacccgcctcttcaagtaatccaacacaaactcatgctcccagtggcacattagaagaaataatttggggacaacaagactggcaaaactttaaaaagaacacagacagcaactatggtttctgtacattctgcccctcaaacggcaaaaataccttagtagacaaaattaaaaagtacagagaccaaagatttaaatggcttactgaaatgccagtaagtaacacctgtcacataaatgccaccttcgccaaaagcactataaagtactgggagtaccacctgggctggtactcaaacatatttataggcaacctgagacacaacttagccttcagaccagcctacatagacatcacctacaaccccatcactgacaaaggagagggcaacattatctggtttcagtacctcacaaaacccactacagaatttatagaaacccaggccaaatgctccatcactaacattcccctatatgctgctttctatggctacgaagactacctccagagaacactaggcccctaccaagatgtagagaccctaggcataatttgtgttaaatgtccttacacagatccccctctagttcacaaagaaaaaagcaagagtaactggggctacgtattctatgacgcccactttggcaacggaaaaaccccagaaggactgggccaagtacacccctactggatgcagagatggagaccctacgtacagtttcaaaaagacactatgcacaaaatatccagaacaggacccttcagctacagagacgagacgccctccattaccctgactgcccaatacaagtttcgttttaactgggggggcgactctatatttccacagattattaaaaacccctgcccagacaccggggttcgaccttcgaccggtagagaccgtcgctcagtacaagtcgttagcccgctcacaatgggaccccagtttatattccactcatgggactggagacggggattctttaatcaaaaaactctcaaaagaatgcttgaaaaaccagttaatgatgcagaatatccaacaggcccaaaggtgcctcgatggtttcccccactcaacaaccaagagcaagaaggcgtctcagatacagagacgacaacctcgcagtcctcacaagaagaagctgctcaagaagccctccaagaagtccaagaggcgtcgctacagcagcacctcttcaagcagtaccgagagcagcgaagaatcggaaagcaactccaactcgtcatgctccaactcaccaagacgcagagcaacctgcacataaatccccgtgtccttggccatgcataaataaagtatacatgtttcctcccgaaaagcccatgcccatacacggataccacgggtgggagacagagtatcaggcctgcaaggcctttgacaggccccctagaaactacctgtcagacaaacccatttatccctggcttccccgctcccaaccagaattcaaagtgagttttaagcttggttttcaataaacaaggccgtgggaatttcacttgtcggtgtctacctcttaaggtcactaagcactccgagcgttagcgaggagtgcgacccttccccctggtgcaacgccctcggcggccgcgcgctacgccttcggctgcgcgcggcacctcggacctaacgaaagtgagtggggccagacttcgccataaggcctttatcttcttgccattagttcgtgtcgggggtcgccataggcttcgagctcggttttaggccttccgaactacaaaaaccgccattttagtgacgtcacggcggccattttaagtaagcatggggggcggtgacgtacaagttcaaaggtcaccgcacttccgtgtttacacaaaatggtggccaactccttccgggtcaaaggttgtcggctacgtcataagtcacgtggggagggctgcgtcacaacccggaagcaatcctcaccacgtgatttgtaacgtgaccgctacgtcacagccgccattttagttcacaaaatggcggacttccttcctcttttttgaaaataacggccctgcggcggcgcgcgcgctgcgcgcgcgccgggggctgctgcccccccccgcgcatgcgcgcggggccccccccgcggggggctccgcccccccggccccccccccccgaagatcgtcactaaccacgtgactcccgcaggccaaccacagtctatgtcgtgcacttcctgggcatggtctacgtgataatataaagcgcttcacttccgaatggctgagttttccacgcccgtccgcggcgagatcgcgacggaggagcgatcgagcgtcccgaggg

SEQ ID NO: 311 - protein, 765 aa, Alphatorquevirus sp.; identical to SEQ ID NO: 307

SEQ ID NO: 312 - protein, 156 aa, Alphatorquevirus sp.; identical to SEQ ID NO: 308

SEQ ID NO: 313 - protein, 147 aa, Alphatorquevirus sp.; identical to SEQ ID NO: 309

SEQ ID NO: 314 - DNA, 3720 bp, Alphatorquevirus sp.
cgggtgccggaggtgagtttacacaccgcagtcaaggggcaattcgggcacgggactggccgggctatgggcaagattcttaaaaaattttcccgatcactttgccgccaggacacaaaaacatgccgtggagaccgccggtgcatagtgtccaggggcgagaggatcagtggtttgcgagcctttttcacggccacgcttcattttgcggttgcggtgaccctattgagcatcttaatagcattgctcatcgctttcctcgcgccggtccaccaaggccccctccggggctagagcaacctaaccccccgcagcagggcccggccgggcccggaggaccgcccgccatcttggccctgccggctccgcccgcggagcctaacgacccgcagccacgccgtggtggtggggacggtggcgccgccgctggcgccgcaggcgaccgtggagaccgagactacgacgaagaagagctagacgagcttttccgcgccgccgccgaagacgatttgtaagtaggagatggcgccggccttacaggcgcaggaggagacgcgggcgacgcagacgcagacgcagacgcagacataagcccaccttagtactcagacagtggcaacccgacgttatcagacactgtaagataacaggatggatgcccctcattatctgtggaaaggggtccacccagttcaactacatcacccacgcggacgatatcacccccaggggagcctcctacgggggcaacttcacaaacatgactttctccctcgaggccatatacgaacagtttttgtaccacagaaacaggtggtcggcctccaaccacgacctagaactctgcagatacaagggtaccaccctaaaactgtacaggcacccagacgtagactacatagtcacctacagcagaacaggcccctttgagatcagccacatgacctacctcagtactcaccccctgctaatgctgctaaacaaacaccacatagtggtgcccagcctaaagactaagcccagaggcagaaaggccataaaagtcagaataaggcccccaaaactaatgaacaacaagtggtacttcaccagagacttctgtaacataggcctcttccagctctgggccacaggcttagaactcagaaacccctggctgagaatgagcacccttagcccctgtataggcttcaatgtccttaaaaacagcatctacaccaacctcagcaacctgccacaacacaaacaagccagacttgatattataaacaaaacacttcacccaaccgacattacaggagcaaacaacaaaaagtggcagtacacctacaccaaactcatggcccctatttactactcagcaaacagggccagcacctatgactgggaaaattacagcaacgagtcaaactactataacacatattgtaaatttaatcaaaaaagagaagagaaattaacaaaaatcaaaaaagagtggcagacgctatatccacaacaatctactgcactgccagactcctatgacctcttacaggagtatggcctatacagcccatactacctcaaccccacaagaataaacctagactggatgaccccctacacacacgtcaggtacaaccccctcgtagacaagggcttcggaaacagaatatacatacagtggtgctcagaggcagatgttagctacaacagaacaaagtccaagtgtctcttacaagacatgcccctctttttcatggcctatggatacatagactgggcaataaaaaacactggcgtgtcatcactagtaaaggacgccagaatctgcatcaggtgtccctacaccgagccacaactagtgggctccacagaagacataggctttgtacccatctcagaaaccttcatgaggggcgacatgccggtacttgcaccatacataccgttgagctggttttgcaagtggtatcccaacatagctcaccagaaggaagtccttgaggcaatcatttcctgcagccccttcatgccccgtgaccaggacatgaacggttgggatatcacaatcggttacaaaatggacttcttatggggcggttcccctctcccctcacagccaatcgacgacccctgccagcagggaacccacccgattcccgaccccgataaacaccctcgcctcctacaagtctcgaacccgaaactactcggaccgaggacagtctttcacaagtgggacatcagacgtgggcagtttagcaaaagaagtattaagagagtgtcagaatactcaagcgatgatgaatctcttgcgccaggtctcccatcaaagcgaaacaagctcgactcggcgttcagaggagaaaatcgagagcaaaaagaatgctattctctcctcaaagcgctcgaggaagaagagaccccagaagaagaagaaccagcaccccaagaaaaagcccagaaagaggagctactccaccagctccagctccagagacgccaccagcgagtcctcagacgagggctcaagctcgtctttacagacatcctccgactccgccagggagtccactggaaccccgagctcacatagagcccccaccttacatacccgacctgctttttcccaatactggtaaaaaaaaaaaattctctcccttcgactgggaaacagaggcggagctggcggggtggatgcggcggcctatgcgcttctttccctcagacacccctcactacccgtggctaccccccgagcgagatatccccaaaatatgtaacataaacttcaaaataaagctgcaagagtgagtgattcgaggccctcctctgttcacttagcggtgtctacctcttaaggtcaccaagcactccgagcgccagcgaggagtgcgaccctctaccaaggggcaacttcctcggggtccggcgctacgcgcttcgcgctgcgccggacgcctcggaccccccctcgacccgaatcgctcgcgcgattcggacctgcggcctcgggggggtcgggagctttattaaacagactccgagatgccattggacactgagggggtgaacagcaacgaaagtgagtggggccagacttcgccataaggcctttaactttgggtcgcttgtcggtggcttccgggtccgcctgggggccgccattttagcttcggccgccattttaggccctcgcgggcctccgtaggcgcgttttaatgacgtcacggcagccatcttgtcgtgacgtttgagacacgtgatgggggcgtgcctaaacccggaagcatccctggtcacgtgactctgacgtcacggcggccattttgtgctgtccgccatcttgtgacttccttccgctttttcaaaaaaaaagaggaagtatgacgtagcggcggggggggcgggaatcgggtgggttccctgctggcaggggtcgtcgattggctgtgaggggagcgcatgcgcggggcccccccccgcgggggggctccgcccccccggcccccccccgtgctgaatccaccgcgcatgcgcgaccacgcccccgccgccattttgtgcagcccgccaatttctcgttcaaacagaccaatcgaatactacttcgtgcacttcctggggcgtgtcctaccactgtatataagcagaggcggtgacgaatggtagagtttttcctggcccgtccgcggcgagagcgcgagcgaagcgagcgatcgagcgtcccgtggg

SEQ ID NO: 315 - protein, 641 aa, Alphatorquevirus sp.
MPLIICGKGSTQFNYITHADDITPRGASYGGNFTNMTFSLEAIYEQFLYHRNRWSASNHDLELCRYKGTTLKLYRHPDVDYIVTYSRTGPFEISHMTYLSTHPLLMLLNKHHIVVPSLKTKPRGRKAIKVRIRPPKLMNNKWYFTRDFCNIGLFQLWATGLELRNPWLRMSTLSPCIGFNVLKNSIYTNLSNLPQHKQARLDIINKTLHPTDITGANNKKWQYTYTKLMAPIYYSANRASTYDWENYSNESNYYNTYCKFNQKREEKLTKIKKEWQTLYPQQSTALPDSYDLLQEYGLYSPYYLNPTRINLDWMTPYTHVRYNPLVDKGFGNRIYIQWCSEADVSYNRTKSKCLLQDMPLFFMAYGYIDWAIKNTGVSSLVKDARICIRCPYTEPQLVGSTEDIGFVPISETFMRGDMPVLAPYIPLSWFCKWYPNIAHQKEVLEAIISCSPFMPRDQDMNGWDITIGYKMDFLWGGSPLPSQPIDDPCQQGTHPIPDPDKHPRLLQVSNPKLLGPRTVFHKWDIRRGQFSKRSIKRVSEYSSDDESLAPGLPSKRNKLDSAFRGENREQKECYSLLKALEEEETPEEEEPAPQEKAQKEELLHQLQLQRRHQRVLRRGLKLVFTDILRLRQGVHWNPELT

SEQ ID NO: 316 - DNA, 3719 bp, Alphatorquevirus sp.
cgggtgccgaaggtgagtttacacaccgaagtcaaggggcaattcgggctcgggactggccgggctatgggcaaggctcttagggtattcattcttaaaatgcacttttctagaatctctcgctcgaaaaggaaagtgcttctgccggcactgccagctccaccgccgcctaggcaacttctaatgtggcagccaccgatccagaatggaactcaactcgaccgccattggttcgagtcagtctggcgttcgcatgctgccttttgtggctgtggcgactgtattggccatcttcaccatctggctgctaacctgggtagaccacctgctccacaacccccgcgagaacagcacccaccgcagataagagggctcccggcactcccggcacctcccagtaacagaaactcatggcctggtactggtggaggcgccgccggaggagaggctggtggaagcctaggcggaggagatggaggacacggagaacccgcagacgacgacctgctagacgctatcgcactcgccgaagagtaaggaggagaagggggaggtggaggagacgatatagacgctggcgcagacgcggggggcgacgcagacacagaaaaaaacttataattaaacagtggcaacctaactttataagacactgttatataataggatacctgccacttataatatgtggagaaaacactttctctcacaactatgccacccactcggacgacatggtctctacgggggcctacggagggggcatgactaccacaaaatttactctaagaatactatttgacgagtaccaaagacacttaaacttctggactgttagcaaccaagacctagacctagcaaggtacctgggagtaaaactcacaatatttagacaccccactgtagactttatagtgcagatacacacacaacccccttttcaagacacagaaataacaggccccagcatacacccagggatgctcatactctctaaaaaacacatacttatacccagcttaaaaaccagaccctctagaaaacactatataaagctcagagtaggggccccaagactttttcaagacaagtggtacccccagagcgaactctgtgacgtcacattgctcgttatatatgcaaccgcatgtgacttgcaatatccgttcggctcaccacaaactgacaacgtatgtgtcaacttccagatattggggcaaccctataaccaacacctcaaggtgacgttagcctcaactgaagaaaacacatataaaaattactatgaacagaacttatatagccatactgaattttataacactacagaaacagtagcacaactaaaaccaatagttgatgccaccactaatggaaactggtctcaatacataaacactgacaaactagaccaaacacctccaacaacattaaagcataacaacacatggtacaaaggcactgtatataaaccctcaattaaagaagtttcaacaaaagttagagccacctaccagaaagccacagagcttgctctaccaggagcagtaaaacccaccacagacttatttgagtatcacgcaggaatatacagctcaatattcctatctccaggaagagcatactttgagacccccggagcataccaagacataatttacaatcccctaacagacaaaggagtaggtaacatagtgtggatagactggctaagcaaatcagattcactatactctgaaaaacaaagcaaatgtgctatatttgacctaccactatgggcctccttctttggatacgcagaattctgctctaaaagcacaggagacacagccatagcatacaacgccagagtatgtgtcagatgtccctacacagagccacagctgctaaaccacaacaacccctctcaggggttcgtgttttactcctacaactttggcaaaggcaaaatgccgggaggcagctcccaggtacctataagaatgagatggaagtggtacgtgtgcatgttccaccagctagaggttatggaagctatatgtcagagcggaccgtttgcataccacagcgacgaaaaaaaagcagtactgggtataaaatataagttcgactggaaatggggaggaaatcctatctcccaacagattgtcagaaacccctgcagtggacaaaactcctcgggcaatagagtgcctcgctcagtacaagcagttgacccgaaatacgtctcgccccaactcgtctggcactcgtgggacttcagaagaggactctttggccaggcaggtattaaaagaatgcaaaacgaatcagatgctcttacactttctccagtccacagaccaaaacgccccaaaagggacacccaggtcaaagaaaaaacgccagaaaaagactcagattcagcactccaactccgaagactccagccctggatccactccagtcaagaaacaaaagacgaagaggaggagataccggaggggccggtacaagaacaactcctccaccagctccagcagcagcgattcctcagagtgcagctggagtccatcgcccaagaagtcctcaaaatcaggaggggccacagcctacaccccctactatcctcccatgcataaacaaggtctttatgtttaaccctccaggtccaaaacccatcgttgggtacgagtcctggagggatgagtttgaatcatgcaaggcctgggacaggccccctagatcctaccacacagatattcccacttacccctggatgcccaaaccccaagaccaaatacgtgtaagcttcaaacttggctttcattaaaatttcaaggccgtgcaacattcacttgtcggtgtctacctctaaaggtcactaagcactccgagcgcaagcgaggagtgcgaccctccccccctggggcaactccctcgaagtccggcgctacgcgcttcgcgctgcgccggacatctcggaccccccctccacccgaaacgcttgcgcgtttcggaccttcggcgtcgggggggtcgggggctttactaaacagactccgaggtgccattggacactgagggggcatacagcaacgtaagtgagtggggccagacttcgccataaggcctttatcttcttgccatttgtcagtatagggggtcgccataggcttcggcctccattttaggccttccggactacaaaaatggccgtttcagtgacgtcacggcggccattttaagtcagcttcggggagggcgtcatacagttcaaaggtcatcctcaccggaactggcacaaaatggcggtcaatctcttccgggtcaaaggtcacgcctacgtcatagatgacgtggggaggcgtactgtaaaacacggaagtaggccccgccacgtcattatcacgtgggtgctgcgtcacggccgccattttgttttacaaaatggccgacttccttcctcttttttaaaaaataaccgtcagcggcggcgcgcgcgctacgcgcgcggggggcaccccccccccccccggggggggggccccccccccggcccccccccccgaagaacgtcactaaccacgtgactcccacaggccaaccacagtctatgtcatccacttcctgggcatggtctacgtgataatataaagcggtgcacttccgaatggctgagtttttcacgcccgtccgcagcggcagcaccacggagggtgatccccgcgtcccgaggg

SEQ ID NO: 317 - protein, 736 aa, Alphatorquevirus sp.
MAWYWWRRRRRRGWWKPRRRRWRTRRTRRRRPARRYRTRRRVRRRRGRWRRRYRRWRRRGGRRRHRKKLIIKQWQPNFIRHCYIIGYLPLIICGENTFSHNYATHSDDMVSTGAYGGGMTTTKFTLRILFDEYQRHLNFWTVSNQDLDLARYLGVKLTIFRHPTVDFIVQIHTQPPFQDTEITGPSIHPGMLILSKKHILIPSLKTRPSRKHYIKLRVGAPRLFQDKWYPQSELCDVTLLVIYATACDLQYPFGSPQTDNVCVNFQILGQPYNQHLKVTLASTEENTYKNYYEQNLYSHTEFYNTTETVAQLKPIVDATTNGNWSQYINTDKLDQTPPTTLKHNNTWYKGTVYKPSIKEVSTKVRATYQKATELALPGAVKPTTDLFEYHAGIYSSIFLSPGRAYFETPGAYQDIIYNPLTDKGVGNIVWIDWLSKSDSLYSEKQSKCAIFDLPLWASFFGYAEFCSKSTGDTAIAYNARVCVRCPYTEPQLLNHNNPSQGFVFYSYNFGKGKMPGGSSQVPIRMRWKWYVCMFHQLEVMEAICQSGPFAYHSDEKKAVLGIKYKFDWKWGGNPISQQIVRNPCSGQNSSGNRVPRSVQAVDPKYVSPQLVWHSWDFRRGLFGQAGIKRMQNESDALTLSPVHRPKRPKRDTQVKEKTPEKDSDSALQLRRLQPWIHSSQETKDEEEEIPEGPVQEQLLHQLQQQRFLRVQLESIAQEVLKIRRGHSLHPLLSSHA

SEQ ID NO: 318 - protein, 156 aa, Alphatorquevirus sp.
MGKALRVFILKMHFSRISRSKRKVLLPALPAPPPPRQLLMWQPPIQNGTQLDRHWFESVWRSHAAFCGCGDCIGHLHHLAANLGRPPAPQPPREQHPPQIRGLPALPAPPSNRNSWPGTGGGAAGGEAGGSLGGGDGGHGEPADDDLLDAIALAEE

SEQ ID NO: 319 - protein, 126 aa, Alphatorquevirus sp.
LDPLQSRNKRRRGGDTGGAGTRTTPPPAPAAAIPQSAAGVHRPRSPQNQEGPQPTPPTILPCINKVFMFNPPGPKPIVGYESWRDEFESCKAWDRPPRSYHTDIPTYPWMPKPQDQIRVSFKLGFH

SEQ ID NO: 320 - DNA, 3715 bp, Alphatorquevirus sp.
cgggtgccggaggtgagtttacacaccgcagtcaaggggcaattcgggctcgggactggccgggctatgggcaaggctcttaaaaaagccatgtttctcggtaaactttacagaaagaagaggctcctgtcactgtccccactgcacactccacagaaagcttgcaggcttctgagtgctatgtggagaccccccgctcacaatgtacaaggccaagaaaagcagtggtacgagtcatgctttcggtctcacgctgctatgtgcggctgtggcgattttatcagccatctttgtcatcttgctgataattttggacgccctccgacagtctctcggcctccggcacccacacctccagtaaggccactgccagctctcccggcaccccccaacccctccggtagcagagcggcatggcctactggtgggggaaacggagaagacgagccccatggaggaggagacggcgctggaggactcgcagaactcgcagacgaggagctgctttccgccgccgtgggcgtcgccgaagagtaagaaagaggagggggaggtggagaaggacttatagaaaatggcggaggggcaaaaagagacgcaggcacaagagacgcttaatactgactcagtggcaacccgcctttataagacgctgctatatagtgggctacctgcccctaataatatgcggagaaaacacctccggcagaaactttgccacccactcagacgaccttatatccaacggaccttacggggggggcatgactaccaccaaatttactctcagaatactgtatgacgaacacctgaggcaccttaactactggactgtcagtaacgaggacctagacctgtgtagatacctggggggcaccttctacgcgtacagacaccccactgtagactttatcatacaaatacacaccagtcccccctttctagacactccactcacaggtcccagcatacacccgggcatgctgatgctcaccaaacacaaaatactaatacctagcctaaaaaccagacccagcaaaaaacacaaagtaaaaattagattcagaccccctaaactatttcaagacaagtggtacccccagtcagagctctgtgacaccacactcataaccgtctttgcaaccgcatgtgacctgcaatttccgttcggctcaccactaacgaacaacccttgcgtcaacttccaggtgctaggttccgtttacaaaaagcacctcagtatacttcctgataaactgtctacatatacagattactataatagtaacttatataacaatacacagctatatcaaacatttcaaacaatagctcaaattaaaccaagtgctcaagaaaatgaattttctcctacatggcaagagtgtcaaaatgctactaagcttaacgcgacaggcactaaccaatctgtatgtaatgacacctggtactatggaaaaacttatacaacctcaataacagaagcagctaaaaagattagagaaaaatacttaaaagctacaagacaagccctaccgttactacaaacacatggacatgaactactagagtaccacacaggtgtgtacagttctatattcctatctgcaggcagaacatactttgaaaccacaggggcctatacagacatagtttacaaccccctagtagacaaaggcataggaaacaaagtgtggctagaccccctaagtaaagaggacgcggtgttaaatagaaaacaagcaaaagtactgttagaagacatacccatatgggcagccctatttggatacacagaatttgcagctaaatacacaggagactctgccatatcagcaaactacagactgacaatacggtgcccctacacagaccccatgctagtagacaaaaacaacgaagaccaaggctttgtgccctactctaaaaactttggcaacggaaaaatgccaggagggtcctccaacgtcccactgactatgagaatcaaatggtaccccatactattccaccaactagaactcatggaagaactagtacagtccggaccgtttgcatacaggggcgacgaaaagacgtgtgtattagccataaaatataacttcagatggaaatggggaggtaaccctgtttctcaccagattgtgcgcaacccctgtaaaggagggtccggtgcccgtcgagagcctcgctcaatacaagcagttgacccgaaatacgtcacaccgacgctatccttccactcgtgggacttcagacggggactctttggcaaggcaagtattgagagaatgtcaagagaatcagaaactaatatctattctacaggcccaccaacaaaaagaccaaaaagagacacggacccgtacgactcgcagcaagaagaaaactcaatttcaagacacctccagctccagccctggatccactccagtcaagaagcccaaagcgaagaagaaacgcaagtcccggagaacctacaagaacaactcctccagcagctccgagagcagcagcagctccgagtccatctccagtccgtcgcctcggaagtcctcaaaatcagggcgggatacggcatacaccccctattatcttcccaagcctaaacaaggtttatatgtttgaccccccaggtcctaagcccatacagggctaccaggactgggtagaagagtacaccgcctgtaagtactggaacagacctcccagaaagtaccactcagatatgccgttctacccagacgtccccaaagttccagacaacataagggtctcctttaagcttggctttcaataaacacacctgttcactgtactaggccgtgggagtttcactcgtcggtgtctacctctaaaggtcactaagcactccgagcgccagcgaggagtgcgacccttccccctgactcaacttcttcggagccgcgcgctacgccttcggctgcgcgcggcacctcagacccccgctcgtgctgacacgctcgcgcgtgtcagaccacttcgggctcgcgggggtcgggatatttgctaaacagactccgagttgccattggacactgtagccgtgaatcagtaacgaaagtgagtggggccagacttcgccataaggcctttatcttcttgccatttgtccgtctcgggggtcgccgtaggcttcgggctcggttttaggccttccggactacaaaaaccgccattttagtgacgtcacggcggccattttaagtcagcgccggggaggcgtgacgtgcagttcaaaggtcatcctcaccggaactggcacaaaatggccgccaacttcttccgggtcaaaggtcgctactacgtcataggtgacgtcgctggtgtctgctgcaaacacggaagtaggccccgctacgtcacttgtcacgtgactgcgacgtcacagccgccattttgttttacaaaatggccgacttccttccgcttttttaaaaataacggttcggcggcggcgcgcgcgctgcgcgcgcgcgggcccccccccgcgggggggctccgccccccggccccccccccccgaagatcgtcactaaccacgtgactccaacaggccaacctacatctacatcgtacacttcctgggcggggtctacatcatcatataagtaactgcacttccgaatggctgagttttccacgcccgtccgcagcggcagcaccacggagggtgatccccgcgtcccgaggg

SEQ ID NO: 321 - protein, 731 aa, Alphatorquevirus sp.
MAYWWGKRRRRAPWRRRRRWRTRRTRRRGAAFRRRGRRRRVRKRRGRWRRTYRKWRRGKKRRRHKRRLILTQWQPAFIRRCYIVGYLPLIICGENTSGRNFATHSDDLISNGPYGGGMTTTKFTLRILYDEHLRHLNYWTVSNEDLDLCRYLGGTFYAYRHPTVDFIIQIHTSPPFLDTPLTGPSIHPGMLMLTKHKILIPSLKTRPSKKHKVKIRFRPPKLFQDKWYPQSELCDTTLITVFATACDLQFPFGSPLTNNPCVNFQVLGSVYKKHLSILPDKLSTYTDYYNSNLYNNTQLYQTFQTIAQIKPSAQENEFSPTWQECQNATKLNATGTNQSVCNDTWYYGKTYTTSITEAAKKIREKYLKATRQALPLLQTHGHELLEYHTGVYSSIFLSAGRTYFETTGAYTDIVYNPLVDKGIGNKVWLDPLSKEDAVLNRKQAKVLLEDIPIWAALFGYTEFAAKYTGDSAISANYRLTIRCPYTDPMLVDKNNEDQGFVPYSKNFGNGKMPGGSSNVPLTMRIKWYPILFHQLELMEELVQSGPFAYRGDEKTCVLAIKYNFRWKWGGNPVSHQIVRNPCKGGSGARREPRSIQAVDPKYVTPTLSFHSWDFRRGLFGKASIERMSRESETNIYSTGPPTKRPKRDTDPYDSQQEENSISRHLQLQPWIHSSQEAQSEEETQVPENLQEQLLQQLREQQQLRVHLQSVASEVLKIRAGYGIHPLLSSQA

SEQ ID NO: 322 - protein, 156 aa, Alphatorquevirus sp.
MGKALKKAMFLGKLYRKKRLLSLSPLHTPQKACRLLSAMWRPPAHNVQGQEKQWYESCFRSHAAMCGCGDFISHLCHLADNFGRPPTVSRPPAPTPPVRPLPALPAPPNPSGSRAAWPTGGGNGEDEPHGGGDGAGGLAELADEELLSAAVGVAEE

SEQ ID NO: 323 - protein, 126 aa, Alphatorquevirus sp.
LDPLQSRSPKRRRNASPGEPTRTTPPAAPRAAAAPSPSPVRRLGSPQNQGGIRHTPPIIFPSLNKVYMFDPPGPKPIQGYQDWVEEYTACKYWNRPPRKYHSDMPFYPDVPKVPDNIRVSFKLGFQ

SEQ ID NO: 324 - DNA, 3714 bp, Alphatorquevirus sp.
cgggtgccggaggtgagtttacacaccgcagtcaaggggcaattcgggctcgggactggccgggccccgggcaaggctcttaaaaaatgcactttcgcagagtgcgagcgaaaaggaaactgctactgcaaactgtgcgagctccaccgaaggcacctgccatgagcttcaccacacctactattaatgccgggatccgagagcagcaatggttcgagtccatccttagatcccaccactcgttctgtggctgtggtgatcccgtgcttcattttactaaccttgctactcgctttaactatctgcctactacctcttcgcctctggaccctcccggcccagcgccgcgaggccgcccggcgctccgccgtctcccggcactcccttcagcccccgcgaccccctctagagatccagtatggcctactggttccgagggtggggctggaggccgaggcgccggtggagaaggtggcgccgccgtcgaaggagactaccgagaagaagagttagacgagctgttcgcggccttggaagaagacgcaaaccaagggtaaggaggcgccgcagacgccgcagacgtgtctacaaacgggggtggagacgcaggaggtacataagacgtgggcgacgcaaaaagaaactcgtactgactcagtggaacccggcagtagttaagaggtgcaacattaagggcggacttccaataatcatatgcggagagcccagggcagcctttaactatggctaccacatggaggactacactccccaacctttccccttcggagggggaatgagcacagtgactttctctctgaaaggcttatatgatcagtacctcaaacaccaaaacaggtggactttctcaaacgaccagctagacctggccagatacaggggctgtaaactaaggttttacagaagccccgtctgtgactttatagtacactacaacctaatacctccactaaaaatgaaccagtttacaagtcccaacacgcacccgggactactcatgctcagcaaacacaaaataataattcccagcttccaaacaagaccggggggcaaacgctttgttaaaataagacttaatccccccaaactatttgaagacaagtggtacactcaacaagacctatgcaaagttccgctcgttagtattacagcaactgcggctgacttgcggtatccgttctgctcaccacaaacgaacaacccttgcaccaccttccaggtgctgcgcaagaactacaacacagttataggaacttccgtaaaagaccaagagtccacacaagagtttgaaaaatggctatatggcacagactcacactatcaaacatttgccacagaagctcaactaggtagaatacctgcatttaaccctgatggcaccacaaactcacaaaaagacttctggcaacaaagctggagcaaaaaaaatgaacaatggttaggattaggaacatacccacagactactacacaaatgtacaaaattccatatgacagcaactttggctaccctacatacagagcacaacctgaatatattaaaaaaagaagagcctcaaactttaaatatgaaatagaaaaccctgtcagtaaaaaagtatggccacaaccaagtacaacaactcccacagtagactactatgaataccactgtggatggttcagtaacatatttataggcccaaacagatacaatttacaatttcaaacagcatacgtagacaccacatataacccactcatggacaaaggaaaaggcaacaaaatatggttccagtacctttctaaaaaaggcacagactataacgaaaaacaatgctactgccttctagaagacatgcccctgtgggcaatgtgctttggatacacagactatgtagaaactcaattaggcccaaatgtagaccatgaaacagcaggccttctaataataatatgtccttacactcaaccacctatgtatgacaaaactagacccaactggggatacgtagcctatgacacaaactttggcaatggaaaaatgccctccggaacaggccaagttccagtatactggcaatgcagatggagacccatgctgtggttccaagaacaagtactaaatgacatctcaaagactggaccgtacgcctacagagacgaatataaaaatgtacagctgactctctactacaactttatttttaactgggggggcgacatgtattacccacaggtcgttaaaaacccctgtggagactccggaatcgttcccggttccggtagattcactcgagaagtacaagtcgttagcccgctttccatgggaccggcctacatcttccactacttcgacagcagaaggggcttctttagtgaaaaagctcttaaaagaatgcaacaacaacaagaatttgatgaatcttttacattcaaacctaagagacccaaactttctacagcagccacagaaatcctccagctcgaagaagactcgtcttcaggggaaggaaaatcgccactacagcaagaagagaaagaagcagaagtcctccaaacgccacaagtacagctccagctccagcggaacatccaggagcagctcgcaatcaagcagcagctccaattcctcctgctccaactcctcaagacccaatccaatttgcatttaaacccacaatttttaagcccttcataaaatatgacatgtttggggacccccttcctcaccccccaacagcccaagactgggccacagaatatgagtgctgtaaggcctttaacaggccacctagaaccaacctaaaagacacccccttttacccctgggtccctaaacctaaacctcaattccgtgtatcttttaaacttggttttcaataaacaaggccgtgggagtttcacttgtcggtgtcaacctcttaaggtcactaagcactccgagcgtaagcgaggagtgcgaccctcccccctggggcaactccctcgaagtccggcgctacgcgcttcgcgctgcgccggacatctcggaccccccctccacccgaaacgcttgcgcgtttcggaccttcggcgtcgggggggtcgggggctttactaaacagactccgagatgccattggacactgagggggtgaacagcaacgaaagtgagtggggccagacttcgccataaggcctttatcttcttgccatttgtcagtgtccggggtcgccataggcttcggcctcggttttaggccttccggactaccaaaatggcggattccgtgacgtcatggccgccattttaggctgttgcccggcgtttgacttccgtgttaaaggtcaaacacccggcggcaccacaaaatggccgtcaattacttccgaggtcaaaggttaccgctacgtcataagtcacgtgacagggaggagcgacaaacccggaagtcatcctcacccacgtgacttaccacgtggtgtgtacgtcacacgccgccattttaaatcacaaaatggcggacttccttccgcttttttaaaaaaaacggccccccccgaagtccgtcactaaccacgtgactcccgcaggccaaccgagtgctatgtcgtgcacttcctgggcggagtctacgtcctcatataagtaagtgtacttccgaatggctgagttttccacgcccgtccgcagcggcagcaccacggagggtgatccccgcgtcccgaggg

SEQ ID NO: 325 - protein, 760 aa, Alphatorquevirus sp.
MAYWFRGWGWRPRRRWRRWRRRRRRLPRRRVRRAVRGLGRRRKPRVRRRRRRRRRVYKRGWRRRRYIRRGRRKKKLVLTQWNPAVVKRCNIKGGLPIIICGEPRAAFNYGYHMEDYTPQPFPFGGGMSTVTFSLKGLYDQYLKHQNRWTFSNDQLDLARYRGCKLRFYRSPVCDFIVHYNLIPPLKMNQFTSPNTHPGLLMLSKHKIIIPSFQTRPGGKRFVKIRLNPPKLFEDKWYTQQDLCKVPLVSITATAADLRYPFCSPQTNNPCTTFQVLRKNYNTVIGTSVKDQESTQEFEKWLYGTDSHYQTFATEAQLGRIPAFNPDGTTNSQKDFWQQSWSKKNEQWLGLGTYPQTTTQMYKIPYDSNFGYPTYRAQPEYIKKRRASNFKYEIENPVSKKVWPQPSTTTPTVDYYEYHCGWFSNIFIGPNRYNLQFQTAYVDTTYNPLMDKGKGNKIWFQYLSKKGTDYNEKQCYCLLEDMPLWAMCFGYTDYVETQLGPNVDHETAGLLIIICPYTQPPMYDKTRPNWGYVAYDTNFGNGKMPSGTGQVPVYWQCRWRPMLWFQEQVLNDISKTGPYAYRDEYKNVQLTLYYNFIFNWGGDMYYPQVVKNPCGDSGIVPGSGRFTREVQVVSPLSMGPAYIFHYFDSRRGFFSEKALKRMQQQQEFDESFTFKPKRPKLSTAATEILQLEEDSSSGEGKSPLQQEEKEAEVLQTPQVQLQLQRNIQEQLAIKQQLQFLLLQLLKTQSNLHLNPQFLSPS

SEQ ID NO: 326 - protein, 156 aa, Alphatorquevirus sp.; identical to SEQ ID NO: 196

SEQ ID NO: 327 - protein, 58 aa, Alphatorquevirus sp.; identical to SEQ ID NO: 197

SEQ ID NO: 328 - DNA, 3709 bp, Alphatorquevirus sp.
cgggtgccgaaggtgagtttacacaccgaagtcaaggggcaattcgggctcgggactggccgggctatgggcaaggctcttaaaaaagcatgtttctcggcaggcattggagaaagaaaagggcactgctactgctaccggtgccagctaaaccgaaagcactttctcaacagatgagctggagcagacccgtgcacgatgagcgcggaatacagcgcaactggttcgagggggtcattcgcacccacgctgcttgctgtggttgtggtaatgcttgtactcatctggctgctctggcccagaggtatgggtacccctccctaccttcgcataccccgcgacccggcacctcgacacctgtgagcaccccagagcagatccgtagagcccgggccctgcccgcggctccggaccaccctccagccctgccatggcatggggatggtggaagagacggcggcgcggctggttccgacggcggtggacccgtggcagagttcgcagaagatggcctagacggacttatcgccgccctcgacgacgaacagtaaggaggcgcagacggaggaggagggggagacgaaaattcagacggtacagatttaagagacgctaccgcagacgtaaaaagactcaaaagattaaactgacacaatggcaaccagccaaaacaaaacgctgctttatgataggatattttcctactgttattcagggacaaggacggtggtcagaaaactttaccagtcacatagaagataaagtggccaagggaccctttgggggcgggcacagcaccagtaggtggtctctaaaagtactgtacgaggagaaccagagacaccacaacttttggacagccagtaacagtgatctagaactagccaggttctttggcagctcctggaggttttacagacacgacacacaagactacatagtcacctggaacagaaaggctcccctgggaggcaatatactgacatcacctaacatgcacccgggaatagccatgctaagcaaacacaaggtggtagtcccaagtaaactgaccagacccaggggcaaaaagagcattaaagttaatataaaaccccccactacattcatagacaagtggtacttccaaaaggacatatgtgacctaacattactaaacttaaacgttgtaacatgtgaccttcggtttccgttctgctcaccacaaactgacaacgtttgtgtaaccttccaggtgcttgcaccaatttataacgattacatgtccatcacttccccaaaactgacttcagcattatggaaagagtactatagagaatttttaaataaagctataccaccaaacaaagacagaaaagcaaacattttaaacaccttcttaacagaaggatcatacagaaaaccacaagtagacaaatacagaaaaccattaaatgaaaaccaatactactcacccaaagatgcacagtggggagaccccattcacataataacacacacagaaataacaggcaaccaaaaaaaacaagacagaggcgacttaattgataaaatcattaacaatgccgaaaacgttttaacaaaagttaaccaagaactaaaggaatatgaagccagagaaacagaacacgcattattcacacactggacaggaatatttggacctccatttctagactacaacagaataagtccagaaattaaaggcctctacaaagacatcatatacaaccccctaatagacaaaggagtaggcaatcacatatgggtggactactgcagcaaaacaaacaacgaatactcagaaacccagagcaaatgtcacttaacagacctccccttatggtgcatgacgtttggatatgcagactgggtaaaaaaagacacaggcaactggggaatagtagactgggccagagtacttataatatgcccttacacctttccaaagctatacaaccctgacaaacccaacacaggctttgtagtatacagctccaactttgccatgggacgaatgcccgatggaagcaaatacgtccccataggcataagacacaagtggtacccaacaatgctaaaccaacagccagtactagaagacattagtctaagcggaccgttcgctcccagagagaaagtacctagcgtccaactgactgccaagtacaagttccgatggcattttggtggcaatcctgtttccgaacaggttattaaagacccgtgccaacagcccaccttccaaatgcccggaaccggtacactccctcgcagaatacaagtggcggacccgaaatacctcgggccccagtacaccttccactcgtgggactacagacgtgacttctttaacagaaagactattaagagaatgtcagaacaaccagaaacttttgagtctatattctcaggcccaaaaaaaccaagggtggacctcgacaaaatccagctgcaagaaggcaactattcccaagaccaaagaaaacagaaaccgtgggaagacagcgagacccagacagagagcgaagtcccatcagaagaagagacgcagaacctacagcagcagctccaacagcagctccgagaacaaaagcagctcagacagggaatcaactgcctcttcgagcagctaataaaaacccagcagggagtccatatagatccttcccttgtataggcccaaaagtcttacttttcccagagagagcacctaaaacctactctaagggagactgggaaacagagtatcaggcctgcagagcgtttgacagaccccctagaagcaacctgtcagactcaccctactatccttaccttccaccaccccccgaaaaattctatgtaacctttaagctcggcttcaaataaacaaggccgtgggagtttcacttgtcggtgtctgcttataaaggtcactaagcactccgagcgaagcgaggagtgcgaccccctgccctgggcccacttcttcggagccgcgcgctacgccttcggctgcgcgcggcacctcagacccccgctcgtgctgacacgctcgcgcgtgtcagaccacttcgggctcgcgggggtcgagaaatttgctaaacagactccgagttgcctttggatactgtagctgtgaatcagtaacgaaagtgagtggggccagacttcgccataaggcctttatcttctcgccatttgtccgtgtcaggggtcgccataggcttcggcctccgttttaggccttccggactacaaatatggccgattcagtgacgtcacggcagccattttaagtagttgaggcggacggtggcgtgagttcaaaggtcaccatcagcgtcacctactaagatggcggtcaatatcttccgggtcaaaggtcagcgctacgtcataagtcacgtgggcacggcttgcttaaacacggaagtagctgacccgcgtgacttgtcacgtgacgtgtgcgtcacggccgccattttgttttacaaaaatggccgacttccttcctcttttttaaaaataacggttcggcgggcccccccccgtgctacgtcacaaactacgtgtcaattctccataggccagacacgatctacgtcatacacttcctgggcatggtctacatcataatataagacgccgcacttccgaatggctgagttttccacgcccgtccgcagcggtgaagccacggagggagatcagcgcgtcccgaggg

SEQ ID NO: 329 - protein, 749 aa, Alphatorquevirus sp.; identical to SEQ ID NO: 248

SEQ ID NO: 330 - protein, 153 aa, Alphatorquevirus sp.; identical to SEQ ID NO: 249

SEQ ID NO: 331 - protein, 84 aa, Alphatorquevirus sp.; identical to SEQ ID NO: 250

SEQ ID NO: 332 - DNA, 3707 bp, Alphatorquevirus sp.
cgggagccggaggtgagtttacacaccgcagtctaggggcaattcgggcacgggtctggccgggctatgggcaagattcttaaaaagtttccccgctgtgtcctacgccaggacacaaaaacatgccgtggagaccgccggcgcacgacgtccagggcagagagaaccagttctttgcgggatgttttcacatgcatgctgctttctgcgggtgcggtgaccttgtcggccatcttgctagcattgctgctcgctttcctgctgccggaccccctgcttcgccgggcctcagacctccgagaccccctgccccggccggtccgggcggtccccccggctaccttcccgctctcccggctccggcaccggagccgcctaacccagcaccacgccgtggtggtggggaagatggcgccgcagcgggtggcgccgccgatggggcacaagaagaggccgccgcctacggcgaagaagagctagaagagcttttccgcgccgccgccgaggacgatatgtaagtaggagatggcgccggccttacaggcgcagacgaaaaaaggggcgacggagacgcagacgcagacggactcacaaacccaccctactcctcagacagtggcagccggacgttgttaggacctgctacataacaggctggatgcccctactaatctgtggctctggaaacacccagtttaactttataatgcacatggacgatatcacccccaggggagcctcctacgggggcaacctaactaacatgacttttaccctggagggtctctttgaacagtttgaataccacagaaacaggtggtccagaagcaaccacgacctagacatggccagatacttgttcaccacaataaaactctacagacatgaaactgtagactacatagtagcctacagcagaacaggccctttccagataagccacctcactcacctcagcacccacccactactcatgcttctgtcaaaacaccacatagtagtacccagtctgagaaccaagcctaggggcagaaaatacaaaaaagtaagaataaaacctccaaaacttatgttaaacaagtggtacttcaccaaagacatatgtgacctaggcctctttcaaatatgggccacgggagcagaactcagaaacccctggctcagatcaggcaccaaatccccctgcgtgggcttcgctgtactaaacaactccatttacacagacctcagcaacctaccagatcacaacacacaaagaacaaatatacaacataaactacacccatcttcactaactcctgcagaaaacaaaagcctatggcagtacacatacaccaaactaatggctcccatttactacaaagctgttactaacagcacatacaattggcaaaattacagcgacgcagataactatcacaaaacatattgcaaatgggcagatatgaaaacgtcaagactagaacaaattcaaaaagaattttcagctgtatacccacaactaccaacacaaaggcccacagacagcacacttttacaagactttggcatatacagcccatactacctaacacccaccagaatcagcctagactggcacacagcctacacctatgtcaggtacaacccactcacagacaaaggtataggcaacagagtctacctgcagtggtgctcagagagcagctgcaagtggtccagcacaaaaagcaaggccacaatagtagatatgccactgttcatcgccttgtatggctacatagactgggccataaaggccacgggagtctccagcctagtaaaagacgccagactgatgatcagatgcccctacacagagcctcaacttgtgggggcaacagaagacgtgggcttttgcttactcagccaaaccttcatgaacggagacatgcccgttcttgcaccatatatcccaatttcctggttcgttaagtggtatcccatgttagcacatcaaaaggaagccatagaggacattgtgggcagcggaccgtttatggttagagatcaggaagccagcagttgggacataaccatggggtacagagcctgttttaaatggggcgggtcgcctctgcccacacaggcaatcgacgacccctgccagaagcccacctatccactacccgaccccgatagacaccctcgcctactacaagtctcagacccgagcaagctcggcccaaagacagtcttccacagctgggacatgcgacggggacagtttagcaaaagaagtattgaaagaatgtcagaatacacagagaatgatgaactttttgaaacaggtctgccacgaaaaaagaaaaagttcgacacgccaatcggaggactccaaggcgaggaaagaagaggctacactttactccaagccctccaagacagccaggaagaaacggagtcagaagaccaaaaacaagcaccccaaacaaaagagacggagacgcaacaactcctccaccagctccagctccagaaacaccaccagcgagtcctcagaaagggactccgagagctgttcggggacgttctccgactccggagaggagtccacttcgaccccctccttacataggccctccaccatacatcgcagatctactttttccttctactaataaaaaaaaaaaattctccaccttcgactgggaaacggaggctcagctaggagccatattcaagcgacccatgcgcttctatccctcagacccccctttctacccgtggctaccccccaagcaagatatccccaaggtatgtaaagtaaacttccaaataaagcttgcagagtgagtaattcgaggccctcctgtattcacttagcggtgtctacctcttaaggtcaccaagcactccgagcgccagcgaggagtgcgaccctccaccaaggggcaacttcctcggggtccggcgctacgcgcttcgcgctgcgccggacgcctcggacccccccctcgacccgaatcgctcgcgcgattcggacctgcggcctcgggggggtcgggggctttactaaacagactccgagttgccattggacactggagctgtgaattagtaacgaaagtgagtggggccagacttcgccataaggcctttatcttcctgccatttgtcagtggcttccgggtccgcgtgggggccgccattttagcttcggccgccattttaggccctcgcgggcctccgtaggcgcgttttagtgacgtcacggcagccattttgtcgttacgtttgagacacgtgatgggggcgtgcctaaacccggaagcatccctggtcacgtgactctgacgtcacggcggccattttgtgctgtccgccatcttgtgacttccttccgctttttaaaaaaaaaagaggaagtatgacgtagcggcgggggggcggcgcgcttcgcgcgctgcccaccaggggacacagcggggaaactttttaagaatcttgcccatagcccggccagacccgtgctaaatccaccgcgcatgcgcggccacgcccccgccgccattttgtgcagcccgccaatttctctttcaaacagaccaatccagtactacttcgtgcacttcctggggcgtgtcctgcccctctatataagcagaagcggtgacgaatggtagagtttttcctggcccgtccgcggcgagagcgcgagcgaagcgagcgatcgagcgacccgtggg

SEQ ID NO: 333 - protein, 645 aa, Alphatorquevirus sp.
MPLLICGSGNTQFNFIMHMDDITPRGASYGGNLTNMTFTLEGLFEQFEYHRNRWSRSNHDLDMARYLFTTIKLYRHETVDYIVAYSRTGPFQISHLTHLSTHPLLMLLSKHHIVVPSLRTKPRGRKYKKVRIKPPKLMLNKWYFTKDICDLGLFQIWATGAELRNPWLRSGTKSPCVGFAVLNNSIYTDLSNLPDHNTQRTNIQHKLHPSSLTPAENKSLWQYTYTKLMAPIYYKAVTNSTYNWQNYSDADNYHKTYCKWADMKTSRLEQIQKEFSAVYPQLPTQRPTDSTLLQDFGIYSPYYLTPTRISLDWHTAYTYVRYNPLTDKGIGNRVYLQWCSESSCKWSSTKSKATIVDMPLFIALYGYIDWAIKATGVSSLVKDARLMIRCPYTEPQLVGATEDVGFCLLSQTFMNGDMPVLAPYIPISWFVKWYPMLAHQKEAIEDIVGSGPFMVRDQEASSWDITMGYRACFKWGGSPLPTQAIDDPCQKPTYPLPDPDRHPRLLQVSDPSKLGPKTVFHSWDMRRGQFSKRSIERMSEYTENDELFETGLPRKKKKFDTPIGGLQGEERRGYTLLQALQDSQEETESEDQKQAPQTKETETQQLLHQLQLQKHHQRVLRKGLRELFGDVLRLRRGVHFDPLLT

SEQ ID NO: 334 - DNA, 3703 bp, Alphatorquevirus sp.
cgggtgccggaggtgagtttacacaccggagtcaaggggcaattcgggctcgggactggccgggccccgggcaaggctcttaaatagctatgttttttggtaggcctcacagaaagaagaggctactgtcactgcttagcttgccagctgcaaagaaaaaaccacctatgagtcagtggaggccccctctgcacaatgtcccggggatcgagcacctctggtacgagtccgtgcatcgtggccatgctgctatttgtggctgtggggatcctgtacgccatcttactgctcttgctgaaagatatggcgtcccagggggcccgcgatcttctggggcaccgggagtagggggcaaccacaaccctcccccaatccgtcgagcccgccacccggcggccgctccggaccccccagcaggtaaccagcctccggccctgccatggcatggggatggtggaagcgaaagcggcgctggtggtggagaaagcggtggacccgtggccgacttcgcagacgatggactagacgacctcgtcgccgccctcgacgaagaagagtaaggaggagaaggaggtggaggagagggcgaccgagacgcagactgtacagacgctacagacggtacagacgaaaacgaaagagggctaagataactataagacagtggcaaccagccaagactagaaaatgctacataaggggctacatgcccgcccttatgtgcggctggggagcctacagcagaaactacagcagtcacttagaggacaaaataactgcgggaccctatggtgggggacacagcactatgagattctctctacaggtgctctacgaagagcacctaaaacaccacaactactggacacgcagcaaccaggacctagaactggccctgtactatggctgcacaattaagttttacagggaccccgaaacagactttatagttacataccagagaaaatctcctctgggaggtaacataatgacagcaccatcactacacccagcagaagccatgcttacaagaaacaaaatactagtacctagtctgcaaactaaaccaaagggcagaaaaactgtaaaggttaacatagcaccccccaccctatttgttcacaagtggtactttcaaaaggacatatgtgacttaacactgttcaacttgaacgttgttgcggctgacttgcggtttccgttcggctcaccacaaactgacaacatttgcataaccttccaagttctctcttccgtttacaacggcttcctctccataactcacacttcctcaaccaatgacaatattatagatcaattcttaagtctagcaataccagacgatcctaaagaaagacactggaatgttttaaatacatacaaaacagaaggttgtttttcacacccacaactgcaaaaatacaaaatacctcaaacaggcattggtattagtaactactttgccacaccagacggactatggggagacgcgatatacagcaaaaacaatgcaggcacaaagcaaacagcagccgatattcgacaaacaattaaagcaaacatgacatcttactttaaaaaaatacaggaagagtccacaataataacaaagggagacaaattattctgtcacctcacaggcatattctcacctccttggctaaacataggtagagttagcagagaatttccaggcctatacaatgacattgtttacaacccatggacagacaaaggctcaggcaacaaaatatggctagacagcttaacaaaagcagacaacatttacaaaaaaggacagagtgtactactaatggaagacatgcccctatacataatgctaaacgggtatatagactgggctaaaaaagaactaaacaactggcagatgcaaaccatgtacagagtaatgatagtatgtccctatacttatcccagactatatttagacacaaacccatacaacgggtatgtaatgtactcacaagcctttggagcaggtctcatgccagacaaagtatcaattccacccatagcatggagaggcaaatggtacccacacgtactgcaccaagaagcagtaataaatgacatagttcagtgtgggccttttgcaccaaaggtacaaaaaccaaacatgcagcttaacatgaaatactcatttagattcacatggggcggtaatcctatctccgcacagattgttaaagacccctgcacccagcccacctttgaaattcccggtggcggtaacatccctcgcagaatacaagtcatcaatccgaaattcctcgggcccaactacagtttcagatcatttgacatacgacgtgacctctttagcgacaagagtcttaaaagaatctcagaacaaccagagacttttgagtctttattctcaggtggcaaacgccccaggatcgacctgcccaagtacgtcccgccagaagaaagctccgatacccagcagaggcaacaaagagaacagaggccgtggacgagcgaaagcgaaagcgaagcagaagcccaagaagaggcgccgcagggctcgatccgagagcagctccagcagcagctccaagagcagcttcaactccgaagagggctccagtgcctattcgagcagctagtgagaacgcagcagggagtccacgtagacccctgcctcgcgtaggccccgagcagtggctgtttccagagagaaagcccagaccccctcctacttccggggactgggccatggaatacctaatgtgtaagataatgaacaggcctccccgcactcacctaacagacccccctttctacccttactgcaaaaacaattacaatgtaacctttcagcttaactacaaataaaagccatcctctctgtgcaaggccgtgggagtttcacttgtcggtgtctacctctaaaggtcactaagcactccgagcgccagcgaggagtgcgacccttccccctgactcaacttcttcggagccgcgcgctacgccttcggctgcgcgcggcacctcagtcccccgctcgtgctgacacgcttgcgcgtgtcagaccacttcgggctcgcgggggtaacgaaagtgagtggggccagacttcgccataaggcctttatcttcttgccatttgtccgtgtcggcggtcgccataggcttcgggctcggttttaggccttccggactacaaaaaccgccatattagtgacgtcacggccgccattttaagtaagcatggcgggcggtggtgtcaaatgtcaaaggtcacagcctgccatacttgcacaaaatggcggacttccgcttccgggttggccgccatgtttgatcacgtgacaacatacgtcacggccgccattttagttcacaaaatggccgacttccttcctctttttcaaaaaaaagcggaagtgccgcagcggcggcggggggcggcgcgctacgcgcgccgcccagtagggggtgctatagcacccccccccgcgcatgcgcggggtcccccccccgggggggctctgccccccggccccccccgtgctacgtcactaaccacgtgtgcttcacaggccaaccatatgctatgtcgtccacttcctggggtgtgtctacgtgataatataaatgagtgcacttccgaatggctgagtttatgctgcccgtccgcggagaggagccacggcagaggatccgaacgtcccgaggg

SEQ ID NO: 335 - protein, 744 aa, Alphatorquevirus sp.
MAWGWWKRKRRWWWRKRWTRGRLRRRWTRRPRRRPRRRRVRRRRRWRRGRPRRRLYRRYRRYRRKRKRAKITIRQWQPAKTRKCYIRGYMPALMCGWGAYSRNYSSHLEDKITAGPYGGGHSTMRFSLQVLYEEHLKHHNYWTRSNQDLELALYYGCTIKFYRDPETDFIVTYQRKSPLGGNIMTAPSLHPAEAMLTRNKILVPSLQTKPKGRKTVKVNIAPPTLFVHKWYFQKDICDLTLFNLNVVAADLRFPFGSPQTDNICITFQVLSSVYNGFLSITHTSSTNDNIIDQFLSLAIPDDPKERHWNVLNTYKTEGCFSHPQLQKYKIPQTGIGISNYFATPDGLWGDAIYSKNNAGTKQTAADIRQTIKANMTSYFKKIQEESTIITKGDKLFCHLTGIFSPPWLNIGRVSREFPGLYNDIVYNPWTDKGSGNKIWLDSLTKADNIYKKGQSVLLMEDMPLYIMLNGYIDWAKKELNNWQMQTMYRVMIVCPYTYPRLYLDTNPYNGYVMYSQAFGAGLMPDKVSIPPIAWRGKWYPHVLHQEAVINDIVQCGPFAPKVQKPNMQLNMKYSFRFTWGGNPISAQIVKDPCTQPTFEIPGGGNIPRRIQVINPKFLGPNYSFRSFDIRRDLFSDKSLKRISEQPETFESLFSGGKRPRIDLPKYVPPEESSDTQQRQQREQRPWTSESESEAEAQEEAPQGSIREQLQQQLQEQLQLRRGLQCLFEQLVRTQQGVHVDPCLA

SEQ ID NO: 336 - protein, 156 aa, Alphatorquevirus sp.
MFFGRPHRKKRLLSLLSLPAAKKKPPMSQWRPPLHNVPGIEHLWYESVHRGHAAICGCGDPVRHLTALAERYGVPGGPRSSGAPGVGGNHNPPPIRRARHPAAAPDPPAGNQPPALPWHGDGGSESGAGGGESGGPVADFADDGLDDLVAALDEEE

SEQ ID NO: 337 - protein, 65 aa, Alphatorquevirus sp.
LPRVGPEQWLFPERKPRPPPTSGDWAMEYLMCKIMNRPPRTHLTDPPFYPYCKNNYNVTFQLNYK

SEQ ID NO: 338 - DNA, 3703 bp, Alphatorquevirus sp.
cgggtgccggaggtgagtttacacaccggagtcaaggggcaattcgggctcgggactggccgggccccgggcaaggctcttaaatagctatgttttttggtaggcctcacagaaagaagaggctactgtcactgcttagcttgccagctgcaaagaaaaaaccacctatgagtcagtggaggccccctctgcacaatgtcccggggatcgagcacctctggtacgagtccgtgcatcgtggccatgctgctatttgtggctgtggggatcctgtacgccatcttactgctcttgctgaaagatatggcgtcccagggggcccgcgatcttctggggcaccgggagtagggggcaaccacaaccctcccccaatccgtcgcgcccgccccccggcggccgctccggaccccccagcaggtaaccagcctccggccctgccatggcatggggatggtggaagcgaaagcggcgctggtggtggagaaagcggtggacccgtggccgacttcgcagacgatggactagacgacctcgtcgccgccctcgacgaagaagagtaaggaggagaaggaggtggaggagagggcgaccgagacgcagactgtacagacgctacagacggtacagacgaaaacgaaagagggctaagataactataagacagtggcaaccagccaagactagaaaatgctacataaggggctacatgcccgcccttatgtgcggctggggagcctacagcagaaactacagcagtcacttagaggacaaaataactgcgggaccctatggtgggggacacagcactatgagattctctctacaggtgctctacgaagagcacctaaaacaccacaactactggacacgcagcaaccaggacctagaactggccctgtactatggctgcacaattaagttttacagggaccccgaaacagactttatagttacataccagagaaaatctcctctgggaggtaacataatgacagcaccatcactacacccagcagaagccatgcttacaagaaacaaaatactagtacctagtctgcaaactaaaccaaagggcagaaaaactgtaaaggttaacatagcaccccccaccctatttgttcacaagtggtactttcaaaaggacatatgtgacttaacactgttcaacttgaacgttgttgcggctgacttgcggtttccgttcggctcaccacaaactgacaacatttgcataaccttccaagttctctcttccgtttacaacggcttcctctccataactcacacttcctcaaccaatgacaatattatagatcaattcttaagtctagcaataccagacgatcctaaagaaagacactggaatgttttaaatacatacaaaacagaaggttgtttttcacacccacaactgcaaaaatacaaaatacctcaaacaggcattggtattagtaactactttgccacaccagacggactatggggagacgcgatatacagcaaaaacaatgcaggcacaaagcaaacagcagccgatattcgacaaacaattaaagcaaacatgacatcttactttaaaaaaatacaggaagagtccacaataataacaaagggagacaaattattctgtcacctcacaggcatattctcacctccttggctaaacataggtagagttagcagagaatttccaggcctatacaatgacattgtttacaacccatggacagacaaaggctcaggcaacaaaatatggctagacagcttaacaaaagcagacaacatttacaaaaaaggacagagtgtactactaatggaagacatgcccctatacataatgctaaacgggtatatagactgggctaaaaaagaactaaacaactggcagatgcaaaccatgtacagagtaatgatagtatgtccctatacttatcccagactatatttagacacaaacccatacaacgggtatgtaatgtactcacaagcctttggagcaggtctcatgccagacaaagtatcaattccacccatagcatggagaggcaaatggtacccacacgtactgcaccaagaagcagtaataaatgacatagttcagtgtgggccttttgcaccaaaggtacaaaaaccaaacatgcagcttaacatgaaatactcatttagattcacatggggcggtaatcctatctccgcacagattgttaaagacccctgcacccagcccacctttgaaattcccggtggcggtaacatccctcgcagaatacaagtcatcaatccgaaattcctcgggcccaactacagtttcagatcatttgacatacgacgtgacctctttagcgacaagagtcttaaaagaatctcagaacaaccagagacttttgagtctttattctcaggtggcaaacgccccaggatcgacctgcccaagtacgtcccgccagaagaaagctccgatacccagcagaggcaacaaagagaacagaggccgtggacgagcgaaagcgaaagcgaagcagaagcccaagaagaggcgccgcagggctcgatccgagagcagctccagcagcagctccaagagcagcttcaactccgaagagggctccagtgcctattcgagcagctagtgagaacgcagcagggagtccacgtagacccctgcctcgcgtaggccccgagcagtggctgtttccagagagaaagcccagaccccctcctacttccggggactgggccatggaatacctaatgtgtaagataatgaacaggcctccccgcactcacctaacagacccccctttctacccttactgcaaaaacaattacaatgtaacctttcagcttaactacaaataaaagccatcctctctgtgcaaggccgtgggagtttcacttgtcggtgtctacctctaaaggtcactaagcactccgagcgccagcgaggagtgcgacccttccccctgactcaacttcttcggagccgcgcgctacgccttcggctgcgcgcggcacctcagtcccccgctcgtgctgacacgcttgcgcgtgtcagaccacttcgggctcgcgggggtaacgaaagtgagtggggccagacttcgccataaggcctttatcttcttgccatttgtccgtgtcggcggtcgccataggcttcgggctcggttttaggccttccggactacaaaaaccgccatattagtgacgtcacggccgccattttaagtaagcatggcgggcggtggtgtcaaatgtcaaaggtcacagcctgccatacttgcacaaaatggcggacttccgcttccgggttggccgccatgtttgatcacgtgacaacatacgtcacggccgccattttagttcacaaaatggccgacttccttcctctttttcaaaaaaaagcggaagtgccgcagcggcggcggggggcggcgcgctacgcgcgccgcccagtagggggtgctatagcacccccccccgcgcatgcggggggtcccccccccggggggctctgccccccggcccccccccgtgctacgtcactaaccacgtgtgcttcacaggccaaccatatgctatgtcgtccacttcctggggtgtgtctacgtgataatataaatgagtgcacttccgaatggctgagtttatgctgcccgtccgcggagaggagccacggcagaggatccgaacgtcccgaggg

SEQ ID NO: 339 - protein, 744 aa, Alphatorquevirus sp.; identical to SEQ ID NO: 335

SEQ ID NO: 340 - protein, 156 aa, Alphatorquevirus sp.
MFFGRPHRKKRLLSLLSLPAAKKKPPMSQWRPPLHNVPGIEHLWYESVHRGHAAICGCGDPVRHLTALAERYGVPGGPRSSGAPGVGGNHNPPPIRRARPPAAAPDPPAGNQPPALPWHGDGGSESGAGGGESGGPVADFADDGLDDLVAALDEEE

SEQ ID NO: 341 - protein, 65 aa, Alphatorquevirus sp.; identical to SEQ ID NO: 337

SEQ ID NO: 342 - DNA, 3700 bp, Alphatorquevirus sp.
cgggtgccggaggtgagtttacacaccgcagtcaaggggcaattcgggcacgggactggccgggctatgggcaagattcttaaaaaattcccccgatccctctgccgccaggacataaaaacatgccgtggagaccgccggtgcatagtgtccaggggcgagaggatcagtggttcgcgagcttttttcacggccacgcttcgttttgcggctgcggtgaccctgttgagcatcttaatagcattgctggtcgctttcctcgcgccggtccacccagaccccctccagggctacagcagcctaaccccccgcagcagggcccggccgggcccgaagggccgcccgccatcttagccctaccggctccgcccgcggagcctgacgacccgcagccacgccgtggtggtggggacgctggcgccgccgctggcgccgcaggcgaccgtggagaccgagactacgacgaagaagagctagacgagcttttccgcgccgccgccgaagacgatttgtaagtaggagatggcgccggccttacaggcgcaggaggagacgcgggcgacgcagacgcagacgcagacgcagacataagcccaccctagtactgagacagtggcaacccgacgttatcagacactgtaagataacaggatggatgcccctcattatctgtggaaaggggtccacccagttcaactacatcacccacgcagacgatatcaccccaaggggagcctcctacgggggcaacttcacaaacatgactttctctctggaggccatatatgaacagtttgtgtaccacagaaacaggtggtcggcctccaaccacgacctagaactctgcaggtacaggggtaccaccttaaaactctacaggcacccagaagtagactacatagtcacctacagcaggacaggccctttcgagatcagccacatgacctacctgagcactcacccactgctaatgctgctaaacaagcaccacatagtggtgcccagcctaaagactaagcccaggggcagaaaggccataaaagtgagaataaggcccccaaaactcatgaacaacaagtggtactttaccagagacttctgtaacataggcctcttccagctctgggccacaggcttagaactcagaaacccctggctcagaatgagcaccctcagcccctgcataggcttcaatgtccttaaaaacagcatctacaccaaccttagcaacctgccacaacacaaacaagccagattagacattataaacaacacacttcacccacatgaaattacaggaccaaacaacaaaaagtggcagtacacttacaccaaactcatggcccctatttactatgcagcaaacagggccagcacctatgactgggaaaattacagcaatgaaactaactacaacaacacatatcttaaatttgatcaaaaaagaaatgaaaaattaaccaaaatcagaaaagagtggcagatgctgtatccacaacaacctacagcactgccagactcctatgacctcctacaggagtatggcctatacagcccatactaccttaaccccacaagaataaacctagactggatgaccccctacacacacgttaggtacaacccccttgtagacaagggctttggaaacagaatatacatccagtggtgctcagagtcagatgttagctacaacagaacaaagtccaagtgtctcttacaagacatgcccctctttttcatggcctatggctacatagactgggcaataaaaaacacaggcgtgtcctcactagtcaaagacgccagaatctgcatcaggtgtccctacacagagccacagctagtggggtccacagaagacataggctttgtacccatctcagagaccttcatgaggggcgacatgccggtacttgcaccatacataccgttgagctggttttgcaagtggtatcccaacatagctcaccagaaggaagtccttgaggcaatcatttcctgcagccccttcatgccccgtgaccaggacatgaacggttgggatatcacaatcggttacaaaatggacttcttatggggcggttcccctctcccctcacagccaatcgacgacccctgccagcagggaacccacccgcttcccgcccccgataagcaccctcgcctcctacaagtctcgaacccgaaactactcggaccgaggacagtgttccacaagtgggacatcagacgtgggcagtttagcaaaagaagtattaagagagtgtcagaatactcaagcgatgatgaatctcttgcgccaggtctcccatcaaagcgaaacaagctcgactcggcgttcagaggagaaaatcgagagcaaaaagaatgctattctctcctcaaagcgctcgaagaagaggagaccccagaagaagaagaaccagcaccccaagaaaaagcccagaaagaggagctactccaccagctccagctccagagacgccaccagcgagtcctcagacgagggctcaagctcgtctttacagacatcctccgactccgccagggagtccactggaaccccgagctcacatagagcccccaccttacatacccgacctgctttttcccaattctggtaaaaaaaaaaaattctctaccttcgactgggagacagaggcccagctggcggggtggatgcggcggcctatgcgcttctatccctcagacacccctcactacccgtggctaccccccgagcgagatatcccgaaaatatgtaacataaacttcaaaataaaacttcaagagtgagtgattcgaggccctcctctgttcacttagcggtgtctacctcttaaggtcaccaagcactccgagcgccagcgaggagtgcgaccctccaccaaggggcaacttcctcggggtccggcgctacgcgcttcgcgctgcgccggacgcctcggacccccccctcgacccgaatcgctcgcgcgattcggacctgcggcctcgggggggtcgggggctttattaaacagactccgagttgccattggactcaggagctgtgaatcagtaacgaaagtgagtggggccagacttcgccataaggcctttaactttgggtcgcttgtcggtggcttccgggtttgcctgggggccgccattttagcttcggccgccattttaggccctcgcgggcctccgtaggcgcgttttaatgacgtcacggcagccattttgtcgtgacgtttgagacacgtgatgggggcgtgccttaacccggaagcatccctggtcacgtgactctgacgtcacggcagccattttgtgctgtccgccatcttgtgacttccttccgctttttcaaaaaaaaagaggaagtgtgacgtagcggcggggggggcggcgcgcttcgcgcgcgtttttatgtcctggcggcagagggatcgggggaattttttaagaatcttgcccccccggccccccccccgtgcttaatccaccgcgcatgcgcgaccacgcccccgccgccattttatgcaacccgccaatttctctttcaaacaggccaatcagctactactttgtgcacttcctggggcgtgtcctgccactgtatataagcagaggcagtgacgaatggtagagtttttcctggcccgtccgcggcgagagcgcgagcgaagcgagcgatcgagcgtcccgtggg

SEQ ID NO: 343 - protein, 658 aa, Alphatorquevirus sp.
LRQWQPDVIRHCKITGWMPLIICGKGSTQFNYITHADDITPRGASYGGNFTNMTFSLEAIYEQFVYHRNRWSASNHDLELCRYRGTTLKLYRHPEVDYIVTYSRTGPFEISHMTYLSTHPLLMLLNKHHIVVPSLKTKPRGRKAIKVRIRPPKLMNNKWYFTRDFCNIGLFQLWATGLELRNPWLRMSTLSPCIGFNVLKNSIYTNLSNLPQHKQARLDIINNTLHPHEITGPNNKKWQYTYTKLMAPIYYAANRASTYDWENYSNETNYNNTYLKFDQKRNEKLTKIRKEWQMLYPQQPTALPDSYDLLQEYGLYSPYYLNPTRINLDWMTPYTHVRYNPLVDKGFGNRIYIQWCSESDVSYNRTKSKCLLQDMPLFFMAYGYIDWAIKNTGVSSLVKDARICIRCPYTEPQLVGSTEDIGFVPISETFMRGDMPVLAPYIPLSWFCKWYPNIAHQKEVLEAIISCSPFMPRDQDMNGWDITIGYKMDFLWGGSPLPSQPIDDPCQQGTHPLPAPDKHPRLLQVSNPKLLGPRTVFHKWDIRRGQFSKRSIKRVSEYSSDDESLAPGLPSKRNKLDSAFRGENREQKECYSLLKALEEEETPEEEEPAPQEKAQKEELLHQLQLQRRHQRVLRRGLKLVFTDILRLRQGVHWNPELT

SEQ ID NO: 344 - DNA, 3700 bp, Alphatorquevirus sp.
cgggtgccgaaggtgagtttacacaccgaagtcaaggggcaattcgggcacgggactggccgggctatgggcaaggctcttaaaaaattcccccgctgtgttctccggcaggacacaaagtcatgccgtggagaccgccggttcataacgttccaggcagagaaaaccaatggtttgcatcgatttttcacggtcatgcttctttctgcgggtgcggtgaccctgttgggcatcttaacggcattgctcctcgctttcctaacgccggtccaccgagaccacctccagggctagaccagctgaatcccgagggcccggcgggtcccggaggtccccccgccatcttgccagctctgccggccccggcagaccctgatccggcaccacggcgtggtggtggggcagatggaggcgccgccgctggggccgccgccgccgcagaccataccgggtacgaagaaggagacctagaagatcttttcgccgccgcggccgaggacgatatgtgagtaggcggaggcgccgccgctactacaggcgcagactaagacggggcagacgcagagggcgacgaaagagacacagacagactctagtagtgaggcagtggcaacctgacgttgttaaaaagtgtaagataacaggatggatgcccctcataatctgtggctctggcagcacacagatgaactttataactcacatggacgacaccccccctatggggtacacgtacgggggcaactttgtaaatatgacttttactctagaggccatctatgaacaattcctgtaccacagaaacaggtggtccagatctaaccatgacttagaccttgccaggtacctagggatcactctaaaagcctacagacacaccacagtagactacatactcagctacaacagaacaggccccttcaacataagtgaaatgacctacatgagcacacaccctgcactcatgctactgcaaaagcacagaatagtagtgcccagcttaagaacaaagccaaggggcaaaagagccataaaaatcagaataagacccccaaaactaatgctaaccaagtggtacttcaccaaagacatctgctccatgggcctcttccagttaatggcaacaggggcagaactcacaaacccctggctcagagacaccacaaaaagcccagtaataggcttcagagtcctaaaaaacagcatatacaccaatctatctaacctaaaagagacaagcatatcaggagaaagaaaatcaatactaaacaaactacacccatcatctctaacaggctctggaaacacagccaaagggtgggaatactcctacactaaactaatggcacctatatactactcatcagtcagaaacagcacatacaactggcaaaactaccaaactaactatgcaaccacagcagcaaaatttaaggaaaagcaaacacaaagtctaactttaattaaatcagaatacctgtaccactacccaaacaatgtcacacaagtagacttcatagccgaccccactcttacacatgactggggtatatacagcccatactggctaactccaacaagaatcagcctagactgggacacaccatggacatatgtcagatacaacccactgtcagacaagggcttaggcaacagaatatatgcacagtggtgctcagaaaaaaccagtaaattagacatcacaaaaagcaagtgcatactaaaagactttccactgtgggccatggcctatggctactgtgactgggtagtaaagtgcacaggagtatccagtgcatggacagacatgagaatagcaatcatatgtccatacacagaaccggcacttgtagggtcaacagcagatgtaggcttcattccagtaagtgacaccttttgcaacggagatatgccgtttcttgcaccatacatacctattacatggtggatcaagtggtaccccatgattacacaccaaaaggaagttcttgaggcaatagttaactgtggaccgtttgtacctcgagaccagagctccccagcttgggaaataactctgggttacaaaatggattggaaatggggtggctctcccctgccttcacaggcaatcgacgacccctgccagaagtccacccacgagctacccgaccccgatagacaccctcgcatgttacaagtctctgacccgacaaagctcggaccgaagacagtttttcacaaatgggactggagacgtgggatgcttagcaaaagaagtattaaaagagtccaagaagactcaacagatgatgaatatgttgcaggacctctaccaagaaaaagaaacaagttcgatactcgagtccaaggccctccaaccccagaaaaagaaagttacagtttactccaagccctccaagagtcggggcaagagagcagctcagaggaccaagaacaagcaccccaagaaaaagaggaccagaaggaagcgctcatggagcagctccagctccagaaacaccaccagcgagtcctcaagcgaggcctcaaactcctcctcggagacgtgctccgactccggagaggagtccactgggaccccctcctgtcctaatccaaggtcccagtatcccagacctgcttttccctaacacacaaaaaaaaaagaaattttccaactacgactgggtgtgcgagtacgagctggccagatggatggatcgtcctttgcggcactacccatcagacccccctcactacccctggctaccaaaaaagcctgctacccagcctacatgtaaagtaagtttcaaattaaagcttgatgcctaaaattcaaggccgtgggtgtttcacttcatcggtgttaacctctataagtcactaagcactccgagcgaagcgaggagtgcgacccccctgcccggtagcaacttcctcggggtccggcgctacgccttcggctgcgccggacgcctcggaccccccctcgacccgaatcgctcgcgcgattcggacctgcggcctcgggggggtcgggagctttattaaacagactccgagatgccattggacactgaggggatgaacagcaacgaaagtgagtggggccagacttcgccataaggcctttatcttcttgccatttgtcagtgtcttccgggttcgcgtgggggccgccattttagcttcggccgccattttaggccctcacgggcctccgtagtcgcgcaccagtgacgtcacagcagccatattggtcctgacgtcacagtcacgtggggagggcacacgtgatcccggaagtgtccctgctcacgtgatctgacgtcacggccgccattttgtgctgtccgccattttgtgacttccttccgctttttgtaaaaaaaagaggaagtgtgacgtagaaggttctgattggtctgtttgaatagaaattggcgggctgtagaaaaccccccccgcgggggggctccgcccccccccggcccccccccgtgctatgtccaccgcgcatgcgcggccacgcccccgccgccattttctacagcccgccaatttctattcaaacagaccaatcagaaccttctacgtgcacttcctggggcgtgtctacgaggtctatataagcaacagcggtgacgaatggtagagttttttctcgcccgtccgcggcgagagcgcgagcgaagcgagcgatcgagcgtcccgtggg

SEQ ID NO: 345 - protein, 648 aa, Alphatorquevirus sp.
MPLIICGSGSTQMNFITHMDDTPPMGYTYGGNFVNMTFTLEAIYEQFLYHRNRWSRSNHDLDLARYLGITLKAYRHTTVDYILSYNRTGPFNISEMTYMSTHPALMLLQKHRIVVPSLRTKPRGKRAIKIRIRPPKLMLTKWYFTKDICSMGLFQLMATGAELTNPWLRDTTKSPVIGFRVLKNSIYTNLSNLKETSISGERKSILNKLHPSSLTGSGNTAKGWEYSYTKLMAPIYYSSVRNSTYNWQNYQTNYATTAAKFKEKQTQSLTLIKSEYLYHYPNNVTQVDFIADPTLTHDWGIYSPYWLTPTRISLDWDTPWTYVRYNPLSDKGLGNRIYAQWCSEKTSKLDITKSKCILKDFPLWAMAYGYCDWVVKCTGVSSAWTDMRIAIICPYTEPALVGSTADVGFIPVSDTFCNGDMPFLAPYIPITWWIKWYPMITHQKEVLEAIVNCGPFVPRDQSSPAWEITLGYKMDWKWGGSPLPSQAIDDPCQKSTHELPDPDRHPRMLQVSDPTKLGPKTVFHKWDWRRGMLSKRSIKRVQEDSTDDEYVAGPLPRKRNKFDTRVQGPPTPEKESYSLLQALQESGQESSSEDQEQAPQEKEDQKEALMEQLQLQKHHQRVLKRGLKLLLGDVLRLRRGVHWDPLLS

SEQ ID NO: 346 - DNA, 3697 bp, Alphatorquevirus sp.
cgggtgccggaggtgagtttacacaccgaagtcaaggggcaattcgggctcgggactggccgggctatgggcaaggctcttaaagaatgcacttttctcgaatttctaggcaaaagaaaaggaaagtgctactgcgacgtgtgcgagctaaatcgaaagctaggccttcaatgagccaccggcctccagcacacaatgccgcgggcattgagcgcctctggttcgacagttgctttaggtcccacggatcttgttgtggttgtggtaattttattaatcatattcttctactggctaatcgctatggctttcaggccggtccgccggcgccaggtggtcctcggggtgcacccgcactgagggccctgccgcctcccggggaatccaatcccggtgacggcgagcaacaaccatggcgtggcgatggtggtggcagagacgaaggagacggtggccgtggaggagacgccgctggagacgcctacgcacaagacgacctagacgcgctgttcgccgccgtcgaagaagagcaacagtaaggagaaggaggtgggggcgcagacgggggcgacgcacatacaccagacgcagggccagacgcagacgcaaacccagaaaaaaactgctgctttctatgtggcagccccagactataaggagatgcactattaggggcttcactagcctaataatatgtgggaactccaaatcggggcgaaactatgccctccacagcgaggactacaccacacagatagagccctttgggggcagctttagcaccactacatggagcctaaaggtgctgtttgacgagcaccaaaaaatgctgaacaaatggagctaccccaacatacaactagacctcgccagatacaaggggtgcaccttctacttctacagagacttaaaaacagactatatagtaacctggagtagaaatccaccctttaaactgaacaaatacagctctcccatgctgcacccaggcatgatgatgcagagaaaaaagaaactcatagtacctagctttcaaacgagaccaaagggcaaaaagagatacagggtccacataagaccccccaacatgtttgaagacaagtggtacacacaagaggacctgtgtcccgttaatcttgtgtcacttgcggtttctgcggctacactgacacatccgttctgcccaccactaacgaacaacccttgcatcaccttccaggtgttgaaagaattttattacaaagccataggcattaacagtaacttaacctcacaatatgaagaactagaaacaatattatatgaaaaaaactgcacatactatcaaacaggccaagttttagcacagctaaatccaaactttaaaccagcaaaaaacaatggcacaaaccaagacctaggtactgcagtatcctggcttaaacaaacaaacgccactaatggcttcctaactaaaaacaacccagtatttggcatgtgtagctacaaacctaacaaagctcaacttaagaaagttagacagtggtactggcaacaacaaaacactgaaaatgacatacacagcacctatggaaaagccacactagaacagtttgaataccacataggcttttacagctctgtattcttaagcccccaaagagacctacaattcgctgcagcataccaagatgtaacttataatccaaactgtgacagggctgtaggaaacatggtgtggtttcagtacagtacaaaacccaccacagaatttgatgagacccagtgtaaatgtgtccttcacgacattccactgtgggcagccttctatggctactctgactttataatccaagagctaagcataagcacagaaatatataacataggcctagtctgtgtcatctgcccatacacctctccacctatgtacaacaaaataaaacccacctgggggtacgtgttctatgacaccacctttggcaatggcaagatgcccaacgggtctggccacatccctgtgtactggcagcagagatggtggcccagaatggccttccagcaacaagtaatgcatgactttacactaacaggccccttcagctataaagatgactatgctaacacaacattcactgcaaaatataagtttgatttcttatggggcggtaatatgatatccgaacaggttatcaagaacccgtgcaaatcagagagtgaacacgcctcctacccccatcgagtcagtcgcgacctacaaattgttgacccagcaaccatgggcccccaatatgtattccacacctgggactggagacggggactttttggcagagatgctctcaaaagagtgtcagaaaaaccgacagatgcttttgagtttacaaacccttacaaaagaccaagatatctccctcctacagaccaagaagaagcagagcaagaaaaaggcttgtattcaccggagcaaagactccggtactcgtcagaagagaaccagaagacgagcccgccgcaaagcgagcagctccgagagcgagtcctctcactccagctcacagagcagcagcgagtcggagagcagctccgattcctcttacagcaagtcctcaaaacgcaagcaggtctccacctaaacccccaattatttcaaaggctgtaaacaaagtttatctgtttgatccccccaggcctgtaatccccataatgggcagagaggcctgggaagacgagtacacatgctgcagagtgtggaatagaccagctagacaaaaccacacagacacccccttctacccctgggctcctaaaccccccccacaattcaaagtgtcttttaaactcggctggagataaataaacaaggccttaaactgttcacttgtcggtgtctacctgttaaggtcactaagcactccgagcgttagcgaggagtgcgaccctctaccaaggggcaactccctcgaagtccggcgctacgcgcttcgcgctgcgccggacatctcggaccccccctccacccgaaacgcttgcgcgtttcggaccttcggcgtcgggggggtcggggactttactaaacagactccgaggtgccattggacactgagggggtgaacagcaacgaaagtgagtggggccagacttcgccatagggcctttatcttcttgccatttgtcagtgtccggggtcgccataggcttcggccccggttttaggccttccagactaccaaaatggccgatttcgtgacgtcatggcggccattttaagtaagctccacccaggactgacgtcagtgtcaaaggtcatcctcgggcggaacttacatgaaatggcggtgaactgcttccgggtcaaaggtcagacctacgtcattcgtcacgtggggaggcttactgcgtcatttgcggaagtaggccccgccacgtgacggtcacgtgggtgctgcgtcacagccgccattttagttcacaaaatggcctacttccttccgcttttttaaaaattaaccgtcggcggcggcgcgcgcgcttcgcgcgcccccccgaagtccgtcactaaccacgtgacctctctccgccaatcagagtctacgtgattcatttcctgggcatggcctacatcctaatataagcaagtgcacttccgaatggctgagttttccacgcccgtccgcagcggtggagcagccgagcagcgacccccgcgtcccgaggg

SEQ ID NO: 347 - protein, 742 aa, Alphatorquevirus sp.
MAWRWWWQRRRRRWPWRRRRWRRLRTRRPRRAVRRRRRRATVRRRRWGRRRGRRTYTRRRARRRRKPRKKLLLSMWQPQTIRRCTIRGFTSLIICGNSKSGRNYALHSEDYTTQIEPFGGSFSTTTWSLKVLFDEHQKMLNKWSYPNIQLDLARYKGCTFYFYRDLKTDYIVTWSRNPPFKLNKYSSPMLHPGMMMQRKKKLIVPSFQTRPKGKKRYRVHIRPPNMFEDKWYTQEDLCPVNLVSLAVSAATLTHPFCPPLTNNPCITFQVLKEFYYKAIGINSNLTSQYEELETILYEKNCTYYQTGQVLAQLNPNFKPAKNNGTNQDLGTAVSWLKQTNATNGFLTKNNPVFGMCSYKPNKAQLKKVRQWYWQQQNTENDIHSTYGKATLEQFEYHIGFYSSVFLSPQRDLQFAAAYQDVTYNPNCDRAVGNMVWFQYSTKPTTEFDETQCKCVLHDIPLWAAFYGYSDFIIQELSISTEIYNIGLVCVICPYTSPPMYNKIKPTWGYVFYDTTFGNGKMPNGSGHIPVYWQQRWWPRMAFQQQVMHDFTLTGPFSYKDDYANTTFTAKYKFDFLWGGNMISEQVIKNPCKSESEHASYPHRVSRDLQIVDPATMGPQYVFHTWDWRRGLFGRDALKRVSEKPTDAFEFTNPYKRPRYLPPTDQEEAEQEKGLYSPEQRLRYSSEENQKTSPPQSEQLRERVLSLQLTEQQRVGEQLRFLLQQVLKTQAGLHLNPQLFQRL

SEQ ID NO: 348 - protein, 150 aa, Alphatorquevirus sp.
MHFSRISRQKKRKVLLRRVRAKSKARPSMSHRPPAHNAAGIERLWFDSCFRSHGSCCGCGNFINHILLLANRYGFQAGPPAPGGPRGAPALRALPPPGESNPGDGEQQPWRGDGGGRDEGDGGRGGDAAGDAYAQDDLDALFAAVEEEQQ

SEQ ID NO: 349 - protein, 60 aa, Alphatorquevirus sp.
LFDPPRPVIPIMGREAWEDEYTCCRVWNRPARQNHTDTPFYPWAPKPPPQFKVSFKLGWR

SEQ ID NO: 350 - DNA, 3697 bp, Alphatorquevirus sp.
cgggtgccggaggtgagtttacacaccgaagtcaaggggcaattcgggctcgggactggccgggctatgggcaaggctcttaaagaatgcgtttttctcgaatttatcgcagaaagaagaggctgctgccactgctttgcttgcgagctgaaccgaaagcacaacctaatatgagctggtgcactccagttgaaaatgcctataagagagagatcaactttctcaggggctgccaactgcttcacactagcttttgcggttgtgatgattttattaatcatgttattcgcctacaaaatcttcacgggaatctacaccagcccacgggaccgtctacacctccagtgacccgtagagctctggccctgcctgctgctccggagtcatggcgttccggtggtggtggtggagacgccgcccccagcgacggtggacccgccgcagatggaggagactacgaacccggagacctagacgcactgtacgacgccgtcgccgcagaccaagagtaaggagaaggcggtggggaaggagacgggggcgacgcagactgtacagacgcagatacaaaaagaggcgcaaaagacgaaaaaaaatgaccttaaaaatatggaatccatccaccattcgcgcctgtaacattaggggatttgtagcactagtagtttgtggacacactcgtgcaggctctaactatgccatacacagcgaagactacatacctcaactaaaaccctacggagggtcttttagcactactacctggagcctaaaagtactgtttgacgagcacctcaaatttagaaacaaatggagctatcctaacacagaactagaccttgccagatacaggggagccacattcacattttacagagacccaaaagtagactacatagtagtatacaacacagtgcctccatttaagcttaacaaatacagctgccctatgctacatccaggcatgatgatgcagtataaaaaaaaaatattaatacctagctatcaaacaaaaccaaagggaagcgctaaagtaagacttagaataaaacctcctgtattatttgaagataagtggtacactcagcaagacctgtgccccgttaatcttttgtcacttgcggttagcgcatgttccttcctgcatccgtttataccaccagaaagtgacaacatatgcataacgttccaggtgttgcgagatttttattacacacaaatgtcagttacacccacaacaaccacttccctaaatgacaaagacaaaaaaatatttagtgaccacttatataaaaaccctgaatactggcaatcacaccacactgctgctagattatctacctctcaaaagcctgcattaccttcaaacagcgcaatacccaatacccaaggatacttaaacacaacacctactaacacaagttttagaactggaaacaacacaatatatggccaaccaggctacaggccagacaatgagaaactaactaaaataagagaatggtactttaaccaagaaaacacagacaaccccatacatggcacttacttgaaacccacattaaactctgtagattaccacttaggaaaatacagtgctatatttttaagcccctacagaacaaacactcagtttgatacagcataccaagatgtaacctacaaccccaacacagacaaaggcaaaggaaacaaaatatggattcaaagctgcacaaaagaatccactattctagaccaaagttgtaaatgtgtagtagaagacctacctttatgggctatggtaaatggctacctagaattttgtgactcagaacttccaggagccaatatttacaatacctacattgtagttgttatatgcccttacactaaacctcaaatgctaaacaaaactaatccaaaacagggctatgtgttctatgacaccctgtttggagatggaaaaatgcctacaggcacaggcctggtacctttctggctacagagcagatggtaccctagatgccagtttcaacaacaggtgctgcatgacttatacctcaccggtccatttagctacaaagatgacctaaaatcatttagctttaatgctaaatacaaatttagcttcttatggggcggcaatatgattccccaacagattatcaaaaacccgtgcaaaaaagaagaatccacattcacctatcccagtagagagcctcgcgacttacaagttgttgacccactcaccgtgggcccagaatgggtcttccacacatgggactggagacgtggactttttggtaaagatgctatcgacagagtgtcaaaaaaaccagacgatgatgcagaatattatccagtaccaaaaaggcctcgattcttccctccaacagacacacagtcagagccagaaaaagacttcggtttcacaccggagagccaagagctattccaggaggagccacaagcaccccaagaagaaagccaagaagtacagcagcagcaactcctccagctcagactctcacagcagttcagaatcagacagcagctccagcacctgttcgtacaagtcctcaaaacccaagccggtctccacataaacccattatttttaaaccatgcataaatcaagtgtttatgtttccaccagacacccctagacccattataacaaaagaagggtgggaagatgagtttgtaacttgcaaacactgggataggccagccagaacatactacacagacaaacctacctatccttggatgcccaaggcaccccctcaatgcaatgtatctttcagactgggctttaaataaaaattcaaggccttaaactgttcacttgtcggtgtctacctctaaaggtcactaagcactccgagcgttagcgaggagtgcgaccctcccccctgatgcaacgccctcggagtccggcgctacgccttcggctgcgccggacacctcggccccccccctccacccgaaacgcttgcgcgtttcggaccttcggcgtcggggggggcgggggctttactaaacagactccgaggtgccattggacactgagtgggcgtacagcaacgaaagtgagtggggccagacttcgccatagggcctttatcttcttgccatttgtccgtgtccggggtcgacataggcttcggcctcacttttaggccttccggactaccaaaatggcgcatttagtgacgtcacggccgccattttaagtaaggcggaagcagctccactctctcacaaaatggcggcggagcacttccggcttaccgaaaaatggaggtcaattacttccaggttaaaggttagttactacgtcaccgatgacgtggggaggcgtgctgtaaaacccggaagcaggccccgcacgtcattgtcacgtggttactacgtcacagccgccattttgttttacaaaatggccgacttccttccgcttttttaaaaaaaggcgccaaaaaacggctgcggcgggggcgcgcgcgctacgcgcgcgctccgccccccggccccccccccccgaagtacgtcactaaccacgtgttttccacaggccaatcagaaccttctacgtacacttcctgggctgggtctttgagagcatataactaacagcacttccgaatggctgagttttccacgcccgtccgcagcggcagcaccacggagggtgatccccgcgtcccgaggg

SEQ ID NO: 351 - protein, 742 aa, Alphatorquevirus sp.
MAFRWWWWRRRPQRRWTRRRWRRLRTRRPRRTVRRRRRRPRVRRRRWGRRRGRRRLYRRRYKKRRKRRKKMTLKIWNPSTIRACNIRGFVALVVCGHTRAGSNYAIHSEDYIPQLKPYGGSFSTTTWSLKVLFDEHLKFRNKWSYPNTELDLARYRGATFTFYRDPKVDYIVVYNTVPPFKLNKYSCPMLHPGMMMQYKKKILIPSYQTKPKGSAKVRLRIKPPVLFEDKWYTQQDLCPVNLLSLAVSACSFLHPFIPPESDNICITFQVLRDFYYTQMSVTPTTTTSLNDKDKKIFSDHLYKNPEYWQSHHTAARLSTSQKPALPSNSAIPNTQGYLNTTPTNTSFRTGNNTIYGQPGYRPDNEKLTKIREWYFNQENTDNPIHGTYLKPTLNSVDYHLGKYSAIFLSPYRTNTQFDTAYQDVTYNPNTDKGKGNKIWIQSCTKESTILDQSCKCVVEDLPLWAMVNGYLEFCDSELPGANIYNTYIVVVICPYTKPQMLNKTNPKQGYVFYDTLFGDGKMPTGTGLVPFWLQSRWYPRCQFQQQVLHDLYLTGPFSYKDDLKSFSFNAKYKFSFLWGGNMIPQQIIKNPCKKEESTFTYPSREPRDLQVVDPLTVGPEWVFHTWDWRRGLFGKDAIDRVSKKPDDDAEYYPVPKRPRFFPPTDTQSEPEKDFGFTPESQELFQEEPQAPQEESQEVQQQQLLQLRLSQQFRIRQQLQHLFVQVLKTQAGLHINPLFLNHA

SEQ ID NO: 352 - protein, 141 aa, Alphatorquevirus sp.
MRFSRIYRRKKRLLPLLCLRAEPKAQPNMSWCTPVENAYKREINFLRGCQLLHTSFCGCDDFINHVIRLQNLHGNLHQPTGPSTPPVTRRALALPAAPESWRSGGGGGDAAPSDGGPAADGGDYEPGDLDALYDAVAADQE

SEQ ID NO: 353 - protein, 59 aa, Alphatorquevirus sp.
MFPPDTPRPIITKEGWEDEFVTCKHWDRPARTYYTDKPTYPWMPKAPPQCNVSFRLGFK

SEQ ID NO: 354 - DNA, 3695 bp, Alphatorquevirus sp.
cgggtgccggaggtgagtttacacaccgcagtcaaggggcaattcgggcacgggactggccgggctatgggcaagattcttaaaaaattcccccgatccctctgccgccaggacataaaaacatgccgtggagaccgccggtgcatggtgtccaggggcgagaggatcagtggttcgcgagcttttttcacggccacgcttcgttttgcggttgcggtgacgctgttggccatcttaatagcattgctcctcgctttcctcgcgccggtccaccaaggccccctccggggctagagcagcctaaccccccgcagcagggcccggccgggcccggagggccgcccgccatcttggctctgccggctccgcccgcggagcctgacgacccgcagccacgccgtggtggtggggacggtggcgccgccgctggcgccgcaggcgaccgtggagaccgagactacgacgaagaagagctagacgaacttttccgcgccgccgccgaagacgatttgtaagtaggagatggcgccggccttacaggcgcaggaggagacgcgggcgacgcagacgcagacgcagacgcagacataagcccaccctagtactcagacagtggcaacccgacgttatcagacactgtaagataacaggatggatgcccctcattatctgtggcaaggggtccacccagttcaactacatcacccacgcggacgatatcacccccaggggagcctcctacgggggcaacttcacaaacatgactttctccctggaggccatatatgaacagtttttgtaccacagaaacaggtggtcggcctccaaccacgacctagaactctgcaggtacaagggtaccaccctaaaactctacagacacccagaggtagactacatagtcacctacagcaggacaggccccttcgagatcagccacatgacctacctcagcactcaccccctgctaatgctgctaaacaagcaccacatagtggtgcccagcctaaagactaagcccaggggcagaaaggccataaaagtgagaataaggcccccaaaactcatgaacaacaagtggtacttcaccagagacttctgtaacataggcctcttccagctctgggccactggactagaactcagaaacccctggctcagaatgagcaccctgagtccctgcataggcttcaatgtccttaaaaacagcatctacaccaacctcagcaacctgccacaacataaaaatgctagactagaaattattaacaaaacacttcacccagacgacattacaggagcaaacaacaagaagtggcagtacacatacaccaaactcatggcccctatttactactcagcaaacagggccagcacctatgactgggaaaattacagcaacgaaacaaactaccacaacacatatattaaatttaatcaaaaaagaaccgagaaactaacaaaaatcagaaaagagtggcagatgctctatccacagcaacctactgcactgccagactcctatgacctcttacaggagtatggcttatacagtccatactaccttaaccccacaaggataaacctagactggatgaccccctacacacacgtgaggtacaaccccctcgtagacaagggctttggaaacagaatatacatccagtggtgctcagagacaagtgttagctacaacaaaacaaagtccaaatgtctgctacaagacatgcccctgtttttcatggcctatggctacatagactgggcaataaaaaacacaggggtctcctcactagtgagagacgccagaatctgcatcaggtgcccctacacagagccacagctcgtggggtccacagaagacataggctttgtacccatctcagagaccttcatgaggggcgacatgccggtacttgcaccatacataccgttgagctggttttgcaagtggtatcccaacatagctcaccagaaggaagtccttgaggcaatcatttcctgcagccccttcatgccccgtgaccaggacatgaacggttgggatatcacaatcggttacaaaatggacttcttatggggcggttcccctctcccctcacagcccatcgacgacccctgccagcagggaacccacccgattcccgaccccgataaacaccctcgcctcctacaagtgtcgaacccgaaactactcggaccgaggacagtgttccacaagtgggacatcagacgtgggcagtttagcaaaagaagtattaagagagtgtcagaatactcaagcgatgatgaatctcttgcgccaggtctcccatcaaagcgaaacaagctcgactcggcgttcagaggagaaaaccgagagcaaaaagaatgctattctctcctcaaagcgctcgaggaagaagagaccccaaaggaagaagaaccagcaccccaagaaaaagcccagaaagaggagctactccaccagctccagctccagagacgccaccagcgagtcctcagacgagggctcaagctcgtctttacagacatcctccgactccgccagggagtccactggaaccccgagctcacatagagcccccaccttacatcccagacctgctttttcccaatactggtaaaaaaaaaaaattctctaccttcgactgggagacagaggcccagctggcggggtggatgcggcggcctatgcgcttctatccctcagacacccctcactacccgtggctaccccccgagcgagatatcccgaaagtatgtaacataaacttcaaaataaagcttcaagagtaactaattcgaggccctcctctgttcacttagcggtgtctacctcttaaagtcaccaagcactccgagcgccagcgaggagtgcgaccctccaccaaggggcaacttcctcggggtccggcgctacgcgcttcgcgctgcgccggacgcctcggaccccccctcgacccgaatcgctcgcgcgattcggacctgcggcctcgggggggtcgggggctttattaaacagactccgagatgccattggacactgagggggtgaacagcaacgaaagtgagtggggccagacttcgccataaggcctttaactttgggtcgcttatcggtggcttccgggtccgcctgggggccgccattttagcttcggccgccattttaggccctcgcgggcctccgtaggcgcgttttaatgacgtcacggcagccattttgtcgtgacgtttgagacacgtgatgggggcgtgcctaaacccggaagcatccctggtcacgtgactctgacgtcacggcggccattttgtgctgtccgccatcttaccacttccttccgctttttcaaaaaaaaagaggaagtatgacgtagcggcggggggggcggcgcgcttcgcgcgccccccccccccgcgcatgcgcggggccccccccgcggggggggctccgcccccccggccccccccccgtgctgaatccaccgcgcatgcgcggccacgcccccgccgccattttgtgcagcccgccaatttctctttgaaacaggccaatcagctactacttcgtacacttcctggggcgtgtcctgcaactctatataagcagaggcggttacgaatggtagagtttttcctggcccgtccgcggcgagagcgcgagcgaagcgagcgatcgagcgtcccgtggg

SEQ ID NO: 355 - protein, 641 aa, Alphatorquevirus sp.
MPLIICGKGSTQFNYITHADDITPRGASYGGNFTNMTFSLEAIYEQFLYHRNRWSASNHDLELCRYKGTTLKLYRHPEVDYIVTYSRTGPFEISHMTYLSTHPLLMLLNKHHIVVPSLKTKPRGRKAIKVRIRPPKLMNNKWYFTRDFCNIGLFQLWATGLELRNPWLRMSTLSPCIGFNVLKNSIYTNLSNLPQHKNARLEIINKTLHPDDITGANNKKWQYTYTKLMAPIYYSANRASTYDWENYSNETNYHNTYIKFNQKRTEKLTKIRKEWQMLYPQQPTALPDSYDLLQEYGLYSPYYLNPTRINLDWMTPYTHVRYNPLVDKGFGNRIYIQWCSETSVSYNKTKSKCLLQDMPLFFMAYGYIDWAIKNTGVSSLVRDARICIRCPYTEPQLVGSTEDIGFVPISETFMRGDMPVLAPYIPLSWFCKWYPNIAHQKEVLEAIISCSPFMPRDQDMNGWDITIGYKMDFLWGGSPLPSQPIDDPCQQGTHPIPDPDKHPRLLQVSNPKLLGPRTVFHKWDIRRGQFSKRSIKRVSEYSSDDESLAPGLPSKRNKLDSAFRGENREQKECYSLLKALEEEETPKEEEPAPQEKAQKEELLHQLQLQRRHQRVLRRGLKLVFTDILRLRQGVHWNPELT

SEQ ID NO: 356 - DNA, 3692 bp, Betatorquevirus sp.
cgggagccgaaggtgagtgaaaccaccgaagtctaggggcaattcgggctagatcagtctggcggaacgggcaagaaacttaaaatattttattttacagatgagtaaactctacaaacctctaaatatcagcttaaaccacaaaaacctacaatggatgaatgctcaagttgctcttcatgatatgcactgccaatgtgaccagccactaagacacatcattgtacaaataatagaaaaagaaccaaatataaaattcaacaaagaagaatctactaaaattcaaaaatgccttactactggagaagaagacgatggcgacgttcttggcgccggagacctagatacccttttcgcagaagacgtttttggagaagaagacaacgatgggtaagaaaacccaaaagaaaacttaaaaaaataactattaaacaatggcaaccaagtactattagaaaactaactgttaaaggacaataccccctttttgccggaacctcagacagaattgccaatgactatactgcttatgtagatgaaattgctccaaaagatgttccaggcgggggactatacagtattacagtatttactttacaaggattatatgaactgcatcaaaagggtagaaattggtggacacaatctaactgtgacttgcctttaattagatactcgggatgtactataaaactttactttaacccttcagcagactatataactactataattaactgtggagaacttaaagctaacttagaaatgtttcaatctacacaaccttctattttactacttaacaaaaaaaaaagagtaatgctatgtagaaactataaaagaaaacgcagaccatataaaaaatggtttatacatcctcctgcattgttatataacaaatggtattttcaaaaagaactaagtacatacccactattaatgataataactgcggccggtagctttgacagatactatcaaggagctaattcaatttcagaaacaataggattccaatctttaaacacagacttttttgtaatacatagctggaaatttccatcaacattaccatacagaccaaatgacagattttacatgtttggcataggaggtactacaacatttgacaacgccacacctgaacaattaatattactagggaatcctacagataacacaaaaggatcaatgataggaacagctacttccactaactggtcagaaaaagttacagaatatttagctaaatcaacaaactggggtaatccatttcacccttattggctacatgccgatgaaggagaaggccttatatgccttttagaagtcactgaaacaaccaccctacaacaaaaactaaaattactaactccaacaactaaattacaattacaaggctttattgaaccaacaaaaccatttacagtacattgcagatataatccacaagcagacatgggaagaaactccatatttgtaaccagaataacaggagacaacacaccatggcacaaaccaaacgatgaacacctattaacacaaggcctaccactatggctactacactggggatggctagactacttaagaaagtcaggaacaccacaaagactagatacagactacattcatgtaatagtgtcagaccacataagtccaaaagaattatcctactatgtacctatagattatgactttttaaatgcaaaaagtccttattctgatcacataaaaccctatgaccaacaaaactggcatccaaaaattaactttcaacaaaaaagcatagcacatatatgccaaagtggaccactaacaattaaattaccacaagatataagtgctactgctcactttagttataaatttcattttaagctcggaggatgcccaccagcaatggacaaagtttgtgaaccagctaaacaaccctcctatcctcaacccggtaacctcctatcatcaattatattgcagaacccacaaactccaattgaatacttcctcagctcctttgatcaaagaagggaactccttacagaaagagctgcaaagcgcctcaaaaaagaccaagagtttaaagaaactgttcttaaacctacaggacaaactctcctcgacgtacaaatgtcatcccctcaaacaacatcgtcagaggacacatcgtcggaggaagaaagcgaggaggagacacagcagcagctccacagacaccagcgaaaacacagaaaactccagcgaggaattctcaagctcctgaacctactccaacattcaaaatagttaatagcacaataaaagtaaacctattccctgaaagtaaacagaaaaatagacgccttacggctagagaaagaagtgacgatatacaagatgctaaaatatggggtagatatgtaaaaaattatttactggaatctcatttttataaagatgtacctattacacccttaattccccgtataaactttgaccttggtttcaaacaataaagcctgcatactttcacacctcggtgtccatttatttaagtttaaacctatataaacatccaccacactccctaatacgcaggcgcaaaagggggctccgcccccttaaaccccaagggggctccgcccccttaaacccccaggggggataccccccttaaaaccccccaaaaaccacaacattacaatactttaccacaaacgaacaggaaaccacaaaatttgcattgccgaccacaaacgaacaggaaacccacaaaatttgcattgccgaccacaaaccgtcactaacttccctaaactacaatacttccctttttactcataaatattcattacattaattagtaatcaccatcattcctgggcggatctaaactacctatataaccaagtacactgacgaatggctgagtttacgccgccagacggagacaggatcacttcagtgactccaggctgatcttgggcgggagccggaggtgagtgaaaccaccgtagtctaggggcaattcgggctagatcagtctggcggctacacaagcagctcctcaaattaatacaaactacaaaataattaactgtaaaactaaaatacaattattccctaatgtaaaagtaaaaaaaaatcgccgctttcacccctgggaaatagatactgaaagggatttagctaaaatatttagaagacctatgcgtacatttttctatgatgatcctttttacccttacttgcctcctacaccacttgctaatcaatatgcaaactttaaactaaactttgttgactcagatgaataaacaaggccttcaaatttcacttaatggtgtctgtttctttaagtttaaccttaataaactgactccgcctccctaaaattagggcgccaaaagggggctccgcccccttaaacccccaagggggctccgcccccttacacccccaagggggctccgccccctttaacccccattaatattcataaaggaaaccacaaaattagaattgccgaccacaaactgccatatgcaaattaacttcctaaaaccaactacaacttccctaaaaattaattaataaacagcgtcacaagggaggagccaaaccactatataactaactacactgacgaatggctgagtttatgccgccagacgaagacaggatcactacagtgactccaggctgatcttggg

SEQ ID NO: 357 - protein, 665 aa, Betatorquevirus sp.
MPYYWRRRRWRRSWRRRPRYPFRRRRFWRRRQRWVRKPKRKLKKITIKQWQPSTIRKLTVKGQYPLFAGTSDRIANDYTAYVDEIAPKDVPGGGLYSITVFTLQGLYELHQKGRNWWTQSNCDLPLIRYSGCTIKLYFNPSADYITTIINCGELKANLEMFQSTQPSILLLNKKKRVMLCRNYKRKRRPYKKWFIHPPALLYNKWYFQKELSTYPLLMIITAAGSFDRYYQGANSISETIGFQSLNTDFFVIHSWKFPSTLPYRPNDRFYMFGIGGTTTFDNATPEQLILLGNPTDNTKGSMIGTATSTNWSEKVTEYLAKSTNWGNPFHPYWLHADEGEGLICLLEVTETTTLQQKLKLLTPTTKLQLQGFIEPTKPFTVHCRYNPQADMGRNSIFVTRITGDNTPWHKPNDEHLLTQGLPLWLLHWGWLDYLRKSGTPQRLDTDYIHVIVSDHISPKELSYYVPIDYDFLNAKSPYSDHIKPYDQQNWHPKINFQQKSIAHICQSGPLTIKLPQDISATAHFSYKFHFKLGGCPPAMDKVCEPAKQPSYPQPGNLLSSIILQNPQTPIEYFLSSFDQRRELLTERAAKRLKKDQEFKETVLKPTGQTLLDVQMSSPQTTSSEDTSSEEESEEETQQQLHRHQRKHRKLQRGILKLLNLLQHSK

SEQ ID NO: 358 - protein, 111 aa, Betatorquevirus sp.
LAERARNLKYFILQMSKLYKPLNISLNHKNLQWMNAQVALHDMHCQCDQPLRHIIVQIIEKEPNIKFNKEESTKIQKCLTTGEEDDGDVLGAGDLDTLFAEDVFGEEDNDG

SEQ ID NO: 359 - protein, 90 aa, Betatorquevirus sp.
LAATQAAPQINTNYKIINCKTKIQLFPNVKVKKNRRFHPWEIDTERDLAKIFRRPMRTFFYDDPFYPYLPPTPLANQYANFKLNFVDSDE

SEQ ID NO: 360 - DNA, 3691 bp, Alphatorquevirus sp.
cgggagccgaaggtgagtttacacaccgcagtctaggggcaattcgggcacgggtctggccgggctatgggcaaggctcttaaaaaattaccccggtgtgttctccgccaggacaacaagtcatgccgtggcgaccgccggtgcataacatcccgggtagagaaaatcaatggtttgcaagcttctttcacgggcatgcttctttttgcggttgtggtgaccctgttgggcatcttaacggcattgctcatcgctttcctcacgccgctccaccgagaccacctccagggctagagcagccaaacctcggagggccggaaggtcccggaggtcccccggcacccctgccagctctgcctgccccggcagagcccgacccggcaccacgccgtggtggtggggccgatggaggcggcgccgctggggccgccgccgccgcagaccatggaggatacgacgaaggagatctagaagatcttttcgccgccgcggccgaagacgatatgtgagtaggcgggggcgccgccgcagattctggcgcagacgcagacggggcagacgcagggggcgacgaaagacacacaaacccactattgtactcagacagtggcaacctgacgtagtgagaccctgcaaaataacaggatggatgccccttattatctgtgggtcaggaagcacccagttcaacttcataacccacatggatgactttccccccatgggctacacctacgggggcaattttacaaatgtaaccttctcattagaggccatatatgaacaatttctttaccacagaaacagatggagctcctccaaccatgacctagaccttgccaggtaccagggaaccaccctaaaactatacagacacgaatacctagactacatagtcagctacaacagaacaggcccttttcagatcagcgacatgacctacctcagcactcaccctgctatgatgctacttcaaaaacatagaatagtagtacccagctttaaaacaaagccaagggggcgcaggtccataaaaattagaataaagcccccaaaactaatgctaaacaagtggtacttcacaaaagacatttgcagcatgggactcttccaactacaggccacagcatgcaccttaaacaacccctggctcagagacaccaccaagagccctgtcataggctttagagtccttaaaaactcctactactcagacctttctaacttagcagatgaagagtctgagaacagaaggcgaggaattattaaccacctccacccacaaacactaacaggctcaccaccaaatgccaaaggatgggaaatcacttacacaagactaatgggacccacatactacaaatcagtaccaagcagcacatacaattggctaaattatcaaacacactatgctacagtttataatgcgtttgcaaaagaaaaaagcgcaaaattagacacaataaacaaggaataccattaccactaccccacatatgcaataaaagactttaaaacaaattcaacacttacacatgactatggcatatacagtccctactacttaacaccaaccagaataagcttagactggcaaacaccatggacatatataagatacaacccactagcagacaaaggcctaggaaacatagtatacgctcagtggtgctcagaaaaaacacccaatgtcagcacaactaaaagcaaatgcataatgaaagacctaccactatggtgcatattctatggctacataaactgggtaattaaaagcaccggagtaagctccgctgctacagacatgagaataatgataataagtccttacactgacccagcacttatagggtcaactccagaccaaggctttctgccagtaagtgacaccttttgcaatggagacatgccgtttcttgcaccatatgtgccaatcaagtggtgggttaactggtacccttgcattgcacaccaaaaggaagtgtttgaggcaattgttaactgtggaccgttcgtcccacgagaccagacgaaaccctcttgggaaattaccttaggttacaaaatgaactggaaatggggtggctctcccctgccttcacaggcaatcgacgacccctgccagaagcccacccatgagcttcccgaccccgatagacaccctcgcatgctacaagtctcagacccgacaaagctcggaccgaagacagtgttccacaagtgggactggagacgtgggatgcttagcaaaagaagtattaaaagagtccaagaagactcaagcgatgatgaatatgttgcagggcctttaccacgaaaaagaaacaagctcgacaccaggaccgcaggtcttcaaacccccgaaaaagaaagttacactttactccaagccctccaagactcggcggaagagagcccctcgagccaagaacaagcaccccaagaagaaaaccaaaaagaggcgctcctacagcagctcgagctccaaaagcagcaccagcgagtcctcaaacgaggcctcaaactcctcctgggagacatcctccgactccgccgaggagtccactgggaccccctcctgtcctaattcagggtccttctatcccagacctgcttttccctaacacacaaaaaaaaaaactattttccaactacgactgggtgtgcgagtacgagctggccaaatgcatggatcgccccttgcggcactacccatcagacccccctcactacccctggctaccaaaaaagcctgctacccctcctacatgtagagtaagtttcaaattaaagctcgatgcctaaaattcaaggccgtgggtgtttcacttcatcggtgtctacctctaaaagtcactaagcactccgagcgtaagcgaggagtgcgacccccctgcccggtagcaacttcctcggggtccggcgctagaccccccctcgacccgaatcgctcgcgcgattcggacctgcggcctcgggggggtcgggggctttattaaacagactccgaggtgccattggacactgagggggtgaacagcaacgaaagtgagtggggccagacttcgccataaggcctttaactttgggtcgcttgtcagcggcttccgggtccgcatgggggccgccattttagcttcggtcgccattttaggccctcgcggggctccgtagtcgcatattagtgacgtcacggcagccatcttagtcgtgacgtcaaagtcacgtggggagggcggcgtgtaacccggaagtcatcctcatcacgtgacctgacgtcacggccgccattttgtgctgtccgccatcttgtgacttccttccgctttttgtaaaaaaaagaggaagtatgacgttgcggcgggggggcggcgcgcttcgcgcgccgcccaccagggggcgctacgcgcccccccccgcgcatgcgcgggtcccccccctcggggggggctccgcccccccggcccccccccgcgcttaatccaccgcgcatgcgcaaccacgcccccgccgccattttgtgcagcccgccaattttattttaaacagaccaatcagctactacttcgtgcacttcctggggcgtgtcctgccactgtatataaacagaagcggtgacgaatggtagagttttttctcgcccgtccgcggcgagagcgcgagcgaagcgagcgatcgagcgacccgtggg

SEQ ID NO: 361 - protein, 645 aa, Alphatorquevirus sp.; identical to SEQ ID NO: 110

SEQ ID NO: 362 - DNA, 3686 bp, Alphatorquevirus sp.
cgggtgccggaggtgagtttacacaccgcagtcaaggggcaattcgggcacgggactggccgggctatgggcaagattcttaaaaaattttcccgatcactttgccgccaggacacaaaaacatgccgtggagaccgccggtgcatagtgtccaggggcgagaggatcagtggtttgcgagcctttttcacggccacgcttcattttgcggttgcggtgaccctattgagcatcttaatagcattgctcatcgctttcctcgcgccggtccaccaaggccccctccggggctagagcaacctaaccccccgcagcagggcccggccgggcccggaggaccgcccgccatcttggccctgccggctccgcccgcggagcctaacgacccgcagccacgccgtggtggtggggacggtggcgccgccgctggcgccgcaggcgaccgtggagaccgagactacgacgaagaagagctagacgagcttttccgcgccgccgccgaagacgatttgtaagtaggagatggcgccggccttacaggcgcaggaggagacgcgggcgacgcagacgcagacgcagacgcagacataagcccaccttagtactcagacagtggcaacccgacgttatcagacactgtaagataacaggatggatgcccctcattatctgtggaaaggggtccacccagttcaactacatcacccacgcggacgatatcacccccaggggagcctcctacgggggcaacttcacaaacatgactttctccctcgaggccatatacgaacagtttttgtaccacagaaacaggtggtcggcctccaaccacgacctagaactctgcagatacaagggtaccaccctaaaactgtacaggcacccagacgtagactacatagtcacctacagcagaacaggcccctttgagatcagccacatgacctacctcagtactcaccccctgctaatgctgctaaacaaacaccacatagtggtgcccagcctaaagactaagcccagaggcagaaaggccataaaagtcagaataaggcccccaaaactaatgaacaacaagtggtacttcaccagagacttctgtaacataggcctcttccagctctgggccacaggcttagaactcagaaacccctggctgagaatgagcacccttagcccctgtataggcttcaatgtccttaaaaacagcatctacaccaacctcagcaacctgccacaacacaaacaagccagacttgatattataaacaaaacacttcacccaaccgacattacaggagcaaacaacaaaaagtggcagtacacctacaccaaactcatggcccctatttactactcagcaaacagggccagcacctatgactgggaaaattacagcaacgagtcaaactactataacacatattgtaaatttaatcaaaaaagagaagagaaattaacaaaaatcaaaaaagagtggcagacgctatatccacaacaatctactgcactgccagactcctatgacctcttacaggagtatggcctatacagcccatactacctcaaccccacaagaataaacctagactggatgaccccctacacacacgtcaggtacaaccccctcgtagacaagggcttcggaaacagaatatacatacagtggtgctcagaggcagatgttagctacaacagaacaaagtccaagtgtctcttacaagacatgcccctctttttcatggcctatggatacatagactgggcaataaaaaacactggcgtgtcatcactagtaaaggacgccagaatctgcatcaggtgtccctacaccgagccacaactagtgggctccacagaagacataggctttgtacccatctcagaaaccttcatgaggggcgacatgccggtacttgcaccatacataccgttgagctggttttgcaagtggtatcccaacatagctcaccagaaggaagtccttgaggcaatcatttcctgcagccccttcatgccccgtgaccaggacatgaacggttgggatatcacaatcggttacaaaatggacttcttatggggcggttcccctctcccctcacagccaatcgacgacccctgccagcagggaacccacccgattcccgaccccgataaacaccctcgcctcctacaagtctcgaacccgaaactactcggaccgaggacagtctttcacaagtgggacatcagacgtgggcagtttagcaaaagaagtattaagagagtgtcagaatactcaagcgatgatgaatctcttgcgccaggtctcccatcaaagcgaaacaagctcgactcggcgttcagaggagaaaatcgagagcaaaaagaatgctattctctcctcaaagcgctcgaggaagaagagaccccagaagaagaagaaccagcaccccaagaaaaagcccagaaagaggagctactccaccagctccagctccagagacgccaccagcgagtcctcagacgagggctcaagctcgtctttacagacatcctccgactccgccagggagtccactggaaccccgagctcacatagagcccccaccttacatacccgacctgctttttcccaatactggtaaaaaaaaaaaattctctcccttcgactgggaaacagaggcggagctggcggggtggatgcggcggcctatgcgcttctttccctcagacacccctcactacccgtggctaccccccgagcgagatatccccaaaatatgtaacataaacttcaaaataaagctgcaagagtgagtgattcgaggccctcctctgttcacttagcggtgtctacctcttaaggtcaccaagcactccgagcgccagcgaggagtgcgaccctctaccaaggggcaacttcctcggggtccggcgctacgcgcttcgcgctgcgccggacgcctcggaccccccctcgacccgaatcgctcgcgcgattcggacctgcggcctcgggggggtcgggagctttattaaacagactccgagatgccattggacactgagggggtgaacagcaacgaaagtgagtggggccagacttcgccataaggcctttaactttgggtcgcttgtcggtggcttccgggtccgcctgggggccgccattttagcttcggccgccattttaggccctcgcgggcctccgtaggcgcgttttaatgacgtcacggcagccatcttgtcgtgacgtttgagacacgtgatgggggcgtgcctaaacccggaagcatccctggtcacgtgactctgacgtcacggcggccattttgtgctgtccgccatcttgtgacttccttccgctttttcaaaaaaaaagaggaagtatgacgtagcggcgggggggcggcgcgcttcgcgcgcttcgctcgcgctctcgccgcggacgggccaggaaaaactctaccattcgtcccccccccgtgctgaatccaccgcgcatgcgcgaccacgcccccgccgccattttgtgcagcccgccaatttctcgttcaaacagaccaatcgaatactacttcgtgcacttcctggggcgtgtcctaccactgtatataagcagaggcggtgacgaatggtagagtttttcctggcccgtccgcggcgagagcgcgagcgaagcgagcgatcgagcgtcccgtggg

SEQ ID NO: 363 - protein, 641 aa, Alphatorquevirus sp.; identical to SEQ ID NO: 315

SEQ ID NO: 364 - DNA, 3685 bp, Alphatorquevirus sp.
cgggtgccggaggtgagtttacacaccgaagtcaaggggcaattcgggctcgggactggccgggctatgggcaaggctcttaaagaatgcgtttttctcgaatttatcgcagaaagaagaggctgctgccactgctttgcttgcgagctgaaccgaaagcacaacctaatatgagctggtgcactccagttgaaaatgcctataagagagagatcaactttctcaggggctgccaactgcttcacactagcttttgcggttgtgatgattttattaatcatgttattcgcctacaaaatcttcacgggaatctacaccagcccacgggaccgtctacacctccagtgacccgtagagctctggccctgcctgctgctccggagtcatggcgttccggtggtggtggtggagacgccgcccccagcgacggtggacccgccgcagatggaggagactacgaacccggagacctagacgcactgtacgacgccgtcgccgcagaccaagagtaaggagaaggcggtggggaaggagacgggggcgacgcagactgtacagacgcagatacaaaaagaggcgcaaaagacgaaaaaaaatgaccttaaaaatatggaatccatccaccattcgcgcctgtaacattaggggatttgtagcactagtagtttgtggacacactcgtgcaggctctaactatgccatacacagcgaagactacatacctcaactaaaaccctacggagggtcttttagcactactacctggagcctaaaagtactgtttgacgagcacctcaaatttagaaacaaatggagctatcctaacacagaactagaccttgccagatacaggggagccacattcacattttacagagacccaaaagtagactacatagtagtatacaacacagtgcctccatttaagcttaacaaatacagctgccctatgctacatccaggcatgatgatgcagtataaaaaaaaaatattaatacctagctatcaaacaaaaccaaagggaagcgctaaagtaagacttagaataaaacctcctgtattatttgaagataagtggtacactcagcaagacctgtgccccgttaatcttttgtcacttgcggttagcgcatgttccttcctgcatccgtttataccaccagaaagtgacaacatatgcataacgttccaggtgttgcgagatttttattacacacaaatgtcagttacacccacaacaaccacttccctaaatgacaaagacaaaaaaatatttagtgaccacttatataaaaaccctgaatactggcaatcacaccacactgctgctagattatctacctctcaaaagcctgcattaccttcaaacagcgcaatacccaatacccaaggatacttaaacacaacacctactaacacaagttttagaactggaaacaacacaatatatggccaaccaggctacaggccagacaatgagaaactaactaaaataagagaatggtactttaaccaagaaaacacagacaaccccatacatggcacttacttgaaacccacattaaactctgtagattaccacttaggaaaatacagtgctatatttttaagcccctacagaacaaacactcagtttgatacagcataccaagatgtaacctacaaccccaacacagacaaaggcaaaggaaacaaaatatggattcaaagctgcacaaaagaatccactattctagaccaaagttgtaaatgtgtagtagaagacctacctttatgggctatggtaaatggctacctagaattttgtgactcagaacttccaggagccaatatttacaatacctacattgtagttgttatatgcccttacactaaacctcaaatgctaaacaaaactaatccaaaacagggctatgtgttctatgacaccctgtttggagatggaaaaatgcctacaggcacaggcctggtacctttctggctacagagcagatggtaccctagatgccagtttcaacaacaggtgctgcatgacttatacctcaccggtccatttagctacaaagatgacctaaaatcatttagctttaatgctaaatacaaatttagcttcttatggggcggcaatatgattccccaacagattatcaaaaacccgtgcaaaaaagaagaatccacattcacctatcccagtagagagcctcgcgacttacaagttgttgacccactcaccgtgggcccagaatgggtcttccacacatgggactggagacgtggactttttggtaaagatgctatcgacagagtgtcaaaaaaaccagacgatgatgcagaatattatccagtaccaaaaaggcctcgattcttccctccaacagacacacagtcagagccagaaaaagacttcggtttcacaccggagagccaagagctattccaggaggagccacaagcaccccaagaagaaagccaagaagtacagcagcagcaactcctccagctcagactctcacagcagttcagaatcagacagcagctccagcacctgttcgtacaagtcctcaaaacccaagccggtctccacataaacccattatttttaaaccatgcataaatcaagtgtttatgtttccaccagacacccctagacccattataacaaaagaagggtgggaagatgagtttgtaacttgcaaacactgggataggccagccagaacatactacacagacaaacctacctatccttggatgcccaaggcaccccctcaatgcaatgtatctttcagactgggctttaaataaaaattcaaggccttaaactgttcacttgtcggtgtctacctctaaaggtcactaagcactccgagcgttagcgaggagtgcgaccctcccccctgatgcaacgccctcggagtccggcgctacgccttcggctgcgccggacacctcggcccccccctccacccgaaacgcttgcgcgtttcggaccttcggcgtcggggggggcgggggctttactaaacagactccgaggtgccattggacactgagtgggcgtacagcaacgaaagtgagtggggccagacttcgccatagggcctttatcttcttgccatttgtccgtgtccggggtcgacataggcttcggcctcacttttaggccttccggactaccaaaatggcgcatttagtgacgtcacggccgccattttaagtaaggcggaagcagctccactctctcacaaaatggcggcggagcacttccggcttaccgaaaaatggaggtcaattacttccaggttaaaggttagttactacgtcaccgatgacgtggggaggcgtgctgtaaaacccggaagcaggccccgcacgtcattgtcacgtggttactacgtcacagccgccattttgttttacaaaatggccgacttccttccgcttttttaaaaaaaggcgccaaaaaacggctgcggcgggggcgcgcgcgctacgcgcgcgcacacacccccaccgaagtacgtcactaaccacgtgttttccacaggccaatcagaaccttctacgtacacttcctgggctgggtctttgagagcatataactaacagcacttccgaatggctgagttttccacgcccgtccgcagcggcagcaccacggagggtgatccccgcgtcccgaggg

SEQ ID NO: 365 - protein, 742 aa, Alphatorquevirus sp.; identical to SEQ ID NO: 351

SEQ ID NO: 366 - protein, 141 aa, Alphatorquevirus sp.; identical to SEQ ID NO: 352

SEQ ID NO: 367 - protein, 59 aa, Alphatorquevirus sp.; identical to SEQ ID NO: 353

SEQ ID NO: 368 - DNA, 3684 bp, Alphatorquevirus sp.
cccccgtgctacgtcactaaccacgtggcagtcaaggggcaattcgggctcgggactggccgggctatgggcaaggctcttagggtcatcgctcttaaaaatgttttttggcaggccttacagaaaaaagaaaagggcgctgctactgtctcagctgccagatccaaagaagaaactacctggtgatatgacctggcgccccccggtacacaatgccgcaggcatcgataggcagttctttgaagcctgctttagatgccacagtagttgctgcggctgcggcagctttattaatcatcttaacgtactggctgctcgctatggctttactggggggccggcgccgccaggtggtcctgggccggcgccccaagtgagacccgcgcttccagcgcctgagcccgacccggaggccgagaaccgtgagccatggcgtggagctggtggtggcaacgatggaggcgccgccgctggaaacccaggcgccgccgctggagacgcctacgacggagaagacctagacgccctcttcgccgccgtcgccgaggacgcagagtaaggaggcggaggtggggcaggagacgggggcgacgcagacggtacgccaccagacgaaagagacgcaccaagggtcgcaactttagaaaaaaactagtactgactcagtggcacccctctagcataaggcgctgcttaattaagggcatagtccccctggtaatatgcggacacaccaggtggaactgcaactacgccctccatagcgaggactataccgaggagggtcgcttcgcccacggggggtccctcagcaccactacgtggtcgctaaaggtgctgtacgacgaattcttaaagcaccacaacttttggggctaccccaacaaccagctagacctggccaggtacaagggggccaaattcaccttctacagacacaaaaagactgactttatagtattctttaacagaaggcctccctttaagctaaacaaatacagctgcgcctcttaccaccctggcatgctcatgcagcagaaacacaaggtgctaatacccagctacgacactaaaccaaaggggaggccaaaaataactgttagaataaagccccccactctgttagaagacaagtggtacactcagcaggacctgtgcgacgttaacctgttgcaacttgtggttactgcggctgactttcaacatccgttctgctcaccacaaacgaacactccaaccacaacgttccaagtgttgaaagacatttattacaacactatgagcatctctgatcccctagaaaactacaataatgttaataagcccactgagtctaaatcatttaacgagtactcaaaggaactagaagaaattttatataccaggggctcctactggaactcttttcactccatggagtaccttaacccaaacacatcagataaacacgaccataaaatatttgacagtagcaacaaagagctaacaaaatggctgtcaacaaaaggcggcgataactttcaaactggagacagcacccagtttggccacaacagctacaaacccaatactgacaaaataacaaaagccagaaaagcctactgggatgccctaaacaaaccaaatgacctggctactaacataggacaggcaaaggcagagagattcgagtaccacctaggctggtactctccgatactactaagcagacacagaagcaacttaaactttgccagggcctaccaagacgtcacttacaaccctaactgtgacagaggtgtaaaaaacaaagtgtgggttcagtcgctcactaaacccaccacagagttcgatgaaaagagatgcaagtgtgtggtagagaacctgcccctgtgggcggctttgtactgctaccacaactttgtagaagaggagctaggcatctcctctgaaatctacaactcctgcatagtagtagtgcagtgtccttatacctttcctcctctttatgacaaaaagctacccaacaaggggtacatattctatgacaccctgtttggcaacggcaaaatgcccgacggacgcggacaggtagacgtgttccggcagcagcggtggtacccccgcatggccgcacagactcaggtgatgcatgacatcaccatgacaggccccttctcctaccacgacgagctagtaagcacacaactgactgccaagtacacctttgactttatgtggggcggcaatatgatctccacacagatcatcaagaacccctgcaaagacagtggactggaacccgcctatcccggtagacagcgtcgcgacttacaaattgttgacccacactccatgggcccgcaattctcgttccacaactgggactacagacggggcctatttggcaaagacgctatcgacagagtgtcaaaagaaccaagagatgctccagagtatcctaacccatacaaaaggcctagatatgttcctcccacagaccgcgcagaccaagagcaagaaaaagacttcaatttccaggaagaaagcggggcgtcctcgtcagaagagagcgatcaagaagtcctgcaagagacgcaagtactcaagttccagccagagcagcagcagcaactccacctgcagctcgcgcagcagcagcgactcggagagcaactccgattcctactccaccagatgttcaaaacccaagccaatctgcacctaaacccatatacatacacccagctataaacagagtgtttatgtttgaaccccagggccccaggcccataactactagacaggggtgggaggacgagtacacaactgccggcatatggggcaggcccgtccgctccttctacacagacacccctttctaccccgaggttcccaaaataccccctcaattctctgtaagtttcaaactcggctggaaataaaaatacaaggcctttcactgttcacttgtcggtgtctacctcttaaggtcactaagcactccgagcgtcagcgaggagtgcgacccttccccctggtgcaacgccctcggcggccgcgcgctacgccttcggctgcgcgcggcacctcggacccccgctcgtgctgacacgcttgcgcgtgtcagaccacttcgggctcgcgggggtcgggaattttgctaaacagactccgagttgccattggacactgtagccgtgaatcagtaacgaaagtgagtggggccagacttcgccataaggcctttatcttctcgccattggtccgtcgggaggggtcgctctaaacgcggaccccgttttcagcccttccggactacaaaagcggccattttagtgacgtcacggcggccatcttaagtaaggcggaagtagctccactatacaaaatggcggcggagcacttccggcttgcccaaaatggcggccaagctcttccgggtaaaaggtcagcagctacgtcacaagtcacgtggggagggttggcatgtaacccggaagtcaatcctcccacgtggcctgtcacgtgactgctacgtcacggccgccattttagttcacaaaatggcggacttccttcctcttttttaaaaattaaccgttggcggcggcgcgcgcgctgcgcgcgcgccgggggctgccgcccccccccgcgcatgcgcgcgggtccccccccccgcggggggctccgccccccggcccc

SEQ ID NO: 369 - protein, 767 aa, Alphatorquevirus sp.
MAWSWWWQRWRRRRWKPRRRRWRRLRRRRPRRPLRRRRRGRRVRRRRWGRRRGRRRRYATRRKRRTKGRNFRKKLVLTQWHPSSIRRCLIKGIVPLVICGHTRWNCNYALHSEDYTEEGRFAHGGSLSTTTWSLKVLYDEFLKHHNFWGYPNNQLDLARYKGAKFTFYRHKKTDFIVFFNRRPPFKLNKYSCASYHPGMLMQQKHKVLIPSYDTKPKGRPKITVRIKPPTLLEDKWYTQQDLCDVNLLQLVVTAADFQHPFCSPQTNTPTTTFQVLKDIYYNTMSISDPLENYNNVNKPTESKSFNEYSKELEEILYTRGSYWNSFHSMEYLNPNTSDKHDHKIFDSSNKELTKWLSTKGGDNFQTGDSTQFGHNSYKPNTDKITKARKAYWDALNKPNDLATNIGQAKAERFEYHLGWYSPILLSRHRSNLNFARAYQDVTYNPNCDRGVKNKVWVQSLTKPTTEFDEKRCKCVVENLPLWAALYCYHNFVEEELGISSEIYNSCIVVVQCPYTFPPLYDKKLPNKGYIFYDTLFGNGKMPDGRGQVDVFRQQRWYPRMAAQTQVMHDITMTGPFSYHDELVSTQLTAKYTFDFMWGGNMISTQIIKNPCKDSGLEPAYPGRQRRDLQIVDPHSMGPQFSFHNWDYRRGLFGKDAIDRVSKEPRDAPEYPNPYKRPRYVPPTDRADQEQEKDFNFQEESGASSSEESDQEVLQETQVLKFQPEQQQQLHLQLAQQQRLGEQLRFLLHQMFKTQANLHLNPYTYTQL

SEQ ID NO: 370 - protein, 167 aa, Alphatorquevirus sp.
LAGLWARLLGSSLLKMFFGRPYRKKKRALLLSQLPDPKKKLPGDMTWRPPVHNAAGIDRQFFEACFRCHSSCCGCGSFINHLNVLAARYGFTGGPAPPGGPGPAPQVRPALPAPEPDPEAENREPWRGAGGGNDGGAAAGNPGAAAGDAYDGEDLDALFAAVAEDAE

SEQ ID NO: 371 - protein, 59 aa, Alphatorquevirus sp.
MFEPQGPRPITTRQGWEDEYTTAGIWGRPVRSFYTDTPFYPEVPKIPPQFSVSFKLGWK

SEQ ID NO: 372 - DNA, 3683 bp, Alphatorquevirus sp.
cgggtgccgaaggtgagtttacacaccgcagtcaaggggcaattcgggcacgggactggccgggctatgggcaagactcttaaaaaatttccctgctctgttctccggcaggacacaaagtcatgccgtggagaccgccggtccataacgttacgggccgagaaaatcaatggtacgcagcagtttttcactctcatgcttcttggtgcggctgtggtaaccctgttgggcatattaacagcattgctcctcgctttcctaacgccggtcccccgagaccacctccggggctagaccagcaaaaccccgagggcccggcgggtcccggaggtccccccgccattttgccagctctgccggccccggcagaccctgagccgccgccacggcgtggtggtggggcagatggaggcgccgccgcagacctcgctatcgcagacgcacctggaggatacgcagaagacgacctagacgaccttttcgccgccgccgcggaggacgatatgtgagtaggcggaggcgccgccgctactacaggcgcagactgagacggggcagacgcagagggcgacgaagaaaacacagacagactctagtcctcaggcagtggcaaccagacgttgtaagacactgtaaaataacaggatggatgcccctagtaatctgtggctccgggagcacacagaacaattttataactcacatggacgactttccccccatgggatactcatacgggggcaacttcacaaacctcaccttctccttagagggcatatatgaacagtttatgtaccacagaaacaggtggtcccggtccaaccacgacctagacctggccagatacaaaggcacaactctaaagctttacagacaccaaaccttagactacatagtcagctacaatagaacaggcccctttcaaatcagtgacatgacctaccttagcacacaccctgcattcatgctactccaaaaacacagaatagtagtacccagcttacttaccaaacctaaaggcagaagatccataaaagtcagaataaagccaccaaaactcatgctaaacaagtggtactttaccaaagacatatgcagcatgggcctgtttcaattacaggccacagcatgcactttatacaatccctggctcagagacactacaaaaagcccagtcataggctttagagtacttaaaaacagcatctacacaaacctcagtaacctaccagatcataacggagccagagaggccatcagaaagaaactacacccaaatgccttaaccggacactctccaaaccaaaaaggctgggaatatagctacacaaaactaatggccccaatatactactcagccaacagaaacagcacatataactggctaaactaccaagataactatgtatccacttatgcaaaatttaaagcaaaaatgcaagacaacttacaactaatacaaaaagaatacctataccactacccgaacaattccaccatagaccttataaataacaacacactcacacatgactggggtatatacagcccctactggctaacacccaccagaataagcctagactgggaaactccttggacatatgttagatacaacccactggcagacaaaggcataggcaatgctgtatatgcacaatggtgttcagaacaaagcaacaaactagatccaaaaaagtccaagtgtataatgagagacctgccactgtgggctatattctatggctatgtagactgggtagtaaaatccacaggagtcagcagtgcagttacagacatgagaatagccatcaggagcccctacacagaaccggcacttatagggtcaactgaagatgtaggcttcattccagtaagtgacaccttttgcaatggagacatgccgtttcttgctccatacatccctgtgggctggtggatcaagtggtaccccatgattgcacaccaaaaggaagtctttgaggcaatagttaactgtggaccgtttgtgcccagagaccagaccaagcccagttgggaaattaccctaggttacaaaatggactggttatggggtggctctcccctgccttcacaggcaatcgacgacccctgccagaagcccacccacgaacttcccgatcccgatagacaccctcgtatgttacaagtctctgacccgacaaaactcggaccgaagacagtgttccacaaatgggactggagacgtgggatgcttagcaaaagaagtattaaaagagtccaagaagactcaacagatgatgaatatgttgcaggacctctaccaagaaaaagaaacaagttcgatactccagcccaaggcctgcaaaccccagaaaaagaaagttacactttactccaagccctccaagagtcgggccaagagagcagctccgaggaccaagaacaagcaccccaaaaaaaagagacagaagagaaagcactcctggagcagctccagctccagaaacaccaccagcgagtcctcaagcgaggcctcaaactcctcctgggagacgtcctccgactccgccgaggagtccattgggaccccctccttacatagcgcccccaacgcctatcccagacctgcttttccctaacacacaaaaaaaaaagaaattttccaactacgactggtcatgcgagtacgagctggccaaatggatggatcgccctttgcggcactacccatccgacctccctcactacccatggctaccaaaaaagcctcctacccagcctacatgtagagtaactttcaaattaaagctcgatgcctaaaattcaaggccgttggcgtttcacttcccggtgtctacctctataagtcactaagcactccgagcgttagcgaggagtgcgacccccctgcccggtagcaacttcctcggggtccggcgctacgccttcggctgcgccggacgcctcggaccccccctcgacccgaatcgctcgcgcgattcggacctgcggcctcgggggggtcgggagctttattaaacagactccgagatgccattggacactgagggggtgaacagcaacgaaagtgagtggggccagacttcgccataaggcctttaactttgggtcgcttgtcagcggcttccgggtccgcctgggggccgccattttagcttgggccgccattttaggccctcgcgggcctccgtagttgcgtattagtgacgtcacggcagccatcttggctgtgacgtcaaagtcacgtgcagagggcggcgtgtaacccggaagtcatcctcatcacgtgacctgacgtcacggccgccattttgtgctgtccgccatcttataacttccttccgctttttgtaaaaaaaagaggaagtatgacgtagcggcgggggggcggcgcgcttcgcgcgccgcccactagggccccccccccggggggggggctctgcccccccggccccccccctgcttaatccaccgcgcatgcgcggccacgccctcgccgccattttgtgcagcccgccaatttctgtttaaacaggccaatcaggaggctctacgtccacttcctggggtgtgtctacgaggtctatataagcagaggtagtgacgaatggtagagttttttctggcccgtccgcggcgagagcgcgagcgaagcgagcgatcgagcgtctcgtggg

SEQ ID NO: 373 - protein, 680 aa, Alphatorquevirus sp.
LRRGRRRGRRRKHRQTLVLRQWQPDVVRHCKITGWMPLVICGSGSTQNNFITHMDDFPPMGYSYGGNFTNLTFSLEGIYEQFMYHRNRWSRSNHDLDLARYKGTTLKLYRHQTLDYIVSYNRTGPFQISDMTYLSTHPAFMLLQKHRIVVPSLLTKPKGRRSIKVRIKPPKLMLNKWYFTKDICSMGLFQLQATACTLYNPWLRDTTKSPVIGFRVLKNSIYTNLSNLPDHNGAREAIRKKLHPNALTGHSPNQKGWEYSYTKLMAPIYYSANRNSTYNWLNYQDNYVSTYAKFKAKMQDNLQLIQKEYLYHYPNNSTIDLINNNTLTHDWGIYSPYWLTPTRISLDWETPWTYVRYNPLADKGIGNAVYAQWCSEQSNKLDPKKSKCIMRDLPLWAIFYGYVDWVVKSTGVSSAVTDMRIAIRSPYTEPALIGSTEDVGFIPVSDTFCNGDMPFLAPYIPVGWWIKWYPMIAHQKEVFEAIVNCGPFVPRDQTKPSWEITLGYKMDWLWGGSPLPSQAIDDPCQKPTHELPDPDRHPRMLQVSDPTKLGPKTVFHKWDWRRGMLSKRSIKRVQEDSTDDEYVAGPLPRKRNKFDTPAQGLQTPEKESYTLLQALQESGQESSSEDQEQAPQKKETEEKALLEQLQLQKHHQRVLKRGLKLLLGDVLRLRRGVHWDPLLT

SEQ ID NO: 374 - DNA, 3679 bp, Alphatorquevirus sp.
cgggtgccggaggtgagtttacacaccgaagtcaaggggcaattcgggcacgggactggccgggctatgggcaaggctcttaaaaaatttccccgctgtgttctccggcaggacacaaagtcatgccgtggagaccgccagtccataacgttccaggtagagaaaaccaatggtttgcagcggtttttcacggtcatgctgctttctgcgggtgcggtgaccctgttgggcatcttaacggcattgctcctcgctttcctaacgccggtccaccgagaccacctccagggctagaccagcttaatcccgagggcccggcgggtcccggaggtccccccgccatcttgccagctctgccggccccggcagaccctgatccggcaccacggcgtggtggtggggcagatggaggcgccgccgctggggccgccgccgccgcagaccataccgggtacgaagaaggagacctagaagatcttttcgccgccgcggccgaggacgatatgtgagtaggcggaggcgccgccgctactacaggcgcagactgagacggggcagacgcagagggcgacgaaagagacacaaacagactctagtcctcagacagtggcaaccagacgttgttaaacactgtaaaattacaggatggatgccccttataatctgtggctcagggagcacacagaacaactttataactcacatggacgactttccccccatgggctactcctacgggggcaactttacaaaccttaccttctccttagagggcatatatgaacagtttttgtaccacagaaacaggtggtcccggtccaaccatgacttagacctagccagatacaaaggcacaactttaaaactatacagacaccacaccttagactacatagtgagctacaacagaacagggcctttccagatcagtgatatgacctacctcagcacacaccctgcattcatgctccttcaaaaacacagaatagttgtacccagcttactcactaaacccaagggcaaaagatccattaaagttagaataaagcccccaaaactaatgctaaataagtggtactttacaaaagacatatgtagcatgggcctctttcagctacaggccacagcatgcactctatacaatccctggctcagagacaccacaaaaagcccagtaataggcttcagagtacttaaaaacagcatctacacaaacctcagtaacctgccagagcatgatggagccagagaagccatcagaaaaaaactacacccagaatccttaacaggacacagtccaaatcaaaaaggctgggaatacagctacacaaaactaatggctccaatatactactcagccaacaaaaacagcacatataactggctaaactaccaagataactatataaccacttacactaaatttaaaacaaaaatgacagaaaacttacaactaatccaaaaagaatacttataccactatcccaacaatgtaacaacagacttaataactaaaaacacactaacacatgactggggcatatacagcccctactggctaactcccaccagaataagcctagactgggaaacaccctggacatatgtcagatacaacccactagcagacaaaggcataggtaatgctatatatgcacaatggtgctcagaacaaacaagcaaactagactcaaaaaaatctaagtgcataatgagagacctaccactgtgggctatatgctatggctacgtagactgggtagtaaaatccacaggagtaagcagtgcagtaacagacatgagaatagctattagaagcccctacactgaaccagcacttatagggtcaacagaagacgtaggcttcattccagtaagtgacaccttttgcaacggagacatgccgtttcttgctccatacatccctgtgggctggtggatcaagtggtaccccatgattgcacaccaaaaggaagtgcttgaggcaatagttaactgtggaccgtttgtgcccagagaccaaaccactcccagttgggaaattaccgtaggttacaaaatggactggttatggggtggctctcccctgccttcacaggcaatcgacgacccctgccagaagcccacccacgagctacccgatcccgatagacaccctcgcatgttacaagtctctgacccgacaaaactcggaccgaagacagtctttcacaaatgggactggagacgtgggatgcttagcaaaagaagtattaaaagagtccaagaagactcaacagatgatgaatatgttgcaggacctttaccaagaaaaagaaacaagttcgatactccagcccaaggccttccaaccccagaaaaagaaagctacactttactccaagccctccaagagtcggggcaagagagcagctcagagagccaagaacaagcaccccaagaaaaagaaaaccagaaggaagcgctcatggagcagctccagctccaaaaacagcaccagcgagtcctcaagcgaggcctcaaactcctcctcggagacgtgctccgactccggagaggagtccactgggaccccctccttacatagctcctcctccctttatcccagacctgcttttccctaacacacaaaaaaaaaacaaattttccaactacgagtgggtgtgcgagtacgagctggccaaatggatggatcgccctttgcggcactacccatcagacccccctcactacccctggctaccaaaaaagcctcctacccagcctacatgtagagtaagtttcaaattaaagctcgatgcctaaaattcaaggccgtgggtgtttcacttcatcggtgtctacctctaaaggtcactaagcactccgagcgaagcgaggagtgcgacccccctgcccggtagcaacttcctcggggtccggcgctacgccttcggctgcgccggacgcctcggacccccccgggggggtcgggggctttactaaacagactccgaggtgccattggacactgagggggtgaacagcaacgaaagtgagtggggccagacttcgccataaggcctttaactttgggtcgcttgtcagcggcttccgggtccgcctgggggccgccattttaccttcggccgccattataggccctcgcaggcctccgtagtcgcatatcagtgacgtcacggcagccatcttggctgtgacgtcaaagtcacgtggggagggcggcgtgtaacccggaagtcatcctcatcacgtgacctgacgtcacggccgccattttgtgctgtccgccatcttgtaacttccttccgctttttgtaaaaaaaagaggaagtatgacgtagcggcggggggggcggcgcgcttcgcgcgccgcccaccagggggcgctgcgcgcccccccccgcgcatgcgcgggtcccccccctcggggggggctccccccccccggccccccccccgtgcttaatccaccgcgcatgcgcggccacgcccccgccgccattttgtgcagcccgccaatttctattcaaacagaccaatcaggaccttctacgtgcacttcctggggcgtgtctacgaggtctatataagcaacagcggtgacgaatggtagagttttttttcgcccgtccgcggcgagagcgcgagcgaagcgagcgatcgagcgtcccgtggg

SEQ ID NO: 375 - protein, 680 aa, Alphatorquevirus sp.
LRRGRRRGRRKRHKQTLVLRQWQPDVVKHCKITGWMPLIICGSGSTQNNFITHMDDFPPMGYSYGGNFTNLTFSLEGIYEQFLYHRNRWSRSNHDLDLARYKGTTLKLYRHHTLDYIVSYNRTGPFQISDMTYLSTHPAFMLLQKHRIVVPSLLTKPKGKRSIKVRIKPPKLMLNKWYFTKDICSMGLFQLQATACTLYNPWLRDTTKSPVIGFRVLKNSIYTNLSNLPEHDGAREAIRKKLHPESLTGHSPNQKGWEYSYTKLMAPIYYSANKNSTYNWLNYQDNYITTYTKFKTKMTENLQLIQKEYLYHYPNNVTTDLITKNTLTHDWGIYSPYWLTPTRISLDWETPWTYVRYNPLADKGIGNAIYAQWCSEQTSKLDSKKSKCIMRDLPLWAICYGYVDWVVKSTGVSSAVTDMRIAIRSPYTEPALIGSTEDVGFIPVSDTFCNGDMPFLAPYIPVGWWIKWYPMIAHQKEVLEAIVNCGPFVPRDQTTPSWEITVGYKMDWLWGGSPLPSQAIDDPCQKPTHELPDPDRHPRMLQVSDPTKLGPKTVFHKWDWRRGMLSKRSIKRVQEDSTDDEYVAGPLPRKRNKFDTPAQGLPTPEKESYTLLQALQESGQESSSESQEQAPQEKENQKEALMEQLQLQKQHQRVLKRGLKLLLGDVLRLRRGVHWDPLLT

SEQ ID NO: 376 - DNA, 3678 bp, Alphatorquevirus sp.
cgggtgccggaggtgagtttacacaccgcagtcaaggggcaattcgggcacgggactggccgggcttatgggcaaggctcttaaaaaattcccccgctgtgtattacagcaggacatcaaaacatgtcgtggagaccgccggcgcataacgtccaggggcgcgagggccagtggttcgcgtcgttttttcacagccacaattgcttttgcggctgcggtgaccctgttgggcatcttaatcgcattgctcctcgctttcctaacgccagaggaccccccccgcctccggagctagaccaagctctcgggccccctaacccgggagctccgccggccattttgccggccctaccgcctcctgctaacccagacgaccagcagccaccacggcgtggtggtacggccgccgaaggcgccgctggccatggagatggcgcagacgccgccgcagactatggagaagaagacctagagctactgttcgccgccgccgacgaagaccagtgagtagaaagcgccgctacaggcgcagacgcagacgaaggggcagacggacttatagggggcgacgaagaaagagacagaccctagttataaaacaatggcaaccggacgttaacagactatgcaggataacaggatggctacccctaatagtttgtggcacagggaacacccaaaacaactttatagtacactcagaagatgttaccccaagaggagcagcctttgggggtaaccttacccacatcacatggtgcctagaggccatatacaatgaatttctaatgcacagaaacagatggagcagatctaaccatgacctagacctctgcagatacctaggtgccacatttaaggcctacagacaccccacagtagactacataatagcctggactagaacacctccatttcaaatgacagaacttacctaccttagctgccaccccttactaatgctcttaagcaaacacagaatagtagtaaagagccaacaaacaaaaaaagggggcaaaaaatatgttaagtttcatataaaacccccaaaactaatgcttaacaaatggtactttacaaaagacttttgcaaagtacccctattcagcatgtgggcaacagcctgcgaacttcaaaacccctggctaagagaatccaccctgtctccagtagtgggattctatgccttaaaaccagacatatacacaaaccttagcatcctcccagaaaaagttaacgactttcaatcatccttttacaacatagtacacccacaaacaatacaatcctcaaacagtgaaattagatgggaatacacatacacaacactaatgaggccaatatataactcatgcccagcacttacaaactccacatatgactgggaaaactacagcacaccagacaactactcaaaatgctaccaatgctttactttaaaaagagaaacaaaatttcaaaaaattaaaaaacaatatgaaaaagtataccccaccttaacaacacaaacaccccaaaactactacttaacacaagaatttggcttctacagcccttactatttaacacccacaagaattagcctagactggcacacacccttccactacatcagatacaaccccatggcagacagaggcctaggaaacatgatctgggtagactggtgcagcagagaagaatctacatatgactccacacgcagcaagtgcatgctaaaagacctgccactatacatgctattctatggctatgcagactgggtaacaaagtccataggctcacaatcagcctggagagacatgagactcatggtaatatgcccatacacagagccacaactacaaatgaaaaataacaaaacacaaggatatgttatctatgcagataactttgccaacggaaacatgccctacttgcaaccacatatcccaatctcgtggtttacccgttggttcccttgcctcacacaccagcgtgaagcaatggagcgtgtggtttcctgtggaccgttcatggtcagagaccaagaccgcaacagttgggacataactttaggctacaagttcttatggagatgggggggctctcctctgcccactcaggccattgacgacccctgccagaagcccacccacgcactgcccgagcccggtacgctccctagaatcctacaagtcagtgacccgacgcaacttggaccgaaaacaatcttccacctctgggaccagaggcgtggactcattagtaaaagaagtattcaaagaatgtcagaataccaaacagatgatgaacttgtatcgccaggtcgcccaaagcgtccaaagctcgacacgagaccagagggactaccagaggagcaaagaggagcctacaatttacttcaagccctccaggactcagcccaatcggaagaaagcgacgaagaacagatgccacctctcgaagaagaacaagcaccccaagaaaagacagaaaaaatactcgtcaagcagctcgagcagcagaaactccaccagcgagtcctcaaacgaggactccgagtcctgctcggagacgtgatgaagctgaggaggggcctacacatagatcccctccttacatagctcctccacagtatgtaccagacctactgttccctaacactcaaaaaaaacccaaattttccaaattcgggtgggaaacagaggcccagcttgcagcggccttcgacaggcctatgcgcttctacccttcagaccccccaacctacccatggctaccaaaaaagccagttacccacactacctatagagtgtcttttcaacttaaagccccccaataaagtttcaaggccgtgggactttcacttgtcggtgtctgcttcttaaagtcacaaagcactccgagcgccagcgaggagtgcgaccctcccccctggaacaagttcctcagagccgcgcgctacgccttcggctgcgcgcggcacttcggaccccccctccacccgaaacgcttgcgcgtttcggaccttcggcgtcgggggggtcgggagctttattaaacagactccgagatgccattggacactgaggggtcgtacagcaacgaaagtgagtggggccagacttcgccataaggcctttatcctctcgccatttgtcagtgtcttccgggttcgtatggaggtcgccattttagcttcgacctccattttaggccctcgcgggcacccttagtcgcgttttagtgacgtcacggcagccattttgggcgtgacgtcaaaatcacgtggggagggcggcgttaaacccggaagccatcctcgtcacgtgacctgacgtcacggccgccattttgtgctgtccgccatgttgtgacttccttccgcttttttaaaaaaaaagaggaagtatgacgtagcggcgagggggcggcgcgcttcgcgcgccgcccactagcccccccggcccccccccccctgcttaatccaccacgcatgcgcagccacgcccccgccgccattttgtacagcccaccaatttctctttcaaacaggccaatcagatactactacgtacacttcctggggcgtgtctatgaagtctatataaccaatgccactgacgaatggtagagtttatttcgcccgtccgcggcgagagcgcgagcgaagcgagcgatcgagcgtcccgtggg

SEQ ID NO: 377 - protein, 605 aa, Alphatorquevirus sp.
MHRNRWSRSNHDLDLCRYLGATFKAYRHPTVDYIIAWTRTPPFQMTELTYLSCHPLLMLLSKHRIVVKSQQTKKGGKKYVKFHIKPPKLMLNKWYFTKDFCKVPLFSMWATACELQNPWLRESTLSPVVGFYALKPDIYTNLSILPEKVNDFQSSFYNIVHPQTIQSSNSEIRWEYTYTTLMRPIYNSCPALTNSTYDWENYSTPDNYSKCYQCFTLKRETKFQKIKKQYEKVYPTLTTQTPQNYYLTQEFGFYSPYYLTPTRISLDWHTPFHYIRYNPMADRGLGNMIWVDWCSREESTYDSTRSKCMLKDLPLYMLFYGYADWVTKSIGSQSAWRDMRLMVICPYTEPQLQMKNNKTQGYVIYADNFANGNMPYLQPHIPISWFTRWFPCLTHQREAMERVVSCGPFMVRDQDRNSWDITLGYKFLWRWGGSPLPTQAIDDPCQKPTHALPEPGTLPRILQVSDPTQLGPKTIFHLWDQRRGLISKRSIQRMSEYQTDDELVSPGRPKRPKLDTRPEGLPEEQRGAYNLLQALQDSAQSEESDEEQMPPLEEEQAPQEKTEKILVKQLEQQKLHQRVLKRGLRVLLGDVMKLRRGLHIDPLLT

SEQ ID NO: 378 - DNA, 3678 bp, Alphatorquevirus sp.
cgggtgccggaggtgagtttacacaccgcagtcaaggggcaattcgggctcgggactggccgggctatgggcaaggctcttagggtcatcgctcttaaatatgtttttcggcaggccttacagacaaaagaaaagggcgctgtcactgcttggcgtgcgaactccacagaagaaacgggctcgtgacatgacctggcgcccaccggtacacaatgccgccggcatcgacaggcagttctttgaggcttgttttcgatgccacgcaggttgctgtggctgcggtaattttgttagccatattaatgtactggctgctcgctatggcttcacagggggtccggcgccgccaggtggtcctgggccggcgccccaagtgagacccgcgcttccagcgcctgagccggaccccgagggtcctgagcctcagccatggcgtggagctggtggtggcaacgatggaggcgccgccgttggaaacccaggcgccgccgctggagacgcctacgacggagacgacctagacgccctcttcgccgccgtcgccgaggacgcagagtaaggaggcggaggtggggcaggagacgggggcgacgcagacggtacaccaccaaacgaaagagacgcaccaggggtcgcaactttaaaaagaaactagtactgactcagtggcacccctctagcataagacgctgcttaattaagggcatagtccccctggtaatatgcgggcacaccaggtggaactggaactacgccctgcacagtgaggactatactgaagagggtcgctatgcccacggggggtccctcagcaccactacgtggtcgctcaaggtgctctacgacgagtacttaaagcaccacaacttctggggctatcccaacaaccagctagacctggccaggtacaagggggcaaaattcaccttctacagacagaaaaagactgactttatagtgttctttaacagaaagcctccctttaagctaaacaaatacagctgcgcctcttaccaccctggcatgcttatgcagcaaagacacaaggtgctcattcccagctatgacactaaacccaagggcaggccaaaaataactgttagaataaagccccccactctgttagaggacaagtggtacactcagcaggacctgtgcgacgttaacctgttgcaacttgtggttactgcggctgactttcaacatccgttctgctcaccacaaacgaacactccaaccacaacgttccaagtgttgaaagacatttattacaacactatgagcatctctgagcccccagaggcctacagtaacgttaataagccttctgaatctaaaaacttttcaagttactcacaagagctagagaacatattatatgcaaggggctcctactggaactctttccacgcccttgagtacctcaacccaggcatatcagacacatacaacaataaaatatttaatggcacctctgcaacattaaacagttggcttacaggaaagggcaattcaaaatttcaaactggagacagcacccagttcggccacaatagctacaaacccactactgaaaacataaaaacagccagatcagcctactggactgccttaaacaggcctaatgaccttgctgttaacatagcacaggcaaaggcagagagattcgagtaccacctaggctggtactctcccatactactaagcaaccacagaagcaacttaaactttgccagggcctaccaagacgtcacctacaaccctaactgtgacagaggtgtaaaaaacagactgtgggttcagcctctcactaaacccaccacagagtttgatgaaaagagatgcaagtgtgtggtagagaacctgcccctgtgggcagccttctactgctaccacaactttgtagaagaggagctaggcatctcctctgaaatctacaactcctgtatagtagtagtgcagtgtccttatacctttcctcctctttatgacaaaaaactacccaacaaggggtacatattctatgacaccctgtttggcaacggcaaaatgcccgacggacgcggacagatagacgtcttctggcagcagcggtggtacccccgcatggccacgcagactcaggtgatgcatgacatcaccatgacaggccccttctcctaccacgacgagctagtaagcacacaactgactgccaagtacacctttgactttatgtggggcggcaatatgatctccacacagatcatcaagaacccctgcaaagacagtggactggaacccgcctatcccggtagacagcgtcgcaacttacaaattgttgacccacactccatgggcccgcaattctcgttccacaactgggactacagacggggcctatttggccaagacgctatcgacagagtgtcaaaagaaccaagagatgctccagagtatcctaacccatacaaaaggcctagatatcttcctcccacagaccgcgcagaccaagagcaagaaaaagacttcaatttccaggaagaaagcggggcgtcctcgtcagaagagaccgatcaagaagtcctccaagagacgcaagtactccagttcaagccagagcagcagcagcaactccacctgcagctcgcgcagcagcagcgactcggagagcaactccgattcctactccaccagatgttcaaaacccaagccaatctgcacctaaacccatatacatacacccagctataaacaaggtgttcatgttcgaccctgagggtcccaagcccataaacaccagagagggctgggcagatgagtaccacactgcctcagtttggggcaggcccgtacgttcctactacacagacacccccttctacccagaggttcccaaggtgccccctcaattctctgtaagttttaaactcggctggaaataaaaatgcaaggcctttcactgttcacttgtcggtgtctacctcttaaggtcactaagcactccgagcgtcagcgaggagtgcgacccttccccctggtgcaacgccctcggcggccgcgcgctacgccttcggctgcgcgcggcacctcggacccccgctcgtgctgacacgcttgcgcgtgtcagaccacttcgggctcgcgggggtcggtaaatttgctaaacagactccaagttgccattggacactggagctgtgaatcagtaacaaaagtgagtggggccagacttcgccataaggcctttatcttcttgccatttgtccgtgtagggggtcgccataggcttcggcctccattttaggccttccgaactaccaaaatggccgattccgtgacgtcatggcggccattttaagtaagctccacccaggactgacgtcagtgtcaaaggtcatcctcggcggaagcttacatgaaatggcggccaatttcttccgggtcaaaggtcacgcctacgtcattcgtcacgtggggaggcatactgcgcaaacgcggaagtaggccccgtcacgtgacggtcacgtgggtgctgcgtcacagccgccattttagttcacaaaatggccgacttccttccgcttttttaaaaattaaccgtctgcgtcgcccccgtctcctgccccacctccgcctccttactctgcgtcgtccgcagcggcagcaccacggagggtgatccccgcgtcccgaggg

SEQ ID NO: 379 - protein, 767 aa, Alphatorquevirus sp.; identical to SEQ ID NO: 149

SEQ ID NO: 380 - protein, 167 aa, Alphatorquevirus sp.; identical to SEQ ID NO: 150

SEQ ID NO: 381 - protein, 59 aa, Alphatorquevirus sp.; identical to SEQ ID NO: 151

SEQ ID NO: 382 - DNA, 3668 bp, Alphatorquevirus sp.
cgggtgccggaggtgagtttacacaccgcagtcaaggggcaattcgggctcgggactggccgggctatgggcaaggctcttaaaaaaagccatgttttttggtcggccttacagaaagaaaagggcactgttactgctacgcgtgcgagctccagaggcgaaaccacctgctatgagctggagacccccggtgcacaaccccaatgggattgagagaaacctgtgggaggcattctttcgcatgcatgcttcagcttgtggttgtggcgatcttgttggccatattactatactggctggtcggtatggtgctcctcctcgtcccccggcccccgggactcccagaccaccgctgagacgccagctggcccttccggcgccccccgctgatccgcagcaggccaacccagcatggcctggtggggacggtggagaagatggcgctgggggccccgccgctggcggcgccgtcgcagacgccgagtaccaagaagacgagctcaacgccctgttcgacgccgtcgagcaagaagagtaaggaggaggcgatgggggaggcggaggtggagacgggggtacagacgcagactgagactcagacgcagacgcagacgaaagcgaaagatagtactgactcagtggaacccagctaaagtcaggagatgtaccattaagggggtactccccatgatcttgtgcggggcaggacgctcagggtttaactatggactgcacagcgacgactacaccacccagaaaccccttggccagaacccccacgggggcggcatgagcacagtgacttttagccttcaggttctctatgaccagtatcagaggtttatgaacaagtggtcgtactctaacgaccaactagacctcgccaggtactttggctgcaccttctggttctacagacacccagaagtggactttgtagctcagtttgacaacgttccccccatgaaaatggacgagaacacagcccctaacactcacccgtcattcttactacaaaacaaacacagggttaaaatccccagctttaaaaccaagccgtttggcagaaaaaaagttagagttaaagtggggccccccaaactgtttgaagacaaatggtacagccaacatgacctgtgtaaggttcccctagtcagttggcggttaaccgcagctgacttcagatttccgttctgctcaccacaaactgacaacccttgctacaccttccaggtattgcatgaagagtattacccagtaataggcacttctgctttagaacagggaactaattacaattcatcaggcatatgtacattagaaacgtttttatatggaaaatgtacccactatcaaacatttgccacagacacaagactaaaccctcaaagacccataacaggcaacaacaacaaaacttataatcctagtggagccacagaagcaattatatggagtcaagatgactttaacaactttaaaaagcacacagacagcaactatggctactgcacctactgcccaaacgacgacttaattcaaaaaattaaaaactacagagacaaaagattccagtggctaactgaaatgccacaaacaaacacctgccacataaatgccacctacgcccgaggaaaaattaaacagtgggaatatcacctaggctggtactcaaatatatttataggcaacctaagacacaacctagcattccgaacagcatacattgacattacctacaaccccattacagacaaaggagaaggcaacattgtatggttccaatatgccaccaaacccaacacacaatacatagacagccaggcaaaatgcactattagagacatacccctatatgctgccttttatggctacgaagactacatacaaagaacactaggcccctaccaagatgtagaaaccctgggtataatctgtgttaaatgtccctacacagatccccctctagttcacaagtctgcagataaaaaagactggggctatgtattttacgacatgcactttggcaacggaaaaaccccagaaggacttggccaggtgcacccttactggatgcaaagatggagaccctacgtacagtttcaaaaagacactatgaacaagatagccagaaccggaccgttcagctacagagacgacatgccttccatcactttgactgccgggtacaagtttcgttttaactggggggggcgactctatatttccacagattattaaaaacccctgcccagacagtggggtacgaccttcatccagtagagagcgtcgctcagtacaagtcgttagcccgctcacaatggggccagaatacatattccaccggtgggactggcgacggggcttctttaatcaaaaagctctcaaaagaatgcttgaaaaatcaattaatgatagagagtatccaacaggcccaaaggtccctcgatggtttcccccactcgacaaccaagagcaagaaggcgcctcagattcagaagcgacaagctcgcagtcctcgcaagaagaagccgctcaagaagccctccaagaagtccaagaggcgacgctacagcagcacctcctccagcagtaccgagagcagcgacgaatcggaaagcaactccaactcgtcatgctccaactcaccaaaacgcagagcaacctgcacataaatccccgtgtgcttggccatgcataaataaagtctacatgtttcccccagaaaaacccatgcccatacacgggtaccacgggtgggagacagagtatcaggcctgcaaagcctttgacaggccccctagaaactacctttcagacaaacccatctatccctggcttccccgctctcaacctgaatttaaagtcagttttaagcttggttttcaataaacaaggccgtgggaatttcacttgtcggtgtctacctcttaaggtcactaagcactccgagcgttagcgaggagtgcgacccttccccctggtgcaacgccctcggcggccgcgcgctacgccttcggctgcgcgcggcacctcggacccccgctcgtgctgacacgctcgcgcgtgtcagaccacttcgggctcgcgggggtcgggaattttgctaaacagactccgagttgccattggacactgtagctgtgaatcagtaacgaaagtgagtggggccagacttcgccataaggcctttatcttcttgccattggtccgtctcgggggtcgtcataggcttcgggcccggttttaggccttccggactacaaaaatcgccattttagtgacgtcacggcggccattttaagtaagcatggcgggcggtgacgtataagttcaaaggtcaccgcgcttccgtgtttacacaaaatggtggtcaactccttccgggtcaaaggtcagcagctacgtcataagtcacgtggggagggctgcgtcgcaacccggaagcaatcctcaccacgtgatttgtcacgtgaccgctacgtcacggccgccattttagttcacaaaatggctgacttccttcctcttttttaaaaataacggccctgcggcggcgcgcgcgctgcgcgcgcgctaatataagtagctgcacttccgaatggctgagttttccacgcccgtccgcagcgagatcgcgacggaggagcgatcgagcgtcccgaggg

SEQ ID NO: 383 - protein, 609 aa, Alphatorquevirus sp.
MAWWGRWRRWRWGPRRWRRRRRRRVPRRRAQRPVRRRRARRVRRRRWGRRRWRRGYRRRLRLRRRRRRKRKIVLTQWNPAKVRRCTIKGVLPMILCGAGRSGFNYGLHSDDYTTQKPLGQNPHGGGMSTVTFSLQVLYDQYQRFMNKWSYSNDQLDLARYFGCTFWFYRHPEVDFVAQFDNVPPMKMDENTAPNTHPSFLLQNKHRVKIPSFKTKPFGRKKVRVKVGPPKLFEDKWYSQHDLCKVPLVSWRLTAADFRFPFCSPQTDNPCYTFQVLHEEYYPVIGTSALEQGTNYNSSGICTLETFLYGKCTHYQTFATDTRLNPQRPITGNNNKTYNPSGATEAIIWSQDDFNNFKKHTDSNYGYCTYCPNDDLIQKIKNYRDKRFQWLTEMPQTNTCHINATYARGKIKQWEYHLGWYSNIFIGNLRHNLAFRTAYIDITYNPITDKGEGNIVWFQYATKPNTQYIDSQAKCTIRDIPLYAAFYGYEDYIQRTLGPYQDVETLGIICVKCPYTDPPLVHKSADKKDWGYVFYDMHFGNGKTPEGLGQVHPYWMQRWRPYVQFQKDTMNKIARTGPFSYRDDMPSITLTAGYKFRFNWGGRLYISTDY

SEQ ID NO: 384 - protein, 160 aa, Alphatorquevirus sp.
LAGLWARLLKKAMFFGRPYRKKRALLLLRVRAPEAKPPAMSWRPPVHNPNGIERNLWEAFFRMHASACGCGDLVGHITILAGRYGAPPRPPAPGTPRPPLRRQLALPAPPADPQQANPAWPGGDGGEDGAGGPAAGGAVADAEYQEDELNALFDAVEQEE

SEQ ID NO: 385 - DNA, 3664 bp, Alphatorquevirus sp.
cgggagccggaggtgagtttacacaccgcagtctaggggcaattcgggcacgggtctggccgggctatgggcaagattcttaaaaagtttccccgctgtgtcctacgccaggacacaaaaacatgccgtggagaccgccggcgcacgacgtccaaggcagagagaaccaattctttgcgggatgttttcacatgcatgctgctttctgcgggtgcggtgacgttgtcggccatcttgctagcattgctgctcgctttcctgctgccggaccccctgctccgccgggcctcagacctccaagaccccctgccccggccggtccgggcggtccccccggctaccttcccgctctcccggctccggcaccggagccgcctaatccagcaccacgccgtggtggtggggaagatggcgccgccgcgggtggcgccgccgatgggggagaagaagaggccgccgcgtacggcgaggaagaactagaagagcttttccgcgccgccgccgaggacgatatgtaagtaggagatggcgccggccttacaggcgcagacggagaaaggggcgacggagacgcagacgcagacggactcacaaacccaccctagtaatgagacagtggcaaccggacgttgttaggacctgctacatcacagggtggatgcccctcatcatctgtggccaaggacagacccagtttaactttataatgcacatggacgatatcaccccccggggagcctcctatggaggcaacctcactaacataacatggaccctagagggcctgtgggaacagttccagtaccacagaaacaggtggtcgcgcagcaaccacgacctagacctagccaggtacatattcaccacccttaagctctacagacacgacactgtagactacatagtcagctacaccagaacaggacctttccaaatggggcacctcactcacctcagcactcaccctcttctaatgctactctcaaaacaccacatagtagtgcccagcctaaaaacaaaacctgggggcagaaaatacaaaaaaatcagaatcaagcccccaaaactcatgttaaacaagtggtacttcaccaaagacatctgtgacctgggcctcttccaactgtgggccacgggagcagagctcagaaacccctggttaagatcaggcacacaaagcccctgcataggcttctgtgtactaaacaactcctactacaccaacctcagcaaccttccacaatacgaacaggctagaacacagatacaactgtcttttcacccctcagacatacaaataaaccaagaaaaaaatctatggcagtacacatacacaggccttatgtctaagtactactacaaaggcaaccaggccagcacctatgactttcaaaattacagcactccactaaactacaaaaacacatatacaaaatggttagaggagaaacaaagcagacttactaaacttcaacaacagtggcaaaaagtgtacccacaactagtcacacaacaaccaacagacacaacactcttacaagactttggcatatacagccccttctatctcacacccgtcagaatcagcctagactggcgcaccacctacacacacgttaggtacaacccactcacagacaaaggcataggcaacagaatatacctacagtggtgctcagagtctagctgcaaatacagctccacaaagagtaagtgccccatagtagacatgccactatacatagccttctatggctacatagactggtgcatcaaatgcacaggcaactctggcctcgtaaaagacgccagaatcatggtcaggtgtccctacaccgagccccaactagtgggggccacagaggacgtgggcttttgcctcctcagtaacaccttcatgaacggagacatgcccgtgctggccccctatatcccaatttcctggttcgttaagtggtaccccatgattgcacaccaaaaggaaaccgttgaagccatagtttcctgtggaccgttcatgcccagagatcaggaagccaagagttgggacataaccttgggttacagatcctgtttcaaatggggcgggtcgcctctgcccacacaggccatcgacgacccctgccagaagcccacgcacccacttcccgaccccgatagacaccctcgcctcctacaagtctcagacccgacaaagctcggccccaagaccatattccacagttgggacatgcgacgcggacaatttagcaaaagaagtattgagagaatgtcagaatacacagagtatgatgaatattttgaaacaggtctaccatcaaaaagaaaaaagttcgacacgccggcagaaggactccaaggagagcaaagaaaagcctacaatttactccaagccctcgaggcgagccaagaagagtcggggtcagaagaccaagaacaagtacccccacaagagacggagacgcaacaactcctccagcagctgcagctccagaaacaccaccagcgagtcctcagacagggcctcaaacacctcctcggggacgtcctccgactccgacgaggagtccactgggaccccctccttacatagagccgcccccgttcattcccgatcttctttttccttctactaacaaaaaaaaaaaattctccaaattcgactgggaaacggaggctcagctagggcagatattcaagcgtcctatgcgcttctatccctcagacaaccctcactacccgtggttaccccccaagcgagatatccccaaaatatgtaacgtaaacttccaaataaaacttgcagagtaacacattcgaggccctcctctgttcacttagcggtgtctacctcttaaggtcaccaagcactccgagcgcaagcgaggagtgcgaccctccgccctggggcaacttcctcggggtccggcgctacgcgcttcgcgctgcgccggacgcctcggaccccccctcgacccgaatcgctcgcgcgattcggacctgcggcctcgggggggtcgggggctttattaaacagactccgagttgccattggacactggagctgtgaatcagtaacgaaagtgagtggggccagacttcgccataaggcctttaactttgggtcgcttgtcagcggcttccgggtccgcgtgggggccgccattttacctttggccgccattttaggccctcgcgggcctccgtagacgcgttttaatgacgtcacaggcgccatcttgactgtgacgtatcagtcacgtgtgcggggcgtgcctaaacccggaagcatccctggtcacgtgactgtgacgtcgcggccgccattttgtacgtccgccattttgtgacttccttccgctttttcaaaaaaaaagaggaagtatgacgtagcggcggggggggcggcgcgcttcgcgcgccgcccaccagggccccccccccgtgtctaaatccaccgcgcatgcgcggccacgcccccgccgccattttgtgcggcccgccaatttctgtttcaaacagaccaatcagaagactctacgtgcacttcctggggtgtgtcttcgaagagtatataagcagagacggttacgaatggtagagttttttctggcccgtccgcggcgagagcgcgagcgaagcgagcgatcgagcgacccgtggg

SEQ ID NO: 386 - protein, 661 aa, Alphatorquevirus sp.; identical to SEQ ID NO: 240

SEQ ID NO: 387 - DNA, 3657 bp, Alphatorquevirus sp.
cgggtgccggaggtgagtttacacaccgcagtcaaggggcaattcgggctcgggactggccgggctatgggcaaggctcttaaaaagccatgtttctcggtaaactttacagaaagaaaaggaaactgctactgcaagctgtgcgtgctccacaggcgccatctcccatgagccgctgctggtgtcccccccggggtaatgtcgcctctcgcgaagcccggtggtacgacgcggttcgaggaagccacgatgctttttgcggctgtggtgatcctgttcttcatttttctcgtctggttgcacgttctaaccatcagggacctccgacgcccccctcggacgaccgtgcgccgtcgcgtaccccagtgagacgcctgctgcctctccccagctaccccggcgagggtccggctcctagatggtctggtggggatggaggcgccggtggtggcgaccaaagagaaggtggcgatggcggcgcgcgcgccgccgacgaagagtaccggcccgaagacctagacgagcttttcgacgctatcgaacaagaacagtaaggaggagacgcagggggaggcggaggggctaccggcgccgtcacagactgagacgctatgccagacgtagattcaaacgcagaaagatagtactgactcagtggaacccccagactgtcagaaaatgtactataaggggtctcatgcccgtcctgtgggcgggcatgggcaaggggggccacaactacgccgtccgctcagatgactttactataaaagggggcttcggcggctcttttgcgacagagaccttcagtctcagagtactgttcgaccagtaccagaggggctttaacaagtggtccttcagtaaccaggacctagacctggccctctaccatgggtgcaaatggacattctacagacaccaagacacagactttataatatacttcaccaacaatccccccatgaaaaccaaccagttctctgctcccttgaccactccgggcatgctaatgaaaaacaaatataagatactactgcccagctttaaaaccagacccagggggcgaaagtccgtctctgtcagaataagaccccctaaactatttcagcataagtggtacacccagcaggacctgtgcacagttcctcttgtccaactgaacgtgaccgcagctgatttcacacatccgttcggctcaccactaactgacactccttgcataagcttccaggtgctgggtgacttgtataacgaatgtcttaatatagaccttcctcaatttacagaaaacggtgagatagagcccagttcaaattatgagagacctaataaagaacaacttaaaaaactttatcaaaccctctttaccaaaccagactcctcacactactggcaaacattcatagtaaactccatggtcagagcccatattaatgcgaaacaagcccaaaaagcctatgaaaatgtaaggtcctcacctacctacaacactcaaccattccccacagaacccttaaaaagtgagtttgacacatggaaaaacgaattcacagaccaaagagacagcaactttctttttgctacataccatccagacaaaattaaaggtacattaaagaaaatgagagacaataactttctattagagactggcccaaatgacagatatgggtccttccaggcccagtacaccagaaacacacacatgctagactactacctcggcttctacagccccatattcctatctgatggcagatccaatgtagaattctttacagcatacagagacatagtgtacaaccccctcctagacaaagccgagggcaacatgatctggttccagtaccacacaaagacagacaacaaatacagaaaaccagaatgccactgggagataacagacatgcccctgtgggccctctgcaacgggtacgaggagtacctagagagccagataaaatatggagacgccaaagtagagggcaaggtcctcatcaggtgtccctacaccaaacctcctctcacagaccccaaagatcctactgcaggatttgtagtttacaaccagaactttggacgaggaaagtggatagacggaggaggctacatccccttacacgagaggagcaagtggtacgtcatgctacagtaccagactgacgtcctacacgacatagtgacttgtggaccgtggcagtacagggacgacaacagaaacagtcagcttatagccaagtactccttcagattcaagtggggcggtaaccttgttcactcccaggtcatcagaaacccatgtaaggacaaccaagtatccggtccacgtagacagcctagagacgtacaagttgttgacccgcaactcgtctcgccgccctgggtcctccacaacttcgaccagagacgaggacagtttactgaaacagctatcagacgtctgctacagcaaccaatgcctggcgagtatgttgctccagcccaacacgtacccctcctcttcctaccctcagagtaccaacgcgaagacggaagtgtcgaagacaactccggttcaccggtcaaaagaccccgcacctcgtacgaagagaacgaaacacagacggagtcctcgtcggagggggacccggcggagacgacgagggagctcgtcatccgaaagctccgagagcagcgagcactccagttccagctccaacacttcgctctccaactcgccaagacccaggcgaacctgcacataaaccccctattatctttcccgcagtaaacaaggtcctgctattccccccagagggtcctaaacccatagtaggtaaggaggcctggcaagatgagtacgtagcctgcaaatactgggacaggccacctagaacccaccacacagacacccctttctatccctgggccccccaacaattccgtgtgagcttcaaacttggctttcaataaaattgctacgccgtggaactctcactggtcggtgtctacctcttaaggtcactaagcactccgagcgtcagcgaggagtgcgacccttccccctggtgcaacgccctcggcggccgcgcgctacgccttcggctgcgcgcggcacctcggacccccgctcgtgctgacacgctcgcgcgtgtcagaccacttcgggctcgcgggggtcgggaattttgctaaacagactccgagttgccattggacactgtagctgtgaatcagtaacgaaagtgagtggggccagacttcgccatagggcctttatcttctcgccattggttcgtgtagggggtcgccgtaggcttcgagctcggttttaggccttccggactaccaaaatggcggaatcggtgacgtcacggccgccattttaagtaggtgccgtccaggactgctgttccgggtcagagggcatcctcggcggaacctacacaaaatggaggtcaagtccttccgggtcaaaggggctccgccccccggtcccccccccgaagtacgtcactaaccacgtgactcccacaggccaaccacagtctatgtcgtgcacttcctgggcatggtctacgttataatataaagcggtgcacttccgaatggctgagttttccacgcccgtccgcggcgagattgcgacgaaggagcaatcgagcgtcccgaggg

SEQ ID NO: 388 - protein, 784 aa, Alphatorquevirus sp.
MVWWGWRRRWWRPKRRWRWRRARRRRRVPARRPRRAFRRYRTRTVRRRRRGRRRGYRRRHRLRRYARRRFKRRKIVLTQWNPQTVRKCTIRGLMPVLWAGMGKGGHNYAVRSDDFTIKGGFGGSFATETFSLRVLFDQYQRGFNKWSFSNQDLDLALYHGCKWTFYRHQDTDFIIYFTNNPPMKTNQFSAPLTTPGMLMKNKYKILLPSFKTRPRGRKSVSVRIRPPKLFQHKWYTQQDLCTVPLVQLNVTAADFTHPFGSPLTDTPCISFQVLGDLYNECLNIDLPQFTENGEIEPSSNYERPNKEQLKKLYQTLFTKPDSSHYWQTFIVNSMVRAHINAKQAQKAYENVRSSPTYNTQPFPTEPLKSEFDTWKNEFTDQRDSNFLFATYHPDKIKGTLKKMRDNNFLLETGPNDRYGSFQAQYTRNTHMLDYYLGFYSPIFLSDGRSNVEFFTAYRDIVYNPLLDKAEGNMIWFQYHTKTDNKYRKPECHWEITDMPLWALCNGYEEYLESQIKYGDAKVEGKVLIRCPYTKPPLTDPKDPTAGFVVYNQNFGRGKWIDGGGYIPLHERSKWYVMLQYQTDVLHDIVTCGPWQYRDDNRNSQLIAKYSFRFKWGGNLVHSQVIRNPCKDNQVSGPRRQPRDVQVVDPQLVSPPWVLHNFDQRRGQFTETAIRRLLQQPMPGEYVAPAQHVPLLFLPSEYQREDGSVEDNSGSPVKRPRTSYEENETQTESSSEGDPAETTRELVIRKLREQRALQFQLQHFALQLAKTQANLHINPLLSFPQ

SEQ ID NO: 389 - protein, 154 aa, Alphatorquevirus sp.
MFLGKLYRKKRKLLLQAVRAPQAPSPMSRCWCPPRGNVASREARWYDAVRGSHDAFCGCGDPVLHFSRLVARSNHQGPPTPPSDDRAPSRTPVRRLLPLPSYPGEGPAPRWSGGDGGAGGGDQREGGDGGARAADEEYRPEDLDELFDAIEQEQ

SEQ ID NO: 390 - protein, 57 aa, Alphatorquevirus sp.
LLFPPEGPKPIVGKEAWQDEYVACKYWDRPPRTHHTDTPFYPWAPQQFRVSFKLGFQ

SEQ ID NO: 391 - DNA, 3657 bp, Alphatorquevirus sp.
cgggtgccggaggtgagtttacacaccgcagtcaaggggcaattcgggctcgggactggccgggctatgggcaagactcttagggtcatcgctcttaaaaatgttttttggcaggccttacagaaaaaagaaaagggcgctgtcactgtctggcgtgcgagctctacaggcgaaacggtctcgggacatgacctggcgccccccgatacacaatgccgccggcattaataggcagttctttgaagcctgctttagatgccacaacagttgctgtggctgcggcagctttattgatcatattaatgtactggctgctcgctatggctttactggggggccggcgccgccaggtggtcctcggccggcgccccaagtgaggcccgcgcttcccgcgccggagcccgacccggaggccgacaaccgtgagccatggcgtggagctggtggtggcaacgatggaggcgccgcggctggaaacccaggcgccgccgctggagacgcctacgatggagaagacctcgacgccctgttcgccgccgtcgccgaagacgcagagtaaggagacggaggtggggtaaaagacgggggcgacgcagacggtacacccgtagacgaaagagacgcattaagctcagaaactttaaaaagaaactagtactgactcagtggcacccctccgtagtcagacgctgctttatcaggggcatagttcccatccttatatgcgggcacacaaaatggaacagtaactacgccctgcatagtgaggactacacagaagagggccgctaccctcacggagggtccctctcgaccactacgtggtcactaaaggtgctgtacgacgagtacctaaagcaccacaacttctggggctacccaaacacccagctagacctggccaggtacaggggctgcaccttcactttctacagacacaaaaaaactgactttatagtatggtggaacagaaagcctccctttaaactaaacaagctgagctgcccgtccttccacccgggcatgctcatgcaacagaaacacaaggtgctaatcccaagctttgacactaaacccgggggcagagctaaaattagagttagaataaagccccccactctgttagaggacaagtggtacactcagcaagacttgtgtccggtaaacctggcgcaacttgtggttactgcggctgactttcaacatccgttctgctcaccacaaacgaacactccaaccacaaccttccaggtgttgaaagaaatgtattataacactattggcatagttgacacagaagaaagttacatttcagttaataataaaactacatttaaaacatacaatgagtttctaacaactttacaaaaccacttatactccacaggttcctactggaactcctttcacacagcagaatacttaaaccccaatgtcacagacacttacaaccacaaaatatttaataatacatccacatcattaacaccatggctcacaggcaaaagcaacaccaattttcaaactggtaacagcacccagtttggctacaacagctacaaaccaacagcagaaaacattcaattagccaatactgcatactggcaagcactcacaaaaccaaacgaccaggcaacacaaataggacaggctcgtgcaaaacaatttgaataccacactggcatctacagccccatattcctaagcagacacagaagcacactaaactttgccagggcctaccaggacgtcacatacaacccaaactgtgacagaggagttaaaaacagggtgtgggtgcagtccctaactaagtccaccacagagttcgatgaaaaacgcagcaagtgcgttatcactgacctgcctctgtgggccgctctgtactgctatcacaactttgtagaagaggagctaggcatctcctcagagatctacaacgcctgtatagtctgtgtacagtgtccttacacctttccccccatgtatgacaaaaaaaacccaaacaaggggtacgtgttctatgacgccctgttcggaaacggaaaaaccccagacggacgcggacaggtagacgtgttctggcagcagcggtggtacccccgcatggcctgccaggtgcaagtcatgcacgacatcaccatgaccggacccttctcctaccacgacgaactagtgagtacacaactgactgctaagtacaaatttgacttcatgtggggtggaaacatgatctcctcacagatcatcaagaacccctgcaaagacacagacatggacaccacctatcccagtagacagcgtcgcgacatacaaattgttgacccacactccatggggccctccttcgcgttccacacgtgggactacagacgcggactgtttggtaaagatgctatcgacagagtgtcaaaacaacaagactatgctccagagtatcctaacccatacaaaaagcctagatattttcccccaacagacagggcagagctccaagggcaagaagaagactggagtttccaggtcgaaagcgaggggtcgtcgtcagaagagagcgatcaagaagcccaagaagaggaggtactccagttccagccaggacagcagctgcagcaactccacctgcagctcgcgcagcagcagcagatcgggcagcagctccgattcctgttccaacaaatgctcaaaacccaggccaatctgcacctaaacccatatacatacacccagctataaacagggtgttcatgtttgaaccccagggccccaggcctataaccacaagagaggggtgggaagacgagtacacaaccgccggcgtatggggccggcccgtccgctccttttacacagacacccccttctaccccgaggttcccaagataccccctcaattctctgtaactttcaaactcggctggaaataaaaatgcaaggcctttcactgttcacttgtcggtgtctacctcttaaggtcactaagcactccgagcgtcagcgaggagtgcgacccttccccctggtgcaacgccctcggcggccgcgcgctacgccttcggctgcgcgcggcacctcggacccccgctcgtgctgacacgcttgcgcgtgtcagaccacttcgggctcgcgggggtcgggaattttgctaaacagactccgacttgccattggacactgtagccgtgaatcagtaacgaaagtgagtggggccagacttcgccataaggcctttatcttcttgccattggtccgtcgggaggggtcgctccaaacgcggaccccgttttcagcccttccggactacaaaatcggccattttagtgacgtcacggcaaccatttttagtaaggcggaagcagcttcactatacaaaatggcggcggagcacttccggcttgcccaaaatggcggccaagctcttccgggtcaaaggtggcaaactacgtcacaagtcacgtggggagggttggcgtataacccggaagtcaatcctcccacgtggcctgtcacgtgactgctacgtcacggccgccattttagtgcacaaaatggcggacttccttccttttttttaaaaatttaccgtctgcgtcgcccccgtcttttaccccacctccgtctccttactctcggagggtgatccccgcgtcccgaggg

SEQ ID NO: 392 - protein, 768 aa, Alphatorquevirus sp.
MAWSWWWQRWRRRGWKPRRRRWRRLRWRRPRRPVRRRRRRRRVRRRRWGKRRGRRRRYTRRRKRRIKLRNFKKKLVLTQWHPSVVRRCFIRGIVPILICGHTKWNSNYALHSEDYTEEGRYPHGGSLSTTTWSLKVLYDEYLKHHNFWGYPNTQLDLARYRGCTFTFYRHKKTDFIVWWNRKPPFKLNKLSCPSFHPGMLMQQKHKVLIPSFDTKPGGRAKIRVRIKPPTLLEDKWYTQQDLCPVNLAQLVVTAADFQHPFCSPQTNTPTTTFQVLKEMYYNTIGIVDTEESYISVNNKTTFKTYNEFLTTLQNHLYSTGSYWNSFHTAEYLNPNVTDTYNHKIFNNTSTSLTPWLTGKSNTNFQTGNSTQFGYNSYKPTAENIQLANTAYWQALTKPNDQATQIGQARAKQFEYHTGIYSPIFLSRHRSTLNFARAYQDVTYNPNCDRGVKNRVWVQSLTKSTTEFDEKRSKCVITDLPLWAALYCYHNFVEEELGISSEIYNACIVCVQCPYTFPPMYDKKNPNKGYVFYDALFGNGKTPDGRGQVDVFWQQRWYPRMACQVQVMHDITMTGPFSYHDELVSTQLTAKYKFDFMWGGNMISSQIIKNPCKDTDMDTTYPSRQRRDIQIVDPHSMGPSFAFHTWDYRRGLFGKDAIDRVSKQQDYAPEYPNPYKKPRYFPPTDRAELQGQEEDWSFQVESEGSSSEESDQEAQEEEVLQFQPGQQLQQLHLQLAQQQQIGQQLRFLFQQMLKTQANLHLNPYTYTQL

SEQ ID NO: 393 - protein, 167 aa, Alphatorquevirus sp.; identical to SEQ ID NO: 77

SEQ ID NO: 394 - protein, 138 aa, Alphatorquevirus sp.; identical to SEQ ID NO: 78

SEQ ID NO: 395 - DNA, 3657 bp, Alphatorquevirus sp.
cgggtgccgaaggtgagtttacacaccgaagtcaaggggcaattcgggcacgggactggccgggctatgggcaaggctcttaaaaaattcccccgctgtgttctccggcaggacacaaagtcatgccgtggagaccgccggttcataacgttccaggcagagaaaaccaatggtttgcatcgatttttcacggtcatgcttctttctgcgggtgcggtgaccctgttgggcatcttaacggcattgctcctcgctttcctaacgccggtccaccgagaccacctccagggctagaccagctgaatcccgagggcccggcgggtcccggaggtccccccgccatcttgccagctctgccggccccggcagaccctgatccggcaccacggcgtggtggtggggcagatggaggcgccgccgctggggccgccgccgccgcagaccataccgggtacgaagaaggagacctagaagatcttttcgccgccgcggccgaggacgatatgtgagtaggcggaggcgccgccgctactacaggcgcagactaagacggggcagacgcagagggcgacgaaagagacacagacagactctagtagtgaggcagtggcaacctgacgttgttaaaaagtgtaagataacaggatggatgcccctcataatctgtggctctggcagcacacagatgaactttataactcacatggacgacaccccccctatggggtacacgtacgggggcaactttgtaaatatgacttttactctagaggccatctatgaacaattcctgtaccacagaaacaggtggtccagatctaaccatgacttagaccttgccaggtacctagggatcactctaaaagcctacagacacaccacagtagactacatactcagctacaacagaacaggccccttcaacataagtgaaatgacctacatgagcacacaccctgcactcatgctactgcaaaagcacagaatagtagtgcccagcttaagaacaaagccaaggggcaaaagagccataaaaatcagaataagacccccaaaactaatgctaaccaagtggtacttcaccaaagacatctgctccatgggcctcttccagttaatggcaacaggggcagaactcacaaacccctggctcagagacaccacaaaaagcccagtaataggcttcagagtcctaaaaaacagcatatacaccaatctatctaacctaaaagagacaagcatatcaggagaaagaaaatcaatactaaacaaactacacccattatctctaacaggctctggaaacacagccaaagggtgggaatactcctacactaaactaatggcacctatatactactcatcagtcagaaacagcacatacaactggcaaaactaccaaactaactatgcaaccacagcagcaaaatttaaggaaaagcaaacacaaagtctaactttaattaaatcagaatacctgtaccactacccaaacaatgtcacacaagtagacttcatagacgaccccactcttacacatgactggggtatatacagcccatactggctaactccaacaagaatcagcctagactgggacacaccatggacatatgtcagatacaacccactgtcagacaagggcttaggcaacagaatatatgcacagtggtgctcagaaaaaaccagtaaattagacatcacaaaaagcaagtgcatactaaaagactttccactgtgggccatggcctatggctactgtgactgggtagtaaagtgcacaggagtatccagtgcatggacagacatgagaatagcaatcatatgtccatacacagaaccggcacttgtagggtcaacagcagatgtaggcttcattccagtaagtgacaccttttgcaacggagatatgccgtttcttgcaccatacatacctattacatggtggatcaagtggtaccccatgattacacaccaaaaggaagttcttgaggcaatagttaactgtggaccgtttgtacctcgagaccagagctccccagcttgggaaataactctgggttacaaaatggattggaaatggggtggctctcccctgccttcacaggcaatcgacgacccctgccagaagtccacccacgagctacccgaccccgatagacaccctcgcatgttacaagtctctgacccgacaaagctcggaccgaagacagtttttcacaaatgggactggagacgtgggatgcttagcaaaagaagtattaaaagagtccaagaagactcaacagatgatgaatatgttgcaggacctctaccaagaaaaagaaacaagttcgatactcgagtccaaggccctccaaccccagaaaaagaaagttacagtttactccaagccctccaagagtcggggcaagagagcagctcagaggaccaagaacaagcaccccaagaaaaagaggaccagaaggaagcgctcatggagcagctccagctccagaaacaccaccagcgagtcctcaagcgaggcctcaaactcctcctcggagacgtgctccgactccggagaggagtccactgggaccccctcctgtcctaatccaaggtcccagtatcccagacctgcttttccctaacacacaaaaaaaaaagaaattttccaactacgactgggtgtgcgagtacgagctggccagatggatggatcgtcctttgcggcactacccatcagacccccctcactacccctggctaccaaaaaagcctgctacccagcctacatgtaaagtaagtttcaaattaaagcttgatgcctaaaattcaaggccgtgggtgtttcacttcatcggtgttaacctctataagtcactaagcactccgagcgaagcgaggagtgcgacccccctgcccggtagcaacttcctcggggtccggcgctacgccttcggctgcgccggacgcctcggaccccccctcgacccgaatcgctcgcgcgattcggacctgcggcctcgggggggtcgggagctttattaaacagactccgagatgccattggacactgaggggatgaacagcaacgaaagtgagtggggccagacttcgccataaggcctttatcttcttgccatttgtcagtgtcttccgggttcgcgtgggggccgccattttagcttcggccgccattttaggccctcacgggcctccgtagtcgcgcaccagtgacgtcacggcagccatattggtcctgacgtcacagtcacgtggggagggcacacgtgatcccggaagtgtccctgctcacgtgatctgacgtcacggccgccattttgtgctgtccgccattttgtgacttccttccgctttttgtaaaaaaaagaggaagtgtgacgtagcggcgggggggcggcgcgcttcgcgcgccgcccaccagcccccccccgtgctatgtccaccgcgcatgcgcggccacgcccccgccgccattttctacagcccgccaatttctattcaaacagaccaatcagaaccttctacgtgcacttcctggggcgtgtctacgaggtctatataagcaacagcggtgacgaatggtagagttttttctcgcccgtccgcggcgagagcgcgagcgaagcgagcgatcgagcgtcccgtggg

SEQ ID NO: 396 - protein, 648 aa, Alphatorquevirus sp.
MPLIICGSGSTQMNFITHMDDTPPMGYTYGGNFVNMTFTLEAIYEQFLYHRNRWSRSNHDLDLARYLGITLKAYRHTTVDYILSYNRTGPFNISEMTYMSTHPALMLLQKHRIVVPSLRTKPRGKRAIKIRIRPPKLMLTKWYFTKDICSMGLFQLMATGAELTNPWLRDTTKSPVIGFRVLKNSIYTNLSNLKETSISGERKSILNKLHPLSLTGSGNTAKGWEYSYTKLMAPIYYSSVRNSTYNWQNYQTNYATTAAKFKEKQTQSLTLIKSEYLYHYPNNVTQVDFIDDPTLTHDWGIYSPYWLTPTRISLDWDTPWTYVRYNPLSDKGLGNRIYAQWCSEKTSKLDITKSKCILKDFPLWAMAYGYCDWVVKCTGVSSAWTDMRIAIICPYTEPALVGSTADVGFIPVSDTFCNGDMPFLAPYIPITWWIKWYPMITHQKEVLEAIVNCGPFVPRDQSSPAWEITLGYKMDWKWGGSPLPSQAIDDPCQKSTHELPDPDRHPRMLQVSDPTKLGPKTVFHKWDWRRGMLSKRSIKRVQEDSTDDEYVAGPLPRKRNKFDTRVQGPPTPEKESYSLLQALQESGQESSSEDQEQAPQEKEDQKEALMEQLQLQKHHQRVLKRGLKLLLGDVLRLRRGVHWDPLLS

SEQ ID NO: 397 - DNA, 3655 bp, Alphatorquevirus sp.
cgggtgccggaggtgagtttacacaccgcagtcaaggggcaattcgggctcgggactggccgggctatgggcaaggctctcaaaaaagcatgtttatcggtaaaatttacagaaagaaaaggaaagtgccactgtacggcctgccagatccaaagaagaaactacctactagtatgagccactggagcagacccgtccaccatgcaacggggatcgaacacctctggtaccagtctgttattaacagccattctgctagctgcggttgtggcgatcctgtacgccactttacttatcttgctgagaggtatggttttgccccaactccccgcgccccgccagtagccccgacgcccaccatccgtagagccaggcctgcgcctgccgctccggagccccgtgccctaccatggcatggggatggtggagaagaaggcgcaagtggtggtggagacgccggttcgcccgaggcagagttcgcagacgacggattagacgccctcgtcgccgcactcgacgaagaacagtaaggagacgcagacaatggaggagggggcgacccagacgcagactatttaagcgaaagagacgctttaagagacgcagacgaaaacctaagataaaaataacccagtggcagcctagtaaagtaaagagatgctttatgataggctactttccagcactaatatgtgggcagggaaagtggtcagaaaactttaccagccacatagaagacaagacccctaagggacccttcggaggagggcacagcacagccaggctatctttaaaagtactgtacgaggaaaaccagaagcatcacaacttctggactgccagcaacaaagaactagagctagccaggttctttggcagtacctggacactgtacagacacgaagaggtagactacatatgcacctttaacagaaaaagccccctgggaggcaacctgctaacagcacccagtctgcacccgggggccgccatgctatccaaacataaaatactagtacccagttttaaaaccagaccgggcggaaaacccactgtaaaatttagaataagaccaccaacaacactaatagacaaatggtactttcaaaaagatatttgtgacactacactgctgaacattaactttgttgcatgtgacttgcggtttccgttctgctcaccacaaactgacaatgtttgtgtaacatttcaagtcctttccgcggtttataacgacttcctctctataaccaacagcaacttacaagcaacaaattgggaaagtgaatacacaaagtttttaaagaaagcatttccaacagacagaagcattaataaattaaacacatttacaacagaaggggcctttagtcacccaaaagtagaaaagtttaaaccagtaattccactacaccaagataaatactttcaagacaaagacggtcaatggggagacccaatacacattacagacagtcaaagtagagaaagtattatagacaaaattgttaagaatgcaagaaactacctaaaaaaatacacagatgagtttaaacaatttccaaacattgcccagttccaccacggattttttacacagtggacaggcatatacagtgctgcttttttaaactaccatagaatatctccagaagtaccaggcctatacacagatatcatctacaacccacttgtagacaaaggcataggaaatcacatatggatagactacctcagcaaaccagaccctaacttagatccagtaaaaagtaaatgccacatagcagacctgcctatgtggatggcaacctttggcctagtagactggtgcaaaaaagacacaggcaactggggcatacccgcgtgggccagagtactaatgatatgtccctatacgtttccacctatgtatgaccaaagcaacccaaccagaggatttatacccataggttacaacttctcacaaggactaatgccagacggcagtaaatacattccaatgcaactgagagctaagtggtaccccaacctgttaaaccaacaagcagtacttgaagacataagtgagtcaggaccctttgcatttagagaaaaaaaacctagcgccagcataacagtaaaatacaaatttagatggcactttgggggcaaccctgtgtccgaacaggttattgcagacccatgccaacaaccaacctttgaaatgcccggaaccggttcgctgcctcgcagactacaagtcacggacccgaaactcctcgggccacactacacattccacagctgggactggagacgtgactactttaacagaaagactcttaagagaatgtcagaacaacaagaaacttctgagtttttattcccaggcccaaaaaaacccagagtggatctcggggtcgtccaagctgtcgaaaaagtctcttccccgaggaaaagagaacagaaaccgtgggaagacagcgagcagcaatcagagacagaagccctctcggaggaagaagaagagggctcgatacaccagcagctccagcagcagctgcagcagcaaaaacagctcaggagaggaatcaactgcctcttcgagcagctagtaaaaacacagcagggagtacacctagatccttccctcttgtaggccccagacagtggctgtttccagaaagaaagccagcccctgcccctagctcgggagactgggccacagagtatctagcagctagagtatttgacagacccccaagaagcaaccttaaagatacaccctactacccctacattaaaaaccagtacaacgtgtactttgatctaacctttgaataaagtgcagtttcaaatttgcaaggccgtgggagtttcactggtcggtgtctacctctaaaggtcactaagcactccgagcgttagcgaggagtgcgacccttccccctgactcaacttcttcggagccgcgcgctacgccttcggctgcgcgcggcacctcagacccccgctcgtgctgacacgctcgcgcgtgtcagaccacttcgggctcgcgggggtcgggaaatttgctaaacagactccgagttgccattggacactgtagctgtgaatcagtaacgaaagtgagtggggccagacttcgccataaggcctctatcttcttgccatttgtccgtgtcgggggttgccataggcttcgggctcggttttaggccttccggactacaaaatgcgccatttcagtgacgtcacgaccgccatcttaagtagttgaggcggacggtggcgtgagttcaaaggtcaccatcagccacacctactcaaaatggaggtcaaattcttccaggtcaaaggtcaccggcgccatcttaagtcacgtgaccttctacgtcacggccaccattttagtttacaaaatggccgacttccttcctctttttcaaaaaaaagcggaagtgccgccgcggccccgcggggggctctgccccccggccccccccgtgctacgtcactaaccacgtgtcctccacaggccaatcgccgtgtatgtcgtgcacttcctgggcatgatctacgtgataatataaagcggtgcacttccgaatggctgagttttccacgcccgtccgcagcggcagcaccacggagggtgatccccgcgtcccgaggg

SEQ ID NO: 398 - protein, 742 aa, Alphatorquevirus sp.
MAWGWWRRRRKWWWRRRFARGRVRRRRIRRPRRRTRRRTVRRRRQWRRGRPRRRLFKRKRRFKRRRRKPKIKITQWQPSKVKRCFMIGYFPALICGQGKWSENFTSHIEDKTPKGPFGGGHSTARLSLKVLYEENQKHHNFWTASNKELELARFFGSTWTLYRHEEVDYICTFNRKSPLGGNLLTAPSLHPGAAMLSKHKILVPSFKTRPGGKPTVKFRIRPPTTLIDKWYFQKDICDTTLLNINFVACDLRFPFCSPQTDNVCVTFQVLSAVYNDFLSITNSNLQATNWESEYTKFLKKAFPTDRSINKLNTFTTEGAFSHPKVEKFKPVIPLHQDKYFQDKDGQWGDPIHITDSQSRESIIDKIVKNARNYLKKYTDEFKQFPNIAQFHHGFFTQWTGIYSAAFLNYHRISPEVPGLYTDIIYNPLVDKGIGNHIWIDYLSKPDPNLDPVKSKCHIADLPMWMATFGLVDWCKKDTGNWGIPAWARVLMICPYTFPPMYDQSNPTRGFIPIGYNFSQGLMPDGSKYIPMQLRAKWYPNLLNQQAVLEDISESGPFAFREKKPSASITVKYKFRWHFGGNPVSEQVIADPCQQPTFEMPGTGSLPRRLQVTDPKLLGPHYTFHSWDWRRDYFNRKTLKRMSEQQETSEFLFPGPKKPRVDLGVVQAVEKVSSPRKREQKPWEDSEQQSETEALSEEEEEGSIHQQLQQQLQQQKQLRRGINCLFEQLVKTQQGVHLDPSLL

SEQ ID NO: 399 - protein, 146 aa, Alphatorquevirus sp.
MFIGKIYRKKRKVPLYGLPDPKKKLPTSMSHWSRPVHHATGIEHLWYQSVINSHSASCGCGDPVRHFTYLAERYGFAPTPRAPPVAPTPTIRRARPAPAAPEPRALPWHGDGGEEGASGGGDAGSPEAEFADDGLDALVAALDEEQ

SEQ ID NO: 400 - protein, 82 aa, Alphatorquevirus sp.
LPLRAASKNTAGSTPRSFPLVGPRQWLFPERKPAPAPSSGDWATEYLAARVFDRPPRSNLKDTPYYPYIKNQYNVYFDLTFE

SEQ ID NO: 401 - DNA, 3654 bp, Alphatorquevirus sp.
cgggtgccggaggtgagtttacacaccgcagtcaaggggcaattcgggctcgggactggccgggctatgggcaagactcttagggtcatcgctcttaaaaatgttttttggcaggccttacagaaaaaagaaaagggcgctgtcactgtctggcgtgcgagctctacaggcgaaacggtctcgggacatgacctggcgccccccgatacacaatgccgccggcattaataggcagttctttgaagcctgctttagatgccacaacagttgctgtggctgcggcagctttattgatcatattaatgtactggctgctcgctatggctttactggggggccggcgccgccaggtggtcctcggccggcgccccaagtgaggcccgcgcttcccgcgccggagcccgacccggaggccgacaaccgtgagccatggcgtggagctggtggtggcaacgatggaggcgccgcggctggaaacccaggcgccgccgctggagacgcctacgatggagaagacctcgacgccctgttcgccgccgtcgccgaagacgcagagtaaggagacggaggtggggtaaaagacgggggcgacgcagacggtacacccgtagacgaaagagacgcattaagctcagaaactttaaaaagaaactagtactgactcagtggcacccctccgtagtcagacgctgctttatcaggggcatagttcccatccttatatgcgggcacacaaaatggaacagtaactacgccctgcatagtgaggactacacagaagagggccgctaccctcacggagggtccctctcgaccactacgtggtcactaaaggtgctgtacgacgagtacctaaagcaccacaacttctggggctacccaaacacccagctagacctggccaggtacaggggctgcaccttcactttctacagacacaaaaaaactgactttatagtatggtggaacagaaagcctccctttaaactaaacaagctgagctgcccgtccttccacccgggcatgctcatgcaacagaaacacaaggtgctaatcccaagctttgacactaaacccgggggcagagctaaaattagagttagaataaagccccccactctgttagaggacaagtggtacactcagcaagacttgtgtccggtaaacctggcgcaacttgtggttactgcggctgactttcaacatccgttctgctcaccacaaacgaacactccaaccacaaccttccaggtgttgaaagaaatgtattataacactattggcatagttgacacagaagaaagttacatttcagttaataataaaactacatttaaaacatacaatgagtttctaacaactttacaaaaccacttatactccacaggttcctactggaactcctttcacacagcagaatacttaaaccccaatgtcacagacacttacaaccacaaaatatttaataatacatccacatcattaacaccatggctcacaggcaaaagcaacaccaattttcaaactggtaacagcacccagtttggctacaacagctacaaaccaacagcagaaaacattcaattagccaatactgcatactggcaagcactcacaaaaccaaacgaccaggcaacacaaataggacaggctcgtgcaaaacaatttgaataccacactggcatctacagccccatattcctaagcagacacagaagcacactaaactttgccagggcctaccaggacgtcacatacaacccaaactgtgacagaggagttaaaaacagggtgtgggtgcagtccctaactaagtccaccacagagttcgatgaaaaacgcagcaagtgcgttatcactgacctgcctctgtgggccgctctgtactgctatcacaactttgtagaagaggagctaggcatctcctcagagatctacaacgcctgtatagtctgtgtacagtgtccttacacctttccccccatgtatgacaaaaaaaacccaaacaaggggtacgtgttctatgacgccctgttcggaaacggaaaaaccccagacggacgcggacaggtagacgtgttctggcagcagcggtggtacccccgcatggcctgccaggtgcaagtcatgcacgacatcaccatgaccggacccttctcctaccacgacgaactagtgagtacacaactgactgctaagtacaaatttgacttcatgtggggtggaaacatgatctcctcacagatcatcaagaacccctgcaaagacacagacatggacaccacctatcccagtagacagcgtcgcgacatacaaattgttgacccacactccatggggccctccttcgcgttccacacgtgggactacagacgcggactgtttggtaaagatgctatcgacagagtgtcaaaacaacaagactatgctccagagtatcctaacccatacaaaaagcctagatattttcccccaacagacagggcagagctccaagggcaagaagaagactggagtttccaggtcgaaagcgaggggtcgtcgtcagaagagagcgatcaagaagcccaagaagaggaggtactccagttccagccaggacagcagctgcagcaactccacctgcagctcgcgcagcagcagcagatcgggcagcagctccgattcctgttccaacaaatgctcaaaacccaggccaatctgcacctaaacccatatacatacacccagctataaacagggtgttcatgtttgaaccccagggccccaggcctataaccacaagagaggggtgggaagacgagtacacaaccgccggcgtatggggccggcccgtccgctccttttacacagacacccccttctaccccgaggttcccaagataccccctcaattctctgtaactttcaaactcggctggaaataaaaatgcaaggcctttcactgttcacttgtcggtgtctacctcttaaggtcactaagcactccgagcgtcagcgaggagtgcgacccttccccctggtgcaacgccctcggcggccgcgcgctacgccttcggctgcgcgcggcacctcggacccccgctcgtgctgacacgcttgcgcgtgtcagaccacttcgggctcgcgggggtcgggaattttgctaaacagactccgacttgccattggacactgtagccgtgaatcagtaacgaaagtgagtggggccagacttcgccataaggcctttatcttcttgccattggtccgtcgggaggggtcgctccaaacgcggaccccgttttcagcccttccggactacaaaatcggccattttagtgacgtcacggcaaccatttttagtaaggcggaagcagcttcactatacaaaatggcggcggagcacttccggcttgcccaaaatggcggccaagctcttccgggtcaaaggtggcaaactacgtcacaagtcacgtggggagggttggcgtataacccggaagtcaatcctcccacgtggcctgtcacgtgactgctacgtcacggccgccattttagtgcacaaaatggcggacttccttccttttttttaaaaattaaccgccggccccccagtaaagccatagcgagcagccagtacattaacggagggtgatccccgcgtcccgaggg

SEQ ID NO: 402 - protein, 768 aa, Alphatorquevirus sp.; identical to SEQ ID NO: 392

SEQ ID NO: 403 - protein, 167 aa, Alphatorquevirus sp.; identical to SEQ ID NO: 77

SEQ ID NO: 404 - protein, 138 aa, Alphatorquevirus sp.; identical to SEQ ID NO: 78

SEQ ID NO: 405 - DNA, 3649 bp, Alphatorquevirus sp.
tcaggccccgggttttcggtggcggtggcagtcaaggggcaattcgggctcgggactggccgggctatgggcaaggctcttagggtcttcattcttaaaatgtttctcggcagagtgtaccgccagaagaaaaggaaactgctactgctggctgtgcagactgcaccgaagacatcttccatgagtctgtggcggcccccgacgagacatgtccccgccagagagagagattgggttgaagtcacgctcagagcccacgctgctttttgtggctgtcctactcctattgttcattttactagtttacttgcacgttttaatcttcaaggaggcccgcagacaccaccggacgagccgggtgagggtgcgtcggtgctgagggccctaccggccccgagcccgcgcagacgccacaccgccaccgaaaacccggggcctgagccatggcctactggtggcgccgccgcaagtggccgtggagacgcagatggaggcgctggagacgccgccgacgagtaccgagacgaagatatagacgacctgttcgccgctatcgaaagagatacacagtaaggagacggaggaggaggagagggtggcgggggcgacgcagacgtagactgtatagacgcagagccaccattaggcgaaagagacggactctagtaatcagacaatggcagccaaacaacataagaaaatgtaaaataaggggcctactgcctatgctaatatgcgggcacggtaacagcgccaacaactatgccataaggtcagacgatacagtgcccaccagaactccttttggaggaggactcagcacagtacatttctctctaaaggtgctctatgaccagcacctaaggggtctcaacaggtggagcacctctaatgacatactagacctggccagatacaatggctgcactttctggttctacagagacctcaaaacagactacatagttcagtacaacataaccactcccttcacaatagacaaagacagtagtgccagctatcacccaggtatgctcatgcaaacaaagcacaagatattagtacccagctatgacacacatcccaggggcaagcctaaaattaagatccgcataccaccccccaaaatgttcatagataaatggtatgctcagaacgacctctgtgaggttcctcttgtgacatttgtggtcagcctagcttcctttacacatccgttctgcccaccactaactgaaaatccttgcatcactttccaagttctgcaaaatttctataacagttacataggttacaacattaacaatgctagcacatatgaaaatatatttaaagactatctatataaggaggcagccttttatcaacaagtactaacaccctcctacattaagaagatagactataatccagatggaagccccacatcacaaaattcaaacatagcacatcccactaatcaatttccaagcctaggcacatttaatgcatgggttaccacaggagtaacaggtaataatactaattataacggagaaaaaggaaacagcaagaaatttataacaggacacacaaatgtacactttaacttttgtacatacaacccaaacgtgcaagaactcacaacacttagaaaatactactttcactgcgaaacagcacaaagtgtaacatcaaaaccatttgatactccacacgtccctcaacactacactaggcctacacatgactattttgaatacagaataggggccttctctccaatattcctcagtccttttagaacaagccctatagaaaactggcctatggcatacagagacatctcatacaatcccctaaatgacaaaggagtaggaaataaaatgtggtaccagagcatcacaaaacaagacacccaattcacactaccaagctccacatttgtgcttgaagacaaaccactgtgggccatgtgttatggatacagagactttataaagagcaccagagagagacaagacatagactttgatggcctagtctgcataatatctccctacaccgtaccgccactgtatgacaaggaccacacacacactggattcgtagtgtatgacagcctatttggaaatggaaaatggttggacggcagcgggttcatacccgtggagtaccagtgcagatggagagtctgcctggcatttcaacaacaagtactgactgacatagccatgactggaccgttcagttacaaagacgactataaaaacacttgcatacaagcaaagtacaaatttaacttcagatggggtggtaatatgctctatcagcagaccatcaaaaatccctgcacggacggacaccctaccgactcccatagagagcctagaagcatacaagtgtctgacccgcttaccgtgggacccagatactgcttccaccagtgggactggagacgtgggttccttggtgacaaagctctcaaaagaatgttacaaaaaccgctcgattttgaactatatgcagtcactccaaagagacccagaatattccctcccacagaaggagagcaagaaagccaaaggcaagaaagaagctccagttcagaggaagaaagcatccttatctcgcaagaagagaaagtaccgacggaggcactccaagtccacctccgaaagcagctcagacagcagcgagagctacgattccagctcaagcacctcttccaccagctctgcaaaacccaagcgggtctccacctcaaccccctattatttacccagcagtaaacacggtgtatatgttcccagagatggctccaaagcccgctcctactagtggagactgggccacggagctggaggcctgcaaggcatgggatagacccatgaggcagaacctccaagatacccccttctacccctggatgcctaccaacttcagggtcagcttcaaactcggttttaaaccctaaataaaaatttcaacgccgtgcactgttcacttgtcggtgtctacctcttaaagtcactaagcactccgagcgtcagcgaggagtgcgacccttccccctggtgcaacgccctcggcggccgcgcgctacgccttcggctgcgcgcggcacctcggacccccgctcgtgctgacacgctcgcgcgtgtcagaccacttcgggctcgcgggggtcgggaaatttgctaaacagactccgagttgccattggactcaggagctgtgaatcagtaacgaaagtgagtggggccagacttcgccataaggcctttatcttcttgccattggtcagtgtcgggggtcgccataggcttcgatctcggttttaggccttccggactacaaaaatggcgcattccgtgacgtcatggccgccattttgagtaaggcgaaacaggctgtgaccccgtgtcaaaggtcagggttcagccttccgccttacacgaaatggaggacaatctcttccgggtcaaaggtcaccactacgtcataagtcacgtggggatggctgctgtaaacacggaagtagctgacccgcgtgacttgtcacgtggtgcgtgcgtcacggcggccattttgtataacaaaatggcggacttccttcctcttttttgaaaataacggcccagcggcggcgccaccagtaggccatggc

SEQ ID NO: 406 - protein, 775 aa, Alphatorquevirus sp.
MAYWWRRRKWPWRRRWRRWRRRRRVPRRRYRRPVRRYRKRYTVRRRRRRRGWRGRRRRRLYRRRATIRRKRRTLVIRQWQPNNIRKCKIRGLLPMLICGHGNSANNYAIRSDDTVPTRTPFGGGLSTVHFSLKVLYDQHLRGLNRWSTSNDILDLARYNGCTFWFYRDLKTDYIVQYNITTPFTIDKDSSASYHPGMLMQTKHKILVPSYDTHPRGKPKIKIRIPPPKMFIDKWYAQNDLCEVPLVTFVVSLASFTHPFCPPLTENPCITFQVLQNFYNSYIGYNINNASTYENIFKDYLYKEAAFYQQVLTPSYIKKIDYNPDGSPTSQNSNIAHPTNQFPSLGTFNAWVTTGVTGNNTNYNGEKGNSKKFITGHTNVHFNFCTYNPNVQELTTLRKYYFHCETAQSVTSKPFDTPHVPQHYTRPTHDYFEYRIGAFSPIFLSPFRTSPIENWPMAYRDISYNPLNDKGVGNKMWYQSITKQDTQFTLPSSTFVLEDKPLWAMCYGYRDFIKSTRERQDIDFDGLVCIISPYTVPPLYDKDHTHTGFVVYDSLFGNGKWLDGSGFIPVEYQCRWRVCLAFQQQVLTDIAMTGPFSYKDDYKNTCIQAKYKFNFRWGGNMLYQQTIKNPCTDGHPTDSHREPRSIQVSDPLTVGPRYCFHQWDWRRGFLGDKALKRMLQKPLDFELYAVTPKRPRIFPPTEGEQESQRQERSSSSEEESILISQEEKVPTEALQVHLRKQLRQQRELRFQLKHLFHQLCKTQAGLHLNPLLFTQQ

SEQ ID NO: 407 - protein, 168 aa, Alphatorquevirus sp.
MGKALRVFILKMFLGRVYRQKKRKLLLLAVQTAPKTSSMSLWRPPTRHVPARERDWVEVTLRAHAAFCGCPTPIVHFTSLLARFNLQGGPQTPPDEPGEGASVLRALPAPSPRRRHTATENPGPEPWPTGGAAASGRGDADGGAGDAADEYRDEDIDDLFAAIERDTQ

SEQ ID NO: 408 - protein, 79 aa, Alphatorquevirus sp.
LQNPSGSPPQPPIIYPAVNTVYMFPEMAPKPAPTSGDWATELEACKAWDRPMRQNLQDTPFYPWMPTNFRVSFKLGFKP

SEQ ID NO: 409 - DNA, 3647 bp, Alphatorquevirus sp.
gcctccccctccggcgcctccttactgttcttcaaggggcaattcgggctcgggactggccgggctatgggcaaggctcttaaaaaggcatgtttctcggtaaaatctacagaaagaaaaggaaactgctactgccaactgtgcgtccttcaccggcgccatcttccatgagctcgacctggcgggtcccgcggggcgatgtcgcctcccgtgagcgtcactggtacctttcggtacgagatagccacgatgctttttgtggctgtcgtgatcctgtttttcatctttctcgtctggctgcacgttttaacaatcagggacctccgccgccccccccccaggacgaccgcccgacgtcggctaccccagtgagacgcctcctcccgctgccctcctacccgggagagggtcccccagatagatggcctggtggggatggaggcgccgctggtggcggccgcggagacggtggcgatgggggcgtacgcgccgcagacgaagagtaccggcccgaagacctcgacgaacttttcggcgctatcgaacaagaacagtaaggaggcgccggagggggaggcggaggggctaccggcgacggtacagactgagacgcttgcgcagacgcagatacaaacgcaaaaagatagtactgactcagtggaacccccagaccgtcaggaggtgcaccataaagggtctcatgccagtactctgggcgggcatgggccaagggggccacaactacgcggtgcgctccgatgactacgtggccaaagggggtttcgggggctccttcgccacagagaccttttctctgaaggtgctctatgaccagtaccagaggggctataacaggtggacttatagcaacgaggacttagacctagccctatactatggctgcaagtgggtcttctacagaagcccagacacagactttatagtatacttcactaacaatccccccatgaagaccaaccagttcaccgctcccctgaccactccaggcatgctcatgaggagcaaatacaagatactaatccccagctttaaaaccaggcccaaggggcgcaagactgtgagtgtaagaataaaaccccccaaactgttcctgcacaagtggtacacccagcaggacctgtgcccagttccgttagtccaactgaacgtgaccgcagcggatatgcaacatccgttcggctcaccactaactgaaaacccttgcatcactttccaagttttagggaacttgtacaataactgcctcaacattgacctcccccaatttacacaagacggggagtttgagaccaatacaccttacactagagagaatgcaaatgacttaaaaactttatataaagaactattctgtaaaaaagacagcgctcactactggcagacgttcatcactaacaccatgatgaaggcccatatagatgctgataaggcccaatcagcaaccactaactatccctcttctggcaccacaccttcatacaacacagctgacttcccaacagtaccaacaaaagcagaatttaccacctggaaaaacaaatttactgacggaagagacagtaactttctctttgccacctatcacccagaccaagtaagagaaacaattaaaaaaatgagagacaataactttaagctagaaacaggtcccaacgacaagtacgggtccttccaaagccaatacactagaaacactcacctactagactactacctgggcttctacagcccaatattcctatcaccaggaaggtcaaatatagaattcttcacagccttcagagacatagtttacaaccccctcctagacaaggcagaaggaaacatgatctggttccaatatcatactaaatatgacaataaattcaaaaaaccagaatgccactgggaaataaaggacatgcccctgtgggccctctgcaacgggtacgtagagtacctagagagccagataaaatatggagatattctagtagagggcaaagtcctcatcaggtgtccttacacaaagccgcccctaacagacaagaacgaccccacagccgggttcgttgtctacaacactaactttggaatgggcaagtggatagacggcgggggctacatccccctacacgagagaagcaagtggtatgtcatgctcagataccaaacggacgtcctccatgacatagtgacctgtggaccgtggcagtacagagacgataacaaaaacgctcagctagtggccaagtactactttcggttcaagtggggaggaaacaccatccattcccaggttatcagaaacccgtgcccagacacccaagtttccggaccccgtcgacagcctagagaagtacaagtcgttgacccgcagctcatcacaccgccgtgggtcctccacacgttcgaccaaagacgcggactgtttactgaaggagctatcagacgtctgctcaaacaaccaatacctggcgagtatgatcctcaacccccccgggtcccactcctctttctaccctcagcattccagagagaagacggcgctgccgaaagcgactccgattcaccggccaaaagaccccggtactcgttcgaagagagccagacggagaccctctcctcggaggaggacccggcggagacgacgagggagctcctcctccgaaagctccgagagcagcgagcactccagttccagctgcagcacttcgcagtccaactcgccaagacccaggcgaacctccacgtaaaccccctgtcatactgcccgccataaacaaggtgtttctgtttccccctgagggtcccaaacccatctcaggcagagaggcctgggcagacgaatacgccaccgcggcgacctgggacaggcccgtccgcacctaccactcagacacccccacatatccctggatgccccaacaattccgtgtaagcttcaaactaggcttccaataaaaatgtactaggccgtaaactgttcacttgtcggtgtctacctcttaaggtcactaagcactccgagcgtcagcgaggagtgcgacccttccccctggtgcaacgccctcggcggccgcgcgctacgccttcggctgcgcgcggcacctcggacccccgctcgtgctgacacgctcgcgcgtgtcagaccacttcgggctcgcgggggtcggaaattttgctaaacagactccgagttgccattggacactgtagctgtgaatcagtaacgaaagtgagtggggccagacttcgccataaggcctttatcttcttgccatttgtccgtatcgggggtcgccataggcttcggcctcggttttaggccttccggactaccaaaatggcggatttagtgacgtcacggccgccattttaagtaggtgccgtccaggactgctgttccgggtcagagggcatcctcggcgggacttacacaaaatggcgggcaaaaacatccgggtcaaaggttacacctacgtcataagtcacgtgtctggctcctgctacgtcatatgcggaagtaggccccgtcacgtgactcgtcacgtgggtgtcgcgtcacggcggccattttgtatcacaaaatggcggacttccttcctcttttttgaaaataacgtaccgtcgccggtagcccctcc

SEQ ID NO: 410 - protein, 786 aa, Alphatorquevirus sp.
MAWWGWRRRWWRPRRRWRWGRTRRRRRVPARRPRRTFRRYRTRTVRRRRRGRRRGYRRRYRLRRLRRRRYKRKKIVLTQWNPQTVRRCTIKGLMPVLWAGMGQGGHNYAVRSDDYVAKGGFGGSFATETFSLKVLYDQYQRGYNRWTYSNEDLDLALYYGCKWVFYRSPDTDFIVYFTNNPPMKTNQFTAPLTTPGMLMRSKYKILIPSFKTRPKGRKTVSVRIKPPKLFLHKWYTQQDLCPVPLVQLNVTAADMQHPFGSPLTENPCITFQVLGNLYNNCLNIDLPQFTQDGEFETNTPYTRENANDLKTLYKELFCKKDSAHYWQTFITNTMMKAHIDADKAQSATTNYPSSGTTPSYNTADFPTVPTKAEFTTWKNKFTDGRDSNFLFATYHPDQVRETIKKMRDNNFKLETGPNDKYGSFQSQYTRNTHLLDYYLGFYSPIFLSPGRSNIEFFTAFRDIVYNPLLDKAEGNMIWFQYHTKYDNKFKKPECHWEIKDMPLWALCNGYVEYLESQIKYGDILVEGKVLIRCPYTKPPLTDKNDPTAGFVVYNTNFGMGKWIDGGGYIPLHERSKWYVMLRYQTDVLHDIVTCGPWQYRDDNKNAQLVAKYYFRFKWGGNTIHSQVIRNPCPDTQVSGPRRQPREVQVVDPQLITPPWVLHTFDQRRGLFTEGAIRRLLKQPIPGEYDPQPPRVPLLFLPSAFQREDGAAESDSDSPAKRPRYSFEESQTETLSSEEDPAETTRELLLRKLREQRALQFQLQHFAVQLAKTQANLHVNPLSYCPP

SEQ ID NO: 411 - protein, 155 aa, Alphatorquevirus sp.
MFLGKIYRKKRKLLLPTVRPSPAPSSMSSTWRVPRGDVASRERHWYLSVRDSHDAFCGCRDPVFHLSRLAARFNNQGPPPPPPQDDRPTSATPVRRLLPLPSYPGEGPPDRWPGGDGGAAGGGRGDGGDGGVRAADEEYRPEDLDELFGAIEQEQ

SEQ ID NO: 412 - protein, 64 aa, Alphatorquevirus sp.
LPAINKVFLFPPEGPKPISGREAWADEYATAATWDRPVRTYHSDTPTYPWMPQQFRVSFKLGFQ

SEQ ID NO: 413 - DNA, 3645 bp, Alphatorquevirus sp.
gccaccctcgcctccgtctccttactgttcttcaaggggcaattcgggctcgggactggccgggctatgggcaaggctcttaaaaagccatgtttctcggtaaactttacagaaagaaaaggaaactgctactgcaagctgtgcgtgctccacaggcgccatcttccatgagctctacctggcgagtgccccgcggcgatgtctccgcccgcgaactatgctggtaccgctcagttcgagacagccacgatgctttttgtggctgtcgtgatcctgtttttcatctttctcgtctggctgcacgttctaaccatcagggacctccgacgccccccacggacgagcgcccgccggcgtctaccccagtgaggcacctgctgccgctgccctcctaccccggcgagggtccccaggctagatggcctggtggggatggagaaggcgctggtggcgcccgcggaggcggtggagatggcggcgcccgcgcaggcgaagaagagtaccggccagaagacctcgacgagctgttcggcgctatcgaacaagaacagtaaggagacggaggcgagggtggcggaggggctacaggcgccggtacagactgagacgcttacgtagacgtggcaggcgacgcaaaaagataatactgactcagtggaacccccagactgtcagaaagtgctttatcagaggacttatgccagtactgtgggcgggcatgggcacggggggccacaactacgccgtccgctcagatgacttcgtggtagacagaggctttgggggctccttcgccacagaaacattttcactgagggtcctctatgaccagtatcaaagaggctttaacaggtggtcccacaccaacgaagaccttgacctagccagatacaatagctgcaaatggaccttctatagacaccaagacacagactttatagtatactttactaacaatccccccatgaaaaccaaccagtacacagcgcctctcaccactccaggcatgctcatgagaagcaagtacaaaatcctaataccaagctttaaaactagacccagaggcaaaaagtcaatatcagtcagaataagaccccctaagctatttcaggacaagtggtacacccaacaagacctgtgcccagttcctcttgtccaactgaacgtaaccgcagctgatttcacacatccgttcggctcaccactaactgacagtccttgcataagattccaggtactaggagacttgtacaataaatgtctcaatatagaccttcctgaatttgatgagcaaggaaagatgaaagataacccaacatacactagagaaaataaaactcatttacaaactttatacactaccttgtttaacagccgccagtcaggggtctactggcaaacattcataacaaacaccatggtaaaagcacacatagacgctaaaaaagctcaattagctatcaacaacacagttccatcaacacaaccatcctacaatacagagcaattccccacaaagccagaaaaggcaaaatttgatgattggaaaaaaaaatttacagacacaagagacagtaactttctattcgccacatatcacccagacatgatacactcaaccatagcagaaatgagaaacaataactttgatctagaaacaggacccaatgacaaatatggtaatttctctagtcaatacaccagaaacacacagatgctagactactacctaggcttctacagtcccatatttctgtctgatggaagatccaacacagaattcttcacagcctacagagacatagtatataaccctctcttagacaaggccacaggtaacatgatatggttccagtaccacacaaagacagacaatatatacaacaaacaaacctgccactgggaaatattagatatgcccctgtgggccctctgcaacggctatgtagagtacctagagagccaaataaagtacggggacgtacttactgaaggcaaagtcctaataagatgtccctacacgaagcctcctctaacagaccccaaagactcacaggcaggatacgtggtgtacaacaccaactttggaagaggcaagtggacagatggaaaaggctacatccccctacacgagaggagcaagtggtatgtgatgctcagataccagactgacgtactccatgacatagtgacttgtggaccctggcagtacagagacgataacaaaaactctcagctcatagccaagtacagattcaagttctactggggaggtaacatggtgcattctcaggtcatcaggaacccgtgcaaagacacccaagtatccggaccccgtcgacagcctcgggaagtacaagtcgttgacccgcaactcatcaccccgccgtgggtcctccactcgttcgaccagagacgaggaatgtttactgagggagctatcagacgtctgctcaagcaaccaatacctggcgagtatgctcctacagcactcagggtcccgctcctctttccctcctcagagttccaacgagagggagaaggtgcagaaagcgactcatcttccccgacaaaaagaccgcgactctggcaagaagaggccagccagacggagacggagtcctcggaggggccggcggagacgacgagggagctcctcgagcgaaagctcagagagcagcgagtcctcaacctccaactccagcacttcgcagtacaactcgccaagacacaagcgaacctccacataaaccccctattatactcccagccttaaacaaagtgtatctattcccccctgacaaacccactcccatacagggataccacgggtggaacacagagttcgaggcctgccaggcctttcacagaccacccagaaagtatctctcagacacacctacctacccttggctccccgtccccaatcctgaaataaaagtgagctttaagctcggtttcaaatcttacaaggccgtgggagtttcactggtcggtgtctacctcttaaggtcaccaagcactccgagcgtcagcgaggagtgcgacccttccccctggtgcaacgccctcggcggccgcgcgctacgccttcggctgcgcgcggcacctcggacccccgctcgtgctgacacgcttgcgcgtgtcagaccacttcgggctcgcgggggtcgggaattttgctaaacagactccgagttgccattggacactgtagctgtgaatcagtaacgaaagtgagtggggccagacttcgccataaggcctttatcttcttgccattggtccgtctagggggtcgccataggcttcgggctcggttttaggccttccggactacaaaaatggcgcattcagtgacgtcacggccgccattttaagtaggtgccgtccaggactgctgttccgggtcagagggcatcctcggcggaacttacacaaaatggcggacaaaaacaaccgggtcaaaggtcaggtctacgtcataagtcacgtgactgggtcctgctacgtcaaacgcggaagtaggccccgccacgtgactagtcacgtgggcactgcgtcacggcggccattttgaatcacaaaatggcggacttccttcctcttttttgaaaataacgtaccggcgcctgtagcccctcc

SEQ ID NO: 414 - protein, 785 aa, Alphatorquevirus sp.
MAWWGWRRRWWRPRRRWRWRRPRRRRRVPARRPRRAVRRYRTRTVRRRRRGWRRGYRRRYRLRRLRRRGRRRKKIILTQWNPQTVRKCFIRGLMPVLWAGMGTGGHNYAVRSDDFVVDRGFGGSFATETFSLRVLYDQYQRGFNRWSHTNEDLDLARYNSCKWTFYRHQDTDFIVYFTNNPPMKTNQYTAPLTTPGMLMRSKYKILIPSFKTRPRGKKSISVRIRPPKLFQDKWYTQQDLCPVPLVQLNVTAADFTHPFGSPLTDSPCIRFQVLGDLYNKCLNIDLPEFDEQGKMKDNPTYTRENKTHLQTLYTTLFNSRQSGVYWQTFITNTMVKAHIDAKKAQLAINNTVPSTQPSYNTEQFPTKPEKAKFDDWKKKFTDTRDSNFLFATYHPDMIHSTIAEMRNNNFDLETGPNDKYGNFSSQYTRNTQMLDYYLGFYSPIFLSDGRSNTEFFTAYRDIVYNPLLDKATGNMIWFQYHTKTDNIYNKQTCHWEILDMPLWALCNGYVEYLESQIKYGDVLTEGKVLIRCPYTKPPLTDPKDSQAGYVVYNTNFGRGKWTDGKGYIPLHERSKWYVMLRYQTDVLHDIVTCGPWQYRDDNKNSQLIAKYRFKFYWGGNMVHSQVIRNPCKDTQVSGPRRQPREVQVVDPQLITPPWVLHSFDQRRGMFTEGAIRRLLKQPIPGEYAPTALRVPLLFPSSEFQREGEGAESDSSSPTKRPRLWQEEASQTETESSEGPAETTRELLERKLREQRVLNLQLQHFAVQLAKTQANLHINPLLYSQP

SEQ ID NO: 415 - protein, 154 aa, Alphatorquevirus sp.
MFLGKLYRKKRKLLLQAVRAPQAPSSMSSTWRVPRGDVSARELCWYRSVRDSHDAFCGCRDPVFHLSRLAARSNHQGPPTPPTDERPPASTPVRHLLPLPSYPGEGPQARWPGGDGEGAGGARGGGGDGGARAGEEEYRPEDLDELFGAIEQEQ

SEQ ID NO: 416 - protein, 199 aa, Alphatorquevirus sp.
LARRGQPDGDGVLGGAGGDDEGAPRAKAQRAASPQPPTPALRSTTRQDTSEPPHKPPIILPALNKVYLFPPDKPTPIQGYHGWNTEFEACQAFHRPPRKYLSDTPTYPWLPVPNPEIKVSFKLGFKSYKAVGVSLVGVYLLRSPSTPSVSEECDPSPWCNALGGRALRLRLRAAPRTPARADTLARVRPLRARGGREFC

SEQ ID NO: 417 - DNA, 3642 bp, Alphatorquevirus sp.
cgggtgccggaggtgagtttacacaccgcagtcaaggggcaattcgggctcgggactggccgggctatgggcaaggctcttaaaaaaagacatgtttctcggtaaactctacagaaagaagagggcactgccactgtgccgcctgcgagcttcaaagaagaaaccacctcctgacatgacctggagacccccggtgcacaacgcccatgggatcgagagaaatctttacgagtgcgtatttcgcgcacatgctgctagctgtggctgcggtgatcttgttggccatatttctctactggctcagcggtatggtgcccctcctcgacctccggcgcccggggctcccagaccacaaatgagacgccagctggcccttccagcgccccccgccgatccgcagcaggctaacccagaatggcctggtggggacggtggagaccgtggcgatggaggcgccgctggagaaggggtcgccgccgacggagactacgaacccgaggaactaaacgccctcttcgacgccgtagaacaagaagagtaaggagaaggagatgggggaggcggaggtggagacgggggtacagacgcagactgagactgagacgcaaacgcagacgcagaaaaaagatagtactgactcagtggaaccccgccaaagtgcggaggtgcaggatatcgggggtcctgcctatggtcctatgcggcgcgggcaggtcagggtttaactatggactgcacagcgacgacctgactgtacagaaaccccttaaccagaacccccacgggggaggcatgagcacagtgactttctctctaaaagtgctctatgaccagtaccagaggttcctaaacaagtggtcttaccccaacgaccagctagacctggccaggtacaagggctgcaaatttatcttctacaggcacccagaaacagactttgtagttcagtatgacaacgttccccccatgaaaatggatgagtttacagcccctaacactcatcccaacttactgctacaggccaaacacagacggaaaatacccagttttaaaaccaggccttttggtaaaaagacagttactattaaagtggggcctcctaaactatttgaagacaagtggtacccccagtcagatctgtgcaaggtgccccttgtcagttggcgggtgaccgcagctgacttgcggtttccgttctgctcaccacaaactgacaacccttgcttcaccttccaagtattgcacgaagagtattacaatgtactaggaacttccgtattagaccaacagacaacttacaaagaagatataactaactttgaaaaatggctatatgaaaaatgcactcactatcaaacatttgccacagacaccagattagccccagaaaaatctacctcaccctcaggagaaacaaatgcacaacaatcatggacacaaacagactttgcacaatttaaaaaacaaacagacagcaactatggctactgcacatactgccccaccaataccttagtagaaaaaattaaaaagtacagagacaaaagatttcagtggctaacaagccctagctctacaaaccgatgccacataaacatgacatacagcaagggcaagtactcagagtacgagtaccacctaggctggtactctaacatttttataggcaacctcagacacaacctagcattcaaaccagcatacatagatgtaacctataaccccatagtagacaaaggcctgggaaaccacatatggtttcagtacctaacaaagcccaccactgagctagtagaagcccaggcaaaatgtcacatccaagacctgcccctgtacgccatgacctttggctatgaggactacttgcagagaacactaggcccattccaggacgtagagaccgtgggcataatttgctttatatgcccttacacagaaccaccctgccttaacaaaaacgagggcaaaaagaactggggctacgtgttctatgacacacactttggcaacggcaagaccccagagggactgggccaagtacacccttactggatgcagagatggagacccatgtcccaggtgcaaaaagaaactctaaacaagattagcaggaccggaccgttcagctacagagacgagcaccctagcgtgacgctgaccgcgaactacaagttctactttaactgggggggcgactctatatttccacagattattaaaaacccctgtccagacaacagcctacgccccggcggccatagagagcctcgctcagtacaagtcgttagcccgctcacaatgggaccgcaatacctctttcactcctgggactggcgacgggggttctttaatccaaaaactctcaaaagaatgcttgaaaaaccagatgatgatgcagagtatccaacaggtccaaaaatccctcgatgggtacccgctctcgagcaccaagggcaagaaagcaacttcgattcggagacagagatctccgagtcctcggaagaagaagccgctcaagaagtcctccaagaaatccaggaggcgccgctacagcagcacctcatccagcagtaccgagagcagcgacgcctcggaaaacaactcaaactcgtcatgctacaactcaccaagacgcagagcaatttgcacataaatccccgcgtccttggccatgcataaataaagtgtacatgtttccccccgaaaaaccccttcccatacacgggtaccacgggtgggagaccgagttccaggcctgcaaggccttcgacaggccccctagaaactacctgtcagacagacccatctacccctggcttccccgctcccagccagaaattaaagtgagttttaagctcggttttcaataaacaaggccgtgggaatttaacttgtcggtgtctacctcttaaggtcactaagcactccgagcgtcagcgaggagtgcgacccttccccctaatgcaacgccctcggcggccgcgcgctacgccttcggctgcgcgcggcacctcggacccccgctcgtgctgacacgctcgcgcgtgtcagaccacttcgggctcgcgggggtcgggaattttattaaacagactccaggttgccattggacactggagctgtgaatcagtaacgaaagtgagtggggccagacttcgccataaggcctttatcttcttgccatttgtccgtgtcgggggtcgccataggcttcgggctcggttttaggccttccggactacaaaaaccgccattttactgacgtcacaggcgccattttaagtcagcgctggggaggcgtgacgtaaagttcaaaggtcatcctcgccggaactggcacaaaatggccgccaactccttccgggtcaaaggttactgctacgtcataggtgacgtagctggtgtctgctataaacacggaagtaggccccgctacgtcacttgtcacgtgacagcacgtcaccgccgccattttgtttaacaaaatggccgacttccttcctgttttttaaaaataacggccctgcggcggcgcgcgcgctgcgcgcgcgtcatataagtaagtgcacttccgaatggctgagttttccacgcccgtccgcagcgagaacaccacggaggggagtccgagcgtcccgaggg

SEQ ID NO: 418 - protein, 754 aa, Alphatorquevirus sp.
MAWWGRWRPWRWRRRWRRGRRRRRLRTRGTKRPLRRRRTRRVRRRRWGRRRWRRGYRRRLRLRRKRRRRKKIVLTQWNPAKVRRCRISGVLPMVLCGAGRSGFNYGLHSDDLTVQKPLNQNPHGGGMSTVTFSLKVLYDQYQRFLNKWSYPNDQLDLARYKGCKFIFYRHPETDFVVQYDNVPPMKMDEFTAPNTHPNLLLQAKHRRKIPSFKTRPFGKKTVTIKVGPPKLFEDKWYPQSDLCKVPLVSWRVTAADLRFPFCSPQTDNPCFTFQVLHEEYYNVLGTSVLDQQTTYKEDITNFEKWLYEKCTHYQTFATDTRLAPEKSTSPSGETNAQQSWTQTDFAQFKKQTDSNYGYCTYCPTNTLVEKIKKYRDKRFQWLTSPSSTNRCHINMTYSKGKYSEYEYHLGWYSNIFIGNLRHNLAFKPAYIDVTYNPIVDKGLGNHIWFQYLTKPTTELVEAQAKCHIQDLPLYAMTFGYEDYLQRTLGPFQDVETVGIICFICPYTEPPCLNKNEGKKNWGYVFYDTHFGNGKTPEGLGQVHPYWMQRWRPMSQVQKETLNKISRTGPFSYRDEHPSVTLTANYKFYFNWGGDSIFPQIIKNPCPDNSLRPGGHREPRSVQVVSPLTMGPQYLFHSWDWRRGFFNPKTLKRMLEKPDDDAEYPTGPKIPRWVPALEHQGQESNFDSETEISESSEEEAAQEVLQEIQEAPLQQHLIQQYREQRRLGKQLKLVMLQLTKTQSNLHINPRVLGHA

SEQ ID NO: 419 - protein, 161 aa, Alphatorquevirus sp.
LAGLWARLLKKDMFLGKLYRKKRALPLCRLRASKKKPPPDMTWRPPVHNAHGIERNLYECVFRAHAASCGCGDLVGHISLLAQRYGAPPRPPAPGAPRPQMRRQLALPAPPADPQQANPEWPGGDGGDRGDGGAAGEGVAADGDYEPEELNALFDAVEQEE

SEQ ID NO: 420 - protein, 147 aa, Alphatorquevirus sp.
MGTRSRAPRARKQLRFGDRDLRVLGRRSRSRSPPRNPGGAATAAPHPAVPRAATPRKTTQTRHATTHQDAEQFAHKSPRPWPCINKVYMFPPEKPLPIHGYHGWETEFQACKAFDRPPRNYLSDRPIYPWLPRSQPEIKVSFKLGFQ

SEQ ID NO: 421 - DNA, 3637 bp, Alphatorquevirus sp.
ccgccgctgaggagggcgctgccgccaccgctcaaggggcaattcgggctcgggactggccgggctatgggcaaggctcttaaaaagctatgtttctcggtaaactctacagaaagaaaaggaaactgctactgcagcctgtgcgtgctccacaggcgccatcttccatgagccgctgctggtgtccgccgcgcggggatgtctcctcccgcgagtccggctggtacgaggcggttcgaagaagccacgatgctttttgtggctgtggtgattctgttcttcatctttctcgtctggctgcacgttttaaccatcagggacctcagacgccccccccggacgaccgcccgtcgcagactccctcagtgagacgcctgctgccgctgccctcctaccccggcgagggccccgcgcctagatggcctggtggggatggaggcgccgctggtggcggccgcggagacggtggcgctggaggcgtccgcgccgccgaagacgagtaccaacccgaagacctcgacgagcttttcggcgctatagaacaagaacagtaaggaggcgccggagggggcggcggaggggctacaggcgacggtatagagtcaggcgactgtacagacgtagatacaaaagaaaaaagatagtactgactcagtggaacccccagactactagaaaatgcaccataaagggcctcatgccagtactctgggcgggaatgggtacggggggccagaactatgcggtgcgctccgacgacttcaccctaaaggggttcgggggctccttcgccacagagacttttagcctaaaggtgctctatgaccagtatcagaggggctttaacatatggactcacactaacgagcagctagacctcgccctgtactacgggtgcaagtgggtgttctacagacacgccaccactgactttataatacacttcaccaacaatcctcccatgaaaacaaaccagttcacggcacccctcaccactccaggcatgctcatgaggagcaagtacaaaatattgctgcccagctttaaaaccaggcccaagggcagaaagtccgtgactgttagaataaagccccccaaactcttccagcacaagtggtacacccagcaagacctgtgttcagttcctcttgtccaactgaacgtgaccgcagcggatatgcaacatccgttcggctcaccactaactgacactccttgcgtcagcttccaggtgctgggtgacttgtacaataactgcctaaatatagatcttcctcaatttgaagcaacaggagaaatttcaagctctactaactaccaaagagaaaatgcaaatcaattaatagaattatataaaactctattcacaaaacaatccagtggtcacttctggcaaacattcctaacaaatactatggtaaaggcacatatagatgcagacaaagcacagcaagccatgcaacaaacaagtacacagccaacatataacactacaggtttccccacaatacccgcagcagaggagtttgctacttggaaagttaaattcactgaccagagagacagcaactttctctttgcaacctatcacccagaacaaattaaagagattattaaaagaatgagagacaataactttaaattagaaacagggcctaatgacaagtatgggcaatatcaggcccagtatacaagaaacacccatatgctagactactacctgggcttctatagccccatattcttaagcagcggcagatccaatatagagttctttacagcatacagagacatagtatacaatcccctattagacaaggccacaggtaacagaatatggttccagtaccacacaaaatgtgataacaagttcaaaaaaccagaatgccactgggaaatagaagacatgcccctgtgggccctctgtaacgggtacaaagagtatctagaaagccaaataaaatacggggacatactagtagaaggcaaagtcctcatcagatgtccatacacacaacctccactagtagataagaacgatcccactgccgggtttgtagtattcaatgagaactttggcaaaggaaagtggatagacggagggggctacatccccctacacgagagaagcaagtggtacgtgatgctcagataccagactgacgtactccatgacatagtgacctgcggaccgtggcagtacagggacgacgacaaaaactctcaactggtggccaagtactactttcgctttaaatggggtggcaacgtaatgcattctcaggttatcagaaacccgtgtccagaccaccaagtatccggaccccgtcgacagcctagagaagtacaagtcgttgacccgcaactcatcacgcccccctgggtcctccacacgttcgaccagagacgaggactctttactgagacagctatcaaacgtctgctcaagcaaccaatacctggcgagtataatactcaacccccaagggtcccactcctctttctaccctcagcattccagagagaagacggaagtgcagaaagcgactcaggttcaccggccaaaagaccccggtactcgttcgaagagagccagacgccgagcctctcctcggaggagaacccggcggagacgacgagggagatcctcctccgaaagctccgagagcagcgagcactccagttccagcttcagcacttcgcagtccaactcgccaaaacccaagcgaacctccacgtaaaccccctgtcattctaccccccataaaccaagtcttcatgtttcctcccgagggccctaaacccataaagggtcccgaggcctgggcggacgagtacttcaccgccgcccactggaacagaccccctagaacccatcacacagacacccccttctatccgtgggtcccaaaacagtatcgtgtcagctttaaacttggctttcaataaaattactacgccgtgggagtctcgctggtcggtgtctacctcttaaggtcactaagcactccgagcgtcagcgaggagtgcgaccctctgccctggtgcaacgccctcggcggccgcgcgctacgccttcggctgcgcgcggcacctcggacccccgctcgtgctgacgcgctcgcgcgcgtcagaccacttcgggctcgcgggggtcgggaaatttgctaaacagactccgagttgccattggacactgtagccgtgaatcagtaacaaaagtgagtggggccagacttcgccataaggcctttatcttcttgccattagtccgtgtagggggtcgccataggcttcgggctcggttttaggccttccggactaccaaaatggcggattcagtgacgtcatggccgccattttaagtaggtgccgtccaggactgcagttccgggtcagagggcatcctcggcggaacctacacaaaatggtggacaaaaacatccgggtcaaaggtcgcagctacgtcataagtcacgtacaagggtcctgctgcgtcatatgcggaagtaggccccgccacgtgactcgtcacgtgactgctacgtcacggcggccattttgtatcacaaaatggcggacttccttcctctttttcaaaaataacgtaccggcggcgggtagtcttagggatccg

SEQ ID NO: 422 - protein, 782 aa, Alphatorquevirus sp.
MAWWGWRRRWWRPRRRWRWRRPRRRRRVPTRRPRRAFRRYRTRTVRRRRRGRRRGYRRRYRVRRLYRRRYKRKKIVLTQWNPQTTRKCTIKGLMPVLWAGMGTGGQNYAVRSDDFTLKGFGGSFATETFSLKVLYDQYQRGFNIWTHTNEQLDLALYYGCKWVFYRHATTDFIIHFTNNPPMKTNQFTAPLTTPGMLMRSKYKILLPSFKTRPKGRKSVTVRIKPPKLFQHKWYTQQDLCSVPLVQLNVTAADMQHPFGSPLTDTPCVSFQVLGDLYNNCLNIDLPQFEATGEISSSTNYQRENANQLIELYKTLFTKQSSGHFWQTFLTNTMVKAHIDADKAQQAMQQTSTQPTYNTTGFPTIPAAEEFATWKVKFTDQRDSNFLFATYHPEQIKEIIKRMRDNNFKLETGPNDKYGQYQAQYTRNTHMLDYYLGFYSPIFLSSGRSNIEFFTAYRDIVYNPLLDKATGNRIWFQYHTKCDNKFKKPECHWEIEDMPLWALCNGYKEYLESQIKYGDILVEGKVLIRCPYTQPPLVDKNDPTAGFVVFNENFGKGKWIDGGGYIPLHERSKWYVMLRYQTDVLHDIVTCGPWQYRDDDKNSQLVAKYYFRFKWGGNVMHSQVIRNPCPDHQVSGPRRQPREVQVVDPQLITPPWVLHTFDQRRGLFTETAIKRLLKQPIPGEYNTQPPRVPLLFLPSAFQREDGSAESDSGSPAKRPRYSFEESQTPSLSSEENPAETTREILLRKLREQRALQFQLQHFAVQLAKTQANLHVNPLSFYPP

SEQ ID NO: 423 - protein, 154 aa, Alphatorquevirus sp.
MFLGKLYRKKRKLLLQPVRAPQAPSSMSRCWCPPRGDVSSRESGWYEAVRRSHDAFCGCGDSVLHLSRLAARFNHQGPQTPPPDDRPSQTPSVRRLLPLPSYPGEGPAPRWPGGDGGAAGGGRGDGGAGGVRAAEDEYQPEDLDELFGAIEQEQ

SEQ ID NO: 424 - protein, 56 aa, Alphatorquevirus sp.
MFPPEGPKPIKGPEAWADEYFTAAHWNRPPRTHHTDTPFYPWVPKQYRVSFKLGFQ

SEQ ID NO: 425 - DNA, 3632 bp, Alphatorquevirus sp.
aaacgagacgccgtgagtttacacaccgcagtcaaggggcaattcgggctcgggactggccgggctatgggcaagactcttagggttatcgctttttaaaacatgtttctcggcagggtctggagaaagaaaaggcaagtgccactgccaacactgcgagtggtgtcgctaccacaacctccacctatgagcagccagtggagacccccggttcacaatgtccaagggctggagcgcaattggtgggagtgcttcttccgtggtcatgcttgcttttgtggctgtggtgatgctattactcatattaatcatctggcgtctcgttttggacgtcctcctgctacctcaactccccgagggccgcagccacctccagtgaccccgttcccggccctgccggccccggagcctagcccagagccatggcgtggcgccggtggcgatggcggccgtggtggagacgccggaggcgccgccggtggagaaggagacgccggaggcccagacgacgccgcccttatcgacgccgtcgaactcgcagagtaaggaggcgcagggggcggtggaggcgcgcttacagacgttgggggcgacgcagacgcagacgcagacacaaaaagaaactggtactgactcagtggcagccccctatagttaagaagtgcctaataatagggtacgacccccttataatctgtggcataaacaggacagcttttaactacactacacactcagaagatttcacttttaacaacgagagctttggagggggaatatgcacagcacagtacacactaagaatactattccaagagaagctggcccaacacaacttctggacggccagcaacgaggacctggacttggccaggtacctgggtggagtactaatactgttcagacacccaacagtagattttttagtaagagtgcgcaccagtcctccattcaatgacacagacatgactgctctcactctgcacccaggcataatgatgctcagtaaaaaggttattaaggtacccagccttaaaaccaggcccagcaaaaaacactatataaaaataaaattcggagcccctaaactgtttgaagacaagtggtacccccagaacgagctatgtgatgtaactctagtcagcatacaggcaaccgcagctgatttccaatatccgttcggctcaccactaacgaactcagtctgttgcaacttccaggttcttaacagcaactatgacaaagcacttagtatacttaacactactcaggtaaaagaagaactgcatactaaaagacaacaatgttataattttcttttacaacaatacagctactacaacacaaaacagacactagctcaacttaaatttaacttttttccaaaacagaaccccaaaatgccaacattagacaatgcagactcatctaaatctccagagtctctcactaaatctaacgttactgagaactacccacactgggactctctatatggtggcctagcatatggctttacacctacctctcatagtgaaaacacaaaccaagcaaaagacttacaaaaccaaatgataaacgcaaacactttctatacaaaagcaggcaaacaactaataaagggattcacacccatacagcatgacaatcacccaaacacaaacatctttgactactacacaggtatgtactgtagcatatttctatcctccggaaggtccaacccagaagttaaaggcagctatacagacatatcttacaacccactcacagataaaggtgtaggcaacatgatatggatagactggctaaacaaaccagacagcatatacgaccccgctaagagcaaatgcctactaaaagactttcccttgtggtgcatggtatacgggtacgcagactactgcagaaaagccacaggagactcagccatactactagacagcagagtagtaataagatgcccgtacacataccctcagcttataaaacacaacaatgaaaactgggggttcgtcccctatagcgaaaactttggactgggtagaatgcccgggggcaatccaaacccctcgaccagaatgagactatactggtacccaatgctgctacaccagatggaagtattagagtgcttggcacagaccggaccgtttgcctaccacggagacgagagaaagactgtactgactgctaaatacaagttcagatggaagtggggaggaaaccctgtctttcaacaggttcttagagacccctgcacaggaggtgccgtggcgccccacaccagtcgacaccctcgcgcaatacaagtctttgacccgaagtaccaagccccggagtacctgttccacaagtgggacttcaggaggggactctttagcactaaaggtattaaaagagtgtcagaacaaccaacaaatgatgagtttcttacaggccgcagcaagagacccaagaaagatacaggggccccgctccaagaagaggagcaaaaagaagactcgcatttcagactcccccagctcagaccctggctcccctccagccaggaaacgcagagccaaagcgaagaagagcagcagacgcgcagcacaacagtacaagaacaattacagcaacagctccagcaacagcgactcatgggagtccaactccgagacgtctgtctccagctcgcaagagtccaagcggggcacagtctccaccccgttttccaatgccatgtataaacaaggtgtttatatttcctgagagggagccaaagaagccccctaccagcaaagactggcaggaagaatttgaggcctgtaaacactgggacaggcctgctagacctagcttagatagaccccctttctacccttggatgcccagggaaccccaaacctgtcgtgtaaccttcaagcttggctggcaataaaattacaaggccgtgggagtttcacttgtcggtgtctgcttattaaggtcactaagcactccgagcgtaagcgaggagtgcgaccccctgccctgggcccacttcttcggagccgcgcgctacgccttcggctgcgcgcggcacctcagacccccgctcgtgctgacacgctcgcgcgtgtcagaccacttcgggctcgcgggggtcggaaattttgctaaacagactccgagttgccattggacactgtagctgtgaattagtaacaaaagtgagtggggccagacttcgccataaggcctttatctttttgccattggatagtgtagggggtcgccataggcttcagcctcagttttaggccttccggactacaaaaatggcggattccgtgacgtcatggccgccattttaagtaaggcggaagcagctccactttctcacaaaatggcggcggagcacttccggcttgcccaaaatggcgggcaagctcttccgggtcaaaggttaaacacctacgtcataagtcacgtgactggggaggtcttgaacccggaagcttcctcgatcacgtgtcttgtcacgtgggcgctacgtcaccggcgccatcttgttttacaaaatggccgacttccttccggttttttgaaaaaaggcgccaaaaaacggctgcggccctcggggagttgaggtagcaggaggacgtcca

SEQ ID NO: 426 - protein, 769 aa, Alphatorquevirus sp.
MAWRRWRWRPWWRRRRRRRWRRRRRRPRRRRPYRRRRTRRVRRRRGRWRRAYRRWGRRRRRRRHKKKLVLTQWQPPIVKKCLIIGYDPLIICGINRTAFNYTTHSEDFTFNNESFGGGICTAQYTLRILFQEKLAQHNFWTASNEDLDLARYLGGVLILFRHPTVDFLVRVRTSPPFNDTDMTALTLHPGIMMLSKKVIKVPSLKTRPSKKHYIKIKFGAPKLFEDKWYPQNELCDVTLVSIQATAADFQYPFGSPLTNSVCCNFQVLNSNYDKALSILNTTQVKEELHTKRQQCYNFLLQQYSYYNTKQTLAQLKFNFFPKQNPKMPTLDNADSSKSPESLTKSNVTENYPHWDSLYGGLAYGFTPTSHSENTNQAKDLQNQMINANTFYTKAGKQLIKGFTPIQHDNHPNTNIFDYYTGMYCSIFLSSGRSNPEVKGSYTDISYNPLTDKGVGNMIWIDWLNKPDSIYDPAKSKCLLKDFPLWCMVYGYADYCRKATGDSAILLDSRVVIRCPYTYPQLIKHNNENWGFVPYSENFGLGRMPGGNPNPSTRMRLYWYPMLLHQMEVLECLAQTGPFAYHGDERKTVLTAKYKFRWKWGGNPVFQQVLRDPCTGGAVAPHTSRHPRAIQVFDPKYQAPEYLFHKWDFRRGLFSTKGIKRVSEQPTNDEFLTGRSKRPKKDTGAPLQEEEQKEDSHFRLPQLRPWLPSSQETQSQSEEEQQTRSTTVQEQLQQQLQQQRLMGVQLRDVCLQLARVQAGHSLHPVFQCHV

SEQ ID NO: 427 - protein, 147 aa, Alphatorquevirus sp.; identical to SEQ ID NO: 113

SEQ ID NO: 428 - protein, 129 aa, Alphatorquevirus sp.
LAPLQPGNAEPKRRRAADAQHNSTRTITATAPATATHGSPTPRRLSPARKSPSGAQSPPRFPMPCINKVFIFPEREPKKPPTSKDWQEEFEACKHWDRPARPSLDRPPFYPWMPREPQTCRVTFKLGWQ

SEQ ID NO: 429 - DNA, 3627 bp, Alphatorquevirus sp.
cttcgcgcgcgggtgagtttacacaccgcagtcaaggggcaattcgggctcgggactggccgggccatgggcaaggctcttaaaaagctatgtttctcggtaaaatctacaggaagaaaaggaaactgcttctgcagactgtgcgtgctccacaggcgccatcttccatgagccgctgctggtgtcctcctcggggtgatgtctccacccgcgagtcccggtggtacgagtcggttcgactatgccacgatgctttttgtggctgtggcgatcctgttcttcatttttctcgtatggttgcacgttttaaccatcagggacctccgacgccccccacggacgaccgtgcgccacagaataccccagtgagacgcctgctgcctctccccagctaccccggcgagggtcccgctcctagatggtctggtggggatggaggcgccgctggtggcgaccgaagagaaggtggagatggcggcgcgcgcgccgccgaagacgagtaccaccccgaagacctcgacgagcttttcggcgctatcgaacaagaacagtaaggaggaggcgaagggggaggcggaggggctaccggcgccgttacagactgagacgctatgccagacgcaggttccgacgcaaaaagatagtactgactcagtggaacccccagactgtcagaaaatgtataataaggggcatgatgccagtactctgggccggcatgggcacggggggcagaaactacgccgtcaggtcagatgactacgtggtgaacagggggttcgggggctccttcgccacagagaccttctccctcaaggtactctatgaccagtttcagaggggcttcaacaggtggtctcacactaacgaggacctagacctggcccgctacaggggctgcaggtggactttttacagacacaaagacacagactttatagtgtactttacaaacaatcctcccatgaaaaccaaccagttctcggcccccctaacgacccccggcatgctcatgcgcagcagatttaaaatcctgatccccagctttcagaccagacccaagggtcgcaaaacagtgacagttaggatcaggccccccaaactatttcaagacaagtggtacacccagcaggacctgtgttcagttcctcttgtccaactgaacgtgaccgcagctgatttcacacatccgttcggctcaccactaactgaaactccttgcgtagagttccaggtgctgggtgacttgtacaatacatgtctcaatatcgaccttcctcaatttagtgactcaggagagataatcggtacttattcaaaatctaactcaaataacttaaaagaattatataaagagctgttcactaaacctacatcaggccactactggcagacatttatcacaaacagcatggtcagagcacacatagatgcacaaaaagcaaagcaagcacaaacaacaggcaactcacctacctacaaccaagaccccttccccacaatacctactaaagcagagtttgctgaatggaaaaagaagttcacagacacaagagacagctcctttctttttgccacttaccatccccaagccataaaagagacaataaagaaaatgagagacaataactttaacttagagacaggccccaatgacaaatacggagactacacagcacagtatactggcaatacacacatgctagactactacctaggcttttacagccccatattcctgtcagacggaaggtccaatatagagttcttcactgcctacagagacatagtgtataaccccctgttagacaaggccgaaggcaacatggtgtggttccagtaccacactaaaacagacaacttattcaagaaaccagagtgccactgggagatcaaagacatgcccctgtgggccctcctcaacggatacactgactacctagagactcaaatacagtggggcgacctcagcaaggagggcaaagttctcatcagatgtccctacaccaagccgcccctcacagacaaaaacaacgacatggcaggctacgtagtctacaacagaaactttggcagaggcaagtggatagacggagggggctacgtccccctgcacgagagaacaaagtggtatgtcatgctcagataccagacggacgtgttccatgacatagtgacctgtgggccctggcagtacagagacgataacaaaaacgcccagctagtagccaagtaccgtttcagcttcatgtggggaggtaacactgtgcactctcaggtcatcaggaacccgtgcaaagacaaccaactttccggaccccgtcgacagcctagggacgtacaagtcgttgacccgcagctcgtcacgccgccgtgggtcctccacagcttcgaccagagaagaggcctctttagtgaaacagctctcagacgtctgctcaaacaaccacttcctggcgagtatgctgttacacccctcaggacacccctcctctttctaccctcagagttccaacgagaagacggcgctgtcgaaggcgtctcaggttcaccggccaaaagaccccgtatctggccagaagagagccagacggagacgatctcctcggaggaggacccggcggagacgacgagggagctcctccagcgaaagctccgagagcagcgagcactccagttgcagctccagcagttcgcggtccaactcgccaagacccaggcgaatctccacgtaaaccccctattatctttcccgcagtaaacaaagtgtacctgtttacaccgaaaaagcctactccgatacaggggtaccacggatggaacacagagttcgaggcctgcaacgccttcgacagacctcccagaaagtacattacagacacacctacctacccctggctccccgtccccaatcctgaaataaaggtgagctttaagctcggtttccactaaacaaggccgtgggagtttcactcgtcggtgtctacctctaaaggtcactaagcactccgagcgtcagcgaggagtgcgaccctttgggtgggtgcaacgccctcggcggccgcgcgctacgccttcggctgcgcgcggcacctcggacccccgctcgtgctgacacgctcgcgcgtgtcagaccacttcgggctcgcgggggtcgggaattttgctaaacagactccgagttgccattggacactgtagctgtgaatcagtaacgaaagtgagtggggccagacttcgccatagggcctttatcttcttgccattggtccgtctcgggggtcgccgtaggcttcgggctcggttttaggccttccggactaccaaaatggcggattcagtgacgtcacggccgccattttaagtaggtgccgtccaggactgctgttccgggtcagagggcatcctcggcggaacctgcacaaaatggcggacaaaaacatccggataaaaggtcgcagctacgtcataagtcacgtggaagggccctgctgcgtcatatgcggaagtaggccccgacacgtgactcgtcacgtgactgctacgtcacggcggccattttgtatcacaaaatggcggacttccttcctctttttcaaaaataacggcccggcggcggcgcgcgcg

SEQ ID NO: 430 - protein, 780 aa, Alphatorquevirus sp.
MVWWGWRRRWWRPKRRWRWRRARRRRRVPPRRPRRAFRRYRTRTVRRRRRGRRRGYRRRYRLRRYARRRFRRKKIVLTQWNPQTVRKCIIRGMMPVLWAGMGTGGRNYAVRSDDYVVNRGFGGSFATETFSLKVLYDQFQRGFNRWSHTNEDLDLARYRGCRWTFYRHKDTDFIVYFTNNPPMKTNQFSAPLTTPGMLMRSRFKILIPSFQTRPKGRKTVTVRIRPPKLFQDKWYTQQDLCSVPLVQLNVTAADFTHPFGSPLTETPCVEFQVLGDLYNTCLNIDLPQFSDSGEIIGTYSKSNSNNLKELYKELFTKPTSGHYWQTFITNSMVRAHIDAQKAKQAQTTGNSPTYNQDPFPTIPTKAEFAEWKKKFTDTRDSSFLFATYHPQAIKETIKKMRDNNFNLETGPNDKYGDYTAQYTGNTHMLDYYLGFYSPIFLSDGRSNIEFFTAYRDIVYNPLLDKAEGNMVWFQYHTKTDNLFKKPECHWEIKDMPLWALLNGYTDYLETQIQWGDLSKEGKVLIRCPYTKPPLTDKNNDMAGYVVYNRNFGRGKWIDGGGYVPLHERTKWYVMLRYQTDVFHDIVTCGPWQYRDDNKNAQLVAKYRFSFMWGGNTVHSQVIRNPCKDNQLSGPRRQPRDVQVVDPQLVTPPWVLHSFDQRRGLFSETALRRLLKQPLPGEYAVTPLRTPLLFLPSEFQREDGAVEGVSGSPAKRPRIWPEESQTETISSEEDPAETTRELLQRKLREQRALQLQLQQFAVQLAKTQANLHVNPLLSFPQ

SEQ ID NO: 431 - protein, 154 aa, Alphatorquevirus sp.
MFLGKIYRKKRKLLLQTVRAPQAPSSMSRCWCPPRGDVSTRESRWYESVRLCHDAFCGCGDPVLHFSRMVARFNHQGPPTPPTDDRAPQNTPVRRLLPLPSYPGEGPAPRWSGGDGGAAGGDRREGGDGGARAAEDEYHPEDLDELFGAIEQEQ

SEQ ID NO: 432 - protein, 126 aa, Alphatorquevirus sp.
LARREPDGDDLLGGGPGGDDEGAPPAKAPRAASTPVAAPAVRGPTRQDPGESPRKPPIIFPAVNKVYLFTPKKPTPIQGYHGWNTEFEACNAFDRPPRKYITDTPTYPWLPVPNPEIKVSFKLGFH

SEQ ID NO: 433 - DNA, 3627 bp, Alphatorquevirus sp.; identical to SEQ ID NO: 429

SEQ ID NO: 434 - protein, 780 aa, Alphatorquevirus sp.; identical to SEQ ID NO: 430

SEQ ID NO: 435 - protein, 154 aa, Alphatorquevirus sp.; identical to SEQ ID NO: 431

SEQ ID NO: 436 - protein, 126 aa, Alphatorquevirus sp.; identical to SEQ ID NO: 432

SEQ ID NO: 437 - DNA, 3627 bp, Alphatorquevirus sp.
cgggtgccgtaggtgagtttacacaccgaagtcaaggggcaattcgggcacgggactggccgggctatgggcaaggctcttaaaatatttccccgctctgttctccggcaggacacaaagtcatgccgtggagaccgccaattcataacgtcacaggccgcgaaaatcagtggttcgcagcaatttttcactctcatgcttcttggtgcggttgtggtgaccctgttgggcatcttaacagcattgctcctcgctttcctaacgccggtcccccgagaccacctccagggctagaccagcttaatcccgagggcccggcgggtcccggaggtccccccgccatcttgccagctctgccggccccggcagaccctgagccgccgccacggcgtggtggtggggcagatggaaacgccgccgcaggcctcgctatcgcagacgcacctggagggtacgcagaagacgacctagacgaccttttcgccgccgccgcggaggacgatatgtgagtaggcggaggcgccgccgctactacaggcgcagactgagacggggcagacgcagagggcgacgaagaaaacacagacagactctagtcctcaggcagtggcaaccagacgttgtaagacactgtaaaataacaggatggatgcccctagtaatctgtggctccgggagcacacagaacaattttataactcacatggacgactatccccccatgggatactcatacgggggcaacttcacaaacctcaccttctccttagagggcatatatgaacagtttatgtaccacagaaacaggtggtcccggtccaaccacgacctagacctcgccagatacagaggcacaactctaaagctttacagacaccaaaccttagactacatagtcagctacaatagaacaggcccctttcaaatcagtgacatgacctacctcagcacacacccggcattcatgctgctccaaaaacacagaatagtagtacccagcttactaaccaaacctaaaggcagaagatccataaaagtaagaataaagccaccaaaacttatgctaaacaagtggtactttacaaaagacatatgcagcatgggcctgtttcaactacaggccacagcatgcactttatacaatccctggctcagagacagcacaaaaagcccagtcataggctttagagtacttaaaaacagcatctacacaaacctcagtaacctaccagatcatgacggaaccagagaggccatcagaaacaaactacacccagaatccttgacaggacactctccaaatcaaaaaggctgggaatatagctacacaaaactaatggccccaatatactactcagccaacagaaacagcacatataactggctaaactaccaagataactatgtaaacacttatactaaatttaaagataaaatgcaagaaaacttaaaactaatacaaaaagaatacctataccactaccccaacaatgtcaccacagaccttgtaagcaagaacacacttacacatgactggggtatatacagcccctactggctaacacccaccagaataagcctagactgggacactccttggacatatgttagatacaacccactagcagacaaaggcataggcaatgctgtatatgcacaatggtgttcagaacaaaccagcaaactagattcaaaaaagtccaagtgtataatgagagacctgccactgtgggctatattctatggctatgtagactgggtaataaaatccacaggagtcagcagtgcagttacagacatgagaatagccatcaggagcccctacacagaaccggcacttatagggtcaactgaagatgtaggcttcattccagtaagtgacaccttttgcaacggagacatgccgtttcttgctccatacatccctgtgggctggtggatcaagtggtaccccatgattgcacaccaaaaggaagtctttgaggcaatagttaactgtggaccgtttgtgcccagagaccagaccaagcccagttgggaaattactctaggttacaaaatggactggttatggggtggctctcccctgccttcacaggcaatcgacgacccctgccagaagcccacccatgagcttcccgaccccgatagacaccctcgcatgctacaagtctcagacccgacaaagctcggaccgaagacagtgttccacaagtgggactggagacgtgggatgcttagcaaaagaagtattaaaagagtccaagaagactcaagcgatgatgaatatgttgcagggcctttaccacgaaaaagaaacaagctcgacaccaggaccgcaggtcttcaaacccccgaaaaagaaagttacactttactccaagccctccaagactcggcggaagagagcccctcgagccaagaacaagcaccccaagaagaaaaccaaaaagaggcgctcctacagcagctcgagctccaaaagcagcaccagcgagtcctcaaacgaggcctcaaactcctcctgggagacatcctccgactccgccgaggagtccactgggaccccctcctgtcctaattcagggtccttctatcccagacctgcttttccctaacacacaaaaaaaaaaactattttccaactacgactgggtgtgcgagtacgagctggccaaatggatggatcgccccttgcggcactacccatcagacccccctcactacccctggctaccaaaaaagcctgctacccctcctacatgtagagtaagtttcaaattaaagctcgatgcctaaaattcaaggccgtgggtgtttcacttcatcggtgtctacctctaaaagtcactaagcactccgagcgtaagcgaggagtgcgacccccctgcccggtagcaacttcctcggggtccggcgctacgccttcggctgcgccggacgcctcggaccccccctcgacccgaatcgctcgcgcgattcggacctgcggcctcgggggggtcgggagctttactaaacagactccgagtcgctcttggactctgagggggcgtacagcaacgaaagtgagtggggccagacttcgccatagggcctttaacttccgggtgcgtaagggggtcgccattttagcttcggccgccattttagaccctcgcgggcctccgtagtcgcgtattagtgacgtcacaaacgccatcttgactgtgacgtcaaagtcacgtgggcagggcgtgcctaaacccggaagcatccctggtcacgtgacctgacgtcacggccgccatcttgtgcgtccgccattttgtgacttccttccgctttttcaaaaaaaaagaggaagtatgacgtcgcatgcgcgggtccccccctcggggggggctctgcccccccggcccccccccccgggctaaatccaccgcgcatgcgcgaccacgcccccgccgccattttgtacagcccgccaatttctgttcaaacagaccaatcaggaccttctacgtacacttcctggggcgtgtctacgaggtctatataagcaacagcggtgacgaatggtagagtttttcttcgcccgtccgcggcgagagcgcgagcgaagcgagcgatcgagcgtcccgtggg

SEQ ID NO: 438 - protein, 678 aa, Alphatorquevirus sp.
LRRGRRRGRRRKHRQTLVLRQWQPDVVRHCKITGWMPLVICGSGSTQNNFITHMDDYPPMGYSYGGNFTNLTFSLEGIYEQFMYHRNRWSRSNHDLDLARYRGTTLKLYRHQTLDYIVSYNRTGPFQISDMTYLSTHPAFMLLQKHRIVVPSLLTKPKGRRSIKVRIKPPKLMLNKWYFTKDICSMGLFQLQATACTLYNPWLRDSTKSPVIGFRVLKNSIYTNLSNLPDHDGTREAIRNKLHPESLTGHSPNQKGWEYSYTKLMAPIYYSANRNSTYNWLNYQDNYVNTYTKFKDKMQENLKLIQKEYLYHYPNNVTTDLVSKNTLTHDWGIYSPYWLTPTRISLDWDTPWTYVRYNPLADKGIGNAVYAQWCSEQTSKLDSKKSKCIMRDLPLWAIFYGYVDWVIKSTGVSSAVTDMRIAIRSPYTEPALIGSTEDVGFIPVSDTFCNGDMPFLAPYIPVGWWIKWYPMIAHQKEVFEAIVNCGPFVPRDQTKPSWEITLGYKMDWLWGGSPLPSQAIDDPCQKPTHELPDPDRHPRMLQVSDPTKLGPKTVFHKWDWRRGMLSKRSIKRVQEDSSDDEYVAGPLPRKRNKLDTRTAGLQTPEKESYTLLQALQDSAEESPSSQEQAPQEENQKEALLQQLELQKQHQRVLKRGLKLLLGDILRLRRGVHWDPLLS

SEQ ID NO: 439 - DNA, 3621 bp, Alphatorquevirus sp.
cgggagccgaaggtgagtttacacaccgcagtctaggggcaattcgggcacgggtctggccgggctatgggcaagactcttaaaaaatttccccgctgtgttcttcggcaggacatcaagtcatgccgtggcgaccgccggtgcataacgtcccgggcagggaaagccagtggtttgcaagcgtttttcactcgcatgcagctttttgcggctgcggtgacgttgtcgggcatcttactagcattgttcctcgctttcctaacgccggtcctccgagaccacctccaggactagaccagcccaacctgggagggccggaaggtcccggaggtccccccagagccctgccagctctgccggccccggcagagcctgagccggcaccacgccgtggtggtggggaagatggaggcggcgccgctggggccgccgccgccggagaccatggaggatacgaagaaggagatctagaagatcttttcgccgcggccgccgaagacgatatgtgagtaggcggtggcgccgccgcaatttcaggcgcagacgcagacggggcagacgcagggggcgacgaaagagacataaacccacccttgtactcagacagtggcaacctgacgtagtcagaccctgcaaaataacaggatggatgcccctaattatctgtgggtcaggaagcacccagttcaactttataacccacatggatgactttcctcctatggggtccacctacgggggcaacttcaccaaccttaccttctcgttagaagcagtatatgaacagtttttgtaccacagaaacaggtggagctcctctaaccatgacctagacctggcaagataccagggaaccaccctaaaactgtacaggcacgaatacctagactacataattagctacaacagaacaggcccttttcagatcagtgacatgacctacctcagcactcaccctgccttcatgctactacaaaaacacagaatagtagtgcccagctttaagaccaagccacacgggcgcaggtccataaaagttagaataaagcccccaaaactcatgctaaacaagtggtacttcacaaaagacatatgcagcatgggcctcttccagctacaggccacagcatgcaccttaaacaacccctggctcagagacaccacaaaaagcccagtcataggcttcagagtacttaaaaacagcatatacacaaacctcagcaacctacctgaccatgaaggtgccagacaatccattagaaatagactacacccagatagtctcacaggctcatctccaaaccaaaaaggttgggagataagctacacaaaactaatggctccaatatattaccaagccaacagaaacagcacatacaactggctaaactaccaagacaactacaaaactacctacgaagtatttaaaaaaaaaaggaatgaaaatttaactctaatacaaaaagaatacacataccactatcccaacaatgttaccatagacataataggtaaaagcacacttacacatgactggggcatatacagtccctactggctaactccaacaagaatcagcctagactgggaaacaccctggacatatgttagatacaacccactagcagacaaaggcataggcaatgttgtatacgcacagtggtgctcagaacagagctgcaaagtagaccaaaaaaagagcaagtgcataatgagagacctgccactgtgggtaatattttatggctacgtagactggttagtgaaatccacaggcgtcagcagcgcagtcactgacatgagaatagccattataagtccctacaccgagccggcacttatagggtcaacaccagacgtaggcttcattccagtaagtgacaccttttgcaacggagacatgccgtttcttgctccatacatccctgtgggctggtggatcaagtggtaccccatgattgcacaccaaaaggaagtgtttgaagcaatagttaactgtggaccgtttgtcccacgagaccagacgaaaccctcttgggaaattaccatgggttacaaaatgaactggaaatggggcggctctcccctgccttcacaggcaatcgacgacccctgtcagaagcccacccatgagctacccgatcccgatagacaccctcgcatgctacaagtctcagacccgacaaagctcggaccgaagacagttttccacaagtgggactggagacgtgggatgcttagcaaaagaagtattaaaagagtccaagaagactcaagcgatgatgaatatgttgcaggacctttgcaaagaaaaagacacaagatggataccagagccgcaggcctccaaacccccgaaaaagaaagctacactttactccaagccctccaagactcggcagaagagaccctctcgagccaagaacaagcaccccaagaaaaagaggtccaagaagaagcgctcctggagcagctccagctccagaaacagcaccagcgagtcctcaaacgaggcctcaaactcctcctgggagacgtcctccgactccgccgaggagtccactgggaccccctcctgtcataattcagggtccctctatcccagacctgcttttccctaacacacaaaaaaaaaacaaattttccaactacgactggtcagtagagtacgagctggccaaatggatggatcgtcctttgcggcactacccatccgacctccctcactacccctggctaccaaaaaagccacctacccctcctacatgtagagtaagtttcaaattaaaactagattcctaactttcaaggccgtgggtgtttcacttcatcggtgtctacctctataagtcactaagcactccgagcgaagcgaggagtgcgacccccctgcccggtagcaacttcctcggggtccggcgctacgccttcggctgcgccggacgcctcggacccccccgggtgaacagcaacgaaagtgagtggggccagacttcgccataaggcctttaactttgggtcgtatgtcagtgtcttccgggttcgcctgggggccgccattttagcttcggccgccattttaggccctcgagggcctccgtagtcgcgttttagtgacgtcacggcagccatcttggtcctgacgtcacagtcacgtgggaagggaacacgtgatcccggaagtgtccctggtcacgtgacttgacgtcacggccgccattttgtgctgtccgccatcttgtgacttccttccgctttttgtaaaaaaaagaggaagtatgacgtagcggcggggggggcggcgcgcttcgcgcgccgcccaccagggggcgctgcgcgccccccccgcgcatgcgcgggtcccccccccgcggggggggctccgcccccccgccccccccccgtgcttaatccaccgcgcatgcgcggccacgcccccgccgccattttgtacagcccgccaatttctcttcaaacagaccaatcacaatctactacgtgcacttcctggggcgtgtcttcccagtctatataagcagaggcggtgacgaatggtagagttttttctcgcccgtccgcggcgagagcgcgagcgaagcgagcgatcgagcgacccgtggg

SEQ ID NO: 440 - protein, 644 aa, Alphatorquevirus sp.
MPLIICGSGSTQFNFITHMDDFPPMGSTYGGNFTNLTFSLEAVYEQFLYHRNRWSSSNHDLDLARYQGTTLKLYRHEYLDYIISYNRTGPFQISDMTYLSTHPAFMLLQKHRIVVPSFKTKPHGRRSIKVRIKPPKLMLNKWYFTKDICSMGLFQLQATACTLNNPWLRDTTKSPVIGFRVLKNSIYTNLSNLPDHEGARQSIRNRLHPDSLTGSSPNQKGWEISYTKLMAPIYYQANRNSTYNWLNYQDNYKTTYEVFKKKRNENLTLIQKEYTYHYPNNVTIDIIGKSTLTHDWGIYSPYWLTPTRISLDWETPWTYVRYNPLADKGIGNVVYAQWCSEQSCKVDQKKSKCIMRDLPLWVIFYGYVDWLVKSTGVSSAVTDMRIAIISPYTEPALIGSTPDVGFIPVSDTFCNGDMPFLAPYIPVGWWIKWYPMIAHQKEVFEAIVNCGPFVPRDQTKPSWEITMGYKMNWKWGGSPLPSQAIDDPCQKPTHELPDPDRHPRMLQVSDPTKLGPKTVFHKWDWRRGMLSKRSIKRVQEDSSDDEYVAGPLQRKRHKMDTRAAGLQTPEKESYTLLQALQDSAEETLSSQEQAPQEKEVQEEALLEQLQLQKQHQRVLKRGLKLLLGDVLRLRRGVHWDPLLS

SEQ ID NO: 441 - DNA, 3619 bp, Alphatorquevirus sp.
cgggtgccggaggtgagtttacacaccgcagtcaaggggcaattcgggctcgggactggccgggctatgggcaaggctcttaaagcgtacgtcccccgctatgtttctcggcagggtgtggaggaaacagaaaaggaaagtgcttctgctggctgtgcgagctgcacagaagacatcttccatgagtatctggcgtccccccctcgggaatgtctcctacagggagagaaattggcttcaggccgtcgaaggatcccacagttctttttgtggctgtggtgattttattcttcaccttactaatttggctgcacgttttgctcttcaggggcccccaccggagggtgctccgcctcggccgaggccgccgctcctgagagcgctgccggcacccgaggtccgcagggagacgcgtacggagaacccgggcgcctccggtgagccatggcctggcgatggtggtggcagagacgatggcgccgccgcccgtggccccgcagacgatggagacgcctacgacgccggagacctcgacgacctgttcgccgccgtcgaagaagagcaacagtaaggaggcggaggtggaggggcagacgtgggcgacgcacatacacccgacgcgcggtcagacgcagacgcagacccagaaagagacttgtactcactcagtggagcccccagacagtcagaaactgctccatcaggggtatagtgcccatggtaatatgcggacacacaaaagggggtagaaactatgccatccacagcgaagactttactacacagatacaacctttcgggggcagttttagcacgaccacctggtcgctgaaagtactctgggacgaacaccaaaaatttcaaaacaggtggtcctatccaaacacacagctagacctcgccagatacaagggagtcaccttctggttctacagagaccaaaagacagactacatagtacagtggagcagaaatcccccttttaagctaaacaaatacagcagctccatgtaccacccaggcatgatgatgcaggcaaaaaagaaactagttgtacctagtttccagaccagacctaaaggcaaaaagagatacagagtcagaataagaccccccaacatgtttgctgacaagtggtacactcaagaggacctgtgtccggtacctcttgtgcaaattgtggtttctgcggccaacctgctacatccgttctgcccaccacaaacgaacaacccttgcatcaccttccaggttttgaaagacatatatgacaactgcataggagttaactctacacaagaaacatcttataatatacttacagacatattatataacacctgtacatactatgaaacagtacaagtattggctcaattatctcccaatttccagccagctctaaaacccagcagcggacattcaaacgtaacaaaaacactaggagacgcagtagatgacttgaaatacaactcaggaaagttttatacaaaacaaaacccagtatttggcatgtgtaaatacaacccaacaaaagatactatgacagctgctaatcagtggttctgggacaaccttatgcatacaaatgacttacactcctcatatggcaaggcaaacttaaaatgcatggagtaccacacaggcatatacagctccatattcctaagtccccagagaggaatagaattcccagcagcataccaagacgtcacatacaatccaaactgtgacagagcagtaggtaacagggtctggttccaatacagtacaaaaatgaacacacactacgatgccacccaatgcaaatgtgtcttagaaaacatacccctctgggcggccttccatggctactcagactttatagagcaggagctcagcataagctcagaaatccacaactttggcgtagtggtatttcaatgcccgtacacctttcccccctgctacgacaaaaacaggccaaacaaaggatacgtgttctatgacaccacctttggtaatggaaagatgccagacgggtcagggcacatacccgtctactggcaacagaggtggtggatcagactagccttccaggtacaagtcatgcacgactttgtactctgcggcccctttagctacaaagatgacctagcgaacaccacactcacagccagatacaaatttagattcaaatggggcggtaatatcatccccgaacagattatcaagaacccgtgtcaaagacagcagtccctcgcttcctaccccgatagacaacgtcgcgacctacaagttgttgacccatcaaccatgggcccgatctacaccttccacacatgggactggcgacgggggctttttggtgcagatgctatcaagagagtgtcacaaaaaccgggagatgctctccgctttacaaaccctttcaagagacccagatatcttcccccgacagacggagaagactaccgacaagaagaagacttcgctttacaggaaaaaagaaggcgcacatccacagaagaagtccaggacccggagagccccccgcaaagcgcgccgctcctacagcagcagcagcagcaccgggagctctcagtccagctcgcggagcagcagcgactcggagtccaactccgatacatcctccaagaagtcctcaaaacgcaagcgggtctccacctaaaccccctattattaggcccgccagaaacaaggtctatctctttgagccctccagaggcctacaccccatagtgggcagagaggcctgggaggacgaatacctgtgctgtaagtactgggatagacctcccagaaccaaccacctagacatgcccacctatccctggatgcccaccaacttcaaagtcagcttcaaacttggatttaaaccctaaataaaaatttcaaggccgtacactgttcacttgtcggtgtctacctcttaaggtcactaagcactccgagcgcagcgaggagtgcgacccttctgggtgggtgcaacgccctcggcggccgcgcgctacgccttcggctgcgcgcggcacctcggacccccgctcgtgctgacacgctcgcgcgtgtcagaccacttcgggctcgcgggggtcgggaattttgctaaacagactccgagttgccattggatactgtagctgtgaatcagtaacgaaagtgagtggggccagacttcgccataaggcctttatcttcttgccattggacagtgtcgggggtcgccataggcttcgggctcggttttaggccttccggactaccaaaatggcggattccgtgacgtcatggccgccattttgagtaaggcggaacaggctgtcaccccgtgtcaaaggtcaggggtcagccttccgctttggttgtatctgtgtagtaaagtcttcgctgtggatggcatagtttctacccccccgcggggggctccgccccccggtcccccccccgaagatcgtcactaaccacgtgactcctctcgcccaatcagagtctatgtcgtccatttcctgggcatggtctacatcctgatataagtagctgcacttccgaatggctgagttttccacgcccgtccgcggcgagatcgcgacggaggagcgatcgagcgtcccgaggg

SEQ ID NO: 442 - protein, 765 aa, Alphatorquevirus sp.; identical to SEQ ID NO: 153

SEQ ID NO: 443 - protein, 171 aa, Alphatorquevirus sp.; identical to SEQ ID NO: 154

SEQ ID NO: 444 - protein, 187 aa, Alphatorquevirus sp.; identical to SEQ ID NO: 155

SEQ ID NO: 445 - DNA, 3610 bp, Alphatorquevirus sp.
cgcggcgtctccatcgttgccaccaccagcttcaaggggcaattcgggctcgggactggccgggctatgggcaaggctcttagggtcatcgctctgaaaaatgttttttggcaggccttacaggaaaaagaaaagggcgctgctactgtctcagctgccagatccaaagaagaaaccacctggtgatatgagctggcgccccccggtacacaatgccgccggcattgatagacagttctttgaagcctgctttcgatgccacagtagttgctgcggctgcggcagctttattaatcatattaatgtactggctgctcgctatggctttactggggggccggcgccgccaggtggtcctcggccggcgccccaagtgaggcccgcgcttcccgcgcctgagcccgacccggaggcccacaaccgtgagccatggcgtggagctggtggtggcaacgatggagacgccgcggctggaaacccaggcgccgccgctggagacgcctacgatggagaagacctcgacgccctgttcgccgccgtcgccgaagacgcagagtaaggagacggaggtgggggaaaagacgggggcgacgcagacggtacacccatagacgaaagacacgcattaagcccagaaactttaaaaagaaactaatactgactcagtggcacccctctatagtaagacgctgctttatcaggggcatagtccccatcctaatatgcgggcacacaaaatggaacagtaactacgccctgcatagcgaggactacacggaagagggccgctaccctcacggagggtccctctccaccactacgtggtctctaaaggtgctgtacgacgagtacctaaagcaccacaacttctggggctacccaaacacccagctagacctggccagatacaggggctgcacttttaccttctacagacacaaaaagactgactttatagtatggtggaacagaaagcctccctttaaactcaacaagctgagctgcccttcgtttcacccaggcatgctcatgcagcaaaaacacaaggtgctaattcctagctttgacactaaacccgggggcagagctaaaattaaagtcaaaataaaaccccccactctgttagaggacaagtggtacactcagcaagacctgtgtccggtaaacctggcgcaacttgtggttactgcggctgactttcaacatccgttctgctcaccacaaacgaacactccaaccacaaccttccaggtgttgaaagaaatgtactatgacaccataggcatagttgacacacaagaaacttacaattcagttaataataaaagtgactctaacacatacactacatttatgagcaatttagtaacaaagctatactcaacaggatcatactggaactcctttcacacagcagaatatttaaaccccaacataacagacacacacaacaacaaaatatttagtcagagaggcacaggattaacagactggctatcaggaaaaggcgacaacaaatttaacacaggcaacagcacccaatttggccacaatacctataatcctaacttaattaacctaagagcagcaaacgattcctactggacagcactcaccaaacaaaataaccaagctacacaaatagggcaagcacgcgacaaacactttgagtatcacacgggcatttacagtcccatattcctcagcagacacagaagcacactaaactttgccagggcctaccaggacgtcacatacaatccaaactgtgacagaggagttaaaaacagggtgtgggtgcaggccctaactaaggccaccacagagttcgatgaaaaacgcagcaagtgcgttatcactgacctgcctctctgggccgctctccactgctaccacaactttgtagaagaggagctaggcatctcctcagaaatctacaacgcctgtatagtgtgtgtacagtgcccttacacctttccccctatgtatgacaagaaaaacccaaacaaggggtacgtgttctatgacaccctattcggaaacggaaagaccccagacggacgcggacaggtagacgtgttctggcagcagcggtggtacccccgcatggcctgccaggtgcaagttatgcacgacatcaccatgaccggaccgttctcttaccacgacgaactagtgagtacacaacttactgctaaatacaaatttgacttcatgtggggtggaaacatgatctcctcacagatcatcaagaacccctgcaaagacacagacatggacaccacctatcccagtagacagcgtcgcgacttacaaattgttgacccacactccatggggccctccttcgcgttccacacgtgggactacagacacggactgtttggtaaagatgctatcgacagagtgtcaaaacaacaagactatgctccagagtatcctaacccatacaaaaagcctagatattttcccccaacagacagggcagagctccaagggcaagaagaagactagagtttccaagtcgaaagcgaggggtcgtcgtcagaagagagcgatcaagaagcccaagaagaggaggtactccagttccagccaggacagcagctccagcaactccacctgcagctcgcgcagcagcagcagatcgggcagcagctccgattcctgttccaacaaatgctcaaaacccaggccaatctgcacctaaacccatatacatacacccagcgataaacagggtgttcatgtttgaaccccagggcccgaggcctataactaccagagaggggtgggaggacgaatacaccactgccggcatatggggccggcccgtccgctccttctacacagacacccccttctaccccgaggtccctaaaatgcctcctcagtttcatgtatctttcaaactcggctggaaataaaaatgcaaggcctttcactgttcacttgtcggtgtctacctcttaaggtcactaagcactccgagcgttagcgaggagtgcgacccttccccctggtgcaacgccctcggcggccgcgcgctacgccttcggctgcgcgcggcacctcggacccccgctcgtgctgacacgcttgcgcgtgtcagaccacttcgggctcgcgggggtcgggaattttgctaaacagactccgagttgccattggacactgtagccgtgaatcagtaacgaaagtgagtggggccagacttcgccataaggcctttatcttcttgccatttgtccgtgttgggggtcgctccaaacgcggaccccgttttcagcccttccggactacaaaatcggccattttagtgacgtcatggcggccattttaagtaaggcggaagcagctccactatacaaaatggcggcggagcacttccggcttgcccaaaatggcggcaaagctcttccgggtgaaaggtcggctagtacgtcacaagtcacgtggggagggttggcgtgtaacccggaagtcaatcctcccacgtggcctgtcacgtgactgctacgtcacggccgccattttagttcacaaaatggcggacttccttcctcttttttaaaatttaaccgtcggcggcggcgcctgggtttccagc

SEQ ID NO: 446 - protein, 694 aa, Alphatorquevirus sp.
MAWSWWWQRWRRRGWKPRRRRWRRLRWRRPRRPVRRRRRRRRVRRRRWGKRRGRRRRYTHRRKTRIKPRNFKKKLILTQWHPSIVRRCFIRGIVPILICGHTKWNSNYALHSEDYTEEGRYPHGGSLSTTTWSLKVLYDEYLKHHNFWGYPNTQLDLARYRGCTFTFYRHKKTDFIVWWNRKPPFKLNKLSCPSFHPGMLMQQKHKVLIPSFDTKPGGRAKIKVKIKPPTLLEDKWYTQQDLCPVNLAQLVVTAADFQHPFCSPQTNTPTTTFQVLKEMYYDTIGIVDTQETYNSVNNKSDSNTYTTFMSNLVTKLYSTGSYWNSFHTAEYLNPNITDTHNNKIFSQRGTGLTDWLSGKGDNKFNTGNSTQFGHNTYNPNLINLRAANDSYWTALTKQNNQATQIGQARDKHFEYHTGIYSPIFLSRHRSTLNFARAYQDVTYNPNCDRGVKNRVWVQALTKATTEFDEKRSKCVITDLPLWAALHCYHNFVEEELGISSEIYNACIVCVQCPYTFPPMYDKKNPNKGYVFYDTLFGNGKTPDGRGQVDVFWQQRWYPRMACQVQVMHDITMTGPFSYHDELVSTQLTAKYKFDFMWGGNMISSQIIKNPCKDTDMDTTYPSRQRRDLQIVDPHSMGPSFAFHTWDYRHGLFGKDAIDRVSKQQDYAPEYPNPYKKPRYFPPTDRAELQGQEED

SEQ ID NO: 447 - protein, 152 aa, Alphatorquevirus sp.
MFFGRPYRKKKRALLLSQLPDPKKKPPGDMSWRPPVHNAAGIDRQFFEACFRCHSSCCGCGSFINHINVLAARYGFTGGPAPPGGPRPAPQVRPALPAPEPDPEAHNREPWRGAGGGNDGDAAAGNPGAAAGDAYDGEDLDALFAAVAEDAE

SEQ ID NO: 448 - protein, 59 aa, Alphatorquevirus sp.
MFEPQGPRPITTREGWEDEYTTAGIWGRPVRSFYTDTPFYPEVPKMPPQFHVSFKLGWK

SEQ ID NO: 449 - DNA, 3606 bp, Alphatorquevirus sp.
ggcgcgggaagcgcgggcctcacttggggcgccaaggggcaattcgggctcgggactggccgggctatgggcaaggctcttagggtcatcgctcttaaaaatgtttttcggcagaccttacagaaaaaagaaaagggcgctgtcactgtctggcgtgcgagctccacaggcgaaacggtctcgggacatgacctggcgccccccggtacacaatgccgccggcatcgataggcagttctttgaagcctgctttcgatgccacagtagttgctgcggctgcggcagctttattaatcatcttaatgtactggctgctcgctatggctttactggggggccggcgccgccaggtggtcctcggccggcgccccaagtgaggcccgcgcttcccgcgccggagcccgacccggaggccgacaaccgtgagccatggcgtggagctggtggtggcaacgatggaggcgccgcggctggaaacccaggcgccgccgctggagacgcctacgatggagaagacctcgacgccctgttcgccgccgtcgccgaagacgcagagtaaggagacggaggtgggggaacagacgggggcgacgcagacggtacacccgtagacgaaagagacgcattaaggccagaaagtttaaaaagaaactaatactgactcagtggcacccctctgtagttagacgctgctttatcaggggcatagtccccatcctcatatgcgggcacacaaaatggaacagtaactacgccctgcatagcgaggactacacagaagagggccgctaccctcacggagggtccctctcgaccactacgtggtcactaaaggtgctgtacgacgagcacctaaagcaccacaacttctggggctacccaaacacccagctagaccttgccaggtacaggggctgcaagtttactttttacagacacaaaaagactgactttatagtgtggtggaacagaaagcctccctttaaactaaacaaactgagctgcccgtccttccacccgggcatgctcatgcaacagaaacacaaggtgctaattcctagctttgacactaaacccgggggcagagctaaaattacagtaaaaataaagccccccactctgttagaggacaagtggtacactcagcaagacttgtgtccggtaaacctggcgcaacttgtggttactgcggctgactttcaacatccgttctgctcaccacaaacgaacactccaaccacaaccttccaggtgttgaaagatatgtattataacaccataggcatagttgacacagaagaagcttacccatcagttaatgatacaaatacatctaagacatacaagcaatttatgcaggaattagtacaaaagctatactccacaggttcctactggaactcctttcacacagcagaatacctaaacccgaatgtcacagacactcacaacaggaaaatatttaatactgaaaacacaacactaacaagttggctcacaacaaaaggcaacaactgctttcaaaccggtaacagcacccagtttggctacaactcatacaaacctgaaaaagacaagataatatcagcaaatgaggcatactggaaagcactcacacaacgaaacgaccaggcaacaccaataggacaggctcgtgccaaagaattcgaataccacactggcatctacagccccatatttctcagcagacacagaagcacactaagctttgccagggcctaccaagacgtcacatacaacccaaactgtgacagaggagttaaaaacagggtgtgggtgcagtctctaactagagccaccacagaatttgacgagaaacgcagcaagtgcgttatcactgacctgcctctgtgggccgccctgtactgctaccacaactttgtagaagaggagctaggcatctcctcagaaatctacaacgcctgtatagtctgtgtacagtgtccttatacctttccccccatgtatgacaaaaaaaacccaaacaaagggtacgtgttctatgacgccctgtttggaaacggaaagaccccagacggacgcggacaggtggacgtgttctggcagcagcggtggtacccccgcatggcctgccaggtccaagtcatgcacgacattaccatgacgggacccttctcctaccacgacgaactagtgagtacacaactgactgccaaatacaaatttgacttcatgtggggtggaaacatgatctcctcacagatcatcaagaacccctgcaaagacacagacatggacaccacctatcccagtagacagcgtcgcgacttacaaattgttgacccacactccatggggccctccttcgcgttccacacgtgggactacagacgcggactgtttggtaaagatgctatcgacagagtgtcaaaagaacaagactatgctccagagtatcctaacccatacaaaaagcctagatattttcccccaacagacagggcagagctccaagggcaagaagaagactggactttcgagatccaaagccaggggtcgtcgtcagaagagagcgatcaagaagcccaagaagaggaggtactccagttccagccaggacagcagctccagcaactccacctgcagctcgcgcagcagcagcagatcgggcagcagctccgattcctgttccaacaaatgctcaaaacccaggccaatctgcacctaaacccatatacatacacccagctataaacagggttttcatgtttgagccccagggccccaggccaataactaccagagaggggtgggaggacgagtacacaactgccggcatatggggcaggcccgtccgctccttctacacagacacccctttctaccccgaggttcctaaaatacctcctcagtttcatgtatctttcaaactcggctggaaataaaaatgcaaggcctttcactattcacttgtcggtgtctacctcttaaggtcactaagcactccgagcgttagcgaggagtgcgacccttccccctggtgcaacgccctcggcggccgcgcgctacgccttcggctgcgcgcggcacctcggacccccgctcgtgctgacacgcttgcgcgtgtcagaccacttcgggctcgcgggggtcgggaattttgctaaacagactccgagttgccattggacactgtagccgtgaatcagtaacgaaagtgagtggggccagacttcgccataaggcctttatcttcttgccatttgtccgttgggaggggtcgctccaaacgcggaccccgttttcagcccttccggactacgaaaatggccgatttcgtgacgtcacggcggccattttaagtaaggcggaagcagctccactatacaaaatggcggcggagcacttccggcttgcccaaaatggcggccaagctcttccgggtgaaaggttagcaactacgtcacaagtcacgtggggagggttggcgtataacccggaagtcaatcctcccacgtggcctgtcacgtgactgctacgtcacgaccgccattttagtttacaaaatggcggacttccttcctcttttttaaaatttaaccgtcggcctccgggtcgggctcc

SEQ ID NO: 450 - protein, 768 aa, Alphatorquevirus sp.
MAWSWWWQRWRRRGWKPRRRRWRRLRWRRPRRPVRRRRRRRRVRRRRWGNRRGRRRRYTRRRKRRIKARKFKKKLILTQWHPSVVRRCFIRGIVPILICGHTKWNSNYALHSEDYTEEGRYPHGGSLSTTTWSLKVLYDEHLKHHNFWGYPNTQLDLARYRGCKFTFYRHKKTDFIVWWNRKPPFKLNKLSCPSFHPGMLMQQKHKVLIPSFDTKPGGRAKITVKIKPPTLLEDKWYTQQDLCPVNLAQLVVTAADFQHPFCSPQTNTPTTTFQVLKDMYYNTIGIVDTEEAYPSVNDTNTSKTYKQFMQELVQKLYSTGSYWNSFHTAEYLNPNVTDTHNRKIFNTENTTLTSWLTTKGNNCFQTGNSTQFGYNSYKPEKDKIISANEAYWKALTQRNDQATPIGQARAKEFEYHTGIYSPIFLSRHRSTLSFARAYQDVTYNPNCDRGVKNRVWVQSLTRATTEFDEKRSKCVITDLPLWAALYCYHNFVEEELGISSEIYNACIVCVQCPYTFPPMYDKKNPNKGYVFYDALFGNGKTPDGRGQVDVFWQQRWYPRMACQVQVMHDITMTGPFSYHDELVSTQLTAKYKFDFMWGGNMISSQIIKNPCKDTDMDTTYPSRQRRDLQIVDPHSMGPSFAFHTWDYRRGLFGKDAIDRVSKEQDYAPEYPNPYKKPRYFPPTDRAELQGQEEDWTFEIQSQGSSSEESDQEAQEEEVLQFQPGQQLQQLHLQLAQQQQIGQQLRFLFQQMLKTQANLHLNPYTYTQL

SEQ ID NO: 451 - protein, 167 aa, Alphatorquevirus sp.
LAGLWARLLGSSLLKMFFGRPYRKKKRALSLSGVRAPQAKRSRDMTWRPPVHNAAGIDRQFFEACFRCHSSCCGCGSFINHLNVLAARYGFTGGPAPPGGPRPAPQVRPALPAPEPDPEADNREPWRGAGGGNDGGAAAGNPGAAAGDAYDGEDLDALFAAVAEDAE

SEQ ID NO: 452 - protein, 138 aa, Alphatorquevirus sp.
LDFRDPKPGVVVRRERSRSPRRGGTPVPARTAAPATPPAARAAAADRAAAPIPVPTNAQNPGQSAPKPIYIHPAINRVFMFEPQGPRPITTREGWEDEYTTAGIWGRPVRSFYTDTPFYPEVPKIPPQFHVSFKLGWK

SEQ ID NO: 453 - DNA, 3606 bp, Alphatorquevirus sp.
taaggcctgtctgtgtggtttaccctggcggtcaaggggcaattcgggctcgggactggccgggctatgggcaaggctcttagggttttcgctcttaaaatgcgcttttctcgcatatacaggacgcccaaaccgaaaggtgccctgtcactgccgcctgtgccagctacaccggctaaacgggctcagggtgatatgagctggagaccacccgttcacgatggggcaggtatcgagaggcagttctttgaatcctgctttcgaacccactccggttgttgtggctgtggcaattttattgctcatctcaatttactggctgctcgctatggttttactggggggccggcgccgcctggtggtcctggggcgctccccgcactgagacgggcgctgccggcgcccccggcgccagagcctaaccccgaacagccatggcgtggagctggtggtggcagagatggcgccgacgaccgtggggccgacgaagacgctggaggaaactacgcagccgaagacctagacgccctgttcgccgccgtcgcaggagacgtcgaagaacgagagtaaggaggcgccgcggtggtcggtggggacgcagacgggggcgacgcacttttaagagacgcagacgcaggcgaccctactataaacctaaaaagaaactagttcttacccagtggcacccccagactgtaagacgatgtgccataaggggcatgattcccctaatactgtgcgggcacactacctggaacagaaactatgccatgcgtagcgaagactacccagaacagggtagatatccctttggggggtccgtcagtaccactacgtggtcccttagggtgctgttcgacgagcatcagaaacacagaaatacatggagctaccccaacacccagctagacctagccagatacaaacgctgcagattcacattttacagacacaaaaagactgactttatagtcacctggagccgcaggcccccctttaagcttaacaagtacagcaccgccatgatgcacccaggcatgatgatgcagcagaaatataaattattaatcccaagctgggacactaaacctaagggcagacccaaagtgtccgttacaattaggccccccaccctctttgaggacaagtggtatacgcaacaggatctatgtgatgtaaatcttgtgtcacttgcggtttctgcggcgagcttctcacatccgttcagccaaccgtcaagtaacaacatttgcacaaccttccaggtccttaaagataattactacccagttataggcgttttaactgactataataatcaaaaagcaggcaatgacaaagactacaaagcaaacacagacaacttagaaaactggctgtacaaaacaggcagtctataccacacatttcacacacaagaatacttaaatccaagtagaaaatttgaccaaaaatcaggtgcagcaaaagaaattaatgaaaaagcgtggctaggtaaaaacaatgcaaactttcaaacaggcaaatcgtccctgtttggctttaacacatacaaacctgacaaagagaagttacttaagattagaaagcagtactttcaaacactaacacaagaaaatgacttacacagcaaatatggtaaagccaatgcagagcaatttgagtaccacctggggtggtactcccccatatttctaagcagacacagaagcaacttagagtttgccacagcataccaggatgtcacttacaatccaaactgtgacaggggcaagggcaacagaatctggttccagtacggaaccaagatggacacctggttcagtgagaaacagagcaagtgtgttttagtagatttgcccctgtggtgcatgttctatggctatgctgacttcatagaggcagagctaggcatttctgccgagatccacaatgtaggcatagtagtagtccagtgcccctacacgttcccccccatgtttgacaaaacacagccagacaaaggatacgtgttttatgacatgctgtttgggtcaggaaagatgccagacggttcaggccaagtacccatctactggcagcagagatggtacccccgtatggcctttcagctacaagtcatgcacgacataacactaacagggccctttagctacaaagatgatctagtaatgacagagctggccgccaaatacaggttcgatttcttatggggtggcaatatgatttccgaacagattatcaagaacccgtgcagagacgaaggcatggaaccctcctaccccggtagactccgtagggacatacaaattgttgacccacgctccgtgggccctccctgggttttccatacctgggactacagacggggactctttggttcagaggctatcaaaagagtgtcaacaaaaccgactgatgatgactggattacagtgccttacaaaaagccaaagtattttccccccacagaaagaggagaccaaaatcaagaagaaagctggtctttacaggtgcaaaagctcctcatatcgtcagaagagacagaagcgaaagcccagacggaggagcagcagcagcagcagcagctcctccgactccaactccaagagcaacagcagctcggagtcagactcagactgctctgtcaagagctgctcaaaacgcaagcgggtctccacatgaaccccctgttcttctcccagcaactaacagggtttacatgttccccccagagccggcagttagaccaatcttaggcaggcaggcctgggaggacgagttcaccacctgcaagtactgggaccgtcccgccagggtaaaccacacagacaggccttactacccttgggcacctactccccccccccaatttcatgtatccttcaaacttggctggaaataaacttgcaaggccgtggaactctcgcttgtcggtgtctacctcttaaggtcactaagcactccgagcgttagcgaggagtgcgaccctccgccaaggggcaactccctcggagtccggcgctacgccttcggctgcgccggacacctcggaccccccctccacccgaaacgcttgcgcgtttcggaccttcggcgtcgggggggtcgggggctttgctaaacagactccgaggtgccattggacactgagggggcgaacagcaacgaaagtgagtggggccagacttcgccatagggcctttatcttctcgccatttgtccgtggggaggggtcgccataacgcggaccccgtttttaccccttccggactacaaaaatggcgtctttggtgacgtcacggccgccattttaagtaaggcggaagcagctccactctctcacaaaatggcggcggagcacttccggcttgcccaaaatggagggcaagctcttccgggtaaaaggtcggcagctacgtcacaagtcacgtgggtgggtgacgctgtaaacccggaagcaatcctcccacgtggctgttcacgtgactgctacgtcacagccgccattttgttttacaaaatggccgacttccttccgcttttttaaaaaaaggcgccaaaaaacggccgcggcgggggcggggagtaggtgcccaagggtag

SEQ ID NO: 454 - protein, 774 aa, Alphatorquevirus sp.
MAWSWWWQRWRRRPWGRRRRWRKLRSRRPRRPVRRRRRRRRRTRVRRRRGGRWGRRRGRRTFKRRRRRRPYYKPKKKLVLTQWHPQTVRRCAIRGMIPLILCGHTTWNRNYAMRSEDYPEQGRYPFGGSVSTTTWSLRVLFDEHQKHRNTWSYPNTQLDLARYKRCRFTFYRHKKTDFIVTWSRRPPFKLNKYSTAMMHPGMMMQQKYKLLIPSWDTKPKGRPKVSVTIRPPTLFEDKWYTQQDLCDVNLVSLAVSAASFSHPFSQPSSNNICTTFQVLKDNYYPVIGVLTDYNNQKAGNDKDYKANTDNLENWLYKTGSLYHTFHTQEYLNPSRKFDQKSGAAKEINEKAWLGKNNANFQTGKSSLFGFNTYKPDKEKLLKIRKQYFQTLTQENDLHSKYGKANAEQFEYHLGWYSPIFLSRHRSNLEFATAYQDVTYNPNCDRGKGNRIWFQYGTKMDTWFSEKQSKCVLVDLPLWCMFYGYADFIEAELGISAEIHNVGIVVVQCPYTFPPMFDKTQPDKGYVFYDMLFGSGKMPDGSGQVPIYWQQRWYPRMAFQLQVMHDITLTGPFSYKDDLVMTELAAKYRFDFLWGGNMISEQIIKNPCRDEGMEPSYPGRLRRDIQIVDPRSVGPPWVFHTWDYRRGLFGSEAIKRVSTKPTDDDWITVPYKKPKYFPPTERGDQNQEESWSLQVQKLLISSEETEAKAQTEEQQQQQQLLRLQLQEQQQLGVRLRLLCQELLKTQAGLHMNPLFFSQQLTGFTCSPQSRQLDQS

SEQ ID NO: 455 - protein, 187 aa, Alphatorquevirus sp.
LSVWFTLAVKGQFGLGTGRAMGKALRVFALKMRFSRIYRTPKPKGALSLPPVPATPAKRAQGDMSWRPPVHDGAGIERQFFESCFRTHSGCCGCGNFIAHLNLLAARYGFTGGPAPPGGPGALPALRRALPAPPAPEPNPEQPWRGAGGGRDGADDRGADEDAGGNYAAEDLDALFAAVAGDVEERE

SEQ ID NO: 456 - protein, 159 aa, Alphatorquevirus sp.
LDYSALQKAKVFSPHRKRRPKSRRKLVFTGAKAPHIVRRDRSESPDGGAAAAAAAPPTPTPRATAARSQTQTALSRAAQNASGSPHEPPVLLPATNRVYMFPPEPAVRPILGRQAWEDEFTTCKYWDRPARVNHTDRPYYPWAPTPPPQFHVSFKLGWK

SEQ ID NO: 457 - DNA, 3598 bp, Alphatorquevirus sp.
gcgggggcgcgcgcgctacgcgcgcgcgcagtcaaggggcaattcgggctcgggactggccgggctatgggcaaggctcttagggttatcgctctttaaaacatgtttcttggcagggtgtggagaaagaaaaggaaagtgttactgccgacactgcgagtggtaccggtaccacaaccttcacctatgagcagtcagtggagaccccctgttcacaatgtccaggggcaggagcgaaattggtatgagtccttctaccgcggccatgcttgcttttgtggctgtggtgatgctgttactcatattaatcatctggcggctcgttttggacgtcctcccactacctcaactccccgaggaccacagacaccttcagtaaccccgtacccggccctgccggcccctgagcccacgcccgagccatggcgtggcgccggtggcgatggcgaccgtggtggagacgccggaggcgccgccggtggagaagaagacgccggaggcccagacgacgccgcccttatcgacgccgtcgacttcgcagagtaaggaggcgcagggggcggtggaggcgcgcttacagacgttgggggcgacgcaggcgcagacgcagacacaaaaaaagacttgtactgactcagtggcagccccccatagttaagaagtgcctaataatagggtacgacccccttataatatgtggcataaacagaacagcttttaactacactacacacttagaagatttcacttttaacaacgagagctttggaggcggactatgcacaacacagtacacgctaagaatactattccaagaaaagctcgcccaacacaacttctggacggccagcaacgaggacctggacctggccaggtacctgggtggagcactaatactgttcagacacccaactgtagattttttagtaagagtgcgcaccagtcctccatttaatgacacagacatgactgccctcagtctgcacccaggcatgatgatgctcagcaaaaaggttattaaggtacccagccttaaaaccagacccagcagaaaacactatataaaaattaaattcggagcccctaaactgtttgaagacaagtggtacccccagaacgagctatgtgatgtaactctggtcagcatacaggcaaccgcagctgatttccaatatccgttcggctcaccactaacgaactcagtctgttgcaacttccaggttcttaacagcaactatgacaaagcacttagtatacttaacactactcaggtagcagaagacctatatactaaaagacaaaactgttacaattttcttttacaacaatacagctactacaacacaaaacagacagtagctcaacttaaatttgacttttttccaaaacaaaaccccaaaatgccaacaacaaataatgcagacttatccaaatctccagagtctcttactaaaagcaacgttcagacgcaatacccacactgggactctctatatggtggactagcatatggctttacacccacatctcatgcagacaacacaaaccaagcaaaagacttagaaagtcaaatgctacaagccaatcaattctatacaaaagcaggcaaaaaactaataaagggctttacacctataccacataataacaaggcagacacaaacatatttgactactacacaggcatgtactgtagcatatttctatcctccggaaggtccaacccagaagttaaaggcagctatacagacatatcttacaacccactcacagataaaggtgtaggcaacatgatatggatagactggctaagcaaaccagacagcatatacgaccccgctaagagcaaatgcctactaaaagactttcccctatggtgcatggtatacgggtacgcagactactgcagaaaagttacaggagactcagccatactactagactgcagagtagtaataagatgcccgtacacatacccccaacttataaaacacaacaatgacaactggggattcgtcccctacagcgaaaactttggactgggtagaatgcccgggggcaatccaaacccctcgaccagaatgagactgcactggtacccaatgctgctacaccaaatggaagtattagagtgcttagcacagaccggaccgtttgcctaccacggagacgagagaaagactgtactgactgccaaatacaagttcagatggaagtggggaggaaaccctgtctttcaacaggttcttagagacccgtgcaccggaggtgccgtggcgccccacaccagtcgacaccctcgctcaatacaagtccttgacccgaagcaccaagccccggagtacctgtttcacaagtgggacttcagaaggggactctttagcactaaaggtattaaaagagtgtcagaacaaccaacacatgatgagtttcttacaggcagcagcaagagacccaagaaagatacaggggctccgctccaagaagaagagcaaaaagaagactcgcgtttcagagtcccccagctcagaccctggctcccctccagccaggaaacgcagagccaaagcgaagaagagcagcaaacgggcaccacaacgttacaagaacaattacagcaacagctccagcaacagcgaatcatgggagtccaactccgaaacgtctgcctccagctcgcaagagtccaagcggggcacagtctccaccccgttttccaatgccatgtataaacaaggtgtttatatttcctgatagggcacccaagccccctcctaccagcaaagactggcagcaggaatttgaggcctgtaagcactgggacaggcctgccagaaataatcttagtagtcctcctttctacccctggatgcccaggcaaccccctgaatgccatgtaacctttaagcttggctggaaataaaaatgcaaggccgtgggagtttcacttgtcggtgtctgcttattaaggtcgccaagcactccgagcgtcagcgaggagtgcgaccccctgccctgggcccacttcttcggagccgcgcgctacgccttcggctgcgcgcggcacctcagacccccgctcgtgctgacacgctcgcgcgtgtcagaccacttcgggctcgcgggggtcgggaattttgctaaacagactccgagttgccattggacactgtagctgtgaatcagtaacgaaagtgagtggggccagacttcgccataaggcctttatcttcttgccattggatagtgtagggggtcgccataggcttcggccttggttttaggccttccggactacaaaaatggcggatttcgtgacgtcatggccgccattttaagtaaggcggaagcagctccactttctcacaaaatggcggcggagcacttccggcttgcccaaaatggcgggcaagctcttccgggttaaaggttagccactacgtcatgggacacgtgactggggaggagtcacaacccggaagtcttcctcgatcacgtgtcttgtcacgtgggtgctacgtcaccggcgccattttgttttacaaaatggccgacttccttccgctttttcaaaaaaaggcgccaaaaaacggctgcg

SEQ ID NO: 458 - protein, 769 aa, Alphatorquevirus sp.
MAWRRWRWRPWWRRRRRRRWRRRRRRPRRRRPYRRRRLRRVRRRRGRWRRAYRRWGRRRRRRRHKKRLVLTQWQPPIVKKCLIIGYDPLIICGINRTAFNYTTHLEDFTFNNESFGGGLCTTQYTLRILFQEKLAQHNFWTASNEDLDLARYLGGALILFRHPTVDFLVRVRTSPPFNDTDMTALSLHPGMMMLSKKVIKVPSLKTRPSRKHYIKIKFGAPKLFEDKWYPQNELCDVTLVSIQATAADFQYPFGSPLTNSVCCNFQVLNSNYDKALSILNTTQVAEDLYTKRQNCYNFLLQQYSYYNTKQTVAQLKFDFFPKQNPKMPTTNNADLSKSPESLTKSNVQTQYPHWDSLYGGLAYGFTPTSHADNTNQAKDLESQMLQANQFYTKAGKKLIKGFTPIPHNNKADTNIFDYYTGMYCSIFLSSGRSNPEVKGSYTDISYNPLTDKGVGNMIWIDWLSKPDSIYDPAKSKCLLKDFPLWCMVYGYADYCRKVTGDSAILLDCRVVIRCPYTYPQLIKHNNDNWGFVPYSENFGLGRMPGGNPNPSTRMRLHWYPMLLHQMEVLECLAQTGPFAYHGDERKTVLTAKYKFRWKWGGNPVFQQVLRDPCTGGAVAPHTSRHPRSIQVLDPKHQAPEYLFHKWDFRRGLFSTKGIKRVSEQPTHDEFLTGSSKRPKKDTGAPLQEEEQKEDSRFRVPQLRPWLPSSQETQSQSEEEQQTGTTTLQEQLQQQLQQQRIMGVQLRNVCLQLARVQAGHSLHPVFQCHV

SEQ ID NO: 459 - protein, 147 aa, Alphatorquevirus sp.
MFLGRVWRKKRKVLLPTLRVVPVPQPSPMSSQWRPPVHNVQGQERNWYESFYRGHACFCGCGDAVTHINHLAARFGRPPTTSTPRGPQTPSVTPYPALPAPEPTPEPWRGAGGDGDRGGDAGGAAGGEEDAGGPDDAALIDAVDFAE

SEQ ID NO: 460 - protein, 129 aa, Alphatorquevirus sp.
LAPLQPGNAEPKRRRAANGHHNVTRTITATAPATANHGSPTPKRLPPARKSPSGAQSPPRFPMPCINKVFIFPDRAPKPPPTSKDWQQEFEACKHWDRPARNNLSSPPFYPWMPRQPPECHVTFKLGWK

SEQ ID NO: 461 - DNA, 3595 bp, Alphatorquevirus sp.
ttcgcgcgcgaggtgagtttacacaccgcagtcaaggggcaattcgggctcgggactggccgggccccgggcaaggctcttaaaaaatgcactttcgcagagtgcgagcgaaaaggaaactgctactgcaaactgtgcgagctccaccgaaggcacctgccatgagcttcaccacacctactattaatgccggcatccgagagcagcaatggttcgagtccatccttagatcccaccagtcgttctgtggctgtggtgatcccgtgcttcattttactaaccttgctactcgctttaactatctgtctgctacctcttcgcctctggaccctcccggcccaccgccgcgaggccgcccggcgctccgccgcctcccggcgctcccttcagcccccgcgaccccttctagagaaccagcatggcctactggttcagaaggtggggctggaggccgaggcgtcggtggagaaggtggcgccgccgtcgaaggagactaccgagaagaagaactagacgagctgttcgcggccttggaagaagacgcaaaccaagggtaaggaggcgccgcagaactcgcaaacgtacctatagacgggggtggagacgcaggaggtacataagacgagggcgacgcaaaaagaaacttgtactgactcagtggaacccggcagtagttaagaggtgcaacattaagggcggacttccaataattatatgcggagagcccagggcagcctttaactatggctaccacatggaggactacactcctcaacctttccccttcggagggggaatgagcacagtgactttctctctgaaagccttgtatgaccagcacctgaaacaccaaaacaggtggactttttcaaacgaccagctagacctggccagatacaggggctgtaaactaaggttctacagaagccccgtctgtgactttatagtacactacaacctaatacctccactaaaaatgaaccagtttacaagtcccaacacgcacccgggactactcatgctcagcaaacacaagataataattcccagctttcaaacaagacctgggggcagacgctttgttaaaataagacttaatccccccaaactatttgaagacaagtggtacactcagcaagacctgtgcaaggttccgctcgttagtattacagcaactgcggctgacttgcggtatccgttctgctcaccacaaacgaacaacccttgcaccaccttccaggtactgcgcaagaactacaacacagttataggaacttcctttaaggaccaagagtccacacaagagtttgaaaaatggttatatctaacaccatctcactatcaaacatttgccacagaggagagactaggcagaatacctactacatatccagatggaagctgtaactcacaaaaagacacatggcaacaagcatggtctaaacaaggagaagcctactcaccacaaccataccctcaaacctcaattacagggatgcagtcagatggcactataagagatacaactggacaaatgtacaaagtgccatatgacagtaatttcggcttcccaacttacataccacaaacaaggtacatatatgctagaagagaaaaaaacttctactttgaagttaataatcccataagtaaaaaaatatggccacaacccagtacaacaacacccacagtagattactatgaatacagactgggatggttcagtaacatatttataggccccaacagatacaacttacagttccaaacagcatacgtagacaccacatataacccactcatggacaaaggcaagggcaacaaaatatggttccaatacctaagtaaaaaaggcacagattacaatgaaaaacaatgctactgcactcttgaagacatgcccctctgggcaatgtgctttggatacacagactatgtagagactcaactaggaccaaatgtagaccatgaaacagctggactcataattataatctgtccttacactcaaccaccaatgtatgacaaacaaaggcctaactggggatacgtagtatatgacacaaactttggcaatggaaaaatgccctccggaactggccaagtcccagtatactggcaatgcagatggagacccatgctgtggttccaagagcaagtactaaatgacatctcaaagactggaccgtacgcctacagagacgaatataaaaatgtacagctgactatgtactacaacttcatttttaactgggggggcgacatgtattacccacaggtcgttaaaaacccctgtggagactccggaatcgttcccggttccggtagattcactcgagaagtacaagtcgttagcccgctttccatgggaccggcctacatcttccactacttcgacagcagaaggggcttctttagtgaaaaagctcttaaaagaatgcaacaacaacaagaatttgatgaatcttttacattcaaacctaagagacccaaactttctacagcagccacagaaatcctccagctcgaagaagactcgtcttcaggggaaggaaaatcgccactacagcaagaagagaaagaagcagaagtcctcgaaacgccacaagtacacctccagctccagcggaacatccaggagcagctcgcaatcaagcaccagctccaattcctcctgctccaactcctcaagacccaatccaatttgcatttaaacccacaatttttaagcccttcataaaatatgacatgtttggggacccccttcctcaccccccaacagcccaagactgggccacagaatatgagtgctgtaaggcctttaacagaccacctagaaccaacctaaaagacacccccttctacccctgggtccctaaacctaaacctcaattccgtgtatcttttaaacttggttttcaataaacaaggccgtgggagtctcacttgtcggtgtcaacctcttaaggtcactaagcactccgagcgtaagcgaggagtgcgaccctcccccctggggcaactccctcgaagtccggcgctacgcgcttcgcgctgcgccggacatctcggaccccccctccacccgaaacgcttgcgcgtttcggaccttcggcgtcgggggggtcgggggctttactaaacagactccgaggtgccattggacactgagggggtgaacagcaacgaaagtgagtggggccagacttcgccataaggcctttatcttcttgccatttgtcagtgtccggggtcgccataggcttcggcctcgattttaggccttccggactaccaaaatggcggattccgtgacgtcatggccgccattttaggctgttgcccggcgtttgacttccgtgttaaaggtcaaacacccggcggcaccacaaaatggccgtcaattgcttccggggtcaaaggttaccactacgtcataagtcacgtgacagggaagggcgacaaacccggaagtcatcctcacccacgtgacttaccacgtggtgtgtacgtcacacgccgccattttgaatcacaaaatggcggacttccttccgcttttttaaaaaaaacggccctgcggcggcgcgcgcgc

SEQ ID NO: 462 - protein, 773 aa, Alphatorquevirus sp.
MAYWFRRWGWRPRRRWRRWRRRRRRLPRRRTRRAVRGLGRRRKPRVRRRRRTRKRTYRRGWRRRRYIRRGRRKKKLVLTQWNPAVVKRCNIKGGLPIIICGEPRAAFNYGYHMEDYTPQPFPFGGGMSTVTFSLKALYDQHLKHQNRWTFSNDQLDLARYRGCKLRFYRSPVCDFIVHYNLIPPLKMNQFTSPNTHPGLLMLSKHKIIIPSFQTRPGGRRFVKIRLNPPKLFEDKWYTQQDLCKVPLVSITATAADLRYPFCSPQTNNPCTTFQVLRKNYNTVIGTSFKDQESTQEFEKWLYLTPSHYQTFATEERLGRIPTTYPDGSCNSQKDTWQQAWSKQGEAYSPQPYPQTSITGMQSDGTIRDTTGQMYKVPYDSNFGFPTYIPQTRYIYARREKNFYFEVNNPISKKIWPQPSTTTPTVDYYEYRLGWFSNIFIGPNRYNLQFQTAYVDTTYNPLMDKGKGNKIWFQYLSKKGTDYNEKQCYCTLEDMPLWAMCFGYTDYVETQLGPNVDHETAGLIIIICPYTQPPMYDKQRPNWGYVVYDTNFGNGKMPSGTGQVPVYWQCRWRPMLWFQEQVLNDISKTGPYAYRDEYKNVQLTMYYNFIFNWGGDMYYPQVVKNPCGDSGIVPGSGRFTREVQVVSPLSMGPAYIFHYFDSRRGFFSEKALKRMQQQQEFDESFTFKPKRPKLSTAATEILQLEEDSSSGEGKSPLQQEEKEAEVLETPQVHLQLQRNIQEQLAIKHQLQFLLLQLLKTQSNLHLNPQFLSPS

SEQ ID NO: 463 - protein, 156 aa, Alphatorquevirus sp.
MHFRRVRAKRKLLLQTVRAPPKAPAMSFTTPTINAGIREQQWFESILRSHQSFCGCGDPVLHFTNLATRFNYLSATSSPLDPPGPPPRGRPALRRLPALPSAPATPSREPAWPTGSEGGAGGRGVGGEGGAAVEGDYREEELDELFAALEEDANQG

SEQ ID NO: 464 - protein, 58 aa, Alphatorquevirus sp.; identical to SEQ ID NO: 197

SEQ ID NO: 465 - DNA, 3593 bp, Alphatorquevirus sp.
gcttcgcgcgaggtgagtttacacaccgcagtcaaggggcaattcgggctcgggactggccgggccccgggcaaggctcttaaaaaatgcactttcgcagagtgcgagcgaaaaggaaactgctactgcaaactgtgcgagctccaccgaaggcacctgccatgagcttcaccacacctactattaatgccggcattcgagagcagcaatggttcgagtccatccttagatcccaccagtcgttctgtggctgtggtgatcccgtgcttcattttactaaccttgctactcgctttaactatttgtctgctacctcttcgcctctggaccctcccggcccagcgccgcgaggccgcccggcgctccgccgcctcccggcgctcccttcagcccccgcgaccccttctagagaaccagaatggcctactggttcagaaggtggggctggaggccgaggcgccggtggagaaggtggcgccgccgtcgaaggagactaccgagaagaagaactagacgagctgttcgcggccttggaagaagacgcaaaccaagggtaaggaggcgccgcagaactcgcaaacgtacctacagacgggggtggagacgcaggaggtacataagacgagggcgacgcaaaaagaaacttgtactgactcagtggaacccggcagtagttaagaggtgcaacattaagggcggacttccaataattatatgcggagagcccagggcagcctttaactatggctaccacatggaggactacactcctcaacctttccccttcggagggggaataagcacaataactttctctctgaaagccttgtatgaccagtacctgaaacaccaaaacaggtggactttttcaaacgaccagctagacctggccagatacaggggctgtaaactaaggttctacagaagccccgtctgtgactttatagtacactacaacctaatacctccactaaaaatgaaccagtttacaagtcccaacacgcacccgggactactcatgctcagcaaacacaagataataattcccagctttcaaacaagacctgggggcagacgctttattaaaataagacttaatccccccaaactatttgaagacaagtggtacactcagcaagacctgtgcaaggttccgctcgttagtattacagcaactgcggctgacttgcggtatccgttctgctcaccacaaacgaacaacccttgcaccaccttccaggtactgcgcaagaactacaacacagttataggaacttcctttaaggaccaagagtccacacaagattttgaaaaatggttatatcaaacaccatctcactatcaaacatttgccacagaggagagactaggcagaatacctactacatatccagatggaagctctaactcacaaaaagacacatggcaacaagcatggtctaaacaaggagaagcctacttaccacaaccataccctcaaaccttaattacaggaatgcaggcaaatggcactataacaaatacaaatggacaaatgtacaaagtgccatatgacagtaatttcggcttcccaacttacataccacaaacaaggtacatatatgctagaagagaaaaaaacttccactttgaagttaataatcccataagtaacaaaatatggccacaacacagtacaacaacacccacactagattactatgaatacagactgggatggttcagtaacatatttataggccccaacagatacaacttacagttccaaacagcatacgtagacaccacatataacccactcatggacaaaggcaagggcaacaaaatatggttccaatacctaactaaaaaaggcacagattacaatgaaaaacaatgctactgcacccttgaagacatgcccctgtgggcaatgtgctttggatacacagactatgtagagactcaactaggaccaaatgtagaccatgaaacagctggactcataattataatctgtccttacactcaaccaccaatgtatgacaaacaaaggcctaactggggatacgtagtatatgacacaaactttggcaatggaaaaatgccctccggaagtggccaagtcccagtatactggcaatgcagatggagacccatgctgtggttccaagagcaagtactaaatgacatctcaaagactggaccgtacgcctacagagacgaatataaaaatgtacagctgactatgtactacaacttcgtttttaactgggggggcgacatgtattacccacaggtcgttaaaaacccctgtggagactccggaatcgttcccggttccggtagattcactcgagaagtacaagtcgttagcccgctttccatgggaccggcctacatcttccactacttcgacagcagaaggggcttctttagtgaaaaagctcttaaaagaatgcaacaacaacaagaatttgatgaatcttttacattcaaacctaagagacccaaactttctacagcagccacagaaatcctgcagctcgaagaagactcgtcttcaggggaaggaaaatcgccactacagcaagaagagaaagaagcagaagtcctccaaacgccacaagtacagctccagctccagcggaacatccaggagcagctcgcaatcaagcagcagctccaattcctcctgctccaactcctcaagacccaatccaatttgcatttaaacccacaatttctaagcccttcataaaatatgacatgtttggggacccccttcctcaccccccaacagcccaagactgggccacagaatatcagtgctgtaaggcctttaacagaccacctagaaccaacctaaaagacacccccttctacccctgggtccctaaacctaaacctcaattccgtgtatcttttaaacttggttttcaataaacaaggccgtgggagtctcacttgtcggtgtcaacctcttaaggtcactaagcactccgagcgtaagcgaggagtgcgaccctcccccctggggcaactccctcgaagtccggcgctacgcgcttcgcgctgcgccggacatctcggaccccccctccacccgaaacgcttgcgcgtttcggaccttcggcgtcgggggggtcgggggctttactaaacaaactccgaggtgccattggacactgagggggtgaacagcaacgaaagtgagtggggccagacttcgccataaggcctttatcttcttgccatttgtcagtgtccggggtcgccataggcttcggcctccattttaggccttccggactaccaaaatggcggattccgtgacgtcatggccgccattttaggctgttgcccggcgtttgacttccgtgttaaaggtcaaacacccggcggcaccacaaaatggccgtcaattgcttccggggtcaaaagttaccgctacgtcataagtcacgtgacagagaggagcgacaaacccggaagtcatcctcacccacgtgacttaccacgtggtgtgtacgtcacacgccgccattttgaatcacaaaatggcggacttccttccgcttttttaaaaaaaacggccctgcggcggcgcgcgc

SEQ ID NO: 466 - protein, 773 aa, Alphatorquevirus sp.
MAYWFRRWGWRPRRRWRRWRRRRRRLPRRRTRRAVRGLGRRRKPRVRRRRRTRKRTYRRGWRRRRYIRRGRRKKKLVLTQWNPAVVKRCNIKGGLPIIICGEPRAAFNYGYHMEDYTPQPFPFGGGISTITFSLKALYDQYLKHQNRWTFSNDQLDLARYRGCKLRFYRSPVCDFIVHYNLIPPLKMNQFTSPNTHPGLLMLSKHKIIIPSFQTRPGGRRFIKIRLNPPKLFEDKWYTQQDLCKVPLVSITATAADLRYPFCSPQTNNPCTTFQVLRKNYNTVIGTSFKDQESTQDFEKWLYQTPSHYQTFATEERLGRIPTTYPDGSSNSQKDTWQQAWSKQGEAYLPQPYPQTLITGMQANGTITNTNGQMYKVPYDSNFGFPTYIPQTRYIYARREKNFHFEVNNPISNKIWPQHSTTTPTLDYYEYRLGWFSNIFIGPNRYNLQFQTAYVDTTYNPLMDKGKGNKIWFQYLTKKGTDYNEKQCYCTLEDMPLWAMCFGYTDYVETQLGPNVDHETAGLIIIICPYTQPPMYDKQRPNWGYVVYDTNFGNGKMPSGSGQVPVYWQCRWRPMLWFQEQVLNDISKTGPYAYRDEYKNVQLTMYYNFVFNWGGDMYYPQVVKNPCGDSGIVPGSGRFTREVQVVSPLSMGPAYIFHYFDSRRGFFSEKALKRMQQQQEFDESFTFKPKRPKLSTAATEILQLEEDSSSGEGKSPLQQEEKEAEVLQTPQVQLQLQRNIQEQLAIKQQLQFLLLQLLKTQSNLHLNPQFLSPS

SEQ ID NO: 467 - protein, 156 aa, Alphatorquevirus sp.
MHFRRVRAKRKLLLQTVRAPPKAPAMSFTTPTINAGIREQQWFESILRSHQSFCGCGDPVLHFTNLATRFNYLSATSSPLDPPGPAPRGRPALRRLPALPSAPATPSREPEWPTGSEGGAGGRGAGGEGGAAVEGDYREEELDELFAALEEDANQG

SEQ ID NO: 468 - protein, 58 aa, Alphatorquevirus sp.
MFGDPLPHPPTAQDWATEYQCCKAFNRPPRTNLKDTPFYPWVPKPKPQFRVSFKLGFQ

SEQ ID NO: 469 - DNA, 3592 bp, Betatorquevirus sp.
cgggtgctgaaggtgagtgaaaccaccgtaatcaaggggcaattcgggctaattcagtctagcggaacgggcaagaaacttaaattaatatactttttacagatgagcagctttcaaaaaccaactttatacaatggacgcggattagacaaccagtggataaatgtaatttttaactcccatgatttaatgtgcggctgcaacaaagtgaaagatcatctcctcgacattattaacaacgaaaaatgccaccattttacagaagaaatttctaccgaagaaactactggaattacagacacaaacgtcgatattttagaagaaggagaccttacaaaacttttcgaagaaagcgacgacatagacgggtaagaaagcctaaatttcctaaatactttagaaaaaaactaaaaactttaagagtaacccaatggcaacctaaatacataagaagatgctgtataaaaggaattttattactatttgaagcgggacatggacgcttctccaataactttactccatttaaagaaagcttttatcctcataatgaaccaggaggaggaggatggagtatacaagaactatcattatcaaacttatttacacaaaaccaatactttatgaacatatggacacactctaatggtggacttaatttagtaagatatacaggatgtgtaataactttgtatagacagccagaaactgattatatatttcattactatacagaagagactgttaatgcaggaaaattttggtatcctagtatgcaccctataaaaatgttaaactataaccaaagaataattgttcctagcttacaaacagcacccaacaaaagaaaattatacaaaaaaattaaaataacaccacctaaattaataaaaaacaactggtacttccaacaaaatttaagcacatttccactactaagatttgcaacagtcgctacatctttaaaccacatgtttttaagttcaaaatcaactaacagcaacataacattacacatgctaaacacaaaattttttttacgctcagcttttcaatacgcagacacccaatacggatacataccaaagactggcacatacatatatggcttaagaaacggtgcagtacacctagaacaagaaccaagaaaaaatgtaatatacattggtagtcaatattatgatgaaggacaacctataggtaaagcttgggatgaaacatataaaaaagaaaagtggggaaatatattttactacaaatactttgatcacatacaaacaacatttctacacaatgaaccaccaagcacctttttaaataccgctaatatagggaaaaatgtaggacaagtaaccacaaaacaagaaccatactaccaagatgttagatataatccatacagagataaaggtgacggtaacttagcatattggaaaagcatttcagatgccactaaaaacaattgggaaccccctgacgacccagaccaaaaaattggaggctatccattttggttaatgctttggggatgggcagactatacagaaaaattaggtaaattaaaaaatttatctgaaaactatgttttagtactaagatcaaaatacttttcagaatcatttccagcatatgtaccattagacggtagctttattagaggacaggcaccttatgataatgatcctgaagacatatatccttatgatttatcacactggtttccaaaatggaaatttcaaagaaaagcaatagacgacttgttaatgacaggacccggtgtttgtaaagcagaaaatgtacaaagcatacaggcatttatgaaatatcgattttattttaagtggggcggcaactcgtctcaactggaaaccatcgcagaccctaactcccaaccactcggacctaatcccaataatgagcaactatcaaatgaaattattgacccaaaaacttccattgaaaacctcctctaccagtgggatgtcaggagacaccaacttacacaagcagctacggaaagaattaaagaatgccaaacttatgactcatgtttgttcacagatggaacaacaacttcaacacaagaagaaacaacatcacaaaagaaaaaggcccagaaagaagaaatccaaacattacagctccagctccagcaactccaacagttcaaccgagaactacaacagcgattcctcagactccaacaattaacaatggaaacataaaatttacattaattaaaaaagcatacctttttgacccaccaaaaactaaactaacaccaataagagggagggattggcaagacgaattgtatatatctaaatggttaaaaaggccaatgcgccactatttagaagacaaaccaatatacccatggtgtgtacctgaaccacttgtaaattttgaccttgtaaaaggatttaataaaggccagcattaattcacttaacaagtctgtttattaaagtaaaacttatataaaccaacaccgcctccctaatacgcaggcgcacaagggggctccgcccccttaaacccccgggggggaaaccccccctaagcccccccaaaaaaccacataatttaaattgccgaccacaaacgtcacaggaaaccacaaaatttacatagctaaccacaaactgaacaggaaaccacaaaatttgcattgcccaccacaaaccgtcactaacttccctataccatactaacttccctttttaataattattattcattacattaattagtactcaccgtaattccggggaggagacaacacactataaaactaactaccatgacgaatggctgagtttataccgctagacggagacgcgacaacttcgcggctgaatttgggcgggtgctgaaggtgagtgaaaccaccgtaatcaaggggcaattcgggctaattcagtctagcggaacgggcaagaaacttaaattaatatactttttacagatgagcagctttcaaaaaccaactttatacaatggacgcggattagacaaccagtggataaatgtaatttttaactcccatgatttaatgtgcggctgcaacaaagtgaaagatcatctcctcgacattattaacaacgaaaaatgccaccattttacagaagaaatttctaccgaagaaactactggaattacagacacaaacgtcgatattttagaagaaggagaccttacaaaacttttcgaagaaagcgctccctaatacgcaggcgcacaagggggctccgcccccttaaacccccgggggggaaaccccccctaagcccccccaaaaaaccacataatttaaattgccgaccacaaacgtcacaggaaaccacaaaatttacatagctaaccacaaactgaacaggaaaccacaaaatttgcattgcccaccacaaaccgtcactaacttccctataccatactaacttccctttttaataattattattcattacattaattagtactcaccgtaattccggggaggagacaacacactataaaactaactaccatgacgaatggctgagtttataccgctagacggagacgcgacaacttcgcggctgaatttggg

SEQ ID NO: 470 - protein, 659 aa, Betatorquevirus sp.
MPPFYRRNFYRRNYWNYRHKRRYFRRRRPYKTFRRKRRHRRVRKPKFPKYFRKKLKTLRVTQWQPKYIRRCCIKGILLLFEAGHGRFSNNFTPFKESFYPHNEPGGGGWSIQELSLSNLFTQNQYFMNIWTHSNGGLNLVRYTGCVITLYRQPETDYIFHYYTEETVNAGKFWYPSMHPIKMLNYNQRIIVPSLQTAPNKRKLYKKIKITPPKLIKNNWYFQQNLSTFPLLRFATVATSLNHMFLSSKSTNSNITLHMLNTKFFLRSAFQYADTQYGYIPKTGTYIYGLRNGAVHLEQEPRKNVIYIGSQYYDEGQPIGKAWDETYKKEKWGNIFYYKYFDHIQTTFLHNEPPSTFLNTANIGKNVGQVTTKQEPYYQDVRYNPYRDKGDGNLAYWKSISDATKNNWEPPDDPDQKIGGYPFWLMLWGWADYTEKLGKLKNLSENYVLVLRSKYFSESFPAYVPLDGSFIRGQAPYDNDPEDIYPYDLSHWFPKWKFQRKAIDDLLMTGPGVCKAENVQSIQAFMKYRFYFKWGGNSSQLETIADPNSQPLGPNPNNEQLSNEIIDPKTSIENLLYQWDVRRHQLTQAATERIKECQTYDSCLFTDGTTTSTQEETTSQKKKAQKEEIQTLQLQLQQLQQFNRELQQRFLRLQQLTMET

SEQ ID NO: 471 - protein, 121 aa, Betatorquevirus sp.
LKVSETTVIKGQFGLIQSSGTGKKLKLIYFLQMSSFQKPTLYNGRGLDNQWINVIFNSHDLMCGCNKVKDHLLDIINNEKCHHFTEEISTEETTGITDTNVDILEEGDLTKLFEESDDIDG

SEQ ID NO: 472 - protein, 131 aa, Betatorquevirus sp.
MFVHRWNNNFNTRRNNITKEKGPERRNPNITAPAPATPTVQPRTTTAIPQTPTINNGNIKFTLIKKAYLFDPPKTKLTPIRGRDWQDELYISKWLKRPMRHYLEDKPIYPWCVPEPLVNFDLVKGFNKGQH

SEQ ID NO: 473 - DNA, 3587 bp, Alphatorquevirus sp.
gtcattggaggaggggttgtagggtttggggtcaaggggcaattcgggctcgggactggccgggctatgggcaaggctcttaaaaatgcacttttctaggtgcagtagaaagaaaaggacactgtcactgctaccactgcaccattcacagaaagctaggccatctgtgaaaggtatgtggagacccccgactcgaaatgcattcaccattcaacgtaactggttctacagttgctttcactcccactcttctatgtgtggctgtgctgattttattggtcatttcaatcacatcgctgctatgctcggccgtccggaagaccagaaccctcctccgccacccggggctctgagacccctacccgctctcccggccgccaccgaggcgcccggtgatcgagcaccatggcctatgggtggtgctggaggcgacggaggcgcccgtggaggaggagaagatggcgccgctggagacgtcgccggagaccccgcagacgccgacctcgtcgccgctatcgacgccgcagaacagtaaggaggcgcggcagggggaggtggactaggagatatagacgatggcgccgcaagggcaaacgcaaaggcaaaaagaaaattattataaagcagtggcagcccaactacacccgcagatgcaacatagtgggctacctacccctactaatttgtggggaaaatgctgttgccagaaactatgctacccactcagacgacagctactaccccggaccctttggcgggggaatgactacagacaaatttactttaagaatactgtatgatgagtacaaaaggtttatgaactactggaccgcctcaaacgaggacctagacctgtgtagatacctgggagttactatatacgtgtttagacacccagaggtagactttatactacttataaacacctcccctccattcctagacacagaaataacagggcctagcatacacccaggtatgatggccctcaacaaaagagccaggtggatacctagcctaaaaaacagaccaggcagaaagcactatgtaaaaattaaagtaggagccccccgaatgttcacagataagtggtacccccaaacagacctctgtgacatgacactcctaacgatctttgccagtgcggcggatatgcaatatccgttcggctcaccactaactgacactatagttgtgtcattccaagttctgcaatccatgttcaacgactgcctcagtgtacttccttctaactttgaaccatcaggcaaaggattattattatataacaaaattagtaaacacttaccatactataacacaacacaaacacaagcacaactaaaaagatacatagacaatacagcaaacgcaacagacacatggagttcatacctaaataatcaaaaattttcacaaatacaatcaccaattacagactcacactccataggaggaccatacactaagtacaatgacacatggtataaaggcactgcctatgtacaaaaaattactgatgtgccaccaaaggcagcaaaactatactatgaacagaccaaatcacttattggcataacattcacaggatctacagaatacctacactataccggaggcttatacacctccatatggctatcagcaggtagatcctactttgaaaccaaaggcccatacacagacatcacttacaaccccttttcagacagaggagaaggtaacatgctttggatagactggctaactaaagatgactcacaatactcaaaaacacagagcaagtgtctcatagagaacttacccctgtgggcctcagtatacggatacacagagtactgcagcaaagtaacaggagactcaaacatagaacacaactgtagatgtgttatcagaagcccctacacagtaccacagctgttagaccacaacaaccccctcagaggctacgtaccttacagctttaactttggaaatggtaaaatgccaggcggtagcagcctagtacctattagaatgagagccaagtggtaccccactctttttcaccaaagagaagtactagaggccatagcacaggcgggcccctttgcataccactcagacattaagaaagtatccctaggcataaagtacagatttaagtgggtgtggggtggcaaccccgtgtcccaacaggttgttagaaacccctgcaagaccacccaaggttcctcgggcaatagagtgcctcgatcaatacaagtcgttgacccgcggtacaacacgccagagctcaccatacacgcgtgggacttcagacatgggttctttggcagaaaagctattaagagaatgcaagaacaaccaatacctcatgacactttttcagcagggttcaagcgcagtcgccgagatacagaagcactccaatccagccaagaagagcaacaaaaagaaaacttacttttcccagtccagcagctcaagcgagtccccccatgggagacctcgcaagagagccaaagcgaggaagaaaactcgcaaaaacaggagaccctctcccagcaactcagagaccagctgcacaagcagcggctcatgggagagcaactccgatcgctcctctaccaaatgcagagggtccaacaaaatcaacacataaaccctatgttattgccaaagggtctggcattaacttctatttctcacaatgtaatatagatatgtttggtgaccccaaaccctacaacccctcctccaatgactggaaggaggagtacgaggccgcaaagtactgggacagaccccccagacgcgacctaaggagcacccccttctacccctgggcccccacccctaaaccatacaatgtcaactttgccctcaactacaaataaacggtggccgtgggagtttcacttgtcggtgtctacctcttaaggtcactaagcactccgagcgtaagcgaggagtgcgaccctctaccaaggggcaactccctcgaagtccggcgctacgcgcttcgcgctgcgccggacatctcggaccccccctcgacccgaatcgcttgcgcgattcggacctgcggcctcgggggggtcgggggctttattaaacggactccgagatgccattggacactgagggggtgaacagcaacgaaagtgagtggggccagacttcgccatagggcctttatcttcttgccatttgtccgcgaccgggggtcgctcctaggcgcggaccccgtttcggggtccttccgggttcgtcggcgccgttccagtgacgtcacgggcgccatcttaagtggctgtcgccgaggattgacgtcacagttcaaaggtcatcctcggcggtaaccgcaaagatggcggtcaatctcttccgggtcaaaggttgtgcatacgtcataagtcacatgacaggggtccacttaaacacggaagtaggccccgacatgtgactcgtcacgtgtgtacacgtcacggccgccattttgttttacaaaatggccgacttccttcctcttttttaaaaaaaggcgccaaaaaaccgtcggcggggggggccgcgcgctgcgcggcctcgtactcctccttcca

SEQ ID NO: 474 - protein, 765 aa, Alphatorquevirus sp.
MAYGWCWRRRRRPWRRRRWRRWRRRRRPRRRRPRRRYRRRRTVRRRGRGRWTRRYRRWRRKGKRKGKKKIIIKQWQPNYTRRCNIVGYLPLLICGENAVARNYATHSDDSYYPGPFGGGMTTDKFTLRILYDEYKRFMNYWTASNEDLDLCRYLGVTIYVFRHPEVDFILLINTSPPFLDTEITGPSIHPGMMALNKRARWIPSLKNRPGRKHYVKIKVGAPRMFTDKWYPQTDLCDMTLLTIFASAADMQYPFGSPLTDTIVVSFQVLQSMFNDCLSVLPSNFEPSGKGLLLYNKISKHLPYYNTTQTQAQLKRYIDNTANATDTWSSYLNNQKFSQIQSPITDSHSIGGPYTKYNDTWYKGTAYVQKITDVPPKAAKLYYEQTKSLIGITFTGSTEYLHYTGGLYTSIWLSAGRSYFETKGPYTDITYNPFSDRGEGNMLWIDWLTKDDSQYSKTQSKCLIENLPLWASVYGYTEYCSKVTGDSNIEHNCRCVIRSPYTVPQLLDHNNPLRGYVPYSFNFGNGKMPGGSSLVPIRMRAKWYPTLFHQREVLEAIAQAGPFAYHSDIKKVSLGIKYRFKWVWGGNPVSQQVVRNPCKTTQGSSGNRVPRSIQVVDPRYNTPELTIHAWDFRHGFFGRKAIKRMQEQPIPHDTFSAGFKRSRRDTEALQSSQEEQQKENLLFPVQQLKRVPPWETSQESQSEEENSQKQETLSQQLRDQLHKQRLMGEQLRSLLYQMQRVQQNQHINPMLLPKGLALTSISHNVI

SEQ ID NO: 475 - protein, 169 aa, Alphatorquevirus sp.
LGSRGNSGSGLAGLWARLLKMHFSRCSRKKRTLSLLPLHHSQKARPSVKGMWRPPTRNAFTIQRNWFYSCFHSHSSMCGCADFIGHFNHIAAMLGRPEDQNPPPPPGALRPLPALPAATEAPGDRAPWPMGGAGGDGGARGGGEDGAAGDVAGDPADADLVAAIDAAEQ

SEQ ID NO: 476 - protein, 132 aa, Alphatorquevirus sp.
MGDLAREPKRGRKLAKTGDPLPATQRPAAQAAAHGRATPIAPLPNAEGPTKSTHKPYVIAKGSGINFYFSQCNIDMFGDPKPYNPSSNDWKEEYEAAKYWDRPPRRDLRSTPFYPWAPTPKPYNVNFALNYK

SEQ ID NO: 477 - DNA, 3582 bp, Alphatorquevirus sp.
taaaaaaaggcggtgagtttacacaccgcagtcaaggggcaattcgggctcgggactggccgggctacgggcaaggctcttagggttatcgctctttaaaacatgtttctcggcagggtgtggagaaagaaaaggaaagtgccactgccaacactgccagtggtgccgattccacaacctacacgtatgagcagccagtggagaccccctgttcacaatgtccaggggctggagcgaaattggtatgagtccttcttccgcggccatgcttgcttttgtggttgtggtgatgctgttactcatattaatcatctggcggctcgttttggacgtcctcctcctacctcaactccccgaggaccacagacaccttcagtgaccccgttcccggccctgccggcccctgagcccacgcccgagccatggcgtggcgccagtggcgatggcggccgtggtggagacgccggaggcgccgcaggtggagaaggagacgccggagacccagacgacgccgcccttatcgacgccgtcgacctcgcagagtaaggaggcgcagggggcggtggaggcgcgcttacagacgttgggggcgacgcagacgcagacgaaagcacaaaaagagacttatactaactcagtggcagccccctattgtaaaaaggtgctttataattgggtacgaccctgtaattatctgtggtattaacaggaccacctttaactacactacacactcagaagactacacatacaacaatgaaagctttgggggcggactctgcacaacacagtacaccctaagaattctatttcaagagaaactagctcagcacaacttttggacagccagcaacgaggacctagacctagctagatatttaggaggcacatttacattctttaaacacccaacagtagactttctagttagagttcgcaccagtcctcccttcgaggacacagacatgactgcactgtcactacacccaggcatgatgatgctcagcaaaaaagtaattaaaatacctagcctaaaaaccagaccctccagaaaacactatgtaaaaatcaggtttgggccccccaaactctttgaagacaagtggtaccctcagaacgagctgtgtgatgtaactttggtgagcatacaggcaaccgcagctgatttccaatatccgttcggctcaccactaacgaactctatctgttgcaacttccaggttcttaacagtaactatgacggtgcacttagcatactgcacctatctaatgaattaacatctcctatacacactgccagacaaaactgctataactttttattaaaccagtacagttactacaacacaaaacaagttgtagcccagctaaaatatggctggaaccccaatcaaaatccaaccatgcctaataccaataacgcctcgttatctgaaccaccagaaaacttaacaaaagataaagttacaaataagtacccacactgggacacaaaatacgggggcttagcatatggaaacagcacaacaaaccctggcactactgcatcaccaactgacttatatacttcaatgttacaaggcaacaccttttataccacggcaggcaaacaattaatcaaaacatttatacctatagaacactataatggcaacaccaaaagtaataacacaaacatatttgactactacacaggcatgtttagcagcatatttttatctagtggcagaagcaacccagaagtaaaaggcagctacacagacatctcatacaatccacttatagacaaaggggtgggaaacaaactgtggatagactggctctcaaaagcagacactatatacgaccccaaaaaaagcaaatgcctacttaaagactttcccatgtgggcactatgctacggatacgcagactactgcaaaaaagtcaccggagactcggcggtgttgtacaacgccagaatagtcatgagatgtccctacacctacccacaacttacaaaacacgacaatgaagactggggctttgtaccttatagcgagaactttggactcggacggctaccggggggcgaccctaatcctcccaccagaatgagacttcactggtaccccatgatgcttcaccagacagaagtattagaatgcatagcacaatcgggaccctttgcataccacggggacgaaagaaagactgtactgagtgccaaatacaaattcaggtggaagtggggaggtaatcctgtgtttcaacaggttcttagagacccctgcagcggcggtgccgtggcgccccacaccagtcgacaccctcgcgcagtacaaatctatgacccgaagcaccaagccccggaatacttgttccacaagtgggacttcagaaggggactccttagcactaaaggtattaaaagagtgtcagaacaaccaacacatgatgagtttcttacaggccacagcaaaagacccaagaaagatacaggggcgagggtggaagacgaagaacagcaaaaagaaagcttacatttcagactcccagagctcaggccatggctcccctccagtcaagaaacggagagccaaagcgagcaagaagaaacagtcccgaagacggtacaagaacaactacaagagcagctccagcaacagcgaatcatgggagtccaactccgaaacatctgtctccagctcacaagagtccaagcggggcacagtctccaccccgttttccaatgccatgtataaacaaggtgcttatgtttcctgacagggagcccaagaagcctcctaccagcaaagactggaaggaggagtttgaggcctgtaagtactgggacaggccagctagaaataacctcaatagccctcctttttacccctggatgcccaaacagccccctacttgtagtgtaaccttcaagcttggctggaaataaaattacaaggccgtgggtgtttcacttgtcggtgtctgcttattaaagtcactaagcactccgagcgtaagcgaggagtgcgaccccctgccctgggcccacttcttcggagccgcgcgctacgccttcggctgcgcgcggcacctcagacccccgctcgtgctgacacgctcgcgcgtgtcagaccacttcgggctcgcgggggtcggaaattttgctaaacagagtccgagttgccattggacactgtagctgtgaatcagtaacgaaagtgagtggggccagacttcgccataaggcctttatcttcttgccattggatagtgtagggggtcgccataggcttcggcctcggttttaggccttccggactacaaaaatggcgaattccgtgacgtcatagccgccattttaagtaaggcggaagcgcacccgctttctcacaaaatggcggcggagcacttccggcttgcccaaaatggcggacaagctcttccgggttaaagttcagcaactacgtcacaagtcacgtggggagggttggcgtcacaacccggaagccaatcctctcacgtggcctgtcacgtgactgctacgtcaccgacgccattttgttttacaaaatggccgacttccttccgcttttt

SEQ ID NO: 478 - protein, 773 aa, Alphatorquevirus sp.
MAWRQWRWRPWWRRRRRRRWRRRRRRPRRRRPYRRRRPRRVRRRRGRWRRAYRRWGRRRRRRKHKKRLILTQWQPPIVKRCFIIGYDPVIICGINRTTFNYTTHSEDYTYNNESFGGGLCTTQYTLRILFQEKLAQHNFWTASNEDLDLARYLGGTFTFFKHPTVDFLVRVRTSPPFEDTDMTALSLHPGMMMLSKKVIKIPSLKTRPSRKHYVKIRFGPPKLFEDKWYPQNELCDVTLVSIQATAADFQYPFGSPLTNSICCNFQVLNSNYDGALSILHLSNELTSPIHTARQNCYNFLLNQYSYYNTKQVVAQLKYGWNPNQNPTMPNTNNASLSEPPENLTKDKVTNKYPHWDTKYGGLAYGNSTTNPGTTASPTDLYTSMLQGNTFYTTAGKQLIKTFIPIEHYNGNTKSNNTNIFDYYTGMFSSIFLSSGRSNPEVKGSYTDISYNPLIDKGVGNKLWIDWLSKADTIYDPKKSKCLLKDFPMWALCYGYADYCKKVTGDSAVLYNARIVMRCPYTYPQLTKHDNEDWGFVPYSENFGLGRLPGGDPNPPTRMRLHWYPMMLHQTEVLECIAQSGPFAYHGDERKTVLSAKYKFRWKWGGNPVFQQVLRDPCSGGAVAPHTSRHPRAVQIYDPKHQAPEYLFHKWDFRRGLLSTKGIKRVSEQPTHDEFLTGHSKRPKKDTGARVEDEEQQKESLHFRLPELRPWLPSSQETESQSEQEETVPKTVQEQLQEQLQQQRIMGVQLRNICLQLTRVQAGHSLHPVFQCHV

SEQ ID NO: 479 - protein, 147 aa, Alphatorquevirus sp.
MFLGRVWRKKRKVPLPTLPVVPIPQPTRMSSQWRPPVHNVQGLERNWYESFFRGHACFCGCGDAVTHINHLAARFGRPPPTSTPRGPQTPSVTPFPALPAPEPTPEPWRGASGDGGRGGDAGGAAGGEGDAGDPDDAALIDAVDLAE

SEQ ID NO: 480 - protein, 128 aa, Alphatorquevirus sp.
MAPLQSRNGEPKRARRNSPEDGTRTTTRAAPATANHGSPTPKHLSPAHKSPSGAQSPPRFPMPCINKVLMFPDREPKKPPTSKDWKEEFEACKYWDRPARNNLNSPPFYPWMPKQPPTCSVTFKLGWK

SEQ ID NO: 481 - DNA, 3581 bp, Alphatorquevirus sp.
ccctcgggactggccgggctatgggcaaggctcttagggtattcatttttaatatgcgcttttccagaatttacaaacagaagaagaggccactgccactgcttctggtgcgagttcaaccgaaagcactcgctagtgatatgagttggcgccctcccgttcacaatgcggcaggaattgagcgacagctcttcgagggctgctttcgattgcacgctgcctgttgcggttgtggcaattttattactcatcttactatactggctgctcgctatggttttactggggggccggcgccgccaggtggtcctggggcactgccggcgctgaggcgggctcttcccgcgcccgcggcccccgagaaccagcctgaaccacagctatggcgtggtcgtggtggtggaggcgacggaaacggtggtggccgcgcagaaggaggcgatggaggagacttcgcacccgaagagctagacgagctgttccgcgccgtcgccgcagacgaagagtaaggaggcgccggtgggggaggcgaagacgtaggagacgggttttctataagagacgcagacgaaagactggcagactgtacagaaagcccaaaaagaaactagtactgactcaatggcaccccactacagtccgcaactgctctatacgaggcctggtgcctcttgtgctctgcggacacacccagggcggcagaaacttcgccctgaggagcgatgactaccccaagcaggggtctccttatggaggcagttttagcactacaacctggaacttaagggtcctctatgacgagcaccaaaagcaccacaacacgtggagctactccaataaccaactagacctggccagatataaagggtgcaccttttacttttacagagacaaaaagacagactacatagttaaatttcagaggaggggaccctttaagataaacaagtacagcagtcccatggcacaccccggcatgatgatgctagataagatgaaaatactagtgcctagctttgacaccagacccgggggtcgcaggagagtaaaagtaactatacgcccccccactctgttagaagacaagtggtacactcagcaagacctagcgcccgttaatcttgtgtcacttgtggtttctgcggctagcttcatacatccgtttagccaaccacaaacgaacaacatttgcacaaccttccaggtgttgaaagacatgtactatgagtgcataggagttaattcctctttacaagagaagtatgaaaatctatttgatcaactatattccaaatgctgctactttgaaacctttcaaactatagcccagcttaaccctggctttaaagcagctaaaaaaactgcaaacggtactggaaagaaagctcccacactaggagacgcagtttctgaattaaaaagcacaaatggttcgttttacactggcaacaacagcacttttggctgctgcacataccaaccaactaaagacataggtaaacacgccaatgaatggttctggaatcagttaacacaaacaaattcagacacactaggccagtacggacgcgcctccattaaatacatggaatatcacacaggcatttacagctcaatatttctcagcccactaagaagcaacctagaatttgccacagcataccaagatgtaacatacaacccactaactgacagaggcataggcaacagaatctggtaccagtacagcacaaaacctgacactaaatttaatgaaacacaatgcaaatgtatcctcacagacctacctctttggaacatgttttatggctacgtagactttatagagagtgagctaggcataagtgcagaaatccacaactttggcatagtttgtgtacagtgtccctacacctttccccccatgtttgacaaatctaagccagacaaaggctacgtgttctatgacacactttttggcaacggaaagatgccagacggcagcggacacgtacccacctactggcagcagaggtggtggcccagattcagctttcaaagacaagtaatgcacgacattatcctcaccgggcccttcagctacaaagatgactctgtaatgactggcataactgcgggctacaagtttaaattctcatggggcggtgatatggtctccgaacaggtcattaaaaacccagacagaggtgacggacgagactccacctatcccgatagacagcgccgcgacttacaagttgttgacccacgcaccatgggcccccaatgggtattccacacctttgactacagacgggggctatttggaaaggacgctattaagcgagtgtcagaaaaaccgacagatcctgactactttacaacaccttacaaaaaaccaagatttttccctccaacagcaggagaagaaaaactgcaagaagaagactacgctttacaggagaaaagaggcccgctctcgccagaagaggggcagacgagggcgcaagtcctccagcagcaggtcctccagtcggagctccagcaccagcaggagctcggggagcagctcagattcctcctcagggaaatgttcaaaacccaagcgggcatacacatgaacccccgcgcatttcaggagctgtaaaccgtgtgtacatgttcactcctcctagtcccaagaggtttaagacctctcaggactggcagcaagagtacgaggcctgctcagtgtgggacaggcccgctcgcacctgccatacagatacacccacttatccctggatgctaaaaaaccccgaatttaaagtcacttttaaacttggctggaagtaaataaattttactgtttcactgtactaggccgtgggagtttcactcgtcggtgtctacctcttaaagtcactaagcactccgagcgttagcgaggagtgcgaccctagaccaaggggcaactccctcaaagtccggcgctacgcgcttcgcgctgcgccggacatctcggacccccccctccacccgaaacgcttgcgcgtttcggaccttcggcgtcgggggggtcgggggctttactaaacagactccgaggtgccattggacactgagggggcgaacagcaacgaaagtgagtggggccagacttcgccataaggcctttatcttcttgccatttgtccgtgacgggggtcgctctaagcgcggaccccgtttttacccccccgcgagtgttaaaatggcgcgttccgtgacgtcacagccgccattttaagtaaggcggaagagctgctctataaacaaaatggcggaggagcacttccggcttgcccaaaatggctgccaataacatccgggtcaaaagttatgcctacgtcacaagtcacgtgggaacggttgacgtataacccggaagtcaatcctcccacgtggcctgtcacgtgacgcatgcgtcacggcggccatattgatttacaaaatggcgtacttccttcctcttttataaaaaataacgtaccggcggcggcgcgcgcgctacgcgcggcccggccagtcccgagcccgaattgccccttgactgcggtgtgtaaactcacctccggcacccg

SEQ ID NO: 482 - protein, 747 aa, Alphatorquevirus sp.
MAWSWWWRRRKRWWPRRRRRWRRLRTRRARRAVPRRRRRRRVRRRRWGRRRRRRRVFYKRRRRKTGRLYRKPKKKLVLTQWHPTTVRNCSIRGLVPLVLCGHTQGGRNFALRSDDYPKQGSPYGGSFSTTTWNLRVLYDEHQKHHNTWSYSNNQLDLARYKGCTFYFYRDKKTDYIVKFQRRGPFKINKYSSPMAHPGMMMLDKMKILVPSFDTRPGGRRRVKVTIRPPTLLEDKWYTQQDLAPVNLVSLVVSAASFIHPFSQPQTNNICTTFQVLKDMYYECIGVNSSLQEKYENLFDQLYSKCCYFETFQTIAQLNPGFKAAKKTANGTGKKAPTLGDAVSELKSTNGSFYTGNNSTFGCCTYQPTKDIGKHANEWFWNQLTQTNSDTLGQYGRASIKYMEYHTGIYSSIFLSPLRSNLEFATAYQDVTYNPLTDRGIGNRIWYQYSTKPDTKFNETQCKCILTDLPLWNMFYGYVDFIESELGISAEIHNFGIVCVQCPYTFPPMFDKSKPDKGYVFYDTLFGNGKMPDGSGHVPTYWQQRWWPRFSFQRQVMHDIILTGPFSYKDDSVMTGITAGYKFKFSWGGDMVSEQVIKNPDRGDGRDSTYPDRQRRDLQVVDPRTMGPQWVFHTFDYRRGLFGKDAIKRVSEKPTDPDYFTTPYKKPRFFPPTAGEEKLQEEDYALQEKRGPLSPEEGQTRAQVLQQQVLQSELQHQQELGEQLRFLLREMFKTQAGIHMNPRAFQEL

SEQ ID NO: 483 - protein, 162 aa, Alphatorquevirus sp.
MGKALRVFIFNMRFSRIYKQKKRPLPLLLVRVQPKALASDMSWRPPVHNAAGIERQLFEGCFRLHAACCGCGNFITHLTILAARYGFTGGPAPPGGPGALPALRRALPAPAAPENQPEPQLWRGRGGGGDGNGGGRAEGGDGGDFAPEELDELFRAVAADEE

SEQ ID NO: 484 - protein, 58 aa, Alphatorquevirus sp.
MFTPPSPKRFKTSQDWQQEYEACSVWDRPARTCHTDTPTYPWMLKNPEFKVTFKLGWK

SEQ ID NO: 485 - DNA, 3576 bp, Alphatorquevirus sp.
ccgccattttaggccctcgcgggcctccgtatcaaggggcaattcgggctcgggactggccgggctatgggcaaggctcttaaaaatgcacttttctaggtgcagtagaaagaaaaggacactgtcactgttaccactgcaccattcacagaaaactaggccatctgtgaaaggtatgtggagacccccgactcgaaatgcatttactattcaacgtgactggttctacagttgctttcactcccacgcttctatgtgtggctgtgctgattttattagtcatttcaatcatatcgctgctatgctcggccgtccggaagaccagaaccctcctccgccacccggggctctgagacccctacccgctctcccggcctcctccgagacacccggtgatcgagcaccatggcctatgggtggtggtggaggcgacggaggcgcccgtggaggaggaggagatggcgccgctggagacgtcgccgaagaccccgcagacgccgacctcgtcgccgctatcgacgccgcagaacagtaaggagacgcggcagggggaggtggactaggagatatagacgatggcgccgcaagggcaaacgaagaggcaaaaaaaagattatcataaaacagtggcagcccaactacactcgcagatgcaacatagtgggctacatgcctctcctaatctgtggggaaaatactgttgctacaaactatgccactcactcagacgacagctactaccccggaccctttggggggggaatgactacagacaaatttactctaagaatactgtatgatgagtacaagaggtttatgaactactggaccgcctcaaacaaggacctagacctctgtagatacctaggagctactctatatgtgtttagacacccagaagtagactttatactaattataaacacctcccctccatttctagacacagaaataacagggcccagcatacacccaggcatgatggccctcaacaaaagagccaggtggatacctagcttaaaaaacagaccaggcagaaagcactatgtaaagattaaagtaggagccccccgaatgttcacagataagtggtacccccagacagacctctgtgacatgacactcctaacgatttttgccagtgcggcggatatgcaatatccgttcggctcaccactaactgacactatagttgtgtcattccaagttctgcaatccatgtacaacgactgcctaagtgtacttcctgaaaattttgcagacagaacaggcaaaggcgcccagctatataaaaaaataattaatcatttaccctactacaacaccacacaaacacaagcacaatttaaaagatttgtagaaaacagtgcagcaaccaacggtgacaatatatgggcaaactacataaatactaagaagttctcagaaacagaacaatcaaagaatgatacaaacataggaggcccttacaccagttattcagactcatggtacaaaggcacagtatacaatgagaaaattaaacagatacctgaaaaagcaagtaaattatactacgaacaaaccaaaaaccttattggcattacatttacaggatccacacacagactacactactgtggaggcctatattcttccgtatggctatcagcaggtagatcctactttgaaaccaaaggcccatacacagacatcacttacaaccccttttcagacagaggagagggtaatatgctatggatagactggctaactaaagatgactcagcttactcaaaaacaagtagcaagtgcctcatagaacacttgcccctgtgggccgcagtatacggatacaaagaatactgcagcaaagtcacaggagacacaaacatagaacacaactgtagatgtgttataagaagcccctacacagtaccacagctattagaccacaacaatcccctcagaggttacgtgccttatagcataaactttggaaatggtaaaatgccaggcggtagcagcctagtacccattagaatgagagccaagtggtaccccactcttttccaccaaaaagaagtactagaggccatagcgcaggcgggcccctttgcataccactcagacattaaaaaagtgtccctgggcataaagtacagatttaagtgggtatggggtggcaaccccgtgtcccaacaggttgttaaaaacccctgcaagaccacccaaggttcctcgggcaatagagtgcctcgatcaatacaagtcgttgacccgcggtacaacgcgccagagctcaccatacacgcgtgggacttcagacatgggttctttggcagaaaagctattaagagaatgcaagaacaaccaatacctcatgacactttttcagcagggttcaaacgcagtcgccgagacacagaagcactccaatccagtcaagaagagcaacaaaaagaaaacttacttttcccagtccagcagctcaagcgagtccccccgtgggagacctcgcaagagagccaaagcgaggaagaaaactcgcaaaaacaggagaccctctcccagcaactcagagaccagctgcacaagcagcggctcatgggagagcaactccgatcgctcctctaccaaatgcagagggtccaacaaaatcaacacataaaccctatgttattgccaaagggtctggcattaacttctatttctcacaatgtaatatagatatgtttggtgaccccaaaccctacaagccctcctccaatgactggaaggaggagtacgaagccgcaaagtactgggacagaccccccagacacgacctgagaagcacccccttctacccctgggcccccacccccaaaccatacaatgtcaactttgccctcaactacaaataaacggtggccgtgggagtttcacttgtcggtgtctacctcttaaggtcactaagcactccgagcgtaagcgaggagtgcgaccctctaccaaggggcaactccctcgaagtccggcgctacgcgcttcgcgctgcgccggacatctcggaccccccctccacccgaaacgcttgcgcgtttcggaccttcggcgtcgggggggtcgggggctttactaaacagactccaaggtgccattggacactgagggggtgaacagcaacgaaagtgagtggggccagacttcgccatagggcctttatcttcttgccatttgtccgcgaccgggggtcgctcctaggcgcggaccccgtttcggggtccttccgggttcgtcggcgccgttccagtgacgtcacgggcgccatcttaagtggctgtcgccaaggattgacgtcacagttcaaaggtcatcctcggcggtaaccgcaaagatggcggtcaatctcttccgggtcaaaggtcgtacatacgtcataagtcacatgacaagggtccacttaaacacggaagtaggccccgacatgtgactcgtcacgtgtgtacacgtcacggccgccattttgttttacaaaatggccgacttccttcctcttttttaaaaaaaggcgcgaaaaaaccgtcggcgggggggccgccattttagcttcgg

SEQ ID NO: 486 - protein, 767 aa, Alphatorquevirus sp.
MAYGWWWRRRRRPWRRRRWRRWRRRRRPRRRRPRRRYRRRRTVRRRGRGRWTRRYRRWRRKGKRRGKKKIIIKQWQPNYTRRCNIVGYMPLLICGENTVATNYATHSDDSYYPGPFGGGMTTDKFTLRILYDEYKRFMNYWTASNKDLDLCRYLGATLYVFRHPEVDFILIINTSPPFLDTEITGPSIHPGMMALNKRARWIPSLKNRPGRKHYVKIKVGAPRMFTDKWYPQTDLCDMTLLTIFASAADMQYPFGSPLTDTIVVSFQVLQSMYNDCLSVLPENFADRTGKGAQLYKKIINHLPYYNTTQTQAQFKRFVENSAATNGDNIWANYINTKKFSETEQSKNDTNIGGPYTSYSDSWYKGTVYNEKIKQIPEKASKLYYEQTKNLIGITFTGSTHRLHYCGGLYSSVWLSAGRSYFETKGPYTDITYNPFSDRGEGNMLWIDWLTKDDSAYSKTSSKCLIEHLPLWAAVYGYKEYCSKVTGDTNIEHNCRCVIRSPYTVPQLLDHNNPLRGYVPYSINFGNGKMPGGSSLVPIRMRAKWYPTLFHQKEVLEAIAQAGPFAYHSDIKKVSLGIKYRFKWVWGGNPVSQQVVKNPCKTTQGSSGNRVPRSIQVVDPRYNAPELTIHAWDFRHGFFGRKAIKRMQEQPIPHDTFSAGFKRSRRDTEALQSSQEEQQKENLLFPVQQLKRVPPWETSQESQSEEENSQKQETLSQQLRDQLHKQRLMGEQLRSLLYQMQRVQQNQHINPMLLPKGLALTSISHNVI

SEQ ID NO: 487 - protein, 159 aa, Alphatorquevirus sp.
LAGLWARLLKMHFSRCSRKKRTLSLLPLHHSQKTRPSVKGMWRPPTRNAFTIQRDWFYSCFHSHASMCGCADFISHFNHIAAMLGRPEDQNPPPPPGALRPLPALPASSETPGDRAPWPMGGGGGDGGARGGGGDGAAGDVAEDPADADLVAAIDAAEQ

SEQ ID NO: 488 - protein, 57 aa, Alphatorquevirus sp.; identical to SEQ ID NO: 287

SEQ ID NO: 489 - DNA, 3573 bp, Alphatorquevirus sp.
cgggtgccggaggtgagtttacacaccgcagtcaaggggcaattcgggctcgggactggccgggctatgggcaaggctctcaaaaaagcatgtttatcggtaaaatttacagaaagaaaaggaaagtgccactgtacagcctgccagatccaaagaagaaactacctactagtatgagccactggagcagacccgtccaccatgcaacggggatcgaacacctctggtaccagtctgttattaacagccattctgctagctgcggttgtggcgatcctgtacgccactttacttatcttgctgagaggtatggttttgccccaactccccgcgccccgccagtagccccgacgcccaccatccgtagagccaggcctgcgcctgccgctccggagccccgtgccctaccatggcatggggatggtggagaagaaggcgcaagtggtggtggagacgccggttcgcccgaggcagagttcgcagacgacggattagacgccctcgtcgccgcactcgacgaagaacagtaaggagacgcagacaatggaggagggggcgacccagacgcagactatttaagcgaaagagacgctttaagagacgcagacgaaaacctaagataaaaataacccagtggcagcctagtaaagtaaagagatgctttatgataggctactttccagcactaatatgtgggcagggaaggtggtcagaaaactttaccagccacatagaagacaagacccctaagggacccttcggaggagggcacagcacagccaggctatctttaaaagtactgtacgaggaaaaccagaagcatcacaacttctggactgccagcaacaaagaactagagctagccaggttctttggcagtacctggacactgtacagacacgaagaggtagactacatatgcacctttaacagaaaaagccccctgggaggcaacctgctaacagcacccagtctgcacccgggggccgccatgctatccaaacataaaatactagtacccagttttaaaaccagaccgggcggaaaacccactgtaaaatttagaataagaccaccaacaacactaatagacaaatggtactttcaaaaagatatttgtgacactacactgctgaacattaactttgttgcatgtgacttgcggtttccgttctgctcaccacaaactgacaatgtttgtgtaacatttcaagtcctttccgcggtttataacgacttcctctctataaccaacagcaacttacaagcaacaaattgggaaagtgaatacacaaagtttttaaagaaagcatttccaacagacagaagcattaataaattaaacacatttacaacagaaggggcctttagtcacccaaaagtagaaaagtttaaaccagtaattccactacaccaagataaatactttcaagacaaagacggtcaatggggagacccaatacacattacagacagtcaaagtagagaaaatattatacagaaaattgttaagaatgcaagaaactacctaaaaaaatacacagatgagtttaaacaatttccaaacattgcccagttccaccacggattttttacacagtggacaggcatatacagtgctgcttttttaaactaccatagaatatctccagaagtaccaggcctatacacagatatcatctacaacccacttgtagacaaaggcataggaaatcacatatggatagactacctcagcaaaccagaccctaacttagatccagtaaaaagtaaatgccacatagcagacctgcctatgtggatggcaacctttggcctagtagactggtgcaaaaaagacacaggcaactggggcatacccgcgtgggccagagtactaatgatatgtccctatacgtttccacctatgtatgaccaaagcaacccaaccagaggatttatacccataggttacaacttctcacaaggactaatgccagacggcagtaaatacattccaatgcaactgagagctaagtggtaccccaacctgttaaaccaacaagcagtacttgaagacataagtgagtcaggaccctttgcatttagagaaaaaaaacctagcgccagcataacagtaaaatacaaatttagatggcactttgggggcaaccctgtgtccgaacaggttattgcagacccatgccaacaaccaacctttgaaatgcccggaaccggttcgctgcctcgcagactacaagtcacggacccgaaactcctcgggccacactacacattccacagctgggactggagacgtgactactttaacagaaagactcttaagagaatgtcagaacaacaagaaacttctgagtttttattcccaggcccaaaaaaacccagagtggatctcggggtcgtccaagctgtcgaaaaagtctcttccccgaggaaaagagaacagaaaccgtgggaagacagcgagcagcaatcagagacagaagccctctcggaggaagaagaagagggctcgatacaccagcagctccagcagcagctgcagcagcaaaaacagctcaggagaggaatcaactgcctcttcgagcagctagtaaaaacacagcagggagtacacctagatccttccctcttgtaggccccagacagtggctgtttccagaaagaaagccagcccctgcccctagctcgggagactgggccacagagtatctagcagctagagtatttgacagacccccaagaagcaaccttaaagatacaccctactacccctacattaaaaaccagtacaacgtgtactttgatctaacctttgaataaagtgcagtttcaaatttgcaaggccgtgggagtttcactggtcggtgtctacctctaaaggtcactaagcactccgagcgttagcgaggagtgcgacccttccccctgactcaacttcttcggagccgcgcgctacgccttcggctgcgcgcggcacctcagacccccgctcgtgctgacacgctcgcgcgtgtcagaccacttcgggctcgcgggggtcgggaattttgctaaacagactccgagttgccattggacactgtagctgtgaatcagtaacgaaagtgagtggggccagacttcgccataaggcctctatcttcttgccatttgtccgtgtcgggggttgccataggcttcgggctcggttttaggccttccggactacaaaatgcgccatttcagtgacgtcacgaccgccatcttaagtagttgaggcggacggtggcgtgagttcaaaggtcaccatcagccacacctactcaaaatggaggtcaaattcttccaggtcaaaggtcaccggcgccatcttaagtcacgtgaccttctacgtcacggccaccattttagtttacaaaatggccgacttccttcctctttttcaaaaaaaagcggaagtgccgccgcggcggcggggggcggcgcgctgcgcgcgccgcccagtagggggcgccatgcgcccccccccgcgcatgcgcggggccgtccgcagcggcagcaccacggagggtgatccccgcgtcccgaggg

SEQ ID NO: 490 - protein, 742 aa, Alphatorquevirus sp.
MAWGWWRRRRKWWWRRRFARGRVRRRRIRRPRRRTRRRTVRRRRQWRRGRPRRRLFKRKRRFKRRRRKPKIKITQWQPSKVKRCFMIGYFPALICGQGRWSENFTSHIEDKTPKGPFGGGHSTARLSLKVLYEENQKHHNFWTASNKELELARFFGSTWTLYRHEEVDYICTFNRKSPLGGNLLTAPSLHPGAAMLSKHKILVPSFKTRPGGKPTVKFRIRPPTTLIDKWYFQKDICDTTLLNINFVACDLRFPFCSPQTDNVCVTFQVLSAVYNDFLSITNSNLQATNWESEYTKFLKKAFPTDRSINKLNTFTTEGAFSHPKVEKFKPVIPLHQDKYFQDKDGQWGDPIHITDSQSRENIIQKIVKNARNYLKKYTDEFKQFPNIAQFHHGFFTQWTGIYSAAFLNYHRISPEVPGLYTDIIYNPLVDKGIGNHIWIDYLSKPDPNLDPVKSKCHIADLPMWMATFGLVDWCKKDTGNWGIPAWARVLMICPYTFPPMYDQSNPTRGFIPIGYNFSQGLMPDGSKYIPMQLRAKWYPNLLNQQAVLEDISESGPFAFREKKPSASITVKYKFRWHFGGNPVSEQVIADPCQQPTFEMPGTGSLPRRLQVTDPKLLGPHYTFHSWDWRRDYFNRKTLKRMSEQQETSEFLFPGPKKPRVDLGVVQAVEKVSSPRKREQKPWEDSEQQSETEALSEEEEEGSIHQQLQQQLQQQKQLRRGINCLFEQLVKTQQGVHLDPSLL

SEQ ID NO: 491 - protein, 146 aa, Alphatorquevirus sp.
MFIGKIYRKKRKVPLYSLPDPKKKLPTSMSHWSRPVHHATGIEHLWYQSVINSHSASCGCGDPVRHFTYLAERYGFAPTPRAPPVAPTPTIRRARPAPAAPEPRALPWHGDGGEEGASGGGDAGSPEAEFADDGLDALVAALDEEQ

SEQ ID NO: 492 - protein, 82 aa, Alphatorquevirus sp.; identical to SEQ ID NO: 400

SEQ ID NO: 493 - DNA, 3573 bp, Alphatorquevirus sp.
ttcgcgcgcgaggtgagtttacacaccgcagtcaaggggcaattcgggctcgggactggccgggctatgggcaaggctcttaaagcgtacgtcccccgctatgtttctcggcaggttgtggaggaaacagaaaaggaaagtgcttctgctggctgtgcgagctccacagaagacatcttccatgagtatctggcgtccccccctcgggaatgtctcctacagggagagaaattggcttcaggccgtcgaaggatcccacagttctttttgtggctgtggtgattttattcttcatcttactaatttggctgcacgctttgctcttcaggggcccccgccggagggtggtccgcctcggccgaggccgccgctcctgagagcgctgccggcccccgaggtccgcagggagacgcgcacagagaacccgagcgcctccggtgagccatggcctggcgatggtggtggcagagacgatggcgccgccgcccgtggccccgcagacggtggagacgcctacgacgccggagacctcgacgacctgttcgccgccgtcgaagaagagcaacagtaaggaggcggaggtggaggggcagacgtgggcgacgcacatacacccgacgcgcggtcagacgcagacgcagacccagaaaaagacttgtactcactcagtggagcccccagacagtcagaaactgctccatcaggggtatagtgcccatggtaatatgcggacacacaaaagggggtagaaactatgccatccacagcgaagacttcactacacagatacaacccttcgggggcagcttcagcacgaccacctggtcgctaaaagtactctgggacgaacaccaaaaatttcagaacaggtggtcctatccaaacacacagctagaccttgccaggtacaggggagtgaccttctggttctacagagaccagaaaacagactacatagtacaatggagcagaaatcctccctttaaactaaacaaatacagcagctccatgtaccatcctggaatgatgatgcaggcaaaaaaaaaactagtagtgcctagttttcaaactagacctaaaggcaaaaagagatacagagtaagaataagaccccccaacatgtttgctgacaagtggtacactcaagaggacctgtgtccggtacctcttgtgcaaattgtggtttctgcggccagcctgctacatccgttctgcccaccacaaacgaacaacccttgcatcaccttccaggttttgaaagacatctatgacaattgcataggagttaactctacccaaacagcagcatattcaacacttcaaaaaaaattatacactacctgcacatactttgaaacaacacaagtactagcccaactatctccacactttcaacctgcgttaaaagccaccaatctaacacaaaactcaaatgctaccacaacaacactaggaaactatgaaccacagctaaaaagcacaggtagcttttacacaggtaggaatccagtttttggcatgtgtaaatacaacccaactaaggaaacactagaacgtgccaacgactggttctggcaaaatctaatgcacgaaaatgacttacattccagctatggcaaagccaacctaaagtgtatggagtaccacacaggcatatacagctccatatttctaagtccccaaaggtcactagaattcccagcagcataccaagacgtcacctacaaccccaactgtgacagagcagcaggtaacagagtctggtttcagtacagtacaaaaatgaacacagacttcgatgtaactcaatgcaaatgcgtcttagaaaacattcccctgtgggcggccttccatggctacgcagactttatagagcaagaactgtccataagctcagaaatacgcaactttggcatagtttgctttcagtgcccctacactttccccccttgctttaacaaacaaaacccaaacaaaggctacgtgttctatgacaccacctttggtaatggaaagatgccagatggatcagggcacatacccatctactggcaacagagatggtggatcagactagccttccaggtacaagtcatgcacgactttgtgctctgcggtccctttagctacaaagatgacctagccaacaccacacttacagccaggtacaagttcagattcaaatggggcggtaatatcatccccgaacagattatcaagaacccgtgtcaaagagagcagtccctcgcttcctaccccgatagacaacgtcgcgacctacaagttgttgacccatcaaccatgggcccgatctacaccttccacacatgggactggcgacgggggctttttggtacagatgctatccagagagtgtcacaaaaaccgggagatgctctccgctttacaaaccctttcaaaagacccagatatcttcccccgacagacggagaagactaccgacaagaagaagacttcgttttacaggaaaaaagacggcgcacattcacagaagaagtccaggacgaggagagccccccgcaaagcgcgccgctcctacagcagcagcagcagcagcgggagctctcagtccagctcgcagagcagcagcgactcggagtccaactccgatacatcctccaagaagtcctcaaaacgcaagcgggtctccacctaaaccccctattattaggcccgccacaaacaaggtctatctctttgagccccccagaggcctactcccaatagtgggcaaagaggcctgggaggacgagtactgcacctgcaagcactgggatcgccctcccagaaccaaccacctagacatccccacttatccctggatgcccacaaacttcaaagtcagcttcaaacttggatttaaaccctaaataaaaatacaaggccgtacactgttcactcgtcggtgtctacctctataagtcactaagcactccgagcgcagcgaggagtgcgaccctcaggggtgggtgcaacgccctcggcggccgcgcgctacgccttcggctgcgcgcggcacctcggacccccgctcgtgctgacacgctcgcgcgtgtcagaccacttcgggctcgcgggggtcgggaattttgctaaacagactccgagttgccattggacactgtagctgtgaatcagtaacgaaagtgagtggggccagacttcgccataaggcctttatcttcttgccattggtccgtctcgggggtcgccataggcttcgggctccgttttaggccttccggactaccaaaatggcggattccgtgacgtcatggccgccattttaagtaaggcggaacaggctgtcaccccgtgtcaaaaggtcaggggtcagccttccgctttgcacaaaatggagggcaatatcttccgggtcagaggtcgctaccgcgtcataagtcacgtggggacggctgctgtgaacccggaagtagctgacccacgtgacttgtcacgtgactagcacgtcacagccgccattttgttttacaaaatggccgacttccttcctcttttttgaaaataacggcccggcggcggcgcgcgcgc

SEQ ID NO: 494 - protein, 767 aa, Alphatorquevirus sp.
MAWRWWWQRRWRRRPWPRRRWRRLRRRRPRRPVRRRRRRATVRRRRWRGRRGRRTYTRRAVRRRRRPRKRLVLTQWSPQTVRNCSIRGIVPMVICGHTKGGRNYAIHSEDFTTQIQPFGGSFSTTTWSLKVLWDEHQKFQNRWSYPNTQLDLARYRGVTFWFYRDQKTDYIVQWSRNPPFKLNKYSSSMYHPGMMMQAKKKLVVPSFQTRPKGKKRYRVRIRPPNMFADKWYTQEDLCPVPLVQIVVSAASLLHPFCPPQTNNPCITFQVLKDIYDNCIGVNSTQTAAYSTLQKKLYTTCTYFETTQVLAQLSPHFQPALKATNLTQNSNATTTTLGNYEPQLKSTGSFYTGRNPVFGMCKYNPTKETLERANDWFWQNLMHENDLHSSYGKANLKCMEYHTGIYSSIFLSPQRSLEFPAAYQDVTYNPNCDRAAGNRVWFQYSTKMNTDFDVTQCKCVLENIPLWAAFHGYADFIEQELSISSEIRNFGIVCFQCPYTFPPCFNKQNPNKGYVFYDTTFGNGKMPDGSGHIPIYWQQRWWIRLAFQVQVMHDFVLCGPFSYKDDLANTTLTARYKFRFKWGGNIIPEQIIKNPCQREQSLASYPDRQRRDLQVVDPSTMGPIYTFHTWDWRRGLFGTDAIQRVSQKPGDALRFTNPFKRPRYLPPTDGEDYRQEEDFVLQEKRRRTFTEEVQDEESPPQSAPLLQQQQQQRELSVQLAEQQRLGVQLRYILQEVLKTQAGLHLNPLLLGPPQTRSISLSPPEAYSQ

SEQ ID NO: 495 - protein, 171 aa, Alphatorquevirus sp.
LAGLWARLLKRTSPAMFLGRLWRKQKRKVLLLAVRAPQKTSSMSIWRPPLGNVSYRERNWLQAVEGSHSSFCGCGDFILHLTNLAARFALQGPPPEGGPPRPRPPLLRALPAPEVRRETRTENPSASGEPWPGDGGGRDDGAAARGPADGGDAYDAGDLDDLFAAVEEEQQ

SEQ ID NO: 496 - protein, 187 aa, Alphatorquevirus sp.
MGLATGAFWYRCYPESVTKTGRCSPLYKPFQKTQISSPDRRRRLPTRRRLRFTGKKTAHIHRRSPGRGEPPAKRAAPTAAAAAAGALSPARRAAATRSPTPIHPPRSPQNASGSPPKPPIIRPATNKVYLFEPPRGLLPIVGKEAWEDEYCTCKHWDRPPRTNHLDIPTYPWMPTNFKVSFKLGFKP

SEQ ID NO: 497 - DNA, 3573 bp, Alphatorquevirus sp.
cgggtgccggaggtgagtttacacaccgcagtcaaggggcaattcgggctcgggactggccgggccccgggcaaggctcttaaaaaatgcgctttcgcagggttaccgagaaaaggaaagtgcttctgcaaactgtgcgaacttcaaagaaggctaggcggcttctaggtatgtggcagccccccgtgcacaatgttcccggcattgagagaaactggtacgagagctgttttagatcccatgctgctgtttgtggctgtggcgactttgttggccatcttaatcatctggcaactactctgggtcgtcctccacgtcctgggcccccaggcggaccccgcacgccgcaaataagaaacctgccagcgctcccggcgcccgagggcgaacccggtgacagagcgccatggcgtggggcttctggggccgacgccgccggtggagacggtggagagcgcggcgcagacggtggagaccccgcagacgtaggagacgacgccctgctcgccgctttcgagctcgtcgaagagtaaggaggcgcggggggcggtggcgcagacgatacagaaaatggcgacgccgcaagggcagacggactcacagaaaaaaaataatcataagacagtggcaacctaactttataagacgctgctacattataggctacttacctctgatattctgtggtgaaaataccaccgcccagaactatgccactcactctgacgatattataagcaaaggaccgtacggggggggcatgactaccaccaaatttactctgagaatactgtacgacgagtttaccaggtttatgaacttttggactgtcagtaacgaagacctagacctgtgtagatacgtgggcgccaaactcatattttttaagcaccccacggtagactttatagtacagataaacactcagcctccgttcttagacacgcacctcaccgcggcaagcatacacccgggcattatgatgctcagcaaaaagcacattctcataccctcactaaaaaccaggcccagcagaaagcacagggtggtcgtcagggtgggcccacctagactgtttcaagacaagtggtacccccagtcagacctgtgcgacacagttctgctttccatatttgcaaccgcctgcgacttgcaatatccgttcggctcaccactaactgaaaacccttgcgtcaacttccagatcctggggccccagtacaaaaaacaccttagtattagctccactatggatgatactaacaaagaccattataaaaacaacttatttaaccaaactgcgctatacaacacctttcaaaccatagctcagcttaaagagacaggacaaactgtaggcatatcaccaacttggaatgaggtgcaaaatagtactgcccttagtaataacggtacaaatgcaactgaaagcaaagacacttggtacaaaggaaacacatacaagtcaaagatatcagaattagcacagaaaacaagagaaaggtttaaagctgcaacactagcagcactgccaaactaccccacattaatgtccactgacctgtatgagtatcactcaggcatatactccagcatatatttatcagctggcagaagctactttgaaacaacaggggcctactctgacattatatacaaccccttcacagacaaaggcacaggcaacattatctggatagactacctaacaaaagacgacactatttttgtaaaaaacaaaagcaaatgtgaaatacaggacatgcccttgtgggctgcattcacaggatacacagagttctgtgctaaatacacaggagactctgccataatatacaatgccagagtacttataagatgcccatacacagaacccatgctaatagaccactcagacccaaacaaaggctttgtcccctactcatttaactttggcaacggaaagatgccaggaggcagctccaacgtacccataagaatgagggccaagtggtacgtgaacattttccaccaaaaagaagtactagaagccatagtacagagcggaccgtttggctacaagggcgacataaaatcagcagtactgagcatgaaatacagatttcactggaaatggggcggaaaccctatatccaaacaggtcgtcaggaatccctgctccaactccagctcctccgcggcccatagaggacctcgcagcgtacaagcagttgacccgaaatacgttaccccggaggtcacgtggcactcgtgggacatcagacgaggactctttggcaaagcaggtattaagagaatgcaacaagaatcagatgctctttaccttcctccaggaccactcaagaggcctcgcaaggacaccaacgcccaagacccagaggagcaaaacgaaagctcaggtttcagagtccagcagcgagtcccctgggtccactccagccaagaaacgcaaagctcccaagaagagacgcagccacaggggtcggtacaagaccaactactcctccagctccgagagcagcgagtactccgactccagctccaacaactcgcaacccaagtcctcaaagtccaagcagggcaaggcctacaccccctattatcttcccaagcataaacaaggcctttatgtttgagcccaacggtcctaaacccatacagggctaccacgattggctagaggagtacacctgctgcaaacactgggacagacctcccagaaagctacacacagacatacccttctacccctgggcaccaaaaccccaagaccaaataaaggtctccttcaaacttaacttccaataaaatttcaaggccgtgggagtttcacttgtcggtgtctgcttcttaaggtcgccaagcactccgagcgccagcgaggagtgcgaccccccccctgtagcaacgccttcggagccgcgcgctacgccttcggctgcgcgcggcacctcagaccccccctccacccgaaacgcttgcgcgtttcggaccttcggcgtcgggggggtcgggagctttattaaacagactccgagttgccattggacactggagctgtgaatcagtaacgaaagtgagtggggccagacttcgccatagggcctttatcttcttgccattggatcgtaagggggttgccataggcttcggcctggtttacaggccttccggactacaaaaatggcgcattccgtgacgtcacgggcgccattttaagtaaggcggaagcagctccaccttctcacaaaatggcggcggagcacttccggcttgcccaaaatggcgggcaagctcttccaggtgaaaggtcggcagctacgtcacaagtcacgtgggaggcgttggcgtcacaacccggaagccaatcctctcacgtggcctgtcacgtgattgctacgtcatcggcgccatctaaccacgtgactcccgcaggccaaccagagtctacgtcgtgcatttcctgggcatggtctacatcataatataagaacttgcacttccgaatggctgagttttccacgcccgtccgcagcgagaacgccacggagggagatcctcgcgtcccgaggg

SEQ ID NO: 498 - protein, 736 aa, Alphatorquevirus sp.
MAWGFWGRRRRWRRWRARRRRWRPRRRRRRRPARRFRARRRVRRRGGRWRRRYRKWRRRKGRRTHRKKIIIRQWQPNFIRRCYIIGYLPLIFCGENTTAQNYATHSDDIISKGPYGGGMTTTKFTLRILYDEFTRFMNFWTVSNEDLDLCRYVGAKLIFFKHPTVDFIVQINTQPPFLDTHLTAASIHPGIMMLSKKHILIPSLKTRPSRKHRVVVRVGPPRLFQDKWYPQSDLCDTVLLSIFATACDLQYPFGSPLTENPCVNFQILGPQYKKHLSISSTMDDTNKDHYKNNLFNQTALYNTFQTIAQLKETGQTVGISPTWNEVQNSTALSNNGTNATESKDTWYKGNTYKSKISELAQKTRERFKAATLAALPNYPTLMSTDLYEYHSGIYSSIYLSAGRSYFETTGAYSDIIYNPFTDKGTGNIIWIDYLTKDDTIFVKNKSKCEIQDMPLWAAFTGYTEFCAKYTGDSAIIYNARVLIRCPYTEPMLIDHSDPNKGFVPYSFNFGNGKMPGGSSNVPIRMRAKWYVNIFHQKEVLEAIVQSGPFGYKGDIKSAVLSMKYRFHWKWGGNPISKQVVRNPCSNSSSSAAHRGPRSVQAVDPKYVTPEVTWHSWDIRRGLFGKAGIKRMQQESDALYLPPGPLKRPRKDTNAQDPEEQNESSGFRVQQRVPWVHSSQETQSSQEETQPQGSVQDQLLLQLREQRVLRLQLQQLATQVLKVQAGQGLHPLLSSQA

SEQ ID NO: 499 - protein, 148 aa, Alphatorquevirus sp.
MRFRRVTEKRKVLLQTVRTSKKARRLLGMWQPPVHNVPGIERNWYESCFRSHAAVCGCGDFVGHLNHLATTLGRPPRPGPPGGPRTPQIRNLPALPAPEGEPGDRAPWRGASGADAAGGDGGERGADGGDPADVGDDALLAAFELVEE

SEQ ID NO: 500 - protein, 127 aa, Alphatorquevirus sp.
LGPLQPRNAKLPRRDAATGVGTRPTTPPAPRAASTPTPAPTTRNPSPQSPSRARPTPPIIFPSINKAFMFEPNGPKPIQGYHDWLEEYTCCKHWDRPPRKLHTDIPFYPWAPKPQDQIKVSFKLNFQ

SEQ ID NO: 501 - DNA, 3571 bp, Alphatorquevirus sp.
gccgccccccccgtgagtttacacaccgcagtcaaggggcaattcgggctcgggactggccgggccctgggcaaggctcttaaaaaagctatgtttctacgcagagctcaccagaaaaggatactgctactgcaaattgtgccagctacaccgcaggcacctgccatgagctttcgcgcacccaccattcaaggtggagtccgagaccagcaatggttcgaggcctgtattcgatcacacgccgctttctgtggctgtggcgatcccgtgcttcattttaataacattgctgctcgctttcactatctgcctgctacctcctcgcctctggaccctaccggaggagcgccgccgcgccgcccgcagctacgccgccttgcagcgctcccggcggcgccccccagcacctctgagagccagccatggcgtggtggtggtggagacgatggcgccggtggcccagacgccgctggaggacccgtcgccgacgccgagtacgaaccagaagacctagacgacctgttcgccgctatcgaagcagatacacagtaaggaggcgaaggcggagagggtggcgagggcgacgtaggcgcagactgtacagacgcagatacactataaggagaaaaagaaagaaactcatactgaaacagtggcagcccgccaatgttagaaaatgcaaaataaggggcctgtttccaatagttatctgtggacacggcaagagtgccaataactatgccctacactcggacgacgtactaccaatgagacaggcttttggaggggctctaagcactgtatcttttagcctaaaagtactgtatgatcagtatttaagacacctgaacagatggagcacctcaaacgatgtgctagaccttgccaggtacctaggatgcaccttttggttttacagagacaaaaaaactgactacttagtgcagtatgacatctctgctccctacaagctagacaaagacagcggaccgtcctaccatccaggagtactcatgcaagccaaacacaaagtactagtgcccagttttgacacgcaccccaaaggaaaagctaaagtaaaaattagaattaagccccccaaactttttatagataagtggtactctcaagaggatctgtgtaccgttaatcttgtaacatttgtggtcagcctagcttccttctcacatccgttctgcccaccactaacgaacaacccttgtgtaaccttccaagtgttgaacaacttctacaattccgttataggttcctcaattaatgttgcagacactacagtaaactcagtcttcaataactttttatataacaaaggagccttttaccaacaagtactagtagactcttacattaaagaaattaaaacaaatcctgatggctctcctgtagttgcaggccctaacgatagaccctcaacaagcgaaatgagtgcttataacgaatgggtaaaatctaaatttaaagtaccaggaacatctgttcactacaacttttgcacatacaaacctgacagtgccaaattaaatacacttagacaatactactttcattgggaaactgcacagtccacaaaccataaatttaatgtagaacacgtaccacacgcgggcacaaaacctacaaaagactggtgggagtatagaacaggcctattttcacctatatttcttagtccatacagaaccagtcccatagacagctggttgctggcatacagagacgtgtcctacaatccactaaatgacaagggagtaggcaaccgagtatggatgcagagtctagtaaaaccagacacccagttcacactgccctcatgtgtatttgtactagaagacaaacccctgtggtgctgtttctatggctatactgactttataaagagtgtcagagagggccaagacatagactttgaaaacattatttgcattcagtgtccttacacagagcctcctctatatgaaaagcacaaccccaacatgggcttcgtagtatatgacagcaactttggcaatggcaaatggctagacggaaccgggttcgtcccggtagaataccagtgccgctggcggccctgcatagctttccagcaacaggtactaacagacattaccatgagcgggcccttcagctacaaagacgatgttaaaaacacctgcatacaggccaaatacagatttgactttaaatggggcggcaatattctttatcagcagaccatcagaaacccatgtaaagacggacaagctaccgattcccatagacagcctagagacgtacaagtcactgacccgcttaccatgggaccccgatacgctttccaccaatgggactggcgacgtgggtggcttagtgacaaagctctcaaaagaatgctccagaaaccgctcgattttgaactgtatccaatcaatccaaagagacctagactattccctcccacagaagcaggagaaggagaggtcccaaaagaaagctcattttcagaggaagaaagcgagccgtcctcgcaagaagagacgaggccggagaggctccagctcaagctccgacagcagctccgagagcagcgagagctccgagtccacctcaagcacctcttccagcagctcctcaagacacaagcggggctccacctcaacccgctcttattcaaccagcaataaacaaagttcttctgtttccagaaatgggtccaaagcccgctcctactagtggagactgggaaacagaataccaggcctgtaaattctgggacagacctcccagaaaatttctcaccgatacacccttttatccctggatgcctccggcacccccaaaattctctgttagtttcaaactaggcttcaaaccctaaataaacaaggccatacactgttcacttgtcggtgtctacctctataagtcactaagcactccgagcgaagcgaggagtgcgacccccctacccggtagcaacttcttcggagtccggcgctacgccttcggctgcgccggacacctcagaccccccctccacccgaaacgcttgcgcgtttcggaccttcggcgtcgggggggtcgggggctttattaaacagactccgagttgccattggacactgtagctgtgaatcagtaacgaaagtgagtggggccagacttcgccataaggcctttatcttcttgccatttgtccgtctagagggtcgccataggcttcgggctccattttcaggccttccggactacaaaaatggccgttccgtgacgtcacagccgccattttgagtcagcgcgggggagagtaacgtatagttcaaaggtcactatcttccgggctgtcaccaaatggcggacaacttcttccgggtcaaagatcatgcctacgtcataagtcacgtgacagggaagagttatcatatgcggaagtaatcctcacccacgtgacttgacacgtggtgcatacgtcacagccgccattttgttttacaaaatggccgacttccttcctcttttttcaaaatggcgtgccggcggcggcgcgcgcgctacgcgcgcgcgccggggggct

SEQ ID NO: 502 - protein, 752 aa, Alphatorquevirus sp.
MAWWWWRRWRRWPRRRWRTRRRRRVRTRRPRRPVRRYRSRYTVRRRRRRGWRGRRRRRLYRRRYTIRRKRKKLILKQWQPANVRKCKIRGLFPIVICGHGKSANNYALHSDDVLPMRQAFGGALSTVSFSLKVLYDQYLRHLNRWSTSNDVLDLARYLGCTFWFYRDKKTDYLVQYDISAPYKLDKDSGPSYHPGVLMQAKHKVLVPSFDTHPKGKAKVKIRIKPPKLFIDKWYSQEDLCTVNLVTFVVSLASFSHPFCPPLTNNPCVTFQVLNNFYNSVIGSSINVADTTVNSVFNNFLYNKGAFYQQVLVDSYIKEIKTNPDGSPVVAGPNDRPSTSEMSAYNEWVKSKFKVPGTSVHYNFCTYKPDSAKLNTLRQYYFHWETAQSTNHKFNVEHVPHAGTKPTKDWWEYRTGLFSPIFLSPYRTSPIDSWLLAYRDVSYNPLNDKGVGNRVWMQSLVKPDTQFTLPSCVFVLEDKPLWCCFYGYTDFIKSVREGQDIDFENIICIQCPYTEPPLYEKHNPNMGFVVYDSNFGNGKWLDGTGFVPVEYQCRWRPCIAFQQQVLTDITMSGPFSYKDDVKNTCIQAKYRFDFKWGGNILYQQTIRNPCKDGQATDSHRQPRDVQVTDPLTMGPRYAFHQWDWRRGWLSDKALKRMLQKPLDFELYPINPKRPRLFPPTEAGEGEVPKESSFSEEESEPSSQEETRPERLQLKLRQQLREQRELRVHLKHLFQQLLKTQAGLHLNPLLFNQQ

SEQ ID NO: 503 - protein, 161 aa, Alphatorquevirus sp.
LGKALKKAMFLRRAHQKRILLLQIVPATPQAPAMSFRAPTIQGGVRDQQWFEACIRSHAAFCGCGDPVLHFNNIAARFHYLPATSSPLDPTGGAPPRRPQLRRLAALPAAPPSTSESQPWRGGGGDDGAGGPDAAGGPVADAEYEPEDLDDLFAAIEADTQ

SEQ ID NO: 504 - protein, 60 aa, Alphatorquevirus sp.
LFPEMGPKPAPTSGDWETEYQACKFWDRPPRKFLTDTPFYPWMPPAPPKFSVSFKLGFKP

SEQ ID NO: 505 - DNA, 3570 bp, Alphatorquevirus sp.
cgcttcgcgcaggtgagtttacacaccgcagtcaaggggcaattcgggctcgggactggccgggctatgggcaaggctcttaaagcgtacgtcccccgctatgtttctcggcaggttgtggaggaaacagaaaaggaaagtgcttctgctggctgtgcgagctccacagaagacatcttccatgagtatctggcgtccccccctcgggaatgtctcctacagggagagaaattggcttcaggccgtcgaaggatcccacagttctttttgtggctgtggtgattttattcttcatcttactaatttggctgcacgctttgctcttcaggggcccccgccggagggtggtccgcctcggccgaggccgccgctcctgagagcgctgccggcccccgaggtccgcagggagacgcgcacagagaacccgagcgcctccggtgagccatggcctggcgatggtggtggcagagacgatggcgccgccgcccgtggccccgcagacggtggagacgcctacgacgccggagacctcgacgacctgttcgccgccgtcgaagaagagcaacagtaaggaggcggaggtggaggggcagacgtgggcgacgcacatacacccgacgcgcggtcagacgcagacgcagacccagaaaaagacttgtactcactcagtggagcccccagacagtcagaaactgctccatcaggggtatagtgcccatggtaatatgcggacacacaaaagggggtagaaactatgccatccacagcgaagacttcactacacagatacaacccttcgggggcagcttcagcacgaccacctggtcgctaaaagtactctgggacgaacaccaaaaatttcagaacaggtggtcctatccaaacacacagctagaccttgccaggtacaggggagtgaccttctggttctacagagaccagaaaacagactacatagtacaatggagcagaaatcctccctttaaactaaacaaatacagcagctccatgtaccatcctggaatgatgatgcaggcaaaaaaaaaactagtagtgcctagttttcaaactagacctaaaggcaaaaagagatacagagtaagaataagaccccccaacatgtttgctgacaagtggtacactcaagaggacctgtgtccggtacctcttgtgcaaattgtggtttctgcggccagcctgctacatccgttctgcccaccacaaacgaacaacccttgcatcaccttccaggttttgaaagacatctatgacaattgcataggagttaactctacccaaacagcagcatattcaacacttcaaaaaaaattatacactacctgcacatactttgaaacaacacaagtactagcccaactatctccacactttcaacctgcgttaaaagccaccaatctaacacaaaactcaaatgctaccacaacaacactaggaaactatgaaccacagctaaaaagcacaggtagcttttacacaggtaggaatccagtttttggcatgtgtaaatacaacccaactaaggaaacactagaacgtgccaacgactggttctggcaaaatctaatgcacgaaaatgacttacattccagctatggcaaagccaacctaaagtgtatggagtaccacacaggcatatacagctccatatttctaagtccccaaaggtcactagaattcccagcagcataccaagacgtcacctacaaccccaactgtgacagagcagcaggtaacagagtctggtttcagtacagtacaaaaatgaacacagacttcgatgtaactcaatgcaaatgcgtcttagaaaacattcccctgtgggcggccttccatggctacgcagactttatagagcaagaactgtccataagctcagaaatacgcaactttggcatagtttgctttcagtgcccctacactttccccccttgctttaacaaacaaaacccaaacaaaggctacgtgttctatgacaccacctttggtaatggaaagatgccagatggatcagggcacatacccatctactggcaacagagatggtggatcagactagccttccaggtacaagtcatgcacgactttgtgctctgcggtccctttagctacaaagatgacctagccaacaccacacttacagccaggtacaagttcagattcaaatggggcggtaatatcatccccgaacagattatcaagaacccgtgtcaaagagagcagtccctcgcttcctaccccgatagacaacgtcgcgacctacaagttgttgacccatcaaccatgggcccgatctacaccttccacacatgggactggcgacgggggctttttggtacagatgctatccagagagtgtcacaaaaaccgggagatgctctccgctttacaaaccctttcaaaagacccagatatcttcccccgacagacggagaagactaccgacaagaagaagacttcgttttacaggaaaaaagacggcgcacattcacagaagaagtccaggacgaggagagccccccgcaaagcgcgccgctcctacagcagcagcagcagcagcgggagctctcagtccagctcgcagagcagcagcgactcggagtccaactccgatacatcctccaagaagtcctcaaaacgcaagcgggtctccacctaaaccccctattattaggcccgccacaaacaaggtctatctctttgagccccccagaggcctactcccaatagtgggcaaagaggcctgggaggacgagtactgcacctgcaagcactgggatcgccctcccagaaccaaccacctagacatccccacttatccctggatgcccacaaacttcaaagtcagcttcaaacttggatttaaaccctaaataaaaatacaaggccgtacactgttcactcgtcggtgtctacctctataagtcactaagcactccgagcgcagcgaggagtgcgaccctcaggggtgggtgcaacgccctcggcggccgcgcgctacgccttcggctgcgcgcggcacctcggacccccgctcgtgctgacacgctcgcgcgtgtcagaccacttcgggctcgcgggggtcgggaattttgctaaacagactccgagttgccattggacactgtagctgtgaatcagtaacgaaagtgagtggggccagacttcgccataaggcctttatcttcttgccattggtccgtctcgggggtcgccataggcttcgggctccgttttaggccttccggactaccaaaatggcggattccgtgacgtcatggccgccattttaagtaaggcggaacaggctgtcaccccgtgtcaaaaggtcaggggtcagccttccgctttgcacaaaatggagggcaatatcttccgggtcagaggtcgctaccgcgtcataagtcacgtggggacggctgctgtgaacccggaagtagctgacccacgtgacttgtcacgtgactagcacgtcacagccgccattttgttttacaaaatggccgacttccttcctcttttttgaaaataacggcccggcggcggcgcgcg

SEQ ID NO: 506 - protein, 767 aa, Alphatorquevirus sp.; identical to SEQ ID NO: 494

SEQ ID NO: 507 - protein, 171 aa, Alphatorquevirus sp.; identical to SEQ ID NO: 495

SEQ ID NO: 508 - protein, 187 aa, Alphatorquevirus sp.; identical to SEQ ID NO: 496

SEQ ID NO: 509 - DNA, 3568 bp, Alphatorquevirus sp.
cgggtgccgaaggtgagtttacacaccggagtcaaggggcaattcgggctcgggactggccgggctatgggcaaggctcttaaaaaagcatgtttttcggcagggtctggagaaagaaaagggcgctgccactgtccgagctgcgaactcctgcgaaaaaaccacctgtaatgagctggtcccaacctatgcacaatgtcaccacccgcgaaggcttcttttacgccgggtgtaagcagcttcataattgtttttgcggctgtgatgattttattaatcatcttcttcgcatccagacccagcagggtccctctccctcgcggcccttcactcctccgtcaacaccacgccctgtgatccgtagagccctgccggcaccggcggctccggacgcaccggcgccatggcgtggagctggtggtgggcccgccgccgacgcagaccgtggacccggaggagatggaggagactacgcacccgcagacctagacgacctgtacgccgccgtcgacgccgaaaacgcagagtaaggaggagacggtggggaaggagacgagggcgacggacactttacagacgcaaatttagaaagagacgcaggcgacgaaaaaagctagttttaacacaatggaaccctcagactattagagcatgttctataaggggctcagtgtgtctagttatgtgtggtcacacaaaagcaggcagaaactatgccctacactctgaagactatgtcccccaagtgcatgccatgggagggtcctttagcactaccacctggagcctaaaagcactatatgacgagcaccagaaattccataacaaatggagctaccctaacacccagctagacctagccagatacagaggatgccgctggtggttttacagagaccccaaagtagactacattgttacctactacactacacctccatttaaacttaacaaatacagttctcccatgctacaccctggcatgatgatacagtacaaaaaaaaaatactagtaccaagctatcaaacaaaaccaaaaggaaaaggcagaataagtgtttttattaagcccccaactctttttgaggacaaatggtacacccagcaagacctctgtcccgttaatcttttgtcacttgcggttagcgcatgttccttcctgcatccgttctgcccaccagaaagtgacaacatgtgtattacattccaagttttgaaagacttctattaccaacagatgggtgttacacaaattaatggcacaacactaactgaacctgataaaaacatttttaaaaaactttatgaaactccatccttctggcagtcccaccacacatcagcacagttaaacacatctcaaaagccaggcaagcaaacctcagaagcaatacctgaaagagagtggcttcaaggagacggtacaaataaatttaaaacaggaaacaatagtatatacggccaaccaaattataatcctaactataccaaattagaatcaattagacaatggtactggaagcaagaaacagagactaatgatgtacattcctcttatggccgtcctatatacaatgcagtagactaccacctaggaaagtacagcatgatatttttaagcccatacagaaccaacacacaatttgaaacagcatactcagacattacatacaacccaaacacagacaaaggactaggtaacaaaatgtggattcaatctgttactaaaacccacaccaaactagactcctcatgtagatgcttattagaagacattccactgtgggctatggccacaggatacggagagttttgtgagtcagaaattaactcagaggtgtggaacctatatattgtatgcattgtatgcccttacactaaaccaccactatggaaaaaaacagaaacgcctgaaggctgggtattttatgacacactgtttggagatggcaaaatgcccaccgggtcaggcctagtacccgtgtggctacagagcaggtggtaccccagactagtgttccaacaacaagtgctacacgatatataccttacagggccctttagttacaaagatgacctaaagagctttactataaatgccaggtacaaatttaaattcttatggggcggcactataatccccgaacaggtcattaaaaacccgtgcaaagagcaagacacgccattcacctttaccggtagacagcctcgcgacctacaaattactgacccgcagaccatgggcccagaatgggttttccacacctgggactggcgacgaggactatttggtgaaaatgctatcaaaagagtgtcagaacaaccaagcaatgatgcagactattatgctccaccaaaaaaacctagactattccctccaacagacctccaagagcaagaaagaggctcagatttcacactccaggagctcaggatcctctcggagagggcgccgtcgcaaacaagcgaagaagaggacccgcaggaggagcaccagctccagcagcaagagctccagctcagactccagcagcagttcagaatcaggcagcaactgcagcacctattcgtacaagtcctcaaaacccaagccggtctccatataaacccattatttttaaaccctgcataaaccaggtgttcatgtttcctcctgacacccctaaaccgattaccactgcagaagattggaaacatgagtatgaatcctgtaagtactggcatagaccccccagaaagtaccttacagaccgtcccttctacccctggatgcccaaggagccccctcagtgtcgtgtcagctttaaacttggcttccaataaaacagcaaggccattcaaatttcacttgtcggtgtctacctctataagtcactaagcactccgagcgccagcgaggagtgcgacccttcccccttactcaacttcttcggagccgcgcgctacgccttcggctgcgcgcggcacctcagacccccgctcgtgctgacacgctcgcgcgtgtcagaccacttcgggctcgcgggggtcggaaaatttgctaaacagactccaagttgccattggacactggagctgtaaatcagtaacgaaagtgagtggggccagacttcgccataaggcctttatcttcttgccatttgtccgtgtagggggtcgccatagacttcgggctcggttttaggccttccggactacaaaaaccgccattttagtgacgtcacggccgccattttaagtaaggcggaaacagctccactgtgtacaaaatggcggcggagcacttccggcttacacaaaatggccgccaatttcttccgggtcaaaggtcattgctacgtcatcggtgacgtggggagcctactgcgtcaaacgcggaagtaggccccgtacgtcactgtcacgtggtacatgcgtcacggccgccattttgttttacaaaatggccgacttccttccgcttttttaaaaaaaggcgccaaaaaacggctgcggcgggggcgcgcgcgctgcgcgcgcgccgtccgcagcggcagcaccacggagggtgatccccgcgtcccgaggg

SEQ ID NO: 510 - protein, 742 aa, Alphatorquevirus sp.
MAWSWWWARRRRRPWTRRRWRRLRTRRPRRPVRRRRRRKRRVRRRRWGRRRGRRTLYRRKFRKRRRRRKKLVLTQWNPQTIRACSIRGSVCLVMCGHTKAGRNYALHSEDYVPQVHAMGGSFSTTTWSLKALYDEHQKFHNKWSYPNTQLDLARYRGCRWWFYRDPKVDYIVTYYTTPPFKLNKYSSPMLHPGMMIQYKKKILVPSYQTKPKGKGRISVFIKPPTLFEDKWYTQQDLCPVNLLSLAVSACSFLHPFCPPESDNMCITFQVLKDFYYQQMGVTQINGTTLTEPDKNIFKKLYETPSFWQSHHTSAQLNTSQKPGKQTSEAIPEREWLQGDGTNKFKTGNNSIYGQPNYNPNYTKLESIRQWYWKQETETNDVHSSYGRPIYNAVDYHLGKYSMIFLSPYRTNTQFETAYSDITYNPNTDKGLGNKMWIQSVTKTHTKLDSSCRCLLEDIPLWAMATGYGEFCESEINSEVWNLYIVCIVCPYTKPPLWKKTETPEGWVFYDTLFGDGKMPTGSGLVPVWLQSRWYPRLVFQQQVLHDIYLTGPFSYKDDLKSFTINARYKFKFLWGGTIIPEQVIKNPCKEQDTPFTFTGRQPRDLQITDPQTMGPEWVFHTWDWRRGLFGENAIKRVSEQPSNDADYYAPPKKPRLFPPTDLQEQERGSDFTLQELRILSERAPSQTSEEEDPQEEHQLQQQELQLRLQQQFRIRQQLQHLFVQVLKTQAGLHINPLFLNPA

SEQ ID NO: 511 - protein, 146 aa, Alphatorquevirus sp.
MFFGRVWRKKRALPLSELRTPAKKPPVMSWSQPMHNVTTREGFFYAGCKQLHNCFCGCDDFINHLLRIQTQQGPSPSRPFTPPSTPRPVIRRALPAPAAPDAPAPWRGAGGGPAADADRGPGGDGGDYAPADLDDLYAAVDAENAE

SEQ ID NO: 512 - protein, 59 aa, Alphatorquevirus sp.
MFPPDTPKPITTAEDWKHEYESCKYWHRPPRKYLTDRPFYPWMPKEPPQCRVSFKLGFQ

SEQ ID NO: 513 - DNA, 3564 bp, Alphatorquevirus sp.
ttttctgccaaaaggcttggttttaaagctatcaaggggcaattcgggctcgggactggccgggctatgggcaaggctcttaaaaaagccatgtttctcggtcggccttacagaaagaagagggcactgtcactgctacgcgtgcgagctccagaggcgaaaccacctgctatgagctggagacccccggtgcacaaccccaatgggatcgagagaaacctgtgggaggcattctttcgcatgcatgcttcagcttgtggttgtggcgatcttgttggccatattactgtactggctggtcggtatggtgctcctcctcgtcccccggcccccggggctcccagaccaccgctaaaccggcagctggcccttccggcgccccccgctgatcctcagcaggccaacccgagatggcctggtggggacggtggagaagatggcgctggaggccccgccgctggcggcgccgtcgcagacgccgagtaccaagaagacgagctcaacgccctcttcgacgccgtcgaacaagaagagtaaggaggaggcgatgggggaggcggaggtggagacgggggtacagacgcagactgagactgagacgcagacgcagacgaaagcgaaaaatagtactaactcagtggaaccccgccaaagtgcggaggtgtactattaagggggtcttgcccatgatactgtgcggagcaggacgctcagggtttaactatggactgcacagcgacgactacaccacacagaaaccccttggccagaacccccacgggggcggcatgagtacagtgacttttagccttcaagtgctgtatgaccagtaccagaggtttatgaacaagtggtcgtactccaacgaccagctagacctcgccaggtactttggctgcaccttctggttttacagacacccagaggtggactttgtagctcagtttgacaacgttccacccatgaaaatggacgagaacacagcccccaacactcatccctcttttctactacaaaacaaacacagggttaaaattcctagctttaaaaccaagccttttggcagaaaaaaagttagagttacagtagggccccccaaactgtttgaagataagtggtacagccagcatgacttgtgtaaggtgcccctagtcagttggcggttaaccgcatgtgacttcaggtttccgttctgctcaccacaaactgacaacccttgctacaccttccaggtattgcatgaagagtattacccagtaataggcacttctgctttagaaaacggaacaaattacaataaaacagccgtagaaacattagaaaactttttatataaaaaatgtacccactatcaaacatttgccacagacacaagactaaaccctcaaagacccacaacaaccaacggcagacaaacatataatccaagcggacagctagaaggtattaaatggtcaacaaaagattttaatgactttaaaaagcacacagacagcaactatggctactgcacctactgccctactgatgagttagttacgaaaattaaggactacagagaccaaagattcaaatggctaactgaaatttcacaaacaaacacctgccacataaatgccacgtacgctcaaggaaaaattaagcagtgggaatatcacctaggatggtactcaaatatatttataggcaacctcagacacaacctggcattccgcacagcatacatagacattacctacaatcctataacagacaaaggagaaggcaacatagtgtggttccaatatgccactaaaccaaccacagagtacatagaggcccaggcaaaatgcaccattacaaacatacccctatatgctgctttctatggctatgaagactacatccaaagaacactaggcccttatcaggatgtagaaaccctaggtataatatgtgttaaatgtgcctacacagatccccctctagttcacaaagacaagtctaaggtcaactggggctacgtgttctacgacgtccactttggcaacggaaagacccctgagggactgggccaggttcatccttactggatgcaaaggtggagaccctacgtacagtttcaaaaagacactatgaacaagatagccaggacgggaccgttcagctacagagacgagacgccttccataaccctgaccgccggctacaagttccgttttaactgggggggcgactctatatttccacagattattaaaaacccctgcccagacagcggggtacgaccttcaaccggtagagagcgtcgctcagtacaagtcgttagcccgctcacaatggggccagagtacatattccaccggtgggactggcgacgggggttctttaatacaaaaactctcaaaagaatgcttcaaaaatcaattaatgatgaagaatatccaacaggcccaaaggtccctcgatggtttccctcactcgacaaccaagagcaagaaggcgtctcagatacagagacgacagcctcgcagtcctcgcaagaagaagccgctcaagaagccctccaagaagtccaagaggcgtcgctacagcagcacctcctccagcagtaccgagagcagcgaagaatcggacagcaactccaactcgtcatgctccaactcaccaagacgcagagcaacctgcacataaatccccgtgtccttggccatgcataaataaagtgtacatgtttccccccgaaaaaccaatgcccatacacgggtaccacgggtgggagacagaatttcaggcctgcaaggccttcgacaggccccctagaaactacctgtcagacagaccaatctatccctggcttccccgctcccaaccagaatttaaagtcagttttaagcttggttttcaataaacaaggccgtgggaatttcacttgtcggtgtctacctcttaaggtcactaagcactccgagcgttagcgaggagtgcgacccttccccctggtgcaacgccctcggcggccgcgcgctacgccttcggctgcgcgcggcacctcggacccccgctcgtgctgacacgctcgcgcgtgtcagaccacttcgggctcgcgggggtcgggaattttgctaaacagactccgagttgccattggacactgtagctgtgaatcagtaacgaaagtgagtggggccagacttcgccataaggcctttatcttcttgccattggtacgtgtcgggggtcgccgtaggcttcgggctcggttttaggccttccggactacaaaaaccgccattttagtgacgtcacggcggccattttaagtaagcatggcgggcggtgacgtataagttcaaaggtcaccgcgcttccgtgtttacacaaaatggtggccaacttcttccgggtcaaaggtcggcagctacgtcatgagtcacgtgggacggctgcgtcataaacacggaagtggctgttccacgtgacttgtcacgtgactgctacgtcacggccgccattttagtttacaaaatggcggacttccttcctcttttttaaaaataacggccctactgtaactctaacttt

SEQ ID NO: 514 - protein, 762 aa, Alphatorquevirus sp.
MAWWGRWRRWRWRPRRWRRRRRRRVPRRRAQRPLRRRRTRRVRRRRWGRRRWRRGYRRRLRLRRRRRRKRKIVLTQWNPAKVRRCTIKGVLPMILCGAGRSGFNYGLHSDDYTTQKPLGQNPHGGGMSTVTFSLQVLYDQYQRFMNKWSYSNDQLDLARYFGCTFWFYRHPEVDFVAQFDNVPPMKMDENTAPNTHPSFLLQNKHRVKIPSFKTKPFGRKKVRVTVGPPKLFEDKWYSQHDLCKVPLVSWRLTACDFRFPFCSPQTDNPCYTFQVLHEEYYPVIGTSALENGTNYNKTAVETLENFLYKKCTHYQTFATDTRLNPQRPTTTNGRQTYNPSGQLEGIKWSTKDFNDFKKHTDSNYGYCTYCPTDELVTKIKDYRDQRFKWLTEISQTNTCHINATYAQGKIKQWEYHLGWYSNIFIGNLRHNLAFRTAYIDITYNPITDKGEGNIVWFQYATKPTTEYIEAQAKCTITNIPLYAAFYGYEDYIQRTLGPYQDVETLGIICVKCAYTDPPLVHKDKSKVNWGYVFYDVHFGNGKTPEGLGQVHPYWMQRWRPYVQFQKDTMNKIARTGPFSYRDETPSITLTAGYKFRFNWGGDSIFPQIIKNPCPDSGVRPSTGRERRSVQVVSPLTMGPEYIFHRWDWRRGFFNTKTLKRMLQKSINDEEYPTGPKVPRWFPSLDNQEQEGVSDTETTASQSSQEEAAQEALQEVQEASLQQHLLQQYREQRRIGQQLQLVMLQLTKTQSNLHINPRVLGHA

SEQ ID NO: 515 - protein, 156 aa, Alphatorquevirus sp.
MGKALKKAMFLGRPYRKKRALSLLRVRAPEAKPPAMSWRPPVHNPNGIERNLWEAFFRMHASACGCGDLVGHITVLAGRYGAPPRPPAPGAPRPPLNRQLALPAPPADPQQANPRWPGGDGGEDGAGGPAAGGAVADAEYQEDELNALFDAVEQEE

SEQ ID NO: 516 - protein, 147 aa, Alphatorquevirus sp.
MVSLTRQPRARRRLRYRDDSLAVLARRSRSRSPPRSPRGVATAAPPPAVPRAAKNRTATPTRHAPTHQDAEQPAHKSPCPWPCINKVYMFPPEKPMPIHGYHGWETEFQACKAFDRPPRNYLSDRPIYPWLPRSQPEFKVSFKLGFQ

SEQ ID NO: 517 - DNA, 3556 bp, Alphatorquevirus sp.
cgggtgccggaggtgagtttacacaccgcagtcaaggggcaattcgggcttgggactggccgggctatgggcaaggctcttaaaaaagacatgtttctcggtaaactttacagaaagaaaagggcactgctactgcctagcctgccagctgcaaagaaaaaaccacctgctatgagccagtgggtccctccggtgcacaacataaatggccgctgccaccagtggtatgaggggtgctaccgtactcatgctgctttttgtggttgtggcaattttattaatcaccttattgctctgggcgatcagtatggcttcaggccgggttcgagggctcccggcgctccgggagtaggcggacctccggtcccgctccgtcgagccctgccggctccggagccttcccagcaggctaacaacaacaacaaccagagatggtctggggatggtggcgccgacgcaggcgagggtggctccggagcttctggaggaggagagcagctgccagaagacgatctcgatggattgctcgccgcgctagacgacgaagagtaaggagaaaaaggaggtggaggaggaggagagggcgacgcagacggtttatctatagaaaaaagagacgttacagacgcaggagaaagagacaaaaaataataataaaacaatggcaaccggccgttgtcagacgctgcaggatagtggggtacatggctgctctaataagtggaaacgggacctttgctacaaattacagcagccacttagaggacagaatacagaagggaccctttggagggggccacagcaccatgagattctctctgtacgtgctgtaccaagaacacctcagacacatgaactactggacttacacaaacaaggacttagaactgactagatacctgggggcgactataaccttctacagacatcccaccagagactttatagtgacttatagcagacgcacccctctgggaggaaacatactgacagccccctcgctacatccaggcaatgcaatgctaagtaagagaaaaatactcatacccagcttagaaaccagacccaagggtaaaaagacaaaaaaactaagaatagggcccccaacactactaatagacaagtggtactttcagaaagacttttcagacgttacactgtttaacctcaatgttacggaagctgacttgcggtttccgttctgctcaccacaaactgacaacatttgcgtaaacttccaggttctgaaatcctgttacaacgaatacctaggtatacatacatttgacaatgacaataacgatgttaaattaaaagaattttttaataaagctctagtcacaacaggccaacaaaacacagagataaatatactaaacacatttagaacacagggatgccttagccatcctcaagtaaatgtacccaatgctaccagtaacccaaacaaccaagtaacatcggaggaatatttccaaaaactagatggactctggggaaacccaatatatgcaaactccagaaacaatggaggcaaatccactgaaaactttaataaaaccacttttataaacaaatacctaataggtaacatgagcagctaccacaaaaaatttacaacagacaacctgccacaaagctggaaaggcaacaaagcacactgccacctcacaggaatatacagtccaccatacctgaactcaggcagaatatctccagagatatttggcctgtacacagaaataatatacaacccatacacagacaaaggcaaaggaaacaaaatatgggtagacgcactcacaaagggagacaacatatacagcagcacccagagcaggtgtctcttacaagacctacctctctggtgcgcctgtttcgggtacacagactggattaaaaaagaattaaaccactgggacgcaccgtggaactacagactcctaatggtgtgtccctacacatacccaaaactgtacaacgatgcaaacccaaactatggatacgtatgcttctcatatcaatttggagcaggacagatgccggacggcagctcctacgtccctataaaatggaggggaaaatggtaccctaacatgatccaccaacaaaaagttatggaggacctagccagatcaggcccctttgccccaaaacaacaggtacctagcgtgcagctcagcatgaagtacaaatttgcatttaactggggcggtaatcctattttggaacagattgttagagaccccagcactcagcccacctacgaaattcccggtgccggtaacctccctactagagtacaagtcatcgacccgagggttattggaccacaatactcatttagatcctgggactggagacgcggacagtttaatgaaaaaagtattaaaagaatcgcagaacaacaagagacttctgagtatctattttcaggcccaaaaaggccaaggatcgaccagcgcccttacaacccacaagaagaaagctggtcttcaacagtccaacaaagagaaccgaaaccgtgggcctcagaagaagagacggagagccagagccaaagcgaagaagaggcggagacatcaatcagagagcagctgcagcaccagctccaagagcaacacagaatcagacatggaatcaagtgcctcttcgagcagctagtcagaacccagcagggagtacacctacatccatcccttgtgtaggcccaaagaagtacatgtttccagagagggcccctaaaccagctccgagcagcggagactgggagatggaatacctaatgtgtaagctgtttaacaggccccccagaagcaacctaaaagatgtgcctttctacccgtgggttaaaaaccagtacaatgtaagctttcaactcaactacaaataaacctcagcttcaacttgctaggccgtgggagtttcacttgtcggtgtctacctcttaaggtcactaagcactccgagcgccagcgaggagtgcgacccttccccctgactcaacttcttcggagccgcgcgctacgccttcggctgcgcgcggcacctcagacccccgctcgtgctgacacgcttgcgcgtgtcagaccacttcgggctcgcgggggtcgggaaatttgctaaacagactccaagttgccattggacactggagctgtgaatcagtaacgaaagtgagtggggccagacttcgccataaggcctttatcttcttgccatttgtcagtatagggggtcgccataggcttcggcctgggttttaggccttccggactacaaaaaccgccatattagtgacgtcacgggcgccattttaagtaagcaggaagcggctcggtgtatacaaaatggccgcggagcacttccggcttgcccaaaatggtggttaagttcttccgggtcaaaggtcatcggcgccatcttggtcacgtgactgcctacgtcacggccgccattttgtttgacaaaatggccgacttccttcctctttttcaaaaaaaagcggaagtgccgccgcggcggcggggggcggcgcgctgcgcgcgccggaggg

SEQ ID NO: 518 - protein, 758 aa, Alphatorquevirus sp.
MVWGWWRRRRRGWLRSFWRRRAAARRRSRWIARRARRRRVRRKRRWRRRRGRRRRFIYRKKRRYRRRRKRQKIIIKQWQPAVVRRCRIVGYMAALISGNGTFATNYSSHLEDRIQKGPFGGGHSTMRFSLYVLYQEHLRHMNYWTYTNKDLELTRYLGATITFYRHPTRDFIVTYSRRTPLGGNILTAPSLHPGNAMLSKRKILIPSLETRPKGKKTKKLRIGPPTLLIDKWYFQKDFSDVTLFNLNVTEADLRFPFCSPQTDNICVNFQVLKSCYNEYLGIHTFDNDNNDVKLKEFFNKALVTTGQQNTEINILNTFRTQGCLSHPQVNVPNATSNPNNQVTSEEYFQKLDGLWGNPIYANSRNNGGKSTENFNKTTFINKYLIGNMSSYHKKFTTDNLPQSWKGNKAHCHLTGIYSPPYLNSGRISPEIFGLYTEIIYNPYTDKGKGNKIWVDALTKGDNIYSSTQSRCLLQDLPLWCACFGYTDWIKKELNHWDAPWNYRLLMVCPYTYPKLYNDANPNYGYVCFSYQFGAGQMPDGSSYVPIKWRGKWYPNMIHQQKVMEDLARSGPFAPKQQVPSVQLSMKYKFAFNWGGNPILEQIVRDPSTQPTYEIPGAGNLPTRVQVIDPRVIGPQYSFRSWDWRRGQFNEKSIKRIAEQQETSEYLFSGPKRPRIDQRPYNPQEESWSSTVQQREPKPWASEEETESQSQSEEEAETSIREQLQHQLQEQHRIRHGIKCLFEQLVRTQQGVHLHPSLV

SEQ ID NO: 519 - protein, 161 aa, Alphatorquevirus sp.
MGKALKKDMFLGKLYRKKRALLLPSLPAAKKKPPAMSQWVPPVHNINGRCHQWYEGCYRTHAAFCGCGNFINHLIALGDQYGFRPGSRAPGAPGVGGPPVPLRRALPAPEPSQQANNNNNQRWSGDGGADAGEGGSGASGGGEQLPEDDLDGLLAALDDEE

SEQ ID NO: 520 - protein, 134 aa, Alphatorquevirus sp.
LVFNSPTKRTETVGLRRRDGEPEPKRRRGGDINQRAAAAPAPRATQNQTWNQVPLRAASQNPAGSTPTSIPCVGPKKYMFPERAPKPAPSSGDWEMEYLMCKLFNRPPRSNLKDVPFYPWVKNQYNVSFQLNYK

SEQ ID NO: 521 - DNA, 3555 bp, Alphatorquevirus sp.
gcttcgcgcgcggtgagtttacacaccgcagtcaaggggcaattcgggctcgggactggccgggccccgggcaaggctcttaaaaaatgcactttcgcagaatctcagagaaaaggaaactgctactgctacctctgcactctgcatcgcagacacctgccatgagcttcagggcgcccactctaaatgccggtcaacgagagcagctatggttcaagtccatcgtccgatcccatgatagttactgcgggtgtggtaacactgtcgctcattttaataatattgctactcgctttaactacctgcctcttacctcttcgcccctggacccttcctcgggaccgccgcgaggccgcccggcgctccgcgcactcccggctctgccagcggcaccctccacccccactactagccaaccatggcgtggtggggcagatggagaaggtggccgcggcgccggtggaggagatggcggcgccgccgtagaaggagactaccagcaagaagaactcgacgagctgttcgcggccttggaagacgaccaagaaagacggtaaggagacgccggcgccgtcccagacgcacctaccgacgggggtggcgacgcagacggtacataagacgcaggaggggacgcaaaaagaaactgactctcactatgtggaaccctaacatagttaggagatgtaacataaagggagggctgcctctactgatgtgtggagagaacagagccgcatttaactatgcctaccactcagaagactacacagagcagccattcccctatggtggaggaatgagcaccaccacattctcactcagagccctgtacgaccagtacacaaagcacatgaacagatggacgttctcaaacgaccagctagacctggccagatacaggggctgcaaattcaggttctacagacaccccacctgtgactttatagtacactacaacctggttcctcctctaaagatgaaccagttcacaagtcccaacacgcacccaggactactgatgctcactaaacacaagataataatacccagcttcttaacaagaccagggggtcgcagattcataaagataagactgcccccccctaaactctttgaagacaagtggtacactcagcaggacttgtgcaaacaaccgttagtaactctaaccgcaaccgcagcttccttgcggtatccattctgctcaccacaaacgaacaaccccaactgtaccttccaggtactacgcaagaattaccacaaagtcataggcacttcctcaaaaaactctgaggatgttacaccctttgaagactggctctataatactgcctcacactatcaaacctttgccactgaggcacaagtgggcagaataccttcctttaatccagatggctccaaaaacgaaaaagcagaatcatggcaaaaccaatggtctaaaaaatcagaagcatggacaggaggaaccacatatccccacacgtcaacacatcaaatgtacaaaatcccttatgacagtaactatggctttccaacttacaaaccaatgaaagactacatgttagaaagaagagcatggagcttcaaatatcaaacagacaatccagtcagtaaaaagatatggccacaacctaccacaacaaaaccaacagtagattactatgaataccacgcaggctggttcagtaacatattcataggccccaacagatacaatttacaatttcagacagcatatgtagacaccacatacaatccactaaatgacaaaggaaaaggtaacaaaatatggttccagtaccacagcaaagtaaacacagacctcagagacagaggcatctactgcctactagaagacatgcccctatgggccatgacctttggatacagtgactatgtcagcacacagctaggcccaaacgtggaccacgagactcaaggcctggtgtgcataatatgcccatacactgagccccccatgtatgacaagactaacccaaacagtggctacataacatatgacacaaactttggaaatggaaaaatgccctcaggaaggggccaggttccagtatactggcaatgcagatggaggcccatgctgtggttccagcagcaagtacttaatgacatctcaaagagcggaccgtacgcatacagagacgaactgaaaaacgcttgcctgacgacatactataacttcatttttaactgggggggcgacatgtattacccgcaggtcattaaaaacccctgcgcagacagcggactcgttcccggtaccagtagattctctcgagaagtacaagtcgttagcccgttgtccatggggcctcagtacatcctccacctcttcgaccaaagacgcgggttctttagttcgaacgctcttaaaagaatgcaacaacaacaagaatttgatgagtcttttacagtcaaacctaagcgacccaaactttctacagccgccctcgtcgagcaacaagaaggaggctcgacttcagcagaaagaaaatcgccgaccccacaagaagaagcccaggaagaagtccaccagacgccggagatccagctccagctccagcgaaacatcacagaacagctggtcatcaagcagcagctccaattcctgctcctccaaatattcaaaacacaagcaaatattcacatgaacccacgttttataagcccataataacctacaacatgtttggagaacccaatcctcaccctccaactagccaagactggcaaatggagtacgaggcctgcaaaatttgggacaggcccgctagacaaaacctaaaagacacccctttctatccctggatgcctaagcctcccccccaatactctgtaacatttaagcttgggttcaaataaacaaggccgtgcactgttcacttgtcggtgtctacctcttaaggtcaccaagcactccgagcgtcagcgaggagtgcgacccttcctcaaggggcaactccctcgaagtccggcgctacgcgcttcgcgctgcgccggacatctcggaccccccctccacccgaaacgcttgcgcgtttcggaccttcggcgtcgggggggtcggggactttactaaacagactccgagatgccattggacactgagggggcatacagcaacgaaagtgagtggggccagacttcgccataaggcctttatcttcttgccatttgtcagtatccggggttgccataggcttcggcctcggttttaggccttccggactaccaaaatggcgaattccgtgacgtcatggccgccattttaagtagttgaggcggacggtggcgtcaggtcaaacgtcattgtctgcgtcagctactcgaaatggcggtatattccttccgggtcaaaggtcgccgctacgtcataagtcacgtgggggggaccccgctgtatcccggaagcaggccccgccacgtgactactcacgtggtgtgcacgtcacagtcgccattttgtttaacaaaatggccgacttccttccgcttttttaaaaataacggcccagcggcggcgcgcgc

SEQ ID NO: 522 - protein, 760 aa, Alphatorquevirus sp.
MAWWGRWRRWPRRRWRRWRRRRRRRLPARRTRRAVRGLGRRPRKTVRRRRRRPRRTYRRGWRRRRYIRRRRGRKKKLTLTMWNPNIVRRCNIKGGLPLLMCGENRAAFNYAYHSEDYTEQPFPYGGGMSTTTFSLRALYDQYTKHMNRWTFSNDQLDLARYRGCKFRFYRHPTCDFIVHYNLVPPLKMNQFTSPNTHPGLLMLTKHKIIIPSFLTRPGGRRFIKIRLPPPKLFEDKWYTQQDLCKQPLVTLTATAASLRYPFCSPQTNNPNCTFQVLRKNYHKVIGTSSKNSEDVTPFEDWLYNTASHYQTFATEAQVGRIPSFNPDGSKNEKAESWQNQWSKKSEAWTGGTTYPHTSTHQMYKIPYDSNYGFPTYKPMKDYMLERRAWSFKYQTDNPVSKKIWPQPTTTKPTVDYYEYHAGWFSNIFIGPNRYNLQFQTAYVDTTYNPLNDKGKGNKIWFQYHSKVNTDLRDRGIYCLLEDMPLWAMTFGYSDYVSTQLGPNVDHETQGLVCIICPYTEPPMYDKTNPNSGYITYDTNFGNGKMPSGRGQVPVYWQCRWRPMLWFQQQVLNDISKSGPYAYRDELKNACLTTYYNFIFNWGGDMYYPQVIKNPCADSGLVPGTSRFSREVQVVSPLSMGPQYILHLFDQRRGFFSSNALKRMQQQQEFDESFTVKPKRPKLSTAALVEQQEGGSTSAERKSPTPQEEAQEEVHQTPEIQLQLQRNITEQLVIKQQLQFLLLQIFKTQANIHMNPRFISP

SEQ ID NO: 523 - protein, 156 aa, Alphatorquevirus sp.
MHFRRISEKRKLLLLPLHSASQTPAMSFRAPTLNAGQREQLWFKSIVRSHDSYCGCGNTVAHFNNIATRFNYLPLTSSPLDPSSGPPRGRPALRALPALPAAPSTPTTSQPWRGGADGEGGRGAGGGDGGAAVEGDYQQEELDELFAALEDDQERR

SEQ ID NO: 524 - protein, 58 aa, Alphatorquevirus sp.
MFGEPNPHPPTSQDWQMEYEACKIWDRPARQNLKDTPFYPWMPKPPPQYSVTFKLGFK

SEQ ID NO: 525 - DNA, 3553 bp, Alphatorquevirus sp.
ggcgggggggccgcgcgctgcgcgcgcggcctcaaggggcaattcgggctcgggactggccgggctatgggcaaggctcttaaaaatgcacttttctaggatatccagaaagaaaaggctactgctactgcaaacagtgccagctccacagaaaactgtcaaacttttaagaggtatgtggagtcctcccactgacgatgaacatatccgcgagcgaaaatggttcctcgccactgtttattctcactctgctttctgtggctgcaatgatcctgtcggtcacctctgtcgcttggctactctttctaaccgtccggagaacccgggaccctccgggggacgtcgtgctcctttcatcggggtcctacccgctctcccggctgctaccgagcagcccggtgatcgagcaccatggcctatgggtggtggaggagacgccgcaggagatggaagagatggaggagaaggcccaggtggagacgcccatggaggacccgcagacgcagacctgctagacgccgtggacgccgcagaacagtaaggagacgcaggcgcgggaggtggaggaggcgttatagaaagtggaggagaaagggcagacgcaggagaaaaaagaaacttataataagacaatggcagccaaactacaccagaaaatgcaacatagtaggctacatgccagtaattatgtgtggagaaaacactctaataagaaactatgccacacacgcagacgactgctactatccgggaccctttgggggcggcatggccacccagaaatttacactcagaatcctgtacgatgactacaaaaggtttatgaactactggacctcctcaaacgaggacctagacctctgtagatacaggggagtcaccctatacttcttcagacacccagaagtagactttataataattataaacaccacacctccgtttacagacacagagatcacaggacctagcatacatccgggcatgatggccctaaacaagagagccaggttcattcccagcctaaagactagacctagcagaagacacatagttaaaattaaagtgggggcccccaaactgtacgaggacaagtggtacccccagtcagaactctgtgacatgcccctcctaaccgtctacgctaccgcagcggatatgcaatatccgttcggctcaccactaactgacactcctattgtaagcttccaagtattgcgcagcatgtacaacgacgcccttagcatacttccctctaactttgaaaatgccaatagtgcaggcacaaaactttacaatgaaatatctaattatttaccatactacaacacaacagaaacaatagcacagctaaagagatatgtagaaaatactcaaaaaagtgcaacagtgcccaatccatggcaatcaaagtatgttaatactactccctttaccactgcagtagatattactacatcaataccacacaccacattttcagacacctggtacaggggcacagcatacacaaaatctatcactactgtgccactcgccgcagcaacattatatgaaaaccaaacaaaaaaactgctgtctacaacattcacaggagggtccccgtacctagagtaccacggaggcctgtacagctccatatggctatcagcaggccgatcctactttgaaacaaagggagcatacacagacatctgctacaacccctacacagacagaggagaaggcaacatggtgtggatagactggctatcaaaaacagactccatttatgacaagaaccgcagcaaatgccttatagaaaagctacccctatgggcagcagtatacgggtacgcagaatactgtgccaagagcaccggagactcaaacatagacatgaacgccagagtagtgataaggtgcccctacaccaccccccagatgatagacaccagcaacgaactgaggggcttcatagtatacagctttaactttggcaagggcaaaatgcccggaggcagcagcgaggtacccataagaatgagagccaagtggtacccctgtctctttcaccaaaaagaggttctagaagccatagggcagtcgggccccttcgcctaccactgtgaccaaaagaaagcagtgctaggtctaaaatacaggtttcactggatatggggcggaaaccccgtgtttccacaggttgttagaaacccctgcaaagacacacacggttcctcgggccctagaaagcctcgctcagtacaaatcattgacccgaagtacaacacaccagagctcacaatccacgcgtgggatttcagacgtggcttctttggcccaaaagctattaagagaatgcaacaacaaccaacagatgctgaacttcttccaccaggccgcaagaggagcaggcgagacaccgaagccctccaaagcagccaagaaaagcaaaaagaaagcttacttttcaaacagctcaagctccagcgacgagtacccccgtgggaaagctcgcaggcctcgcagacagaggcagagagcgaaaaagagcaagagggaaccctctcccagcagctccgagagcagcttcaccagcaaaagctcctcggcaagcagctcagggaaatgttcctacaactccacaaaatccaacaaaatcaacacgtcaaccctaccttattgccaagggatcaggctttaatttgctggtctcagattcagtaattaacatgtttggagaccctaaaccctacaaaccctccagcaacgactggaaagaagagtacgaggccgctagatattgggacagaccccccagatctaaccttagagacaaacccttttatccctgggccccccccaaacaatccctacaaagtaaactttaaactaggcttccaataaagctaggccgtgggagtttcacttgtcggtgtctgcttcttaaagtcgccaagcactccgagcgtaagcgaggagtgcgaccctcccccccggtagcaacttcttcggagtccggcgctacgccttcggctgcgccggacacctcagaccccccctccacccgaaacgcttgcgcgtttcggaccttcggcgtcggggggggtcgggagctttattaaacagactccgagttgccattggacactggagctgtgaatcagtaacgaaagtgagtggggccagacttcgccataaggcctttatcttcttgccatttgtccgtgtcgggggtcgccgtaggcttgggggtcgccgtcagggccttccggactacaaacatggcgaatccgtgacgtcacggccgccattttaagtaggtgacgtccaggactgacgtaaagttcaaaggtcatcctcggcggaacctatacaaaatggcggacaacatcttccgggtcaaaggtcatcactacgtcataagtcacgtggggacggctgtacttaaacacggaagtaggccccgccacgtgatttaacacgtggtgcatgcgtcacggcggccattttattttacaaaatggcgaacaacttcctcttttttaaaaaaaggcgccaaaaaaccgtc

SEQ ID NO: 526 - protein, 765 aa, Alphatorquevirus sp.; identical to SEQ ID NO: 199

SEQ ID NO: 527 - protein, 161 aa, Alphatorquevirus sp.; identical to SEQ ID NO: 200

SEQ ID NO: 528 - protein, 61 aa, Alphatorquevirus sp.; identical to SEQ ID NO: 201

SEQ ID NO: 529 - DNA, 3552 bp, Alphatorquevirus sp.
ggcgggggggccgcgcgctgcgcgcgcggcctcaaggggcaattcgggctcgggactggccgggctatgggcaaggctcttaaaaatgcacttttctaggatatccagaaagaaaaggctactgctactgcaaacagtgccagctccacagaaaactctcaaacttttaaaaggtatgtggagtcctcccactgacgatgaacgtgtccgcgagcgaaaatggttcctcgcaactgtatattctcactctgctttctgtggctgcaatgatcctgtcggtcacctctgtcgcttggctactctatctaaccgtccggaaaacccgggaccctccgggggacgtcgtgcttcttcgatcggggtcctacccgctctcccggctgctaccgagcaacccggtgatcgagcaccatggcctatggctggtggaggagacgccgcaggaggtggaagagatggaggagaaggcccagatggagacgcccatggaggacccgcagacgtagacctgctagacgccgtggacgccgcagaacagtaaggagacgcaggcgcgggaggtggaggaggcgttatagaaaatggaggagaaagggcagacgcaggagaaaaaagaaacttgtaataagacaatggcagccaaactacaccagaaaatgcaacatagtaggctacatgccagtaattatgtgtggagagaacactctaataagaaactatgccacacacgcagacgactgctactatccgggaccctttgggggcggcatggccacccaaaaattcacactgagaatcctatacgatgactacaaaaggtttatgaactactggacctcctcaaacgaggacctagacctctgtagatacaagggagtcaccctgtacttctttagacacccagaggtagactttataataattataaacaccacacctccgttcgcagacacagagatcacaggacccagcatacatccgggcatgatggccctaaacaagagagccaggttcattcctagcctaaagactagacctggcagaaggcacatagttaaaattagagtgggggcccccaaactgtacgaggacaagtggtacccccagtcagaactctgtgacatgcccctcctaaccgtctacgcgaccgcagcggatatgcaatatccgttcggctcaccactaactgacactcctgttgtaaacttccaagtattgcgcagcatgtacaacgacacccttagcatacttccctctaactttgagaacacacaaagtgcaggccaaaaactatacaaacaaatatctgaatatctaccatactacaacacaacagaaacaatagcacagctaaagagatatgtagaaaatactgaaaaaaattcatcaacacccaatccatggcaatcaaagtatgttaacactacttcctttaccactgcagtaactattagtacaacaaaaccatacaccacattttcagacacctggtacaggggcacagcatacacaaacgctatcactgaggtgccactcaaagcagcaaagctgtatgaaagtcaaacacaaaaactgctgtctacaacatttacaggagggtccccgtacctagaataccacggaggtctgtacagctccatatggctatcagcaggccgatcctactttgaaacaaagggagcatacacagacatctgctacaacccctacacagacagaggagagggcaacatggtgtggatagactggctatcaaaatcaaactccatatatgacaagaccagcagcaaatgccttatagaaaagctacctctatgggcagcagtatacgggtacacagaatactgtgccaagagcaccggagactcaaacatagacatgaacgccagagtagtcataagatgcccctacaccacaccccagatgatagacaccagcaacgaactgaggggcttcatagtatacagctttaactttggcaggggcaaaatgcccggaggcagcagcgaggtacccataagaatgagagccaagtggtacccctgtctgtttcaccagaaagaggttctagaagccatagggcagtcgggccccttcgcctaccactgtgaccaaaagaaagcagtgctaggtctaaaatacaggtttcactggatatggggcggaaaccccgtgtttccacaggttgttagaaacccctgcaaagacacacacggttcctcgggccctagaaagcctcgctcagtacaaatcattgacccgaagtacaacacaccagagctcacaatccacgcgtgggatttcagacgtggcttctttggcccaaaagctattaagagaatgcaacaacaaccaacagatgctgaacttcttccaccaggccgcaagaggagcaggcgagacaccgaagccctccaaagcagccaagaaaagcaaaaagaaagcttacttttcaaacacctccagctccagcgacgagtacccccgtgggaaagctcgcaggcctcgcagacagaggcagagagcgaaaaagagcaagagggaaccctctcccagcagctccgagagcagcttcaccagcaaaagctcctcggcaagcagctcagggaaatgttcctacaactccacaaaatccaacaaaatcaacacgtcaaccctaccttattgccaaaggatcaggcattaatctgctggtctcagattcagtaattaacatgtttggagaccctaaaccctacaaaccctccagcaacgactggaaagaggagtacgaggcctctaaatattgggacagaccccccagatctaaccttagagacaaacccttttatccctgggcccccccaaacaatccctacaaagtaaactttaaactaggcttccaataaagctaggccgtgggagtttcacttgtcggtgtctgcttcttaaagtcgccaagcactccgagcgtaagcgaggagtgcgaccctcccccccggtagcaacttcttcggagtccggcgctacgccttcggctgcgccggacacctcagaccccccctccacccgaaacgcttgcgcgtttcggaccttcggcgtcggggggggtcgggagctttattaaacagactccgagttgccattggacactggagctgtgaatcagtaacgaaagtgagtggggccagacttcgccataaggcctttatcttcttgccatttgtcagtgtcgggggtcgccataggcttcggggtcgccgtcagcgccttccggactacaaacatggcgaattcgtgacgtcacggccgccattttaagtaggtgacgtccaggactgacgtaaagttcaaaggtcatcctcggcggaacctatacaaaatggcggacaacatcttccgggtcaaaggtcatgactacgtcataagtcacgtggagagggctgtacttaaacacggaagtaggccccgccacgtgatttaatacgtggtgcatgcgtcacggcggccattttcttttgcaaaatggcggacaacttcctcttttttaaaaaaaggcgccaaaaaaccgtc

SEQ ID NO: 530 - protein, 765 aa, Alphatorquevirus sp.
MAYGWWRRRRRRWKRWRRRPRWRRPWRTRRRRPARRRGRRRTVRRRRRGRWRRRYRKWRRKGRRRRKKKLVIRQWQPNYTRKCNIVGYMPVIMCGENTLIRNYATHADDCYYPGPFGGGMATQKFTLRILYDDYKRFMNYWTSSNEDLDLCRYKGVTLYFFRHPEVDFIIIINTTPPFADTEITGPSIHPGMMALNKRARFIPSLKTRPGRRHIVKIRVGAPKLYEDKWYPQSELCDMPLLTVYATAADMQYPFGSPLTDTPVVNFQVLRSMYNDTLSILPSNFENTQSAGQKLYKQISEYLPYYNTTETIAQLKRYVENTEKNSSTPNPWQSKYVNTTSFTTAVTISTTKPYTTFSDTWYRGTAYTNAITEVPLKAAKLYESQTQKLLSTTFTGGSPYLEYHGGLYSSIWLSAGRSYFETKGAYTDICYNPYTDRGEGNMVWIDWLSKSNSIYDKTSSKCLIEKLPLWAAVYGYTEYCAKSTGDSNIDMNARVVIRCPYTTPQMIDTSNELRGFIVYSFNFGRGKMPGGSSEVPIRMRAKWYPCLFHQKEVLEAIGQSGPFAYHCDQKKAVLGLKYRFHWIWGGNPVFPQVVRNPCKDTHGSSGPRKPRSVQIIDPKYNTPELTIHAWDFRRGFFGPKAIKRMQQQPTDAELLPPGRKRSRRDTEALQSSQEKQKESLLFKHLQLQRRVPPWESSQASQTEAESEKEQEGTLSQQLREQLHQQKLLGKQLREMFLQLHKIQQNQHVNPTLLPKDQALICWSQIQ

SEQ ID NO: 531 - protein, 161 aa, Alphatorquevirus sp.
LAGLWARLLKMHFSRISRKKRLLLLQTVPAPQKTLKLLKGMWSPPTDDERVRERKWFLATVYSHSAFCGCNDPVGHLCRLATLSNRPENPGPSGGRRASSIGVLPALPAATEQPGDRAPWPMAGGGDAAGGGRDGGEGPDGDAHGGPADVDLLDAVDAAEQ

SEQ ID NO: 532 - protein, 66 aa, Alphatorquevirus sp.
LLVSDSVINMFGDPKPYKPSSNDWKEEYEASKYWDRPPRSNLRDKPFYPWAPPNNPYKVNFKLGFQ

SEQ ID NO: 533 - DNA, 3552 bp, Alphatorquevirus sp.
acttccttccgcttttttgaaaaaagggcagtcaaggggcaattcgggctcgggactggccgggctatgggcaaggctcttagggtcatcgctctttaaaacatgtttctcggcagggtctggagaaagaaaaggcaagtgccactgccaacactgcgagtggtgccgctaccacaaccttcacctatgagcagccagtggagacccccggttcacaatgtgcaagggctggagcgcaattggtgggagtgcttcttccgtggtcatgcttgcttttgtggctgtggtgacgctattactcatattaatcatctggcgtctcgttttggacgtcctcctgctacctcaactccccgaggaccgcaggcacctccagtaaccccgtatccagccctgccggccccggagcctagcccagagccatggcgtggcgccggtggcgatggcggccgtggtggagacgccggaggcgccgccggtggagaaggagacgccggagacccagacgacgccgcccttatcgacgccgtaaacctcgcagagtaaggaggcgcagggggcggtggaggcgcgcttacagacgttgggggcgacgcagacgcagacgcagacacaaaaagagacttgtactgactcagtggcagccccctatagttaaaaagtgcctaataatagggtacgacccccttataatctgtggcataaacagaacagcttttaactacactacacactcagaagatttcactttcaacaacgacagctttggagggggactatgcacagcacagtacacactaagaatactattccaagagaagctggcccaacacaacttctggacgaccagcaacgaggacctggacttagccaggtacctgggtggcgcactaatatttttcagacacccaacagtagattttttagtaagagtgcgcaccagtcctccattcaatgacacagacatgactgctctcactctgcacccgggcattatgatgctcagtaaaaaggtcattaaggtacccagccttaaaaccaggcccagcagaaaacactatgtaaaaataagatttggagcccctaaactgtttgaagacaagtggtacccccagaacgagctgtgtgatgtaactctggtcagcatacaggcaaccgcagctaatttccaatatccgttcggctcaccactaacgaactcagtctgttgcaacttccaggttcttaacagcaactatgacaatgcacttagtatacttaacactactcaagtaacagaagaactacatactaaaagacaaagctgttataattttcttttaaagcaatacagctactacaacacaaaacaaacactagctcaacttaaatttgacttttttccaaagcagaaccccaaaatgccaaaaataagcaatgcacacacatccaaatccccagagagtctcactaaaaatgaagttacatctgaatacccacactgggactctctatatggtggcctagcatatggctttacacctaccagtaattctgaaaacacaaaccaagcaaaagacttacaaactcaaatgatagaagccaacaaattttatacagctgcaggcaaaaaactaataaaaggctttacacctatacaacataacaaccagaacgacacaaacatctttgactactacacaggcatgtactgtagcatatttctatcctccggaaggtccaacccagaagttaaaggcagctacacagacatatcttacaacccactcacagataaaggtgtaggcaacatgatatggatagactggctaagcaaaccagacagcatatacaacccctctaagagcaaatgcctactaaaagactttcccttgtggtgcatggtatacgggtacgcagactactgcagaaaagtcacaggagactcagccatactgctagactgcagagtagtaataagatgcccgtacacataccctcagcttataaaacacaacaatgacaactggggattcgtcccctatagcgaaaactttggactgggtagaatgcccgggggcaatccaaacccctcgaccagaatgagactgaactggtacccaatgctgctacaccagatggaagtattagagtgcttggcacagaccggaccgtttgcctaccacggagacgagagaaagactgtactgactgccaaatacaagttcagatggaagtggggaggaaaccctgtctttcaacaggttcttagagacccctgcaccggaggtgccgtggcgccccacaccagtcgacaccctcgcgcagtacaagtctttgacccgaagcaccaagccccggagtatctgttccacaagtgggacttcaggaggggactctttagcactaaaggtattaaaagagtgtcagaacaaccaacatatgatgagtttcttacaggccgcagcaagagacccaagaaagatacaggggccccgctccaagaagaggagcaaaaagaagactcgcgtttcagagtcccacagctcagaccttggctcccctccagccaggaaacgcagagccaaagcgaagaagagcagcagacacgcagtacaacggtacaagaacaattacagcaacagctccagcaacagcgactcatgggactccaactccgaaacgtctgtctccagctcgcaagagtccaagcggggcacagtctccaccccgttttccaatgccatgtataaacaaggtgtttatatttcctgagagagagcccaagcagccccctaacagcaaagactggcaggaggaattcgaggcctgtaagcactgggacaggcctgcgagatctaacttagatagaccccctttctacccctggatgcccagggaacccccaacttgtcgtgtaaccttcaagcttggctggcaataaaattacaaggccgtgggagtttcacttgtcggtgtctgcttattaaggtcactaagcactccgagcgccagcgaggagtgcgaccccctgccctgggcccacttcttcggagccgcgcgctacgccttcggctgcgcgcggcacctcagacccccgctcgtgctgacacgctcgcgcgtgtcagaccacttcgggctcgcgggggtcgggaattttgctaaacagactccgagttgccattggacactgtagccgtgaatcagtaacgaaagtgagtggggccagacttcgccataaggcctttatcttcttgccattggatagtgtagggggtcgccataggcttcggcctcggttttaggccttccggactacaaaaatggcgcattccgtgacgtcatggccgccattttaagtaaggcggaagcagctccactttctcacaaaatggcggcggagcacttccggcttgcccaaaatggcgggcaagctcttctgggtcaaaggctaaacagctacgtcataagtcacgtgactgcggaggtcgtgaacccggaagcttcctcgatcacgtgtcttgtcacgtgggtgctacgtcacagccgccattttgttttacaaaatggccg

SEQ ID NO: 534 - protein, 769 aa, Alphatorquevirus sp.
MAWRRWRWRPWWRRRRRRRWRRRRRRPRRRRPYRRRKPRRVRRRRGRWRRAYRRWGRRRRRRRHKKRLVLTQWQPPIVKKCLIIGYDPLIICGINRTAFNYTTHSEDFTFNNDSFGGGLCTAQYTLRILFQEKLAQHNFWTTSNEDLDLARYLGGALIFFRHPTVDFLVRVRTSPPFNDTDMTALTLHPGIMMLSKKVIKVPSLKTRPSRKHYVKIRFGAPKLFEDKWYPQNELCDVTLVSIQATAANFQYPFGSPLTNSVCCNFQVLNSNYDNALSILNTTQVTEELHTKRQSCYNFLLKQYSYYNTKQTLAQLKFDFFPKQNPKMPKISNAHTSKSPESLTKNEVTSEYPHWDSLYGGLAYGFTPTSNSENTNQAKDLQTQMIEANKFYTAAGKKLIKGFTPIQHNNQNDTNIFDYYTGMYCSIFLSSGRSNPEVKGSYTDISYNPLTDKGVGNMIWIDWLSKPDSIYNPSKSKCLLKDFPLWCMVYGYADYCRKVTGDSAILLDCRVVIRCPYTYPQLIKHNNDNWGFVPYSENFGLGRMPGGNPNPSTRMRLNWYPMLLHQMEVLECLAQTGPFAYHGDERKTVLTAKYKFRWKWGGNPVFQQVLRDPCTGGAVAPHTSRHPRAVQVFDPKHQAPEYLFHKWDFRRGLFSTKGIKRVSEQPTYDEFLTGRSKRPKKDTGAPLQEEEQKEDSRFRVPQLRPWLPSSQETQSQSEEEQQTRSTTVQEQLQQQLQQQRLMGLQLRNVCLQLARVQAGHSLHPVFQCHV

SEQ ID NO: 535 - protein, 147 aa, Alphatorquevirus sp.
MFLGRVWRKKRQVPLPTLRVVPLPQPSPMSSQWRPPVHNVQGLERNWWECFFRGHACFCGCGDAITHINHLASRFGRPPATSTPRGPQAPPVTPYPALPAPEPSPEPWRGAGGDGGRGGDAGGAAGGEGDAGDPDDAALIDAVNLAE

SEQ ID NO: 536 - protein, 129 aa, Alphatorquevirus sp.
LAPLQPGNAEPKRRRAADTQYNGTRTITATAPATATHGTPTPKRLSPARKSPSGAQSPPRFPMPCINKVFIFPEREPKQPPNSKDWQEEFEACKHWDRPARSNLDRPPFYPWMPREPPTCRVTFKLGWQ

SEQ ID NO: 537 - DNA, 3551 bp, Alphatorquevirus sp.
cgggtgccgaaggtgagtttacacaccggagtcaaggggcaattcgggctcgggactggccgggctatgggcaaggctcttaaagcgatcattcttaaaaatgtttttcggcaggtactacagaaagaaaaggaaagtgcttctgtcctcactgccaactccacagaaaaaacggcctgctatgagctggcagccccctatgcacaatgccagaggcagggagcaccacttctggcaagcttgctacaattctcatgctagtttttgtggctgtggtagttttctttctcacctcgttcgtctggaaggtcgttatgcatctggcaacaacaactcctcgccccagactggggcaccaccaatgatccgtagagccctgcctcccccagcggctccggatcagccccagaccccacaatggtctggaactggtggtggagacggcgccggagaaggtggccagcaaggaggaggaggtggagacgactacgcacccgaagacctagacgcactgttcgacgccgtcgcaggagaccaacagtaaggagaaggaggtgggggcgcagacgggggcgacgcacatacaggagacgcagacgaacccgtagaaagagaaagagactcgtactgactcaatggaaccccagcacagtaagaaagtgctggatccgaggcatgtttcccatgctgatctgtggaaacacacaacagggcagaaactatgcagaccatatggacgatgtaattcctcaaggaaaaccctatggggggtctctaagtaccaccacttggactctacaggcgctgtatgaccagcaccagagattcatgaacaagtggtcttatcccaacacagaactagacctagccaggtacctaggatctgaatttacattttatagagacaaactcacagactatatagtaaccttcaacatagtacctccttttaagctaaacaaatacagctgtgcatcataccacccaggtatgatgatgcagagacgcaagaaaatacttgtaaaaagctttcaaactaaaccaaaaggcagaaaagctgtgaaagtaaaaataggacccccacaactatttgagcagaagtggtacactcagcaagacctttgttccgttggtcttgtgtcatttgcggtttctgcggcgagcctaacacatccgttctgctcaccacaaactgaaaatgttgcagtaaccttccaggttttgaaatccttctactatgaaggaataggcattaacgaacaaactaaacacacaactatagcagacaccctatacacacaaggtaattactatcaaacatttcatacaacatcatacattaattcaggcctaaaaccaggtaaagcaggacaaaatgaactagaccaaacagttaaaacatggattcagtcaaactttcccacaggaaacaacagcacctttggctttaattcatataaaccagataaacaaaaattaaataaactattagactggtactggcaacaactgcaaacaccaaatgacattacctccagctatggaagagctactaacaaatacctagaataccacatgggaatatacagtgctatattcctaagcccactcagaagcaacctgcaattccctacagcataccaagatgtaacatacaacccactcatagacaaaggagtaggaaatgaaatttggtttcaatacaacacaaaacccaatacaagctttgatgaaaaacaatgcaagtgccacataaaagacatacccctttgggcagccttttatggctactcagactatgtacaaacagaaataggagcacaacaagaaatatttaacataggaatagtttgtgtaaaatgcccatacacaataccaaaactaatccatgttgaatcaacaaaaaaagactggggctttgtattttatgatggactatttggaaatggcaaactaccagatgggtcaggacacgttccaacatacctacaagaaagatggtatcctagaatgagatttcaacaaaatgttatgcatgacatatgtcaaacaggcccatttagctacaaagatgaactaaaaagcacagtacttacatgcaaatacaagttcaaattcttatggggtggcaacttaatacctcaacaggtcgttaggaatccctgcaagtcagacggacggttcgacattgacccccatagattccctcgtgagctacaaattgcggaccctcgcaccatggggccccaatgggttttccacacctgggatttcagacgtggactgtacggcaaagatgctatcaaaagagtgtcagaaaaaccagatgatgatgaactctatactttctttccaaaaaaacctcgcctttctacaccagcagacgccccaggcctccaagaaggaggcttctttttccagaaccaccaagaaacaacatcagaagaagaagcagaagcccaagaagaaacgcaggcgcaaccggagcagcagcagcgagtcctcagactgcagctcagacagcagcagcacctcggggaccagctgcgactcctatatcagcaggtcctcaaaacccaagcaggtctccacctaaacccacttatattgggccttgcataaataaagtatacatgtttccagaaagcaagcccagaactcctaccagccaagactgggctcaggagtacgagatggcccgcatatttgacaggcctgccagatccaacctttcagacactcccttttatccctgggtcccaaaacctttcaatgttacttttgctcttaaattcaaataaacaaggccgtgggagtttcacttgtcggtgtctacctctataagtcactaagcactccgagcgtcagcgaggagtgcgacccttccccctgactcaacttcttcggagccgcgcgctacgccttcggctgcgcgcggcacctcagacccccgctcgtgctgacacgcttgcgcgtgtcagaccacttcgggctcgcgggggtcgggaaatttgctaaacagactccaagttgccattggacactgtagctgtgaatcagtaacgaaagtgagtggggccagacttcgccataaggcctttatcttcttgccatttgtccgtgtccggggtcgccataggcttcggcctccattttaggccttccggactacaaaaatggccgattccgtgacgtcatgacggccattttaagtaagcaccgcctaggagcgacgtcacagttcaaaggtcatcctcggcggaacttacacaaaatggtggtcaacttcttccgggtcagaggtcactgctacgtcataggtgacgtagctggtgtctgctgtaaacacggaagtaggccccgcccccgggcccccccccgaagtccgtcactacccacgtgactcccacaggccaaccagaaccttctacgtgcacttcctgggctgggtttatgagagcatataactaagtgcacttccgaatggctgagttttccacgcccgtccgcagcggtggagcacctcaggagcgacccccgcgtcccgaggg

SEQ ID NO: 538 - protein, 734 aa, Alphatorquevirus sp.
MVWNWWWRRRRRRWPARRRRWRRLRTRRPRRTVRRRRRRPTVRRRRWGRRRGRRTYRRRRRTRRKRKRLVLTQWNPSTVRKCWIRGMFPMLICGNTQQGRNYADHMDDVIPQGKPYGGSLSTTTWTLQALYDQHQRFMNKWSYPNTELDLARYLGSEFTFYRDKLTDYIVTFNIVPPFKLNKYSCASYHPGMMMQRRKKILVKSFQTKPKGRKAVKVKIGPPQLFEQKWYTQQDLCSVGLVSFAVSAASLTHPFCSPQTENVAVTFQVLKSFYYEGIGINEQTKHTTIADTLYTQGNYYQTFHTTSYINSGLKPGKAGQNELDQTVKTWIQSNFPTGNNSTFGFNSYKPDKQKLNKLLDWYWQQLQTPNDITSSYGRATNKYLEYHMGIYSAIFLSPLRSNLQFPTAYQDVTYNPLIDKGVGNEIWFQYNTKPNTSFDEKQCKCHIKDIPLWAAFYGYSDYVQTEIGAQQEIFNIGIVCVKCPYTIPKLIHVESTKKDWGFVFYDGLFGNGKLPDGSGHVPTYLQERWYPRMRFQQNVMHDICQTGPFSYKDELKSTVLTCKYKFKFLWGGNLIPQQVVRNPCKSDGRFDIDPHRFPRELQIADPRTMGPQWVFHTWDFRRGLYGKDAIKRVSEKPDDDELYTFFPKKPRLSTPADAPGLQEGGFFFQNHQETTSEEEAEAQEETQAQPEQQQRVLRLQLRQQQHLGDQLRLLYQQVLKTQAGLHLNPLILGLA

SEQ ID NO: 539 - protein, 162 aa, Alphatorquevirus sp.
LAGLWARLLKRSFLKMFFGRYYRKKRKVLLSSLPTPQKKRPAMSWQPPMHNARGREHHFWQACYNSHASFCGCGSFLSHLVRLEGRYASGNNNSSPQTGAPPMIRRALPPPAAPDQPQTPQWSGTGGGDGAGEGGQQGGGGGDDYAPEDLDALFDAVAGDQQ

SEQ ID NO: 540 - protein, 55 aa, Alphatorquevirus sp.
MFPESKPRTPTSQDWAQEYEMARIFDRPARSNLSDTPFYPWVPKPFNVTFALKFK

SEQ ID NO: 541 - DNA, 3549 bp, Alphatorquevirus sp.
cggcggcggcgcgcgcgcttcgcgcgcgcagtcaaggggcaattcgggctcgggactggccgggctatgggcaaggctcttaaagcgtacgtcccccgctatgtttctcggcagggtgtggaggaaacagaaaaggaaagtgcttctgctggctgtgcgagctgcacagaagacatcttccatgagtatctggcgtccccccctcgggaatgtctcctacagggagagaaattggcttcaggccgtcgaaggatcccacagttctttttgtggctgtggtgattttattcttcaccttactaatttggctgcacgttttgctcttcaggggcccccaccggagggtgctccgcctcggccgaggccgccgctcctgagagcgctgccggcacccgaggtccgcagggagacgcgtacggagaacccgggcgcctccggtgagccatggcctggcgatggtggtggcagagacgatggcgccgccgcccgtggccccgcagacgatggagacgcctacgacgccggagacctcgacgacctgttcgccgccgtcgaagaagagcaacagtaaggaggcggaggtggaggggcagacgtgggcgacgcacatacacccgacgcgcggtcagacgcagacgcagacccagaaagagacttgtactcactcagtggagcccccagacagtcagaaactgctccatcaggggtatagtgcccatggtaatatgcggacacacaaaagggggtagaaactatgccatccacagcgaagactttactacacagatacaacctttcgggggcagttttagcacgaccacctggtcgctgaaagtactctgggacgaacaccaaaaatttcaaaacaggtggtcctatccaaacacacagctagacctcgccagatacaagggagtcaccttctggttctacagagaccaaaagacagactacatagtacagtggagcagaaatcccccttttaagctaaacaaatacagcagctccatgtaccacccaggcatgatgatgcaggcaaaaaagaaactagttgtacctagtttccagaccagacctaaaggcaaaaagagatacagagtcagaataagaccccccaacatgtttgctgacaagtggtacactcaagaggacctgtgtccggtacctcttgtgcaaattgtggtttctgcggccaacctgctacatccgttctgcccaccacaaacgaacaacccttgcatcaccttccaggttttgaaagacatatatgacaactgcataggagttaactctacacaagaaacatcttataatatacttacagacatattatataacacctgtacatactatgaaacagtacaagtattggctcaattatctcccaatttccagccagctctaaaacccagcagcggacattcaaacgtaacaaaaacactaggagacgcagtagacgacttgaaatacaactcaggaaagttttatacaaaacaaaacccagtatttggcatgtgtaaatacaacccaacaaaagatactatgacagctgctaatcagtggttctgggacaaccttatgcatacaaatgacttacactcctcatatggcaaggcaaacttaaaatgcatggagtaccacacaggcatatacagctccatattcctaagtccccagagaggaatagaattcccagcagcataccaagacgtcacatacaatccaaactgtgacagagcagtaggtaacagggtctggttccaatacagtacaaaaatgaacacacactacgatgccacccaatgcaaatgtgtcttagaaaacatacccctctgggcggccttccatggctactcagactttatagagcaggagctcagcataagctcagaaatccacaactttggcgtagtggtatttcaatgcccgtacacctttcccccctgctacgacaaaaacaggccaaacaaaggatacgtgttctatgacaccacctttggtaatggaaagatgccagacgggtcagggcacatacccgtctactggcaacagaggtggtggatcagactagccttccaggtacaagtcatgcacgactttgtactctgcggcccctttagctacaaagatgacctagcgaacaccacactcacagccagatacaaatttagattcaaatggggcggtaatatcatccccgaacagattatcaagaacccgtgtcaaagacagcagtccctcgcttcctaccccgatagacaacgtcgcgacctacaagttgttgacccatcaaccatgggcccgatctacaccttccacacatgggactggcgacgggggctttttggtgcagatgctatcaagagagtgtcacaaaaaccgggagatgctctccgctttacaaaccctttcaagagacccagatatcttcccccgacagacggagaagactaccgacaagaagaagacttcgctttacaggaaaaaagaaggcgcacatccacagaagaagtccaggacccggagagccccccgcaaagcgcgccgctcctacagcagcagcagcagcaccgggagctctcagtccagctcgcggagcagcagcgactcggagtccaactccgatacatcctccaagaagtcctcaaaacgcaagcgggtctccacctaaaccccctattattaggcccgccagaaacagggtctatctctttgagccctccagaggcctacaccccatagtgggcagagaggcctgggaggacgaatacctgtgctgtaagtactgggatagacctcccagaaccaaccacctagacatgcccacctatccctggatgcccaccaacttcaaagtcagcttcaaacttggatttaaaccctaaataaaaatttcaaggccgtacactgttcacttgtcggtgtctacctcttaaggtcactaagcactccgagcgcagcgaggagtgcgacccttctgggtgggtgcaacgccctcggcggccgcgcgctacgccttcggctgcgcgcggcacctcggacccccgctcgtgctgacacgctcgcgcgtgtcagaccacttcgggctcgcgggggtcgggaattttgctaaacagactccgagttgccattggacactgtagctgtgaatcagtaacgaaagtgagtggggccagacttcgccataaggcctttatcttcttgccattggtcagtgtcgggggtcgccataggcttcgggctcggttttaggccttccggactaccaaaatggcggattccgtgacgtcatggccgccattttgagtaaggcggaacaggctgtcaccccgtgtcaaaggtcaggggtcagccttccgctttgcacaaaatggagggcaatatcttccgggtcagaggtcgctaccgcgtcataagtcacgtgggaacggctgctgtaaacccggaagtagctgacccacgtgacttgtcacgtgactagcacgtcacagccgccattttgtatcacaaaatggccgacttccttcctcttttttaaaaataacggcc

SEQ ID NO: 542 - protein, 765 aa, Alphatorquevirus sp.
MAWRWWWQRRWRRRPWPRRRWRRLRRRRPRRPVRRRRRRATVRRRRWRGRRGRRTYTRRAVRRRRRPRKRLVLTQWSPQTVRNCSIRGIVPMVICGHTKGGRNYAIHSEDFTTQIQPFGGSFSTTTWSLKVLWDEHQKFQNRWSYPNTQLDLARYKGVTFWFYRDQKTDYIVQWSRNPPFKLNKYSSSMYHPGMMMQAKKKLVVPSFQTRPKGKKRYRVRIRPPNMFADKWYTQEDLCPVPLVQIVVSAANLLHPFCPPQTNNPCITFQVLKDIYDNCIGVNSTQETSYNILTDILYNTCTYYETVQVLAQLSPNFQPALKPSSGHSNVTKTLGDAVDDLKYNSGKFYTKQNPVFGMCKYNPTKDTMTAANQWFWDNLMHTNDLHSSYGKANLKCMEYHTGIYSSIFLSPQRGIEFPAAYQDVTYNPNCDRAVGNRVWFQYSTKMNTHYDATQCKCVLENIPLWAAFHGYSDFIEQELSISSEIHNFGVVVFQCPYTFPPCYDKNRPNKGYVFYDTTFGNGKMPDGSGHIPVYWQQRWWIRLAFQVQVMHDFVLCGPFSYKDDLANTTLTARYKFRFKWGGNIIPEQIIKNPCQRQQSLASYPDRQRRDLQVVDPSTMGPIYTFHTWDWRRGLFGADAIKRVSQKPGDALRFTNPFKRPRYLPPTDGEDYRQEEDFALQEKRRRTSTEEVQDPESPPQSAPLLQQQQQHRELSVQLAEQQRLGVQLRYILQEVLKTQAGLHLNPLLLGPPETGSISLSPPEAYTP

SEQ ID NO: 543 - protein, 171 aa, Alphatorquevirus sp.; identical to SEQ ID NO: 154

SEQ ID NO: 544 - protein, 187 aa, Alphatorquevirus sp.
MGLATGAFWCRCYQESVTKTGRCSPLYKPFQETQISSPDRRRRLPTRRRLRFTGKKKAHIHRRSPGPGEPPAKRAAPTAAAAAPGALSPARGAAATRSPTPIHPPRSPQNASGSPPKPPIIRPARNRVYLFEPSRGLHPIVGREAWEDEYLCCKYWDRPPRTNHLDMPTYPWMPTNFKVSFKLGFKP

SEQ ID NO: 545 - DNA, 3546 bp, Alphatorquevirus sp.
tacgcgcgcgaggtgagtttacacaccgcagtcaaggggcaattcgggctcgggactggccgggctacgggcaaggctcttaaaaaagctactcccttaactatgtttctcggcagagtttaccgccaccagaaaaggaaagtgcttctgtccctggtgcatactccacagaaaacaccttcctccatgaaccgctggtcacccccggcacacgatgcccgcggaattgagaggcagtggtatgagtgtgtttggcgcagtcacgctgcttgctgtggctgtggtgattttattagtcatattaatgatctggcgcatcgttttggacgtcctccgggttccagaccacctactactccccagccgccggctgtgagagccctcccggcgctgccggcccctgagccatggtctggcgcagggggcgacgctggcgccggtggagatggcgccgcaagccgcggtggaggagatggagacgctggagacgtcgcagacgaagacctgctagacgccgtcgacctcgcagagtaaggagacgcaggggagggtggcggcgctcctacagacggtggaagagacgcagggggcgacgcagacataaaaagaaacttatactgactcagtggcaacccgcggttgtcaaaaaatgcagaatagtgggctacgaccccataataatatgtggactgaacagaaccagccacaactccacaactcacgcagaggactacactacaggcaaccaggcctttggggggggactgtgcaccaccagatacactccaagaatactgttccaagagtacatggcccaccacaactactggacggccagcaacagagacctggagctggccaggtacctgggggcttctattatattttttaaacaccccacagtagactttatagccagagtcagaaccatgcctccctttaacgacactgacatgacagccgcatccctgcacccgggaatgcttatgctagctaagaaaaaaataattattcccagtctgaaaaccagaccaagcagaaaacactatgtaaagataaagataggggcccccaagctatttgaagataagtggtactctcagagagacctctgtgacacaactcttgtggttatagaggcaacggttgcagacttgcaatatccgttcggctcaccactaacgaacagcatctgttgcaacttccaggttcttaacagcaactatgacaacgccctgagcacccttataggaactcagggagacaaagacagagataaatgctataaatttctgttaaatacaatcacctactataacacctctcaagtactagcacagctaaacaagtttttacctacctccaacacagttaacctctctgaatcaaatgcctcaaattccattaacccatccaaccaaacagaaaatacatacaataacacaaatacacagatacacaacaatacactgtatggaggagcagcatactttaccacattatcacaaaataattttccaccaaaaaaaatgaaagaggccaacaaagcatacactaaagcagctgcaaaaattctaggcaattggaattttactagcatgaactcatcctcagaacaggatttatcaggcctaaactactttgactattacacaggcatgttttccagcatatttttagccagcggcaggtcaaactgggaggtaaaaggcagctacacagacataacatacaaccccctagtagacaagggagagggcaacatgatctggatagactggatcaccaaaggtgacaccatctactctgaaaataaaagcaaatgcttgctcaaagacctgcccatgtgggccctgtgctatggctacgcagactatgtacttaagtgcacaggagtctccagcataaaaaacgaggccagaatagtcatgaggtgtccctacacgtacccccaactaataaaacacacagaccgcaactatggcttcgtagtgtacagtgacaactttggacgcggacgcatgccggggggcgaccctgtaccaagcaccagaaacagagtgcactggtacatcaccataacccaccagactgaagtgctagagtgcatctcccagaccggaccgtttgcctaccacagcgacgaacgcaaagcagtactgactataaaatacaacttcagatggaaatggggaggcaaccctgtgttccaacagattcttagagacccctgctcgggatcctccggctccggtccccgtagagtgcctcgctcaatacaagtcgatgacccgaagtaccagacaccagagtacatctggcacgcgtgggacttcagacgtggactctttagccagaaaggtattaagagagtgtcagaacaaccaacagatgttgaccttcctacaggcaggggcaagagacccaagagagacacagacggcccgcaagagcaaggccaagaagaaggctcgtcttccatcagacgagtcctccagcagtggctccactccagtcaggagcagagccaagaaagcgaagaagaagcagccccgacgacgctctcgcaagagctacaaaaacaactcaagcagcagcagctcatgggaaagcagctccgagagctcagtctccaactcgcccaagtccaagcggggggacaccttcacccccttttacaatgccatgcataaataaagtatacatgtttccccccatgacctctactccctccagcagagactggaaagaggagtacgaggcctgcagagtctgggacagacctcccagaaacgacctaagaaggccccctttctatccctggatgcctcctacgcacaatgtaagctttaagctctccttcaaataaatgttggccgtgggagtttcacttgtcggtgtctacctctataagtcactaagcactccgagcgtaagcgaggagtgcgaccctctgccctggtgcaacgccctcggcggccgcgcgctacgccttcggctgcgcgcggcacctcggacccccgctcgtgctgacacgcttgcgcgtgtcagaccacttcgggctcgcgggggtcgggaaatttgctaaacagactccgagttgccattggacactgtagccttgaatcagtaacgaaagtgagtggggccagacttcgccataaggcctttatcttcttgccattggatagtgtagggggtcgccataggcttcggcctcggttttaggccttccggactacaaaaatggcggattccgtgacgtcatggccgccattttaagtaaggcggaagcagctgtcactataacaaaatggcggcgacagccttccgctttgcacaaaatggcggtgtttatcttccgggtcaaaggtcacgcctacgtcacaagtcacgtgggggggggcccgctgcgcatacacggaagtaggccccgccacgtgactgaccacgtgggtgctgcgtcacagccgccattttgaatcacaaaatggccgacttccttcctcttttttaaaaataacggcccagcggcggcgcgcgcgc

SEQ ID NO: 546 - protein, 761 aa, Alphatorquevirus sp.
MVWRRGRRWRRWRWRRKPRWRRWRRWRRRRRRPARRRRPRRVRRRRGGWRRSYRRWKRRRGRRRHKKKLILTQWQPAVVKKCRIVGYDPIIICGLNRTSHNSTTHAEDYTTGNQAFGGGLCTTRYTPRILFQEYMAHHNYWTASNRDLELARYLGASIIFFKHPTVDFIARVRTMPPFNDTDMTAASLHPGMLMLAKKKIIIPSLKTRPSRKHYVKIKIGAPKLFEDKWYSQRDLCDTTLVVIEATVADLQYPFGSPLTNSICCNFQVLNSNYDNALSTLIGTQGDKDRDKCYKFLLNTITYYNTSQVLAQLNKFLPTSNTVNLSESNASNSINPSNQTENTYNNTNTQIHNNTLYGGAAYFTTLSQNNFPPKKMKEANKAYTKAAAKILGNWNFTSMNSSSEQDLSGLNYFDYYTGMFSSIFLASGRSNWEVKGSYTDITYNPLVDKGEGNMIWIDWITKGDTIYSENKSKCLLKDLPMWALCYGYADYVLKCTGVSSIKNEARIVMRCPYTYPQLIKHTDRNYGFVVYSDNFGRGRMPGGDPVPSTRNRVHWYITITHQTEVLECISQTGPFAYHSDERKAVLTIKYNFRWKWGGNPVFQQILRDPCSGSSGSGPRRVPRSIQVDDPKYQTPEYIWHAWDFRRGLFSQKGIKRVSEQPTDVDLPTGRGKRPKRDTDGPQEQGQEEGSSSIRRVLQQWLHSSQEQSQESEEEAAPTTLSQELQKQLKQQQLMGKQLRELSLQLAQVQAGGHLHPLLQCHA

SEQ ID NO: 547 - protein, 143 aa, Alphatorquevirus sp.
MFLGRVYRHQKRKVLLSLVHTPQKTPSSMNRWSPPAHDARGIERQWYECVWRSHAACCGCGDFISHINDLAHRFGRPPGSRPPTTPQPPAVRALPALPAPEPWSGAGGDAGAGGDGAASRGGGDGDAGDVADEDLLDAVDLAE

SEQ ID NO: 548 - protein, 62 aa, Alphatorquevirus sp.
MPCINKVYMFPPMTSTPSSRDWKEEYEACRVWDRPPRNDLRRPPFYPWMPPTHNVSFKLSFK

SEQ ID NO: 549 - DNA, 3545 bp, Alphatorquevirus sp.
cgggagccgaaggtgagtttacacaccgcagtctaggggcaattcgggcacgggtctggccgggctatgggcaagactcttaaaaaatttccttgctctgtgctccgccaggacatcaagtcatgccgtggtctccgccgagacataatatcacaacaagagaagatctctgggtgcaatcagttatttattcacatgacactttttgtggctgtgatagtgttcttcagcatcttactagcctcctgggtggcctacaaccagctccacctagagacccagcaccccctgccatacggagcctgccggcactgccgccagctccgcaaccccctgaagaaccacggcgtggtggagatacagacggaggccgtggagaagatggaggagacgccgctggggcctacgaaccaggagacctagaagaacttttcgccgccgccgcggaagacgatatgtgagtagagggcggcgccgccgatacaggcgcagacggagacgggggcgacgcagaaggggacgcagacgcaggcacagaaagacactcattgtcaggcagtggcaaccagacgttattaagagatgctttattactgggtggctacccctaattatctgtggaaatggacacacccaatttaactttataactcacatggacgacattccacccagaaatgcgtcctatgggggcaactttacaaatgtcacctttaaccttgcctgcttctatgaagaattcatgcaccacagaaacaaatggtcagcctccaaccatgacctagaactggtcagatacctcagaaccagcctaaaactgtacagacacgactcagtagactatatagttacctacaccaccacaggcccattcgagacaaatgaaatgtcctacatgctaactcaccctctagccatgcttctcagcaaaaaacatgtagttgtacccagcctaaagacaaaaccacacggcaaaaagtacaaaaagataacaatcaaacccccaaaactaatgctaaacaaatggtactttgccaaagacttctgccacataggcctcttccagctctgggctacaggcctagaactaagaaacccatggctcaggtcaggcacaaacagcccagttataggattctatgtccttaaaaaccaaatatatcaaaacagatacagcaatctgtctacagaaacacaaaaaagaaaagatgcatatgacgaactaacaaaagagaatggctccaaatggtacaattggcaatacacatacacaaaagtaatgaaacctatatactatgctgctgccaatgatcctactaacacacgttttaaaaccaaaccctataattggaaaaattacaaagaaaactttaaagcagtacaaactaagtggacaaatacagtaaaagatgcatatgaactagtagcagatgaatacagacaaatatacaccaccacactcacatatccaccaccatgggaacccactaacacttcagatataaacactggcagacaatacctagagcatgactgtggaatatacagcccatattttataacaccacaaatatacagcccagaatggcacacagcctggtcctacatcagatataatcccctcacagacaaaggcataggcaacagagtctgtgtgcagtactgcagcgaggccagcagtgactacaacccagtaaaaagcaagtgcatgctacaagacatgcccttgtggatgatgctgtatggctatgcagactatgtagtaaagagtacaggcatacagtcagcctggacagacatgagagtggccatcaggagcccctacacagacccaaaactcataggcagctcagaaaacacaatgttcattcccataggcatagaattcatgaacggagacatgccagacaagaggccctacattccgttaaagtggtggtttaagtggtaccccatgattacacaccaaaaaaccgcacttgaggcaatagtttcctgcagcccgttcatgcccagagatcaggaacaagccagttgggacataactgtaggttacaaagcaaccttcttatggggcgggtcccccttacctccacagcccatcgacgacccctgccaaaaatccacacacgaacttcccgaccccgatagaaaccctccaagaatacaaatctcagacccgcagcacctcggaccggcgacgctgttccactcgtgggacctcagacgtggatacattaatacaaaaagtattaaaagagtgtcagaacacctcgactctaatgaatatttttcaacaggcgtcgtatccaaaaaaccccgattcgacacaccccaccacgggcagctatcaaaccaagaagaagacgccttacatatactccgacaactccaaaaagagcaagaagagagcacctccgaagaagaacaagcactccaaaaagaagaggagcaaaaagaaaaactcctacagcagctccgagtccagcgacagcaccagcgagtcctcagggagggaatcaaacacctcatgggagacgtcctccgactcagacagggagtgcactggaacccaatcctgtaatccttccagcagaaccaataccagacctcctattccccaatactggtaaaaaaaaaaaattttctcccttcgaatggcagtgcgagcaagaactggcctgtctaatgaaacggcctatgcgtttctatccctcagacagcccgttctacccatggctaccccccaagcaagatatcccaaaaatatgtaaagtaaacttcaaaataaatttcagtgaatgaatctcgaggccccgggagtttcacttagcggtgtctacctctaaaggtcactaagcactccgagcgcaagcgaggagtgcgaccccctgcccggtagcaacttcctcggggtccggcgctacgccttcggctgcgccagctgtgaatcagtaacgaaagtgagtggggccagacttcgccataaggcctttaacttggggtcgcttgtcagcggcttccgggtccgcgtgggggccgccattttagcttcggccgccattttaggccctcgcgggcctccgtaggcgcgctctaatgacgtcacaggcgccatcttggctgtgacgtatcagtcacgtggacagggcgtgccttaacccggaagcatccctggtcacgtgactgtgacgtcgcggccgccattttgtgcgtccgccattttgtgacttccttccgctttttcaaaaaaaaagaggaagtatgacgtagcggcggggggggggggggggggggggggggggcggccccccgggcccccccccccgtgctaggtccaccgcgcatgcgcggccacgcccccgccgccattttgtacagcccgccaatttccattcaaacagaccaatgaacgtttactacgtacacttcctcgggtgtgtcctgccactctatataagcaacagcggtgacgaatggtagagttttttccgcccgtccgcagcgaggacgcgagcgtagcgagcggccgagcgacccgtggg

SEQ ID NO: 550 - protein, 642 aa, Alphatorquevirus sp.
MDDIPPRNASYGGNFTNVTFNLACFYEEFMHHRNKWSASNHDLELVRYLRTSLKLYRHDSVDYIVTYTTTGPFETNEMSYMLTHPLAMLLSKKHVVVPSLKTKPHGKKYKKITIKPPKLMLNKWYFAKDFCHIGLFQLWATGLELRNPWLRSGTNSPVIGFYVLKNQIYQNRYSNLSTETQKRKDAYDELTKENGSKWYNWQYTYTKVMKPIYYAAANDPTNTRFKTKPYNWKNYKENFKAVQTKWTNTVKDAYELVADEYRQIYTTTLTYPPPWEPTNTSDINTGRQYLEHDCGIYSPYFITPQIYSPEWHTAWSYIRYNPLTDKGIGNRVCVQYCSEASSDYNPVKSKCMLQDMPLWMMLYGYADYVVKSTGIQSAWTDMRVAIRSPYTDPKLIGSSENTMFIPIGIEFMNGDMPDKRPYIPLKWWFKWYPMITHQKTALEAIVSCSPFMPRDQEQASWDITVGYKATFLWGGSPLPPQPIDDPCQKSTHELPDPDRNPPRIQISDPQHLGPATLFHSWDLRRGYINTKSIKRVSEHLDSNEYFSTGVVSKKPRFDTPHHGQLSNQEEDALHILRQLQKEQEESTSEEEQALQKEEEQKEKLLQQLRVQRQHQRVLREGIKHLMGDVLRLRQGVHWNPIL

SEQ ID NO: 551 - DNA, 3545 bp, Alphatorquevirus sp.
ctgcggcggcgcgcgcgctgcgcgcgcgcgctcaaggggcaattcgggctcgggactggccgggctatgggcaaggctcttaaaaaagccatgtttctcggtcggccttacagaaagaagagggcactgtcactgctacgcgtgcgagctccagaggcgaaaccacctgctatgagctggagacccccggtgcacaaccccaatgggatcgagagaaacctgtgggaggcattctttcgcatgcatgcttcagcttgtggttgtggcgatcttgttggccatattactgtactggctggtcggtatggtgctcctcctcgtcccccggcccccggggctcccagaccaccgctaaaccggcagctggcccttccggcgccccccgctgatcctcagcaggccaacccgagatggcctggtggggacggtggagaagatggcgctggaggccccgccgctggcggcgccgtcgcagacgccgagtaccaagaagacgagctcaacgccctcttcgacgccgtcgaacaagaagagtaaggaggaggcgatgggggaggcggaggtggagacgggggtacagacgcagactgagactgagacgcagacgcagacgaaagcgaaaaatagtactaactcagtggaaccccgccaaagtgcggaggtgtactattaagggggtcttgcccatgatactgtgcggagcaggacgctcagggtttaactatggactgcacagcgacgactacaccacacagaaaccccttggccagaacccccacgggggcggcatgagtacagtgacttttagccttcaagtgctgtatgaccagtaccagaggtttatgaacaagtggtcgtactccaacgaccagctagacctcgccaggtactttggctgcaccttctggttttacagacacccagaggtggactttgtagctcagtttgacaacgttccacccatgaaaatggacgagaacacagcccccaacactcatccctcttttctactacaaaacaaacacagggttaaaattcctagctttaaaaccaagccttttggcagaaaaaaagttagagttacagtagggccccccaaactgtttgaagataagtggtacagccagcatgacttgtgtaaggtgcccctagtcagttggcggttaaccgcatgtgacttcaggtttccgttctgctcaccacaaactgacaacccttgctacaccttccaggtattgcatgaagagtattacccagtaataggcacttctgctttagaaaacggaacaaattacaataaaacagccgtagaaacattagaaaactttttatataaaaaatgtacccactatcaaacatttgccacagacacaagactaaaccctcaaagacccacaacaaccaacggcagacaaacatataatccaagcggacagctagaaggtattaaatggtcaacaaaagattttaatgactttaaaaagcacacagacagcaactatggctactgcacctactgccctactgatgagttagttacgaaaattaaggactacagagaccaaagattcaaatggctaactgaaatttcacaaacaaacacctgccacataaatgccacgtacgctcaaggaaaaattaagcagtgggaatatcacctaggatggtactcaaatatatttataggcaacctcagacacaacctggcattccgcacagcatacatagacattacctacaatcctataacagacaaaggagaaggcaacatagtgtggttccaatatgccactaaaccaaccacagagtacatagaggcccaggcaaaatgcaccattacaaacatacccctatatgctgctttctatggctatgaagactacatccaaagaacactaggcccttatcaggatgtagaaaccctaggtataatatgtgttaaatgtgcctacacagatccccctctagttcacaaagacaagtctaaggtcaactggggctacgtgttctacgacgtccactttggcaacggaaagacccctgagggactgggccaggttcatccttactggatgcaaaggtggagaccctacgtacagtttcaaaaagacactatgaacaagatagccaggacgggaccgttcagctacagagacgagacgccttccataaccctgaccgccggctacaagttccgttttaactgggggggcgactctatatttccacagattattaaaaacccctgcccagacagcggggtacgaccttcaaccggtagagagcgtcgctcagtacaagtcgttagcccgctcacaatggggccagagtacatattccaccggtgggactggcgacgggggttctttaatacaaaaactctcaaaagaatgcttcaaaaatcaattaatgatgaagaatatccaacaggcccaaaggtccctcgatggtttccctcactcgacaaccaagagcaagaaggcgtctcagatacagagacgacagcctcgcagtcctcgcaagaagaagccgctcaagaagccctccaagaagtccaagaggcgtcgctacagcagcacctcctccagcagtaccgagagcagcgaagaatcggacagcaactccaactcgtcatgctccaactcaccaagacgcagagcaacctgcacataaatccccgtgtccttggccatgcataaataaagtgtacatgtttccccccgaaaaaccaatgcccatacacgggtaccacgggtgggagacagaatttcaggcctgcaaggccttcgacaggccccctagaaactacctgtcagacagaccaatctatccctggcttccccgctcccaaccagaatttaaagtcagttttaagcttggttttcaataaacaaggccgtgggaatttcacttgtcggtgtctacctcttaaggtcactaagcactccgagcgttagcgaggagtgcgacccttccccctggtgcaacgccctcggcggccgcgcgctacgccttcggctgcgcgcggcacctcggacccccgctcgtgctgacacgctcgcgcgtgtcagaccacttcgggctcgcgggggtcgggaattttgctaaacagactccgagttgccattggacactgtagctgtgaatcagtaacgaaagtgagtggggccagacttcgccataaggcctttatcttcttgccattggtacgtgtcgggggtcgccgtaggcttcgggctcggttttaggccttccggactacaaaaaccgccattttagtgacgtcacggcggccattttaagtaagcatggcgggcggtgacgtataagttcaaaggtcaccgcgcttccgtgtttacacaaaatggtggccaacttcttccgggtcaaaggtcggcagctacgtcatgagtcacgtgggacggctgcgtcataaacacggaagtggctgttccacgtgacttgtcacgtgactgctacgtcacggccgccattttagtttacaaaatggcggacttccttcctcttttttaaaaataacggcc

SEQ ID NO: 552 - protein, 762 aa, Alphatorquevirus sp.; identical to SEQ ID NO: 514

SEQ ID NO: 553 - protein, 178 aa, Alphatorquevirus sp.
LRRRARCARALKGQFGLGTGRAMGKALKKAMFLGRPYRKKRALSLLRVRAPEAKPPAMSWRPPVHNPNGIERNLWEAFFRMHASACGCGDLVGHITVLAGRYGAPPRPPAPGAPRPPLNRQLALPAPPADPQQANPRWPGGDGGEDGAGGPAAGGAVADAEYQEDELNALFDAVEQEE

SEQ ID NO: 554 - protein, 147 aa, Alphatorquevirus sp.; identical to SEQ ID NO: 516

SEQ ID NO: 555 - DNA, 3545 bp, Alphatorquevirus sp.
cgcttcgcgcgcgcaccggggggctccgccctcaaggggcaattcgggctcgggactggccgggctatgggcaaggctcttagggtcatcgctctttaaaacatgtttctcggcaggccttacagaaagaagagggcactgccactgcctcgcctgcactctacaccgcaaacacggcctagcatgagccaccactggcgcgagccctacgacaatgtctccaaccgggagaggcactggctggaaggagtactcaggacccaccgagccttttgtggttgcagcgatcctgtgcttcattttactaatctggttgcacgttttaatcttcaaggcggtgctgcctcgcagggtggtcctaggaatccgcccccgctgaggcgcctgcccgcgctgcccccggccccctcgcccggcaacacccctaggccgccatgtcctggtggggatggcgccgccggtggtggcgaaggccgcggagacggtggagatggagacgtacgcgccgcccgagacgaataccgcgacgacgatatcgacgacctgctcgccgctatcgagcaagacgagtaaggaggcgccgcgcggggggctggcgggggcgacgcagatactcccgacgctatagtaggagactgactgtgaggcgaaagaaaaagaaacttactcttaaggtctggcagcctcagaatatcaaaaagtgcaagatcaggggtctcctgcccctcctaatctgcgggcacacccggtccgcctttaactatgccatccactcggatgacaagaccccccagcaggagagttttgggggcgggctcagcactgtaagcttcagtctcaaagtactgtttgaccagaaccaaaggggactcaacaggtggtcggccagcaacgaccagctggacctcgcccggtacctgggctgcacgttctggttctacagagacaaaaacactgacttcatagtgcagtacgatgttagcgccccctttaagctggacaaaaacagctcgccgagctaccaccccttcatgctcatgaaggccaagcacaaagtgctggtgcccagcttcaacaccagacccaagggcagggagaaagttaaggtcaggataaagccccccaccatgttcatagacaagtggtacactcaggaggacctctgtcccgttattcttgtgtcacttgtggttagcgcagcttcctttacacatccgttctgctcaccacaaactgccaacccttgcatcaccttccaggttttgaaagagttctattaccctgcaatggggtacgccacaccagaaagcacaatgaacggaatatggaacaccctctatacaactgccacctactggcagtcccacctgaccccccagtttgtcagaatgccctccaaaaatccagataatactgacaacacagaagctgccgagtttaatatctgggttgaatccgagtttaaaacaggcaagttagtcaagtacaacttccctcaatataaacctaacagagacaaattacaaaaactaagaaagtactatttccagtgggaaactaagacagaaggggtggcagtacctcctacatggaccacccccacatcagacaggtacgagtaccacgtaggcatgttcagccctatatttctgacccccttcaggtccgcagggctagactttcccagggcataccaggacgtcacatacaatcccctcacagacaagggagtgggcaacagaatgtggttccagtacaacactaaaatagacacccagttcgatgccaggtcctgcaaatgcatcctcgaggacatgcccctttactgcatggcctacgggtacgctgactttttagagcaagagataggagagtaccaggacctagaggccaacgggtacgtctgtgtcatcagtccttacactaaaccccccatgttcaacaaaaataacccccaacaggggtacgtgttctacgactcccagtggggcaatggcaagtggatagacggcaccgggttcgtccccgtgtactggctaaccaggtggagagtagaactgctatttcagaaaaaagtactgtcagacatcgccatgtcaggccccttcagctaccccgacgaactaaagaacactgtactgactgcaaagtatagatttgactttaagtggggtggcaatctcttccaccaacagaccattagaaacccctgcaaaccagaagaaacctcgaccagtagattccctcgcgaggtacaagtcgttgacccggtcaccatgggcccccgattcgtgtttcactcctgggactggagacgagggttccttagtgacagagctctcaagagaatgttcgaaaaaccgctcgattttgagggatttgcagcgactccaaaacgacctcgcatattccctcccacagagggacagctcgccagagagcaaaaggagcaagaagaaggctgcgattcgcaggaagaaagcagccttacctcgctcgaagaagtcccggaagagacgcagctacgagtccacctccgaaagcagctcagagagcagcgaagcatcagacagcaactcagaaccatgttccaccagcttgtcaagacgcaagcgggcctacacctaaacccccttttatctatccagccataaacagggcctacatattcccagacagggccccaaaaccgtctcccaccccgggagactgggccaccgagtacctgtgcgccaagatcttcgacaggccccccaggtccgtgctcacagacacccccttctacccttgggtccccaaacccactcccgagttccgggtctccttcaaactgggatttaaaccctaaataaaattttcaaggccgtggaaatctcacttatcggtgtctacctcttaaggtcactaagcactccgagcgccagcgaggagtgcgaccctgtctctgtgggccccctactgccgatagccaacttcttcggagccgcgcgctacgccttcggctgcgcgcggcacctcagacccccgctcgtgctgacacgctcgcgcgtgtcagaccacttcgggctcgcgggggtcggaaattttactaaacagactccgagacgctcttggacactgagtgggcgtatcagtaacgaaagtgagtggggccagacttcgccatagggcctttatcttcttgccatttgtcagtatagggagtcgccataggcttcgggtccggttacaggccttccggactacaaaaatggcgaattcagtaacgtcacggccgccatcttaagtaaggcggaacctggctgtcactatacaaaatggcggcgacagccttccgctttacacaagatggtggtatttttcttccgggtcagaggtcaccggctacgtcataagtcacgtgggaagggcgaagcgtaaacccggaagctaatcctcccacgtggcttgtcacgtgaccgctacgtcacggcggccattttaaatcacaaaatggcggatttccttcctctttttcaaaatttaaccgtcggcggcggcgcgcg

SEQ ID NO: 556 - protein, 739 aa, Alphatorquevirus sp.
MSWWGWRRRWWRRPRRRWRWRRTRRPRRIPRRRYRRPARRYRARRVRRRRAGGWRGRRRYSRRYSRRLTVRRKKKKLTLKVWQPQNIKKCKIRGLLPLLICGHTRSAFNYAIHSDDKTPQQESFGGGLSTVSFSLKVLFDQNQRGLNRWSASNDQLDLARYLGCTFWFYRDKNTDFIVQYDVSAPFKLDKNSSPSYHPFMLMKAKHKVLVPSFNTRPKGREKVKVRIKPPTMFIDKWYTQEDLCPVILVSLVVSAASFTHPFCSPQTANPCITFQVLKEFYYPAMGYATPESTMNGIWNTLYTTATYWQSHLTPQFVRMPSKNPDNTDNTEAAEFNIWVESEFKTGKLVKYNFPQYKPNRDKLQKLRKYYFQWETKTEGVAVPPTWTTPTSDRYEYHVGMFSPIFLTPFRSAGLDFPRAYQDVTYNPLTDKGVGNRMWFQYNTKIDTQFDARSCKCILEDMPLYCMAYGYADFLEQEIGEYQDLEANGYVCVISPYTKPPMFNKNNPQQGYVFYDSQWGNGKWIDGTGFVPVYWLTRWRVELLFQKKVLSDIAMSGPFSYPDELKNTVLTAKYRFDFKWGGNLFHQQTIRNPCKPEETSTSRFPREVQVVDPVTMGPRFVFHSWDWRRGFLSDRALKRMFEKPLDFEGFAATPKRPRIFPPTEGQLAREQKEQEEGCDSQEESSLTSLEEVPEETQLRVHLRKQLREQRSIRQQLRTMFHQLVKTQAGLHLNPLLSIQP

SEQ ID NO: 557 - protein, 156 aa, Alphatorquevirus sp.
MFLGRPYRKKRALPLPRLHSTPQTRPSMSHHWREPYDNVSNRERHWLEGVLRTHRAFCGCSDPVLHFTNLVARFNLQGGAASQGGPRNPPPLRRLPALPPAPSPGNTPRPPCPGGDGAAGGGEGRGDGGDGDVRAARDEYRDDDIDDLLAAIEQDE

SEQ ID NO: 558 - protein, 128 aa, Alphatorquevirus sp.
LRFAGRKQPYLARRSPGRDAATSPPPKAAQRAAKHQTATQNHVPPACQDASGPTPKPPFIYPAINRAYIFPDRAPKPSPTPGDWATEYLCAKIFDRPPRSVLTDTPFYPWVPKPTPEFRVSFKLGFKP

SEQ ID NO: 559 - DNA, 3544 bp, Alphatorquevirus sp.
cgggtgccggaggtgagtttacacaccgcagtcaaggggcaattcgggctcgggactggccgggctatgggcaaggctcttaaaaaagcatgtttctcggtaaaatttacagaaagaaaaggaaagtgccactgtacggcctgccagctccaaagaagaaaccacctactggtatgagccactggagcagacccgtccaccatgcaacggggatcgaacacctctggtaccagtctgttattaacagccattctgctagctgcggttgtggcgatcctgtacgccactttacttatcttgctgagaggtatggcttcgccccaactccccgcgccccgccagtagccccgacgcccaccatccgtagagccaggcctgtgcctgccgctccggagccccgtgccctaccatggcatggggatggtggaaacgaaaacgcaagtggtggtggagacgccggttcgcccgaggcagagttcgcagacgacggattagacgccctcgtcgccgcactcgacgaagaacagtaaggagacgcagacaatggaggagggggcgactaagacgcagactgtttaagcgaaaaagacgctttaagagacgcagacgaaaagctaagataaaaataactcagtggcaacctagctcagttaagagatgttttgttataggatactttccattagtaatatgtggccccggaaggtggtcagagaactttaccagtcacatagaggacaagataagcaaaggaccctttgggggagggcacagcactagtagatggtccctaaaagtactctacgaagagttccaaagacaccacaacttttggactagaagcaacaaagaactagaattagttagattctttggaagcagttggagattttacagacacgaggacgttgactatatagtatactactctagaagggctcccctgggaggtaacatactgacagcacccagcctacacccaggggcagccatgctcagcaaacacaagataatagttcccagctttaaaaccagacccggtggaaaacccaccgtaaaaattaatattaagccccctacaacactaatagacaaatggtacttccagaaagacatttgtgacacaacctttttaaacttgaacgttgtactctgcaacctgcggtttccgttctgctcaccacaaactgacaacatttgtgtaaccttccaggtattgcatgaggtttaccacaattacattagcataactgccaaagaattacttacaccttcaggctggaaaaactactatgaaaagtttttaaatgctgcctttccaaataacagatcaattaataaattaaacacttttagcacagaaggagcctacagccacccacaaataaaaaaatatacagaaaacataacaacttcagattcgaaatactttagagataaagacggacagtggggagatgctatttatataacagacagccaaagtcaagcagacgtaataaagttaataataaaaaatgcagaaaactacctaaaaaaagtacagcaagaatatgcaggacaagagaatttaaaaaacctaatacatccagttttctgtcagtacgtaggcatatttggcagtccactactaaacttccacagaataagtccagaaattccaggcctgtacaaagacataatatataatcccttaatagacaaaggcataggaaacagagtgtggatagactacctcagcaaagataacacaaagtacaaccccacacaaagtaaatgttacatagcagaccttccaatgtggatggcctgctttggcctagtagactggtgcaaaaaagaaacaggcaactggggaataccagcctgggctagagtagtaatgatatgtccatacacctatcccaaattatacaacacaccagacccagaaagtggattcataccaataggatacaactttagccaaggtttcatgccagacggcaccaaatacacacccatacagatgagacacagatggtatccaaacttactaaaccagcaagcagtattagaagacataagtcagtcagggcccttctcatacagagaaaaaacaaacacagcaaacataaacgcaaaatacaaatttagatttcactttgggggcaaccctgtgtccgaacagattgttgcagacccatgcaaacaacccacctttgaaatgcccggaaccagtacactccctcctcgactacaagtcacggacccgaaactcctcggaccgcactacacattccacagctgggacaaaagacgtgactattataacggaaaaactattaagagaatgtcagaacaacaagaaacttctgagtttttattcccaggcccgaaaaaacccagagtcgatctggacgcagtgcagcctgtcgaaaaagactctttgccccagcaaagagaacagagaccctgggagacgagcgagagcgagaaagagacagaagccctctcggaagaagaagagacgggctccgtccaccagcagctcaggcagcagctcaaggagcaaaagcagctcagacagggaatcgagtgcctcttcgagcagctaataaaaacccagcagggagtccacctagatccttccctcttgtaggccccagacagtggctgtttcccgagagaaagccagcccctgcccctacctcgggagactgggccacagaatatttagcagctagagtgtttgacagacccccgagaagcaaccttaaagatacaccctactacccctacgttaaaaaccaatacaatgtgtactttgacctaacctttgaataaagtgcagcttcaaatttgcaaggccgtgggagtttcactggtcggagtctacctctaaaggtcactaagcactccgagcgttagcgaggagtgcgacccttccccctgactcaacttcttcggagccgcgcgctacgccttcggctgcgcgcggcacctcagacccccgctcgtgctgacacgctcgcgcgtgtcagaccacttcgggctcgcgggggtcgggaaatttgctaaacagactccgagttgccattggactcaggagctgtgaatcagtaacgaaagtgagtggggccagacttcgccatagggcctttatcttcttgccattggtccgtgtcgggggtcgccgtaggcttcggactcggttttaggccttccggactacaaaattcgccattttagtgacgtcacgaccgccatcttaagtagttgaggcggacggtggcgtgagttcaaaggtcaccatcagccacacctactcaaaatggaggtcaaattcttccaggtcaaaggtcaccggcgccatcttaagtcacgtgaccttctacgtcacggccaccattttagtttacaaaatggccgacttccttcctctttttcaaaaaaaagcggaagtgccgccgcgaatataaagcgctgcacttccgaatggctgagttttccacgcccgtccgcagcggcagcaccacggagggtgatccccgcgtcccgaggg

SEQ ID NO: 560 - protein, 743 aa, Alphatorquevirus sp.
MAWGWWKRKRKWWWRRRFARGRVRRRRIRRPRRRTRRRTVRRRRQWRRGRLRRRLFKRKRRFKRRRRKAKIKITQWQPSSVKRCFVIGYFPLVICGPGRWSENFTSHIEDKISKGPFGGGHSTSRWSLKVLYEEFQRHHNFWTRSNKELELVRFFGSSWRFYRHEDVDYIVYYSRRAPLGGNILTAPSLHPGAAMLSKHKIIVPSFKTRPGGKPTVKINIKPPTTLIDKWYFQKDICDTTFLNLNVVLCNLRFPFCSPQTDNICVTFQVLHEVYHNYISITAKELLTPSGWKNYYEKFLNAAFPNNRSINKLNTFSTEGAYSHPQIKKYTENITTSDSKYFRDKDGQWGDAIYITDSQSQADVIKLIIKNAENYLKKVQQEYAGQENLKNLIHPVFCQYVGIFGSPLLNFHRISPEIPGLYKDIIYNPLIDKGIGNRVWIDYLSKDNTKYNPTQSKCYIADLPMWMACFGLVDWCKKETGNWGIPAWARVVMICPYTYPKLYNTPDPESGFIPIGYNFSQGFMPDGTKYTPIQMRHRWYPNLLNQQAVLEDISQSGPFSYREKTNTANINAKYKFRFHFGGNPVSEQIVADPCKQPTFEMPGTSTLPPRLQVTDPKLLGPHYTFHSWDKRRDYYNGKTIKRMSEQQETSEFLFPGPKKPRVDLDAVQPVEKDSLPQQREQRPWETSESEKETEALSEEEETGSVHQQLRQQLKEQKQLRQGIECLFEQLIKTQQGVHLDPSLL

SEQ ID NO: 561 - protein, 146 aa, Alphatorquevirus sp.
MFLGKIYRKKRKVPLYGLPAPKKKPPTGMSHWSRPVHHATGIEHLWYQSVINSHSASCGCGDPVRHFTYLAERYGFAPTPRAPPVAPTPTIRRARPVPAAPEPRALPWHGDGGNENASGGGDAGSPEAEFADDGLDALVAALDEEQ

SEQ ID NO: 562 - protein, 123 aa, Alphatorquevirus sp.
LGDERERERDRSPLGRRRDGLRPPAAQAAAQGAKAAQTGNRVPLRAANKNPAGSPPRSFPLVGPRQWLFPERKPAPAPTSGDWATEYLAARVFDRPPRSNLKDTPYYPYVKNQYNVYFDLTFE

SEQ ID NO: 563 - DNA, 3542 bp, Alphatorquevirus sp.
ggcgggggggccgcgcgctgcgcgcgcggcctcaaggggcaattcgggctcgggactggccgggctatgggcaaggctcttaaaaatgcacttttctaggtgcagtagaaagaaaaggacactgtcactgctaccactgcaccattcacagaaagctaggccatctgtgaaaggtatgtggagacccccgactcgaaatgcattcaccattcaacgtaactggttctacagttgctttcactcccactcttctatgtgtggctgtgctgattttattggtcatttcaatcacatcgctgctatgctcggccgtccggaagaccagaaccctcctccgccacccggggctctgagacccctacccgctctcccggccgccaccgaggcgcccggtgatcgagcaccatggcctatgggtggtgctggaggcgacggaggcgcccgtggaggaggagaagatggcgccgctggagacgtcgccggagaccccgcagacgccgacctcgtcgccgctatcgacgccgcagaacagtaaggaggcgcggcagggggaggtggactaggagatatagacgatggcgccgcaagggcaaacgcaaaggcaaaaagaaaattattataaagcagtggcagcccaactacacccgcagatgcaacatagtgggctacctacccctactaatttgtggggaaaatgctgttgccagaaactatgctacccactcagacgacagctactaccccggaccctttggcgggggaatgactacagacaaatttactttaagaatactgtatgatgagtacaaaaggtttatgaactactggaccgcctcaaacgaggacctagacctgtgtagatacctgggagttactatatacgtgtttagacacccagaggtagactttatactacttataaacacctcccctccattcctagacacagaaataacagggcctagcatacacccaggtatgatggccctcaacaaaagagccaggtggatacctagcctaaaaaacagaccaggcagaaagcactatgtaaaaattaaagtaggagccccccgaatgttcacagataagtggtacccccaaacagacctctgtgacatgacactcctaacgatctttgccagtgcggcggatatgcaatatccgttcggctcaccactaactgacactatagttgtgtcattccaagttctgcaatccatgttcaacgactgcctcagtgtacttccttctaactttgaaccatcaggcaaaggattattattatataacaaaattagtaaacacttaccatactataacacaacacaaacacaagcacaactaaaaagatacatagacaatacagcaaacgcaacaaatacatggaattcatacctaaataatgaaaaattttcaaaaacagaatcaccaaatacagactcaaactccataggaggaccatacactaaatacaatgacacatggtataaaggcactgcctatgtacaaaaaattactgaagtgccaccaaaggcagcaaaactatactatgatcagaccaaatcacttattggcataacattcacaggatctacagaatacctacactataccggaggcttatacacctccatatggctatcagcaggtagatcctactttgaaaccaaaggcccatacacagacatcacttacaaccccttttcagacagaggagaaggtaacatgctttggatagactggctaactaaagatgactcacaatactcaaaaacacagagcaagtgtctcatagagaacttacccctgtgggcctcagtatacggatacacagagtactgcagcaaagtaacaggagactcaaacatagaacacaactgtagatgtgttatcagaagcccctacacagtaccacagctgttagaccacaacaaccccctcagaggctacgtaccttacagctttaactttggaaatggtaaaatgccaggcggtagcagcctagtacctattagaatgagagccaagtggtaccccactctttttcaccaaagagaagtactagaggccatagcacaggcgggcccctttgcataccactcagacattaagaaagtatccctaggcataaagtacagatttaagtgggtgtggggtggcaaccccgtgtcccaacaggttgttagaaacccctgcaagaccacccaaggttcctcgggcaatagagtgcctcgatcaatacaagtcgttgacccgcggtacaacacgccagagctcaccatacacgcgtgggacttcagacatgggttctttggcagaaaagctattaagagaatgcaagaacaaccaatacctcatgacactttttcagcagggttcaagcgcagtcgccgagatacagaagcactccaatccagccaagaagagcaacaaaaagaaaacttacttttcccagtccagcagctcaagcgagtccccccatgggagacctcgcaagagagccaaagcgaggaagaaaactcgcaaaaacaggagaccctctcccagcaactcagagaccagctgcacaagcagcggctcatgggagagcaactccgatcgctcctctaccaaatgcagagggtccaacaaaatcaacacataaaccctatgttattgccaaagggtctggcattaacttctatttctcacaatgtaatatagatatgtttggtgaccccaaaccctacaacccctcctccaatgactggaaggaggagtacgaggccgcaaagtactgggacagaccccccagacgcgacctaaggagcacccccttctacccctgggcccccacccctaaaccatacaatgtcaactttgccctcaactacaaataaacggtggccgtgggagtttcacttgtcggtgtctacctcttaaggtcactaagcactccgagcgtaagcgaggagtgcgaccctctaccaaggggcaactccctcgaagtccggcgctacgcgcttcgcgctgcgccggacatctcggaccccccctcgacccgaatcgcttgcgcgattcggacctgcggcctcgggggggtcgggggctttattaaacggactccgagatgccattggacactgagggggtgaacagcaacgaaagtgagtggggccagacttcgccatagggcctttatcttcttgccatttgtccgcgaccgggggtcgctcctaggcgcggaccccgtttcggggtccttccgggttcgtcggcgccgttccagtgacgtcacgggcgccatcttaagtggctgtcgccgaggattgacgtcacagttcaaaggtcatcctcggcggtaaccgcaaagatggcggtcaatctcttccgggtcaaaggttgtgcatacgtcataagtcacatgacaggggtccacttaaacacggaagtaggccccgacatgtgactcgtcacgtgtgtacacgtcacggccgccattttgttttacaaaatggccgacttccttcctcttttttaaaaaaaggcgccaaaaaaccgtc

SEQ ID NO: 564 - protein, 765 aa, Alphatorquevirus sp.
MAYGWCWRRRRRPWRRRRWRRWRRRRRPRRRRPRRRYRRRRTVRRRGRGRWTRRYRRWRRKGKRKGKKKIIIKQWQPNYTRRCNIVGYLPLLICGENAVARNYATHSDDSYYPGPFGGGMTTDKFTLRILYDEYKRFMNYWTASNEDLDLCRYLGVTIYVFRHPEVDFILLINTSPPFLDTEITGPSIHPGMMALNKRARWIPSLKNRPGRKHYVKIKVGAPRMFTDKWYPQTDLCDMTLLTIFASAADMQYPFGSPLTDTIVVSFQVLQSMFNDCLSVLPSNFEPSGKGLLLYNKISKHLPYYNTTQTQAQLKRYIDNTANATNTWNSYLNNEKFSKTESPNTDSNSIGGPYTKYNDTWYKGTAYVQKITEVPPKAAKLYYDQTKSLIGITFTGSTEYLHYTGGLYTSIWLSAGRSYFETKGPYTDITYNPFSDRGEGNMLWIDWLTKDDSQYSKTQSKCLIENLPLWASVYGYTEYCSKVTGDSNIEHNCRCVIRSPYTVPQLLDHNNPLRGYVPYSFNFGNGKMPGGSSLVPIRMRAKWYPTLFHQREVLEAIAQAGPFAYHSDIKKVSLGIKYRFKWVWGGNPVSQQVVRNPCKTTQGSSGNRVPRSIQVVDPRYNTPELTIHAWDFRHGFFGRKAIKRMQEQPIPHDTFSAGFKRSRRDTEALQSSQEEQQKENLLFPVQQLKRVPPWETSQESQSEEENSQKQETLSQQLRDQLHKQRLMGEQLRSLLYQMQRVQQNQHINPMLLPKGLALTSISHNVI

SEQ ID NO: 565 - protein, 159 aa, Alphatorquevirus sp.
LAGLWARLLKMHFSRCSRKKRTLSLLPLHHSQKARPSVKGMWRPPTRNAFTIQRNWFYSCFHSHSSMCGCADFIGHFNHIAAMLGRPEDQNPPPPPGALRPLPALPAATEAPGDRAPWPMGGAGGDGGARGGGEDGAAGDVAGDPADADLVAAIDAAEQ

SEQ ID NO: 566 - protein, 132 aa, Alphatorquevirus sp.; identical to SEQ ID NO: 476

SEQ ID NO: 567 - DNA, 3540 bp, Alphatorquevirus sp.
ggagctggccaggtacctgggggcttctattataaggggcaattcgggctcgggactggccgggctatgggcaaggctcttaaaaaagctacccccttaactatgtttcttggcagagtttaccgccaccagaaaagcaaagtgcttctgtccctggtgcatactccacagaaaacaccttcctccatgaaccggtggtcacccccggcacacgatgcccgcggaattgagaggcagtggtatgagtgtgtttggcgcagtcacgctgcttgctgtggctgtggtgattttattagtcatattaatgatctggcgcatcgttttagacgtcctccgggttccagaccacctactactccccagccgccggctgtgagagccctcccggcgctgccggcccctgagccatggtctggcgcagggggcgacgctggcgccggtggagatggcgccgcaagccgcggtggaggagatggagacgctggagacgtcgcagacgaagacctgctagacgccgtagacctcgcagagtaaggagacgcaggggagggtggcggcgctcctacagacggtggaagagacgcagggggcgacgcaaacataaaaaaaaacttatactaactcagtggcaacccgcggttgtcaaaaaatgcaggatagtgggctacgaccccataataatatgtggactgaacagaaccagccacaactccacaactcacgcagaggactacactacaggcaaccaggcctttggggggggactgtgcaccaccaaatacactctaagaatactgttccaagaatacatggcccaccacaactactggacggccagcaacagagacctggagctggccaggtacctgggggcttctattatattttttaaacaccccacagtagactttgtagccagagtcagaaccatgcctccctttaacgacactgacatgacagccgcatccctgcacccgggaatgcttatgctagctaagaaaaaaataattattcccagtctaaaaaccagacccagcagaaaacactatgtaaagataaagataggggcccccaagctatttgaagataagtggtactctcagagagacctctgtgacacaactcttgtggttatagaggcaacggttgcagacttgcaatatccgttcggctcaccactaacgaacagcatctgttgcaacttccaggttcttaacagcaactatgacaacgccctgagcacccttataggaactcagggagacaaagacagagataaatgctataaatttctgttaaatacaatcacctactataacacctctcaagtactagcacagctaaacaagtttttacctacctccaacacagttaacctctctgaatcaaatgccagagactccattaatccatccaaccaaaaagaaaatacatacactaacacaattacacaaagacacaacaatacactgtatggaggagcagcatactttaccacgtcacaacaaaataatttaccaccaaacaaaatgaaagaggccaacaaagcatacactaaagcagctgaaaaaattctaggcaattggaattttactaacatgaactcatcctcagaacaagagttatcaggcctaaactactttgactactacacaggcatgttttccagcatatttttagccagcggcaggtcaaactgggaggtaaaaggcagctacacagacataacatacaaccccctagtagacaagggagagggcaacatgatctggatagactggatcaccaaaggtgacaccatctactctgagaataaaagcaaatgcttgctgagagacctgcccatgtgggccctgtgctatggctacgcagactatgtacttaagtgcacaggagtctcaagcataaaaaacgaggccagaatagtcatgaggtgtccctacacatacccccaactaacaaaacacacagaccccaactttggattcgtagtatacagtgacaactttggacgcggacgcatgccggggggcgaccctgtaccgagcaccagaaacagggtgcactggtacatcaccataacccaccagactgaagtgctagagtgcatctcccagaccggaccgtttgcctaccacagcgacgaacgcaaagcagtactgactataaaatacaacttcagatggaaatggggaggcaaccctgtgttccaacagattcttagagacccctgctcgggatcctccggctccggtccccgtagagtgcctcgctcaatacaagtcgatgacccgaagtaccagacaccagagtacatctggcacgcgtgggacttcagacgtggactctttagccagaaaggtattaagagagtgtcacaacaaccaacagatgttgaccttcctacaggcaggggcaagagacccaagagagacacagacggcccgcaagagcaaggccaagaagaaggctcgtcttccatcagacgagtactccagcagtggctccactccagtcaggagcagagccaagaaagcgaagaagaagcagccccgacgacgctctcgcaagagctacaaaaacaactcaagcagcagcagctcatgggaaagcagctccgagagctcagtctccaactcgcccaagtccaagcggggggacaccttcacccccttttacaataccatgcataaataaagtgtatatgtttccccccatgacctctactccctccagctcagactggaaagaggagtacgaggcctgcagagtctgggacagacctcccagaaacgacctaacaaagccccctttctatccctggatgcctcctacgcaccatgtaagctttaagctctccttcaaataaatgttggccgtgggagtttcacttgtcggtgtctacctctataagtcactaagcactccgagcgtaagcgaggagtgcgaccctctgccctggtgcaacgccctcggcggccgcgcgctacgccttcggctgcgcgcggcacctcggacccccgctcgtgctgacacgcttgcgcgtgtcagaccacttcgggctcgcgggggtcgggaaatttgctaaacagactccgagttgccattggacactgtagccgtgaatcagtaacgaaagtgagtggggccagacttcgccataaggcctttatcttcttgccattggatagtgtagggggttgccataggcttcggcctcggttttaggccttccggactacaaaaatggcggattccgtgacgtcatggccgccattttaagtaaggcggaagcagctgtcactgtaacaaaatggcggcgacagccttccgctttgcacaaaatggcggtgtttatcttccgggtcaaaggtcacgcctacgtcacaagtcacgtggggggacccgctgcgcatacacggaagtaggccccgccacgtgactaaccacgtgggtgctgcgtcacagccgccattttgaatcacaaaatggccgacttccttcctgttttttaaaaataacggccagcaacagagacct

SEQ ID NO: 568 - protein, 761 aa, Alphatorquevirus sp.
MVWRRGRRWRRWRWRRKPRWRRWRRWRRRRRRPARRRRPRRVRRRRGGWRRSYRRWKRRRGRRKHKKKLILTQWQPAVVKKCRIVGYDPIIICGLNRTSHNSTTHAEDYTTGNQAFGGGLCTTKYTLRILFQEYMAHHNYWTASNRDLELARYLGASIIFFKHPTVDFVARVRTMPPFNDTDMTAASLHPGMLMLAKKKIIIPSLKTRPSRKHYVKIKIGAPKLFEDKWYSQRDLCDTTLVVIEATVADLQYPFGSPLTNSICCNFQVLNSNYDNALSTLIGTQGDKDRDKCYKFLLNTITYYNTSQVLAQLNKFLPTSNTVNLSESNARDSINPSNQKENTYTNTITQRHNNTLYGGAAYFTTSQQNNLPPNKMKEANKAYTKAAEKILGNWNFTNMNSSSEQELSGLNYFDYYTGMFSSIFLASGRSNWEVKGSYTDITYNPLVDKGEGNMIWIDWITKGDTIYSENKSKCLLRDLPMWALCYGYADYVLKCTGVSSIKNEARIVMRCPYTYPQLTKHTDPNFGFVVYSDNFGRGRMPGGDPVPSTRNRVHWYITITHQTEVLECISQTGPFAYHSDERKAVLTIKYNFRWKWGGNPVFQQILRDPCSGSSGSGPRRVPRSIQVDDPKYQTPEYIWHAWDFRRGLFSQKGIKRVSQQPTDVDLPTGRGKRPKRDTDGPQEQGQEEGSSSIRRVLQQWLHSSQEQSQESEEEAAPTTLSQELQKQLKQQQLMGKQLRELSLQLAQVQAGGHLHPLLQYHA

SEQ ID NO: 569 - protein, 155 aa, Alphatorquevirus sp.
MGKALKKATPLTMFLGRVYRHQKSKVLLSLVHTPQKTPSSMNRWSPPAHDARGIERQWYECVWRSHAACCGCGDFISHINDLAHRFRRPPGSRPPTTPQPPAVRALPALPAPEPWSGAGGDAGAGGDGAASRGGGDGDAGDVADEDLLDAVDLAE

SEQ ID NO: 570 - protein, 54 aa, Alphatorquevirus sp.
MFPPMTSTPSSSDWKEEYEACRVWDRPPRNDLTKPPFYPWMPPTHHVSFKLSFK

SEQ ID NO: 571 - DNA, 3539 bp, Alphatorquevirus sp.
cctgcggcggcgcgcgcgcttcgcgcgcgcgtcaaggggcaattcgggctcgggactggccgggccccgggcaaggctcttaaaaaatgcactttcgcagagtgcgccagaaaaggaaactgctactgcaagctgtgcgagctccaccgaaggcacctgccatgagctttgtgacacccactattaatgcctcaatccgagagcagcaatggttcgagtccgtccttagatcacacaactcgttctgtggctgtggtgatcccgtgcttcattttactaacattggtactcgctttaactatctgcctgctacctcttcgcctttggaccctcccggcccagcgccgcgaggccgcccggcgctccgccgtctcccggcactcccttcagcccccgcgaccccctctagagatccagtatggcctactggttccgagggtggggctggaggccgaggcgccggtggagaaggtggcgccgccgtcgaaggagactaccgagaagaagagttaaacgagctgttcgcggccttggaagaagacgcaaaccaagggtaaggaggcgccgcagacgccgcagacgtgtgtacaaacgggggtggagacgcaggaggtacataagacgtgggcgacgcaaaaagaaactcgtactgactcagtggaacccggcagtagttaagaggtgcaacattaagggcggacttccaataatcatatgcggagagcccagggcagcctttaactatggctaccacatggaggactacactcctcaacctttccccttcggagggggaatgagcacagtgactttctctctgaaagccttatatgaccagtacctcaaacaccaaaacaggtggactttctcaaacgaccagctagacctggccagatacaggggctgtaaactaaggttttacagaagccccgtctgtgactttatagtacactacaacctaatacctccactaaaaatgaaccagtttacaagtcccaacacgcacccaggactactcatgctcagcaaacacaaaataataattcccagctttcaaacaaggccggggggcagacgctttgttaaaataaaactcactccccctaaactatttgaagacaagtggtacactcaacaagacctgtgcaaagttccgctcgttagtattacagcaactgcggctgacttgcggtatccgttctgctcaccacaaacgaacaacccttgcaccaccttccaggtgctgcgcaagaactacaacacagttataggaacttccgtaaaagacgaagagtccacacaggactttgaaacatggctatatggcacagactcacactatcaaacatttgccacagaagctcaactaggtagaatacctgcatttaaccctgatggcaccataaactcacaaaaagacagctggcaaaacagttggagccaaaaaaataacacatggttaggagaggaaacatacccacaaactacttcacaaatgtacaaaattccatatgacagcaactttggcttcccaacatacagagcacaacctaagtatgttaaaaatagaagaacctcaaactttaaatatgaaatagaaaaccctgtcagtaaaaaaatatggccacaatcaagtacaacaactcccacagtagactactatgaataccactgtggatggttcagtaacatatttataggcccaaacagatacaatttacaatttcaaacagcgtacgtagacaccacgtacaaccccctaatggataaaggcaaaggcaacaaaatatggttccagtacctttctaaaaaaggcacagactacaatgaaaaacaatgctactgccttctagaagacatgcccctgtgggcaatgtgctttggatactcagactatgtagagactcaattaggcccaaatgtagaccatgaaacagcaggccttataataataatatgtccttacactcaaccacctatgtatgacaaaactaggcccaactggggatacgtagcctatgacacaaactttggcaatggaaaaatgccctccggaacaggccaagtaccagtatactggcagtgcagatggagacccatgctgtggttccaacaacaagtactaaatgacatctcaaagactggaccgtacgcctacagagacgaatataaaaatgtacaactgactctctactacaacttcatttttaactgggggggcgacatgtattacccacaggtcgttaaaaacccctgtggagactccggaatcgttcccggttccggtagattcactcgagaagtacaagtcgttagcccgctttccatgggaccggcctacatcttccactacttcgacagcagaaggggcttctttagtgaaaaagctcttaaaagaatgcaacaacaacaagaatttgatgaatcttttacattcaaacctaagagacccaaactttctacagcagccacagaaatcctccagctcgaagaagactcgtcttcaggggaaggaaaatcgccactacagcaagaagagaaagaagcagaagtcctccaaacgccacaagtacagctccagctccagcggaacatccaggagcagctcgcaatcaagcagcagctccaattcctcctgctccaactcctcaagacccaatccaatttgcatttaaacccacaatttttaagcccatcataaaatatgatatgtttggggacccccttcctcaccccccaacagcccaagactgggccacagaatatgagtgctgtaaggcctttaacagaccacctagaaccaacctaaaagacacccccttctacccctgggtccctaaacctaaacctcaattccgtgtatcttttaaacttggttttcaataaacaaggccgtgggagtttcacttgtcggtgtcaacctcttaaggtcactaagcactccgagcgtaagcgaggagtgcgaccctcccccctggggcaactccctcgaagtccggcgctacgcgcttcgcgctgcgccggacatctcggaccccccctccacccgaaacgcttgcgcgtttcggaccttcggcgtcgggggggggtcgggggctttattaaacagactccgagatgccattggacactgagggggtgaacagcaacgaaagtgagtggggccagacttcgccataaggcctttatcttcttgccatttgtcagtgtcgggggtcgccataggcttcggcctccgttttaggccttccggactaccaaaatggcgaattccgtgacgtcatggccgccattttaggctgttgcccggcgtttgacttccgtgttaaaggtcaaacacccggcggcaccacaaaatggccgtcaattgcttccggggtcaaaggttaccgctacgtcataagtcacgtgacagggaggagcgacaaacccggaagtcatcctcacccacgtgacttaccacgtggtgtgtacgtcacacgccgccattttaaatcacaaaatggcggacttccttccgcttttttaaaaaaaacggc

SEQ ID NO: 572 - protein, 760 aa, Alphatorquevirus sp.
MAYWFRGWGWRPRRRWRRWRRRRRRLPRRRVKRAVRGLGRRRKPRVRRRRRRRRRVYKRGWRRRRYIRRGRRKKKLVLTQWNPAVVKRCNIKGGLPIIICGEPRAAFNYGYHMEDYTPQPFPFGGGMSTVTFSLKALYDQYLKHQNRWTFSNDQLDLARYRGCKLRFYRSPVCDFIVHYNLIPPLKMNQFTSPNTHPGLLMLSKHKIIIPSFQTRPGGRRFVKIKLTPPKLFEDKWYTQQDLCKVPLVSITATAADLRYPFCSPQTNNPCTTFQVLRKNYNTVIGTSVKDEESTQDFETWLYGTDSHYQTFATEAQLGRIPAFNPDGTINSQKDSWQNSWSQKNNTWLGEETYPQTTSQMYKIPYDSNFGFPTYRAQPKYVKNRRTSNFKYEIENPVSKKIWPQSSTTTPTVDYYEYHCGWFSNIFIGPNRYNLQFQTAYVDTTYNPLMDKGKGNKIWFQYLSKKGTDYNEKQCYCLLEDMPLWAMCFGYSDYVETQLGPNVDHETAGLIIIICPYTQPPMYDKTRPNWGYVAYDTNFGNGKMPSGTGQVPVYWQCRWRPMLWFQQQVLNDISKTGPYAYRDEYKNVQLTLYYNFIFNWGGDMYYPQVVKNPCGDSGIVPGSGRFTREVQVVSPLSMGPAYIFHYFDSRRGFFSEKALKRMQQQQEFDESFTFKPKRPKLSTAATEILQLEEDSSSGEGKSPLQQEEKEAEVLQTPQVQLQLQRNIQEQLAIKQQLQFLLLQLLKTQSNLHLNPQFLSPS

SEQ ID NO: 573 - protein, 156 aa, Alphatorquevirus sp.
MHFRRVRQKRKLLLQAVRAPPKAPAMSFVTPTINASIREQQWFESVLRSHNSFCGCGDPVLHFTNIGTRFNYLPATSSPLDPPGPAPRGRPALRRLPALPSAPATPSRDPVWPTGSEGGAGGRGAGGEGGAAVEGDYREEELNELFAALEEDANQG

SEQ ID NO: 574 - protein, 58 aa, Alphatorquevirus sp.; identical to SEQ ID NO: 197

SEQ ID NO: 575 - DNA, 3536 bp, Alphatorquevirus sp.
cacgcccgtccgcagcggtgaagccacgaagtcaaggggcaattcgggctcgggactggccgggctatgggcaaggctctgaaaaaagttatgtttctcggtaaactttacagaaagaaaaggacactgtcactgtgcggcctgccagcagcaaagaaaaaaccacctagtgatatgagctattggaggccacccctgcacaatgtcccggggcttgaacacctctggtacgagtccgtgcatcgtggccatgctgctgtttgcggttgcgggaattttgtacgccatcttgctgctcttgctgaaagatatggctacccgggggggccgagcgctcctggggcaccctcagtagggggcggcggtaaccctcccatccgtcgagcccgccacccggcggccgctccggatcccccggcaggtaaccaggctcccgctctgccatggcatggagatggtggaaacgaaagcggcgctggtggtggagaaaacgatggacccgagggaggtttcgaagacgacggactggacgccctcgtcgccgccctcgacgacgaagagtaaggagaaaaagacagtggaggagggggcgacgcaaacgaacttataacagacgtaggagacgcttaaaaaagaaacgtaggccaaaactgactctgagactgtggcagccagacatggtcagaaaccttaaagtgagcgggtacatacccataataatcagtggcttcgggacattcagtagaaactttagcagccacctactagacaaagttattaaggagccctttggagggggccacagcacaatgagattctcccttcagatactttttgaggaacacctcaggggtcttaactactggtcctactctaacgcagacctagagcttgttagatacaggtactgcaaattcaccttcttcagacacccagacacagactacattgtacagtacaacagaaagacccccctggggggcaacatactaacagcaccatcactacacccaggatccctcatgctgcaaaaatacagggtcctggtccccagctggaaaacaaaacccaagggaaaaggcacagtaaccattaagattcccccccccaccatgctaactgacaaatggtacttttccaaagacgttgcagacctcacattgctaaacctcaacgcagtgtcagctgacctgcggtttccgttctgctcaccacaaacgaacactacttgcataactttccaagttctctcttctgtatacaacaagttcctctctataactgaaattaactctagtaatgaagatgaaaaaattatggagtttttaaatgctgctatgccaaaagacaaatcagcaaatgttttaaatacttttaaatcagaaggcaactatagtcacccttctattaaagtatttaatggctctaacagacccacaaatgatgaatactttgcccaaaaagatagcctgtggggagatgccatctttgtaaactcaacacaaactttagacaagttaaaagagaaaattaaacagaacataaaaaactataaaaaaaaagtacaacaaacaataacagcggtaacacaacaaggctcatctattttttatcatttagttggaatatatggcagcagctggctaaaccaaggtagaatgagcccagaaatactaggcctatacacagaagttatttacaatccatacaccgacaaaggagtaggcaaccttctatggatagaccccttaaacaaatcagacaacctatacaaaccaccacaaagcaaatgcccactaaaagacatgccactgtggcaaatgacctttggctacatagactggataaaaaaagaattaaaccactgggatgctcccataaactacagaatactactaaggtccccctacacatttccaaaactataccatgagacacaaccagagtatggctttgtaatagtatcctacaacttcacagcaggcaaaatgccagacgggtccatgtatgtgcccatactgtatagaactaagtggtacccttacatgttaaaccaagagtcagtaatggaagatataagcagatcagggccctttgcacccaaacaagagatgcccagcacagaactagttgcaaagtacacatttaagtggaaactcgggggcaaccccatctccgaacaggttgttaaagaccccagcacacaacccacctacgagctgcccgcagccggtacaatccctcgtagagtacaagttatcgacccgaaaatcgtcggacccaacatatcgttcaaaagctgggagatcagacgtggatactttagctcgacaagtattaaaagaatgtcagaacaacaagaaacttctgagtcttatttcccaggtccaaaaagacccagaatcgatctgcccaagtacgagccgccagaagaaagctggagtactctccaaagagaactccggccgtggacggactcggaggcggaaaaagaccaaagctcctcggaagaggaagaagagagacccctccgagagcagctgcagctccagctcaaggagcagcagcacctcagacggggaatccagtgcctgttcgaacaactcgtaaaaacacagcagggagtccacgtgaatccctgcctcgcgtaggccccgagcagtggttgttccccgagagaaagccaaagccaggtcccacgtcccaagactgggccatggagtacctggcctgcaaaatatttaataggccccccagaagcaagcttacagattaccctttctatccttactgcaaaaacaattacaatgtaacctttaagcttaactacaaataaatggcagcttcactgttctaggccgtgggagtttcacttgtcggtgtctacctctaaaggtcactaagcactcgtggggccagacttcgccataaggcctttatcttcttgccatttgtcagtatagagggtcgccataggcttcggcctccattttaacctctaaaaactaccaaaatggccgttccagtgacgtcacagccgccattttaagtagctgacgtcaaggattgacgtgaaggttaaaggtcatcctcggcggaagctacacaaaatggtggacaacatcttccgggtcaaaggtcgtgcacacgtcataagtcacgtggtggggacccgctataacccggaagtaggccccgtcacgtgatttgtcacgtgtgttcacgtcacagccgccattttgttttacaaaatggctgacttccttcctcttttttgaaaaaaggcgccaaaaaaccgtcggcgggggggccgcgcgctgcgcgtgcggcccccggggggaggcattgcctccccccccgcgcgcatgcgcgcgggtccccccccctccggggggctccgccccccggccccccccaaagtgctacgtcactgaccacgtgacacccacaggccaaccgaatactatgtcgtgcacttcctgggccgggtctacgtcctcatataactagctgcacttccgaatggctgagttttc

SEQ ID NO: 576 - protein, 735 aa, Alphatorquevirus sp.
MAWRWWKRKRRWWWRKRWTRGRFRRRRTGRPRRRPRRRRVRRKRQWRRGRRKRTYNRRRRRLKKKRRPKLTLRLWQPDMVRNLKVSGYIPIIISGFGTFSRNFSSHLLDKVIKEPFGGGHSTMRFSLQILFEEHLRGLNYWSYSNADLELVRYRYCKFTFFRHPDTDYIVQYNRKTPLGGNILTAPSLHPGSLMLQKYRVLVPSWKTKPKGKGTVTIKIPPPTMLTDKWYFSKDVADLTLLNLNAVSADLRFPFCSPQTNTTCITFQVLSSVYNKFLSITEINSSNEDEKIMEFLNAAMPKDKSANVLNTFKSEGNYSHPSIKVFNGSNRPTNDEYFAQKDSLWGDAIFVNSTQTLDKLKEKIKQNIKNYKKKVQQTITAVTQQGSSIFYHLVGIYGSSWLNQGRMSPEILGLYTEVIYNPYTDKGVGNLLWIDPLNKSDNLYKPPQSKCPLKDMPLWQMTFGYIDWIKKELNHWDAPINYRILLRSPYTFPKLYHETQPEYGFVIVSYNFTAGKMPDGSMYVPILYRTKWYPYMLNQESVMEDISRSGPFAPKQEMPSTELVAKYTFKWKLGGNPISEQVVKDPSTQPTYELPAAGTIPRRVQVIDPKIVGPNISFKSWEIRRGYFSSTSIKRMSEQQETSESYFPGPKRPRIDLPKYEPPEESWSTLQRELRPWTDSEAEKDQSSSEEEEERPLREQLQLQLKEQQHLRRGIQCLFEQLVKTQQGVHVNPCLA

SEQ ID NO: 577 - protein, 165 aa, Alphatorquevirus sp.
MGKALKKVMFLGKLYRKKRTLSLCGLPAAKKKPPSDMSYWRPPLHNVPGLEHLWYESVHRGHAAVCGCGNFVRHLAALAERYGYPGGPSAPGAPSVGGGGNPPIRRARHPAAAPDPPAGNQAPALPWHGDGGNESGAGGGENDGPEGGFEDDGLDALVAALDDEE

SEQ ID NO: 578 - protein, 132 aa, Alphatorquevirus sp.
LEYSPKRTPAVDGLGGGKRPKLLGRGRRETPPRAAAAPAQGAAAPQTGNPVPVRTTRKNTAGSPRESLPRVGPEQWLFPERKPKPGPTSQDWAMEYLACKIFNRPPRSKLTDYPFYPYCKNNYNVTFKLNYK

SEQ ID NO: 579 - DNA, 3536 bp, Alphatorquevirus sp.
ccgccgctgaggagggcgctgccgccaccagtcaaggggcaattcgggctcgggactggccgggctatgggcaaggctcttaaggtcatcgctctttaaaatatgtttctcggcaggccttacagaaagaagaggcaagtgccactgtctggcgtgcaccatccaccgcacccacggcctagcatgagccaccactggcgagagcccatcgacaatgtccccaaccgggagaagcactggctcgagtcggtcctccgaagccaccgagcttattgtggttgccgggatcctgtccttcattttactaatctggttgcacgttacaatctacaaggcggtggtccgtcggcgggtagtcttagggatccgccgccgctgaggagggcgctgccgccaccgccgtcccccagaccgccatgtcctggtggggatggcgccgccgatggtggtggaagccacggaggcgatggagacgcaggagggcgcgccgcccgagacgagtacggccgagacgatatagaagacctgctcgccgctatcgaggcagacgagtaaggaggcgccgcgcggggggctggcgggggcgacgcagatatccccgacgctatagcagacgactgactgtcaggcgaaaaaaaaagaaactgacccttaagatatggcagccccagaatatcagaaagtgtaggataagaggactcctgcccctgctcatatgcggacacgggcgctcagctcacaactatgccatccactcggatgacaagaccccccagcagcagagtttcggaggcgggctcagcaccgtcagcttctcccttaaagtactgtttgaccagaaccagaggggactcaacaggtggtcggccagcaacgaccagctagacctcgcccggtatctgggctgcacgttctggttctacagagacaaaaagactgactttatagtgcagtatgatatcagctctcctttcaaactagataaaaacagcagtcccagctaccaccccttcatgctcatgaagagtaaacacaaggtgctcatccccagctttgacactaaacccaagggcagggaaaagataaaactcaaaatacagccccccaagatgttcatagacaagtggtacactcaggaggacctgtgccccgttattcttgtgtcatttgcggtgagcgcagcttcctttttacatccgttctgctcaccactaacgaacaacccttgcatcaccttccaggtgttgaaagaattctattacagtgccatggggtacggcacaccagaagccacaatgaccacaatatggaacaccctctacacaactgccccttactatcagtcccacctcactcctcagtttatcagaatgcccaccaaaaatcccgataacacaaccaacaacttagccactgcatttaacaattgggttgatacacactttaaaacaggcaagttagtcaagtacaacttccctcaatacgcacctagcgtagagaaattaaaacagttaagacaatactactttgagtgggaaactaaaacacacggggtggcagtacctcctacgtggaccacccccacaatagactggtacgagtatcacataggcatgttcagccccatattcctctcaccatacagatcagcagaccttgaattccccagagcgtatcaagatgtaacttacaatcccctcacagacaagggggtaggcaaccgcatgtggttccaatacaacactaagatagacacccagttcgaacctagatcctgtaaatgtgtcctacaggacatgcccctgtacgccatggcctatggattctcagattttctagaacaagagataggagagtaccaggacctagaggccaacggatttgtgtgcgtcatctgtccatacaccaatccccccatgtacaacaaacacaacccccagcaggggtacgtgttctatgactctcagtggggcaatggcaagtggatagacggaaccgggttcgtccccatatactggatgacaagatggagaatagagctgctatttcaaaaaaaagtactcacagatatagccatgtcaggacccttcagctacccagacgaacttaaaaacactgtactcactgccaaatacagatttgactttaagtggggtggcaatctcttccaccaacagaccattagaaacccctgcaaaccagaagagacctcaaccggtagattctctcgccagatacaagttgttgacccgatcaccatgggcccccgattcgtgtttcactcctgggactggagacgagggttccttagtgacagagctctcaaaagaatgtttgaaaaaccgctcgatactgagggatttacagctactccaaaaagacctcgcatattccctcccacagagggacagctcgccagagagcaaaaggagcaagaagaaggctccgattcgcaggaagaaagcagccttacctcgctcgaagaagtcccgcaagagacgcagctacgagtccacctcagaaagcagctccgagagcagcgaagcatcagacagcaactcagaaccatgttccagcaacttgtcaaaacgcaagcgggcctacacctaaacccccttttatctacccagctataaaccaggcctacatgtttccagaaagggcccccaagccacctcccaccgcggaagactgggccacagagtacctgtgcgccaaaatcttcgatagacccccaaggtccatactctcagacagccccttctacccctggatgcccaagaaaaccccccagttccaggtgtccttcaagcttggattcaaaccctaaataaaaatttcaaggccgtgtcacatacgcttgtcggtgtctacctctataagtcaccaagcactccgagcgccagcgaggagtgcgaccctctctctgtgggcccccctaggcagatactcaacttcttcggagccgcgcgctacgccttcggctgcgcgcggcacctcagacccccgctcgtgctgacacgctcgcgcgtgtcagaccacttcgggctcgcgggggtcgggaattttgctaaacagactccgagttgccattggacaccgtagctgtgaatcagtaacgaaagtgagtggggccagacttcgccatagggcctttatctccttgccatttgtccgtctcgggggtcgccataggcttcgggctcgcttttaggccttccggactacaaatatggccgattctgtgacgtcacagccgccattttgagtaaggcggaacctggctgtcactatacaaaatggcggcgacagccttccgctttacacaacatggaggtcaatttcttccgggtgaaaggtcacgtctacgtcataagtcacgtggggagggtcagcgtaaacccggaagctaatcctcccacgtggctcgtcacgtgggtgatgcgtcacggccgccattttgattcacaaaatggccgacttccttcctcttttttgaaattaacggtccggcggcgggtagtcttagggatccg

SEQ ID NO: 580 - protein, 739 aa, Alphatorquevirus sp.
MSWWGWRRRWWWKPRRRWRRRRARRPRRVRPRRYRRPARRYRGRRVRRRRAGGWRGRRRYPRRYSRRLTVRRKKKKLTLKIWQPQNIRKCRIRGLLPLLICGHGRSAHNYAIHSDDKTPQQQSFGGGLSTVSFSLKVLFDQNQRGLNRWSASNDQLDLARYLGCTFWFYRDKKTDFIVQYDISSPFKLDKNSSPSYHPFMLMKSKHKVLIPSFDTKPKGREKIKLKIQPPKMFIDKWYTQEDLCPVILVSFAVSAASFLHPFCSPLTNNPCITFQVLKEFYYSAMGYGTPEATMTTIWNTLYTTAPYYQSHLTPQFIRMPTKNPDNTTNNLATAFNNWVDTHFKTGKLVKYNFPQYAPSVEKLKQLRQYYFEWETKTHGVAVPPTWTTPTIDWYEYHIGMFSPIFLSPYRSADLEFPRAYQDVTYNPLTDKGVGNRMWFQYNTKIDTQFEPRSCKCVLQDMPLYAMAYGFSDFLEQEIGEYQDLEANGFVCVICPYTNPPMYNKHNPQQGYVFYDSQWGNGKWIDGTGFVPIYWMTRWRIELLFQKKVLTDIAMSGPFSYPDELKNTVLTAKYRFDFKWGGNLFHQQTIRNPCKPEETSTGRFSRQIQVVDPITMGPRFVFHSWDWRRGFLSDRALKRMFEKPLDTEGFTATPKRPRIFPPTEGQLAREQKEQEEGSDSQEESSLTSLEEVPQETQLRVHLRKQLREQRSIRQQLRTMFQQLVKTQAGLHLNPLLSTQL

SEQ ID NO: 581 - protein, 150 aa, Alphatorquevirus sp.
MFLGRPYRKKRQVPLSGVHHPPHPRPSMSHHWREPIDNVPNREKHWLESVLRSHRAYCGCRDPVLHFTNLVARYNLQGGGPSAGSLRDPPPLRRALPPPPSPRPPCPGGDGAADGGGSHGGDGDAGGRAARDEYGRDDIEDLLAAIEADE

SEQ ID NO: 582 - protein, 60 aa, Alphatorquevirus sp.
MFPERAPKPPPTAEDWATEYLCAKIFDRPPRSILSDSPFYPWMPKKTPQFQVSFKLGFKP

SEQ ID NO: 583 - DNA, 3531 bp, Alphatorquevirus sp.
cgggtgccggaggtgagtttacacaccgaagtcaaggggcaattcgggctcgggactggccgggctatgggcaaggctcttaaagaatgcgtttttctcgaatttatcgcagaaagaagaggctcctgccactgctttgcttgcgagctaaaccgaaagcacaacctagtatgagctggtgtactccagttgaaaatgcctataagagagagatcaactttctcaggggctgccaactgcttcacactagcttttgtggctgtgatgattttattaatcatattattcgcctacaaaatcttcacgggaatctacaccagcccacgggaccgtctacacctccagtgacccgtagagctctggccctgccggctgctccggagtcatggcgttccggtggtggtggtggagacgccgcccccagcgacggtggacccgccgcagatggaggagactacgaacccgcagacctagacgcactgtacgacgccgtcgccgcagaccaagagtaaggagaaggcggtggggcaggagacgggggcgacgcagactgtacagacgcagatacaaaaaaaggcgcaaaagacgaaaaaaaatgaccttgaaagtgtggaatccatccaccattcgcgcctgtaatattagaggctttgtagcactagtagtctgtggacacactcgtgcaggctctaactatgccatacacagcgaagactacatacctcaactgagaccctacggagggtcttttagcactactacctggagcctaaaagtactgtttgacgagcaccttaaatttagaaacaaatggagctatcctaatacagagctagacctagccagatacaggggagccacattcacattttacagagacccaaaagtagactacatagtagtatacaacacagtgcctccatttaagcttaacaaatacagctgccctatgctacatcccggtatgatgatgcagtataaaaaaaaaatattaatacctagctatcaaacaaaaccaaagggaagcgctaaagtaagacttagaataaaacctcctgtattatttgaagataagtggtacactcaacaagacctgtgccccgttaatcttttgtcacttgcggttagcgcatgttccttcctgcatccgtttataccaccagaaaatgacaacatatgcataacgttccaggtgttgcgagacttttattacacacaaatgtcagttacacccacaacaaccacttccctaaatgagaaagaccaaaaaatatttagtgaacacttatataaaaaccctgaatactggcaatcacaccacactgctgctagagtatctacctctcaaaagcctgcattacgaacagatagtccaatacccaatactgacggatacctaaacacaacacctactaatgaaactttcagaactggaaacaacacaatatatggccaaccaggctacaaaccagacaatgaaaaactaactaagataagagaatggtactttaaacaagaaaacacagataaccccatacatggcacttacttaaaacctacattaaactctgtagattaccatttaggaaaatacagtgctatatttttaagtccctacagaacaaacactcagtttgacacagcataccaagatgtaacctacaaccccaacacagacaaaggcaaaggaaacaaaatatggattcagagctgcacaaaagaaagcactatcctagaccaaagttgtaaatgtgtagtagaagacctaccgttgtgggctatggtaaatggctacctagaattttgtgactcagaacttccaggagccaatatttacaatacctacattgtagttgtcatatgcccttacactaaacctccaatgctaaacaaaactaatacaaaacaagggtatgtgttctatgacaccctgtttggagatggaaaaatgcctacaggcacaggcctggtacccttctggctgcaaagcagatggtaccctagatgccagtttcagcaacaggtgctgcatgacttgtacgttacgggtccatttagctacaaagatgacctaaaatcatttagctttaatgctaaatacaaatttagcttcttatggggcggcaatatgattccccaacagattatcaaaaacccgtgcaaaaaagaagaatccacattcacctatcccagtagagagcctcgcgacttacaagttgttgacccactcaccgtgggcccacaatgggtcttccacacatgggactggagacgtggactttttggtaaagatgctatcgacagagtgtcaaaaaaaccagacgatgatgcagaatattatccagtaccaaaaaggcctcgattcttccctccaacagacacacagtcagagccagaaaaagacttcggtttcacaccggagagccaagagctattccaggaagagccacaagcaccccaagaagaaagccaagaagtacagcagcagcaactcctccagctcagactgtcacagcagttcagaatcagacagcagctccagcacctgttcgtacaagtcctcaaaacccaagccggtctccacataaacccattatttttaaaccatgcataaatcaggtgtttatgtttccaccagacacccctagacccattataacaaaagaagggtgggaggatgagtttgtaacttgcaaacactgggataggccagccagaacatactacacagacagacctacctacccttggatgcccaaggcaccccctcaatgcaatgtaagtttcaaactgggctttaaataaaaattcaaggccttaaactgttcacttgtcggtgtctacctctaaaggtcactaagcactccgagcgttagcgaggagtgcgaccctcccccctggtgcaacgccctcggagtccggcgctacgccttcggctgcgccggacacctcggcccccccctccacccgaaacgcttgcgcgtttcggaccttcggcgtcgggggggggcgggagctttactaaacagactccgaggtgccattggacactgagtgggcgtacagcaacgaaagtgagtggggccagacttcgccatagggcctttatcttcttgccatttgtcagtgtccggggttgccataggcttcggcctcacttttaggccttccggactaccaaaatggcgcatttagtgacgtcacggccgccattttaagtaaggcggaagtagctccactgtactgcaaaatggcggcggagcacttccggcttgcccaaaatggaggacaattacttccaggtcaaaggttggttactacgtcaccgatgacgtggggaggcgtgctgtaaaacccggaagcaggccccgcacgtcatcgtcacgtggttgctacgtcacgaccgccattttgttttacaaaatggccgacttccttccgcttttttaaaaaaaggcgccaaaaaacggctgcggcgggggcgcgcgcgctacgcgcgcgccccggagggtgatccccgcgtcccgaggg

SEQ ID NO: 584 - protein, 742 aa, Alphatorquevirus sp.
MAFRWWWWRRRPQRRWTRRRWRRLRTRRPRRTVRRRRRRPRVRRRRWGRRRGRRRLYRRRYKKRRKRRKKMTLKVWNPSTIRACNIRGFVALVVCGHTRAGSNYAIHSEDYIPQLRPYGGSFSTTTWSLKVLFDEHLKFRNKWSYPNTELDLARYRGATFTFYRDPKVDYIVVYNTVPPFKLNKYSCPMLHPGMMMQYKKKILIPSYQTKPKGSAKVRLRIKPPVLFEDKWYTQQDLCPVNLLSLAVSACSFLHPFIPPENDNICITFQVLRDFYYTQMSVTPTTTTSLNEKDQKIFSEHLYKNPEYWQSHHTAARVSTSQKPALRTDSPIPNTDGYLNTTPTNETFRTGNNTIYGQPGYKPDNEKLTKIREWYFKQENTDNPIHGTYLKPTLNSVDYHLGKYSAIFLSPYRTNTQFDTAYQDVTYNPNTDKGKGNKIWIQSCTKESTILDQSCKCVVEDLPLWAMVNGYLEFCDSELPGANIYNTYIVVVICPYTKPPMLNKTNTKQGYVFYDTLFGDGKMPTGTGLVPFWLQSRWYPRCQFQQQVLHDLYVTGPFSYKDDLKSFSFNAKYKFSFLWGGNMIPQQIIKNPCKKEESTFTYPSREPRDLQVVDPLTVGPQWVFHTWDWRRGLFGKDAIDRVSKKPDDDAEYYPVPKRPRFFPPTDTQSEPEKDFGFTPESQELFQEEPQAPQEESQEVQQQQLLQLRLSQQFRIRQQLQHLFVQVLKTQAGLHINPLFLNHA

SEQ ID NO: 585 - protein, 141 aa, Alphatorquevirus sp.
MRFSRIYRRKKRLLPLLCLRAKPKAQPSMSWCTPVENAYKREINFLRGCQLLHTSFCGCDDFINHIIRLQNLHGNLHQPTGPSTPPVTRRALALPAAPESWRSGGGGGDAAPSDGGPAADGGDYEPADLDALYDAVAADQE

SEQ ID NO: 586 - protein, 59 aa, Alphatorquevirus sp.; identical to SEQ ID NO: 33

SEQ ID NO: 587 - DNA, 3531 bp, Alphatorquevirus sp.
ggaccccccctccacccgaaacgcttgcgcgtttcggaccttcggcgtcgggggggtcgggagctttattaaacagactccgagttgccattggacactggagctgtgaatcagtaacgaaagtgagtggggccagacttcgccataaggcctttatcttcttgccatttgtcggtgtcgggggtcgctccaagcgcggaccccgttttcagcccttccggactacaaaagtcgccatattagtgacgtcacggcggccattttaagtaaggcggaagtttctccactatacaaaatggcggcggagcacttccggcttgcccaaaatggtggctgacaacatccgggtcaaaggtaacagctacgtcacaagtcacgtggggagggtgtgacgtgtaacccggaagtcaatcctctcacgtggcctgtcacgtgactgctacgtcacggcggccattttgttttacaaaatggcgtacttccttcctcttttttgaaaataacggcccggcggcggcgcgcgcgcttcgcgcgcgtcaaggggcaattcgggctcgggactggccgggccccgggcaaggctcttaaaaaatgcgcttttccaggatcgctcgctcgaaaaggaaagtgccactgccgtcgctgccagcactaccgccgcctgggactatgagctggcgccctccggtccacaatgccgctggaatcgaccgtaactggttcgaatcctgtttcagatctcacactagcagttgcggctgtggaaactttattggccatattaattctctggctactcgttacggctttacccctgggcccgcgccgccgcctggtggtccaggcccgcggccgccagtaccagtgaggccccgacactcggccggagacggtgaccagcccagggctctgccatggcgtggggatggtggagacggagacgctggcccacctaccgaaggtggcgccgctggagacgccgcaggagagtacggccaagaagacctcgacgagctgttcgccgctatggaaagagacgagtaaggaggcgccggtgggggaggcggcggtaccgaaggggctacagacgcaggggcgcgataagactgagacgcagacgcagacggggacgtaagagacttatactgactcagtggcagccccagacccgtagaaagtgcaacatcaccgggtacctcccggtggtatggtgcggctacctccgggccgccagaaactatgcctaccactctgacgactccacaaagcagccggacccctttgggggcgggctgagcactaccacatttaacctaaaggtgctgtacgaccagcaccaaagaggactcaacaggtggtcgttccctaacgaccaactagaccttgctcgctacaaggggtgccaactgacattttacaggcagaaatcaacagactttgtagctgtgtatgacatctctgccccctacaaattagacaagtacagcagtcccagctaccaccctggcaacatgataatgcagaaaaagaaaatcctaattcccagctatgacactaaccccaggggtcgccaaaaagtaaaagttaacattcccccccctaaactgttcgttgataagtggtatgcacaggaggacctgtgcgaggttaatcttgtcacacttgcggttagcgcagcttcctttacacatccgttcggctcaccactaacgaacaacccttgtgtaaccttccaggtgcttgacacaatatactattccgtaataggttacagttcctcagatgaaaaaaaaaaacaagtacttgagactttatatagccaaaatgcatactgggcctcacacttaactccttactttaccactgcccttaaaattccatttccaaatagtagtaaccctacaattgctggaaatggtacacctcaaacacttaatacaacaggcaacgcaacgctcaatattaaaatagcaggagacagcaactataactggtacccttataaccttaaaaacaaaacaacccaacttcatttaattagagaacagtactttaaatgggaaacggacgaaggcccccaagccacatctgactatggcaaacatcacacttggactaaacccaccaatgactactacgaataccacctaggcctgtttagccccatattcataggacccaccagaagcaataaactgtttgccacagcctaccaggacgtcacttacaaccccctaaacgacaaggcggtgggcaacaaattctggtttcagtacaacacaaaggcagacacccagctggtaaaacagggctgctactgcctgttagaggacattcctttttgggccgccatgtacggctactctgactttatagagagcgagctaggcccctttcaggacgcagaaaccgtgggctacatctgtgttatatgcccttacacagaaccccccatgtttaacaaacaaaatcccatgcaaggctacgtattttatgactcgttttttggcaatggcaagtggatagacggacggggacacatagagccttactggctgtgccgctggaggccagaaatgctgttccagcagcaagtcatgagagacattgtgcagacggggccctggagctataaagacgagagcaaaaactgtgttctgcccatgaaatacaaattcaaattcacatggggcggcaatatggtctcccaacagacaatcagaaacccctgcaagactgacggacagcttgccccaaccggtagacagcctagagaagtacaaattgttgacccagtcaccatgggtccccgctgggttttccactcctgggactggcgacgtggctaccttagtgagacagctctcagacgcctgcgagaaaaaccgctcgactatgaggcgtatatgcagaaatcaaaaagacctagactgttccctgttacagagggcgacgagcagtccccccagcaaggcgacgactcgtattcagaggaagaaaagtcgccgcaactcaccgaagagacgacggagacgctacagctccagctccagcgccagctccggcgacagcagcgcctcggagagcagctccagctcctgcaacaccacctcctcaaaacgcaagcgggtttgcaaataaacccattattgttggtccgccagtaaacaaggtgtaccttttccccccacagggtccccgtcccataaacacctctcagggctgggctgatgagttctgtactgcaaagtactgggacaggcccactcgcaccaactacacagacacacctacctacccctggatgcccagtcagttcaaagtgtctttcaaacttggctttcaataaaatatgctcaacttcaacttactaggccgtgggagtttcactggtcggtgtctacctcttaaggtcaccaagcactccgagcgcagcgaggagtgcgacccttgtctctactcaccccccctgcccggtagcaacgccctcggagtccggcgctacgcgctgcgcgctgcgccggacacctc

SEQ ID NO: 588 - protein, 750 aa, Alphatorquevirus sp.
MAWGWWRRRRWPTYRRWRRWRRRRRVRPRRPRRAVRRYGKRRVRRRRWGRRRYRRGYRRRGAIRLRRRRRRGRKRLILTQWQPQTRRKCNITGYLPVVWCGYLRAARNYAYHSDDSTKQPDPFGGGLSTTTFNLKVLYDQHQRGLNRWSFPNDQLDLARYKGCQLTFYRQKSTDFVAVYDISAPYKLDKYSSPSYHPGNMIMQKKKILIPSYDTNPRGRQKVKVNIPPPKLFVDKWYAQEDLCEVNLVTLAVSAASFTHPFGSPLTNNPCVTFQVLDTIYYSVIGYSSSDEKKKQVLETLYSQNAYWASHLTPYFTTALKIPFPNSSNPTIAGNGTPQTLNTTGNATLNIKIAGDSNYNWYPYNLKNKTTQLHLIREQYFKWETDEGPQATSDYGKHHTWTKPTNDYYEYHLGLFSPIFIGPTRSNKLFATAYQDVTYNPLNDKAVGNKFWFQYNTKADTQLVKQGCYCLLEDIPFWAAMYGYSDFIESELGPFQDAETVGYICVICPYTEPPMFNKQNPMQGYVFYDSFFGNGKWIDGRGHIEPYWLCRWRPEMLFQQQVMRDIVQTGPWSYKDESKNCVLPMKYKFKFTWGGNMVSQQTIRNPCKTDGQLAPTGRQPREVQIVDPVTMGPRWVFHSWDWRRGYLSETALRRLREKPLDYEAYMQKSKRPRLFPVTEGDEQSPQQGDDSYSEEEKSPQLTEETTETLQLQLQRQLRRQQRLGEQLQLLQHHLLKTQAGLQINPLLLVRQ

SEQ ID NO: 589 - protein, 150 aa, Alphatorquevirus sp.
MRFSRIARSKRKVPLPSLPALPPPGTMSWRPPVHNAAGIDRNWFESCFRSHTSSCGCGNFIGHINSLATRYGFTPGPAPPPGGPGPRPPVPVRPRHSAGDGDQPRALPWRGDGGDGDAGPPTEGGAAGDAAGEYGQEDLDELFAAMERDE

SEQ ID NO: 590 - DNA, 3530 bp, Alphatorquevirus sp.
gcggcgcgcgcgctacgcgcgcgcaccgcagtcaaggggcaattcgggctcgggactggccgggctatgggcaaggcttttaaaaaagctacccccttaactatgtttctcggcagagtttaccgccgcaagaaaaggaaagtgcttctgtccctggtgcatactccacagaaaacaccttcctccatgaaccgctggttacccccggcacacgatgcccgcggaattgagaggcagtggtatgactgtgtttggcgcagtcacgctgcttgctgtggctgtggtgattttattagtcatattaatgatctggcgcatcgttttggacgtcctccgaattccagaccacctgctactccccagccgccggctgtgagagccctcccggcactgccggcccctgagccatggtctggcgcagggggcgacgctggcgccggtggagatggcgccgcaagccgcggtggaggagatggagacgctggagacgtcgcagacgaagacctgctagacgccgtcgacctcgcagagtaaggagacgcaggggagggtggcggcgctcctacagacggtggaagagacgcagggggcgacgcagacataaaaagaaacttatactgactcagtggcaacccgcggttgtcaaaaaatgcagaatagtgggctacgaccccataataatatgtggactgaacagaaccagccacaactccacaactcacgcagaggactacactacaggcaaccaggcctttggggggggactgtgcaccaccaaatacactctaagaatactgttccaagagtacatggcccaccacaactactggacggccagcaacagagacctggagctggccaggtacctgggggcttctattatattttttaaacaccccacagtagactttgtagccagagtcagaaccatgcctccctttaacgacactgacatcacagccgcatcccttcacccgggaatgcttatgctagctaagaaaaaaataattattcccagtctgaaaaccagaccaagcaaaaaacactatgtaaagataaagataggggcccccaagctatttgaagataagtggtactctcagagagacctctgtgacacaactcttgtggttatagaggcaacggttgcagacttgcaatatccgttcggctcaccactaacgaacagcatctgttgcaacttccaggttcttaacagcaactatgacaacgccctgagcacccttataggaactcagggagacaaagacagagatcaatgctataaatttctgttaaatacaatcacctactataacacctctcaagtactagcacagctaaacaagttcttacctgcctccaacacagttaacctctctgaatcaaatgccgcaaattccattaacccatccaaccaaacacaaaatacatacacatccacaaatatacagatacacaacaatacactgtatggaggagcagcatactttagcacatcaggacaaaataatccaccaaagaaaatgaaagaggccaacaaagcatacactaaagcagctataaaaattctaggcaattggaattttactagcatgaactcatcctcagaatcggagttatcagagctaaactactttgactattacacaggcatgttttccagcatatttttagccagcggcaggtcaaactgggaggtaaaaggcagctacacagacataacatacaaccccctagtagacaagggagagggcaacatgatctggatagactggatcaccaaaggtgacaccatctactctgaaaataaaagcaaatgcttgctcaaagacctgcccatgtgggccctgtgctatggctacgcagactatgtacttaagtgcacaggagtctccagcataaaaaacgaggccagaatagtcatgaggtgtccctacacgtacccccaactaataaaacacacaaaccccaactttggcttcgtagtgtacagtgacaactttggacgcggacgcatgccggggggcgaccctgtaccgagcaccagaaacagagtgcactggtacatcaccataacccaccagactgaagtgctagagtgcatctcccagaccggaccgtttgcctaccacagcgacgaacgcaaagcagtactgactataaaatacaacttcagatggaaatggggaggcaaccctgtgttccaacagattcttagagacccctgcacgggatcctccggctccggtccccgtagagtgcctcgctcaatacaagtcgatgacccgaagcaccagacaccagagtacatgtggcacgcgtgggacttcagacgtggactctttagccagaaaggtattaagagagtgtcagaacaaccaacagatgttgaccttcctacaggcaggggcaagagacccaagagagacacagacggcccgcaagagcaaggccaagaagaaggctcgtgttccatcagacgagtcctccagcagtggctccactccagtcaggagcagagccaagaaagcgaagaagaagcagccccgacgacgctctcgcaagagctacaaaaacaactcaagcagcagcagctcatgggaaagcagctccgagagctcagtctccaactcgcccaagtccaagcggggggacaccttcacccccttttacaatgccatgcataaataaagtatacatgtttccccccatgacctttactccctccagcagagactggaaagaggagtacgaggcctgcagagtctgggacagacctcccagaaacgacctaagaaggccccctttctatccctggatgcctcctacgcacaatgtaagctttaagctctccttcaaataaatgttggccgtgggagtttcacttgtcggtgtctacctctataagtcactaagcactccgagcgtaagcgaggagtgcgaccctctgccctggtgcaacgccctcggcggccgcgcgctacgccttcggctgcgcgcggcacctcggacccccgctcgtgctgacacgcttgcgcgtgtcagaccacttcgggctcgcgggggtcgggaaatttgctaaacagactccgagttgccattggacactgtagctgtgaatcagtaacgaaagtgagtggggccagacttcgccataaggcctttatcttcttgccattggatagtgtagggggtcgccataggcttcggccttggttttaggccttccggactacaaaaatggcggattccgtgacgtcatggccgccattttaagtaaggcggaagcagctgtcactataacaaaatggcggcgacagccttccgctttgcacaaaatggcggtgtttatcttccgggtcaaaggtcacgcctacgtcataagtcacgtggggggggacccgctgagcatacgcggaagtaggccccgccacgtgactaaccacgtgggtgctgcgtcacagccgccattttgaatcacaaaatggccgacttccttcctcttttttaaaaataacggcccagcg

SEQ ID NO: 591 - protein, 760 aa, Alphatorquevirus sp.
MVWRRGRRWRRWRWRRKPRWRRWRRWRRRRRRPARRRRPRRVRRRRGGWRRSYRRWKRRRGRRRHKKKLILTQWQPAVVKKCRIVGYDPIIICGLNRTSHNSTTHAEDYTTGNQAFGGGLCTTKYTLRILFQEYMAHHNYWTASNRDLELARYLGASIIFFKHPTVDFVARVRTMPPFNDTDITAASLHPGMLMLAKKKIIIPSLKTRPSKKHYVKIKIGAPKLFEDKWYSQRDLCDTTLVVIEATVADLQYPFGSPLTNSICCNFQVLNSNYDNALSTLIGTQGDKDRDQCYKFLLNTITYYNTSQVLAQLNKFLPASNTVNLSESNAANSINPSNQTQNTYTSTNIQIHNNTLYGGAAYFSTSGQNNPPKKMKEANKAYTKAAIKILGNWNFTSMNSSSESELSELNYFDYYTGMFSSIFLASGRSNWEVKGSYTDITYNPLVDKGEGNMIWIDWITKGDTIYSENKSKCLLKDLPMWALCYGYADYVLKCTGVSSIKNEARIVMRCPYTYPQLIKHTNPNFGFVVYSDNFGRGRMPGGDPVPSTRNRVHWYITITHQTEVLECISQTGPFAYHSDERKAVLTIKYNFRWKWGGNPVFQQILRDPCTGSSGSGPRRVPRSIQVDDPKHQTPEYMWHAWDFRRGLFSQKGIKRVSEQPTDVDLPTGRGKRPKRDTDGPQEQGQEEGSCSIRRVLQQWLHSSQEQSQESEEEAAPTTLSQELQKQLKQQQLMGKQLRELSLQLAQVQAGGHLHPLLQCHA

SEQ ID NO: 592 - protein, 155 aa, Alphatorquevirus sp.
MGKAFKKATPLTMFLGRVYRRKKRKVLLSLVHTPQKTPSSMNRWLPPAHDARGIERQWYDCVWRSHAACCGCGDFISHINDLAHRFGRPPNSRPPATPQPPAVRALPALPAPEPWSGAGGDAGAGGDGAASRGGGDGDAGDVADEDLLDAVDLAE

SEQ ID NO: 593 - protein, 62 aa, Alphatorquevirus sp.
MPCINKVYMFPPMTFTPSSRDWKEEYEACRVWDRPPRNDLRRPPFYPWMPPTHNVSFKLSFK

SEQ ID NO: 594 - DNA, 3529 bp, Alphatorquevirus sp.
aaaataacggccctgcggcggcgcgcgcgctgcgcggggcaattcgggctcgggactggccgggctatgggcaaggctcttaaaaaagccatgtttctcggtcggccttacagaaagaaaagggcactgtcactgctacgcgtgcgagctccaaaggcgaaaccacctgctatgagctggagacccccggtgcacaaccccaatgggatcgagagaaacctgtgggaggcattctttcgcatgcatgcttcagcttgtggttgtggcgatcttgttggccatcttactgtactggctggtcggtatggtgctcctcctcgtcccccggcccccggggctcccagaccaccgctgaaccggcagctggcccttccggcgccccccgctgatccccagcaggccaacccgagatggcctggtggggacggtggagaagatggcgctggaggccccgccgctggcggcgccgtcgcagacgccgagtaccaagaagacgagctcaacgccctgttcgacgccgtcgagcaagaagagtaaggaggaggcgatgggggaggcggaggtggagacgggggtacagacgcagacttagactgagacgcagacgcagacgaaagaaaataagactgactcagtggaacccagctaaagtcaggagatgtactattaagggtgtcctgcccatgatactgtgcggagcaggacgctcagggtttaactatggactgcacagcgacgactgcaccatacagaaaccccttggccagaacccccacgggggcggcatgagcacagtaacttttagcctacaggtgctatatgaccagtaccagaggtttatgaacaagtggtcgtactccaacgaccagctagacctagccagatactttggctgcaccttctggttttacagacacccagaagtagactttgtcgctcagtttgacaacgttcccccaatgaaaatggacgagaacacagcccctaacactcacccgtcgttcctactgcaaaacaaacacagggttaaaatccccagctttaaaaccaagccttttggcagaaaaaaagttagagttacagtggggccccccaaactgtttgaagacaagtggtacagccagcatgacttgtgtaaggtgcccctagtcagttggcggttaaccgcagctgacttcagatttccgttctgctcaccacaaactgacaacccttgctacaccttccaggtattgcatgaagagtattacccagtaataggcactgctgctatagaacaaggaacaaattacaatccaacaggcatacaaactttagaaaagtttttatatggcagatgtactcactatcaaacatttgccacagacacaagactaaaccctcaaagacccatatcatcaaagaatacaaacacatataatcccagtggtgctccggaaagcataatatggagtacagacgattttaacacatttaaaaaacacacagacagcaactatggctactgcacctactgccctactgacgacttaattgaaaaaattaaaagctacagagacaaaagattcgaatggctaactaaaatgccagaaacaaacacctgccatataaatgccacctacgctcgaggaaaaattaagcagtgggaatatcacctaggctggtactcaaatatatttataggcaacctcagacacaacctggcattccggacagcatacatagacattacctacaatcctataacagacaaaggagaaggcaacatagtgtggttccaatatgccacgaaacccaacacacagtacatagagtcacaggcaaaatgcaccattacaaacatacccctatatgctgctttttatggctacgaagactatatccaaagaacactaggcccctatcaagatgtagagaccctaggcataatatgtgttaaatgtccctacacagatcccccactagttcacaaagacaaggataagtcagactggggctatgtattctacgacgttcactttggcaacggaaagaccccggagggcctgggccaagtgcacccttactggatgcagagatggagaccctatgtacagttccagaaagacactatgaacaaaatagccagaacgggaccgttcagctacagagacgagacgccttccatcaccttgactgccgggtacaagtttcgttttaactgggggggcgactctatatttccacagattattaaaaacccctgcccagacagcggggtacgaccttcaaccagtagagagcgtcgctcagtacaagtcgttagcccgctcacaatggggccagagtacatattccaccggtgggactggcgacgggggttctttaatacaaaaactctcaaaagaatgcttgaaaaatcaattaatgatgaagaatattcaacaggcccaaaggtccctcgatggtttcccccactcgacaaccaagagcaagaaggcgtctcagatacagagacgacaacctcgcagtcctcgcaagaagaagccgctcaagaagccctccaagaagtccaagaggcgtcgctacagcagcacctcctccagcagtaccgagagcagcgaagaatcggaaagcaactccaactcgtcatgctccaactcaccaagacgcagagcaacttgcacataaatccccgtgtccttggccatgcataaataaagtgtacatgtttcccccggaaaaacccatgcccatacacgggtaccacgggtggcagacagagtatgaggcctgcaaagcctttgacaggccccctagaaactacctgtcagacaaacccatctatccctggcttccccgctcccaaccagaatttaaagtcagttttaaacttggttttcaataaacaaggccgtgggaatttcacttgtcggtgtctacctcttaaggtcactaagcactccgagcgtcagcgaggagtgcgacccttccccctggtgcaacgccctcggcggccgcgcgctacgccttcggctgcgcgcggcacctcggacccccgctcgtgctgacacgctcgcgcgtgtcagaccacttcgggctcgcgggggtcgggaattttgctaaacagactccgagttgccattggacactgtagctgtgaatcagtaacgaaagtgagtggggccagacttcgccataaggcctttatcttcttgccattggtccgtgtcgggggtggccgtaggcttcggactcggttttaggccttccggactacaaaaaccgccattttagtgacgtcacggcggccattttaagtaagcatggcgggcggtgacgtataagttcaaaggtcaccgcgcttccgtgtttacacaaaatggtggccaacttcttccgggtcaaaggttggcagctacgtcataagtcacgtggcacggctgcgtcacaacacggaagtggctgttccacgtgacttatcacgtgactgctacgtcacggccgccattttagttcacaaaatggcggacttccttcctctttttta

SEQ ID NO: 595 - protein, 761 aa, Alphatorquevirus sp.
MAWWGRWRRWRWRPRRWRRRRRRRVPRRRAQRPVRRRRARRVRRRRWGRRRWRRGYRRRLRLRRRRRRKKIRLTQWNPAKVRRCTIKGVLPMILCGAGRSGFNYGLHSDDCTIQKPLGQNPHGGGMSTVTFSLQVLYDQYQRFMNKWSYSNDQLDLARYFGCTFWFYRHPEVDFVAQFDNVPPMKMDENTAPNTHPSFLLQNKHRVKIPSFKTKPFGRKKVRVTVGPPKLFEDKWYSQHDLCKVPLVSWRLTAADFRFPFCSPQTDNPCYTFQVLHEEYYPVIGTAAIEQGTNYNPTGIQTLEKFLYGRCTHYQTFATDTRLNPQRPISSKNTNTYNPSGAPESIIWSTDDFNTFKKHTDSNYGYCTYCPTDDLIEKIKSYRDKRFEWLTKMPETNTCHINATYARGKIKQWEYHLGWYSNIFIGNLRHNLAFRTAYIDITYNPITDKGEGNIVWFQYATKPNTQYIESQAKCTITNIPLYAAFYGYEDYIQRTLGPYQDVETLGIICVKCPYTDPPLVHKDKDKSDWGYVFYDVHFGNGKTPEGLGQVHPYWMQRWRPYVQFQKDTMNKIARTGPFSYRDETPSITLTAGYKFRFNWGGDSIFPQIIKNPCPDSGVRPSTSRERRSVQVVSPLTMGPEYIFHRWDWRRGFFNTKTLKRMLEKSINDEEYSTGPKVPRWFPPLDNQEQEGVSDTETTTSQSSQEEAAQEALQEVQEASLQQHLLQQYREQRRIGKQLQLVMLQLTKTQSNLHINPRVLGHA

SEQ ID NO: 596 - protein, 174 aa, Alphatorquevirus sp.
LRRRARCAGQFGLGTGRAMGKALKKAMFLGRPYRKKRALSLLRVRAPKAKPPAMSWRPPVHNPNGIERNLWEAFFRMHASACGCGDLVGHLTVLAGRYGAPPRPPAPGAPRPPLNRQLALPAPPADPQQANPRWPGGDGGEDGAGGPAAGGAVADAEYQEDELNALFDAVEQEE

SEQ ID NO: 597 - protein, 147 aa, Alphatorquevirus sp.
MVSPTRQPRARRRLRYRDDNLAVLARRSRSRSPPRSPRGVATAAPPPAVPRAAKNRKATPTRHAPTHQDAEQLAHKSPCPWPCINKVYMFPPEKPMPIHGYHGWQTEYEACKAFDRPPRNYLSDKPIYPWLPRSQPEFKVSFKLGFQ

SEQ ID NO: 598 - DNA, 3529 bp, Alphatorquevirus sp.; identical to SEQ ID NO: 594

SEQ ID NO: 599 - protein, 761 aa, Alphatorquevirus sp.; identical to SEQ ID NO: 595

SEQ ID NO: 600 - protein, 174 aa, Alphatorquevirus sp.; identical to SEQ ID NO: 596

SEQ ID NO: 601 - protein, 147 aa, Alphatorquevirus sp.; identical to SEQ ID NO: 597

SEQ ID NO: 602 - DNA, 3529 bp, Alphatorquevirus sp.
ggacccccgctcgtgctgacacgcttgcgcgtgtcagaccacttcgggctcgcgggggtcgggaattttgctaaacagactccgagttgccattggacactgtagctgtgaatcagtaacgaaagtgagtggggccagacttcgccataaggcctttatcttcttgccattggtccgtgtcgggggtggccgtaggcttcggactcggttttaggccttccggactacaaaaaccgccattttagtgacgtcacggcggccattttaagtaagcatggcgggcggtgacgtataagttcaaaggtcaccgcgcttccgtgtttacacaaaatggtggccaacttattccgggtcaaaggttggcagctacgtcataagtcacgtggcacggctgcgtcacaacacggaagtggctgttccacgtgacttaccacgtgactgctacgtcacggccgccattttagttcacaaaatggcggacttccttcctcttttttaaaaataacggccctgcggcggcgcgcgcgctgcgcgcgcgctggggggctcgggactggccgggctatgggcaaggctcttaaaaaagccatgtttctcggtcggccttacagaaagaaaagggcactgtcactgctacgcgtgcgagctccaaaggcgaaaccacctgctatgagctggagacccccggtgcacaaccccaatgggatcgagagaaacctgtgggaggcattctttcgcatgcatgcttcagcttgtggttgtggcgatcttgttggccatcttactgtactggctggtcggtatggtgctcctcctcgtcccccggcccccggggctcccagaccaccgctgaaccggcagctggcccttccggcgccccccgctgatccccagcaggccaacccgagatggcctggtggggacggtggagaagatggcgctggaggccccgccgctggcggcgccgtcgcagacgccgagtaccaagaagacgagctcaacgccctgttcgacgccgtcgagcaagaagagtaaggaggaggcgatgggggaggcggaggtggagacgggggtacagacgcagacttagactgagacgcagacgcagacgaaagaaaataagactgactcagtggaacccagctaaagtcaggagatgtactattaagggtgtcctgcccatgatactgtgcggagcaggacgctcagggtttaactatggactgcacagcgacgactgcaccatacagaaaccccttggccagaacccccacgggggcggcatgagcacagtaacttttagcctacaggtgctatatgaccagtaccagaggtttatgaacaagtggtcgtactccaacgaccagctagacctagccagatactttggctgcaccttctggttttacagacacccagaagtagactttgtcgctcagtttgacaacgttcccccaatgaaaatggacgagaacacagcccctaacactcacccgtcgttcctactgcaaaacaaacacagggttaaaatccccagctttaaaaccaagccttttggcagaaaaaaagttagagttacagtggggccccccaaactgtttgaagacaagtggtacagccagcatgacttgtgtaaggtgcccctagtcagttggcggttaaccgcagctgacttcagatttccgttctgctcaccacaaactgacaacccttgctacaccttccaggtattgcatgaagagtattacccagtaataggcactgctgctatagaacaaggaacaaattacaattcaaaaggcatacaaactttagaaaagtttttatatggcagatgtactcactatcaaacatttgccacagacacaagactaaaccctcaaagacccataatatcaaccagtacaaagacatataatcccagtggtgctcaggaagaaataatatggaatacaaacgattttaacgaatttaaaaaacacacagacagcaattatggctactgcacctactgccctactgacaccttaatttccaaaattaaaaactacagagacaaaagattccaatggctaactgaaatgccacaaacaaacacctgccatataaatgccacctacgctcgaggaaaaattaagcagtgggaatatcacctaggatggtactcaaatatatttataggcaacctcagacacaacctggcattccggacagcatacatagacattacctacaatcctataacagacaaaggagaaggcaacatagtgtggttccaatatgccacgaaacccaacacacagtacatagagtcacaggcaaaatgcaccattacaaacatacccctatatgctgctttttatggctacgaagactatatccaaagaacactaggcccctatcaagatgtagagaccctaggcataatatgtgttaaatgtccctacacagatcccccactagttcacaaagacaaggataagtcagactggggctatgtattctacgacgttcactttggcaacggaaagaccccggagggcctgggccaagtgcacccttactggatgcagagatggagaccctatgtacagttccagaaagacactatgaacaaaatagccagaacgggaccgttcagctacagagacgagacgccttccatcaccttgactgccgggtacaagtttcgttttaactgggggggcgactctatatttccacagattattaaaaacccctgcccagacagcggggtacgaccttcaaccagtagagagcgtcgctcagtacaagtcgttagcccgctcacaatggggccagagtacatattccaccggtgggactggcgacgggggttctttaatacaaaaactctcaaaagaatgcttgaaaaatcaattaatgatgaagaatattcaacaggcccaaaggtccctcgatggtttcccccactcgacaaccaagagcaagaaggcgtctcagatacagagacgacaacctcgcagtcctcgcaagaagaagccgctcaagaagccctccaagaagtccaagaggcgtcgctacagcagcacctcctccagcagtaccgagagcagcgaagaatcggaaagcaactccaactcgtcatgctccaactcaccaagacgcagagcaacttgcacataaatccccgtgtccttggccatgcataaataaagtgtacatgtttcccccggaaaaacccatgcccatacacgggtaccacgggtggcagacagagtatgaggcctgcaaagcctttgacaggccccctagaaactacctgtcagacaaacccatctatccctggcttccccgctcccaaccagaatttaaagtcagttttaaacttggttttcaataaacaaggccgtgggaatttcacttgtcggtgtctacctcttaaggtcactaagcactccgagcgtcagcgaggagtgcgacccttccccctggtgcaacgccctcggcggccgcgcgctacgccttcggctgcgcgcggcacctc

SEQ ID NO: 603 - protein, 761 aa, Alphatorquevirus sp.
MAWWGRWRRWRWRPRRWRRRRRRRVPRRRAQRPVRRRRARRVRRRRWGRRRWRRGYRRRLRLRRRRRRKKIRLTQWNPAKVRRCTIKGVLPMILCGAGRSGFNYGLHSDDCTIQKPLGQNPHGGGMSTVTFSLQVLYDQYQRFMNKWSYSNDQLDLARYFGCTFWFYRHPEVDFVAQFDNVPPMKMDENTAPNTHPSFLLQNKHRVKIPSFKTKPFGRKKVRVTVGPPKLFEDKWYSQHDLCKVPLVSWRLTAADFRFPFCSPQTDNPCYTFQVLHEEYYPVIGTAAIEQGTNYNSKGIQTLEKFLYGRCTHYQTFATDTRLNPQRPIISTSTKTYNPSGAQEEIIWNTNDFNEFKKHTDSNYGYCTYCPTDTLISKIKNYRDKRFQWLTEMPQTNTCHINATYARGKIKQWEYHLGWYSNIFIGNLRHNLAFRTAYIDITYNPITDKGEGNIVWFQYATKPNTQYIESQAKCTITNIPLYAAFYGYEDYIQRTLGPYQDVETLGIICVKCPYTDPPLVHKDKDKSDWGYVFYDVHFGNGKTPEGLGQVHPYWMQRWRPYVQFQKDTMNKIARTGPFSYRDETPSITLTAGYKFRFNWGGDSIFPQIIKNPCPDSGVRPSTSRERRSVQVVSPLTMGPEYIFHRWDWRRGFFNTKTLKRMLEKSINDEEYSTGPKVPRWFPPLDNQEQEGVSDTETTTSQSSQEEAAQEALQEVQEASLQQHLLQQYREQRRIGKQLQLVMLQLTKTQSNLHINPRVLGHA

SEQ ID NO: 604 - protein, 198 aa, Alphatorquevirus sp.
LLRHGRHFSSQNGGLPSSFLKITALRRRARCARAGGLGTGRAMGKALKKAMFLGRPYRKKRALSLLRVRAPKAKPPAMSWRPPVHNPNGIERNLWEAFFRMHASACGCGDLVGHLTVLAGRYGAPPRPPAPGAPRPPLNRQLALPAPPADPQQANPRWPGGDGGEDGAGGPAAGGAVADAEYQEDELNALFDAVEQEE

SEQ ID NO: 605 - protein, 147 aa, Alphatorquevirus sp.; identical to SEQ ID NO: 597

SEQ ID NO: 606 - DNA, 3527 bp, Alphatorquevirus sp.
gcttcgcgcgaggtgagtttacacaccgcagtcaaggggcaattcgggctcgggactggccgggccccgggcaaggctcttaaaaatgcacttttctaaaataagcagaaagaaaaggaaactgctactgcaaactgtgccgcttgcagagagccaacggattaccatgagctggtccagacccacccaaaatgtttatacttgtgaacaaaactggtttgagtcctgcctcagatcacactcatgcttttgtggctgtaataatcctgttattcattttaataacattgctactcgctttaactatctgcctactgccaacccgcctgtgggacccccccaaccacccacacgcccgccgtcccgcttgagaccccttcccgctctccccgcgcctcccgctgatccacaagcaccatggcctggggctggtggctcaagcggtggaggagaagaaagaaaccagcgtggaagaagtggagaacgcgccgatggagaagatttcgacgcagaagacctaaacgcacttatggccgccgtcgaagaagacgaacagtaaggaggcgccgcgttagacgactcaggaggagggggtggactaggagacggtacataagacgcaaacgcagaaagaaaaagctagtactgactcagtggaacccccaagacgtgaggagatgcacaataaggggcataataccccttataatgtgcggtgcaaacactgccagttttaactatggcatgcacagcgatgacagcactccccagccagaaaagttcgggggaggcatgagcacagttacatttagcctctatgtgttgtatgaccagtacaccagacacctaaacaggtggtcgtaccccaacgaccagctagacctagccagatacataggctgtaaatttaaattctacagagacacacacacagactttatagttacctatgacataaatccacccatgaaaaacacagaactcagcagccccagcactcatccaggcatgctaatgcaacaaaagagaaaagtactagtccctagctgggacacctatcctagaggcagaaaatatgtactagttaaaataccaccccccaaactatttgaagaccactggtacactcagccagacttatgcaaagttcctcttgtaactttgcggtcaactgccgctgacctcaaacatccgttctgctcaccacaaacgaacaacccttgcaccaccttccaggtgttgcgcgaacagtataacgacatgataggcttcccctttaattataacgcatcagatcaaacacagcaacaaacattaacaacatttgaaaagtggctatactcatccagcacacactatcagacatttgcaaccgaggctaaccttagacccagacagtacaatgcagacggaactcaaaacaaacagtatgcaaacctacaatccaagtggacaactactatatatgcaaaaaagacagacagcaactttgggtacacatcctacaacttttcaggtgagacaggctataaatttgtaacagaaatgagacagtggtactggacacaactaacatcctggacacaaacagtacctcacataaacagcacctttgccaatgccatacatccagagtttgaataccacgctggctggtactcaaacatttttataggccccaacagattcaacgtacagtttagagcagcctacatggatgtcacatacaacccaataaatgacaagggccagttaaacaaaatatggttccagtatagcacaaaacccaccacagagtttgtaccaaaacaggccaaatgccttttagaaaacctacctctgtggagtatgctatttggctactcagaatatgtagagagccagctaggcccctttcaggaccacgagacagtaggcctagtagtagtgcagtgtccatacacagtaccccccatgtatgacaaggacaaaccaaacatgggatacgtgttctatgacacccactttggcaatggaaagctaggcaacggactaggccaggtacccagatactggcagcaaagatggtaccccatcttaaagagacagaaacaagttatgaatgacatctgcaagactggaccgtttgcatacagagacgagagactgcaagctgacttgactgcaggatactcctttagatttaactggggtggtgacttaatctaccaccaggttgtcaaaaacccatgtgactcaggaggactggtgccttccgactccaatagactcaagcgggacgtacaagttgttagcccgctcaccatgggacccagactcatcttccactcgttcgaccaaagacgggggctctttactgacagagctatcaaaagaatgtacgatgaacagattgatgttccagactttacagaacagcctaaaatcccccgacttttccccccagtcgaactcaaagaaagggaagaaaaagactcaggttcggagacggagagcatcagcagttcccaagaaaaagaagcacaaaagcaagcggcgctaccagtccagcagcagctccgactccaactgcgagaacaacagcgactccgagtccacttgcagcacctcttcctccaactccagaaaaccaaagcaaatttacatttaaacccactatctttccagcaagagataagctagacatgtttggtgagattatagatagaaagcctacctcccaagattgggagaccgaatacgtaacctgtaagatatttaacaggccccccagacaacacctcacagaccctcctttctatccctggatgcctaagcctaaacctacatgccgtgtaacctttaagcttggctttcaataaacaaggccgtgggagtttcacttgtcggtgtctacctctataagtcactaagctctccgagcgaagcgaggagagcgaccctagaccaaggggcaactccctcgaagtccggcgctacgcgcttcgcgctgcgccggacatctcggaccccccctcgacccgaatcgcttgcgcgattcggacctgcggcctcgggggggtcgggggctttattaaacagactccgagatgccattggacactgagggggtgaacagcaacgaaagtgagtggggccagacttcgccatagggcctttatcttcttgccatttgtcagtgttcggggttgccataggcttcggcctcggttttaggccttccggactaccaaaatggccgattcagtgacgtcacggcggccattttagattggcgcagaggatctgacgtgcaagttgaaaggtcaggccctcggcgtcatcacaaaatggctgacaatatcttccgggtcaaaggtcatgcatacgtcataagtcacgtgggaaggggcgtgcccttaaacccggaagcatcctcgtccacgtgactgtgacgtgtatgacacgtcaccgccgccattttactttacaaaatggcggacttccttccgcttttttaaaaaaaaacggcctgcggcggcgcgcgc

SEQ ID NO: 607 - protein, 754 aa, Alphatorquevirus sp.
MAWGWWLKRWRRRKKPAWKKWRTRRWRRFRRRRPKRTYGRRRRRRTVRRRRVRRLRRRGWTRRRYIRRKRRKKKLVLTQWNPQDVRRCTIRGIIPLIMCGANTASFNYGMHSDDSTPQPEKFGGGMSTVTFSLYVLYDQYTRHLNRWSYPNDQLDLARYIGCKFKFYRDTHTDFIVTYDINPPMKNTELSSPSTHPGMLMQQKRKVLVPSWDTYPRGRKYVLVKIPPPKLFEDHWYTQPDLCKVPLVTLRSTAADLKHPFCSPQTNNPCTTFQVLREQYNDMIGFPFNYNASDQTQQQTLTTFEKWLYSSSTHYQTFATEANLRPRQYNADGTQNKQYANLQSKWTTTIYAKKTDSNFGYTSYNFSGETGYKFVTEMRQWYWTQLTSWTQTVPHINSTFANAIHPEFEYHAGWYSNIFIGPNRFNVQFRAAYMDVTYNPINDKGQLNKIWFQYSTKPTTEFVPKQAKCLLENLPLWSMLFGYSEYVESQLGPFQDHETVGLVVVQCPYTVPPMYDKDKPNMGYVFYDTHFGNGKLGNGLGQVPRYWQQRWYPILKRQKQVMNDICKTGPFAYRDERLQADLTAGYSFRFNWGGDLIYHQVVKNPCDSGGLVPSDSNRLKRDVQVVSPLTMGPRLIFHSFDQRRGLFTDRAIKRMYDEQIDVPDFTEQPKIPRLFPPVELKEREEKDSGSETESISSSQEKEAQKQAALPVQQQLRLQLREQQRLRVHLQHLFLQLQKTKANLHLNPLSFQQEIS

SEQ ID NO: 608 - protein, 167 aa, Alphatorquevirus sp.
LAGPRARLLKMHFSKISRKKRKLLLQTVPLAESQRITMSWSRPTQNVYTCEQNWFESCLRSHSCFCGCNNPVIHFNNIATRFNYLPTANPPVGPPQPPTRPPSRLRPLPALPAPPADPQAPWPGAGGSSGGGEERNQRGRSGERADGEDFDAEDLNALMAAVEEDEQ

SEQ ID NO: 609 - protein, 58 aa, Alphatorquevirus sp.
MFGEIIDRKPTSQDWETEYVTCKIFNRPPRQHLTDPPFYPWMPKPKPTCRVTFKLGFQ

SEQ ID NO: 610 - DNA, 3526 bp, Alphatorquevirus sp.
cgggtgccggaggtgagtttacacaccgcagtcaaggggcaattcgggcttgggactggccgggctatgggcaaggctcttaaaaaagacatgtttctcggtaaactttacagaaagaaaagggcactgctactgcctagcctgccagctgcaaagaaaaaaccacctgctatgagccagtgggtccctccggtgcacaacataaatggccgctgccaccagtggtatgaggggtgctaccgtactcatgctgctttttgtggttgtggcaattttattaatcaccttattgctctgggcgatcagtatggcttcaggccgggttcgagggctcccggcgctccgggagtaggcggacctccggtcccgctccgtcgagccctgccggctccggagccttcccagcaggctaacaacaacaacaaccagagatggtctggggatggtggcgccgacgcaggcgagggtggctccggagcttctggaggaggagagcagctgccagaagacgatctcgatggattgctcgccgcgctagacgacgaagagtaaggagaaaaaggaggtggaggaggaggagagggcgacgcagacggtttatctatagaaaaaagagacgttacagacgcaggagaaagagacaaaaaataataataaaacaatggcaaccggccgttgtcagacgctgcaggatagtggggtacatggctgctctaataagtggaaacgggacctttgctacaaattacagcagccacttagaggacagaatacagaagggaccctttggagggggccacagcaccatgagattctctctgtacgtgctgtaccaagaacacctcagacacatgaactactggacttacacaaacaaggacttagaactgactagatacctgggggcgactataaccttctacagacatcccaccagagactttatagtgacttatagcagacgcacccctctgggaggaaacatactgacagccccctcgctacatccaggcaatgcaatgctaagtaagagaaaaatactcatacccagcttagaaaccagacccaagggtaaaaagacaaaaaaactaagaatagggcccccaacactactaatagacaagtggtactttcagaaagacttttcagacgttacactgtttaacctcaatgttacggaagctgacttgcggtttccgttctgctcaccacaaactgacaacatttgcgtaaacttccaggttctgaaatcctgttacaacgaatacctaggtatacatacatttgacaatgacactgaaaatgctaaattaaaagaattttttagtaaagctctacccacaacaagcaaagaaaacacagagataaatatactaaacacatttagaacacagggatgccttagccatcctcaagtaaatgtacccaatgctaccagtaacccaaacaaccaagtaacagtcgacgaatatttccaaaaactagatggactctggggaaacccaatatatgcaaactccagaaacaatggaggcaaatccactgaaaactttaataaaaacacttttatagagaaatacctaataggtaacatgagcagctaccacaaaaaatttacaacagacaacctgccacaaagctggaaaggcaacaaagcacactgccacctcacaggaatatacagtccaccatacctgaactcaggcagaatatctccagagatatttggcctgtacacagaaataatatacaacccatacacagacaaaggcaaaggaaacaaaatatgggtagacgcactcacaaagggagacaacatatacagcagcacccagagcaggtgtctcttacaagacctacctctctggtgcgcctgtttcgggtacacagactggattaaaaaagaattaaaccactgggacgcaccgtggaactacagactcctaatggtgtgtccctacacatacccaaaactgtacaacgatgcaaacccaaactatggatacgtatgcttctcatatcaatttggagcaggacagatgccggacggcagctcctacgtccctataaaatggaggggaaaatggtaccctaacatgatccaccaacaaaaagttatggaggacctagccagatcaggcccctttgccccaaaacaacaggtacctagcgtgcagctcagcatgaagtacaaatttgcatttaactggggcggtaatcctattttggaacagattgttagagaccccagcactcagcccacctacgaaattcccggtgccggtaacctccctactagagtacaagtcatcgacccgagggttattggaccacaatactcatttagatcctgggactggagacgcggacagtttaatgaaaaaagtattaaaagaatcgcagaacaacaagagacttctgagtatctattttcaggcccaaaaaggccaaggatcgaccagcgcccttacaacccacaagaagaaagctggtcttcaacagtccaacaaagagaaccgaaaccgtgggcctcagaagaagagacggagagccagagccaaagcgaagaagaggcggagacatcaatcagagagcagctgcagcaccagctccaagagcaacacagaatcagacatggaatcaagtgcctcttcgagcagctagtcagaacccagcagggagtacacctacatccatcccttgtgtaggcccaaagaagtacatgtttccagacagggcccctaaaccagctccgagcagcggagactgggagatggaatacctaatgtgtaagctgtttaacaggccccccagaagcaacctaaaagatgtgcctttctacccgtgggttaaaaaccagtacaatgtaagctttcaactcaactacaaataaacctcagcttcaacttgctaggccgtgggagtttcacttgtcggtgtctacctcttaaggtcactaagcactccgagcgccagcgaggagtgcgacccttccccctgactcaacttcttcggagccgcgcgctacgccttcggctgcgcgcggcacctcagacccccgctcgtgctgacacgcttgcgcgtgtcagaccacttcgggctcgcgggggtcgggaaatttgctaaacagactccaagttgccattggacactggagctgtgaatcagtaacgaaagtgagtggggccagacttcgccataaggcctttatcttcttgccatttgtcagtatagggggtcgccataggcttcggcctgggttttaggccttccggactacaaaaaccgccatattagtgacgtcacgggcgccattttaagtaagcaggaagcggctcggtgtatacaaaatggccgcggagcacttccggcttgcccaaaatggtggttaagttcttccgggtcaaaggtcatcggcgccatcttggtcacgtgactgcctacgtcacggccgccattttgtttgacaaaatggccgacttccttcctctttttcaaaaaaaagcggaagtgccgccgcggaggg

SEQ ID NO: 611 - protein, 758 aa, Alphatorquevirus sp.
MVWGWWRRRRRGWLRSFWRRRAAARRRSRWIARRARRRRVRRKRRWRRRRGRRRRFIYRKKRRYRRRRKRQKIIIKQWQPAVVRRCRIVGYMAALISGNGTFATNYSSHLEDRIQKGPFGGGHSTMRFSLYVLYQEHLRHMNYWTYTNKDLELTRYLGATITFYRHPTRDFIVTYSRRTPLGGNILTAPSLHPGNAMLSKRKILIPSLETRPKGKKTKKLRIGPPTLLIDKWYFQKDFSDVTLFNLNVTEADLRFPFCSPQTDNICVNFQVLKSCYNEYLGIHTFDNDTENAKLKEFFSKALPTTSKENTEINILNTFRTQGCLSHPQVNVPNATSNPNNQVTVDEYFQKLDGLWGNPIYANSRNNGGKSTENFNKNTFIEKYLIGNMSSYHKKFTTDNLPQSWKGNKAHCHLTGIYSPPYLNSGRISPEIFGLYTEIIYNPYTDKGKGNKIWVDALTKGDNIYSSTQSRCLLQDLPLWCACFGYTDWIKKELNHWDAPWNYRLLMVCPYTYPKLYNDANPNYGYVCFSYQFGAGQMPDGSSYVPIKWRGKWYPNMIHQQKVMEDLARSGPFAPKQQVPSVQLSMKYKFAFNWGGNPILEQIVRDPSTQPTYEIPGAGNLPTRVQVIDPRVIGPQYSFRSWDWRRGQFNEKSIKRIAEQQETSEYLFSGPKRPRIDQRPYNPQEESWSSTVQQREPKPWASEEETESQSQSEEEAETSIREQLQHQLQEQHRIRHGIKCLFEQLVRTQQGVHLHPSLV

SEQ ID NO: 612 - protein, 161 aa, Alphatorquevirus sp.; identical to SEQ ID NO: 519

SEQ ID NO: 613 - protein, 134 aa, Alphatorquevirus sp.
LVFNSPTKRTETVGLRRRDGEPEPKRRRGGDINQRAAAAPAPRATQNQTWNQVPLRAASQNPAGSTPTSIPCVGPKKYMFPDRAPKPAPSSGDWEMEYLMCKLFNRPPRSNLKDVPFYPWVKNQYNVSFQLNYK

SEQ ID NO: 614 - DNA, 3524 bp, Alphatorquevirus sp.
ggacccccgctcgtgctgacacgcttgcgcgtgtcagaccacttcgggctcgcgggggtcgggaattttgctaaacagactccgagttgccattggacactgtagctgtgaatcagtaacgaaagtgagtggggccagacttcgccataaggcctttatcttcttgccattggtccgtgtcgggggtggccgtaggcttcggactcggttttaggccttccggactacaaaaaccgccattttagtgacgtcacggcggccattttaagtaagcatggcgggcggtgacgtataagttcaaaggtcaccgcgcttccgtgtttacacaaaatggtggccaacttattccgggtcaaaggttggcagctacgtcataagtcacgtggcacggctgcgtcacaacacggaagtggctgttccacgtgacttaccacgtgactgctacgtcacggccgccattttagttcacaaaatggcggacttccttcctcttttttaaaaataacggccctgcggcggcgcgcgcgctgcgcgcgcgcgctcgggactggccgggctatgggcaaggctcttaaaaaagccatgtttctcggtcggccttacagaaagaaaagggcactgtcactgctacgcgtgcgagctccaaaggcgaaaccacctgctatgagctggagacccccggtgcacaaccccaatgggatcgagagaaacctgtgggaggcattctttcgcatgcatgcttcagcttgtggttgtggcgatcttgttggccatcttactgtactggctggtcggtatggtgctcctcctcgtcccccggcccccggggctcccagaccaccgctgaaccggcagctggcccttccggcgccccccgctgatccccagcaggccaacccgagatggcctggtggggacggtggagaagatggcgctggaggccccgccgctggcggcgccgtcgcagacgccgagtaccaagaagacgagctcaacgccctgttcgacgccgtcgagcaagaagagtaaggaggaggcgatgggggaggcggaggtggagacgggggtacagacgcagacttagactgagacgcagacgcagacgaaagaaaataagactgactcagtggaacccagctaaagtcaggagatgtactattaagggtgtcctgcccatgatactgtgcggagcaggacgctcagggtttaactatggactgcacagcgacgactgcaccatacagaaaccccttggccagaacccccacgggggcggcatgagcacagtaacttttagcctacaggtgctatatgaccagtaccagaggtttatgaacaagtggtcgtactccaacgaccagctagacctagccagatactttggctgcaccttctggttttacagacacccagaagtagactttgtcgctcagtttgacaacgttcccccaatgaaaatggacgagaacacagcccctaacactcacccgtcgttcctactgcaaaacaaacacagggttaaaatccccagctttaaaaccaagccttttggcagaaaaaaagttagagttacagtggggccccccaaactgtttgaagacaagtggtacagccagcatgacttgtgtaaggtgcccctagtcagttggcggttaaccgcagctgacttcagatttccgttctgctcaccacaaactgacaacccttgctacaccttccaggtattgcatgaagagtattacccagtaataggcactgctgctatagaacaaggaacaaattacaattcaaaaggcatacaaactttagaaaagtttttatatggcagatgtactcactatcaaacatttgccacagacacaagactaaaccctcaaagacccataatatcaaccagtacaaagacatataatcccagtggtgctcaggaagaaataatatggaatacaaacgattttaacgaatttaaaaaacacacagacagcaattatggctactgcacctactgccctactgacaccttaatttccaaaattaaaaactacagagacaaaagattccaatggctaactgaaatgccacaaacaaacacctgccatataaatgccacctacgctcgaggaaaaattaagcagtgggaatatcacctaggatggtactcaaatatatttataggcaacctcagacacaacctggcattccggacagcatacatagacattacctacaatcctataacagacaaaggagaaggcaacatagtgtggttccaatatgccacgaaacccaacacacagtacatagagtcacaggcaaaatgcaccattacaaacatacccctatatgctgctttttatggctacgaagactatatccaaagaacactaggcccctatcaagatgtagagaccctaggcataatatgtgttaaatgtccctacacagatcccccactagttcacaaagacaaggataagtcagactggggctatgtattctacgacgttcactttggcaacggaaagaccccggagggcctgggccaagtgcacccttactggatgcagagatggagaccctatgtacagttccagaaagacactatgaacaaaatagccagaacgggaccgttcagctacagagacgagacgccttccatcaccttgactgccgggtacaagtttcgttttaactggggggggcgactctatatttccacagattattaaaaacccctgcccagacagcggggtacgaccttcaaccagtagagagcgtcgctcagtacaagtcgttagcccgctcacaatggggccagagtacatattccaccggtgggactggcgacgggggttctttaatacaaaaactctcaaaagaatgcttgaaaaatcaattaatgatgaagaatattcaacaggcccaaaggtccctcgatggtttcccccactcgacaaccaagagcaagaaggcgtctcagatacagagacgacaacctcgcagtcctcgcaagaagaagccgctcaagaagccctccaagaagtccaagaggcgtcgctacagcagcacctcctccagcagtaccgagagcagcgaagaatcggaaagcaactccaactcgtcatgctccaactcaccaagacgcagagcaacttgcacataaatccccgtgtccttggccatgcataaataaagtgtacatgtttcccccggaaaaacccatgcccatacacgggtaccacgggtggcagacagagtatgaggcctgcaaagcctttgacaggccccctagaaactacctgtcagacaaacccatctatccctggcttccccgctcccaaccagaatttaaagtcagttttaaacttggttttcaataaacaaggccgtgggaatttcacttgtcggtgtctacctcttaaggtcactaagcactccgagcgtcagcgaggagtgcgacccttccccctggtgcaacgccctcggcggccgcgcgctacgccttcggctgcgcgcggcacctc

SEQ ID NO: 615 - protein, 608 aa, Alphatorquevirus sp.
MAWWGRWRRWRWRPRRWRRRRRRRVPRRRAQRPVRRRRARRVRRRRWGRRRWRRGYRRRLRLRRRRRRKKIRLTQWNPAKVRRCTIKGVLPMILCGAGRSGFNYGLHSDDCTIQKPLGQNPHGGGMSTVTFSLQVLYDQYQRFMNKWSYSNDQLDLARYFGCTFWFYRHPEVDFVAQFDNVPPMKMDENTAPNTHPSFLLQNKHRVKIPSFKTKPFGRKKVRVTVGPPKLFEDKWYSQHDLCKVPLVSWRLTAADFRFPFCSPQTDNPCYTFQVLHEEYYPVIGTAAIEQGTNYNSKGIQTLEKFLYGRCTHYQTFATDTRLNPQRPIISTSTKTYNPSGAQEEIIWNTNDFNEFKKHTDSNYGYCTYCPTDTLISKIKNYRDKRFQWLTEMPQTNTCHINATYARGKIKQWEYHLGWYSNIFIGNLRHNLAFRTAYIDITYNPITDKGEGNIVWFQYATKPNTQYIESQAKCTITNIPLYAAFYGYEDYIQRTLGPYQDVETLGIICVKCPYTDPPLVHKDKDKSDWGYVFYDVHFGNGKTPEGLGQVHPYWMQRWRPYVQFQKDTMNKIARTGPFSYRDETPSITLTAGYKFRFNWGGRLYISTDY

SEQ ID NO: 616 - protein, 196 aa, Alphatorquevirus sp.
LLRHGRHFSSQNGGLPSSFLKITALRRRARCARALGTGRAMGKALKKAMFLGRPYRKKRALSLLRVRAPKAKPPAMSWRPPVHNPNGIERNLWEAFFRMHASACGCGDLVGHLTVLAGRYGAPPRPPAPGAPRPPLNRQLALPAPPADPQQANPRWPGGDGGEDGAGGPAAGGAVADAEYQEDELNALFDAVEQEE

SEQ ID NO: 617 - DNA, 3524 bp, Alphatorquevirus sp.
agacccccgctcgtgctgacacgcttgcgcgtgtcagaccacttcgggctcgcgggggtcgggaaatttgctaaacagactccgagttgccattggacacaggagctgtgaatcagtaacgaaagtgagtggggccagacttcgccatagggcctttatcttcttgccatttgtcagtatagggagtcgccataggcttcgggtccggttacaggccttccggactacaaaaatggcgaattcagtaacgtcacggccgccatcttaagtaaggcggaacctggctgtcactatacaaaatggcggcgacagccttccgctttacacaagatggtggtatttttcttccgggtcagaggtcaccggctacgtcataagtcacgtgggaagggtggagcgtaaacccggaagctaatcctcccacgtggcttgtcacgtgaccgctacgtcacggcggccattttaaatcacaaaatggcggatttccttcctctttttcaaaatttaaccgtcggcggcggcgcgcgcgcttcgcgcgcgcgccgggattcgggctcgggactggccgggctatgggcaaggctcttagggtcatcgctctttaaaacatgtttctcggcaggccttacagaaagaaaagggcactgccactgcctcgcctgcactctacaccgcaaacacggcctagcatgagccaccactggcgcgagccctacgacaatgtctccaaccgggagaggcactggctggaaggagtactcaggacccaccgagccttttgtggttgcagcgatcctgtccttcattttactaatctggttgcacgttttaatcttcaaggcggtgctgcctcgcagggtggtcctaggaatccgcccccgctgaggcgcctgcccgcgctgcccccggccccctcgcccggcaacacccctaggccgccatgtcctggtggggatggcgccgccggtggtggcgaaggccgcggagacggtggagatggagacgtacgcgccgcccgagacgaataccgcgacgacgatatcgacgacctgctcgccgctatcgagcaagacgagtaaggaggcgccgcgcggggggctggcgggggcgacgcagatactcccgacgctatagtaggagactgactgtgaggcgaaagaaaaagaaactaactcttaaggtctggcagcctcagaatatcaaaaagtgcaagatcaggggtctcctgcccctcctaatctgcgggcacacccggtccgcctttaactatgccatccactcggatgacaagaccccccagcaggagagttttgggggcgggctcagcactgtaagcttcactctcaaagtactgtttgaccagaaccagaggggactcaacaggtggtcggccagcaacgaccagctggacctcgcccggtacctgggctgcacgttctggttctacagagacaaaaacactgacttcatagtgcagtacgatgttagcgccccctttaagctggacaaaaacagctcgccgagctaccaccccttcatgctcatgaaggccaagcacaaagtgctggtgcccagcttcaacaccagacccaagggcagggagaaagttaaggtcaggataaagccccccaccatgttcatagacaagtggtacactcaggaggacctctgtcccgttattcttgtgtcacttgtggttagcgcagcttcctttacacatccgttctgctcaccacaaactgccaacccttgcatcaccttccaggttttgaaagagttctattactctgcaatggggtacgccacaccagaaaccacaatggacacaatatggaacaccctctatacaactgccacctactggcagtcccacctgaccccccagtttgtcagaatgccctccaaaaatccagataatactgagaacaaacctgctacccaatttaataactgggttgaatccaagtttaaaacaggcaagttagtcaagtacaacttccctcaatataaacctgaaatagacaaattaaaagaactaagacgctactatttccattgggaaactaagacagaaaacgtggcagtacctcctacatggaccacccccacatcagacaggtacgagtaccacgtaggcatgttcagccctatatttctgacccccttcaggtccgcagggctagactttcccagggcataccaggacgtcacatacaatcccctcacagacaagggagtgggcaacagaatgtggttccagtacaacactaaaatagacacccagttcgatgccaggtcctgcaaatgcgtcctccaggacatgcccctttactgcatggcctacgggtacgctgacttcttagagcaagagataggagagtaccaggacctagaggccaacgggtacgtctgtgtcatcagtccttacactaaaccccccatgttcaacaaaagtaaccccgaacaggggtacgtgttctacgactcccagtggggcaatggcaagtggatagacggcaccgggttcgtccccgtgtactggctaaccaggtggagagtagaactgctatttcagaaaaaagtactgtcagacatcgccatgtcaggccccttcagctaccccgacgaactaaagaacactgtactgactgcaaagtatagatttgactttaagtggggtggcaatctcttccaccaacagaccattagaaacccctgcaaaccagaagaaacctcgaccagtagattccctcgcgaggtacaagtcgttgacccggtcaccatgggcccccgattcgtgtttcactcctgggactggagacgagggttccttagtgacagagctctcaagagaatgttcgaaaaaccgctcgattttgagggatttgcagcgactccaaaacgacctcgcatattccctcccacagagggacagctcgccagagagcaaaaggagcaagaagaaggctccgattcgcaggaagaaagcagccttacctcgctcgaagaagtcccggaagagacgcagctacgagtccacctccgaaagcagctcagagagcagcgaagcatcagacagcaactcagaaccatgttccaccagcttgtcaagacgcaagcgggcctacacctaaacccccttttatctatccagccataaacagggcctacatattcccagacagggccccaaaaccgtctcccaccccgggagactgggccaccgagtacctgtgcgccaagatcttcgacaggccccccaggtccgtgctcacagacacccccttctacccttgggtccccaaacccactcccgagttccgggtctccttcaaactgggatttaaaccctaaataaaattttcaaggccgtggaaatctcacttgtcggtgtctacctcttaaggtcactaagcactccgagcgccagcgaggagtgcgaccctgtctctgtgggccccctactgccgatagccaacttcttcggagccgcgcgctacgccttcggctgcgcgcggcacctc

SEQ ID NO: 618 - protein, 739 aa, Alphatorquevirus sp.
MSWWGWRRRWWRRPRRRWRWRRTRRPRRIPRRRYRRPARRYRARRVRRRRAGGWRGRRRYSRRYSRRLTVRRKKKKLTLKVWQPQNIKKCKIRGLLPLLICGHTRSAFNYAIHSDDKTPQQESFGGGLSTVSFTLKVLFDQNQRGLNRWSASNDQLDLARYLGCTFWFYRDKNTDFIVQYDVSAPFKLDKNSSPSYHPFMLMKAKHKVLVPSFNTRPKGREKVKVRIKPPTMFIDKWYTQEDLCPVILVSLVVSAASFTHPFCSPQTANPCITFQVLKEFYYSAMGYATPETTMDTIWNTLYTTATYWQSHLTPQFVRMPSKNPDNTENKPATQFNNWVESKFKTGKLVKYNFPQYKPEIDKLKELRRYYFHWETKTENVAVPPTWTTPTSDRYEYHVGMFSPIFLTPFRSAGLDFPRAYQDVTYNPLTDKGVGNRMWFQYNTKIDTQFDARSCKCVLQDMPLYCMAYGYADFLEQEIGEYQDLEANGYVCVISPYTKPPMFNKSNPEQGYVFYDSQWGNGKWIDGTGFVPVYWLTRWRVELLFQKKVLSDIAMSGPFSYPDELKNTVLTAKYRFDFKWGGNLFHQQTIRNPCKPEETSTSRFPREVQVVDPVTMGPRFVFHSWDWRRGFLSDRALKRMFEKPLDFEGFAATPKRPRIFPPTEGQLAREQKEQEEGSDSQEESSLTSLEEVPEETQLRVHLRKQLREQRSIRQQLRTMFHQLVKTQAGLHLNPLLSIQP

SEQ ID NO: 619 - protein, 156 aa, Alphatorquevirus sp.; identical to SEQ ID NO: 557

SEQ ID NO: 620 - DNA, 3523 bp, Alphatorquevirus sp.
cgggtgccggaggtgagtttacacaccgcagtcaaggggcaattcgggcacgggactggccgggctatgggcaagattcttaaaaaatttccccgatccctttgtcgccaggacataaaaacatgccgtggagaccgccggtacatagtgtccaggggcgagaggatcagtggttcgcaggcttttttcacagccacgcttcattttgcggttgcggtgacgctgttggccatcttaatagcattgctcatcgctttcctcgcgccggcccaccaaggccccctccggggctagagcagcctaacccccggagcagggcccggccgggcccggagggccgcccgccatcttggccctgccggctccgcccgcggagcctgacgacccgcagccacgccgtggtggtggggacggtggcgccgccgctggcgccgcaggcgaccgtggagaccgagactacgacgaagaagagctagacgagcttttccgcgccgccgccgaagacgatttgtaagtaggagatggcgccggccttacaggcgcaggaggagacgcgggcgacgcagacgcagacgcagacgcagacataagcccaccctagtactcagacagtggcaacccgacgttatcagacactgtaagataacaggatggatgcccctcattatctgtggaaaggggtccacccagttcaactacatcacccacgcggacgatatcacccccaggggagcctcctacgggggcaacttcacaaacatgactttctccctggaagccatatatgaacagtttctgtaccacagaaacaggtggtcggcctccaaccacgacctagaactctgcaggtacaagggtaccaccctaaaactatacagacacccagatgtagattacatagtcacctacagcagaacaggacccttcgagatcagccacatgacctacctcagtactcaccccctgctaatgctgctaaacaagcaccacatagtggtgcccagcctaaagactaagcccaggggcagaaaggccataaaagtaaggataaggcccccaaaactcatgaacaacaagtggtacttcactagagacttctgtaacataggcctcttccagctctgggccacaggcttagaactcagaaacccctggctcagaatgagcaccctgagcccctgcataggcttcaatgtccttaaaaacagcatctacaccaacctcagcaacctgccacaataccaacaagagagattaaacattattaacaacacacttcacccacaggacataacaggtccaaacaacaaaaagtggcagtacacatacacaaagcttatggcccctatttactattcagcaaacagggccagcacctatgactgggaaaattacaacaaggaaagtaactacaataacacatatgtaaaattccatcaaaaaagagaggagaaacttacaaaaattagaaaagagtggcagatgctttatccacaacaacatacagcaatgccagaatcctatgaccttttacaagagtatggcctatacagcccatactacctaaaccccacgagaataaacctagactggatgaccccctacacacacgtaaggtacaaccccctggtagacaaaggcttcggaaacagaatatacatccagtggtgctcagaggcagatgtcagctacaacagaacaaagtccaagtgtctgctacaagacatgcccctgtttttcatggcctatggctacatagactgggcaataaaaaacacaggagtgtcttcactagtgagggacgccagaatctgcatcaggtgtccctacacagagccacagctcgtgggatccacagaagacataggctttgtacccatctcagaaactttcatgaggggcgacatgccggtacttgcaccatacataccgttaagctggttttgcaagtggtatcccaacatagctcaccaaaaggaagtccttgaggcaatcatttcctgcagccccttcatgccccgtgaccaggacatgaacggttgggatatcacaatcggttacaaaatggacttcttatggggcggttcccctctcccctcacagccaatcgacgacccctgccagcagggaacccacccgattcccgaccccgataagcaccctcgcctcctacaagtctcgaacccgaaactactcggaccgaggacagtgttccacaagtgggacatcagacgtgggcagtttagcaaaagaagtattaaaagagtgtcagaatactcaagcgatgatgaatctcttgcgccaggtctcccatcaaagcgaaacaagctcgactcggcgttcagaggagaaaacccagagcaaaaagaatgctattctctcctcaaagcgctcgaggaagaagagaccccagaagaagaagaaccagcaccccaagaaaaagcccagaaagaggagctactccaccagctccagctccagagacgccaccagcgagtcctcagacgagggctcaagctcgtctttacagacatcctccgactccgccagggagtccactggaaccccgagctcacatagagcccccaccttacatacccgaccttctttttcccaatactggtaaaaaaaaaaagttctctcccttcgactgggagacagaagcccagctggcggggtggatgcggcggcctatgcgcttctatccctcagacacccctcactacccgtggctaccccccgagcgagatatcccgaaaatatgtaacataaacttcaaaataaagcttcaagagtaagtgattcgaggccctcctctgttcacttagcggtgtctacctcttaaggtcactaagcactccgagcgccagcgaggagtgcgaccctctaccaaggggcaacttcctcggggtccggcgctacgcgcttcgcgctgcgccggacgcctcggaccccccctcgacccgaatcgctcgcgcgattcggacctgcggcctcgggggggtcgggggctttattaaacagactccgagatgccattggacactgagggggtgaacagcaacgaaagtgagtggggccagacttcgccatagggcctttatcttcctgccattggatggtggcttccgggtccgcctgggagccgccattttagcttcggccgccattttaggccctcgggggcctccgtaggcgcactttaatgacgtcacgacagccattttgtcgtgacgtttgagacacgtgatgggggcgtgccttaacccggaagcatccctggtcacgtgactctgacgtcacggcagccattttgtgctgtccgccatcttgtgacttccttccgctttttcaaaaaaaaagaggaagtatgacgtagcggcgggggggctactacttcgtgcacttcctggggcgtgtcctccccctctatataagcagaggcggtgacgaatggtagagtttttcctggcccgtccgcggcgagagcgcgagcgaagcgagcgatcgagcgtcccgtggg

SEQ ID NO: 621 - protein, 641 aa, Alphatorquevirus sp.
MPLIICGKGSTQFNYITHADDITPRGASYGGNFTNMTFSLEAIYEQFLYHRNRWSASNHDLELCRYKGTTLKLYRHPDVDYIVTYSRTGPFEISHMTYLSTHPLLMLLNKHHIVVPSLKTKPRGRKAIKVRIRPPKLMNNKWYFTRDFCNIGLFQLWATGLELRNPWLRMSTLSPCIGFNVLKNSIYTNLSNLPQYQQERLNIINNTLHPQDITGPNNKKWQYTYTKLMAPIYYSANRASTYDWENYNKESNYNNTYVKFHQKREEKLTKIRKEWQMLYPQQHTAMPESYDLLQEYGLYSPYYLNPTRINLDWMTPYTHVRYNPLVDKGFGNRIYIQWCSEADVSYNRTKSKCLLQDMPLFFMAYGYIDWAIKNTGVSSLVRDARICIRCPYTEPQLVGSTEDIGFVPISETFMRGDMPVLAPYIPLSWFCKWYPNIAHQKEVLEAIISCSPFMPRDQDMNGWDITIGYKMDFLWGGSPLPSQPIDDPCQQGTHPIPDPDKHPRLLQVSNPKLLGPRTVFHKWDIRRGQFSKRSIKRVSEYSSDDESLAPGLPSKRNKLDSAFRGENPEQKECYSLLKALEEEETPEEEEPAPQEKAQKEELLHQLQLQRRHQRVLRRGLKLVFTDILRLRQGVHWNPELT

SEQ ID NO: 622 - DNA, 3520 bp, Alphatorquevirus sp.
ttcctcttttttaaaaataacggcccagcggcggaggggcaattcgggctcgggactggccgggctatgggcaaggctcttaaaaaagccatgtttctcggtcggccttacagaaagaaaagggcactgtcactgctacgcgtgcgagctccaaaggcgaaaccacctgctatgagctggagacccccggtgcacaaccccaatgggatcgagagaaacctgtgggaggcattctttcgcatgcatgcttcagcttgtggttgtggcgatcttgttggccatcttactgtactggctggtcggtatggtgctcctcctcgtcccccggcccccggggctcccagaccaccgctgaaccggcagctggcccttccggcgccccccgctgatccccagcaggccaacccgagatggcctggtggggacggtggagaagatggcgctggaggccccgccgctggcggcgccgtcgcagacgccgagtaccaagaagacgagctcaacgccctgttcgacgccgtcgagcaagaagagtaaggaggaggcgatgggggaggcggaggtggagacgggggtacagacgcagacttagactgagacgcagacgcagacgaaagaaaataagactgactcagtggaacccagctaaagtcaggagatgtactattaagggtgtcctgcccatgatactgtgcggagcaggacgctcagggtttaactatggactgcacagcgacgactgcaccatacagaaaccccttggccagaacccccacgggggcggcatgagcacagtaacttttagcctacaggtgctatatgaccagtaccagaggtttatgaacaagtggtcgtactccaacgaccagctagacctagccagatactttggctgcaccttctggttttacagacacccagaagtagactttgtcgctcagtttgacaacgttcccccaatgaaaatggacgagaacacagcccctaacactcacccgtcattcctactgcaaaacaaacacagggttaaaattcccagctttaaaaccaagccttttggcagaaaaaaagttagagttacagtggggccccccaaactgtttgaagacaagtggtacagccagcatgacttgtgtaaggtgcccctagtcagttggcggttaaccgcagctgacttcagatttccgttctgctcaccacaaactgacaacccttgctacaccttccaggtattgcatgaagagtattacccagtaataggcacttctgctatagaaccaggaacaaatcacaatccaacaggcatagacactttagaaaactttttatatggcaaatgtactcactatcaaacatttgccacagacacaagactaaaccctcaaagacccatagctccaaataaaaacacaacatataaccctagtggacttactgaaaacattatttggggacaagaacaatttaactcatttaaaaagcaaacagacagcaactatggctactgcacctactgccctactgcagagttaattaacagaattaaacagtacagagacaaaagattcgaatggctaactcaaatgccagaaaaaaacacctgccatataaatgccacctacgctcgaggaaaaattaagcagtgggaatatcacctaggctggtactcaaacatatttataggcaacctcagacacaacctggcattccggacagcatacatagacattacctacaatcctataacagacaaaggagaaggcaacatagtgtggttccaatatgccacgaaacccaacacagagtacatagagtcacaggcaaaatgcaccattacaaacatacccctatatgctgctttttatggctacgaagactatatccaaagaacactaggcccctatcaagatgtagagaccctaggcataatatgtgttaaatgtccctacacagatcccccactagttcacaaagacaagaataaggcagactggggctatgtattctacgacgttcactttggcaacggaaagaccccggagggcctgggccaagtgcacccttactggatgcagagatggagaccttatgtacagttccagaaagacactatgaacaagatagccagaaccggaccgttcagctacagagacgagacgccttccatcaccttgactgccgggtacaagtttcgttttaactgggggggcgactctatatttccacagattattaaaaacccctgcccagacagcggggtacgaccttcaaccagtagagagcgtcgctcagtacaagtcgttagcccgctcacaatggggccagagtacatattccaccggtgggactggcgacgggggttctttaatacaaaaactctcaaaagaatgcttgaaaaatcaattaatgatgaagaatattcaacaggcccaaaggtccctcgatggtttcccccactcgacaaccaagagcaagaaggcgtctcagatacagagacgacaacctcgcagtcctcgcaagaagaagccgctcaagaagccctccaagaagtccaagaggcgtcgctacagcagcacctcctccagcagtaccgagagcagcgaagaatcggaaagcaactccaactcgtcatgctccaactcaccaagacgcagagcaacttgcacataaatccccgtgtccttggccatgcataaataaagtgtacatgtttcccccggaaaaacccatgcccatacacgggtaccacgggtggcagacagagtatgaggcctgcaaagcctttgacaggccccctagaaactacctgtcagacaaacccatctatccctggcttccccgctcccaaccagaatttaaagtcagttttaaacttggttttcaataaacaaggccgtgggaatttcacttgtcggtgtctacctcttaaggtcactaagcactccgagcgtcagcgaggagtgcgacccttccccctggtgcaacgccctcggcggccgcgcgctacgccttcggctgcgcgcggcacctcggacccccgctcgtgctgacacgcttgcgcgtgtcagaccacttcgggctcgcgggggtcgggaattttgctaaacagactccgagttgccattggacactgtagccgtgaatcagtaacgaaagtgagtggggccagacttcgccataaggcctttatcttcttgccatttgtccgtgtagggggtcgccataggcttcgggctgggttttaggccttccggactacaaatatggccgttccagtgacgtcacggccgccattttgagtaggtgctgtccaggactgctgttccgggtcaaagggcatcctcggcgggacctacataaaatggtggacaatatcttcccggtcaaaggtcacacctacgtcacaagtcacgtgagggggacccgctacgtcatatgcggaagtaggtcccgccacgtgactcaccacgtgggtgctgcgtcacagccgccattttagtttacaaaatggccgacttcc

SEQ ID NO: 623 - protein, 761 aa, Alphatorquevirus sp.
MAWWGRWRRWRWRPRRWRRRRRRRVPRRRAQRPVRRRRARRVRRRRWGRRRWRRGYRRRLRLRRRRRRKKIRLTQWNPAKVRRCTIKGVLPMILCGAGRSGFNYGLHSDDCTIQKPLGQNPHGGGMSTVTFSLQVLYDQYQRFMNKWSYSNDQLDLARYFGCTFWFYRHPEVDFVAQFDNVPPMKMDENTAPNTHPSFLLQNKHRVKIPSFKTKPFGRKKVRVTVGPPKLFEDKWYSQHDLCKVPLVSWRLTAADFRFPFCSPQTDNPCYTFQVLHEEYYPVIGTSAIEPGTNHNPTGIDTLENFLYGKCTHYQTFATDTRLNPQRPIAPNKNTTYNPSGLTENIIWGQEQFNSFKKQTDSNYGYCTYCPTAELINRIKQYRDKRFEWLTQMPEKNTCHINATYARGKIKQWEYHLGWYSNIFIGNLRHNLAFRTAYIDITYNPITDKGEGNIVWFQYATKPNTEYIESQAKCTITNIPLYAAFYGYEDYIQRTLGPYQDVETLGIICVKCPYTDPPLVHKDKNKADWGYVFYDVHFGNGKTPEGLGQVHPYWMQRWRPYVQFQKDTMNKIARTGPFSYRDETPSITLTAGYKFRFNWGGDSIFPQIIKNPCPDSGVRPSTSRERRSVQVVSPLTMGPEYIFHRWDWRRGFFNTKTLKRMLEKSINDEEYSTGPKVPRWFPPLDNQEQEGVSDTETTTSQSSQEEAAQEALQEVQEASLQQHLLQQYREQRRIGKQLQLVMLQLTKTQSNLHINPRVLGHA

SEQ ID NO: 624 - protein, 156 aa, Alphatorquevirus sp.
MGKALKKAMFLGRPYRKKRALSLLRVRAPKAKPPAMSWRPPVHNPNGIERNLWEAFFRMHASACGCGDLVGHLTVLAGRYGAPPRPPAPGAPRPPLNRQLALPAPPADPQQANPRWPGGDGGEDGAGGPAAGGAVADAEYQEDELNALFDAVEQEE

SEQ ID NO: 625 - protein, 147 aa, Alphatorquevirus sp.; identical to SEQ ID NO: 597

SEQ ID NO: 626 - DNA, 3519 bp, Alphatorquevirus sp.
ccttcctcttttttaaaaataaccaccgcagtcaaggggcaattcgggctcgggactggccgggctatgggcaaggctattagggttatcgctctttaaaatgccctttctcggcagggtctggagaaagaaaaggaaggtgcttctgtcagatttgcgaactccatcgccgctccggcctgacatgagccagtggctaccgcctctccaaaatgtcccccaaagggaaagatgttggtttaactgtatctggcagtcacacagatgtttttgtggttgtgctgatcctatccgtcaccttggccatctggctgctcagtataatatgcaaccaggtccgtcgccgggtggtgatcctaggccgccgcgacctccgtcattaagaagataccccgctcttccgggacccgacacccccgctaacccgcccccgcgaccatgccgtggtggggatggcgccggagatggcgctggccccgcaggagatggaggacccgccgccgacgacgagtaccgaccagaagacctagaagacctgtacgccgctatcgaaggagacgagtaaggaggcgccgcggtcgggggcggtacagggggcgacggtacacccgcagacgttacatacgtagatacaggagacgaaaaagaaagaccctcatatggagacagtggcagcctcaaaatatcagaaaatgtagaataaggggcataatccccatcttaatatgtgggcacctgagagcaaaccgaaactatgctcttcacagcgatgacatagttgaacagaacactcccttcgggggctctctcagtaccactagctggtctctaaaagtactgtacgaccagcaccaaaggggtctcaacaggtggtccgccagcaacgagaccctagacctcgccagatacaatggctgcgagtttaccttctatagagacaaaaagactgactttatagtaacctatgacatctcagctccctacaaactagacaaatacagctcgcccagctaccatcccggtagcatgatgctgcagactaaacacaaagtacttatccccagcttcgagaccaaacccaagggtcgcagcacagtaaaagttagaatcaagccccccaaactcttcttagacaagtggtatactcagcaagacctgtgcgacgttaatcttgtgacatttgcggttaccgcagcttcctttacacatccgttctgcccaccacaaactgacaacccctgttgcacattccaagtgttgaaagagttctactaccctgtaataggctactcttccgctatcacaaaagtagactctgtattctctgaaatactatacaaaaactgcacttactatcagagctttttaactccccaatttattggacaaatagttaaactacccaacggcattcttgtaagagagttatcagagtcacctacaggatttccagagggaaccacagttaccaaaaggcaaatagaaagctacaataaatggcaaaaagataacttcctaacaaatgccagtcagcattacaattactgtaattataaacctgacaatacaaatctagtatggctcagaaaatactactttgaatgggaaacacaaaagaatgcctcagtaaaaccagaccacctcacaccctctgttgactggtacgagtaccacataggcctattcagtcccatctttctgagccccttcagatccagcagcctagaatttcctagagcatatcaagatgtgtcatataatcctttagtagacaaaggagtaggcaatgtcatctggttccagtacaacacaaaagcagatacacaactcactatcccttcttgtaaatgtgtaatagaaaacaaaccgctgtgggcagccttctatggctactcagactttgtacaacaagaaataggcccatatacagacgcagactcagtaggttttatatgctgcatctgtccctacaccaaaccccccatgaaaaacccagataatcccatgatgggatatgtgttttatgactccaatttcggagctggcaagtggatagacggcagtggcttcattcccctatactggcaaaccagatggagaccagaaactctgtttcaagaaggagtaatgagagacattaccatgagcggccccttcagctacaaagacgacctaaaaaacacagtactgactgcaaagtacaaatttaactttcgctggggggggggtaatcttatccacgaacagaccattagaaacccatgcccgacggacggacatcccccttccggtagacagcctcgcgatgtacaagtcgttgacccgatctccgtgggccccagattcgtattccactcctgggactggcgtagagggtaccttagcgaagcagctctcaagcgaattagagaacaaccactcgattatgaagcttattcgttcatcccaaagagacctagaatctttcctccaactacaggagacggcgtggcccaaaggcaaggaaaagactactcttcagaggaagaaagcagcctcatctcgttcgaagaggggcaggaaccaaaagcgcaacaagtacacaagcacctcctcagacacctccgaaagcagcgagagctcggcctccgactccgaaccctgttcgagagcctccaaaagacgcaagcgggtctccacgtaaacccattattgttcaaccagctataaaccaggttctcctgttccccgagagggctcccaagcctgctcccagcacaggtgactgggagacagaataccttacatgcaagcactgggacagaccacccagatccaacctttccgacccccctttctatccctggatgcctcccgctttcaatgtaagctttaagctcaacttcaaataaacaaggccgtgggagtttcacttgtcggtgtctacctctttaagtcactaagcactccgagcgtcagcgaggagtgcgacccttccccctggtgcaacgccctcggcggccgcgcgctacgccttcggctgcgcgcggcacctcggacccccgctcgtgctgacacgcttgcgcgtgtcagaccacttcgggctcgcgggggtcgggaattttgctaaacagactccgagttgccattggacactgtagctgtgaatcagtaacgaaagtgagtggggccagacttcgccataaggcctttatcttcttgccatttgtcagtatcgggggtcgccatagacttcggcctccattttaggccttccggactaccaaaatggcggaatccgtgacgtcacggccgccattttaagtaaggcggaagcaggctgtcactatacaaaatggcggcgacagccttccgctttacacaaaatggccgccaaaaacatcccggtcaaaggtcgtgtacacgtcataagtcacgtggggacggctgcgtcacaacccggaagcaatcctcaccacgtgatttgtcacgtgacatgcacgtcatcgccgccattttgaatcacaaaatggccgactt

SEQ ID NO: 627 - protein, 756 aa, Alphatorquevirus sp.
MPWWGWRRRWRWPRRRWRTRRRRRVPTRRPRRPVRRYRRRRVRRRRGRGRYRGRRYTRRRYIRRYRRRKRKTLIWRQWQPQNIRKCRIRGIIPILICGHLRANRNYALHSDDIVEQNTPFGGSLSTTSWSLKVLYDQHQRGLNRWSASNETLDLARYNGCEFTFYRDKKTDFIVTYDISAPYKLDKYSSPSYHPGSMMLQTKHKVLIPSFETKPKGRSTVKVRIKPPKLFLDKWYTQQDLCDVNLVTFAVTAASFTHPFCPPQTDNPCCTFQVLKEFYYPVIGYSSAITKVDSVFSEILYKNCTYYQSFLTPQFIGQIVKLPNGILVRELSESPTGFPEGTTVTKRQIESYNKWQKDNFLTNASQHYNYCNYKPDNTNLVWLRKYYFEWETQKNASVKPDHLTPSVDWYEYHIGLFSPIFLSPFRSSSLEFPRAYQDVSYNPLVDKGVGNVIWFQYNTKADTQLTIPSCKCVIENKPLWAAFYGYSDFVQQEIGPYTDADSVGFICCICPYTKPPMKNPDNPMMGYVFYDSNFGAGKWIDGSGFIPLYWQTRWRPETLFQEGVMRDITMSGPFSYKDDLKNTVLTAKYKFNFRWGGGNLIHEQTIRNPCPTDGHPPSGRQPRDVQVVDPISVGPRFVFHSWDWRRGYLSEAALKRIREQPLDYEAYSFIPKRPRIFPPTTGDGVAQRQGKDYSSEEESSLISFEEGQEPKAQQVHKHLLRHLRKQRELGLRLRTLFESLQKTQAGLHVNPLLFNQL

SEQ ID NO: 628 - protein, 169 aa, Alphatorquevirus sp.
LAGLWARLLGLSLFKMPFLGRVWRKKRKVLLSDLRTPSPLRPDMSQWLPPLQNVPQRERCWFNCIWQSHRCFCGCADPIRHLGHLAAQYNMQPGPSPGGDPRPPRPPSLRRYPALPGPDTPANPPPRPCRGGDGAGDGAGPAGDGGPAADDEYRPEDLEDLYAAIEGDE

SEQ ID NO: 629 - protein, 56 aa, Alphatorquevirus sp.
LFPERAPKPAPSTGDWETEYLTCKHWDRPPRSNLSDPPFYPWMPPAFNVSFKLNFK

SEQ ID NO: 630 - DNA, 3518 bp, Alphatorquevirus sp.
taacggcccagcggcggcgcgcgcgctacgcgcgaggggcaattcgggctcgggactggccgggctatgggcaaggctcttaaaaaagctacccccttaactatgtttcttggcagagtttaccgccaccagaaaagcaaagtgcttctgtccctggtgcatactccacagaaaacaccttcctccatgaaccggtggtcacccccggcacacgatgcccgcggaattgagaggcagtggtatgagtgtgtttggcgcagtcacgctgcttgctgtggctgtggtgattttattagtcatattaatgatctggcgcatcgttttagacgtcctccgggttccagaccacctactactccccagccgccggctgtgagagccctcccggcgctgccggcccctgagccatggtctggcgcagggggcgacgctggcgccggtggagatggcgccgcaagccgcggtggaggagatggagacgctggagacgtcgcagacgaagacctgctagacgccgtagacctcgcagagtaaggagacgcaggggagggtggcggcgctcctacagacggtggaagagacgcagggggcgacgcaaacataaaaaaaaacttatactaactcagtggcaacccgcggttgtcaaaaaatgcaggatagtgggctacgaccccataataatatgtggactgaacagaaccagccacaactccacaactcacgcagaggactacactacaggcaaccaggcctttggggggggactgtgcaccaccaaatacactctaagaatactgttccaagaatacatggcccaccacaactactggacggccagcaacagagacctggagctggccaggtacctgggggcttctattatattttttaaacaccccacagtagactttgtagccagagtcagaaccatgcctccctttaacgacactgacatgacagccgcatccctgcacccgggaatgcttatgctagctaagaaaaaaataattattcccagtctaaaaaccagacccagcagaaaacactatgtaaagataaagataggggcccccaagctatttgaagataagtggtactctcagagagacctctgtgacacaactcttgtggttatagaggcaacggttgcagacttgcaatatccgttcggctcaccactaacgaacagcatctgttgcaacttccaggttcttaacagcaactatgacaacgccctgagcacccttataggaactcagggagacaaagacagagataaatgctataaatttctgttaaatacaatcacctactataacacctctcaagtactagcacagctaaacaagtttttacctacctccaacacagttaacctctctgaatcaaatgccagagactccattaatccatccaaccaaaaagaaaatacatacactaacacaattacacaaagacacaacaatacactgtatggaggagcagcatactttaccacgtcacaacaaaataatttaccaccaaacaaaatgaaagaggccaacaaagcatacactaaagcagctgaaaaaattctaggcaattggaattttactaacatgaactcatcctcagaacaagagttatcaggcctaaactactttgactactacacaggcatgttttccagcatatttttagccagcggcaggtcaaactgggaggtaaaaggcagctacacagacataacatacaaccccctagtagacaagggagagggcaacatgatctggatagactggatcaccaaaggtgacaccatctactctgagaataaaagcaaatgcttgctgagagacctgcccatgtgggccctgtgctatggctacgcagactatgtacttaagtgcacaggagtctcaagcataaaaaacgaggccagaatagtcatgaggtgtccctacacatacccccaactaacaaaacacacagaccccaactttggattcgtagtatacagtgacaactttggacgcggacgcatgccggggggcgaccctgtaccgagcaccagaaacagggtgcactggtacatcaccataacccaccagactgaagtgctagagtgcatctcccagaccggaccgtttgcctaccacagcgacgaacgcaaagcagtactgactataaaatacaacttcagatggaaatggggaggcaaccctgtgttccaacagattcttagagacccctgctcgggatcctccggctccggtccccgtagagtgcctcgctcaatacaagtcgatgacccgaagtaccagacaccagagtacatctggcacgcgtgggacttcagacgtggactctttagccagaaaggtattaagagagtgtcacaacaaccaacagatgttgaccttcctacaggcaggggcaagagacccaagagagacacagacggcccgcaagagcaaggccaagaagaaggctcgtcttccatcagacgagtactccagcagtggctccactccagtcaggagcagagccaagaaagcgaagaagaagcagccccgacgacgctctcgcaagagctacaaaaacaactcaagcagcagcagctcatgggaaagcagctccgagagctcagtctccaactcgcccaagtccaagcggggggacaccttcacccccttttacaataccatgcataaataaagtgtatatgtttccccccatgacctctactccctccagctcagactggaaagaggagtacgaggcctgcagagtctgggacagacctcccagaaacgacctaacaaagccccctttctatccctggatgcctcctacgcaccatgtaagctttaagctctccttcaaataaatgttggccgtgggagtttcacttgtcggtgtctacctctataagtcactaagcactccgagcgtaagcgaggagtgcgaccctctgccctggtgcaacgccctcggcggccgcgcgctacgccttcggctgcgcgcggcacctcggacccccgctcgtgctgacacgcttgcgcgtgtcagaccacttcgggctcgcgggggtcgggaaatttgctaaacagactccgagttgccattggacactgtagccgtgaatcagtaacgaaagtgagtggggccagacttcgccataaggcctttatcttcttgccattggatagtgtagggggttgccataggcttcggcctcggttttaggccttccggactacaaaaatggcggattccgtgacgtcatggccgccattttaagtaaggcggaagcagctgtcactgtaacaaaatggcggcgacagccttccgctttgcacaaaatggcggtgtttatcttccgggtcaaaggtcacgcctacgtcacaagtcacgtggggggacccgctgcgcatacacggaagtaggccccgccacgtgactaaccacgtgggtgctgcgtcacagccgccattttgaatcacaaaatggccgacttccttcctgttttttaaaaa

SEQ ID NO: 631 - protein, 761 aa, Alphatorquevirus sp.; identical to SEQ ID NO: 568

SEQ ID NO: 632 - protein, 155 aa, Alphatorquevirus sp.; identical to SEQ ID NO: 569

SEQ ID NO: 633 - protein, 54 aa, Alphatorquevirus sp.; identical to SEQ ID NO: 570

SEQ ID NO: 634 - DNA, 3517 bp, Alphatorquevirus sp.
cggccctgcggcggcgcgcgcgcttcgcgcgtcaaggggcaattcgggctcgggactggccgggccccgggcaaggctcttaaaaagcatgtttctcggtaaactgtacagaaagaaaaggaaagtgccactgcaagctctgccagtaccaccggctaaacggactagtatgagctgggtacaaccggtatctaacgcccatgtccgagaacaacaatggttcgagtccaccgttagaagccacgacgctttctgtggctgtggtgattccgtgcttcattttactaaccttgctactcgctttaaccgtctgcatgctgccccttcacctctggacccgccctaccccccacccccgaggcgggcgcgtgtgagaggcctgccagccctccccgctcctgaaaacccaccggcgccatggcctggcgctggtggagacgccgctggaaacccagaaggcggcccgcgtggacaaagtaccggagacgccgctggagacgatttcgaccccgcagacctagaagatctactcgccgccgtggaagaagacgaacagtaaggaggcgccgcgttaggcgactgaggcggaggagggggtggactaggagacggtacttgagacgcagaaagagacgaaagctaatactgactcaatggaaccccaccaatgtcagacgctgcaatatcaggggcataataccccttatcatgtgcggggcaaacactgccagttttaactatggcatgcacagcgacgacagcactcctcagccagagaaatttgggggcggcatgagcacagtgacttttagcctgtatgtactgtatgaccagtttaccagacacatgaacaggtggtcgtaccccaacgaccagctagacctcgccagatacaaaggctgctcttttaagatgtacagacaccctacaactgactttatactgacttatgacaacaatccccccatgaaaaacactatatacagctctcctaacacgcaccctggcatcctcatgcaacagaaacacagggtgctaatacccagctggctcacctttcctaaaggcagaaaatatgtaaaaattaaaatacctccacctaagttatttgaggaccactggtacactcagcctgacttatgcaaagtaccgctcgttactttgcggtcaaccgcagctgacttcagacatccgttctgctcaccacaaacgaacaacccttgcaccaccttccaggtgttacgagagaactacaatgcggtcataggacttccctttaccgttaaccacagcaacagtgtagaactacaacctataaatgattttgaaacatggctatactcatccagcacacactatcagacattccaaacagaacaaatgtttagacccagacaatacaatccagatggctccaataataaaaactaccaaaccttactaagtacatggactacaaaaatatattctagaaaaacagacagcaactttggctacacatcctataacttttcaggcaatgacggcaaagcttatgccacccaaatgagacagtggtactggacaaaactaacagaaatgacagccgcagtaccacacattaaccccacttatgccaacacaaacacaccagaatatgaataccacacaggctggttctcaccagtattcataggtccatccagacacaacatacagttcagaacagcatacatggatgtcacttataatccactaaatgacaagggccagtttaacaaagtgtggttccaatacagcacaaaaccaaacacagactttaattccacacagtgcaaatgtataatagaaaacattccactgtggtcagctctatttggctacagtgaatatgtagagagccaactaggcccctttcaagaccatgaaacagtaggcctagtagtagtacagtgcccttacacagtacctcaaatgtacaacaaagaaaagcccctcatgggctacatattctatgacacaaactttggcaatggaaaactgggcaatggcagcggccaggtgcccagatactggcagcaaaggtggtaccccatactcaaaagacagacacaagtaatgaatgacatctgcaagactggacctttcagctacagagacgaactgcttcaggtggacctagcagcctcttacaccttcaaatttaactgggggggcgacttactctaccaccaggtcatcaaaaacccgtgcgactcctcaggactggcacccaccgactccggtagattcaagcgggacgtacaagttgttagcccgctcaccatgggtcccagactcctcttccactcgtttgaccaaagacgggggttctttactgaaagagctatcaaaagaatgcatgatgaacaaattgatgttccagactttacacagcaacctaaaatcccccgcattttcccaccagtcgagctccaagaccaaagagaacaagcagaagaaaactcgagttcggaagcgctctccctcacctcttcccaagaaaaagaagcagaagcccaagaaagtctaccgatacagcagcagctcagaaaacaactcagacagcaacagcagttgcgagtccacttgcagcagctattcctacaactccagaaaacaaaagcaaatttacatttaaacccactatttttcccccaagagaacatgtagacatgttcggtgactactatgatagaaagccaacagcctcagactggcaaactgaatatgagtgctgtagggcctttaatagaccccctagaagcaaccttaaagacagccccttctacccctggatgccaagacagtctcagtttcgtgtaaccttcaaacttggcttctaataaaatttgctaggccgtgcaactttcacttgtcggtgtctacctctaaaggtcactaagctctccgagcgcagcgaggagagcgacccttccccctgactcaacttcttcggagccgcgcgctacgccttcggctgcgcgcggcacctcagacccccgctcgtgctgacacgcttgcgcgtgtcagaccacttcgggctcgcgggggtcgggaaatttgctaaacagactccgagttgccattggacactggagctgtgaatcagtaacgaaagtgagtggggccagacttcgccataaggcctttatcttcttgccatttgtccgtgtcgggggtcgctatagacttcggcctccattttaggccttccgaactaccaaaatggccgattccgtgacgtcatggcggccattttagattggcgcagaggatctgacgtcaaagtttaaaggtcaggccctcggcgtcatcacaaaatggcggcaattctcttccgggttaaaggtcacttcatacgtcataagtcacgtgggaaggggcgtgcctaaacccggaagcatcctcacccacgtgactgtgacgtgtgtgacacgtcaccgccgccattttagttcacaaaatggcggacttccttccgcttttttaaaaaaaa

SEQ ID NO: 635 - protein, 757 aa, Alphatorquevirus sp.
MAWRWWRRRWKPRRRPAWTKYRRRRWRRFRPRRPRRSTRRRGRRRTVRRRRVRRLRRRRGWTRRRYLRRRKRRKLILTQWNPTNVRRCNIRGIIPLIMCGANTASFNYGMHSDDSTPQPEKFGGGMSTVTFSLYVLYDQFTRHMNRWSYPNDQLDLARYKGCSFKMYRHPTTDFILTYDNNPPMKNTIYSSPNTHPGILMQQKHRVLIPSWLTFPKGRKYVKIKIPPPKLFEDHWYTQPDLCKVPLVTLRSTAADFRHPFCSPQTNNPCTTFQVLRENYNAVIGLPFTVNHSNSVELQPINDFETWLYSSSTHYQTFQTEQMFRPRQYNPDGSNNKNYQTLLSTWTTKIYSRKTDSNFGYTSYNFSGNDGKAYATQMRQWYWTKLTEMTAAVPHINPTYANTNTPEYEYHTGWFSPVFIGPSRHNIQFRTAYMDVTYNPLNDKGQFNKVWFQYSTKPNTDFNSTQCKCIIENIPLWSALFGYSEYVESQLGPFQDHETVGLVVVQCPYTVPQMYNKEKPLMGYIFYDTNFGNGKLGNGSGQVPRYWQQRWYPILKRQTQVMNDICKTGPFSYRDELLQVDLAASYTFKFNWGGDLLYHQVIKNPCDSSGLAPTDSGRFKRDVQVVSPLTMGPRLLFHSFDQRRGFFTERAIKRMHDEQIDVPDFTQQPKIPRIFPPVELQDQREQAEENSSSEALSLTSSQEKEAEAQESLPIQQQLRKQLRQQQQLRVHLQQLFLQLQKTKANLHLNPLFFPQENM

SEQ ID NO: 636 - protein, 167 aa, Alphatorquevirus sp.
LAGPRARLLKSMFLGKLYRKKRKVPLQALPVPPAKRTSMSWVQPVSNAHVREQQWFESTVRSHDAFCGCGDSVLHFTNLATRFNRLHAAPSPLDPPYPPPPRRARVRGLPALPAPENPPAPWPGAGGDAAGNPEGGPRGQSTGDAAGDDFDPADLEDLLAAVEEDEQ

SEQ ID NO: 637 - protein, 56 aa, Alphatorquevirus sp.
MFGDYYDRKPTASDWQTEYECCRAFNRPPRSNLKDSPFYPWMPRQSQFRVTFKLGF

SEQ ID NO: 638 - DNA, 3516 bp, Alphatorquevirus sp.
ccttcctcttttttaaaaataaccaccgcagtcaaggggcaattcgggctcgggactggccgggctatgggcaaggctattagggttatcgctctttaaaatgccctttctcggcagggtctggagaaagaaaaggaaggtgcttctgtcagatttgcgaactccatcgccgctccggcctgacatgagccagtggctaccgcctctccaaaatgtcccccaaagggaaagatgttggtttaactgtatctggcagtcacacagatgtttttgtggttgtgctgatcctatccgtcaccttggccatctggctgctcagtataatatgcaaccaggtccgtcgccgggtggtgatcctaggccgccgcgacctccgtcattaagaagataccccgctcttccgggacccgacacccccgctaacccgcccccgcgaccatgccgtggtggggatggcgccggagatggcgctggccccgcaggagatggaggacccgccgccgacgacgagtaccgaccagaagacctagaagacctgtacgccgctatcgaaggagacgagtaaggaggcgccgcggtcgggggcggtacagggggcgacggtacacccgcagacgttacatacgtagatacaggagacgaaaaagaaagaccctcatatggagacagtggcagcctcaaaatatcagaaaatgtagaataaggggcataatccccatcttaatatgtgggcacctgagagcaaaccgaaactatgctcttcacagcgatgacatagttgaacagaacactcccttcgggggctctctcagtaccactagctggtctctaaaagtactgtacgaccagcaccaaaggggtctcaacaggtggtccgccagcaacgagaccctagacctcgccagatacaatggctgcgagtttaccttctatagagacaaaaagactgactttatagtaacctatgacatctcagctccctacaaactagacaaatacagctcgcccagctaccatcccggtagcatgatgctgcagactaaacacaaagtacttatccccagcttcgagaccaaacccaagggtcgcagcacagtaaaagttagaatcaagccccccaaactcttcttagacaagtggtatactcagcaagacctgtgcgacgttaatcttgtgacatttgcggttaccgcagcttcctttacacatccgttctgcccaccacaaactgacaacccctgttgcacattccaagtgttgaaagagttctactaccctgtaataggctactcttccgctatcacaaaagtagactctgtattctctgaaatactatacaaaaactgcacttactatcagagctttttaactccccaatttattggacaaatagttaaactacccaacggcattcttgtaagagagttatcagagtcacctacaggatttccagagggaaccacagttaccaaaaggcaaatagaaagctacaataaatggcaaaaagataacttcctaacaaatgccagtcagcattacaattactgtaattataaacctgacaatacaaatctagtatggctcagaaaatactactttgaatgggaaacacaaaagaatgcctcagtaaaaccagaccacctcacaccctctgttgactggtacgagtaccacataggcctattcagtcccatctttctgagccccttcagatccagcagcctagaatttcctagagcatatcaagatgtgtcatataatcctttagtagacaaaggagtaggcaatgtcatctggttccagtacaacacaaaagcagatacacaactcactatcccttcttgtaaatgtgtaatagaaaacaaaccgctgtgggcagccttctatggctactcagactttgtacaacaagaaataggcccatatacagacgcagactcagtaggttttatatgctgcatctgtccctacaccaaaccccccatgaaaaacccagataatcccatgatgggatatgtgttttatgactccaatttcggagctggcaagtggatagacggcagtggcttcattcccctatactggcaaaccagatggagaccagaaactctgtttcaagaaggagtaatgagagacattaccatgagcggccccttcagctacaaagacgacctaaaaaacacagtactgactgcaaagtacaaatttaactttcgctgggggggtaatcttatccacgaacagaccattagaaacccatgcccgacggacggacatcccccttccggtagacagcctcgcgatgtacaagtcgttgacccgatctccgtgggccccagattcgtattccactcctgggactggcgtagagggtaccttagcgaagcagctctcaagcgaattagagaacaaccactcgattatgaagcttattcgttcatcccaaagagacctagaatctttcctccaactacaggagacggcgtggcccaaaggcaaggaaaagactactcttcagaggaagaaagcagcctcatctcgttcgaagaggggcaggaaccaaaagcgcaacaagtacacaagcacctcctcagacacctccgaaagcagcgagagctcggcctccgactccgaaccctgttcgagagcctccaaaagacgcaagcgggtctccacgtaaacccattattgttcaaccagctataaaccaggttctcctgttccccgagagggctcccaagcctgctcccagcacaggtgactgggagacagaataccttacatgcaagcactgggacagaccacccagatccaacctttccgacccccctttctatccctggatgcctcccgctttcaatgtaagctttaagctcaacttcaaataaacaaggccgtgggagtttcacttgtcggtgtctacctctttaagtcactaagcactccgagcgtcagcgaggagtgcgacccttccccctggtgcaacgccctcggcggccgcgcgctacgccttcggctgcgcgcggcacctcggacccccgctcgtgctgacacgcttgcgcgtgtcagaccacttcgggctcgcgggggtcgggaattttgctaaacagactccgagttgccattggacactgtagctgtgaatcagtaacgaaagtgagtggggccagacttcgccataaggcctttatcttcttgccatttgtcagtatcgggggtcgccatagacttcggcctccattttaggccttccggactaccaaaatggcggaatccgtgacgtcacggccgccattttaagtaaggcggaagcaggctgtcactatacaaaatggcggcgacagccttccgctttacacaaaatggccgccaaaaacatcccggtcaaaggtcgtgtacacgtcataagtcacgtggggacggctgcgtcacaacccggaagcaatcctcaccacgtgatttgtcacgtgacatgcacgtcatcgccgccattttgaatcacaaaatggccgactt

SEQ ID NO: 639 - protein, 755 aa, Alphatorquevirus sp.
MPWWGWRRRWRWPRRRWRTRRRRRVPTRRPRRPVRRYRRRRVRRRRGRGRYRGRRYTRRRYIRRYRRRKRKTLIWRQWQPQNIRKCRIRGIIPILICGHLRANRNYALHSDDIVEQNTPFGGSLSTTSWSLKVLYDQHQRGLNRWSASNETLDLARYNGCEFTFYRDKKTDFIVTYDISAPYKLDKYSSPSYHPGSMMLQTKHKVLIPSFETKPKGRSTVKVRIKPPKLFLDKWYTQQDLCDVNLVTFAVTAASFTHPFCPPQTDNPCCTFQVLKEFYYPVIGYSSAITKVDSVFSEILYKNCTYYQSFLTPQFIGQIVKLPNGILVRELSESPTGFPEGTTVTKRQIESYNKWQKDNFLTNASQHYNYCNYKPDNTNLVWLRKYYFEWETQKNASVKPDHLTPSVDWYEYHIGLFSPIFLSPFRSSSLEFPRAYQDVSYNPLVDKGVGNVIWFQYNTKADTQLTIPSCKCVIENKPLWAAFYGYSDFVQQEIGPYTDADSVGFICCICPYTKPPMKNPDNPMMGYVFYDSNFGAGKWIDGSGFIPLYWQTRWRPETLFQEGVMRDITMSGPFSYKDDLKNTVLTAKYKFNFRWGGNLIHEQTIRNPCPTDGHPPSGRQPRDVQVVDPISVGPRFVFHSWDWRRGYLSEAALKRIREQPLDYEAYSFIPKRPRIFPPTTGDGVAQRQGKDYSSEEESSLISFEEGQEPKAQQVHKHLLRHLRKQRELGLRLRTLFESLQKTQAGLHVNPLLFNQL

SEQ ID NO: 640 - protein, 169 aa, Alphatorquevirus sp.; identical to SEQ ID NO: 628

SEQ ID NO: 641 - protein, 56 aa, Alphatorquevirus sp.; identical to SEQ ID NO: 629

SEQ ID NO: 642 - DNA, 3516 bp, Alphatorquevirus sp.
ccttcctcttttttaaaaataaccaccgcagtcaaggggcaattcgggctcgggactggccgggctatgggcaaggctattagggttatcgctctttaaaatgccctttctcggcagggtctggagaaagaaaaggaaggtgcttctgtcagatttgcgaactccatcgccgctccggcctgacatgagccagtggctaccgcctctccaaaatgtcccccaaagggaaagatgttggtttaactgtatctggcagtcacacagatgtttttgtggttgtgctgatcctatccgtcaccttggccatctggctgctcagtataatatgcaaccaggtccgtcgccgggtggtgatcctaggccgccgcgacctccgtcattaagaagataccccgctcttccgggacccgacacccccgctaacccgcccccgcgaccatgccgtggtggggatggcgccggagatggcgctggccccgcaggagatggaggacccgccgccgacgacgagtaccgaccagaagacctagaagacctgtacgccgctatcgaaggagacgagtaaggaggcgccgcggtcgggggcggtacagggggcgacggtacacccgcagacgttacatacgtagatacaggagacgaaaaagaaagaccctcatatggagacagtggcagcctcaaaatatcagaaaatgtagaataaggggcataatccccatcttaatatgtgggcacctgagagcaaaccgaaactatgctcttcacagcgatgacatagttgaacagaacactcccttcgggggctctctcagtaccactagctggtctctaaaagtactgtacgaccagcaccaaaggggtctcaacaggtggtccgccagcaacgagaccctagacctcgccagatacaatggctgcgagtttaccttctatagagacaaaaagactgactttatagtaacctatgacatctcagctccctacaaactagacaaatacagctcgcccagctaccatcccggtagcatgatgctgcagactaaacacaaagtacttatccccagcttcgagaccaaacccaagggtcgcagcacagtaaaagttagaatcaagccccccaaactcttcttagacaagtggtatactcagcaagacctgtgcgacgttaatcttgtgacatttgcggttaccgcagcttcctttacacatccgttctgcccaccacaaactgacaacccctgttgcacattccaagtgttgaaagagttctactaccctgtaataggctactcttccgctatcacaaaagtagactctgtattctctgaaatactatacaaaaactgcacttactatcagagctttttaactccccaatttattggacaaatagttaaactacccaacggcattcttgtaagagagttatcagagtcacctacaggatttccagagggaaccacagttaccaaaaggcaaatagaaaggtacaataaatggcaaaaagataacttcctaacaaatgccagtcagcattacaattactgtaattataaacctgacaatacaaatctagtatggctcagaaaatactactttgaatgggaaacacaaaagaatgcctcagtaaaaccagaccacctcacaccctctgttgactggtacgagtaccacataggcctattcagtcccatctttctgagccccttcagatccagcagcctagaatttcctagagcatatcaagatgtgtcatataatcctttagtagacaaaggagtaggcaatgtcatctggttccagtacaacacaaaagcagatacacaactcactatcccttcttgtaaatgtgtaatagaaaacaaaccgctgtgggcagccttctatggctactcagactttgtacaacaagaaataggcccatatacagacgcagactcagtaggttttatatgctgcatctgtccctacaccaaaccccccatgaaaaacccagataatcccatgatgggatatgtgttttatgactccaatttcggagctggcaagtggatagacggcagtggcttcattcccctatactggcaaaccagatggagaccagaaactctgtttcaagaaggagtaatgagagacattaccatgagcggccccttcagctacaaagacgacctaaaaaacacagtactgactgcaaagtacaaatttaactttcgctgggggggtaatcttatccacgaacagaccattagaaacccatgcccgacggacggacatcccccttccggtagacagcctcgcgatgtacaagtcgttgacccgatctccgtgggccccagattcgtattccactcctgggactggcgtagagggtaccttagcgaagcagctctcaagcgaattagagaacaaccactcgattatgaagcttattcgttcatcccaaagagacctagaatctttcctccaactacaggagacggcgtggcccaaaggcaaggaaaagactactcttcagaggaagaaagcagcctcatctcgttcgaagaggggcaggaaccaaaagcgcaacaagtacacaagcacctcctcagacacctccgaaagcagcgagagctcggcctccgactccgaaccctgttcgagagcctccaaaagacgcaagcgggtctccacgtaaacccattattgttcaaccagctataaaccaggttctcctgttccccgagagggctcccaagcctgctcccagcacaggtgactgggagacagaataccttacatgcaagcactgggacagaccacccagatccaacctttccgacccccctttctatccctggatgcctcccgctttcaatgtaagctttaagctcaacttcaaataaacaaggccgtgggagtttcacttgtcggtgtctacctctttaagtcactaagcactccgagcgtcagcgaggagtgcgacccttccccctggtgcaacgccctcggcggccgcgcgctacgccttcggctgcgcgcggcacctcggacccccgctcgtgctgacacgcttgcgcgtgtcagaccacttcgggctcgcgggggtcgggaattttgctaaacagactccgagttgccattggacactgtagctgtgaatcagtaacgaaagtgagtggggccagacttcgccataaggcctttatcttcttgccatttgtcagtatcgggggtcgccatagacttcggcctccattttaggccttccggactaccaaaatggcggaatccgtgacgtcacggccgccattttaagtaaggcggaagcaggctgtcactatacaaaatggcggcgacagccttccgctttacacaaaatggccgccaaaaacatcccggtcaaaggtcgtgtacacgtcataagtcacgtggggacggctgcgtcacaacccggaagcaatcctcaccacgtgatttgtcacgtgacatgcacgtcatcgccgccattttgaatcacaaaatggccgactt

SEQ ID NO: 643 - protein, 755 aa, Alphatorquevirus sp.
MPWWGWRRRWRWPRRRWRTRRRRRVPTRRPRRPVRRYRRRRVRRRRGRGRYRGRRYTRRRYIRRYRRRKRKTLIWRQWQPQNIRKCRIRGIIPILICGHLRANRNYALHSDDIVEQNTPFGGSLSTTSWSLKVLYDQHQRGLNRWSASNETLDLARYNGCEFTFYRDKKTDFIVTYDISAPYKLDKYSSPSYHPGSMMLQTKHKVLIPSFETKPKGRSTVKVRIKPPKLFLDKWYTQQDLCDVNLVTFAVTAASFTHPFCPPQTDNPCCTFQVLKEFYYPVIGYSSAITKVDSVFSEILYKNCTYYQSFLTPQFIGQIVKLPNGILVRELSESPTGFPEGTTVTKRQIERYNKWQKDNFLTNASQHYNYCNYKPDNTNLVWLRKYYFEWETQKNASVKPDHLTPSVDWYEYHIGLFSPIFLSPFRSSSLEFPRAYQDVSYNPLVDKGVGNVIWFQYNTKADTQLTIPSCKCVIENKPLWAAFYGYSDFVQQEIGPYTDADSVGFICCICPYTKPPMKNPDNPMMGYVFYDSNFGAGKWIDGSGFIPLYWQTRWRPETLFQEGVMRDITMSGPFSYKDDLKNTVLTAKYKFNFRWGGNLIHEQTIRNPCPTDGHPPSGRQPRDVQVVDPISVGPRFVFHSWDWRRGYLSEAALKRIREQPLDYEAYSFIPKRPRIFPPTTGDGVAQRQGKDYSSEEESSLISFEEGQEPKAQQVHKHLLRHLRKQRELGLRLRTLFESLQKTQAGLHVNPLLFNQL

SEQ ID NO: 644 - protein, 169 aa, Alphatorquevirus sp.; identical to SEQ ID NO: 628

SEQ ID NO: 645 - protein, 56 aa, Alphatorquevirus sp.; identical to SEQ ID NO: 629

SEQ ID NO: 646 - DNA, 3514 bp, Alphatorquevirus sp.
ccttactgttgctcttcttcgacggcggcggtcaaggggcaattcgggctcgggactggccgggctatgggcaaggctcttaaagaatgcacttttctcgaatttctaggcaaaagaaaaggaaagtgctactgcgacgtgtgcgaactaaaccgaaagctaggccttcaatgagccaccggcctccagcacacaatgccacgggcattgagcgcctctggttcgacagctgctttaggtcccacggatcttgttgtggttgtggcgattttattaatcatattcttgtactggctaatcgctatggctttcaggccggtccgccggcgccacgtagtcgtcggggtacacccgcactaagggccctgccgcctcccggggaagccaatcccggtgacggcgagcaacaaccatggcgtggcgatggtggtggcagagacgaaggagacggtggccgtggaggagacgccgctggagacgcctacggacaagacgacctcgacgcactgttcgccgccgtcgaagaagagcaacagtaaggagaaggaggtgggggcgcagacgggggcgacgcacatacagcagacgcagggccagacgcagacgcagacccagaaagaaactgctgctttctatatggcagccccagactataaggagatgcactattaggggcttcactagcctaataatatgtgggaactctaaatcagggcgaaactacgccctccacagcgaggactacaccacacaaatagagcccttcgggggcagctttagcaccactacatggagcctaaaggtgctgtttgacgagcaccaaaaaatgctcaacaaatggagctaccccaacacacaattagacctcgccagatacaaaggggtcaccttctacttctacagagacttaaaaacagactatatagtaacctggagtagaaatccaccctttaaactcaacaagtacagctctcccatgctgcacccaggcatgatgatgcagagaaaaaagaaactcatagtacctagcttccaaaccagaccaaagggcaaaaagagatacagggtccgcataagaccccccaacatgtttgaagacaagtggtacacacaagaggacctgtgtcccgttaatcttgtgtcacttgcggtttctgcggccacactgacacatccgttctgcccaccactaacgaacaacccttgcatcaccttccaggtgttgaaagatttctattacaaagccataggcattaacagtagcttaacctcagaatataacgaactagaaacaatattatatgaaaaaaactgcacatactatcaaacaacccaagttttagcacaactaaatccaaactttaaaccagcacaaaacgggggcaaaaaccaagacctaggtactgcagtaccgtggcttaaacaaacaaatgccactactggcttcctaactaaaaacaacccagtatttggcatgtgtagctataaacctacgacaagtaatcttaaattagttagacaatggtactggaaacagcaaaacactaaaaatgacatacatagtacctatggaaaagccacacttgaacaatttgagtaccacataggcttttacagctctatatttttaagcccccaaagagacctacagttccctgcagcataccaagatgtaacttataacccaaactgtgacagggctgtaggaaacatggtgtggtttcagtacagtacaaaacccaccacagaattcgatgacacccagtgtaaatgtgttcttaaagacattccactgtggtcagccttctatggctactctgactttataatccaagagctaagcataagcacagagatatataacataggcctagtctgtgtcatctgcccatacacctttccacctatgtacaacaaaacaaagcccacctgggggtacgtgttctatgacaccacctttggcaatggcaagatgcccaacgggtctggccacatccctgtgtactggcagcagagatggtggcccagaatggccttccaacaacaagtaatgcatgactttacactaacaggccccttcagctataaagatgactatgctaacacaacattcactgcaaagtataagtttgatttcttatggggcggtaatatgatatccgaacaggttatcaagaacccgtgcaaatcagagagtgaacacgcctcctacccccatcgagtcagtcgcgacctacaaattgttgacccagcaaccatgggcccccaatatatattccacacctgggactggagacggggactttttggcagagatgctctcaaaagagtgtcagaaaaaccgacagatgcttttgagtttacaaacccttacaaaagaccaagatatctccctcctacagaccaagaagaagcagagcaagaaaaagacttctattcaccggagcaaagactccggtactcgtcagaagagaaccaggagacgagcccgccgcaaagcgagcagctccgagagcgagtcctctcactccagctcacagagcagcagcgagtcggagagcagctccgattcctgttacagcaagtcctcaaaacgcaagcaggtctccacctaaacccccaattatttcaaaagctgtaaacaaggtttacatgtttgagccccccaggcctgtaattcccatagtaggcagagaggcctgggaagatgaatacaccacctgcaagttttgggacaggccagctagaaccaatcacacagacacccccttctacccctgggctcctaaggcccccccacaattcaaagtgtctttcaaactcggctggaaataaataaacaaggccttaaactgttcacttgtcggtgtctacctcttaaggtcactaagcactccgagcgtcagcgaggagtgcgaccctccaccaaggggcaactccctcgaagtccggcgctacgcgcttcgcgctgcgccggacatctcggaccccccctccacccgaaacgcttgcgcgtttcggaccttcggcgtcggggggggtcgggggctttactaaacagactccgaggtgccattggacactgagggggtgaacagcaacgaaagtgagtggggccagacttcgccatagggcctttatcttcttgccatttgtcagtgtccggggtcgccataggcttcggcctccgttttaggccttccggactaccaaaatggccgattccgtgacgtcatggcggccattttaagtaagctccacccaggacttacgtcagtgtcaaaggtaatcctcggggggaacttacatgaaatggcggtcaactccttccgggtcaaaggtcggcgcctacgtcattcgtcacgtggggaggcgtactgcgcaaacgcggaagtaggccccgccacgtgacggtcacgtgggtgctacgtcacagccgccattttagttcacaaaatggccgacttacttccgcttttttaaaaattaaccgtctgcgcccccacctccttct

SEQ ID NO: 647 - protein, 742 aa, Alphatorquevirus sp.
MAWRWWWQRRRRRWPWRRRRWRRLRTRRPRRTVRRRRRRATVRRRRWGRRRGRRTYSRRRARRRRRPRKKLLLSIWQPQTIRRCTIRGFTSLIICGNSKSGRNYALHSEDYTTQIEPFGGSFSTTTWSLKVLFDEHQKMLNKWSYPNTQLDLARYKGVTFYFYRDLKTDYIVTWSRNPPFKLNKYSSPMLHPGMMMQRKKKLIVPSFQTRPKGKKRYRVRIRPPNMFEDKWYTQEDLCPVNLVSLAVSAATLTHPFCPPLTNNPCITFQVLKDFYYKAIGINSSLTSEYNELETILYEKNCTYYQTTQVLAQLNPNFKPAQNGGKNQDLGTAVPWLKQTNATTGFLTKNNPVFGMCSYKPTTSNLKLVRQWYWKQQNTKNDIHSTYGKATLEQFEYHIGFYSSIFLSPQRDLQFPAAYQDVTYNPNCDRAVGNMVWFQYSTKPTTEFDDTQCKCVLKDIPLWSAFYGYSDFIIQELSISTEIYNIGLVCVICPYTFPPMYNKTKPTWGYVFYDTTFGNGKMPNGSGHIPVYWQQRWWPRMAFQQQVMHDFTLTGPFSYKDDYANTTFTAKYKFDFLWGGNMISEQVIKNPCKSESEHASYPHRVSRDLQIVDPATMGPQYIFHTWDWRRGLFGRDALKRVSEKPTDAFEFTNPYKRPRYLPPTDQEEAEQEKDFYSPEQRLRYSSEENQETSPPQSEQLRERVLSLQLTEQQRVGEQLRFLLQQVLKTQAGLHLNPQLFQKL

SEQ ID NO: 648 - protein, 150 aa, Alphatorquevirus sp.
MHFSRISRQKKRKVLLRRVRTKPKARPSMSHRPPAHNATGIERLWFDSCFRSHGSCCGCGDFINHILVLANRYGFQAGPPAPRSRRGTPALRALPPPGEANPGDGEQQPWRGDGGGRDEGDGGRGGDAAGDAYGQDDLDALFAAVEEEQQ

SEQ ID NO: 649 - protein, 60 aa, Alphatorquevirus sp.
MFEPPRPVIPIVGREAWEDEYTTCKFWDRPARTNHTDTPFYPWAPKAPPQFKVSFKLGWK

SEQ ID NO: 650 - DNA, 3508 bp, Alphatorquevirus sp.
cgggtgccggaggtgagtttacacaccgcagtcaaggggcaattcgggctcgggactggccgggctatgggcaaggctcttaaaaaagctatgtttctcggtcgcgtttacagaaagaaaaggcgcctgccactgtcctcactgcactctccacagaaagctcgcaaactactaagaggtatgtggaggccccctactcaaaatgtatcaggacaggagagaaactggtacgactctgtgttttattcgcatgctgccttttgtggctgtggggactgtgttggccatcttagctatctggctactcacctgggccgaccacctagtgcacaacccccgccgcaacaacagccacctgtcataagacgcctgcctgctctcccggcacccccaaacccctccggtgatcgagcggcatggcctactggtggtggagacgccggagaagacggccctggagaaggaggcgccgctggaggcttcgcagacctcgcagacgaagagctacttaccgccgccgtcgaggccgccgaagagtaagaaagaggagggggaggtggagacggacttacagacgctggcgtagaaagagggggcgacgcaaacacagacctaaaataattcttaaacagtggcaaccaaactttattagaaactgttttattgtgggttatatgccactgatcttttgtggtgagaacactgtaagccaaaactatgccacccactctgatgacctggtggctaagggaccctacgggggcggcatgaccaccacaaaattcactctcagaatcctgtttgacgaacaccttagatggatgaactactggactgtcagtaacgaggacttagatctctgtagatacgtaggagccaggttttacttttacagacaccccacagtagactttatggtacagatacacacacaggccccatttctagacacagaactcacaggccccagcatacatccaggcatgatgatacttaataagagaaagatatttgtgcccagtttaaaaaccaggcctaacagaaagcacaaagtaagagttaaagtaggggccccccgcttgtttgaggacaagtggtacccccagtcagagctctgtgacaccaccctagtggccatctatgcaacggcctgtgacttgcaatttccgttcggctcaccactaactgaaaacccttgcgtcaacttccaggttttaggttccgcttacaaacagcaccttagtatcctaaccacagaaaccacaaaaaacaaaacacactatgatgaagcactatataaaaaaataccatactacaatacattccaaactatagcacacctcagagaaacaggcaaacaagatgcagcaaaccctacatggggtcaatgcttaaatactaccacacttacattctctggcaataatcaaacaacatgtaatgacacctggtactatggcaatgcatacacagacaaaatagcagacctatgtaaaaaaactaaagaaaaatactttaatgctaccaaatctgctttccctgcctatgctacacttgtagatgacttatatgagtaccatggaggtatttactcctctatattcctatctgcaggcagatcctactttgaaactctaggtgcttactctgacattatatataacccctttgtagacaaaggcctaggtaatatagtgtggatagactacctctcaaagtcagacgccgtctggaaaccccctcaaagcaaatgcaccattaaagaccagcccctgtgggcagcctttaatggctacagtgaattttgtgctaagagcacaggagacggagcagtaaacataaactgcagggtagttattaggtgcccctacacaactcccatgttaatagacaacaaagaccccaatcaaggctttgtaccctactcaaaaaactttggcaatgcaaaaatgaaaggcggctcagcagacgtacccctcagctggagggtaaagtggtacgttatgatgtaccaccaacaagaatttatggaagagatagtacagagcggaccgtgggcctacaagggcgacgaaaagagtgctgcacttaacatgaaatatgtctttaagtggaaatggggcggtaaccctatatctggacaggttgtcagaaatccctgcaagacgtccagttccagtcgacagcctcgttcaatacaagcagttgacccgaagagagtcgcgccaccgctcgtattccacagctgggactaccgacgagggtactttggccacgcaagtattaaaagaatgtcagaagaatcagaacctcctacgctttttacaggaccatcaggcaaacgcccccgcaaggacaccaacgtccagcaggcggaagaagaacagcaaaaagaaaactccactttcagactccagcgccagctccagccctggatcaactccagtcaagaaacgcaaagcagccaagaagagatccaggcgcaggggtcgatacaagaacaactcctccagcagctcggagaacagcgagccctccgaaagcagctggagctcgtcgccagacaagtcctcaaagtccaagcaggcacccacctacacccccttttatcttcccaagcataaacaaagtctttatgtttgagcctaaaggccccaaacccatacaaggctatgaggcctggctagatgagtaccagacagcaggtatctgggataggccagtcagaaactaccacacagacacccccttctacccctggatgcctaagcccccagaccaattccgtgtcagctttaaacttggctttcaataaaatttcaaggcagtacactgttcacctgtcggtgtctacctctataagtcactaagcactccgagcgttagcgaggagtgcagtgagtggggccagacttcgccataaggcctttatcttcttgccatttgtccgtgtcgggggtcgccataggcttcgggttccattttagaccttccggactacaaatatggccgttccagtgacgtcacggccgccattttgagtaggtgccgtccaggactgccgttccgggtgaaagggcatcctcggcgggacctacataaaatggtggacaatatcttccgggtcaaaggtcgcgcctacgtcacaagtcacgtgggggggacccgctacgtcatatgcggaagtaggccccgccacgtgactcaccacgtgagtgctacgtcacagccgccattttagttcacaaaatggccgacttccttcctcttttttaaaaataacggcccagcggcggcgcgcgcgctgcgcgcgcgcgccgggggctgccgccccccccgaagtccgtcactaaccacgtgactcccacaggtcaaccacagtgtatgtcgtgcacttcctgggaggggtctacgttctaatataagtaagtgtacttccgaatggctgagttttccacgcccgtccgcagcgagaacaccacggaggggagtccgcgcgtcccgaggg

SEQ ID NO: 651 - protein, 735 aa, Alphatorquevirus sp.; identical to SEQ ID NO: 264

SEQ ID NO: 652 - protein, 157 aa, Alphatorquevirus sp.; identical to SEQ ID NO: 265

SEQ ID NO: 653 - protein, 127 aa, Alphatorquevirus sp.; identical to SEQ ID NO: 266

SEQ ID NO: 654 - DNA, 3507 bp, Alphatorquevirus sp.
cccccgcgcatgcgcggggccccccccgcagtcaaggggcaattcgggctcgggactggccgggctatgggcaaggctctcaaaaaagcatgtttatcggtaaaatttacagaaagaaaaggaaagtgccactgtacggcctgccagatccaaagaagaaactacctactagtatgagccactggagcagacccgtccaccatgcaacggggatcgaacacctctggtaccagtctgttattaacagccattctgctagctgcggttgtggcgatcctgtacgccactttacttatcttgctgagaggtatggttttgccccaactccccgcgccccgccagtagccccgacgcccaccatccgtagagccaggcctgcgcctgccgctccggagccccgtgccctaccatggcatggggatggtggagaagaaggcgcaagtggtggtggagacgccggttcgcccgaggcagagttcgcagacgacggattagacgccctcgtcgccgcactcgacgaagaacagtaaggagacgcagacaatggaggagggggcgacccagacgcagactatttaagcgaaagagacgctttaagagacgcagacgaaaacctaagataaaaataacccagtggcagcctagtaaagtaaagagatgctttatgataggctactttccagcactaatatgtgggcagggaaggtggtcagaaaactttaccagccacatagaagacaagacccctaagggacccttcggaggagggcacagcacagccaggctatctttaaaagtactgtacgaggaaaaccagaagcatcacaacttctggactgccagcaacaaagaactagagctagccaggttctttggcagtacctggacactgtacagacacgaagaggtagactacatatgcacctttaacagaaaaagccccctgggaggcaacctgctaacagcacccagtctgcacccgggggccgccatgctatccaaacataaaatactagtacccagttttaaaaccagaccgggcggaaaacccactgtaaaatttagaataagaccaccaacaacactaatagacaaatggtactttcaaaaagatatttgtgacactacactgctgaacattaactttgttgcatgtgacttgcggtttccgttctgctcaccacaaactgacaatgtttgtgtaacatttcaagtcctttccgcggtttataacgacttcctctctataaccaacagcaacttacaagcaacaaattgggaaagtgaatacacaaagtttttaaacaaagcatttccaacagacagaagcattaataaattaaacacatttacaacagaaggggcctttagtcacccaaaagtagaaaagtttaaaccagtaattccactacaccaagataaatactttcaagacaaagacggtcaatggggagacccaatacacattacagacagtcaaagtagagaaaatattatacagaaaattgttaagaatgcaagaaactacctaaaaaaatacacagatgagtttaaacaatttccaaacattgcccagttccaccacggattttttacacagtggacaggcatatacagtgctgcttttttaaactaccatagaatatctccagaagtaccaggcctatacacagatatcatctacaacccacttgtagacaaaggcataggaaatcacatatggatagactacctcagcaaaccagaccctaacttagatccagtaaaaagtaaatgccacatagcagacctgcctatgtggatggcaacctttggcctagtagactggtgcaaaaaagacacaggcaactggggcatacccgcgtgggccagagtactaatgatatgtccctatacgtttccacctatgtatgaccaaagcaacccaaccagaggatttatacccataggttacaacttctcacaaggactaatgccagacggcagtaaatacattccaatgcaactgagagctaagtggtaccccaacctgttaaaccaacaagcagtacttgaagacataagtgagtcaggaccctttgcatttagagaaaaaaaacctagcgccagcataacagtaaaatacaaatttagatggcactttgggggcaaccctgtgtccgaacaggttattgcagacccatgccaacaaccaacctttgaaatgcccggaaccggttcgctgcctcgcagactacaagtcacggacccgaaactcctcgggccacactacacattccacagctgggactggagacgtgactactttaacagaaagactcttaagagaatgtcagaacaacaagaaacttctgagtttttattcccaggcccaaaaaaacccagagtggatctcggggtcgtccaagctgtcgaaaaagtctcttccccgaggaaaagagaacagaaaccgtgggaagacagcgagcagcaatcagagacagaagccctctcggaggaagaagaagagggctcgatacaccagcagctccagcagcagctgcagcagcaaaaacagctcaggagaggaatcaactgcctcttcgagcagctagtaaaaacacagcagggagtacacctagatccttccctcttgtaggccccagacagtggctgtttccagaaagaaagccagcccctgcccctagctcgggagactgggccacagagtatctagcagctagagtatttgacagacccccaagaagcaaccttaaagatacaccctactacccctacattaaaaaccagtacaacgtgtactttgatctaacctttgaataaagtgcagtttcaaatttgcaaggccgtgggagtttcactggtcggtgtctacctctaaaggtcactaagcactccgagcgttagcgaggagtgcgacccttccccctgactcaacttcttcggagccgcgcgctacgccttcggctgcgcgcggcacctcagacccccgctcgtgctgacacgctcgcgcgtgtcagaccacttcgggctcgcgggggtcgggaaatttgctaaacagactccgagttgccattggacactgtagctgtgaatcagtaacgaaagtgagtggggccagacttcgccataaggcctctatcttcttgccatttgtccgtgtcgggggttgccataggcttcgggctcggttttaggccttccggactacaaaatgcgccatttcagtgacgtcacgaccgccatcttaagtagttgaggcggacggtggcgtgagttcaaaggtcaccatcagccacacctactcaaaatggaggtcaaattcttccaggtcaaaggtcaccggcgccatcttaggtcacgtgaccttctacgtcacggccaccattttagtttacaaaatggccgacttccttcctctttttcaaaaaaaagcggaagtgccgccgcggcggcggggggcggcgcgctgcgcgcgccgcccagtagggggcgccatgcgccccc

SEQ ID NO: 655 - protein, 742 aa, Alphatorquevirus sp.
MAWGWWRRRRKWWWRRRFARGRVRRRRIRRPRRRTRRRTVRRRRQWRRGRPRRRLFKRKRRFKRRRRKPKIKITQWQPSKVKRCFMIGYFPALICGQGRWSENFTSHIEDKTPKGPFGGGHSTARLSLKVLYEENQKHHNFWTASNKELELARFFGSTWTLYRHEEVDYICTFNRKSPLGGNLLTAPSLHPGAAMLSKHKILVPSFKTRPGGKPTVKFRIRPPTTLIDKWYFQKDICDTTLLNINFVACDLRFPFCSPQTDNVCVTFQVLSAVYNDFLSITNSNLQATNWESEYTKFLNKAFPTDRSINKLNTFTTEGAFSHPKVEKFKPVIPLHQDKYFQDKDGQWGDPIHITDSQSRENIIQKIVKNARNYLKKYTDEFKQFPNIAQFHHGFFTQWTGIYSAAFLNYHRISPEVPGLYTDIIYNPLVDKGIGNHIWIDYLSKPDPNLDPVKSKCHIADLPMWMATFGLVDWCKKDTGNWGIPAWARVLMICPYTFPPMYDQSNPTRGFIPIGYNFSQGLMPDGSKYIPMQLRAKWYPNLLNQQAVLEDISESGPFAFREKKPSASITVKYKFRWHFGGNPVSEQVIADPCQQPTFEMPGTGSLPRRLQVTDPKLLGPHYTFHSWDWRRDYFNRKTLKRMSEQQETSEFLFPGPKKPRVDLGVVQAVEKVSSPRKREQKPWEDSEQQSETEALSEEEEEGSIHQQLQQQLQQQKQLRRGINCLFEQLVKTQQGVHLDPSLL

SEQ ID NO: 656 - protein, 146 aa, Alphatorquevirus sp.; identical to SEQ ID NO: 399

SEQ ID NO: 657 - protein, 82 aa, Alphatorquevirus sp.; identical to SEQ ID NO: 400

SEQ ID NO: 658 - DNA, 3502 bp, Alphatorquevirus sp.
ctgggcaaggctcttaaaaaagctatgtttctacgcagagctcaccagaaaaggatactgctactgcaaattgtgccagctacaccgcaggcacctgccatgagctttcgcgcacccaccattcaaggtggagtccgagaccagcaatggttcgaggcctgtattcgatcacacgccgctttctgtggctgtggcgatcccgtgcttcattttaataacattgctgctcgctttcactatctgcctgctacctcctcgcctctggaccctaccggaggagcgccgccgcgccgcccgcagctacgccgccttgcagcgctcccggcggcgccccccagcacctctgagagccagccatggcgtggtggtggtggagacgatggcgccggtggcccagacgccgctggaggacccgtcgccgacgccgagtacgaaccagaagacctagacgacctgttcgccgctatcgaagcagatacacagtaaggaggcgaaggcggagagggtggcgagggcgacgtaggcgcagactgtacagacgcagatacactataaggagaaaaagaaagaaactcatactgaaacagtggcagcccgccaatgttagaaaatgcaaaataaggggcctgtttccaatagttatctgtggacacggcaagagtgccaataactatgccctacactcggacgacgtactaccaatgagacaggcttttggaggggctctaagcactgtatcttttagcctaaaagtactgtatgatcagtatttaagacacctgaacagatggagcacctcaaacgatgtgctagaccttgccaggtacctaggatgcaccttttggttttacagagacaaaaaaactgactacttagtgcagtatgacatctctgctccctacaagctagacaaagacagcggaccgtcctaccatccaggagtactcatgcaagccaaacacaaagtactagtgcccagttttgacacgcaccccaaaggaaaagctaaagtaaaaattagaattaagccccccaaactttttatagataagtggtactctcaagaggatctgtgtaccgttaatcttgtaacatttgtggtcagcctagcttccttctcacatccgttctgcccaccactaacgaacaacccttgtgtaaccttccaagtgttgaacaacttctacaattccgttataggttcctcaattaatgttgcagacactacagtaaactcagtcttcaataactttttatataacaaaggagccttttaccaacaagtactagtagactcttacattaaagaaattaaaacaaatcctgatggctctcctgtagttgcaggccctaacgatagaccctcaacaagcgaaatgagtgcttataacgaatgggtaaaatctaaatttaaagtaccaggaacatctgttcactacaacttttgcacatacaaacctgacagtgccaaattaaatacacttagacaatactactttcattgggaaactgcacagtccacaaaccataaatttaatgtagaacacgtaccacacgcgggcacaaaacctacaaaagactggtgggagtatagaacaggcctattttcacctatatttcttagtccatacagaaccagtcccatagacagctggttgctggcatacagagacgtgtcctacaatccactaaatgacaagggagtaggcaaccgagtatggatgcagagtctagtaaaaccagacacccagttcacactgccctcatgtgtatttgtactagaagacaaacccctgtggtgctgtttctatggctatactgactttataaagagtgtcagagagggccaagacatagactttgaaaacattatttgcattcagtgtccttacacagagcctcctctatatgaaaagcacaaccccaacatgggcttcgtagtatatgacagcaactttggcaatggcaaatggctagacggaaccgggttcgtcccggtagaataccagtgccgctggcggccctgcatagctttccagcaacaggtactaacagacattaccatgagcgggcccttcagctacaaagacgatgttaaaaacacctgcatacaggccaaatacagatttgactttaaatggggcggcaatatgctttatcagcagaccatcagaaacccatgtaaagacggacaagctaccgattcccatagacagcctagagacgtacaagtcactgacccgcttaccatgggaccccgatacgctttccaccaatgggactggcgacgtgggtggcttagtgacaaagctctcaaaagaatgctccagaaaccgctcgattttgaactgtatccaatcaatccaaagagacctagactattccctcccacagaagcaggagaaggagaggtcccaaaagaaagctcattttcagaggaagaaagcgagccgtcctcgcaagaagagacgaggccggagaggctccagctcaagctccgacagcagctccgagagcagcgagagctccgagtccacctcaagcacctcttccagcagctcctcaagacacaagcggggctccacctcaacccgctcttattcaaccagcaataaacaaagttcttctgtttccagaaatgggtccaaagcccgctcctactagtggagactgggaaacagaataccaggcctgtaaattctgggacagacctcccagaaaatttctcaccgatacacccttttatccctggatgcctccggcacccccaaaattctctgttagtttcaaactaggcttcaaaccctaaataaacaaggccatacactgttcacttgtcggtgtctacctctataagtcactaagcactccgagcgaagcgaggagtgcgacccccctacccggtagcaacttcttcggagtccggcgctacgccttcggctgcgccggacacctcagaccccccctccacccgaaacgcttgcgcgtttcggaccttcggcgtcgggggggtcgggggctttattaaacagactccgagttgccattggacactgtagctgtgaatcagtaacgaaagtgagtggggccagacttcgccataaggcctttatcttcttgccatttgtccgtctagagggtcgccataggcttcgggctccattttcaggccttccggactacaaaaatggccgttccgtgacgtcacagccgccattttgagtcagcgcgggggagagtaacgtatagttcaaaggtcactatcttccgggctgtcaccaaatggcggacaacttcttccgggtcaaaggtcatgcctacgtcataagtcacgtgacagggaagagttatcatatgcggaagtaatcctcacccacgtgacttgacacgtggtgcatacgtcacagccgccattttgttttacaaaatggccgacttccttcctcttttttcaaaatggcgtgccggcggcggcgcgcgcgctacgcgcgcgcgccggggg

SEQ ID NO: 659 - protein, 752 aa, Alphatorquevirus sp.
MAWWWWRRWRRWPRRRWRTRRRRRVRTRRPRRPVRRYRSRYTVRRRRRRGWRGRRRRRLYRRRYTIRRKRKKLILKQWQPANVRKCKIRGLFPIVICGHGKSANNYALHSDDVLPMRQAFGGALSTVSFSLKVLYDQYLRHLNRWSTSNDVLDLARYLGCTFWFYRDKKTDYLVQYDISAPYKLDKDSGPSYHPGVLMQAKHKVLVPSFDTHPKGKAKVKIRIKPPKLFIDKWYSQEDLCTVNLVTFVVSLASFSHPFCPPLTNNPCVTFQVLNNFYNSVIGSSINVADTTVNSVFNNFLYNKGAFYQQVLVDSYIKEIKTNPDGSPVVAGPNDRPSTSEMSAYNEWVKSKFKVPGTSVHYNFCTYKPDSAKLNTLRQYYFHWETAQSTNHKFNVEHVPHAGTKPTKDWWEYRTGLFSPIFLSPYRTSPIDSWLLAYRDVSYNPLNDKGVGNRVWMQSLVKPDTQFTLPSCVFVLEDKPLWCCFYGYTDFIKSVREGQDIDFENIICIQCPYTEPPLYEKHNPNMGFVVYDSNFGNGKWLDGTGFVPVEYQCRWRPCIAFQQQVLTDITMSGPFSYKDDVKNTCIQAKYRFDFKWGGNMLYQQTIRNPCKDGQATDSHRQPRDVQVTDPLTMGPRYAFHQWDWRRGWLSDKALKRMLQKPLDFELYPINPKRPRLFPPTEAGEGEVPKESSFSEEESEPSSQEETRPERLQLKLRQQLREQRELRVHLKHLFQQLLKTQAGLHLNPLLFNQQ

SEQ ID NO: 660 - protein, 161 aa, Alphatorquevirus sp.; identical to SEQ ID NO: 503

SEQ ID NO: 661 - protein, 60 aa, Alphatorquevirus sp.; identical to SEQ ID NO: 504

SEQ ID NO: 662 - DNA, 3498 bp, Alphatorquevirus sp.
ggacccccgctcgtgctgacacgctcgcgcgtgtcagaccacttcgggctcgcgggggtcgggaattttgctaaacagactccgagttgccattggacactgtagctgtgaatcagtaacgaaagtgagtggggccagacttcgccataaggcctctatcttcttgccattggtccgtgtcgggggttgccgtaggcttcgggctcggttttaggccttccggactacaaaaaccgccattttagtgacgtcacggcagccattttaagtaagcatggcgggcggtgacgtataagttcaaaggtcaccgcgcttccgtgtttacacaaaatggtggccaacttcttccgggtcaaaggttggcaactacgtgataagtcacgtgggatggctgcgtcacaaacacggaagtggctgttccacgtgacttgtcacgtgactgctacgtcacagccgccattttagttcacaaaatggcggacttccttcctcttttttaaaaataacggccctgcggcggcgcgcgcgctgcgcgcgtgggcaaggctcttaaaaaagccatgtttctcggtaaactttacagaaagaaaagggcactgtcactgcgcggcctgccaactccaaaggcgaaactacctgcaatgagttggagtcccccgctgcacaaccccaatgggatcgagagaaacctgtacgaggcattctttcgcatgcatgctgcagcttgtggttgcggcgatcttgttggccatcttactgtactggctggtcggtatggtgctcctcctcgtcccccggcccccggggctcccagaccacaaataagacgccagctggcccttcccgcgccccccgctgatccacagcaggccaacccacaatggcctggtggggacggtggagaagatggcgctggaggccccgccgctggcggcgccgtcgcagacgccgagtaccaagaagacgagctcaacgccctgttcgacgccgtcgaacaagaagagtaaggaggaggcgatgggggaggcggaggtggagacgggggtacaggcgcagactgagactgagacgcagacgaaagcgaaagcgcagactgatactgactcagtggcaccccgctaaagtaaggaggtgcagaatatcgggggtcctgcccatgatactatgcggggcgggcaggagtagctttaactacggactgcacagcgatgactttactaaacagaaaccaaacaaccagaacccgcacggcgggggcatgagcactgtaacttttaacctaaaagtgctctttgaccagtacgaaaggttcatgaacaagtggtcgtaccccaacgaccagctagacctggccagatacaagggctgtaaattcaccttctacagacacccagaagtagactttttagctcagtatgacaacgttccccctatgaaaatggacgaactgaccgctcccaacactcaccccgcactgctgctacagagcaaacacagggtaaagatatacagctggaaaaccaggccatttggccctaaaaaagtaacagtaaaagtagggcccccaaaattgtttgaagacaagtggtacagccagtctgacttgtgcaaggtatcccttgtcagttggcggttaaccgcatgtgactttaggtttccgttctgctcaccacaaactgacaacccttgtgtaaccttccaggtgctaggagaacagtattacgaagtctttggaacttccatattggacgttcctacaaaccataccacagaaatatccacatttgaaaattggctatataaacaatgcacccactatcaaacatttgccacagacagcagattagccccccaaaaaaaagcaaactcagacacgaaccaaacatatagccccagtggcaatacagaaactgcaacatggacacaaacaaactactcctcatttaaaccaggcaacagagacagcaactatggttactgcacttacacagtaaatgataacacattcgaagccattaaaaagtacagaaatcaaagattccaatggctaacaaaatacactggagaaaatcacataaacagcacatttgccaaaggcaaatatgaacaatacgagtaccacctagggtggtactctaacatattcataggcaaccttagacacaacttagcattccgcccagcatacatagatgtcacatacaaccccacagtagacaaaggcaaaggcaacattgtgtggtttcaatacctaacaaaacccaccacacagctaataagatcacaggcaaaatgcctaatagaaaacctgccactatactgtgccttctttggttacgaagactacatacagagaacactaggtccttaccaagacatagaaacagtaggtgttatatgctttataagtccttacacagaacctccctgtattagaaaagaagagggcaaaaaggactggggcttcgtattttatgacaccaactttggaaacggaaagactccagagggcataggccaagtacacccttactggatgcagaggtggagagtcatggcccagtttcaaaaagaaactcaaaacagaatcgccagaagcggaccgtttagctacagagacgagataccctcagccacactgactgccaactacaagttctactttaactgggggggcgactctatatttccacagattattaagaacccctgcccagacaccgggctgcgacccagtggcaatagagagcctcgctcagtacaagttgttagcccgctcatcatgggaccagaattcatattccaccgctgggactggcgacgggggttctataatccaaaagctctcaaaagaatgcttgaaaaatcagataatgatgcagagtcttcaacaggcccaaaagtgcctcggtggtttccagcactccacgaccaagagcaagaaagcgacttcgattcccaggaaacaaggtcgcagtcctcgcaagaagaagccgctcaagaagccctccaagacgtccaagagacgtcggtacagcagcacctcctcaagcagttccgagagcagcgggtactcggacagcaactccgcctcctcatgctccaactcaccaagacgcaaagcaatctccacataaatccccgcgtccttggccttgcataaataaagtgtacatgttttccccacaaaaacccaagcgcatacacgggtaccacgggtgggaaacagagtatcaggcctgcaaagcctttaacaggccccctagaaacttcctgtcagacaaacccatctatccctggctcccccgccctcaacctgaattcaaagtcagttttaagctcggttttcaataaacaaggccgtgggaatttcacttgtcggtgtctacctcttaaggtcactaagcactccgagcgtcagcgaggagtgcgacccttccccctggtgcaacgccctcggcggccgcgcgctacgccttcggctgcgcgcggcacctc

SEQ ID NO: 663 - protein, 760 aa, Alphatorquevirus sp.
MAWWGRWRRWRWRPRRWRRRRRRRVPRRRAQRPVRRRRTRRVRRRRWGRRRWRRGYRRRLRLRRRRKRKRRLILTQWHPAKVRRCRISGVLPMILCGAGRSSFNYGLHSDDFTKQKPNNQNPHGGGMSTVTFNLKVLFDQYERFMNKWSYPNDQLDLARYKGCKFTFYRHPEVDFLAQYDNVPPMKMDELTAPNTHPALLLQSKHRVKIYSWKTRPFGPKKVTVKVGPPKLFEDKWYSQSDLCKVSLVSWRLTACDFRFPFCSPQTDNPCVTFQVLGEQYYEVFGTSILDVPTNHTTEISTFENWLYKQCTHYQTFATDSRLAPQKKANSDTNQTYSPSGNTETATWTQTNYSSFKPGNRDSNYGYCTYTVNDNTFEAIKKYRNQRFQWLTKYTGENHINSTFAKGKYEQYEYHLGWYSNIFIGNLRHNLAFRPAYIDVTYNPTVDKGKGNIVWFQYLTKPTTQLIRSQAKCLIENLPLYCAFFGYEDYIQRTLGPYQDIETVGVICFISPYTEPPCIRKEEGKKDWGFVFYDTNFGNGKTPEGIGQVHPYWMQRWRVMAQFQKETQNRIARSGPFSYRDEIPSATLTANYKFYFNWGGDSIFPQIIKNPCPDTGLRPSGNREPRSVQVVSPLIMGPEFIFHRWDWRRGFYNPKALKRMLEKSDNDAESSTGPKVPRWFPALHDQEQESDFDSQETRSQSSQEEAAQEALQDVQETSVQQHLLKQFREQRVLGQQLRLLMLQLTKTQSNLHINPRVLGLA

SEQ ID NO: 664 - protein, 148 aa, Alphatorquevirus sp.
MFLGKLYRKKRALSLRGLPTPKAKLPAMSWSPPLHNPNGIERNLYEAFFRMHAAACGCGDLVGHLTVLAGRYGAPPRPPAPGAPRPQIRRQLALPAPPADPQQANPQWPGGDGGEDGAGGPAAGGAVADAEYQEDELNALFDAVEQEE

SEQ ID NO: 665 - protein, 59 aa, Alphatorquevirus sp.
MFSPQKPKRIHGYHGWETEYQACKAFNRPPRNFLSDKPIYPWLPRPQPEFKVSFKLGFQ

SEQ ID NO: 666 - DNA, 3498 bp, Alphatorquevirus sp.
ccttcctcttttttaaaaataaccaccgcagtcaaggggcaattcgggctcgggactggccgggctatgggcaaggcttttaaaaaagctacccccttaactatgtttctcggcagagtttaccgccgcaaaaaaaggaaagtgcttctgtccctggtgcatactccacagaaaacaccttcctccatgaaccgctggttacccccggcacacgatgcccgcggaattgagaggcagtggtatgactgtgtttggcgcagtcacgctgcttgctgtggctgtggtgattttattagtcatattaatgatctggcgcatcgttttaaacgtcctccgaattccagaccacctgctactccccagccgccagctgtgagagccctcccggcactgccggcccctgagccatggtctggcgcagggggcgacgctggcgccggtggagatggcgccgcaagccgcggtggaggagatggagacgctggagacgtcgcagacgaagacctgctagacgccgtcgacctcgcagagtaaggagacgcaggggagggtggcggcgctcctacagacggtggaagagacgcagggggcgacgcagacataaaaagaaacttatactgactcagtggcaacccgcggttgtcaaaaaatgcagaatagtgggctacgaccccataataatatgtggactgaacagaaccagccacaactccacaactcacgcagaggactacactacaggcaaccaggcctttggggggggactgtgcaccaccaaatacactctaagaatactgttccaagagtacatggcccaccacaactactggacggccagcaacagagacctggagctggccaggtacctgggggcttctattatattttttaaacaccccacagtagactttgtagccagagtcagaaccatgcctccctttaacaacactgacatcacagccgcatcccttcacccgggaatgcttatgctagctaagaaaaaaataattattcccagtctgaaaaccagaccaagcaaaaaacactatgtaaaaataaagataggggcccccaagctatttgaagataagtggtactctcagagagacctctgtgacacaactcttgtggttatagaggcaacggttgcagacttgcaatatccgttcgactcaccactaacgaacagcatctgttgcaacttccaggttcttaacagcaactatgacaacgccctgagcacccttataggaactcagggagacaaagacagagatcaatgctataaatttctgttaaatacaatcacctactataacacctctcaagtactagcacagctaaacaagttcttacctgcctccaacacagttaacctctctgaattaaatgccgcaaattccattaacccatccaaccaaacacaaaatacatacacatccacaaatatacagatacacaacaatacactgtatggaggagcagcatactttagcacatcaggacaaaataatccaccaaagaaaatgaaagaggccaacaaagcatacactaaagcagctataaaaattctaggcaattggaattttactagcatgaactcatcctcagaatcggagttatcagagctaaactactttgactattacacagacatgttttccagcatatttttagccagcggcaggtcaaactgggaggtaaaaggcagctacacagacataacatacaaccccctagtagacaagggagagggcaacatgatctggatagactggatcaccaaaggtgacaccatctactctgaaaataaaagcaaatgcttgctcaaagacctgcccatgtgggccctgtgctatggctacgcagactatgtacttaagtgcacaggagtctccagcataaaaaacgaggccagaatagtcatgaggtgtccctacacgtacccccaactaataaaacacacaaaccccaactttggcttcgtagtgtacagtgacaactttggacgcggacgcatgccggggggcgaccctgtaccgagcaccagaaacagagtgcactggtacatcaccataacccaccagactgaagtgctagagtgcatctcccagaccggaccgtttgcctaccacagcgacgaacgcaaagcagtactgactataaaatacaacttcagatggaaatggggaggcaaccctgtgttccaacagattcttagagacccctgcacgggatcctccggctccggtccccgtagagtgcctcgctcaatacaagtcgatgacccgaagcaccagacaccagagtacatgtggcacgcgtgggacttcagacgtggactctttagccagaaaggtattaagagagtgtcagaacaaccaacagatgttgaccttcctacaggcaggggcaagagacccaagagagacacagacggcccgcaagagcaaggccaagaagaaggctcgtgttccatcagacgagtcctccagcagtggctccactccagtcaggagcagagccaagaaagcgaagaaaaagcagccccgacgacgctctcgcaagagctacaaaaacaactcaagcagcagcagctcatgggaaagcagctccgagagctcagtctccaactcgcccaagtccaagcggggggacaccttcacccccttttacaatgccatgcataaataaagtatacatgtttccccccatgacctttactccctccagcagagactggaaagaggagtacgaggcctgcagagtctgggacagacctcccagaaacgacctaagaaggccccctttctatccctggatgcctcctacgcacaatgtaagctttaagctctccttcaaataaatgttggccgtgggagtttcacttgtcggtgtctacctctataagtcactaagcactccgagcgtaagcgaggagtgcgaccctctgccctggtgcaacgccctcggcggccgcgcgctacgccttcggctgcgcgcggcacctcggacccccgctcgtgctgacacgcttgcgcgtgtcagaccacttcgggctcgcgggggtcgggaattttgctaaacagactccgagttgccattggacactgtagctgtgaatcagtaacgaaagtgagtggggccagacttcgccataaggcctttatcttcttgccattggatagtgtagggggtcgccataggcttcggccttggttttaggccttccggactacaaaaatggcggattccgtgacgtcatggccgccattttaagtaaggcggaagcagctgtcactataacaaaatggcggcgacagccttccgctttgcacaaaatggcggtgtttatcttccgggtcaaaggtcacgcctacgtcataagtcacgtggggggggacccgctgagcatacgcggaagtaggccccgccacgtgactaaccacgtgggtgctgcgtcacagccgccattttgaatcacaaaatggccgactt

SEQ ID NO: 667 - protein, 760 aa, Alphatorquevirus sp.
MVWRRGRRWRRWRWRRKPRWRRWRRWRRRRRRPARRRRPRRVRRRRGGWRRSYRRWKRRRGRRRHKKKLILTQWQPAVVKKCRIVGYDPIIICGLNRTSHNSTTHAEDYTTGNQAFGGGLCTTKYTLRILFQEYMAHHNYWTASNRDLELARYLGASIIFFKHPTVDFVARVRTMPPFNNTDITAASLHPGMLMLAKKKIIIPSLKTRPSKKHYVKIKIGAPKLFEDKWYSQRDLCDTTLVVIEATVADLQYPFDSPLTNSICCNFQVLNSNYDNALSTLIGTQGDKDRDQCYKFLLNTITYYNTSQVLAQLNKFLPASNTVNLSELNAANSINPSNQTQNTYTSTNIQIHNNTLYGGAAYFSTSGQNNPPKKMKEANKAYTKAAIKILGNWNFTSMNSSSESELSELNYFDYYTDMFSSIFLASGRSNWEVKGSYTDITYNPLVDKGEGNMIWIDWITKGDTIYSENKSKCLLKDLPMWALCYGYADYVLKCTGVSSIKNEARIVMRCPYTYPQLIKHTNPNFGFVVYSDNFGRGRMPGGDPVPSTRNRVHWYITITHQTEVLECISQTGPFAYHSDERKAVLTIKYNFRWKWGGNPVFQQILRDPCTGSSGSGPRRVPRSIQVDDPKHQTPEYMWHAWDFRRGLFSQKGIKRVSEQPTDVDLPTGRGKRPKRDTDGPQEQGQEEGSCSIRRVLQQWLHSSQEQSQESEEKAAPTTLSQELQKQLKQQQLMGKQLRELSLQLAQVQAGGHLHPLLQCHA

SEQ ID NO: 668 - protein, 155 aa, Alphatorquevirus sp.
MGKAFKKATPLTMFLGRVYRRKKRKVLLSLVHTPQKTPSSMNRWLPPAHDARGIERQWYDCVWRSHAACCGCGDFISHINDLAHRFKRPPNSRPPATPQPPAVRALPALPAPEPWSGAGGDAGAGGDGAASRGGGDGDAGDVADEDLLDAVDLAE

SEQ ID NO: 669 - protein, 62 aa, Alphatorquevirus sp.; identical to SEQ ID NO: 593

SEQ ID NO: 670 - DNA, 3497 bp, Alphatorquevirus sp.
gcgcgcgcgcaggtgagtttacacaccgcagtcaaggggcaattcgggctcgggactggccgggccccgggcaaggctcttaaaaaatgcgctttcgcagggttgccgagaaaaggaaagtgcttctgcaaactgtgcgagctacacagacgtctaggcagcttctaggtatgtggcagcctcccgtgcacaatgtccccggcatcgagagaaactggtacgagagctgtttcagatcccatgctgctgtttgtggttgtggcgactttattggccatcttaattatctggcaactactctgggtcgccctccgcgtcctcagcccccaggcggaccccgcacgccgcagataagaaacctgccagcgctcccggcgcccgagggcgagcccggtgacagagcgccatggcgtggggcttctggggccgacgccggcggtggagacggtggagagcgcggcgcagacggtggagaccccgcagacgtaggagacgacgccctgctcgccgctttcgagctcgtcgaagagtaaggagacgcggggggcggtggcgcagacgctacagaaaatggcgacggggcagacgcagacggactcacagaaaaaagataatcataaaacagtggcaaccaaactttattagacgctgctacattatagggtacctaccgctaatattctgtggcgaaaacacaaccgcccagaactatgccactcactcagacgatatgataagcaaaggaccgtacggggggggcatgactactacaaaatttactctgagaatactgtacgacgagtttaccaggtttatgaacttttggactgtcagtaacgaagacctagacctgtgtagatacgtgggctgcaaactcatattttttaaacatcccacggtagactttatagtacagataaacactcagcctcctttcttagacacgtccctcaccgcggccagcatacacccgggcatcatgatgctcagcaaaagacacatactaataccctctctaaagacccggcccagcagaaaacacagggtggtcgtcagggtgggcgccccaagactttttcaagacaagtggtacccccagtcagacctgtgtgacacagttctgctttccatattcgcaaccgcctgtgacttgcaatatccgttcggctcaccactaactgacaacccttgcgtcaacttccagattttggggccccagtacaaaaaacaccttagtattagctccactatggatactactaacgaaacacattataaaaacaacttatttaaccaaactgcactatacaacacctttcaaacaatagctcagcttaaagagacaggacaaactacaagtataacaccaacttggaatgcggtacaaaatactattgcacttaattctttaggtaataatgcaactactagcaaagacacttggtacaaaggaaacacatacacaaaagatatagaaaaattagcagagaaaacaagagaaagattcacagctgcaacaaaagcagcactaccaaactaccccacaataatgtccacaaacttatatgaataccactcaggaatatactccagcatatttctatcagctggcaggagctactttgaaaccaccggggcctactctgacattatatacaaccctttcacagacaaaggcacaggcaacataatttggatagactaccttacaaaagaagacaccatttttgtaaaaaacaaaagcaaatgcgagataatggacatgcccctgtgggcggcctgcacaggatacacagagttctgtgcaaagtacacaggcgactctgccattatctacaatgccagaatactaataagatgcccatacactgaacccatgctaatagaccactcagaccctaacaaaggcttcgtaccctactcatttaactttggcaacggaaagatgccgggaggcagctccaacgtgcccataagaatgagagccaagtggtacgtgaacatattccaccaaaaagaagtcttggagagcatagtacaatccggaccgtttgggtacaagggcgacataaaatcagctgtactgtctatgaaatacagatttcactggaagtggggcggaaaccctatatccaaacaggtcgtcaggaatccctgctccaactccagctcctccgcggcccatagaggacctcgcagcgtacaagcggttgacccgaaatacaataccccagacgtcacgtggcactcgtgggacatcagacgaggactctttggcaaagcaggtattaaaagaatgcagcaggaatcagatgctttttacattcctgcaggaccactcaagaggcctcggagagacacgaacaccgaaaacccagaagggcaaaacgaaagctcaggtttcagagtccagcagcgactcccgtgggtccactccagccaagagacgcaaagctccgaagaagagacgcaggcgcaggggtcggtacaagaccaactactcctccagctccgagagcagcgagtactccgactccagctccagcaactcgcaacccaagtcctcaaagtccaagcagggcacggcctacaccccctattatcttcccaagcataaacaaagcctttatgtttgagccccagggtcctaaacccatacaaggctacaacgattggctagaggagtacacttgctgtaaattctgggacagacccccaagaaaactacacacagatacaccattctacccctgggcaccaaaacccgaaaaccaagtcaaggtaacctttaaactcaactttaaataaaaattctaggccgtgggagtttcacttgtcggtgtctgcttcttaaggtcgccaagcactccgagcgctagcgaggagtgcgaccccccctccggtagcaacgccttcggagccgcgcgctacgccttcggctgcgcgcggcacctcagaccccccctccacccgaaacgcttgcgcgtttcggaccttcggcgtcggggggggtcgggagctttattaaacagactccgagttgccattggacactgcagctgtgaatcagtaacgaaagtgagtggggccagacttcgccatagggcctttatcttctcgccattggatagtgtcaggggtcgccgtaggcttcggcctggtttttaggccttccgaactacaaaaatggcggatttagtgacgtcacggccgccattttaagtaaggcggaagcagctccactttttcacaaaatggcggcggagcacttccggcttgcccaaaatggcgggcaagctcttccgggtcaaagatcaccaactacgtcacaagtcacctgactggggagaagtcacaacccggaagttctcctcggtcacgtgactgatcacgtggttgctacgtcatcggcgccatcttgtgtctcaaaatggcgggcaacttccgcttttttaaaaaaaggcgcgaaaaaacggcggcggcggcgcgcgcgctgc

SEQ ID NO: 671 - protein, 736 aa, Alphatorquevirus sp.; identical to SEQ ID NO: 268

SEQ ID NO: 672 - protein, 148 aa, Alphatorquevirus sp.; identical to SEQ ID NO: 269

SEQ ID NO: 673 - protein, 59 aa, Alphatorquevirus sp.; identical to SEQ ID NO: 270

SEQ ID NO: 674 - DNA, 3494 bp, Alphatorquevirus sp.
gcgggggcgcgcgcgctgcgcgcgcgcgcagtcaaggggcaattcgggctcgggactggccgggctatgggcaaggctcttaaaaaagcatgtttttcggcagggtctggagaaagaaaagggcgctgccactgtccgagctgcgaactcctgcgaaaaaaccacctgtaatgagctggtcccaacctatgcacaatgtcaccacccgcgaaggcttcttttacgccgggtgtaagcaacttcataattgtttttgcggctgtgatgattttattaatcatcttcttcgcatccagacccagcagggtccctctccctcgcggcccttcactcctccgtcaacaccacgccctgtgatccgtagagccctgccggcaccggcggctccggacgcaccggcgccatggcgtggagctggtggtgggcccgccgccgacgcagaccgtggacccggaggagatggaggagactacgcacccgcagacctagacgacctgtacgccgccgtcgacgccgaaaacgcagagtaaggaggagacggtggggaaggagacgagggcgacggacactttacagacgcaaatttagaaagagacgcaggcgacgaaaaaagctagttttaacacaatggaaccctcagactattagagcatgttctataaggggctcagtgtgtctagttatgtgtggtcacacaaaagcaggcagaaactatgccctacactctgaagactatgtcccccaagtgcatgccatgggagggtcctttagcactaccacctggagcctaaaagcactatatgacgagcaccagaaattccataacaaatggagctaccctaacacccagctagacctagccagatacagaggatgccgctggtggttttacagagaccccaaagtagactacattgttacctactacactacacctccatttaaacttaacaaatacagttctcccatgctacaccctggcatgatgatacagtacaaaaaaaaaatactagtaccaagctatcaaacaaaaccaaaaggaaaaggcagaataagtgtttttattaagcccccaactctttttgaggacaaatggtacacccagcaagacctctgtcccgttaatgttttgtcacttgcggttagcgcatgttccttcctgcatccgttctgcccaccagaaagtgacaacatgtgtattacattccaagttttgaaagacttctattaccaacagatgggtgttacacaaattaatggcacaacactaactgaacctgataacaacatttttaaaaaactttatggaactccatccttctggcagtcccaccacacatcagcacagttaaacacatctcaaaagccaggcaagccaacctcagacgcaatacctgaaagagagtggcttcaaggagacggtacaaataaatttaaaacaggaaacaatagtatatacggccaaccaaattataatcctaactataccaaattagaattaattagacaatggtactggaagcaagaaacagagactaatgatgtacattcctcttatggccgtcctatatacaatgcagtagactaccacctaggaaagtacagcatgatatttttaagcccatacagaaccaacacacaatttgaaacagcatactcagacattacatacaacccaaacacagacaaaggactaggtaacaaaatgtggattcaatctgttactaaaacccacaccaaactagactcctcatgtagatgcttattagaagacattccactgtgggctatggccacaggatacggagagttttgtgagtcagaaattaactcagaggtgtggaacctatatattgtatgcattgtatgcccttacactaaaccaccactatggaaaaaaacagaaacgcctgaaggctgggtattttatgacacactgtttggagatggcaaaatgcccaccgggtcaggcctagtacccgtgtggctacagagcaggtggtaccccagactagtgttccaacaacaagtgctacacgatatataccttacagggccctttagttacaaagatgacctaaagagctttactataaatgccaggtacaaatttaaattcttatggggcggcactataatccccgaacaggtcattaaaaacccgtgcaaagagcaagacacgccattcacctttaccggtagacagcctcgcgacctacaaattactgacccgcagaccatgggcccagaatgggttttccacacctgggactggcgacgaggactatttggtgaaaatgctatcaaaagagtgtcagaacaaccaagcaatgatgcagactattatgctccaccaaaaaaacctagactattccctccaacagacctccaagagcaagaaagaggctcagatttcacactccaggagctcaggatcctctcggagagggcgccgtcgcaaacaagcgaagaagaggacccgcaggaggagcaccagctccagcagcaagagctccagctcagactccagcagcagttcagaatcaggcagcaactgcagcacctattcgtacaagtcctcaaaacccaagccggtctccatataaacccattatttttaaaccctgcataaaccaggtgttcatgtttcctcctgacacccctaaacccattaccactgcagaagattggaaacatgagtatgaatcctgtaagtactggcatagaccccccagaaagtaccttacagaccgtcccttctacccctggatgcccaaggagccccctcagtgtcgtgtcagctttaaacttggcttccaataaaacagcaaggccattcaaatttcacttgtcggtgtctacctctataagtcactaagcactccgagcgccagcgaggagtgcgacccttcccccttactcaacttcttcggagccgcgcgctacgccttcggctgcgcgcggcacctcagacccccgctcgtgctgacacgctcgcgcgtgtcagaccacttcgggctcgcgggggtcgggaattttgctaaacagactccgagttgccattggacactgtagccgtgaatcagtaacgaaagtgagtggggccagacttcgccataaggcctttatcttcttgccatttgtccgtgtagggggtcgccatagacttcgggctcggttttaggccttccggactacaaaaaccgccattttagtgacgtcacggccgccattttaagtaaggcggaagcagctccactgtgtacaaaatggcggcggagcacttccggcttacacaaaatggccgccaatttcttccgggtcaaaggtcattgctacgtcatcggtgacgtggggagcctactgcgtcaaacgcggaagtaggccccgtacgtcactgtcacgtggtacatgcgtcacggccgccattttgttttacaaaatggccgacttccttccgcttttttaaaaaaaggcgccaaaaaacggctgcg

SEQ ID NO: 675 - protein, 742 aa, Alphatorquevirus sp.
MAWSWWWARRRRRPWTRRRWRRLRTRRPRRPVRRRRRRKRRVRRRRWGRRRGRRTLYRRKFRKRRRRRKKLVLTQWNPQTIRACSIRGSVCLVMCGHTKAGRNYALHSEDYVPQVHAMGGSFSTTTWSLKALYDEHQKFHNKWSYPNTQLDLARYRGCRWWFYRDPKVDYIVTYYTTPPFKLNKYSSPMLHPGMMIQYKKKILVPSYQTKPKGKGRISVFIKPPTLFEDKWYTQQDLCPVNVLSLAVSACSFLHPFCPPESDNMCITFQVLKDFYYQQMGVTQINGTTLTEPDNNIFKKLYGTPSFWQSHHTSAQLNTSQKPGKPTSDAIPEREWLQGDGTNKFKTGNNSIYGQPNYNPNYTKLELIRQWYWKQETETNDVHSSYGRPIYNAVDYHLGKYSMIFLSPYRTNTQFETAYSDITYNPNTDKGLGNKMWIQSVTKTHTKLDSSCRCLLEDIPLWAMATGYGEFCESEINSEVWNLYIVCIVCPYTKPPLWKKTETPEGWVFYDTLFGDGKMPTGSGLVPVWLQSRWYPRLVFQQQVLHDIYLTGPFSYKDDLKSFTINARYKFKFLWGGTIIPEQVIKNPCKEQDTPFTFTGRQPRDLQITDPQTMGPEWVFHTWDWRRGLFGENAIKRVSEQPSNDADYYAPPKKPRLFPPTDLQEQERGSDFTLQELRILSERAPSQTSEEEDPQEEHQLQQQELQLRLQQQFRIRQQLQHLFVQVLKTQAGLHINPLFLNPA

SEQ ID NO: 676 - protein, 146 aa, Alphatorquevirus sp.; identical to SEQ ID NO: 511

SEQ ID NO: 677 - protein, 59 aa, Alphatorquevirus sp.; identical to SEQ ID NO: 512

SEQ ID NO: 678 - DNA, 3494 bp, Alphatorquevirus sp.
cgggtgccggaggtgagtttacacaccgcagtcaaggggcaattcgggctcgggactggccgggctatgggcaaggctcttaaaaaagacatgtttctcggtaaactctacagaaagaagagggcactgccactgtgccgcctgcgagcttcaaagaagaaaccacctcctgacatgacctggagacccccggtgcacaacgcccatggtatagagagaaatctctacgagtgcatattccgcgcacatgctgctagctgtggttgcggtgatcttgttggccatatttctctactggctcagcggtatggtgctcctccaagaccgccggcgcccggggctcccagaccacatatgagacgccagctggcccttccagcgccccccgccgatccgcagcaggctaacccagaatggcctggtggggacggtggagaccgtggcgatggaggcgccgctggaggaggggtcgccgccgacggagactacgaacccgaggagctcgacgccctgttcgacgccgtagaacaagaagagtaaggagaaggagatgggggaggcggaggtggagacgggggtacagacgcagactgagactgagacgcaaacgcagacgcagaaaaaagatagtactgactcagtggaaccccgccaaagtgcggaggtgcaggatatcgggggtcctgcctatgatcctgtgcggcgcgggcagggcagggttcaactatggactgcacagcgacgacctaaccgtacagaaaccccttaaccagaacccccacgggggaggcatgagcacagtgactttctctctaaaagtgctctatgaccagtaccagagattcttaaacaagtggtcttaccccaacgaccagctagacctggccagatacaagggctgcaaattcaccttctacagacacccagacacagactttatagttcagtatgacaacgttccccccatgaaaatggatgagtttacagcccctaacactcatcccaacttgctgctacaagccaaacacagacgcaaaatccccagttttaaaaccaggccttttggtaaaaagacagtcactattaaagtggggcctcctaaactttttgaagacaagtggtacccccagtcagatctgtgcaaggtgccccttgtcagttggcgggtgaccgcagctgacttgcggtttccgttctgctcaccacaaactgacaacccttgcttcaccttccaagtattgcacgagaactattacccgtgctttggaacttcctgtttagaccaacggacaagttacactacagaaattaacaatttagaaagttggctatatggctcctgcagtcactatcaaacatttgccacagacactagattagccccagaaaaaacaacgcagccatcagggtcaactaacacacctaactggacacaatcagattttcaaaaatttaaaaaaagtacagacagcaactatggctactgtacctactgtccagaaagagaccttattacaaaaattaaaaattacagaaaaaaaagatttggctggctaacaacccctgacacagccaacacttgtcacataaacatgacatacagcaagggcaagtacgaagagtacgagtaccacctaggctggtactccaacatatttataggcaacctgagacacaacctagcattcaggccagcatacatagatgtaacctataatcccatagtagacaaaggcctgggaaaccacatatggtttcagtacctgacaaagcccaccactgagctagtagaagcccaggcaaagtgccacatccaggacctgcccctgtacgccatgacctttgggtacgaggactacctccagagaacactaggccctttccaggatgtagagaccgtgggcataatctgctttatatgcccttacacagaaccgccctgcattaacaaaaacgagggcaaaaagacctggggctacgtgttctatgacacacactttggcaacggcaagaccccagagggactgggccaagtgcacccttattggatgcagagatggagaccagtgtcccaggtgcaaaaagagactctaaacaagattagcaggaccggaccgttcagctacagagacgagcaccctagcgtgacgctgaccgcgaactacaagttctactttaactggggggggcgactctatatttccacagattattaaaaacccctgtccagacaacagcctgcgtcccggcggccatagacagcctcgctcagtacaagtcgttagcccgctcacaatgggaccacaatacctgttccactcctgggactggagacgggggttctttaatccaaaaactctcaaaagaatgcttgaaaaaccagatgatgatacagagtattcaacaggtccaaaaatccctcgatgggtacccgctctcgagcaccaagggcaagaaagcaacttcgattcggagacagagatctccgagtcctcggaagaagaagccgctcaagaagtcctccaaaaaatccaggaggcgccgctacagcagcacctcatccagcagtaccgagagcagcgacgcctcggaaagcaactcaaactcgtcatgctgcaactcaccaagacgcagagcaatctccacataaatccccgcgtccttggccatgcataaataaagtgtacatgtttccccccgagaaaccccttcccatacacgggtaccacgggtgggagacggagtatcaggcctgcaaggccttcgacaggccccctagaaactacctgtcagacaaacccatctacccctggcttccccgctcccagccagaaattaaagtgaattttaagctcggttttcaataaacaaggccgtgggaatttcacttgtcggtgtctacctcttaaggtcactaagcactccgagcgtcagcgaggagtgcgacccttccccctggtgcaacgccctcggcggccgcgcgctacgccttcggctgcgcgcggcacctcggacccccgctcgtgctgacacgctcgcgcgtgtcagaccacttcgggctcgcgggggtcgggaattttgctaaacagactccgagttgccattggacactgtagccgtgaatcagtaacgaaagtgagtggggccagacttcgccataaggcctttatcttcttgccatttgtccgtgtcgggggtcgccgtaggcttcgggctcggttttaggccttccggactacaaaaaccgccattttagtgcccccccccccgcgcatgcgcggggccccccccccacggggggcgccgccccccggccccccccccgaagtccgtcactaaccacgtgactcccgcaggccaacccactgctacatcgtgcacttcctgggcggagtctacctcataatataagtaggtgcacttccgaatggctgagttttccacgcccgtccgcagcgagatcgcgacggaggagcgaccgagcgtcccgaggg

SEQ ID NO: 679 - protein, 600 aa, Alphatorquevirus sp.
MAWWGRWRPWRWRRRWRRGRRRRRLRTRGARRPVRRRRTRRVRRRRWGRRRWRRGYRRRLRLRRKRRRRKKIVLTQWNPAKVRRCRISGVLPMILCGAGRAGFNYGLHSDDLTVQKPLNQNPHGGGMSTVTFSLKVLYDQYQRFLNKWSYPNDQLDLARYKGCKFTFYRHPDTDFIVQYDNVPPMKMDEFTAPNTHPNLLLQAKHRRKIPSFKTRPFGKKTVTIKVGPPKLFEDKWYPQSDLCKVPLVSWRVTAADLRFPFCSPQTDNPCFTFQVLHENYYPCFGTSCLDQRTSYTTEINNLESWLYGSCSHYQTFATDTRLAPEKTTQPSGSTNTPNWTQSDFQKFKKSTDSNYGYCTYCPERDLITKIKNYRKKRFGWLTTPDTANTCHINMTYSKGKYEEYEYHLGWYSNIFIGNLRHNLAFRPAYIDVTYNPIVDKGLGNHIWFQYLTKPTTELVEAQAKCHIQDLPLYAMTFGYEDYLQRTLGPFQDVETVGIICFICPYTEPPCINKNEGKKTWGYVFYDTHFGNGKTPEGLGQVHPYWMQRWRPVSQVQKETLNKISRTGPFSYRDEHPSVTLTANYKFYFNWGGRLYISTDY

SEQ ID NO: 680 - protein, 157 aa, Alphatorquevirus sp.
MGKALKKDMFLGKLYRKKRALPLCRLRASKKKPPPDMTWRPPVHNAHGIERNLYECIFRAHAASCGCGDLVGHISLLAQRYGAPPRPPAPGAPRPHMRRQLALPAPPADPQQANPEWPGGDGGDRGDGGAAGGGVAADGDYEPEELDALFDAVEQEE

SEQ ID NO: 681 - DNA, 3493 bp, Alphatorquevirus sp.
gcggcggcgcgcgcgctgcgcgcgcgccgggtcaaggggcaattcgggctcgggactggccgggctatgggcaaggctcttaaaaagccatgtttctcggtaaactttacagaaagaaaaggaaagtgcttctgcagactgtgccagacccaaagaaggctaggcggcttctgattatgtggcagccccccgtgcacaatgttcccgggatcgagagaaactggtacgagagttgctttcgatcccacgctgctgtttgtggctgtggcgactttgttggccatattaataatctggcagctactctgggtcgccctccgcgttctcgacacccaggaggccccggcactccgcagataagaaacctgccagcgctcccggcaccccagggtgagcccggtaacagagcgccatggcctacggatggtggggccggcggcgccgctggagaagatggaggacgcggcgcagaccgtggagaaccagaagacgtagaagacgacgcgctcctcgccgctttcgacctcgtcgaagagtaaggaggcgcagggggcggtggcggaggcggtatagaaaatggaggcgacgcaggggcagacggacgcacagaaaaaagataatcataaaacagtggcagccgaactttataagacgctgctacatcataggctacctgcctctgatattctgtggcgagaacaccaccgcccagaactttgccacccactcggacgatatgataggcaaaggaccgtgggggggaggcatgactacaacaaagtttactctaagaatcctgtacgacgagtttaccaggtttatgaacttctggactgtcagtaacgaagacctagacctgtgtagatacgtgggctgcaaactaatattttttagacaccccacagtagactttatagtcaggataaacacacagcctccgttcctagacactaacctcaccgcaccacagatccacccgggcatcatgatgctcagtaaaaaacacatactgataccctcgctaaagaccaggcccagcagaaaacacagggtggttgtcagagtgggcccacctagactttttcaagacaagtggtacccccagtcagacctctgtgacacagttctgctttccgtgtttgcaacggcctgtgacttgcaatatccgttcggctcaccactaactgacaacccttgcgtcaacttccagattctggggcaccagtacaaaaaccaccttagtataagttccataaatgatgaatctaacaaacagcactatcaaaccaatttatttaacaaagttgagctatacaacacttttcaaaccatagcccagctcaaagatacaggactagtcacaaaccttacaggatcacaaaacatgtggaaccaggtacaaaacacaacagcactcttaccaaacggcagtaatgcacctgaaagcaaagacacttggtacaaaggaaacacatacaacaataaaattaaagagttagcagaaaaaactagagctagatttgcaagtgcaacaaaggcagccctaccaaactaccccacaatcatgtctacagacctctatgagtaccactcaggcatatactccagcatattcctagcagcaggcaggagctactttgagaccccgggggcctacacagacgtcatatacaacccttttacagacaaaggcactggaaacatggtctggatagactacctaacaaaagaaaactccatatacacaaacaacaaaagcaaatgtgagatatttgacttacctctctgggccaccttcacaggatactcagagttctgttcaaaagttacaggagacacggccatacacctaaatgctagagtggttgtcagatgcccctacactgagcccatgctcatagaccactcagaccccaacaatggctttgtaccatactcctttaactttggagagggcaagatgcccggaggctcctccaaagtgcctataagaatgagggccaagtggtacgtaaacatgtttcaccagcaagagttcatggaggccatagtagagagcggaccgtttgcttacaagggcgacataaaatcagcggtactcagcctgaaatacagattccactggaaatggggcggaaaccctatatccaaacaggtcgtccggaatccctgctccacctccagcacctccgcgggccatcgaggacctcgcagcgtacaagtcgttgacccgaaacacgttaccccggaagtcacgtggcactcgtgggacatcaaacgaggactctttggtaaagcaggtattaaacgaatgcagcaagaatcagatgctctttacatttctacaggagcattcaagaggccccgcagggataccaacgccgaagacccagaaaagcaaaacgaaagctcagctttcagagtccagcagcgagtcccctggatccactccagccaagaaacgcaaagctcgcaagaagaaatacaaacggaggggacggtacaagaacaactcctcctccagctccgagagcagcgagtactccgcttccagctccaacagctcgccagccaagtcctcaaagtccaagcagggcaaggcctacaccccctattatcttcccaagcataaacaaggcctttatgtttgagcccaagggtcctaaacccatacagggctaccacgattggctagaagaatacacctgctgcaagttctgggacagaccccccagaacgctacacacagacacgcccttctacccctgggcaccaaaacccctagaacaagtaaaggtctctttcaaacttaacttccaataaaatttcaaggccgtgggagtttcacttgtcggtgtctgcttcttaaggtcaccaagcactccgagcgcagcgaggagtgcgaccctgggggtgggtgcaacgccctcggcggccgcgcgctacgccttcggctgcgcgcggcacctcggacccccgctcgtgctgacacgctcgcgcgtgtcagaccacttcgggctcgcgggggtcgggaaatttattaaacagactccaggttgccattggacaccggagctgtgaatcagtaacgaaagtgagtggggccagacttcgccatagggcctttatcttcttgccatttgtccgtgaggaggtcgccataggcttcggcctggtttttaggccttccggactaccaaaatggcggatttggtgacgtcacgaccgccattttaagtaaggcggaagcagctccactttctcacaaaatggcggcggagcacttccggcttgcccaaaatggcgggcaagctcttccgggtgaaaggtcagcagctacgtcacaagtcacgtgtggagggttggcgtcacaacccggaagccagtcctctcacgtggcctgtcacgtgactcatacgtcatcggcgccatcttgtgtcacaaaatggcgtgcaacttccgcttttttgaaaaaaggcgcgaaaaaacggcg

SEQ ID NO: 682 - protein, 739 aa, Alphatorquevirus sp.
MAYGWWGRRRRWRRWRTRRRPWRTRRRRRRRAPRRFRPRRRVRRRRGRWRRRYRKWRRRRGRRTHRKKIIIKQWQPNFIRRCYIIGYLPLIFCGENTTAQNFATHSDDMIGKGPWGGGMTTTKFTLRILYDEFTRFMNFWTVSNEDLDLCRYVGCKLIFFRHPTVDFIVRINTQPPFLDTNLTAPQIHPGIMMLSKKHILIPSLKTRPSRKHRVVVRVGPPRLFQDKWYPQSDLCDTVLLSVFATACDLQYPFGSPLTDNPCVNFQILGHQYKNHLSISSINDESNKQHYQTNLFNKVELYNTFQTIAQLKDTGLVTNLTGSQNMWNQVQNTTALLPNGSNAPESKDTWYKGNTYNNKIKELAEKTRARFASATKAALPNYPTIMSTDLYEYHSGIYSSIFLAAGRSYFETPGAYTDVIYNPFTDKGTGNMVWIDYLTKENSIYTNNKSKCEIFDLPLWATFTGYSEFCSKVTGDTAIHLNARVVVRCPYTEPMLIDHSDPNNGFVPYSFNFGEGKMPGGSSKVPIRMRAKWYVNMFHQQEFMEAIVESGPFAYKGDIKSAVLSLKYRFHWKWGGNPISKQVVRNPCSTSSTSAGHRGPRSVQVVDPKHVTPEVTWHSWDIKRGLFGKAGIKRMQQESDALYISTGAFKRPRRDTNAEDPEKQNESSAFRVQQRVPWIHSSQETQSSQEEIQTEGTVQEQLLLQLREQRVLRFQLQQLASQVLKVQAGQGLHPLLSSQA

SEQ ID NO: 683 - protein, 149 aa, Alphatorquevirus sp.
MFLGKLYRKKRKVLLQTVPDPKKARRLLIMWQPPVHNVPGIERNWYESCFRSHAAVCGCGDFVGHINNLAATLGRPPRSRHPGGPGTPQIRNLPALPAPQGEPGNRAPWPTDGGAGGAAGEDGGRGADRGEPEDVEDDALLAAFDLVEE

SEQ ID NO: 684 - protein, 127 aa, Alphatorquevirus sp.
LDPLQPRNAKLARRNTNGGDGTRTTPPPAPRAASTPLPAPTARQPSPQSPSRARPTPPIIFPSINKAFMFEPKGPKPIQGYHDWLEEYTCCKFWDRPPRTLHTDTPFYPWAPKPLEQVKVSFKLNFQ

SEQ ID NO: 685 - DNA, 3490 bp, Alphatorquevirus sp.
ggacccccgctcgtgctgacacgctcgcgcgtgtcagaccacttcgggctcgcgggggtcgggaaatttattaaacagactccaggttgccattggacactggagctgtgaatcagtaacgaaagtgagtggggccagacttcgccatagggcctttatcttctcgccattagatagtgtaaggggtcgccgtaggcttcggcctcgttttcaggccttccggactacaaaaatggcggatttggtgacgtcacgaccgccattttaagtaaggcggaagtagttccactttcttacaaaatggcggcggagcacttccggcttgcccaaaatggcgggcaagctcttccgggtcaaaggtcagcgactacgtcacaagtcacgtgggaaggcttggcgtcacaacccggaagccaatcctctcacgtggcctgtcacgtgactgctacgtcatcggcgccatcttgtgttacaaaatggcggacaacttccgcttttttgaaaaaaggcgcgaaaaaacggcggcggcggcgcgcgcgctgcgcgcgcgcgcaaggggcaattcgggctcgggactggccgggctatgggcaaggctcttaaaaagccatgtttctcggtaaactttacagaaagaaaaggaaagtgcttctgcagactgtgccagacccaaagaaggctaggcggcttctgattatgtggcagccccccgtgcataatgtacccgggatcgagagaaactggtacgagagttgctatcgatcccatgctgctgtgtgtggctgtggcgactttgttggccatattaatcatctggcaactactctgggtcgccctgcgcgtcctcggcaccccgggggccccggcactccgcagataagaaacctgccagcgctcccggcaccccagggtgagcccggtgacagagcgccatggcctacggatggtggggccggcggcgccgctggagaagatggaggacgcggcgcagaccgtggagaaccaggagacgtagaagacgacgcgctcctcgccgctttcgacctcgtcgaagagtaaggaggcgcagggggcggtggcgcaggcggtatagaaaatggaggcgacgcaggggcagacggacgcacagaaaaaagataatcataaaacagtggcagccaaactttataagacgctgctacataataggctacctgcctctgatattctgtggcgaaaacaccaccgcccagaactttgccacccactcggacgatatgatagccaaaggaccatgggggggaggcatgactactaccaagtttactctgagaatcctctacgacgagtttaccaggtttatgaacttctggactgtcagtaacgaagacctagacctgtgtagatacgtgggctgcaaactcatattctttaaacaccccacagtagactttatagtgaggataaacacacagcctccgttcctagacactaacctcaccgcggcacaaatccacccgggcataatgatgctcagcaagaaacacatactaataccctcactaaagaccaggcccagcagaaagcacagggtggtcgtcagggtgggcccacctagactttttcaagacaagtggtacccccagtcagacttgtgtgacacagttctgctttccgtgtttgcaacggcctgtgacttgcaatatccgttcggctcaccacaaactgacaacccttgcgtcaacttccagatcctggggcaccagtacaaaaaccaccttagtattagttccacaaatgatgactctaacaaaacccactatgacaacaatttatttaataaaaaagagctatacaacacattccaaacaatagctcagcttaaagacacaggattagtctcaaacactacaggaacaggaaacatgtggaccgaagtgcaaaacacaacagcactctcaataaatggctcaaatgcacttgacagcaaagacacttggtacaaaggaaacacatacaataactctattacaaagttagcacaactaaccagagccagatttaaagctgcaacacaggcagccctgccaaactaccccacaataatgtccacagacctctatgaataccactcaggcatatactctagcatattcctagcagcaggcagaagctactttgagactccgggggcctacacagacgtcatatacaacccctttacagacaaaggcactggaaacatggtctggatagactacctaacaaaagcagactccatatacacaaagaacaaaagcaaatgtgagatatttgacctgcctctgtgggccaccttcacaggatactcagagttctgctcaaaagttacaggagacaccgccatacacctaactgccagagtagtagtgagatgcccctacactgaacccatgctcatagaccactcagaccccaacaggggctttgtaccttactcctttaactttggagagggcaagatgccaggaggctcctccaaagtgcctataagaatgagggccaaatggtacgtgaacatatttcaccagcaagagttcatggaggccatagttgagagcggaccgtttgcttacaagggcgacataaaatcagcggtactcagcatgaaatacagattccactggaaatggggcggaaaccctatatccaaacaggtcgtccggaatccctgctccacctccagcacctccgcgggccatcgaggacctcgcagcgtacaagtcgttgacccgaaacatgttaccccggaagtcacctggcactcgtgggacatcaagcgaggcatctttggcaaagcaggtattaaaagaatgcagcaagaatcagatgctctttacattcctacaggaccactcaaaagacctcgcagagacacgaacgcccaagacccagaagagcaaaacgaaagctcaggtttcagagtccagcagcgattcccctggatccactccagccaagaaacgcaaagctcgcaagaagaggtgcaagcggagggcacggtacaggaacaactcctcctccagctccgagagcagcgagtactccggttccagctccaacagctcgccagccaagtcctcaaagtccaagcagggcaaggcctacaccccctattatcttcccaagcataaacaaggcctttatgtttgagccccagggtcctaaacccatacagggctaccacgattggctagaagaatacacctgctgcaaattctgggacagacctcccagaaagctacacacagatacacccttctacccctgggcaccaaaacccctagaccaagtaagggtctcctttaaactcaacttccaataaaatttcaaggccgtgggagtttcacttgtcggtgtctgcttcttaaggtcaccaagcactccgagcgcagcgaggagtgcgaccctgggggtgggtgcaacgccctcggcggccgcgcgctacgccttcggctgcgcgcggcacctc

SEQ ID NO: 686 - protein, 739 aa, Alphatorquevirus sp.
MAYGWWGRRRRWRRWRTRRRPWRTRRRRRRRAPRRFRPRRRVRRRRGRWRRRYRKWRRRRGRRTHRKKIIIKQWQPNFIRRCYIIGYLPLIFCGENTTAQNFATHSDDMIAKGPWGGGMTTTKFTLRILYDEFTRFMNFWTVSNEDLDLCRYVGCKLIFFKHPTVDFIVRINTQPPFLDTNLTAAQIHPGIMMLSKKHILIPSLKTRPSRKHRVVVRVGPPRLFQDKWYPQSDLCDTVLLSVFATACDLQYPFGSPQTDNPCVNFQILGHQYKNHLSISSTNDDSNKTHYDNNLFNKKELYNTFQTIAQLKDTGLVSNTTGTGNMWTEVQNTTALSINGSNALDSKDTWYKGNTYNNSITKLAQLTRARFKAATQAALPNYPTIMSTDLYEYHSGIYSSIFLAAGRSYFETPGAYTDVIYNPFTDKGTGNMVWIDYLTKADSIYTKNKSKCEIFDLPLWATFTGYSEFCSKVTGDTAIHLTARVVVRCPYTEPMLIDHSDPNRGFVPYSFNFGEGKMPGGSSKVPIRMRAKWYVNIFHQQEFMEAIVESGPFAYKGDIKSAVLSMKYRFHWKWGGNPISKQVVRNPCSTSSTSAGHRGPRSVQVVDPKHVTPEVTWHSWDIKRGIFGKAGIKRMQQESDALYIPTGPLKRPRRDTNAQDPEEQNESSGFRVQQRFPWIHSSQETQSSQEEVQAEGTVQEQLLLQLREQRVLRFQLQQLASQVLKVQAGQGLHPLLSSQA

SEQ ID NO: 687 - protein, 149 aa, Alphatorquevirus sp.
MFLGKLYRKKRKVLLQTVPDPKKARRLLIMWQPPVHNVPGIERNWYESCYRSHAAVCGCGDFVGHINHLATTLGRPARPRHPGGPGTPQIRNLPALPAPQGEPGDRAPWPTDGGAGGAAGEDGGRGADRGEPGDVEDDALLAAFDLVEE

SEQ ID NO: 688 - protein, 127 aa, Alphatorquevirus sp.
LDPLQPRNAKLARRGASGGHGTGTTPPPAPRAASTPVPAPTARQPSPQSPSRARPTPPIIFPSINKAFMFEPQGPKPIQGYHDWLEEYTCCKFWDRPPRKLHTDTPFYPWAPKPLDQVRVSFKLNFQ

SEQ ID NO: 689 - DNA, 3487 bp, Alphatorquevirus sp.
ctacgcgcgcgggtgagtttacacaccgcagtcaaggggcaattcgggctcgggactggccgggctatgggcaaggctcttaaaaaagctatgtttctcggtcgcgtttacagaaagaaaaggcgcttgtcactgtccccactgcactctccacaaaaagctcgcaaactactgagaggtatgtggaggccccctactcaaaatgtatcaggacaggagagacactggtacgactctgtgttttattcgcatgctgccttttgtggctgtggggactgtgttggccatcttatctatctggctactcacctgggccgaccacctagtgcacaacccccgccgcaacagcagccacctgtcataacacgcctgcctgctctcccggcacccccaaacccctccggtgatcgagcggcatggcctactggtggtggaaacgcaggagaagacggccctggagaaggaggcgccgctggaggcttcgcagacctcgcagacgaagacctacttaccgccgccgccgaggccgccgaagagtaagaaagaggagggggaggtggagacggacttacagacgctggcgtagaaagagggggcgacgcaaacacagacctaaaataattcttaaacagtggcaaccaaactttatcagaaactgctacatagtgggttttatgccactgatcttttgtggtgagaacactgtaagccaaaactatgccacccactctgatgacttggtggctaagggaccctacgggggaggcatgaccaccacaaaattcactctcagaatcttgtttgacgaacacctaagatggatgaactactggactgttagtaacgaggacttagatctctgtagatatgtaggagccaacttttacttttacagacaccccacagtagattttatggtgcaaattcacacacaggcccccttcttagacacagaactcacaggccccagcatacacccaggcatgatgattcttaacaagaaaaagatatttatacccagtctcaaaaccaggcctaacagaaagcacaaagtaaaagtcagagtaggggccccccgcttgtttgaagacaagtggtacccccagtcagaactctgtgacaccaccctagtggccatctatgcaacggcctgtgacttgcaatttccgttcggctcaccactaactgacaacccttgcgtcaacttccaggttttaggttccgcttacaaacagcaccttagtattctaagcacagaaaccgcaaaaaacaaacaacactatgaagaagccttatataaaaaaacagcatacttcaatacattccaaactatagcacaccttagagaaacaggcaaacaagagtcagcaactcctacatggggccaatgcttaaacaccaccacactaacattcactggcaacaatcaaacaacatgtaatgacacctggtactatggcaacgcatacacagacaaaataggagaactatgtaagaaaaccaaagaaaaatactttcatgctacaaagtctgcctttcctgcttatgctacacttgtagatgacctctatgagtaccacggaggcatattctcctctatatttctgtccccaggcagatcctactttgaaactctaggtgcttactctgacattatctataatccttttgtagacaaaggcctaggcaatatagtgtggatagactacctctcaaagtcagacgctgtctggagaccccctcaaagcaaatgcaccattaaagaccaacccctatgggcagcctttaatggatacagtgaattctgtgccaaaagcacaggagacggagcagttaacataaactgcagagtagttgtgaggtgcccctacacatctcccatgctaatagacaacaaaaacccagagcaaggctttgtcccctactccaaaaactttggcaatgcaaaaatgaaaggtggctctgcagacgtgcccctcagctggaggatcaagtggtatgtcatgatgtaccaccagcaagaatttatggaagagatagtacagagcggaccgtgggcgtacaagggcgacgaaaaaagcgcgacactaaacatgaaatacgtattcaaatggaaatggggcggtaaccctatatctggacaggttgtcagaaacccctgcaagacctccagttccagtcgagagcctcgttcaatacaagcagttgacccgaagagagttgcaccgccactcgtattccactcgtgggactaccgacgagggtactttggccacgcaagtattaaaagaatgtcagaagaatcagaacctcctacgctttttacaggaccatcaggcaaacgcccccgcagagacaccaacgtacagcaagaagaaccgcaaaaagaaagctcgagtttcagagtccagcgacagctccagccgtggatccagtccagtcaagaaacgcaaagcagccaagaagagatccaggcgcaggggtcgatacaagaacaactcctccagcagctcggagaacagcgagccctccgaaagcagctggagctcctcgccggacaagtcctcaaagtccaagcaggccaccacctacacccccttttatcttcccaagcataaacaaagtctttatgtttgagcctaaaggcccaaaacctataaagggctatgaggcctggttagatgagtaccaaacagcaggtatctgggataggccagtcagaaactaccacacagacacccccttctacccctggatgcctaagccccccgaccaatttcgtgtcagctttaaacttggctttcaataaaatttcaaggcagtacactgttcacctgtcggtgtctacctctataagtcactaagcactccgagcgtcagcgaggagtgcgaccctagggggggactcaacgccttcggagccgcgcgctacgccttcggctgcgcgcggcacctcagacccccgctcgtgctgacacgcttgcgcgtgtcagaccacttcgggctcgcgggggtcgggaattttgctaaacagactccgagttgccattggacactagagctgtgaatcagtaacgaaagtgagtggggccagacttcgccataaggcctttatcttcttgccatttgtccgtgtcgggggtcgccataaacttcgggctcggttttaggccttccgaactacaaatatggccgttccagtgacgtcacggtcgccattttgagtaggtgccgtccaggactgccattgccagtcaaagggcatcctcggcggaacctacataaaatggtagacaatatcttccgggtcaaaggtcacacctacgtcacaagtcacgtgggggggacccgctacgtcatatgcggaagtaggccccgccacgtgactaaccacgtgggtgctgcgtcacagccgccattttagttcacaaaatggccgacttccttcctcttttttaaaaataacggctcagcggcggcgcgcgcg

SEQ ID NO: 690 - protein, 733 aa, Alphatorquevirus sp.
MAYWWWKRRRRRPWRRRRRWRLRRPRRRRPTYRRRRGRRRVRKRRGRWRRTYRRWRRKRGRRKHRPKIILKQWQPNFIRNCYIVGFMPLIFCGENTVSQNYATHSDDLVAKGPYGGGMTTTKFTLRILFDEHLRWMNYWTVSNEDLDLCRYVGANFYFYRHPTVDFMVQIHTQAPFLDTELTGPSIHPGMMILNKKKIFIPSLKTRPNRKHKVKVRVGAPRLFEDKWYPQSELCDTTLVAIYATACDLQFPFGSPLTDNPCVNFQVLGSAYKQHLSILSTETAKNKQHYEEALYKKTAYFNTFQTIAHLRETGKQESATPTWGQCLNTTTLTFTGNNQTTCNDTWYYGNAYTDKIGELCKKTKEKYFHATKSAFPAYATLVDDLYEYHGGIFSSIFLSPGRSYFETLGAYSDIIYNPFVDKGLGNIVWIDYLSKSDAVWRPPQSKCTIKDQPLWAAFNGYSEFCAKSTGDGAVNINCRVVVRCPYTSPMLIDNKNPEQGFVPYSKNFGNAKMKGGSADVPLSWRIKWYVMMYHQQEFMEEIVQSGPWAYKGDEKSATLNMKYVFKWKWGGNPISGQVVRNPCKTSSSSREPRSIQAVDPKRVAPPLVFHSWDYRRGYFGHASIKRMSEESEPPTLFTGPSGKRPRRDTNVQQEEPQKESSSFRVQRQLQPWIQSSQETQSSQEEIQAQGSIQEQLLQQLGEQRALRKQLELLAGQVLKVQAGHHLHPLLSSQA

SEQ ID NO: 691 - protein, 157 aa, Alphatorquevirus sp.
MGKALKKAMFLGRVYRKKRRLSLSPLHSPQKARKLLRGMWRPPTQNVSGQERHWYDSVFYSHAAFCGCGDCVGHLIYLATHLGRPPSAQPPPQQQPPVITRLPALPAPPNPSGDRAAWPTGGGNAGEDGPGEGGAAGGFADLADEDLLTAAAEAAEE

SEQ ID NO: 692 - protein, 59 aa, Alphatorquevirus sp.
MFEPKGPKPIKGYEAWLDEYQTAGIWDRPVRNYHTDTPFYPWMPKPPDQFRVSFKLGFQ

SEQ ID NO: 693 - DNA, 3486 bp, Alphatorquevirus sp.
cggcggcggcggcgcgcgcgctgcgcgcgcgtcaaggggcaattcgggctcgggactggccgggctatgggcaaggctcttaaaaagccatgtttcttggtaaactttacagaaagaaaaggaaagtgcttctgcagactgtgccagacccaaagaaggctaggcggcttctaattatgtggcagccctccacgcacaatgtacccgggatcgagagaaactggtacgagagctgctttcgatctcatgctgctgtttgtggttgtggcgactttgttgggcatattaatcatctggcagctactctgggtcgccctccgcgttctcggcaccccgggggccccggcactccgcagataagaaacctgccagcgctcccggcaccccagggtgagcccggtgacagagcgccatggcctacggatggtggggccggcggcgccgctggagaagatggaggacgcggcgcagaccatggagaaccaggagacgtagaagacgacgcgctcctcgccgctttcgaactcgtcgaagagtaaggaggcgcagggggcggtggcgcaggcggtatagaaaatggaggcgacgcaggggcagacggacgcacagaaaaaagataatcataaaacagtggcagccgaactttataagacgctgctacatcataggctacctgcctctcgtattctgtggcgagaacaccaccgcccaaaactttgccacccactcggacgatatgatagccaaaggaccgtggggggggggcatgactactactaagtttactcttagaatcctgtacgacgagtataccaggtttatgaacttctggactgtcagtaacgaagacctagacctgtgtagatacgtgggctgcaaactcatattctttaagcaccccacggtagactttatggtgaggataaacacacagcctcctttcctagacactaacctcaccgcaccacagatccacccaggcatcatgatactcagcaaaaaacacatactaataccctcgctaaagaccaggcctagcagaaaacacagggtggtcgtcagggtgggcccacctagactgtttcaagacaagtggtacccccagtcagacctgtgtgacacagttctgctttccgtgtttgcaacggcctgtgacttgcaatatccgttcggctcaccactaactgacaacccttgcgtcaacttccagattctggggcagcagtacaaaaaccaccttagtattagttccacagaagaccaatctaacaaacaacactatgacagcaatttatttaaccaaacatcactatacaacacttttcaaacaatagctcagcttaaagaaacaggcatgatagacaaagaccaccaagattatggatggaacaaagtacaaaatactaccagtcttgacgtatcaggtagcaatgccactagcagcaaagacacttggtacaaaggaaacacatacaacgacaacattaaaaatttagcacaaaaaactagagctagatttaaaggtgcaacacagacagccctgccaaactaccccacaatcatctctacagacttgtatgaataccactcaggcatatactccagcatattcctagcagcaggcaggagctactttgagacccctggagcctacacagacgttatatacaacccttttacagacaaaggcactggaaacatggtctggatagactacctaacaaaatcagactctatatacaccaaaaacaaaagcaaatgtgagatatttgacctgccactgtggaccgccttcacaggatactcagagttctgctcaaaagttacaggagacaccgccatacacctaaatgccagagtagtagtaagatgcccctacacccaacccatgcttatcaaccactcagaccccaacatgggctttgtaccatactcatttaactttggagagggcaagatgcccggaggctcctccaaagtacccataagaatgagagccaagtggtacgtaaacatgtttcaccagcaagagttcatggaggccatagttcagagcggaccgtttgcttacaagggcgacataaagtcagcggtactcagcattaagtacagattccactggaaatggggcggaaaccctatatccaaacaggtcgtccggaatccctgctccacctccagcacctccgcgggccatcgaggacctcgcagcgtacaagtcgttgacccgaagcacgttaccccgcaagtcacctggcactcgtgggacatcaagcgaggcatctttggcaaagcaggtattaagagaatgcaacaggaatcagatgctctttacattcctacaggagcactcaagaggccccgcagagataccaacgccgaagacccagaagagcaaagcgaaagctcacgtttcacagtccagcagcgactcccctggatccactccagccaagaaacgcaaagctcgcaagaagagatgcaaacggaggggacggtacaggaacaactcctcgtccagctccgagagcagcgagtactccgcttccagctccaacagctcgccagccaagtcctcaaagtccaagccgggcaaggcctacaccccctattatcttcccaagcataaacaaagcgtttatgtttgagcccaatggtcctaaacccatagagggctaccacgattggctagaggaatacacctgctgcaaattctgggacagaccccccagaaagctacacactgacacgcccttctacccctgggcaccaaaaccccgagaccaagtaagggtctcctttaaacttaacttccaataaaatttcaaggccgtgggagtttcacttgtcggtgtctgcttcttaaggtcaccaagcactccgagcgtcagcgaggagtgcgaccctgggggtgggtgcaacgccctcggcggccgcgcgctacgccttcggctgcgcgcggcacctcggacccccgctcgtgctgacacgctcgcgcgtgtcagaccacttcgggctcgcgggggtcgggaaatttgctaaacagactccgagttgccattggactctggagctgtgaatcagtaacgaaagtgagtggggccagacttcgccatagggcctttatcttctcgccattggaccgtgagggggtcgccgtaggcttcggcctcgtttttaggccttccggactacaaaaatggcgcatttagtgacgtcacggccgccattttaagtaaggcggaagcagctccactttctcacaaaatggcggcggagcacttccggcttgcccaaaatggcgggcaagctcttccgggttaaaggtcaccagctacgtcacaagtcacgtggggagcgttggcgtcacaacccggaagccaatcctctcacgtggcctgtcacgtggctgctacgtcatcggcgccatcttgtgtcgcaaaatggcagacaacttccgcttttttgaaaaaaggcgcgaaaaaa

SEQ ID NO: 694 - protein, 738 aa, Alphatorquevirus sp.
MAYGWWGRRRRWRRWRTRRRPWRTRRRRRRRAPRRFRTRRRVRRRRGRWRRRYRKWRRRRGRRTHRKKIIIKQWQPNFIRRCYIIGYLPLVFCGENTTAQNFATHSDDMIAKGPWGGGMTTTKFTLRILYDEYTRFMNFWTVSNEDLDLCRYVGCKLIFFKHPTVDFMVRINTQPPFLDTNLTAPQIHPGIMILSKKHILIPSLKTRPSRKHRVVVRVGPPRLFQDKWYPQSDLCDTVLLSVFATACDLQYPFGSPLTDNPCVNFQILGQQYKNHLSISSTEDQSNKQHYDSNLFNQTSLYNTFQTIAQLKETGMIDKDHQDYGWNKVQNTTSLDVSGSNATSSKDTWYKGNTYNDNIKNLAQKTRARFKGATQTALPNYPTIISTDLYEYHSGIYSSIFLAAGRSYFETPGAYTDVIYNPFTDKGTGNMVWIDYLTKSDSIYTKNKSKCEIFDLPLWTAFTGYSEFCSKVTGDTAIHLNARVVVRCPYTQPMLINHSDPNMGFVPYSFNFGEGKMPGGSSKVPIRMRAKWYVNMFHQQEFMEAIVQSGPFAYKGDIKSAVLSIKYRFHWKWGGNPISKQVVRNPCSTSSTSAGHRGPRSVQVVDPKHVTPQVTWHSWDIKRGIFGKAGIKRMQQESDALYIPTGALKRPRRDTNAEDPEEQSESSRFTVQQRLPWIHSSQETQSSQEEMQTEGTVQEQLLVQLREQRVLRFQLQQLASQVLKVQAGQGLHPLLSSQA

SEQ ID NO: 695 - protein, 149 aa, Alphatorquevirus sp.
MFLGKLYRKKRKVLLQTVPDPKKARRLLIMWQPSTHNVPGIERNWYESCFRSHAAVCGCGDFVGHINHLAATLGRPPRSRHPGGPGTPQIRNLPALPAPQGEPGDRAPWPTDGGAGGAAGEDGGRGADHGEPGDVEDDALLAAFELVEE

SEQ ID NO: 696 - protein, 127 aa, Alphatorquevirus sp.
LDPLQPRNAKLARRDANGGDGTGTTPRPAPRAASTPLPAPTARQPSPQSPSRARPTPPIIFPSINKAFMFEPNGPKPIEGYHDWLEEYTCCKFWDRPPRKLHTDTPFYPWAPKPRDQVRVSFKLNFQ

SEQ ID NO: 697 - DNA, 3485 bp, Alphatorquevirus sp.
ggacccccgctcgtgctgacacgctcgcgcgtgtcagaccacttcgggctcgcgggggtcgggaaatttattaaacagactccaggttgccattggacaccggagctgtgaatcagtaacgaaagtgagtggggccagacttcgccatagggcctttatcttcttgccattggatagtgtaaggggtcgccataacgcggaccccgtttttaccccttccggactacaaatatggctaatttagtgacgtcacagccaccattttaagtaaggcggaagcagctccactttctcacaaaatggcggcggagcacttccggcttgcccaaaatggcgggcaagcttttccgggtcaaaggttagcaactacgtcacaagtcacgtggagagggttggcgtcacaacccggaagccaatcctctcacgtggcctgtcacgtgactgctacgtcatcggcgccatcttgtgtcacaaaatggcggacaacttccgcttttttgaaaaaaggcgcgaaaaaacggcggcggcggcgcgcgcgctgcgcgctcaaggggcaattcgggctcgggactggccgggctatgggcaaggctcttaaaaagcaatgtttctcggtaaactttacagaaagaaaaggaaagtgcttctgcacactgtgccagacccaaagaaagctaggcggcttctgattatgtggcagccccccgtgcacaatgtacccgggatcgagagaaactggtacgagagttgctttcgatcccacgctgctctttgtggctgtggcgactttgttggccatcttaatcatctggcagctactctgggtcgccctccgcgttctcggcaccccgggggccccggcactcctcagataagaaacctgccagcgctcccggcaccccagggtgagcccggtgacagagcgccatggcctacggatggtggggccggcggcgccgctggagaagatggaggacgcggcgcagaccgtggagaaccaggagacgtagaagacgacgcgctcctcgccgctttcgacctcgtcgaagagtaaggagacgaagggggcggtggcgcaggcggtatagaaaatggaggcgacgcaggggcagacggacacacagaaaaaagataatcataaaacagtggcagccgaactttataagacgctgctacatcataggctacctgcctctgatattctgtggcgagaacaccaccgcccagaactttgccacccactcagacgatatgatagcaaaaggaccgtggggggggggcatgactacaacaaagtttactctgagaatcctgtacgacgaatttaccaggtttatgaacttctggactgttagtaacgaagacctagacctgtgtagatacgtgggctgcaaactaatattctttaaacaccccactgtagactttatagtcaggataaacacacagcctccatttctagacactaacctcaccgcggcacagatacacccgggcatcatgatgctcagcaaaaaacacatactaataccctcactaaagaccaggcccagcagaaaacacagggtggtcgtcagggtgggcccaccaagactgtttcaagacaagtggtacccccagtctgacctttgcgacacagttctgctttccatatttgcaacggcctgtgacttgcaatatccgttcggctcaccactaactgaaaacccttgcgtaaacttccaggttctggggccccagtacaaaaaccaccttagtattagcacacttaaagacagagagaactcagaacactatgacaataatttatttagtcaagtatcactatacaacacttttcaaaccatagcccaacttaaagaaacaggcctagctactttagacaatacaaactctaactggtggacaaaagtacaaaacaacaccagtttattaccaaacggcaccaatgcaaccgtaagccgagatacatggtacaaagggaacacatataatcgtgatataacagagttagcaaaaaagacaagagaaagatttcaaaaagcaacacaaaacgcactgccacagtacgccacactgatgcccacagcactgtatgaataccactcaggaatatactccagcatatacttagcagcaggcaggagctactttgagaccccaggggcctactcagacataatatacaatccttttacagacaaaggcactggcaacataatatggatagactacctaacaaaagaagacagcatatacactaaaaacaaaagcaaatgcgaaatattagacctacccctctgggcagcctttacaggctatgcagagttttgtgccaaatacacaggagactctgccatccaatacaacgccagggtagtagtaagatgcccctacaccgaacccatgcttatggaccactcagaccccaacagaggctttgtaccatactcctttaactttggagagggcaagatgcccggaggctcctccaaagtgcccataagaatgagggccaagtggtacgtgaacatgtttcaccagcaagagtttatggaggccatagttcagagcggaccgtttgcttacaagggcgacataaaatcagcggtactcagcataaagtacagattccactggaaatggggcggaaaccctatatccaaacaggtcgtccggaatccctgctccacctccagcacctccgcgggccatcgaggacctcgcagcatacaagtcgttgacccgaaatacgttaccccggaagtcacctggcacgcgtgggacatcaagagaggcatctttggcaaagcaggtattaaaagaatgcaacaagaatcagatgctatttacattcctacaggaccactcaagagacctcgcagagatacaaacgcccaagacccagaagagcaaaacgaaagctccagtttcagagtccagcagcgactcccctggatccactccagccaagaaacgcaaagctcgcaagaagagatgcaaacggaggggacggtacaggaacaactcctcctccagctccgagagcagcgagtactccgcttccagctccaacagctcgccagccaagtcctcaaagtccaagcagggcaagggctacaccccctattatcttcccaagcataaacaaagcctttatgtttgagcctaaaggtcctaaacccatacagggctaccacgattggctagaggagtacacctgctgcaaattctggaacagaccccccagaaaactacacacagacacacccttctacccctgggcaccaaaaccaccaaaccaagtaagggtctctttcaaactcaacttccaataaagtttcaaggccgtgggagtttcacttgttggtgtctgcttcttaaggtcaccaagcactccgagcgcagcgaggagtgcgaccctgggggtgggtgcaacgccctcggcggccgcgcgctacgccttcggctgcgcgcggcacctc

SEQ ID NO: 698 - protein, 739 aa, Alphatorquevirus sp.
MAYGWWGRRRRWRRWRTRRRPWRTRRRRRRRAPRRFRPRRRVRRRRGRWRRRYRKWRRRRGRRTHRKKIIIKQWQPNFIRRCYIIGYLPLIFCGENTTAQNFATHSDDMIAKGPWGGGMTTTKFTLRILYDEFTRFMNFWTVSNEDLDLCRYVGCKLIFFKHPTVDFIVRINTQPPFLDTNLTAAQIHPGIMMLSKKHILIPSLKTRPSRKHRVVVRVGPPRLFQDKWYPQSDLCDTVLLSIFATACDLQYPFGSPLTENPCVNFQVLGPQYKNHLSISTLKDRENSEHYDNNLFSQVSLYNTFQTIAQLKETGLATLDNTNSNWWTKVQNNTSLLPNGTNATVSRDTWYKGNTYNRDITELAKKTRERFQKATQNALPQYATLMPTALYEYHSGIYSSIYLAAGRSYFETPGAYSDIIYNPFTDKGTGNIIWIDYLTKEDSIYTKNKSKCEILDLPLWAAFTGYAEFCAKYTGDSAIQYNARVVVRCPYTEPMLMDHSDPNRGFVPYSFNFGEGKMPGGSSKVPIRMRAKWYVNMFHQQEFMEAIVQSGPFAYKGDIKSAVLSIKYRFHWKWGGNPISKQVVRNPCSTSSTSAGHRGPRSIQVVDPKYVTPEVTWHAWDIKRGIFGKAGIKRMQQESDAIYIPTGPLKRPRRDTNAQDPEEQNESSSFRVQQRLPWIHSSQETQSSQEEMQTEGTVQEQLLLQLREQRVLRFQLQQLASQVLKVQAGQGLHPLLSSQA

SEQ ID NO: 699 - protein, 149 aa, Alphatorquevirus sp.
MFLGKLYRKKRKVLLHTVPDPKKARRLLIMWQPPVHNVPGIERNWYESCFRSHAALCGCGDFVGHLNHLAATLGRPPRSRHPGGPGTPQIRNLPALPAPQGEPGDRAPWPTDGGAGGAAGEDGGRGADRGEPGDVEDDALLAAFDLVEE

SEQ ID NO: 700 - protein, 127 aa, Alphatorquevirus sp.
LDPLQPRNAKLARRDANGGDGTGTTPPPAPRAASTPLPAPTARQPSPQSPSRARATPPIIFPSINKAFMFEPKGPKPIQGYHDWLEEYTCCKFWNRPPRKLHTDTPFYPWAPKPPNQVRVSFKLNFQ

SEQ ID NO: 701 - DNA, 3484 bp, Alphatorquevirus sp.
gcgcgcgcgctgcgcgcgcgccgggggggagtcaaggggcaattcgggctcgggactggccgggccccgggcaaggctcttaaaaaatgcgctttcgcagggttgcagagaaaaggaaagtgcttctgcaaactgtgcgagctacaaagaaggctaggcggcttctaggtatgtggcagccccccgtgcacaatgtccccggcatcgagagaaactggtacgagagctgtttcagatcccatgctgctgtttgcggctgtggcgactttgttggtcatcttaatcatctggcagctactctgggtcgtcctccgcgttctcggcaccccgggggccccggcactcctcagataagaaacctgccagcgctcccggcgccccagggcgagcccggtgacagagcgacatggcgtggggcttctggggccgacgccgccggtggagacggtggagagcgcggcgcagacggtggagatcccgcagacgtaggagacgacgccctgctcgccgctttcgagctcgtcgaagagtaaggaggcgcggggggcggtggcgcagacgctacagaaaatggcgacggggcagacgcagacggactcacagaaaaaaaataatcataaaacagtggcaaccaaactttatcagacgctgctacattatagggtacctacccttaatattctgtggcgaaaataccactgcccaaaactatgccactcactctgacgatatgataagcaaaggaccgtacggggggggcatgactaccaccaaatttactctgagaatactgtacgacgagtttaccaggtttatgaacttttggactgtcagtaacgaagacctagacctgtgtagatacgtgggcgccaaactcatattttttaagcaccccacggtggactttatagtgcagataaacacccagcctccttttctagacacgcacctcaccgcggccagcatacacccgggcatcatgatgctcagcaagagacacatactcataccctctctaaaaacccggccaagcaaaaaacacagggtggtggtcagggtgggcgcccccaaactgtttcaggacaagtggtacccccagtcagacctgtgcgacacagttctgctttccatatttgcaaccgcctgtgacttgcaatatccgttcggctcaccactaactgacaacccttgcgtcaacttccagatcctggggccccagtacaaaaaacaccttagtattagctctactaatgataacagtaacaaaacacactacaatgaaaatctttttaagaaaactgaactatacaacacttttcaaaccatagcacaacttaaagaaacaggacaagcaacagacataacccctagttggaatgatgtgcaaaacacaacaacactacatagtacaggcaacaatgcaactcagagccgagacacttggtacaagggcaatacatacaaaaacaacatatcacaattagcagaaaaaaccagacaaagatttcaagctgcaacaaaggcagccctgcctaactaccccacaataatgaccacagacctatatgaataccactctggcatatactccagtatttacctgtcagctggcaggagctactttgagacaacaggggcctactctgacattatatacaaccccttcacagacaaaggcacaggcaacattatctggatagactacctaacaaaagaagacactatttttgtaaaaaacaaaagcaaatgtgagatagaggacatgcccctgtgggctgcctgtactggatacacagagttctgtgctaaatacacaggagactctgccataatatacaatgccagaatacttataagatgcccatacacagaacccatgctagtagaccactcagacccaaacaaaggctttgtcccctactcatttaactttggcaacggaaaaatgcccggaggcagctccaacgtacccataagaatgagggcaaagtggtacgtgaacatgtttcaccaaaaagaagtactagaagccatagtacagagcggaccgttcgggtacaagggcgacataaaatcagctgtactggccatgaaatacagatttcactggaagtggggtggaaaccctatatccaaacaggtcgtcagaaatccgtgctccaactccagctcctccgcggcacatagaggacctcgcagcgtacaagcagttgacccgaaatacaataccccagaggtcacgtggcactcgtgggacatcagacgaggaatctttggcaaagcaggtattaaaagaatgcaacaagaatcagatgctctttacattcctccaggaccactcaagagacctcgcagagacacgaacgcccaagatccagaagagcaaaacgaaagctcaggtttcagagtccagcagcgactcccgtgggtccactccagccaagagacgcaaagctcccaagaagagacggaggcgcaggggtcggtacaagaccaactacacctccagctccgagagcagcgagtactccgactccagctccagcaactcgcaacccaagtcctcaaagtccaagcagggcacggcctacaccccctattatcttcccaagcgtaaacaaagcctttatgtttgagccccagggtcctaaacccatacagggctacaacgattggctagaagagtacactgcctgcaaatactgggacagacccccaagaaagctacacacagacatacccttttacccctgggcaccaaaaccccaagaccaagtcagggtctcctttaaactcaactttcaataaaaattgctaggccgtgggagtttcacttgtcggtgtctgcttcttaaggtcgccaagcactccgagcgcaagcgaggagtgcgaccccccttccggtagcaacgccttcggagccgcgcgctacgccttcggctgcgcgcggcacctcagaccccccctccacccgaaacgcttgcgcgtttcggaccttcggcgtcggggggggtcgggaactttattaaacagactccgaggtgctcttggacactgagggggtgaacagcaacgaaagtgagtggggccagacttcgccataaggcctttatcttcttgccattagatagtgtagggggttgccataggcttcggcctcgtttttaggccttccggactacaaaaatggcggatttagtgacgtcacggccgccattttaagtaaggcggaagcagctccactttctcacaaaatggcggcggagcacttccggcttgcccaaaatggcgggcaagctcttccgggtcaaaggtcggcatctacgtcacaagtcacgtggaaagggttggcgtcacaacccggaagccaatcgtctgacgtggcctgtcacgtgactgctacgtcatcggcgccatcttgtgtcacaaaatggcgaacaacttccgcttttttgaaaaaaggcgcgaaaaaacggcggcggcg

SEQ ID NO: 702 - protein, 736 aa, Alphatorquevirus sp.
MAWGFWGRRRRWRRWRARRRRWRSRRRRRRRPARRFRARRRVRRRGGRWRRRYRKWRRGRRRRTHRKKIIIKQWQPNFIRRCYIIGYLPLIFCGENTTAQNYATHSDDMISKGPYGGGMTTTKFTLRILYDEFTRFMNFWTVSNEDLDLCRYVGAKLIFFKHPTVDFIVQINTQPPFLDTHLTAASIHPGIMMLSKRHILIPSLKTRPSKKHRVVVRVGAPKLFQDKWYPQSDLCDTVLLSIFATACDLQYPFGSPLTDNPCVNFQILGPQYKKHLSISSTNDNSNKTHYNENLFKKTELYNTFQTIAQLKETGQATDITPSWNDVQNTTTLHSTGNNATQSRDTWYKGNTYKNNISQLAEKTRQRFQAATKAALPNYPTIMTTDLYEYHSGIYSSIYLSAGRSYFETTGAYSDIIYNPFTDKGTGNIIWIDYLTKEDTIFVKNKSKCEIEDMPLWAACTGYTEFCAKYTGDSAIIYNARILIRCPYTEPMLVDHSDPNKGFVPYSFNFGNGKMPGGSSNVPIRMRAKWYVNMFHQKEVLEAIVQSGPFGYKGDIKSAVLAMKYRFHWKWGGNPISKQVVRNPCSNSSSSAAHRGPRSVQAVDPKYNTPEVTWHSWDIRRGIFGKAGIKRMQQESDALYIPPGPLKRPRRDTNAQDPEEQNESSGFRVQQRLPWVHSSQETQSSQEETEAQGSVQDQLHLQLREQRVLRLQLQQLATQVLKVQAGHGLHPLLSSQA

SEQ ID NO: 703 - protein, 148 aa, Alphatorquevirus sp.
MRFRRVAEKRKVLLQTVRATKKARRLLGMWQPPVHNVPGIERNWYESCFRSHAAVCGCGDFVGHLNHLAATLGRPPRSRHPGGPGTPQIRNLPALPAPQGEPGDRATWRGASGADAAGGDGGERGADGGDPADVGDDALLAAFELVEE

SEQ ID NO: 704 - protein, 59 aa, Alphatorquevirus sp.
MFEPQGPKPIQGYNDWLEEYTACKYWDRPPRKLHTDIPFYPWAPKPQDQVRVSFKLNFQ

SEQ ID NO: 705 - DNA, 3482 bp, Alphatorquevirus sp.
gcgcgctacgcggtgagtttacacaccgcagtcaaggggcaattcgggctcgggactggccgggctacgggcaaggctcttaaaaaagctatgtttcttggtaaactttacagaaagaaaaggctgctgtcactgtccccactgcacactccacagaaaacttgcaggcttttaactactatgtggagaccccccgctcacaatgtacaaggccaagaaagacagtggtacgagtcatgctttcgctctcacgctgctatgtgtggctgtggcgattttattaggcatctttgtcatcttgctgataattttggacgccctccaactgttcctcggcctccagcacccacaccaccagtaagaccactgccagctctcccggcaccccccaacccctccggtagcagagcggcatggcctactggtggtggagacggagaagacgagccccgtggaggagcagacggcgctggaggactcgcagaactcgcagacgaagagctgctttccgccgccgtggacgtcgccgaagagtaagaaagaggagggggaggtggagaaggacttatagaaaatggcggaggggcaaaaagagacgcaggcacaaaagacgcttaatactaactcagtggcaacccgcctttataagacgctgctatatagtgggctacctgcccctcataatatgcggagaaaacacctccgccagaaactttgctacccactcagacgaccttatatccaacggaccttacggggggggcatgactactaccaaatttactctcagaatactgtatgacgaacacctgaggcaccttaactactggactgtcagtaacgaagacctagatctgtgtagatacctggggggcaccttctacgcgtacagacaccccactgtagactttatcatacagatacacaccagtcccccctttctagacactccactcacgggtcccagcatacacccgggcatgctaatgctcacaaaacacaaaatactaatacctagcctaaaaaccagacccaacaagaaacacaaagtaaaaattaaattcagaccccctaaactatttcaagacaagtggtacccccagtcagagctctgtgacaccacactcataaccgtctttgcaaccgcatgtgacctgcaatttccgttcggctcaccactaacgaacaacccttgcgtcaacttccaggtgctaggttccgtttacaaaaagcacctcagcatacttcctgaaaaactgtcatcatatataaattactatgacactaacttatataacaatttacaactatatcaaacattccaaacaatagctcaaattaaacccagtgcccaagaaaatggctttactccttcatggcaaaattgtcaaaataacgttaagcttaaccagacaggcaccaaccaatctcaatgtaatgacacctggtactatggaaaaacttatacacaatctataacagaagcagctaaaaatattagaaaaaaatacttaagcgctacaagatcagctctaccgctactacaaacacatggagatgaactactagagtaccacacaggtgtgtacagttctatattcttatctgcaggcagaacatactttgaaaccacaggggcttacacagacatagtctacaaccccctagtagacaaaggcataggaaacaaagtgtggctagaccccctaactaaagaagacgcggtgctaaacagaaaacaagcaaaagtactgttagaagacatacccatatgggcagccctatttggatacacagaatttgcagctaaatacacgggagactctgccatatcagcaaactacagactgacgttacggtgcccctacacagaccccatgctagtagacagaaacaacgaagaccaaggcttcgtgccctactctaaaaactttggcaacggaaaaatgccaggagggtcctccaacgttccactgactatgagaattaaatggtaccccatattattccaccaactagaactcatggaagagctagtacagtgtggaccgttcgcatacaagggcgaggaaaagatgtgtgtattagccataaaatataacttcagatggaaatggggaggtaaccctgtttctcaccagattgtgcgcaacccctgtaaaggagggtccggtgcccgtcgagagcctcgctcaatacaagcagttgacccgaaatacgtcacaccgacgctatccttccactcgtgggacttcagacggggactatttggcaaggcaagtattgaaagaatgtcaagagaatcagaaactaatatctatcctacaggcccaccaagaaaaagaccaaaaagggacacggacccgtacgactcgcaacaagaagaaaactcaatttccagacacctccagctccagccgtgggtccactccagccaagaagcccaaagcgaagaagaaacgcaagtcccggagaacctacaagaacaactcctccagcagctccgagagcagcagcagctccgagtccatctccagtccctcgcctcgcaagtgctcaaaatcagggcgggatacgggatacaccccctattatcttcccaagcctaaacaaggtctttatgtttgaccctgcaggccctaaacccatacaggggtacgaggcctggcacgatgagtttactacctgtaaatattggaacaggcctgccagaaagtaccacacagatatacccttctacccagacgtccccaaagccccagaccaaataagagtttcctttaagcttggctttcaataaacacacctgttcactgtactaggccgtgggagtttcacttgttggtgtctacctctaaaggtcactaagcactccgagcgccagcgaggagtgcgacccttccccctgactcaacttcttcggagccgcgcgctacgccttcggctgcgcgcggcacctcagacccccgctcgtgctgacacgcttgcgcgtgtcagaccacttcgggctcgcgggggtcgggatatttgctaaacagactccgagttgccattggacactgtagccgtgaatcagtaacgaaagtgagtggggccagactttgccataaggcctttatcttcttgccatttgtccgtctcgggggtcgccgtaggcttcggactcggttttaggccttccggactacaaaaaccgccattttagtgacgtcacggcggccattttaagtcagcgccggggaggcgtgccgtgcagttcaaacgtcatcctcaccggaactggcacaaaatggccgtcattttcttccgggttaaaggtcgctgctacgtaataggtgacgtcgctggtacctgctgtaaacacggaagtatgccccgctacgtcacttgtcacgtgactgcaacgtcacggccgccattttgttttacaaaatggccgacttccttccgctttttcaaaaataacggttcagcggcggcgc

SEQ ID NO: 706 - protein, 731 aa, Alphatorquevirus sp.
MAYWWWRRRRRAPWRSRRRWRTRRTRRRRAAFRRRGRRRRVRKRRGRWRRTYRKWRRGKKRRRHKRRLILTQWQPAFIRRCYIVGYLPLIICGENTSARNFATHSDDLISNGPYGGGMTTTKFTLRILYDEHLRHLNYWTVSNEDLDLCRYLGGTFYAYRHPTVDFIIQIHTSPPFLDTPLTGPSIHPGMLMLTKHKILIPSLKTRPNKKHKVKIKFRPPKLFQDKWYPQSELCDTTLITVFATACDLQFPFGSPLTNNPCVNFQVLGSVYKKHLSILPEKLSSYINYYDTNLYNNLQLYQTFQTIAQIKPSAQENGFTPSWQNCQNNVKLNQTGTNQSQCNDTWYYGKTYTQSITEAAKNIRKKYLSATRSALPLLQTHGDELLEYHTGVYSSIFLSAGRTYFETTGAYTDIVYNPLVDKGIGNKVWLDPLTKEDAVLNRKQAKVLLEDIPIWAALFGYTEFAAKYTGDSAISANYRLTLRCPYTDPMLVDRNNEDQGFVPYSKNFGNGKMPGGSSNVPLTMRIKWYPILFHQLELMEELVQCGPFAYKGEEKMCVLAIKYNFRWKWGGNPVSHQIVRNPCKGGSGARREPRSIQAVDPKYVTPTLSFHSWDFRRGLFGKASIERMSRESETNIYPTGPPRKRPKRDTDPYDSQQEENSISRHLQLQPWVHSSQEAQSEEETQVPENLQEQLLQQLREQQQLRVHLQSLASQVLKIRAGYGIHPLLSSQA

SEQ ID NO: 707 - protein, 148 aa, Alphatorquevirus sp.
MFLGKLYRKKRLLSLSPLHTPQKTCRLLTTMWRPPAHNVQGQERQWYESCFRSHAAMCGCGDFIRHLCHLADNFGRPPTVPRPPAPTPPVRPLPALPAPPNPSGSRAAWPTGGGDGEDEPRGGADGAGGLAELADEELLSAAVDVAEE

SEQ ID NO: 708 - protein, 59 aa, Alphatorquevirus sp.
MFDPAGPKPIQGYEAWHDEFTTCKYWNRPARKYHTDIPFYPDVPKAPDQIRVSFKLGFQ

SEQ ID NO: 709 - DNA, 3481 bp, Alphatorquevirus sp.
gcgcgcgcgctacgcgcgcgcgccccgggagtcaaggggcaattcgggctcgggactggccgggctatgggcaaggctcttaaagaatgcgtttttctcgaatttatcgcagaaagaagaggctgctgccactgctttgcttgcgagctgaaccgaaagcacaacctaatatgagctggtgcactccagttgaaaatgcctataagagagagatcaactttctcaggggctgccaactgcttcacactagcttttgcggttgtgatgattttattaatcatgttattcgcctacaaaatcttcacgggaatctacaccagcccacgggaccgtctacacctccagtgacccgtagagctctggccctgcctgctgctccggagtcatggcgttccggtggtggtggtggagacgccgcccccagcgacggtggacccgccgcagatggaggagactacgaacccggagacctagacgcactgtacgacgccgtcgccgcagaccaagagtaaggagaaggcggtggggaaggagacgggggcgacgcagactgtacagacgcagatacaaaaagaggcgcaaaagacgaaaaaaaatgaccttaaaaatatggaatccatccaccattcgcgcctgtaacattaggggatttgtagcactagtagtttgtggacacactcgtgcaggctctaactatgccatacacagcgaagactacatacctcaactaaaaccctacggagggtcttttagcactactacctggagcctaaaagtactgtttgacgagcacctcaaatttagaaacaaatggagctatcctaacacagaactagaccttgccagatacaggggagccacattcacattttacagagacccaaaagtagactacatagtagtatacaacacagtgcctccatttaagcttaacaaatacagctgccctatgctacatccaggcatgatgatgcagtataaaaaaaaaatattaatacctagctatcaaacaaaaccaaagggaagcgctaaagtaagacttagaataaaacctcctgtattatttgaagataagtggtacactcagcaagacctgtgccccgttaatcttttgtcacttgcggttagcgcatgttccttcctgcatccgtttataccaccagaaagtgacaacatatgcataacgttccaggtgttgcgagatttttattacacacaaatgtcagttacacccacaacaaccacttccctaaatgacaaagacaaaaaaatatttagtgaccacttatataaaaaccctgaatactggcaatcacaccacactgctgctagattatctacctctcaaaagcctgcattaccttcaaacagcgcaatacccaatacccaaggatacttaaacacaacacctactaacacaagttttagaactggaaacaacacaatatatggccaaccaggctacaggccagacaatgagaaactaactaaaataagagaatggtactttaaccaagaaaacacagacaaccccatacatggcacttacttgaaacccacattaaactctgtagattaccacttaggaaaatacagtgctatatttttaagcccctacagaacaaacactcagtttgatacagcataccaagatgtaacctacaaccccaacacagacaaaggcaaaggaaacaaaatatggattcaaagctgcacaaaagaatccactattctagaccaaagttgtaaatgtgtagtagaagacctacctttatgggctatggtaaatggctacctagaattttgtgactcagaacttccaggagccaatatttacaatacctacattgtagttgttatatgcccttacactaaacctcaaatgctaaacaaaactaatccaaaacagggctatgtgttctatgacaccctgtttggagatggaaaaatgcctacaggcacaggcctggtacctttctggctacagagcagatggtaccctagatgccagtttcaacaacaggtgctgcatgacttatacctcaccggtccatttagctacaaagatgacctaaaatcatttagctttaatgctaaatacaaatttagcttcttatggggcggcaatatgattccccaacagattatcaaaaacccgtgcaaaaaagaagaatccacattcacctatcccagtagagagcctcgcgacttacaagttgttgacccactcaccgtgggcccagaatgggtcttccacacatgggactggagacgtggactttttggtaaagatgctatcgacagagtgtcaaaaaaaccagacgatgatgcagaatattatccagtaccaaaaaggcctcgattcttccctccaacagacacacagtcagagccagaaaaagacttcggtttcacaccggagagccaagagctattccaggaggagccacaagcaccccaagaagaaagccaagaagtacagcagcagcaactcctccagctcagactctcacagcagttcagaatcagacagcagctccagcacctgttcgtacaagtcctcaaaacccaagccggtctccacataaacccattatttttaaaccatgcataaatcaagtgtttatgtttccaccagacacccctagacccattataacaaaagaagggtgggaagatgagtttgtaacttgcaaacactgggataggccagccagaacatactacacagacaaacctacctatccttggatgcccaaggcaccccctcaatgcaatgtatctttcagactgggctttaaataaaaattcaaggccttaaactgttcacttgtcggtgtctacctctaaaggtcactaagcactccgagcgttagcgaggagtgcgaccctcccccctgatgcaacgccctcggagtccggcgctacgccttcggctgcgccggacacctcggcccccccctccacccgaaacgcttgcgcgtttcggaccttcggcgtcggggggggcgggggctttactaaacagactccgaggtgccattggacactgagtgggcgtacagcaacgaaagtgagtggggccagacttcgccatagggcctttatcttcttgccatttgtccgtgtccggggtcgacataggcttcggcctcacttttaggccttccggactaccaaaatggcgcatttagtgacgtcacggccgccattttaagtaaggcggaagcagctccactctctcacaaaatggcggcggagcacttccggcttaccgaaaaatggaggtcaattacttccaggttaaaggttagttactacgtcaccgatgacgtggggaggcgtgctgtaaaacccggaagcaggccccgcacgtcattgtcacgtggttactacgtcacagccgccattttgttttacaaaatggccgacttccttccgcttttttaaaaaaaggcgccaaaaaacggctgcggcgggg

SEQ ID NO: 710 - protein, 742 aa, Alphatorquevirus sp.; identical to SEQ ID NO: 351

SEQ ID NO: 711 - protein, 141 aa, Alphatorquevirus sp.; identical to SEQ ID NO: 352

SEQ ID NO: 712 - protein, 59 aa, Alphatorquevirus sp.; identical to SEQ ID NO: 353

SEQ ID NO: 713 - DNA, 3481 bp, Alphatorquevirus sp.
ggcggcgcgcgcgctgcgcgcgcgcgccgggtcaaggggcaattcgggctcgggactggccgggccccgggcaaggctcttaaaaaatgcgctttcgcagggttgcacagaaaaggaaagtgcttctgcaaactgtgcgagcttcaaagaagactaggcggcttctaggtatgtggcagccccccgtgcacaatgtccccggcatcgagagaaactggtacgagagctgtttcagatcccatgctgctgtttgtggctgtggcgactttgttggccatcttaatcatctggcaactactctgggtcgtcctccacgtcctgggcccccaggcggaccccgcacgccgcagataagaaacctgccagcgctcccggcgccccagggcgagcccggtgacagagcgccatggcgtggggcttctggggccgacgccgccggtggagacggtggagagcgcggcgcagacggtggagaccccgcagacgtaggagacgacgccctgctcgccgctttcgagctcgtcgaagagtaaggaggcgcggggggcggtggcgcagacgctacagaaaatggcgacgggggcgacgcagacggactcacagaaaaaagatagtcataaaacagtggcaaccaaactttattagacgctgctacataatagggtatctacccttaatattctgtggcgaaaatacaacctcccagaactatgccactcactctgacgatatgataagcaagggaccgtacgggggaggcatgactaccactaaattcactctaagaatactgtacgacgagtttaccaggtttatgaacttttggactgttagcaacgaagacctagacctgtgtagatacgtgggctgcaaactgatattttttaaacaccccacggtagactttatagtacagataaacactcagcctccttttctagacacgcacctcaccgcggccagcatacacccgggcatcatgatgctaagcaagagacacatactaataccctctctaaagacccggccaagcagaaaacacagggtggtcatcagggtgggcgccccaagactttttcaggacaagtggtacccccagtcagacctgtgtgacacagttctgctttccatatttgcaaccgcctgtgacttgcaatatccgttcggctcaccactaactgacaacccttgcgtcaacttccagattctggggccccagtacaaaaaacaccttagtattagctctacaatggatcaaactaaccaacaacattataacagccacttgtttaatcaaactgcactgtataacacctttcaaaccattgctcagcttaaagagacaggacaaactgcaaacataactacaaattggaatagcgtacaaaataatactgcacttgataagtcaggtagtaatgcaactgcaagccgagacacttggtacaaaggaaacacatacaatgaacacattagtaacttagcggaagaaaccagaaaaagatttaaagctgcaacactagcagcactaccaaactaccccacaataatgaccacagacttatatgaataccactcaggcatatactccagcatattcctatcagctggcagaagctactttgaaacaataggggcctactctgacattatatacaacccttttacagacaaaggcacaggcaacataatctggatagactacctaacaaaagaagacacaatttttgtaaaaaacaaaagcaaatgcgagataagtgacatgcccctatgggcggcctgcacaggatatacagagttttgtgcaaagtacacaggagactctgccatcatttacaatgccagagtactaataagatgcccatacactgagcccatgctagtagaccactcagaccctaacaaaggcttcgtaccctactcattcaactttggcaacggaaagatgcccggaggcagctctaacgtgcccataagaatgagagccaagtggtacgtgaacatattccaccaaaaagaagtcttggagagcatagtgcaaagcggaccgtttgggtacaagggcgacataaaatcagcagtactggccatgaaatacagatttcactggaaatggggcggaaaccctatatccaaacaggtcgtcaggaatccctgctccaactccagctcctccgcggcccatagaggacctcgcagcgtacaagcagttgacccgaaatacaataccccagaggtcacgtggcactcgtgggacatcagacgaggactctttggcaaagcaggtattaaaagaatgcaacaagaatcagatgctctttacattcctccaggaccactcaagaggcctcgcagagacaccaatgcccaagacccagaagagcaaaacgaaagctcaggtttcagagtccagcagcgactcccgtgggtccactccagccaagaaacgcaaagctcccaagaagagacggaggcgcaggggtcggtacaagaccaactactcctccagctccgagagcagcgagtactccgactccagctccagcaactcgcaacccaagtcctcaaagtgcaagcagggcacagcctacaccccctattatcttcccaagcgtaaacaaagcctttatgtttgagcccgagggtcctaaacccatacagggctacaacgattggctagaggagtatactgtttgcaaatactgggacagacccccaagaaagctacacacagacatacccttttacccctgggcacctaaacccaaagaccaagtcagggtaacctttaaactcaactttcaataaaaattctaggccgtgggagtttcacttgtcggtgtctgcttcttaaggtcgccaagcactccgagcgccagcgaggagtgcgaccccccctccggtagcaacgccttcggagccgcgcgctacgccttcggctgcgcgcggcacctcagacccccgctcgtgctgacacgctcgcgcgtgtcagaccacttcgggctcgcgggggtcgggaaatttattaaacagactccaggttgccattggacactggagctgtgaatcagtaacgaaagtgagtggggccagacttcgccatagggcctttatcttctcgccattagatagtgtaaggggtcgccgtaggcttcggcctcgttttcaggccttccggactacaaaaatggcggatttggtgacgtcacgaccgccattttaagtaaggcggaagtagttccactttcttacaaaatggcggcggagcacttccggcttgcccaaaatggcgggcaagctcttccgggtgaaaggtcagcaactacgtcacaagtcacgtggggagggttggcgtcacaacccggaagccaatcctctcacgtggctcgtcacgtgactgctacgtcatcagcgccatgttgttacacaaaatggcggacaacttccgcttttttaaaaaaaggcgcgaaaaaacggcggc

SEQ ID NO: 714 - protein, 736 aa, Alphatorquevirus sp.
MAWGFWGRRRRWRRWRARRRRWRPRRRRRRRPARRFRARRRVRRRGGRWRRRYRKWRRGRRRRTHRKKIVIKQWQPNFIRRCYIIGYLPLIFCGENTTSQNYATHSDDMISKGPYGGGMTTTKFTLRILYDEFTRFMNFWTVSNEDLDLCRYVGCKLIFFKHPTVDFIVQINTQPPFLDTHLTAASIHPGIMMLSKRHILIPSLKTRPSRKHRVVIRVGAPRLFQDKWYPQSDLCDTVLLSIFATACDLQYPFGSPLTDNPCVNFQILGPQYKKHLSISSTMDQTNQQHYNSHLFNQTALYNTFQTIAQLKETGQTANITTNWNSVQNNTALDKSGSNATASRDTWYKGNTYNEHISNLAEETRKRFKAATLAALPNYPTIMTTDLYEYHSGIYSSIFLSAGRSYFETIGAYSDIIYNPFTDKGTGNIIWIDYLTKEDTIFVKNKSKCEISDMPLWAACTGYTEFCAKYTGDSAIIYNARVLIRCPYTEPMLVDHSDPNKGFVPYSFNFGNGKMPGGSSNVPIRMRAKWYVNIFHQKEVLESIVQSGPFGYKGDIKSAVLAMKYRFHWKWGGNPISKQVVRNPCSNSSSSAAHRGPRSVQAVDPKYNTPEVTWHSWDIRRGLFGKAGIKRMQQESDALYIPPGPLKRPRRDTNAQDPEEQNESSGFRVQQRLPWVHSSQETQSSQEETEAQGSVQDQLLLQLREQRVLRLQLQQLATQVLKVQAGHSLHPLLSSQA

SEQ ID NO: 715 - protein, 148 aa, Alphatorquevirus sp.
MRFRRVAQKRKVLLQTVRASKKTRRLLGMWQPPVHNVPGIERNWYESCFRSHAAVCGCGDFVGHLNHLATTLGRPPRPGPPGGPRTPQIRNLPALPAPQGEPGDRAPWRGASGADAAGGDGGERGADGGDPADVGDDALLAAFELVEE

SEQ ID NO: 716 - protein, 59 aa, Alphatorquevirus sp.
MFEPEGPKPIQGYNDWLEEYTVCKYWDRPPRKLHTDIPFYPWAPKPKDQVRVTFKLNFQ

SEQ ID NO: 717 - DNA, 3480 bp, Alphatorquevirus sp.
agaccccccctccacccgaaacgcttgcgcgtttcggaccttcggcgtcgggggggtcgggagctttattaaacagactccgaggtgctcttggacactgagggggtgaacagcaacgaaagtgagtggggccagacttcgccataaggcctttatcttcttgccattagatagtgtagggggttgccataggcttcggcctcgtttttaggccttccggactacaaaaatggcggatttagtgacgtcacggccgccattttaagtaaggcggaagcagctccactttctcacaaaatggcggcggagcacttccggcttgcccaaaatggcgggcaagctcttccgggtcaaaggtcggcatctacgtcacaagtcacgtggaaagggttggcgtcacaacccggaagccaatcgtctgacgtggcctgtcacgtgactgctacgtcatcggcgccatcttgtgtcacaaaatggcgaacaacttccgcttttttgaaaaaaggcgcgaaaaaacggcggcggcggcgcgcgcgctgcgcgcgcgcgccggggtcaaggggcaattcgggctcgggactggccgggccccgggcaaggctcttaaaaaatgcgctttcgcagggttgcagagaaaaggaaagtgcttctgcaaactgtgcgagctacaaagaaggctaggcggcttctaggtatgtggcagccccccgtgcacaatgtccccggcatcgagagaaactggtacgagagctgtttcagatcccatgctgctgtttgcggctgtggcgactttgttggtcatcttaatcatctggcagctactctgggtcgtcctccgcgttctcggcaccccgggggccccggcactcctcagataagaaacctgccagcgctcccggcgccccagggcgagcccggtgacagagcgacatggcgtggggcttctggggccgacgccgccggtggagacggtggagagcgcggcgcagacggtggagatcccgcagacgtaggagacgacgccctgctcgccgctttcgagctcgtcgaagagtaaggaggcgcggggggcggtggcgcagacgctacagaaaatggcgacggggcagacgcagacggactcacagaaaaaaaataatcataaaacagtggcaaccaaactttatcagacgctgctacattatagggtacctacccttaatattctgtggcgaaaataccactgcccaaaactatgccactcactctgacgatatgataagcaaaggaccgtacggggggggcatgactaccaccaaatttactctgagaatactgtacgacgagtttaccaggtttatgaacttttggactgtcagtaacgaagacctagacctgtgtagatacgtgggcgccaaactcatattttttaagcaccccacggtggactttatagtgcagataaacacccagcctccttttctagacacgcacctcaccgcggccagcatacacccgggcatcatgatgctcagcaagagacacatactcataccctctctaaaaacccggccaagcaaaaaacacagggtggtggtcagggtgggcgcccccaaactgtttcaggacaagtggtacccccagtcagacctgtgcgacacagttctgctttccatatttgcaaccgcctgtgacttgcaatatccgttcggctcaccactaactgacaacccttgcgtcaacttccagatcctggggccccagtacaaaaaacaccttagtattagctctactaatgataacagtaacaaaacacactacaatgaaaatctttttaagaaaactgaactatacaacacttttcaaaccatagcacaacttaaagaaacaggacaagcaacagacataacccctagttggaatgatgtgcaaaacacaacaacactacatagtacaggcaacaatgcaactcagagccgagacacttggtacaagggcaatacatacaaaaacaacatatcacaattagcagaaaaaaccagacaaagatttcaagctgcaacaaaggcagccctgcctaactaccccacaataatgaccacagacctatatgaataccactctggcatatactccagtatttacctgtcagctggcaggagctactttgagacaacaggggcctactctgacattatatacaaccccttcacagacaaaggcacaggcaacattatctggatagactacctaacaaaagaagacactatttttgtaaaaaacaaaagcaaatgtgagatagaggacatgcccctgtgggctgcctgtactggatacacagagttctgtgctaaatacacaggagactctgccataatatacaatgccagaatacttataagatgcccatacacagaacccatgctagtagaccactcagacccaaacaaaggctttgtcccctactcatttaactttggcaacggaaaaatgcccggaggcagctccaacgtacccataagaatgagggcaaagtggtacgtgaacatgtttcaccaaaaagaagtactagaagccatagtacagagcggaccgttcgggtacaagggcgacataaaatcagctgtactggccatgaaatacagatttcactggaagtggggtggaaaccctatatccaaacaggtcgtcagaaatccgtgctccaactccagctcctccgcggcacatagaggacctcgcagcgtacaagcagttgacccgaaatacaataccccagaggtcacgtggcactcgtgggacatcagacgaggaatctttggcaaagcaggtattaaaagaatgcaacaagaatcagatgctctttacattcctccaggaccactcaagagacctcgcagagacacgaacgcccaagatccagaagagcaaaacgaaagctcaggtttcagagtccagcagcgactcccgtgggtccactccagccaagagacgcaaagctcccaagaagagacggaggcgcaggggtcggtacaagaccaactacacctccagctccgagagcagcgagtactccgactccagctccagcaactcgcaacccaagtcctcaaagtccaagcagggcacggcctacaccccctattatcttcccaagcgtaaacaaagcctttatgtttgagccccagggtcctaaacccatacagggctacaacgattggctagaagagtacactgcctgcaaatactgggacagacccccaagaaagctacacacagacatacccttttacccctgggcaccaaaaccccaagaccaagtcagggtctcctttaaactcaactttcaataaaaattgctaggccgtgggagtttcacttgtcggtgtctgcttcttaaggtcgccaagcactccgagcgcaagcgaggagtgcgaccccccttccggtagcaacgccttcggagccgcgcgctacgccttcggctgcgcgcggcacctc

SEQ ID NO: 718 - protein, 736 aa, Alphatorquevirus sp.; identical to SEQ ID NO: 702

SEQ ID NO: 719 - protein, 148 aa, Alphatorquevirus sp.; identical to SEQ ID NO: 703

SEQ ID NO: 720 - protein, 59 aa, Alphatorquevirus sp.; identical to SEQ ID NO: 704

SEQ ID NO: 721 - DNA, 3478 bp, Alphatorquevirus sp.
cgggtgccggaggtgagtttacacaccgcagtcaaggggcaattcgggctcgggactggccgggccctgggcaaggctcttaaaaatgcacttttctaaaataagcagaaagaaaaggaaactgctactgcaaactgtgccgcttgcagagatcgaacggactaccatgagctggtccagacccgtccaaaatgtttccattctcgaacaaaactggttcgaatcctgcctcagatcacacgcatgcttctgtggctgtaataatcctattattcattttaataacattgctactcgctttaactatttgcctactgccaatccgcctgtgggaccctcccaaccgcccacacgcccgccgtcccgcttgagaccccttcccgctctccccgcgcctcccgctgatccacaagcaccatgggctggggctggtggctcaagcggtggaggagaagaaagaaaccagcgtggaagaagtggagaacgcgcagatggagaagatttcgacgcagaagacctaaacgcacttatggccgccgtcgaagaagacgaacagtaaggaggcgccgcggtagacgactgaggaggagggggtggactaggagacggtacataagacgcagacgcaaaaagaaaaagctagtactgacccagtggaacccccaggacgttaggagatgcacaataaggggcataataccccttatcatgtgcggtgcaaacactgccagttttaattatggcatgcacagcgatgacagcaccccccagccagagaagttcgggggaggcatgagcacagtaacattcagtttatttgtactatatgaccagtacaccagacacctaaacaggtggtcgtacccaaacgaccagctagacctagccagatacagaggctgcaaatttaaattctacagagacacctcaacagactttatagtcacctatgacattaatccacccatgaaaaacacagaactaagcagccctaacacacacccaggcatgcttatgcagcaaaaaagaaaggtactcgtccctagctgggacacgtatcccagaggcagaaaatatgtcctagttaagataccaccccccaaactgtttgaagaccactggtacactcagccagacttgtgcaaagttcctcttgtaactttgcggtcaactgccgctgacctcaaacatccgttctgctcaccacaaacgaacaacccttgcaccaccttccaggtgttgcgcacccagtataacagtatgataggcttcccctttaactataacccatcagacgcaactcaaacacaacagttaaaaacatttgaaaaatggctatattcatctagcacacactatcagacatttgccactgaagctaaccttagacccagacagtacaatgcagacggaactcaaaataaggactacagcaagttacaatccacctggacaactactatatatgcaaaaaaaacagatagcaactttggctacacatcatacaacttttcaggagaggatggctataagtatgtaacacaaattagacagtggtactggacacaactaacatcctggacacaaacagtccctcacataaacagcaccttttccaatgccattcacccagagtttgaataccacgcgggctggtactcaaacatatttataggccccaacagatttaatatacagtttagagcagcctacatggatgtcacctacaacccaataaatgacaaaggccacctgaacaaagtatggttccagtacagcacaaaacccaccacagactttgtagaaaagcaggccaaatgtttactgcaaaacctgcctttgtggagcatgctgttcggctactcagagtatgtagaaagtcagctaggcccctttcaggaccacgaaacagtaggcctagtaatagtacagtgcccatacacagtaccccccatgtatgacaaagacaatccagacatggggttcgtgttctatgacacacactttggcaacggaaagctaggcaacggactgggccaggtacccagatactggcagcagagatggtaccccatcttaaagagacagaaacaagtcatgaatgacatctgcaagacgggaccatttgcgtacagagacgagagactgcaagctgacttgactgcaggatactcatttaagtttaactggggtggtgacttaatctaccaccaggttgtcaaaaacccatgcgactcaggaggactggtgccttccgactccagtagattcaagcgggacgtacaagttgttagcccgctcaccatgggacccagactcatcttccactcgttcgaccaaagacgggggctctttactgacagagctatcaaaagaatgtacgatgaacagattaatgttccagactttacagaacagcctaaaatcccccgacttttccccccagtcgagctcaaagaaagggaagaaaaagactcagattcggagacagagacgatcagcagctcccaagaaaaagaagcgaaaaggcaagaggcgctaccagtccagcagcagctccgactccaactgcgagaacaacagcgactccgagtccacttgcagcacctcttcctccaactccagaaaaccaaagcaaatttacatttaaacccactatcttttcagcaagagataagctagacatgtttggtaacattatagatagaaagcctacctcccaggactgggagacagagtacatagcctgtagaatatttgacaggccccccagacagcaactcacagaccctcctttctatccttggatgcctaagcctaaacctgcatgccgtgtaacctttaagcttggctttcaataaacaaggccgtgggagtttcacttctcggtgtctacctctataagtcactaagctctccgagcgaagcgaggagagcgaccctaaaccaaggggcaactccctcgaagtccggcgctacgcgcttcgcgctgcgccggacatctcggaccccccctccacccgaaacgcttgcgcgtttcggaccttcggcgtcgggggggtcgggagctttattaaacagactccgagttgccattggacactggagctgtgaatcagtaacgaaagtgagtggggccagacttcgccataaggcctttatcttcttgccatttgtcagtgttcggggtcgccataggcttcggcctccattttaggccttccggactaccaaaatggcgcatttttaagagccttgcccagggcccggccagtcccgagcccgaattgccccccggccccccccccgaagaacgtcactaaccacgtgactcccgcaggccaatcacagtctatgtcgtgcacttcctgggcatggtctacgtgataatataaagaacagcacttccgaatggctgagttttccacgcccgtccgcagcgaggagcagccgaagggagatccgcgcgtcccgaggg

SEQ ID NO: 722 - protein, 754 aa, Alphatorquevirus sp.
MGWGWWLKRWRRRKKPAWKKWRTRRWRRFRRRRPKRTYGRRRRRRTVRRRRGRRLRRRGWTRRRYIRRRRKKKKLVLTQWNPQDVRRCTIRGIIPLIMCGANTASFNYGMHSDDSTPQPEKFGGGMSTVTFSLFVLYDQYTRHLNRWSYPNDQLDLARYRGCKFKFYRDTSTDFIVTYDINPPMKNTELSSPNTHPGMLMQQKRKVLVPSWDTYPRGRKYVLVKIPPPKLFEDHWYTQPDLCKVPLVTLRSTAADLKHPFCSPQTNNPCTTFQVLRTQYNSMIGFPFNYNPSDATQTQQLKTFEKWLYSSSTHYQTFATEANLRPRQYNADGTQNKDYSKLQSTWTTTIYAKKTDSNFGYTSYNFSGEDGYKYVTQIRQWYWTQLTSWTQTVPHINSTFSNAIHPEFEYHAGWYSNIFIGPNRFNIQFRAAYMDVTYNPINDKGHLNKVWFQYSTKPTTDFVEKQAKCLLQNLPLWSMLFGYSEYVESQLGPFQDHETVGLVIVQCPYTVPPMYDKDNPDMGFVFYDTHFGNGKLGNGLGQVPRYWQQRWYPILKRQKQVMNDICKTGPFAYRDERLQADLTAGYSFKFNWGGDLIYHQVVKNPCDSGGLVPSDSSRFKRDVQVVSPLTMGPRLIFHSFDQRRGLFTDRAIKRMYDEQINVPDFTEQPKIPRLFPPVELKEREEKDSDSETETISSSQEKEAKRQEALPVQQQLRLQLREQQRLRVHLQHLFLQLQKTKANLHLNPLSFQQEIS

SEQ ID NO: 723 - protein, 167 aa, Alphatorquevirus sp.
LAGPWARLLKMHFSKISRKKRKLLLQTVPLAEIERTTMSWSRPVQNVSILEQNWFESCLRSHACFCGCNNPIIHFNNIATRFNYLPTANPPVGPSQPPTRPPSRLRPLPALPAPPADPQAPWAGAGGSSGGGEERNQRGRSGERADGEDFDAEDLNALMAAVEEDEQ

SEQ ID NO: 724 - protein, 58 aa, Alphatorquevirus sp.
MFGNIIDRKPTSQDWETEYIACRIFDRPPRQQLTDPPFYPWMPKPKPACRVTFKLGFQ

SEQ ID NO: 725 - DNA, 3477 bp, Alphatorquevirus sp.
agacccccgctcgtgctgacacgcttgcgcgtgtcagaccacttcgggctcgcgggggtcgggaaatttgctaaacagactccaagttgccattggacactggagctgtgaatcagtaacgaaagtgagtggggccagacttcgccataaggcctttatcttcttgccatttgtcagtatagggggtcgccataggcttcggcctgggttttaggccttccggactacaaaaaccgccatattagtgacgtcacgggcgccattttaagtaagcaggaagcggctcggtgtatacaaaatggccgcggagcacttccggcttgcccaaaatggtggttaagttcttccgggtcaaaggtcatcggcgccatcttggtcacgtgactgcctacgtcacggccgccattttgtttgacaaaatggccgacttccttcctctttttcaaaaaaaagcggaagtgccgccgcggcggcggggggcggcgcgctgcgcgcgccgggctcttaaaaaagccatgtttctcggtaaactttacagaaagaaaagggcactgctactgcctagcctgccagctgcaaagaaaaaaccacctgctatgagccagtgggtccctccggtgcacaacataaatggccgctgccaccagtggtatgaggggtgctaccgtactcatgctgctttttgtggttgtggcaattttattaatcaccttattgctctgggcgatcagtatggcttcaggccgggttcgagggctcccggcgctccgggagtaggcggacctccggtcccgctccgtcgagccctgccggctccggagccttcccagcaggctaacaacaacaacaaccagagatggtctggggatggtggcgccgacgcaggcgagggtggctccggagcttctggaggaggagagcagctgccagaagacgatctcgatggattgctcgccgcgctagacgacgaagagtaaggagaaaaaggaggtggaggaggaggagagggcgacgcagacggtttatctatagaaaaaagagacgttacagacgcaggagaaagagacaaaaaataataataaaacaatggcaaccggccgttgtcagacgctgcaggatagtggggtacatggctgctctaataagtggaaacgggacctttgctacaaattacagcagccacttagaggacagaatacagaagggaccctttggagggggccacagcaccatgagattctctctgtacgtgctgtaccaagaacacctcagacacatgaactactggacttacacaaacaaggacttagaactgactagatacctgggggcgactataaccttctacagacatcccaccagagactttatagtgacttatagcagacgcacccctctgggaggaaacatactgacagccccctcgctacatccaggcaatgcaatgctaagtaagagaaaaatactcatacccagcttagaaaccagacccaagggtaaaaagacaaaaaaactaagaatagggcccccaacactactaatagacaagtggtactttcagaaagacttttcagacgttacactgtttaacctcaatgttacggaagctgacttgcggtttccgttctgctcaccacaaactgacaacatttgcgtaaacttccaggttctgaaatcctgttacaacgaatacctaggtatacatacatttgacaatgacaataacgatgttaaattaaaagaattttttaataaagctctagtcacaacaggccaacaaaacacagagataaatatactaaacacatttagaacacagggatgccttagccatcctcaagtaaatgtacccaatgctaccagtaacccaaacaaccaagtaacatcggaggaatatttccaaaaactagatggactctggggaaacccaatatatgcaaactccagaaacaatggaggcaaatccactgaaaactttaataaaaccacttttataaacaaatacctaataggtaacatgagcagctaccacaaaaaatttacaacagacaacctgccacaaagctggaaaggcaacaaagcacactgccacctcacaggaatatacagtccaccatacctgaactcaggcagaatatctccagagatatttggcctgtacacagaaataatatacaacccatacacagacaaaggcaaaggaaacaaaatatgggtagacgcactcacaaagggagacaacatatacagcagcacccagagcaggtgtctcttacaagacctacctctctggtgcgcctgtttcgggtacacagactggattaaaaaagaattaaaccactgggacgcaccgtggaactacagactcctaatggtgtgtccctacacatacccaaaactgtacaacgatgcaaacccaaactatggatacgtatgcttctcatatcaatttggagcaggacagatgccggacggcagctcctacgtccctataaaatggaggggaaaatggtaccctaacatgatccaccaacaaaaagttatggaggacctagccagatcaggcccctttgccccaaaacaacaggtacctagcgtgcagctcagcatgaagtacaaatttgcatttaactggggcggtaatcctattttggaacagattgttagagaccccagcactcagcccacctacgaaattcccggtgccggtaacctccctactagagtacaagtcatcgacccgagggttattggaccacaatactcatttagatcctgggactggagacgcggacagtttaatgaaaaaagtattaaaagaatcgcagaacaacaagagacttctgagtatctattttcaggcccaaaaaggccaaggatcgaccagcgcccttacaacccacaagaagaaagctggtcttcaacagtccaacaaagagaaccgaaaccgtgggcctcagaagaagagacggagagccagagccaaagcgaagaagaggcggagacatcaatcagagagcagctgcagcaccagctccaagagcaacacagaatcagacatggaatcaagtgcctcttcgagcagctagtcagaacccagcagggagtacacctacatccatcccttgtgtaggcccaaagaagtacatgtttccagagagggcccctaaaccagctccgagcagcggagactgggagatggaatacctaatgtgtaagctgtttaacaggccccccagaagcaacctaaaagatgtgcctttctacccgtgggttaaaaaccagtacaatgtaagctttcaactcaactacaaataaacctcagcttcaacttgctaggccgtgggagtttcacttgtcggtgtctacctcttaaggtcactaagcactccgagcgtcagcgaggagtgcgacccttccccctgactcaacttcttcggagccgcgcgctacgccttcggctgcgcgcggcacctc

SEQ ID NO: 726 - protein, 758 aa, Alphatorquevirus sp.; identical to SEQ ID NO: 518

SEQ ID NO: 727 - protein, 218 aa, Alphatorquevirus sp.
LPKMVVKFFRVKGHRRHLGHVTAYVTAAILFDKMADFLPLFQKKAEVPPRRRGAARCARRALKKAMFLGKLYRKKRALLLPSLPAAKKKPPAMSQWVPPVHNINGRCHQWYEGCYRTHAAFCGCGNFINHLIALGDQYGFRPGSRAPGAPGVGGPPVPLRRALPAPEPSQQANNNNNQRWSGDGGADAGEGGSGASGGGEQLPEDDLDGLLAALDDEE

SEQ ID NO: 728 - protein, 134 aa, Alphatorquevirus sp.; identical to SEQ ID NO: 520

SEQ ID NO: 729 - DNA, 3475 bp, Alphatorquevirus sp.
cgggtgccggaggtgagtttacacaccgcagtcaaggggcaattcgggctcgggactggccgggctatgggcaaggctcttaaaaaggcatgtttctcggtaaactctacagaaagaaaaggaaactgctactgccagctgtgcatccttcaccggcgccatcttccatgagctcgacctggcgggtcccgcggggcgatgtcgcctcccgtgagcgtcactggtacctttcagtacgagacagccacgacgctttttgtggctgtcgtgatcctatttttcatctttctcgtctggctgcacgttttaacaatcagggacctccgccgcccccccaggacgacggcccgacgtcggctaccccagtgagacgcctcctcccgctaccctcctacccgggagagggtcccccagatagatggcctggtgggcatggaggcgccgctggtggcggccgcggagacggtggcgatgggggcgtacgcgccgcagacgaagagtaccggcccgaagacctcgacgagcttttcggcgctatcgaacaagaacagtaaggaggcgccggagggggaggcggaggggctacaggcgacggtacagactgagacgcttgcgcagacgcagatacaaacgcaaaaagatagtactgactcagtggaacccccagaccgtcaggagatgcaccataaagggtctcatgccagtactctgggcgggcatgggccaggggggccacaactatgcggtgcgctccgatgactacgtggccaaggggggtttcgggggctccttcgccacagagaccttctccctgaaggtgctctatgaccaataccagaggggctttaacaggtggacttatagcaacgaggacttagacctagccctgtactatggctgcaagtgggtcttctacagaagcccagacacagactttatagtatacttcactaacaatccccccatgaagaccaaccagttcaccgctcccctgaccactccaggcatgctcatgaggaacaaatataagatactgatacccagctttaaaaccaggcccaaggggcgcaaaacagtgactgtgagaataaaaccccccaaactgttcctgcacaagtggtacacccagcaggacctgtgcccagttccgttagtccaactgaacgtgaccgcagcggatatgcaacatccgttcggctcaccactaactgaaaacccttgcatcactttccaagttttagggaacttgtacaataactgcctcaacattgacctcccccaatttacagaaaatggagaacttgaaaatagtccaaattatactagaggaaatacagaggacttaaaaaccctttataaagaattattctgtaagaaagaaagcggtcactactggcaaaccttcatcactaactccatgatgaagtcccacatagacgctaccaaagctcagtcagctaccactaactatcccaacgcgccacaaagcgtagcctacaacaaagcggactttcctacaaagccagccaaagaaaacttcattagctggaaaaacaaatttactgacggtagagacagtaactttctctttgccacctatcaccctgaccaagtaacaaccacaattaaagaaatgagagacaataactttgccttagaaacaggccccaatgacaagtacgggtccttcaccagccagtacaccagaaacactcacctactagactactacctgggcttctacagccccatcttcctgtccccagcaaggtccaatatagaattttttacagccttcagagacatagtgtacaaccctctcctagacaaagcccagggcaacatgatctggttccagtatcacactaaatttgacaataaattcaaaaaaccagaatgccactgggagatagcagatatgcccctgtgggccctctgcaacgggtacgtagagtacctcgagagtcagattaaatatggagatatactcctagagggcaaagtcctcataaggtgtccttacaccaagccgcccctagtagacaagaacgaccccacagccgggttcgttgtctacaacactaactttggcatgggcaagtggatagacggcggcggctacatccccctacacgagagaagcaagtggtatgtcatgctcagataccagacggacgtcctccatgacatagtaacctgtggaccgtggcagtacagagacgataacaaaaacgctcagctagtggccaagtactactttcggttcaagtggggaggaaacacaatccattcccaggttatcagaaacccgtgcccagacaccgaagtttccggagcccgtcgacagcctagacaagtacaagtcgttgacccgcagctcatcacaccgccgtgggtcctccacacgttcgaccagagacgcggactctttagtgaagcagctatcagacgtctgctcaaacaaccaattcctggcgagtatgatcctcaacccccccgagtcccactcctctttctaccctcagcattccagaaagaagacggcggtgccgaaagcgactccggttcaccggtcaaaagaccccggtactcgttcgaagagagccagacggaaaccctctcctcggaggaggacccggcggagacgacgagggagctcctcctccgaaagctccgagagcagcgagcactccagttccagctgcagcacttcgcagtccaactcgccaagacccaagcgaacctgcacgtaaaccccctgtcatactgcccgccataaacaaggtgtttctgtttccccccgagggtcccaaacccatctcaggcagagaggcctgggcagacgagtacgccaccgcggcggcctgggacaggcccgtccgcacctaccactcagacacccccatttatccctggatgccccaacaattccgtgtaagcttcaaactcgggttccaataaaaatatactaggccgtaaactgttcacttgtcggtgtctacctcttaaggtcactaagcactccgagcgtcagcgaggagtgcgaccctctaccctggtgcaacgccctcggcggccgcgcgctacgccttcggctgcgcgcggcacctcggacccccgctcgtgctgacacgctcgcgcgtgtcagaccacttcgggctcgcgggggtcgggaattttgctaaacagactccgagttgccattggatactgtagctgtgaatcagtaacgaaagtgagtggggccagacttcgccataaggcctttatcttcttgccattggacagtgtcgggggtcgccataggcttcgggctcggttttaggccttccggactaccaaaatggcggattccgtgacgtcatggccgccattttgagtaaggcggaacaggctgtcaccccgtgtcaaaggtcaggggtcagccttccgctttgcgagatcgcgacggaggagcgatcgagcgtcccgaggg

SEQ ID NO: 730 - protein, 786 aa, Alphatorquevirus sp.
MAWWAWRRRWWRPRRRWRWGRTRRRRRVPARRPRRAFRRYRTRTVRRRRRGRRRGYRRRYRLRRLRRRRYKRKKIVLTQWNPQTVRRCTIKGLMPVLWAGMGQGGHNYAVRSDDYVAKGGFGGSFATETFSLKVLYDQYQRGFNRWTYSNEDLDLALYYGCKWVFYRSPDTDFIVYFTNNPPMKTNQFTAPLTTPGMLMRNKYKILIPSFKTRPKGRKTVTVRIKPPKLFLHKWYTQQDLCPVPLVQLNVTAADMQHPFGSPLTENPCITFQVLGNLYNNCLNIDLPQFTENGELENSPNYTRGNTEDLKTLYKELFCKKESGHYWQTFITNSMMKSHIDATKAQSATTNYPNAPQSVAYNKADFPTKPAKENFISWKNKFTDGRDSNFLFATYHPDQVTTTIKEMRDNNFALETGPNDKYGSFTSQYTRNTHLLDYYLGFYSPIFLSPARSNIEFFTAFRDIVYNPLLDKAQGNMIWFQYHTKFDNKFKKPECHWEIADMPLWALCNGYVEYLESQIKYGDILLEGKVLIRCPYTKPPLVDKNDPTAGFVVYNTNFGMGKWIDGGGYIPLHERSKWYVMLRYQTDVLHDIVTCGPWQYRDDNKNAQLVAKYYFRFKWGGNTIHSQVIRNPCPDTEVSGARRQPRQVQVVDPQLITPPWVLHTFDQRRGLFSEAAIRRLLKQPIPGEYDPQPPRVPLLFLPSAFQKEDGGAESDSGSPVKRPRYSFEESQTETLSSEEDPAETTRELLLRKLREQRALQFQLQHFAVQLAKTQANLHVNPLSYCPP

SEQ ID NO: 731 - protein, 154 aa, Alphatorquevirus sp.; identical to SEQ ID NO: 40

SEQ ID NO: 732 - protein, 64 aa, Alphatorquevirus sp.
LPAINKVFLFPPEGPKPISGREAWADEYATAAAWDRPVRTYHSDTPIYPWMPQQFRVSFKLGFQ

SEQ ID NO: 733 - DNA, 3474 bp, Alphatorquevirus sp.
gcggcgggggcgcgcgcgctacgcgcgcgagtcaaggggcaattcgggctcgggactggccgggctatgggcaaggctcttaaagaatgcgtttttctcgaatttatcgcagaaagaagaggctgctgccactgctttgcttgcgagctgaaccgaaagcacaacctaatatgagctggtgcactccagttgaaaatgcctataagagagagatcaactttctcaggggctgccaactgcttcacactagcttttgcggttgtgatgattttattaatcatgttattcgcctacaaaatcttcacgggaatctacaccagcccacgggaccgtctacacctccagtgacccgtagagctctggccctgcctgctgctccggagtcatggcgttccggtggtggtggtggagacgccgcccccagcgacggtggacccgccgcagatggaggagactacgaacccggagacctagacgcactgtacgacgccgtcgccgcagaccaagagtaaggagaaggcggtggggaaggagacgggggcgacgcagactgtacagacgcagatacaaaaagaggcgcaaaagacgaaaaaaaatgaccttaaaaatatggaatccatccaccattcgcgcctgtaacattaggggatttgtagcactagtagtttgtggacacactcgtgcaggctctaactatgccatacacagcgaagactacatacctcaactaaaaccctacggagggtcttttagcactactacctggagcctaaaagtactgtttgacgagcacctcaaatttagaaacaaatggagctatcctaacacagaactagaccttgccagatacaggggagccacattcacattttacagagacccaaaagtagactacatagtagtatacaacacagtgcctccatttaagcttaacaaatacagctgccctatgctacatccaggcatgatgatgcagtataaaaaaaaaatattaatacctagctatcaaacaaaaccaaagggaagcgctaaagtaagacttagaataaaacctcctgtattatttgaagataagtggtacactcagcaagacctgtgccccgttaatcttttgtcacttgcggttagcgcatgttccttcctgcatccgtttataccaccagaaagtgacaacatatgcataacgttccaggtgttgcgagatttttattacacacaaatgtcagttacacccacaacaaccacttccctaaatgacaaagacaaaaaaatatttagtgaccacttatataaaaaccctgaatactggcaatcacaccacactgctgctagattatctacctctcaaaagcctgcattaccttcaaacagcgcaatacccaatacccaaggatacttaaacacaacacctactaacacaagttttagaactggaaacaacacaatatatggccaaccaggctacaggccagacaatgagaaactaactaaaataagagaatggtactttaaccaagaaaacacagacaaccccatacatggcacttacttgaaacccacattaaactctgtagattaccacttaggaaaatacagtgctatatttttaagcccctacagaacaaacactcagtttgatacagcataccaagatgtaacctacaaccccaacacagacaaaggcaaaggaaacaaaatatggattcaaagctgcacaaaagaatccactattctagaccaaagttgtaaatgtgtagtagaagacctacctttatgggctatggtaaatggctacctagaattttgtgactcagaacttccaggagccaatatttacaatacctacattgtagttgttatatgcccttacactaaacctcaaatgctaaacaaaactaatccaaaacagggctatgtgttctatgacaccctgtttggagatggaaaaatgcctacaggcacaggcctggtacctttctggctacagagcagatggtaccctagatgccagtttcaacaacaggtgctgcatgacttatacctcaccggtccatttagctacaaagatgacctaaaatcatttagctttaatgctaaatacaaatttagcttcttatggggcggcaatatgattccccaacagattatcaaaaacccgtgcaaaaaagaagaatccacattcacctatcccagtagagagcctcgcgacttacaagttgttgacccactcaccgtgggcccagaatgggtcttccacacatgggactggagacgtggactttttggtaaagatgctatcgacagagtgtcaaaaaaaccagacgatgatgcagaatattatccagtaccaaaaaggcctcgattcttccctccaacagacacacagtcagagccagaaaaagacttcggtttcacaccggagagccaagagctattccaggaggagccacaagcaccccaagaagaaagccaagaagtacagcagcagcaactcctccagctcagactctcacagcagttcagaatcagacagcagctccagcacctgttcgtacaagtcctcaaaacccaagccggtctccacataaacccattatttttaaaccatgcataaatcaagtgtttatgtttccaccagacacccctagacccattataacaaaagaagggtgggaagatgagtttgtaacttgcaaacactgggataggccagccagaacatactacacagacaaacctacctatccttggatgcccaaggcaccccctcaatgcaatgtatctttcagactgggctttaaataaaaattcaaggccttaaactgttcacttgtcggtgtctacctctaaaggtcactaagcactccgagcgttagcgaggagtgcgaccctcccccctgatgcaacgccctcggagtccggcgctacgccttcggctgcgccggacacctcggcccccccctccacccgaaacgcttgcgcgtttcggaccttcggcgtcggggggggggcgggggctttactaaacagactccgaggtgccattggacactgagtgggcgtacagcaacgaaagtgagtggggccagacttcgccatagggcctttatcttcttgccatttgtccgtgtccggggtcgacataggcttcggcctcacttttaggccttccggactaccaaaatggcgcatttagtgacgtcacggccgccattttaagtaaggcggaagcagctccactctctcacaaaatggcggcggagcacttccggcttaccgaaaaatggaggtcaattacttccaggttaaaggttagttactacgtcaccgatgacgtggggaggcgtgctgtaaaacccggaagcaggccccgcacgtcattgtcacgtggttactacgtcacagccgccattttgttttacaaaatggccgacttccttccgcttttttaaaaaaaggcgccaaaaaacggct

SEQ ID NO: 734 - protein, 742 aa, Alphatorquevirus sp.; identical to SEQ ID NO: 351

SEQ ID NO: 735 - protein, 141 aa, Alphatorquevirus sp.; identical to SEQ ID NO: 352

SEQ ID NO: 736 - protein, 59 aa, Alphatorquevirus sp.; identical to SEQ ID NO: 353

SEQ ID NO: 737 - DNA, 3474 bp, Alphatorquevirus sp.
cggcggcggcggcgcgcgcgctgcgcgcgcgtcaaggggcaattcgggctcgggactggccgggccccgggcaaggctcttaaaaaatgcgctttcgcagggttgcacagaaaaggaaagtgcttctgcaaactgtgcgagcttcaaagaagactaggcggcttctaggtatgtggcagccccccgtgcacaatgtccccggcatcgagagaaactggtacgagagctgtttcagatcccatgctgctgtttgtggctgtggcgactttgttggccatcttaatcatctggcaactactctgggtcgtcctccacgtcctgggcccccaggcggaccccgcacgccgcagataagaaacctgccagcgctcccggcgccccagggcgagcccggtgacagagcgccatggcgtggggcttctggggccgacgccgccggtggagacggtggagagcgcggcgcagacggtggagaccccgcagacgtaggagacgacgccctgctcgccgctttcgagctcgtcgaagagtaaggaggcgcggggggcggtggcgcagacgctacagaaaatggcgacgggggcgacgcagacggactcacagaaaaaagatagtcataaaacagtggcaaccaaactttattagacgctgctacataatagggtatctacccttaatattctgtggcgaaaatacaacctcccagaactatgccactcactctgacgatatgataagcaagggaccgtacgggggaggcatgactaccactaaattcactctaagaatactgtacgacgagtttaccaggtttatgaacttttggactgttagcaacgaagacctagacctgtgtagatacgtgggctgcaaactgatattttttaaacaccccacggtagactttatagtacagataaacactcagcctccttttctagacacgcacctcaccgcggccagcatacacccgggcatcatgatgctaagcaagagacacatactaataccctctctaaagacccggccaagcagaaaacacagggtggtcatcagggtgggcgccccaagactttttcaggacaagtggtacccccagtcagacctgtgtgacacagttctgctttccatatttgcaaccgcctgtgacttgcaatatccgttcggctcaccactaactgacaacccttgcgtcaacttccagattctggggccccagtacaaaaaacaccttagtattagctctacaatggatcaaactaaccaacaacattataacagccacttgtttaatcaaactgcactgtataacacctttcaaaccattgctcagcttaaagagacaggacaaactgcaaacataactacaaattggaatagcgtacaaaataatactgcacttgataagtcaggtagtaatgcaactgcaagccgagacacttggtacaaaggaaacacatacaatgaacacattagtaacttagcggaagaaaccagaaaaagatttaaagctgcaacactagcagcactaccaaactaccccacaataatgaccacagacttatatgaataccactcaggcatatactccagcatattcctatcagctggcagaagctactttgaaacaataggggcctactctgacattatatacaacccttttacagacaaaggcacaggcaacataatctggatagactacctaacaaaagaagacacaatttttgtaaaaaacaaaagcaaatgcgagataagtgacatgcccctatgggcggcctgcacaggatatacagagttttgtgcaaagtacacaggagactctgccatcatttacaatgccagagtactaataagatgcccatacactgagcccatgctagtagaccactcagaccctaacaaaggcttcgtaccctactcattcaactttggcaacggaaagatgcccggaggcagctctaacgtgcccataagaatgagagccaagtggtacgtgaacatattccaccaaaaagaagtcttggagagcatagtgcaaagcggaccgtttgggtacaagggcgacataaaatcagcagtactggccatgaaatacagatttcactggaaatggggcggaaaccctatatccaaacaggtcgtcaggaatccctgctccaactccagctcctccgcggcccatagaggacctcgcagcgtacaagcagttgacccgaaatacaataccccagaggtcacgtggcactcgtgggacatcagacgaggactctttggcaaagcaggtattaaaagaatgcaacaagaatcagatgctctttacattcctccaggaccactcaagaggcctcgcagagacaccaatgcccaagacccagaagagcaaaacgaaagctcaggtttcagagtccagcagcgactcccgtgggtccactccagccaagaaacgcaaagctcccaagaagagacggaggcgcaggggtcggtacaagaccaactactcctccagctccgagagcagcgagtactccgactccagctccagcaactcgcaacccaagtcctcaaagtgcaagcagggcacagcctacaccccctattatcttcccaagcgtaaacaaagcctttatgtttgagcccgagggtcctaaacccatacagggctacaacgattggctagaggagtatactgtttgcaaatactgggacagacccccaagaaagctacacacagacatacccttttacccctgggcacctaaacccaaagaccaagtcagggtaacctttaaactcaactttcaataaaaattctaggccgtgggagtttcacttgtcggtgtctgcttcttaaggtcgccaagcactccgagcgccagcgaggagtgcgaccccccctccggtagcaacgccttcggagccgcgcgctacgccttcggctgcgcgcggcacctcagacccccgctcgtgctgacacgctcgcgcgtgtcagaccacttcgggctcgcgggggtcgggaaatttattaaacagactccaggttgccattggacaccggagctgtgaatcagtaacgaaagtgagtggggccagacttcgccatagggcctttatcttctcgccattagatagtgtaaggggtcgccgtaggcttcggcctcgttttcaggccttccggactacaaaaatggcggatttggtgacgtcacgaccgccattttaagtaaggcggaagtagttccactttcttacaaaatggcggcggagcacttccggcttgcccaaaatggcgggcaagctcttccgggtgaaaggtcagcaactacgtcacaagtcacgtggggagggttggcgtcacaacccggaagccaatcctctcacgtggctcgtcacgtgactgctacgtcatcagcgccatgttgttacacaaaatggcggacaacttccgcttttttaaaaaaaggcgcgaaaaaa

SEQ ID NO: 738 - protein, 736 aa, Alphatorquevirus sp.; identical to SEQ ID NO: 714

SEQ ID NO: 739 - protein, 148 aa, Alphatorquevirus sp.; identical to SEQ ID NO: 715

SEQ ID NO: 740 - protein, 59 aa, Alphatorquevirus sp.; identical to SEQ ID NO: 716

SEQ ID NO: 741 - DNA, 3468 bp, Alphatorquevirus sp.
gcggcggcgcgcgcgctgcgcgcgcgcaccgggaaggggcaattcgggctcgggactggccgggctatgggcaaggctcttaaaaagctatgtttctcggtaaactttacagaaagaagaggcgcctgccactgtccccactgcacactccacaaaaaactcgcaaacttctgagtgatatgtggagaccccccgtgcacaatgtccgcggccaggagagacagtggtacgaatcctgctttcgtagtcacgcttctttttgtggctgtggtgattttattcggcatatttgtgatctgacgaatgattttggacgtcctcctaccgttccacggcccccagcaccaccacctccagtaaggccactgccagctctcccggcacccccaaacccctccggtagcagagcgacatggcctactggtggtggaaacggagaaggcgaggcccgtggagaaggagacggcgctggagggttcgcagacctcgcagacgaagagctgctttccgccgccgtggacgccgtagaagagtaagaaagaggagggggaggtggaggaggacttatagaaaatggcggaggggcagaaagagacgaaagcacaaaagacgcttagtactgactcagtggcaacccgcctttattagacgctgctatatagtcggctacctgccccttttaatatgcggagagaacacctccggcagaaactttgccactcactcagacgacctaatatcaaacggaccctacgggggaggcatgactactaccaaatttactctaagaatactgtatgacgaacacctcagacaccttaactactggaccgttagtaacgaagacttagacttgtgcagataccttggggggaccttctacgcctacagacaccccacagtagactttatcatacagatacacaccagtccccccttcctagacactcccctgacgggtcccagcatacacccaggcatgctgatgctcacaaaaaacaaaatactaatacccagcttaaaaaccagacctaacaaaaagcacaaagttaaaattagatttaggcctcctaaactgttccaagataagtggtacccccagtcagagctctgtgacacaacactactaaccgtctttgcaaccgcatgtgacctgcaatttccgttcggctcaccactaacgaacaacccttgcgtcaacttccaggtactaggttccgtttacaaacggcacctcagtatacttcctgataaattattaaactatgaagcacactataaagacaacctatataacgtagtacaatactatgatacattccaaactatagcacaaataaaacccagcgccacacaaccagatttcagtccctcatggaatgagatacaaaataaatgtagtttagatgcatcaggcgcaaaccagccaacaagcaatgacacatggtacttaggccacgcatatacaaaagacaaaatacaacaagcagcttataaaattagagataaatacttagctgccacaagaaaagcactaccagcactagcaacactaggagacaaaatgttagagtaccacacaggcatctacagctccatattcctatctgcaggcagatcttactttgaaaccctaggagcctacacagatataatttacaacccactagtagataaaggcataggtaacaaagtgtggctagatcccctatcaaaagaagacgcagtattaaacagaaaacaagcaaaagtagtaatagaagacatacccttatgggcagccctatttggctacacagaatttgcagccaaatacacaggagactctgccataacagccaactacagactgacaatacggtgcccctacacagaccccatgctaacagacacaaagaacgaagaccagggcttcgtaccgtactctaagaactttggcaacggaaaaatgcccggaggcagtgccaacgttccactgactatgagaataaggtggtaccccatactcttccatcagctagaatggctagaagaaatgattcagtctggaccgtttgcatacaggggcgacgaaaaaagctgtgtgttagctataaagtacattttcagatggaaatggggaggtaaccctgtctctcaccagattgtgcgaaatccctgcaaaggagggtccggttcccgtagagagcctcgctcaatacaagcagctgacccgaaatacatcactccgagactatcgttccactcgtgggactttagacgaggactgtttggcatccagagtattaaaagaatgtcagaagaatcaacagctcctgtctattctacaggcccaccaacaaaaagaccaaaaaaggacaccgacccgtacgactcacagcaagaagaaaactcgagttcaagacacctccagctccagccctggatccactccagtcaagaagtccaaagcgaagaagaaacgcaagtcccggaaaacgtacaagaacaactcctccagcagctccgagagcagcagcagctcagggtccatctccagtccctcgcctcagaagtcctcaaaatcagggcgggatacggcatacaccccctattatcttcccaagcctaaacaaagtctttatgtttgaccctccgggtcccaaacccatacagggctaccacgcctggttagatgaataccaaacagcaggtgtgtgggataggccagttagaacataccacacagacatacccttctacccctgggcacccaaaaaacctccccccgaccaattccgcgtcagcttcaaacttggctttcaataaaatttcaaggcctttgactgttcacttgtcggtgtctacctctataagtcactaagcactccgagcgccagcgaggagtgcgaccctagggggggactcaacgccttcggagccgcgcgctacgccttcggctgcgcgcggcacctcagacccccgctcgtgctgacacgctcgcgcgtgtcagaccacttcgggctcgcgggggtcgggaaatttattaaacagactccaggttgccattggacaccggagctgtgaatcagtaacgaaagtgagtggggccagacttcgccatagggcctttatcttcttgccatttgtccgtcacgggggtcgccataggcttcgggctccgttttaggccttccggactacaaaaatcgccatgttagtgacgtcacggcggccattttaagtaaggcggaagagcgtccactgtgtacaaaatggcggcggagcacttccggcttgcccaaaatggcggccaaaaacatccgggttaaaggtcacatgtacgtcacaagtcacgtggggaggattggcatttaacccggaagtcaatcctctcacgtggcctgtcacgtgacgtgtgcgtcacggcggccattttgttttacaaaatggcggacttccttcctcttttttaaaaataacggcccg

SEQ ID NO: 742 - protein, 732 aa, Alphatorquevirus sp.
MAYWWWKRRRRGPWRRRRRWRVRRPRRRRAAFRRRGRRRRVRKRRGRWRRTYRKWRRGRKRRKHKRRLVLTQWQPAFIRRCYIVGYLPLLICGENTSGRNFATHSDDLISNGPYGGGMTTTKFTLRILYDEHLRHLNYWTVSNEDLDLCRYLGGTFYAYRHPTVDFIIQIHTSPPFLDTPLTGPSIHPGMLMLTKNKILIPSLKTRPNKKHKVKIRFRPPKLFQDKWYPQSELCDTTLLTVFATACDLQFPFGSPLTNNPCVNFQVLGSVYKRHLSILPDKLLNYEAHYKDNLYNVVQYYDTFQTIAQIKPSATQPDFSPSWNEIQNKCSLDASGANQPTSNDTWYLGHAYTKDKIQQAAYKIRDKYLAATRKALPALATLGDKMLEYHTGIYSSIFLSAGRSYFETLGAYTDIIYNPLVDKGIGNKVWLDPLSKEDAVLNRKQAKVVIEDIPLWAALFGYTEFAAKYTGDSAITANYRLTIRCPYTDPMLTDTKNEDQGFVPYSKNFGNGKMPGGSANVPLTMRIRWYPILFHQLEWLEEMIQSGPFAYRGDEKSCVLAIKYIFRWKWGGNPVSHQIVRNPCKGGSGSRREPRSIQAADPKYITPRLSFHSWDFRRGLFGIQSIKRMSEESTAPVYSTGPPTKRPKKDTDPYDSQQEENSSSRHLQLQPWIHSSQEVQSEEETQVPENVQEQLLQQLREQQQLRVHLQSLASEVLKIRAGYGIHPLLSSQA

SEQ ID NO: 743 - protein, 148 aa, Alphatorquevirus sp.
MFLGKLYRKKRRLPLSPLHTPQKTRKLLSDMWRPPVHNVRGQERQWYESCFRSHASFCGCGDFIRHICDLTNDFGRPPTVPRPPAPPPPVRPLPALPAPPNPSGSRATWPTGGGNGEGEARGEGDGAGGFADLADEELLSAAVDAVEE

SEQ ID NO: 744 - protein, 128 aa, Alphatorquevirus sp.
LDPLQSRSPKRRRNASPGKRTRTTPPAAPRAAAAQGPSPVPRLRSPQNQGGIRHTPPIIFPSLNKVFMFDPPGPKPIQGYHAWLDEYQTAGVWDRPVRTYHTDIPFYPWAPKKPPPDQFRVSFKLGFQ

SEQ ID NO: 745 - DNA, 3464 bp, Alphatorquevirus sp.
agacccccgctcgtgctgacacgctcgcgcgtgtcagaccacttcgggctcgcgggggtcgggaaatttattaaacagactccaggttgccattggacactggagctgtgaatcagtaacgaaagtgagtggggccagacttcgccatagggcctttatcttcttgccatttgtccgtcacgggggtcgccataggcttcgggctccgttttaggccttccggactacaaaaatcgccatgttagtgacgtcacggcggccattttaagtaaggcggaagagcgtccactgtgtacaaaatggcggcggagcacttccggcttgcccaaaatggcggccaaaaacatccgggttaaaggtcacatgtacgtcacaagtcacgtggggaggattggcatttaacccggaagtcaatcctctcacgtggcctgtcacgtgacgtgtgcgtcacggcggccattttgttttacaaaatggcggacttccttcctcttttttaaaaataacggcccggcggcggcgcgcgcgctgcgcgcgcgcgcaaggggcaattcgggctcgggactggccgggctatgggcaaggctcttaaaaagctatgtttctcggtaaactttacagaaagaagaggcgcctgccactgtccccactgcacactccacaaaaaactcgcaaacttctgagtgatatgtggagaccccccgtgcacaatgtccgcggccaggagagacagtggtacgaatcctgctttcgtagtcacgcttctttttgtggctgtggtgattttattcggcatatttgtgatctgacgaatgattttggacgtcctcctaccgttccacggcccccagcaccaccacctccagtaaggccactgccagctctcccggcacccccaaacccctccggtagcagagcgacatggcctactggtggtggaaacggagaaggcgaggcccgtggagaaggagacggcgctggagggttcgcagacctcgcagacgaagagctgctttccgccgccgtggacgccgtagaagagtaagaaagaggagggggaggtggaggaggacttatagaaaatggcggaggggcagaaagagacgaaagcacaaaagacgcttagtactgactcagtggcaacccgcctttattagacgctgctatatagtcggctacctgccccttttaatatgcggagagaacacctccggcagaaactttgccactcactcagacgacctaatatcaaacggaccctacgggggaggcatgactactaccaaatttactctaagaatactgtatgacgaacacctcagacaccttaactactggaccgttagtaacgaagacttagacttgtgcagataccttggggggaccttctacgcctacagacaccccacagtagactttatcatacagatacacaccagtccccccttcctagacactcccctgacgggtcccagcatacacccaggcatgctgatgctcacaaaaaacaaaatactaatacccagcttaaaaaccagacctaacaaaaagcacaaagttaaaattagatttaggcctcctaaactgttccaagataagtggtacccccagtcagagctctgtgacacaacactactaaccgtctttgcaaccgcatgtgacctgcaatttccgttcggctcaccactaacgaacaacccttgcgtcaacttccaggtactaggttccgtttacaaacggcacctcagtatacttcctgataaattattaaactatgaagcacactataaagacaacctatataacgtagtacaatactatgatacattccaaactatagcacaaataaaacccagcgccacacaaccagatttcagtccctcatggaatgagatacaaaataaatgtagtttagatgcatcaggcgcaaaccagccaacaagcaatgacacatggtacttaggccacgcatatacaaaagacaaaatacaacaagcagcttataaaattagagataaatacttagctgccacaagaaaagcactaccagcactagcaacactaggagacaaaatgttagagtaccacacaggcatctacagctccatattcctatctgcaggcagatcttactttgaaaccctaggagcctacacagatataatttacaacccactagtagataaaggcataggtaacaaagtgtggctagatcccctatcaaaagaagacgcagtattaaacagaaaacaagcaaaagtagtaatagaagacatacccttatgggcagccctatttggctacacagaatttgcagccaaatacacaggagactctgccataacagccaactacagactgacaatacggtgcccctacacagaccccatgctaacagacacaaagaacgaagaccagggcttcgtaccgtactctaagaactttggcaacggaaaaatgcccggaggcagtgccaacgttccactgactatgagaataaggtggtaccccatactcttccatcagctagaatggctagaagaaatgattcagtctggaccgtttgcatacaggggcgacgaaaaaagctgtgtgttagctataaagtacattttcagatggaaatggggaggtaaccctgtctctcaccagattgtgcgaaatccctgcaaaggagggtccggttcccgtagagagcctcgctcaatacaagcagctgacccgaaatacatcactccgagactatcgttccactcgtgggactttagacgaggactgtttggcatccagagtattaaaagaatgtcagaagaatcaacagctcctgtctattctacaggcccaccaacaaaaagaccaaaaaaggacaccgacccgtacgactcacagcaagaagaaaactcgagttcaagacacctccagctccagccctggatccactccagtcaagaagtccaaagcgaagaagaaacgcaagtcccggaaaacgtacaagaacaactcctccagcagctccgagagcagcagcagctcagggtccatctccagtccctcgcctcagaagtcctcaaaatcagggcgggatacggcatacaccccctattatcttcccaagcctaaacaaagtctttatgtttgaccctccgggtcccaaacccatacagggctaccacgcctggttagatgaataccaaacagcaggtgtgtgggataggccagttagaacataccacacagacatacccttctacccctgggcacccaaaaaacctccccccgaccaattccgcgtcagcttcaaacttggctttcaataaaatttcaaggcctttgactgttcacttgtcggtgtctacctctataagtcactaagcactccgagcgccagcgaggagtgcgaccctagggggggactcaacgccttcggagccgcgcgctacgccttcggctgcgcgcggcacctc

SEQ ID NO: 746 - protein, 732 aa, Alphatorquevirus sp.; identical to SEQ ID NO: 742

SEQ ID NO: 747 - protein, 148 aa, Alphatorquevirus sp.; identical to SEQ ID NO: 743

SEQ ID NO: 748 - protein, 128 aa, Alphatorquevirus sp.; identical to SEQ ID NO: 744

SEQ ID NO: 749 - DNA, 3460 bp, Alphatorquevirus sp.
tttttgccggaggtgagtttacacaccgcagtcaaggggcaattcgggctcgggactggtcgggctatgggcaaggctcttaaaaagatgcgtttctctaatatcgcccgcagaaagaaaaggaaactgtcactgctacctgtgcaccctccacaggagacacctaccatgagctttgtagaacccttactgagcagcaaccacagagagatagcatactaccatggctgtgttcagatgcacaaagccttctgtggctgtgacaactttctcacccacctgcaacgcatagcaacatacatctctgttaaccagcacactccacccagcacaccctcaaacaccctccgtagagcccgggccctacccgcggctccggagccggctccatggcgtggtcctggtggtggcagaggaggcgccgaaggtggccgtggagacgcagaaggtggaggagactacgcacaagaagacctagacgccctgttcgacgccgtcgcaagagatacagagtaaggagacggaggcggtggggaaggaaacgtgggcgacgcacataccttagacgcagacttaaaaagagaaagagacgaaaaaagctcagactgactcagtggaaccctagcacaataaggggatgtacaattaaaggtatggcccccctaataatatgcggccacaccatggccggcaataactttgccatccgaatggaggactatgtatctcagattagaccattcggagggtccttcagtaccaccacctggagcctaaaagtactgtgggacgagcacacgagattccacaacacctggagctaccccaacactcagctagatctagcaagatttaaaggagtaaccttctacttctacagggacaaagacacagactttatagtaacatacagctcagttccaccatttaaaatagacaaatactcctcagccatgctacacccaggcatgctcatgcaaagaaaaaaaaagatattaatacccagctttacaaccagaccaagaggccgaaagaaaattaaagtacacataaaacctcctgtattatttgaagacaaatggtacacccagcaggacctgtgcgacgttaatcttttgtcacttgcggtttctgcggcttcctttagacatccgttctgcccaccacaaactgacaacatttgcataaccttccaagtgttgaaagacttttactataagcaaatgtcagttacaccagacgaagacaaccaaagaaaagatgaacatatacttcacatattatacacaactgcagaatattatcaaactgttcacacaacaggcattattaacaaaacacaaagagtagctaagtttcaaacctctacaaaaacacttgcagatttaccccaaattgcaggctatttaaatccaccatccgctactacagcaaaccaaacattagcaactggtaacaactcaatctatggctttccatcatacaatccacagaaagacaaattgcaggccatagcaaaatggttctgggaacaagaaactaacactgaaaatgttgttacaggctcatattcaatgcctactaacccagcagtaagctatcacctaggaaaatacagtccaatatacttaagttcatacagaactaacctacaatttagaacagcatacacagatgtcacatacaatccactaaatgacaaaggtaaaggaaaccaaatatgggtacaatatgtaacaaaaccagatacaaaattcaatgccacacaatgcaaatgtcacatagtagacatacccctctgggcagcattccatgggtacatagactttatacaaagtgaattaggcatacaagaagaaatactaaacattgccattatagtagttatatgcccatacacaaaacctaaactaattaacaatcctccaaatgaaaacgaagggtttgtattctatgacacacaatttggagatggtaaaatgccagaaggcacaggcctagtccccatctactaccaaaacaggtggtatcccagaataaagttccagagccaagtagtgcatgactttgtactaacaggcccctttagctacaaagatgaccttaaaagcacagtactaacagtagaatacaagttcaaattcttatggggcggcaatatgattcccgaacaggttatcagaaacccttgtaaaacagaaggacacgatctccctcacaccagtagattccatcgcgacttacaagttgttgacccacagaccgtgggcccccaatgggcgctccacacctgggactggcgacgtggactctttggttcagaggctatcaaaagagtgtctgaacaacaaatacatgatgagctgtattaccaaccttcaaagaaacctcgattcctccctccagtatcaggcctccaagagcaagaaagagactacagttcgcaggaggagaaaatccagtcctcctcagaagaagaggaggaccagaagaaaaaagaacaaaaacagcagcagcgactccacctccagttccaagagcagcagcgactcggaaaccaactccgactcatcttccgagagctacagaaaacccaagcgggtctccacataaatcctatgttatcaaaccggctgtaaataaagtttacctttttcctcccgaggggcctaaacccatctctggctacagagcatgggaagacgagttcacctgctgtaagtactgggacaggcctagtagaattaaccacacagacccccctttctacccctggatgcctaagtacaatgtaacctttaaacttggctggaaataaaatttcaaggccgtacactgttcacctgtcggtgtctacctctataagtcactaagcactccgagcgtagcgaggagtgcgaccctccccccccggtagcaacttcttcggagtccggcgctacgccttcggctgcgccggacacctcagaccccccctccacccgaaacgcttgcgcgtttcggaccttcggcgtcgggggggggtcgggagctttattaaacagactccgaggtgctcttggacactgaggggacgtacagcaacgaaagtgagtggggccagacttcgccatagggcctttatcttcttgccatttgtccgtgtccggggtcgccataggcttcggcctagttttcaggccttccggactacaaaaatggcgcattccgtgacgtcatggccgccattttaagtaaggcggaaccaggctgtcaccctgtgtcaaaggtcaagggacagccttccgacttgcacaaaatggccgccaacttcttccgggtcaaaggtcactgctacgtcataggtgacgtggtggggaacctacttaaacacggaagtaggccccgacacgtcactgtcacgtgacagtgcgtcacagccgccattttgttttacaaaatggccgacttccttcctctt

SEQ ID NO: 750 - protein, 749 aa, Alphatorquevirus sp.
MAWSWWWQRRRRRWPWRRRRWRRLRTRRPRRPVRRRRKRYRVRRRRRWGRKRGRRTYLRRRLKKRKRRKKLRLTQWNPSTIRGCTIKGMAPLIICGHTMAGNNFAIRMEDYVSQIRPFGGSFSTTTWSLKVLWDEHTRFHNTWSYPNTQLDLARFKGVTFYFYRDKDTDFIVTYSSVPPFKIDKYSSAMLHPGMLMQRKKKILIPSFTTRPRGRKKIKVHIKPPVLFEDKWYTQQDLCDVNLLSLAVSAASFRHPFCPPQTDNICITFQVLKDFYYKQMSVTPDEDNQRKDEHILHILYTTAEYYQTVHTTGIINKTQRVAKFQTSTKTLADLPQIAGYLNPPSATTANQTLATGNNSIYGFPSYNPQKDKLQAIAKWFWEQETNTENVVTGSYSMPTNPAVSYHLGKYSPIYLSSYRTNLQFRTAYTDVTYNPLNDKGKGNQIWVQYVTKPDTKFNATQCKCHIVDIPLWAAFHGYIDFIQSELGIQEEILNIAIIVVICPYTKPKLINNPPNENEGFVFYDTQFGDGKMPEGTGLVPIYYQNRWYPRIKFQSQVVHDFVLTGPFSYKDDLKSTVLTVEYKFKFLWGGNMIPEQVIRNPCKTEGHDLPHTSRFHRDLQVVDPQTVGPQWALHTWDWRRGLFGSEAIKRVSEQQIHDELYYQPSKKPRFLPPVSGLQEQERDYSSQEEKIQSSSEEEEDQKKKEQKQQQRLHLQFQEQQRLGNQLRLIFRELQKTQAGLHINPMLSNRL

SEQ ID NO: 751 - protein, 170 aa, Alphatorquevirus sp.
LPEVSLHTAVKGQFGLGTGRAMGKALKKMRFSNIARRKKRKLSLLPVHPPQETPTMSFVEPLLSSNHREIAYYHGCVQMHKAFCGCDNFLTHLQRIATYISVNQHTPPSTPSNTLRRARALPAAPEPAPWRGPGGGRGGAEGGRGDAEGGGDYAQEDLDALFDAVARDTE

SEQ ID NO: 752 - DNA, 3458 bp, Alphatorquevirus sp.
tttttgccggaggtgagtttacacaccgcagtcaaggggcaattcgggctcgggactggtcgggctatgggcaaggctcttaaaaagatgcgtttctctaatatcgcccgcagaaagaaaaggaaactgtcactgctacctgtgcaccctccacaggagacacctaccatgagctttgtagaacccttactgagcagcaaccacagagagatagcatactaccatggctgtgttcagatgcacaaagccttctgtggctgtgacaactttctcacccacctgcaacgcatagcaacatacatctctgttaaccagcacactccacccagcacaccctcaaacaccctccgtagagcccgggccctacccgcggctccggagccggctccatggcgtggtcctggtggtggcagaggaggcgccgaaggtggccgtggagacgcagaaggtggaggagactacgcacaagaagacctagacgccctgttcgacgccgtcgcaagagatacagagtaaggagacggaggcggtggggaaggaaacgtgggcgacgcacataccttagacgcagacttaaaaagagaaagagacgaaaaaagctcagactgactcagtggaaccctagcacaataaggggatgtacaattaaaggtatggcccccctaataatatgcggccacaccatggccggcaataactttgccatccgaatggaggactatgtatctcagattagaccattcggagggtccttcagtaccaccacctggagcctaaaagtactgtgggacgagcacacgagattccacaacacctggagctaccccaacactcagctagatctagcaagatttaaaggagtaaccttctacttctacagggacaaagacacagactttatagtaacatacagctcagttccaccatttaaaatagacaaatactcctcagccatgctacacccaggcatgctcatgcaaagaaaaaaaaagatattaatacccagctttacaaccagaccaagaggccgaaagaaaattaaagtacacataaaacctcctgtattatttgaagacaaatggtacacccagcaggacctgtgcgacgttaatcttttgtcacttgcggtttctgcggcttcctttagacatccgttctgcccaccacaaactgacaacatttgcataaccttccaagtgttgaaagacttttactataagcaaatgtcagttacaccagacgaagacaaccaaagaaaagatgaacatatacttcacatattatacacaactgcagaatattatcaaactgttcacacaacaggcattattaacaaaacacaaagagtagctaagtttcaaacctctacaaaaacacttgcagatttaccccaaattgcaggctatttaaatccaccatccgctactacagcaaaccaaacattagcaactggtaacaactcaatctatggctttccatcatacaatccacagaaagacaaattgcaggccatagcaaaatggttctgggaacaagaaactaacactgaaaatgttgttacaggctcatattcaatgcctactaacccagcagtaagctatcacctaggaaaatacagtccaatatacttaagttcatacagaactaacctacaatttagaacagcatacacagatgtcacatacaatccactaaatgacaaaggtaaaggaaaccaaatatgggtacaatatgtaacaaaaccagatacaaaattcaatgccacacaatgcaaatgtcacatagtagacatacccctctgggcagcattccatgggtacatagactttatacaaagtgaattaggcatacaagaagaaatactaaacattgccattatagtagttatatgcccatacacaaaacctaaactaattaacaatcctccaaatgaaaacgaagggtttgtattctatgacacacaatttggagatggtaaaatgccagaaggcacaggcctagtccccatctactaccaaaacaggtggtatcccagaataaagttccagagccaagtagtgcatgactttgtactaacaggcccctttagctacaaagatgaccttaaaagcacagtactaacagtagaatacaagttcaaattcttatggggcggcaatatgattcccgaacaggttatcagaaacccttgtaaaacagaaggacacgatctccctcacaccagtagattccatcgcgacttacaagttgttgacccacagaccgtgggcccccaatgggcgctccacacctgggactggcgacgtggactctttggttcagaggctatcaaaagagtgtctgaacaacaaatacatgatgagctgtattaccaaccttcaaagaaacctcgattcctccctccagtatcaggcctccaagagcaagaaagagactacagttcgcaggaggagaaaatccagtcctcctcagaagaagaggaggaccagaagaaaaaagaacaaaaacagcagcagcgactccacctccagttccaagagcagcagcgactcggaaaccaactccgactcatcttccgagagctacagaaaacccaagcgggtctccacataaatcctatgttatcaaaccggctgtaaataaagtttacctttttcctcccgaggggcctaaacccatctctggctacagagcatgggaagacgagttcacctgctgtaagtactgggacaggcctagtagaattaaccacacagacccccctttctacccctggatgcctaagtacaatgtaacctttaaacttggctggaaataaaatttcaaggccgtacactgttcacctgtcggtgtctacctctataagtcactaagcactccgagcgtagcgaggagtgcgaccctcccccccggtagcaacttcttcggagtccggcgctacgccttcggctgcgccggacacctcagaccccccctccacccgaaacgcttgcgcgtttcggaccttcggcgtcggggggggtcgggagctttattaaacagactccgaggtgctcttggacactgaggggacgtacagcaacgaaagtgagtggggccagacttcgccatagggcctttatcttcttgccatttgtccgtgtccggggtcgccataggcttcggcctagttttcaggccttccggactacaaaaatggcgcattccgtgacgtcatggccgccattttaagtaaggcggaaccaggctgtcaccctgtgtcaaaggtcaagggacagccttccgacttgcacaaaatggccgccaacttcttccgggtcaaaggtcactgctacgtcataggtgacgtggtggggaacctacttaaacacggaagtaggccccgacacgtcactgtcacgtgacagtgcgtcacagccgccattttgttttacaaaatggccgacttccttcctctt

SEQ ID NO: 753 - protein, 749 aa, Alphatorquevirus sp.; identical to SEQ ID NO: 750

SEQ ID NO: 754 - protein, 170 aa, Alphatorquevirus sp.; identical to SEQ ID NO: 751

SEQ ID NO: 755 - DNA, 3456 bp, Alphatorquevirus sp.
agacccccgctcgtgctgacacgcttgcgcgtgtcagaccacttcgggctcgcgggggtcgggaattttgctaaacagactcccagttgccattggactcaggagctgtgaatcagtaacgaaagtgagtggggccagacttcgccataaggcctttatcttcttgccatttgtccgtgtagggggtcgccataggcttcgggctcggttttaggccttccggactacaaatatggccgttccagtgacgtcacggccgccattttgagtaggtgccgtccaggactgccgttccgggtcaaagggcatcctcggcgggacctacataaaatggtggacaatatcttccggggcaaaggtcacacctacgtcacaagtcacgtggggggggcccgctacgtcatatgcggaagtaggccccgccacgtgactaaccacgtgggtgctgcgtcacagccgccattttagtttacaaaatggccgacttccttcctgttttttaaaaataacggcccagcggcggcgcgcgcgctacgcgcgcgctcgggactggccgggctatgggcaaggctcttaaaaaagccatgtttctcggtcgcatttacagaaagaaaaggcgcctgttactgtccccactgcactctccacaaaaacctcgcaaactactgaaaggtatgtggaggccccctactcaaaatgtatcaggacaggagaaacactggtacgactctgtgttttattcgcatgctgccttttgtggctgtggggactgtgttggccatcttagctatctggctactcacctgggccgaccacctagtgcacaacccccaccgcaacagcagccacctgtcataagacgcctgcctgctctcccggcacccccaaacccctccggtgatcgagcggcatggcctactggtggtggagacgccggagaagacggccctggagaaggaggcgccgctggaggcttcgcagacctcgcagacgaagacctacttaccgccgccgtcgaggccgccgaagagtaagaaagaggagggggaggtggagacgaacttacagacgctggcgtagaaagagggggcgacgcaaacacagacctaaaataattcttaaacagtggcaaccaaactttattagaaactgttttattgtgggttatatgccactgatcttttgtggtgaaaacactgtaagccaaaactatgccacccactctgatgacctggtggctaagggaccctacgggggtggcatgaccaccacaaaattcactctgagaattctctttgacgaacaccttagatggatgaactactggactgttagtaacgaggacttagatctctgcagatatgtaggagcccgcttttacttttacagacaccccacagtagattttatggtgcaaatacacacacaggccccctttctagacacagaactcacaggccccagcatacacccaggcatgatgattctaaataagaggaaaatatttgtgcccagtttaaaaaccaggcctaacagaaagcacaaagtaagggttaaagtaggggccccccgcttgtttgaagacaagtggtacccccagtcagaactttgtgacaccaccctagtggccatctatgcaacggcctgtgacttgcaatttccgttcggctcaccactaactgacaacccttgcgtcaacttccaggttttaggttccgcttacaaacagcaccttagtatcctaaccacagaaactgaaaagaatagactacactataaacaagctctttttaacaaggtagcatactacaatacattccagacaatagcacaccttagagaaacaggcaaacaagaaaatgccagccctcactggaacacatgtgtaaattctacaccacttaactttaatggcgagaaccaaaccatatgtaatgacacctggtactatggcaatgcatacaagcccgacatagaaaccctgtgtgaaaaaaccaggcaaaaatactttaaagcaaccaaaagcgcttttcctgcttatgctacacttgtagatgacctctatgaataccacggaggtatatactcctctatatttctctctgcaggcagatcctactttgaaactctaggtgcttactctgacattatatataacccctttgtagacaaaggcctaggtaacatagtatggatagactacctctcaaaatcagacgcagtctggaaaccccctcaaagtaaatgcaccattaaagaccagcccctatgggcagcctttaacggctacagtgaattctgtgccaaaagcacaggagacggagcagtaaacataaactgcagagtagttgttaggtgcccctacacaactcccatgttaatagacaacaaggaccccaatcaaggctttgtaccctactccaaaaactttggcaatgcaaaaatgaaaggcggctcagcagacgtacccctcagctggagggtaaagtggtatgttatgatgtaccaccaacaagaatttatggaagaaatagtacagagcggaccgtgggcctacaagggcgacgaaaagagtgctgcacttaacatgaagtatgtctttaaatggaaatggggcggtaaccctatatctggacaggttgtcagaaacccgtgcaagacctccagttccagtcgagaacctcgttcaatacaagcagttgacccgaagagagtcgcaccaccgctcgtattccacagctgggactaccgacgagggttctttggccacgcaagtattaaaagaatgtcagaagaatcagaacctcctacgctttttacaggaccatcaggcaaacgcccccgcagggacaccaacgttcagcagccggaagaagaacagcaaaaagaaagctccagtttcagactccagcgccagctccagccgtggatcaactccagtcaagaaacgcaaagcagccaagaagagatccaggcgcaggggtcgatacaagaccaactcctccagcagctcggagaacagcgagccctccgaaagcagctggagctcctcgccggacaagtcctcaaagtccaagcaggccaccacctacaccccctattatcttcccaagcataaacaaagtctttatgtttgagcccaaaggccccaaacccatacagggttatgaggcctggttagatgagtaccaaacagcaggtatctggaataggccagtcagaaactaccacacagacacccccttctacccctggatacctaagccccccaaccaattccgtgtcagctttaaacttggctttcaataaaatttcaaggcagtacactgttcacctgtcggtgtctacctctataagtcactaagcactccgagcgccagcgaggagtgcgaccctagggggggactcaacgccttcggagccgcgcgctacgccttcggctgcgcgcggcacctc

SEQ ID NO: 756 - protein, 735 aa, Alphatorquevirus sp.
MAYWWWRRRRRRPWRRRRRWRLRRPRRRRPTYRRRRGRRRVRKRRGRWRRTYRRWRRKRGRRKHRPKIILKQWQPNFIRNCFIVGYMPLIFCGENTVSQNYATHSDDLVAKGPYGGGMTTTKFTLRILFDEHLRWMNYWTVSNEDLDLCRYVGARFYFYRHPTVDFMVQIHTQAPFLDTELTGPSIHPGMMILNKRKIFVPSLKTRPNRKHKVRVKVGAPRLFEDKWYPQSELCDTTLVAIYATACDLQFPFGSPLTDNPCVNFQVLGSAYKQHLSILTTETEKNRLHYKQALFNKVAYYNTFQTIAHLRETGKQENASPHWNTCVNSTPLNFNGENQTICNDTWYYGNAYKPDIETLCEKTRQKYFKATKSAFPAYATLVDDLYEYHGGIYSSIFLSAGRSYFETLGAYSDIIYNPFVDKGLGNIVWIDYLSKSDAVWKPPQSKCTIKDQPLWAAFNGYSEFCAKSTGDGAVNINCRVVVRCPYTTPMLIDNKDPNQGFVPYSKNFGNAKMKGGSADVPLSWRVKWYVMMYHQQEFMEEIVQSGPWAYKGDEKSAALNMKYVFKWKWGGNPISGQVVRNPCKTSSSSREPRSIQAVDPKRVAPPLVFHSWDYRRGFFGHASIKRMSEESEPPTLFTGPSGKRPRRDTNVQQPEEEQQKESSSFRLQRQLQPWINSSQETQSSQEEIQAQGSIQDQLLQQLGEQRALRKQLELLAGQVLKVQAGHHLHPLLSSQA

SEQ ID NO: 757 - protein, 157 aa, Alphatorquevirus sp.
MGKALKKAMFLGRIYRKKRRLLLSPLHSPQKPRKLLKGMWRPPTQNVSGQEKHWYDSVFYSHAAFCGCGDCVGHLSYLATHLGRPPSAQPPPQQQPPVIRRLPALPAPPNPSGDRAAWPTGGGDAGEDGPGEGGAAGGFADLADEDLLTAAVEAAEE

SEQ ID NO: 758 - protein, 59 aa, Alphatorquevirus sp.
MFEPKGPKPIQGYEAWLDEYQTAGIWNRPVRNYHTDTPFYPWIPKPPNQFRVSFKLGFQ

SEQ ID NO: 759 - DNA, 3454 bp, Alphatorquevirus sp.
agaccccccctccacccgaaacgcttgcgcgtttcggaccttcggcgtcgggggggtcgggggctttattaaacagactccgagttgccattggacactgtagctgtgaatcagtaacgaaagtgagtggggccagacttcgccataaggcctttatcttcttgccatttgtccgtctagagggtcgccataggcttcgggctccattttcaggccttccggactacaaaaatggccgttccgtgacgtcacagccgccattttgagtcagcgcgggggagagtaacgtatagttcaaaggtcactatcttccgggctgtcaccaaatggcggacaacttcttccgggtcaaaggtcatgcctacgtcataagtcacgtgacagacaagagttaccacatgcggaagtaatcctcacccacgtgacttgtcacgtggtgcatacgtcacagccgccattttgttttacaaaatggccgacttccttcctgttttttcactgggcaaggctcttaaaaaagctatgtttctacgcagagctcaccagaaaaggatactgctactgcaaattgtgccagctacaccgcaggcacctgccatgagctttcgcgcacccaccattcaaggtggagtccgagaccagcaatggttcgaggcctgtattcgatcacacgccgctttctgtggctgtggcgatcccgtgcttcattttaataacattgctgctcgctttcactatctgcctgctacctcctcgcctctggaccctaccggaggagcgccgccgcgccgcccgcagctacgccgccttgcagcgctcccggcggcgccccccagcacctctgagagccagccatggcgtggtggtggtggagacgatggcgccggtggcccagacgccgctggaggacccgtcgccgacgccgagtacgaaccagaagacctagacgacctgttcgccgctatcgaagcagatacacagtaaggaggcgaaggcggagagggtggcgagggcgacgtaggcgcagactgtacagacgcagatacactataaggagaaaaagaaagaaactcatactgaaacagtggcagcccgccaatgttagaaaatgcaaaataaggggcctgtttccaatagttatctgtggacacggcaagagtgccaataactatgccctacactcggacgacgtactaccaatgagacaggcttttggaggggctctaagcactgtatcttttagcctaaaagtactgtatgatcagtatttaagacacctgaacagatggagcacctcaaacgatgtgctagaccttgccaggtacctaggatgcaccttttggttttacagagacaaaaaaactgactacttagtgcagtatgacatctctgctccctacaagctagacaaagacagcggaccgtcctaccatccaggagtactcatgcaagccaaacacaaagtactagtgcccagttttgacacgcaccccaaaggaaaagctaaagtaaaaattagaattaagccccccaaactttttatagataagtggtactctcaagaggatctgtgtaccgttaatcttgtaacatttgtggtcagcctagcttccttctcacatccgttctgcccaccactaacgaacaacccttgtgtaaccttccaagtgttgaacaacttctacaattccgttataggttcctcaattaatgttgcagacactacagtaaactcagtcttcaataactttttatataacaaaggagccttttaccaacaagtactagtagactcttacattaaagaaattaaaacaaatcctgatggctctcctgtagttgcaggccctaacgatagaccctcaacaagcgaaatgagtgcttataacgaatgggtaaaatctaaatttaaagtaccaggaacatctgttcactacaacttttgcacatacaaacctgacagtgccaaattaaatacacttagacaatactactttcattgggaaactgcacagtccacaaaccataaatttaatgtagaacacgtaccacacgcgggcacaaaacctacaaaagactggtgggagtatagaacaggcctattttcacctatatttcttagtccatacagaaccagtcccatagacagctggttgctggcatacagagacgtgtcctacaatccactaaatgacaagggagtaggcaaccgagtatggatgcagagtctagtaaaaccagacacccagttcacactgccctcatgtgtatttgtactagaagacaaacccctgtggtgctgtttctatggctatactgactttataaagagtgtcagagagggccaagacatagactttgaaaacattatttgcattcagtgtccttacacagagcctcctctatatgaaaagcacaaccccaacatgggcttcgtagtatatgacagcaactttggcaatggcaaatggctagacggaaccgggttcgtcccggtagaataccagtgccgctggcggccctgcatagctttccagcaacaggtactaacagacattaccatgagcgggcccttcagctacaaagacgatgttaaaaacacctgcatacaggccaaatacagatttgactttaaatggggcggcaatattctttatcagcagaccatcagaaacccatgtaaagacggacaagctaccgattcccatagacagcctagagacgtacaagtcactgacccgcttaccatgggaccccgatacgctttccaccaatgggactggcgacgtgggtggcttagtgacaaagctctcaaaagaatgctccagaaaccgctcgattttgaactgtatccaatcaatccaaagagacctagactattccctcccacagaagcaggagaaggagaggtcccaaaagaaagctcattttcagaggaagaaagcgagccgtcctcgcaagaagagacgaggccggagaggctccagctcaagctccgacagcagctccgagagcagcgagagctccgagtccacctcaagcacctcttccagcagctcctcaagacacaagcggggctccacctcaacccgctcttattcaaccagcaataaacaaagttcttctgtttccagaaatgggtccaaagcccgctcctactagtggagactgggaaacagaataccaggcctgtaaattctgggacagacctcccagaaaatttctcaccgatacacccttttatccctggatgcctccggcacccccaaaattctctgttagtttcaaactaggcttcaaaccctaaataaacaaggccatacactgttcacttgtcggtgtctacctctataagtcactaagcactccgagcgaagcgaggagtgcgacccccctacccggtagcaacttcttcggagtccggcgctacgccttcggctgcgccggacacctc

SEQ ID NO: 760 - protein, 752 aa, Alphatorquevirus sp.; identical to SEQ ID NO: 502

SEQ ID NO: 761 - protein, 185 aa, Alphatorquevirus sp.
LSRGAYVTAAILFYKMADFLPVFSLGKALKKAMFLRRAHQKRILLLQIVPATPQAPAMSFRAPTIQGGVRDQQWFEACIRSHAAFCGCGDPVLHFNNIAARFHYLPATSSPLDPTGGAPPRRPQLRRLAALPAAPPSTSESQPWRGGGGDDGAGGPDAAGGPVADAEYEPEDLDDLFAAIEADTQ

SEQ ID NO: 762 - protein, 60 aa, Alphatorquevirus sp.; identical to SEQ ID NO: 504

SEQ ID NO: 763 - DNA, 3447 bp, Alphatorquevirus sp.
cgacttccttccgcttttttaaaaaaaggcgtcaaggggcaattcgggctcgggactggccgggctatgggcaaggctcttaaaaaagcatgtttttcggcagggtctggagaaagaaaagggcgctgccactgtccgagctgcgaactcctgcgaaaaaaccacctgtaatgagctggtcccaacctatgcacaatgtcaccacccgcgaaggcttcttttacgccgggtgtaagcagcttcataattgtttttgcggctgtgatgattttattaatcatcttcttcgcatccagacccagcagggtccctctccctcgcggcccttcactcctccgtcaacaccacgccctgtgatccgtagagccctgccggcaccggcggctccggacgcaccggcgccatggcgtggagctggtggtgggcccgccgccgacgcagaccgtggacccggaggagatggaggagactacgcacccgcagacctagacgacctgtacgccgccgtcgacgccgaaaacgcagagtaaggaggagacggtggggaaggagacgagggcgacggacactttacagacgcaaatttagaaagagacgcaggcgacgaaaaaagctagttttaacacaatggaaccctcagactattagagcatgttctataaggggctcagtgtgtctagttatgtgtggtcacacaaaagcaggcagaaactatgccctacactctgaagactatgtcccccaagtgcatgccatgggagggtcctttagcactaccacctggagcctaaaagcactatatgacgagcaccagaaattccataacaaatggagctaccctaacacccagctagacctagccagatacagaggatgccgctggtggttttacagagaccccaaagtagactacattgttacctactacactacacctccatttaaacttaacaaatacagttctcccatgctacaccctggcatgatgatacagtacaaaaaaaaaatactagtaccaagctatcaaacaaaaccaaaaggaaaaggcagaataagtgtttttattaagcccccaactctttttgaggacaaatggtacacccagcaagacctctgtcccgttaatcttttgtcacttgcggttagcgcatgttccttcctgcatccgttctgcccaccagaaagtgacaacatgtgtattacattccaagttttgaaagacttctattaccaacagatgggtgttacacaaattaatggcacaacactaactgaacctgataaaaacatttttaaaaaactttatgaaactccatccttctggcagtcccaccacacatcagcacagttaaacacatctcaaaagccaggcaagcaaacctcagaagcaatacctgaaagagagtggcttcaaggagacggtacaaataaatttaaaacaggaaacaatagtatatacggccaaccaaattataatcctaactataccaaattagaatcaattagacaatggtactggaagcaagaaacagagactaatgatgtacattcctcttatggccgtcctatatacaatgcagtagactaccacctaggaaagtacagcatgatatttttaagcccatacagaaccaacacacaatttgaaacagcatactcagacattacatacaacccaaacacagacaaaggactaggtaacaaaatgtggattcaatctgttactaaaacccacaccaaactagactcctcatgtagatgcttattagaagacattccactgtgggctatggccacaggatacggagagttttgtgagtcagaaattaactcagaggtgtggaacctatatattgtatgcattgtatgcccttacactaaaccaccactatggaaaaaaacagaaacgcctgaaggctgggtattttatgacacactgtttggagatggcaaaatgcccaccgggtcaggcctagtacccgtgtggctacagagcaggtggtaccccagactagtgttccaacaacaagtgctacacgatatataccttacagggccctttagttacaaagatgacctaaagagctttactataaatgccaggtacaaatttaaattcttatggggcggcactataatccccgaacaggtcattaaaaacccgtgcaaagagcaagacacgccattcacctttaccggtagacagcctcgcgacctacaaattactgacccgcagaccatgggcccagaatgggttttccacacctgggactggcgacgaggactatttggtgaaaatgctatcaaaagagtgtcagaacaaccaagcaatgatgcagactattatgctccaccaaaaaaacctagactattccctccaacagacctccaagagcaagaaagaggctcagatttcacactccaggagctcaggatcctctcggagagggcgccgtcgcaaacaagcgaagaagaggacccgcaggaggagcaccagctccagcagcaagagctccagctcagactccagcagcagttcagaatcaggcagcaactgcagcacctattcgtacaagtcctcaaaacccaagccggtctccatataaacccattatttttaaaccctgcataaaccaggtgttcatgtttcctcctgacacccctaaacccattaccactgcagaagattggaaacatgagtatgaatcctgtaagtactggcatagaccccccagaaagtaccttacagaccgtcccttctacccctggatgcccaaggagccccctcagtgtcgtgtcagctttaaacttggcttccaataaaacagcaaggccattcaaatttcacttgtcggtgtctacctctataagtcactaagcactccgagcgccagcgaggagtgcgacccttccccctgactcaacttcttcggagccgcgcgctacgccttcggctgcgcgcggcacctcagacccccgctcgtgctgacacgctcgcgcgtgtcagaccacttcgggctcgcgggggtcggaaattttgctaaacagagtccgagttgccattggacactgtagctgtgaatcagtaacgaaagtgagtggggccagacttcgccataaggcctttatcttcttgccatttgtccgtgtagggggtcgccatagacttcgggctcggttttaggccttccggactacaaaaaccgccattttagtgacgtcacggccgccattttaagtaaggcggaaacagctccactgtgtacaaaatggcggcggagcacttccggcttacacaaaatggccgccaatttcttccgggtcaaaggtcattgctacgtcatcggtgacgtggggagcctactgcgtcaaacgcggaagtaggccccgtacgtcactgtcacgtggtacatgcgtcacggccgccattttgttttacaaaatggc

SEQ ID NO: 764 - protein, 742 aa, Alphatorquevirus sp.; identical to SEQ ID NO: 510

SEQ ID NO: 765 - protein, 146 aa, Alphatorquevirus sp.; identical to SEQ ID NO: 511

SEQ ID NO: 766 - protein, 59 aa, Alphatorquevirus sp.; identical to SEQ ID NO: 512

SEQ ID NO: 767 - DNA, 3436 bp, Alphatorquevirus sp.
agacccccgctcgtgctgacacgctcgcgcgtgtcagaccacttcgggctcgcgggggtcgggaaatttgctaaacagactccgagttgccattggactctggagctgtgaatcagtaacgaaagtgagtggggccagacttcgccatagggcctttatcttcttgccattggtccgtgtcgggggtcgccgtaggcttcggactcggttttaggccttccggactacaaaattcgccattttagtgacgtcacgaccgccatcttaagtagttgaggcggacggtggcgtgagttcaaaggtcaccatcagccacacctactcaaaatggtggacaatttcttccaggtcaaaggtcacagacgccatcttaggtcacgtgacctactacgtcacggccgccattttagtttgcaaaatggccgacttccttcctctttttcaaaaaaaaagcggaagtgccgccgcggcggcggggggcggcgcgctgcgcgcgccgtcgggactggccgggctatgggcaaggctcttaaaaaagcatgtttctcggtaaaatttacagaaagaaaaggaaagtgccactgtacggcctgccagctacaaagaaaaaattacctactgctatgagccactggagcagacctgtccaccatgcaacggggatcgaacacctctggtaccagtctgttattaacagccattctgctagctgcggttgtggcgatcctgtacgccactttacttatcttgctgagaggtatggctttgccccaactccccgggccccgccagtagccccgacgcccaccatccgtagagccaggcctgtgcctgccgctccggagccccgtgctctaccatggcatggggatggtggaaacgaaaacgcaagtggtggtggagacgccggttcgcccgaggcagacttcgcagacgacggattagacgccctcgtcgccgcactcgacgaagaacagtaaggagacgcagacaatggaggagggggcgactaagacgcagactgtttaagcgaaaaagacgctttaagagacgcagacgaaaagctaagataaaaataactcagtggcaacctagctcagttaagagatgttttgttataggatactttccattagtaatatgtggccccggaaggtggtcagagaactttaccagtcacatagaggacaagatcagcaaaggaccctttgggggagggcacagcactagtagatggtccctaaaagtactctacgaagagttccaaagacaccacaacttttggactagaagcaacaaagaactagaattagttagattctttggaagcagttggagattttacagacacgaggacgttgactatatagtatactactctagaagggctcccctgggaggtaacatactgacagcacccagcctacacccaggggcagccatgctcagcaaacacaagataatagttcccagctttaaaaccagacccggtggaaaacccaccgtaaaaattaatattaagccccctacaacactaatagacaaatggtacttccagaaagacatttgtgacacaacctttttaaacttgaacgttgtactctgcaacctgcggtttccgttctgctcaccacaaactgacaacatttgtgtaaccttccaggtattgcatgaggtttaccacaatttcattagcataactgccaaagaattacttacaccttcaggctggaaaaaccactataaaaactttttaaatgctgcctttccaactaacagatcaattaataaattaaacacttttagcacagaaggagcctacagccacccacaaataaaaaaatatacagaaaacataacaacttcagattcgaaatactttagagataaagacggacagtggggagatgctatttatataacaaacacccaaagtcgagaacaagtaatacagctaataataaataatgcagaaaactacctaaaaaaagtacaggaagaatatgcaggacaagagaatttaaaaaacctaatacatccagttttctgtcagtacgtaggcatatttggcagtccactactaaacttccacagaataagtccagaaattccaggcctgtacaaagacataatatataatcccttaatagacaaaggcataggaaacagagtgtggatagactacctcagcaaagataacacaaagtacagccccacacaaagtaaatgttacatagcagaccttccaatgtggatggcctgctttggcctagtagactggtgcaaaaaagaaacaggcaactggggaataccagcctgggctagagtagtaatgatatgtccatacacctatcccaaattatacaacacaccagacccagaaagtggattcataccaataggatacaactttagccaaggtttcatgccagacggcaccaaatacacacccatacagatgagacacagatggtatccaaacttactaaaccagcaagcagtattagaagacataagtcagtcagggcccttctcatacagagaaaaaacaaacacagcaaacataaacgcaaaatacaaatttagatttcactttgggggcaaccctgtgtccgaacagattgttgcagacccatgcaaacaacccacctttgaaatgcccggaaccagtacactccctcctcgactacaagtcacggacccgaaactcctcggaccgcactacacattccacagctgggacaaaagacgtgactattataacggaaaaactattaagagaatgtcagaacaacaagaaacttctgagtttttattcccaggcccgaaaaaacccagagtcgatctggacgcagtgcagcctgtcgaaaaagactctttgccccagcaaagagaacagagaccctgggagacgagcgagagcgagaaagagacagaagccctctcggaagaagaagagacgggctccgtccaccagcagctcaggcagcagctcaaggagcaaaagcagctcagacagggaatcgagtgcctcttcgagcagctaataaaaacccagcagggagtccacctagatccttccctcttgtaggccccagacagtggctgtttcccgagagaaagccagcccctgcccctacctcgggagactgggccacagagtatttagcagctagagtgtttgacagacccccgagaagcaaccttaaagatacaccctactacccctacgttaaaaaccaatacaatgtgtactttgacctaacctttgaataaagtgcagcttcaaatttgcaaggccgtgggagtttcactggtcggagtctacctctaaaggtcactaagcactccgagcgttagcgaggagtgcgacccttccccctgactcaacttcttcgaagccgcgcgctacgccttcggctgcgcgcggcatctc

SEQ ID NO: 768 - protein, 743 aa, Alphatorquevirus sp.
MAWGWWKRKRKWWWRRRFARGRLRRRRIRRPRRRTRRRTVRRRRQWRRGRLRRRLFKRKRRFKRRRRKAKIKITQWQPSSVKRCFVIGYFPLVICGPGRWSENFTSHIEDKISKGPFGGGHSTSRWSLKVLYEEFQRHHNFWTRSNKELELVRFFGSSWRFYRHEDVDYIVYYSRRAPLGGNILTAPSLHPGAAMLSKHKIIVPSFKTRPGGKPTVKINIKPPTTLIDKWYFQKDICDTTFLNLNVVLCNLRFPFCSPQTDNICVTFQVLHEVYHNFISITAKELLTPSGWKNHYKNFLNAAFPTNRSINKLNTFSTEGAYSHPQIKKYTENITTSDSKYFRDKDGQWGDAIYITNTQSREQVIQLIINNAENYLKKVQEEYAGQENLKNLIHPVFCQYVGIFGSPLLNFHRISPEIPGLYKDIIYNPLIDKGIGNRVWIDYLSKDNTKYSPTQSKCYIADLPMWMACFGLVDWCKKETGNWGIPAWARVVMICPYTYPKLYNTPDPESGFIPIGYNFSQGFMPDGTKYTPIQMRHRWYPNLLNQQAVLEDISQSGPFSYREKTNTANINAKYKFRFHFGGNPVSEQIVADPCKQPTFEMPGTSTLPPRLQVTDPKLLGPHYTFHSWDKRRDYYNGKTIKRMSEQQETSEFLFPGPKKPRVDLDAVQPVEKDSLPQQREQRPWETSESEKETEALSEEEETGSVHQQLRQQLKEQKQLRQGIECLFEQLIKTQQGVHLDPSLL

SEQ ID NO: 769 - protein, 146 aa, Alphatorquevirus sp.
MFLGKIYRKKRKVPLYGLPATKKKLPTAMSHWSRPVHHATGIEHLWYQSVINSHSASCGCGDPVRHFTYLAERYGFAPTPRAPPVAPTPTIRRARPVPAAPEPRALPWHGDGGNENASGGGDAGSPEADFADDGLDALVAALDEEQ

SEQ ID NO: 770 - protein, 123 aa, Alphatorquevirus sp.; identical to SEQ ID NO: 562

SEQ ID NO: 771 - DNA, 3436 bp, Alphatorquevirus sp.; identical to SEQ ID NO: 767

SEQ ID NO: 772 - protein, 743 aa, Alphatorquevirus sp.; identical to SEQ ID NO: 768

SEQ ID NO: 773 - protein, 146 aa, Alphatorquevirus sp.; identical to SEQ ID NO: 769

SEQ ID NO: 774 - protein, 123 aa, Alphatorquevirus sp.; identical to SEQ ID NO: 562

SEQ ID NO: 775 - DNA, 3423 bp, Betatorquevirus sp.
cgggtgccgaaggtgagtgaaaccaccgtagtcaaggggcaattcgggctagctcagtctggcggaacgggcaagaaacttaaaataatactttattttacagatatgagctctatctggaagaaaccaacattctcaccgagacaacaagaaaaccactggcttggaattgtgttttctactcatgatgccttctgccactgcgaagacccctggttgcatttaatgattcttcttaacaaacaaggccaagctcccaaaccagaatcagaagtaagaaatataaaatgcctccttactggaatcgatacaactactaccaaagaagaccataccgaagaagacgtggttaccggtttcgacgatggagagctggaaaaactattcgcagaagatggcaccgaagaaaatggagacgaaggaacaaggtaaaaagacgctttagaaagaaaaaactgaaaaagattgttttaaaacaatttcagccacataaaataacaaaatgtaaaattataggaaaaaaatgtctatttcaaggcagtcctctaagaagcagtaataattatattcaatactgttactcttatgtacctgaactatatcctgggggaggaggctggtctttacttgtacatagcttgggaagtttatatgaagattatcaacatttacataatgtatggacaactagcaatgctggcatgcctttagtacgctttttaggagtagaatttaagttctatcaagacttatatactgattatgttgttatatatgataactgctggcctttagtagacaccccttatacacatgctaacagctgtcctagccaaatgctacaaagaaaaaacaaaataatagtcccaagtaaaatgacacaaaatagaaaaaaaccttataaaagatgctttgtaaaacctccaacacaaatgtataaccgttggtatttccaaagagacatttgtgacacaccactaaacatgctaaccgcaactgccatctcacttacaaaaccattttgtgaccctaaagcaagaagcaataatataactgtttattgcctaaatccacatagatttagaaacccaaactttcaaaacccaccaataaccaatggttactcaccatttactgcagataatctagaaaaccaccctgcaatgtacttatattcatctcatagtgtaattaacaaacgtaaagaactacaaacactcacaccactaaccaacacaaaagataacaaagcaggagctactctacaacacttatacgcaaacgatggtcaaaacaacaaatttgaaaactggggaaatcccttttatagactaaacttttggggagaagaatttcatatataccaaagcaaacatggtccaacatcagagaaagccaaattgtgggcaacaaatacacagtatacaaattcagacataagtatatctgacgaagtaacattaatggtaggatacaatttatatgcctgtagatacaatccagaaagagacacaggagaaggtaatatgtgttacattttaaataattcttcagccacttcattagaacctccttcaaataaaaaccttatatttgaaggatttccactatacatactactatggggttggacagactttttaaaaaagctaaagcaaaccatagacattgacaaaaactattttttagttgtcaaatcacctttttttgaagaaaagctgccatactatatttttattgacgatgattttagagatggctttgaaccctatactccacacgacaaagacaatgcacaatcttacatttcaccttacaacatgaatcactggtatcctaaatacttatttcaaacacaaagcgttgaaaaaatttgcagatcaggtcctgcctgtactagaccaaataatgagaattacttacaagcattttacaaatataaattctactttaaatggggaggctgtccaaaacaattagcaaaagcctatgatccttgtttacagtcaaaatggcccactcccgataacatcactccaggacttgaaatctcgaatcctaatgagccaccacaaacccacatctatgactgggactgggaagaagattatgttaaagaaaaagctttgcaaagaattagagtatacacagaatctcctaaacaaatactcttccttacagactcgaaacaaaaccccaaaccactccaaatcaaggaaaagaaagaggagtcagaaaacgaagaggaaacgcagctactcctccagctccaccacatccgacaccagcgaaagcagctcgaactccttctccagtcaaaacagggactaataaatatacaataaaacactgtaaaattagagtaaaactatttccatctccaacaaaaaaccgtagaatgactccaaaagaaagagaactagaaaaagaggtggcaaaaatatttaaaagaccaccaagagactttatatttgactttcctacttatccttatattccacctacaccccttgcaaactttgaccttaatttcaaagaataaaggccaacatacttcacttgatggtgtctgtttattaaagtttaacttaaataagctaactccgcctccctagtatgttggcgctgtaaagggggctccgcccccttacacccccaagggggctccgcccccttacacccccaaagggggctccgcccccttacacccccaagggggctccgcccccttacaccccagctccaccacatccgacaccagcgaaagcagctcgaactccttctccagtcaaaacagggactaataaatatacaataaaacactgtaaaattagagtaaaactatttccatctccaacaaaaaaccgtagaatgactccaaaagaaagagaactagaaaaagaggtggcaaaaatatttaaaagaccaccaagagactttatatttgactttcctacttatccttatattccacctacaccccttgcaaactttgaccttaatttcaaagaataaaggccaacatacttcacttgatggtgtctgtttattaaagtttaacttaaataagctaactccgcctccctagtatgttggcgctgtaaagggggctccgcccccttacacccccaagggggctccgcccccttacacccccaagggggctccgcccccttacaccccctcataaatattcaacaggaaaaccacataattagaattgccgaccacaaaccgtcatacacttccccttttttaacacacttcctcttactctcattattattcattacattaattaataatcaccgtaattcctgggtggagactaaaacctatataactaactacacttccgaatggctgagtttatgccgccagtcgtagactgcaccactttagtgactgcaggctgagcttggg

SEQ ID NO: 776 - protein, 685 aa, Betatorquevirus sp.
MPPYWNRYNYYQRRPYRRRRGYRFRRWRAGKTIRRRWHRRKWRRRNKVKRRFRKKKLKKIVLKQFQPHKITKCKIIGKKCLFQGSPLRSSNNYIQYCYSYVPELYPGGGGWSLLVHSLGSLYEDYQHLHNVWTTSNAGMPLVRFLGVEFKFYQDLYTDYVVIYDNCWPLVDTPYTHANSCPSQMLQRKNKIIVPSKMTQNRKKPYKRCFVKPPTQMYNRWYFQRDICDTPLNMLTATAISLTKPFCDPKARSNNITVYCLNPHRFRNPNFQNPPITNGYSPFTADNLENHPAMYLYSSHSVINKRKELQTLTPLTNTKDNKAGATLQHLYANDGQNNKFENWGNPFYRLNFWGEEFHIYQSKHGPTSEKAKLWATNTQYTNSDISISDEVTLMVGYNLYACRYNPERDTGEGNMCYILNNSSATSLEPPSNKNLIFEGFPLYILLWGWTDFLKKLKQTIDIDKNYFLVVKSPFFEEKLPYYIFIDDDFRDGFEPYTPHDKDNAQSYISPYNMNHWYPKYLFQTQSVEKICRSGPACTRPNNENYLQAFYKYKFYFKWGGCPKQLAKAYDPCLQSKWPTPDNITPGLEISNPNEPPQTHIYDWDWEEDYVKEKALQRIRVYTESPKQILFLTDSKQNPKPLQIKEKKEESENEEETQLLLQLHHIRHQRKQLELLLQSKQGLINIQ

SEQ ID NO: 777 - protein, 108 aa, Betatorquevirus sp.
MSSIWKKPTFSPRQQENHWLGIVFSTHDAFCHCEDPWLHLMILLNKQGQAPKPESEVRNIKCLLTGIDTTTTKEDHTEEDVVTGFDDGELEKLFAEDGTEENGDEGTR

SEQ ID NO: 778 - DNA, 3423 bp, Betatorquevirus sp.
cgggtgccgaaggtgagtgaaaccaccgtagtcaaggggcaattcgggctagctcagtctggcggaacgggcaagaaacttaaaataatactttattttacagatatgagctctatctggaagaaaccaacattctcaccgagacaacaagaaaaccactggcttggaattgtgttttctactcatgatgccttctgccactgcgaagacccctggttgcatttaatgattcttcttaacaaacaaggccaagctcccaaaccagaatcagaagtaagaaatataaaatgcctccttactggaatcgatacaactactaccaaagaagaccataccgaagaagacgtggttaccggtttcgacgatggagagctggaaaaactattcgcagaagatggcaccgaagaaaatggagacgaaggaacaaggtaaaaagacgctttagaaagaaaaaactgaaaaagattgttttaaaacaatttcagccacataaaataacaaaatgtaaaattataggaaaaaaatgtctatttcaaggcagtcctctaagaagcagtaataattatattcaatactgttactcttatgtacctgaactatatcctgggggaggaggctggtctttacttgtacatagcttgggaagtttatatgaagattatcaacatttacataatgtatggacaactagcaatgctggcatgcctttagtacgctttttaggagtagaatttaagttctatcaagacttatatactgattatgttgttatatatgataactgctggcctttagtagacaccccttatacacatgctaacagctgtcctagccaaatgctacaaagaaaaaacaaaataatagtcccaagtaaaatgacacaaaatagaaaaaaaccttataaaagatgctttgtaaaacctccaacacaaatgtataaccgttggtatttccaaagagacatttgtgacacaccactaaacatgctaaccgcaactgccatctcacttacaaaaccattttgtgaccctaaagcaagaagcaataatataactgtttattgcctaaatccacatagatttagaaacccaaactttcaaaacccaccaataaccaatggttactcaccatttactgcagataatctagaaaaccaccctgcaatgtacttatattcatctcatagtgtaattaacaaacgtaaagaactacaaacactcacaccactaaccaacacaaaagataacaaagcaggagctactctacaacacttatacgcaaacgatggtcaaaacaacaaatttgaaaactggggaaatcccttttatagactaaacttttggggagaagaatttcatatataccaaagcaaacatggtccaacatcagagacagccaaaaagtgggcaacaagtccagactatacaaattcagacgcaagtatatctgacgaagtaacattaatggtaggatacaatttatatgcctgtagatacaatccagaaagagacacaggagaaggtaatatgtgttacattttaaataattcttcagccacttcattagaacctccttcaaataaaaaccttatatttgaaggatttccactatacatactactatggggttggacagactttttaaaaaagctaaagcaaaccatagacattgacaaaaactattttttagttgtcaaatcacctttttttgaagaaaagctgccatactatatttttattgacgatgattttagagatggctttgaaccctatactccacacgacaaagacaatgcacaatcttacatttcaccttacaacatgaatcactggtatcctaaatacttatttcaaacacaaagcgttgaaaaaatttgcagatcaggtcctgcctgtactagaccaaataatgagaattacttacaagcattttacaaatataaattctactttaaatggggaggctgtccaaaacaattagcaaaagcctatgatccttgtttacagtcaaaatggcccactcccgataacatcactccaggacttgaaatctcgaatcctaatgagccaccacaaacccacatctatgactgggactgggaagaagattatgttaaagaaaaagctttgcaaagaattagagtatacacagaatctcctaaacaaatactcttccttacagactcgaaacaaaaccccaaaccactccaaatcaaggaaaagaaagaggagtcagaaaacgaagaggaaacgcagctactcctccagctccaccacatccgacaccagcgaaagcagctcgaactccttctccagtcaaaacagggactaataaatatacaataaaacactgtaaaattagagtaaaactatttccatctccaacaaaaaaccgtagaatgactccaaaagaaagagaactagaaaaagaggtggcaaaaatatttaaaagaccaccaagagactttatatttgactttcctacttatccttatattccacctacaccccttgcaaactttgaccttaatttcaaagaataaaggccaacatacttcacttgatggtgtctgtttattaaagtttaacttaaataagctaactccgcctccctagtatgttggcgctgtaaagggggctccgcccccttacacccccaagggggctccgcccccttacacccccaaagggggctccgcccccttacacccccaagggggctccgcccccttacaccccagctccaccacatccgacaccagcgaaagcagctcgaactccttctccagtcaaaacagggactaataaatatacaataaaacactgtaaaattagagtaaaactatttccatctccaacaaaaaaccgtagaatgactccaaaagaaagagaactagaaaaagaggtggcaaaaatatttaaaagaccaccaagagactttatatttgactttcctacttatccttatattccacctacaccccttgcaaactttgaccttaatttcaaagaataaaggccaacatacttcacttgatggtgtctgtttattaaagtttaacttaaataagctaactccgcctccctagtatgttggcgctgtaaagggggctccgcccccttacacccccaagggggctccgcccccttacacccccaagggggctccgcccccttacaccccctcataaatattcaacaggaaaaccacataattagaattgccgaccacaaaccgtcatacacttccccttttttaacacacttcctcttactctcattattattcattacattaattaataatcaccgtaattcctgggtggagactaaaacctatataactaactacacttccgaatggctgagtttatgccgccagtcgtagactgcaccactttagtgactgcaggctgagcttggg

SEQ ID NO: 779 - protein, 685 aa, Betatorquevirus sp.
MPPYWNRYNYYQRRPYRRRRGYRFRRWRAGKTIRRRWHRRKWRRRNKVKRRFRKKKLKKIVLKQFQPHKITKCKIIGKKCLFQGSPLRSSNNYIQYCYSYVPELYPGGGGWSLLVHSLGSLYEDYQHLHNVWTTSNAGMPLVRFLGVEFKFYQDLYTDYVVIYDNCWPLVDTPYTHANSCPSQMLQRKNKIIVPSKMTQNRKKPYKRCFVKPPTQMYNRWYFQRDICDTPLNMLTATAISLTKPFCDPKARSNNITVYCLNPHRFRNPNFQNPPITNGYSPFTADNLENHPAMYLYSSHSVINKRKELQTLTPLTNTKDNKAGATLQHLYANDGQNNKFENWGNPFYRLNFWGEEFHIYQSKHGPTSETAKKWATSPDYTNSDASISDEVTLMVGYNLYACRYNPERDTGEGNMCYILNNSSATSLEPPSNKNLIFEGFPLYILLWGWTDFLKKLKQTIDIDKNYFLVVKSPFFEEKLPYYIFIDDDFRDGFEPYTPHDKDNAQSYISPYNMNHWYPKYLFQTQSVEKICRSGPACTRPNNENYLQAFYKYKFYFKWGGCPKQLAKAYDPCLQSKWPTPDNITPGLEISNPNEPPQTHIYDWDWEEDYVKEKALQRIRVYTESPKQILFLTDSKQNPKPLQIKEKKEESENEEETQLLLQLHHIRHQRKQLELLLQSKQGLINIQ

SEQ ID NO: 780 - protein, 108 aa, Betatorquevirus sp.; identical to SEQ ID NO: 777

SEQ ID NO: 781 - DNA, 3419 bp, Alphatorquevirus sp.
agacccccgctcgtgctgacacgctcgcgcgtgtcagaccacttcgggctcgcgggggtcgggatatttgctaaacagactccgagttgccattggacactgtagccgtgaatcagtaacgaaagtgagtggggccagacttcgccataaggcctttatcttcttgccatttgtccgtgacggaggttgccatagccttcgggctcggttttaggccttccggactacaaaaaccgccatattagtgacgtcacggcggccattttaagtaaggcggaagcagctccactatacacaaaatggcggcggagcacttccggcttgcccaaaatggcggccaaaaacatccgggttaaaggtcacacctacgtcacaagtcacgtggggagggttggcgtataacccggaagtcaatcctctcacgtggcctgtcacgtgacgtgtgcgtcacggcggccattttgttttacaaaatggcggacttccttcctcttttttaaaaataacggcccggcggcggcgcgcgcgctgcgcggcaaggctcttaaaaaagccatgtttctcggtaaactttacagaaagaagaggcgcctgccactgtccccactgtacactccacaaaaaactcgcaggcttctgactgctatgtggacacccccggcgcacaatgtccgcggccaggagagacagtggtacgagtcctgctttcgctctcacgcttgtttttgtggctgtggtgattttattcggcatctttgtgatctggcgaatgattttggacgtcctcctaccgctcaacgaccaccggcaccaccacctccagtaaggcctctgccagctctcccggcaccccccaacccctccggtagcagagcggcatggcctactggtggtacagacggagacgaagagccccgaggtggaggagacggcgctggagggttcgcagacctcgcagacgaagaactgctgtccgccgccgtagaggccgccgaagagtaagaaagaggagggggaggtggaggaggagttatagaaaatggcggaggggcagaaagagacgcaaacacaagagacgcttagtactgactcagtggcaacctgcttttataagacgctgctatatagtaggcttcttgcccctcataatctgcggagaaaacacctccgcaagaaactttgctacccactctgacgacctcatttccaacggaccgtacgggggaggcatgacgaccactaaattcaccctcagaatactgtatgacgaacacctcaggtggctaaactactggactgttagcaaccaggacctagacctgtgtagatacctggggggcaccttctatgcatacagacaccccacagtagactttattgtacagatacatactagtccccctttcctagacactcccctcacagggcccagcatacaccctggcatgctcatgctagcaaaaaacaaaatactaatacctagcctgaaaaccagaccaaacaaaaaaaaacacaaagtaaaaattagattcaggcccccaaaactctttgaagacaagtggtacccccagtcagaactctgtgacaccacactactaaccgtctttgcaaccgcatgtgacctgcaatttccgttcggctcaccactaactgacaaccattgcgtcaacttccaggtgctaggttccgcttacaaacggcacctcagtatacttcctgagaaactaaacttagctaaagatcactttgatcgcagcttatattcagttgctgcttactacaacacattccaaacaatagctcaaatgaaaccttccacccaacaaacagatttcacccctaagtggtccacaatagttaacaacacacaattagcagtagatggcaaaaaccagtctaaatcaaatgacacctggtacctaggcaatgcatataatgttgaacttgcaaaagaagcagcaaaaaacataagaacaaaatacttaaacgctactagacaagcactacccgccctattaacactaggagacgaattactagaataccacacaggtatctacagctcaatattcttatcggcaggcagatcttactttgaaacactaggtgcctacacagacataatctacaatccctttgtagacaaaggaataggaaacaaagtatggttagaccccctaatcaaagaagatgcagtactagacacaaaaaaagccaaagtactaatagaagaccaaccaatatgggcagcactatttggatacacagaatttgcagcaaaatacacaggagactctgcaataacagccaactacagacttgtaataagatgcccctacacagaccctatgctagtagacagagacaatgaactacaggggtttgtaccatactctaaaaactttggcaacggaaaaatgccagggggctctgccaacgttccactaactatgagaataaagtggtaccccatgctatttcaccaactagaggtactagaagaactagtgcagtccggaccgtttgcatacaagggcgaccaaaagagctgtgtacttgctttaaaatacatcttcagatggaaatggggaggtaaccctgtgtctcaccagattgtacgcaacccctgcaaaggaggcacccgttcccgtcgagagcctcgctcagtacaagcagctgacccgaaatatgtcacaccgaggctgtccttccactcgtgggacttcagacgagggctttttggcgcggcaagtattaaaagaatgtcagaggaatcaggagctcctgtctatcctacaggcccaccgagaaaaagaccaaaaagagacaccgacccgtacgactcgcagcaagaagaaaactcgagttcaagacacctccagctccagccctgggtccactccagccaagaagtccaaagcgaagaagagacgcaagtcccgcaaaacctacaagaacaactcctccagcagctccgagagcagcagcagctcaggctccacttacagtccctcgccaaccaagtcctcaaaatcaaagcgggatacagcatacaccccctattatcttcccaagcctaaacaaagtctatatgtttgagcctaaaggccccaaacccatacaaggctatgaggcctggttagatgaataccaaacagcaggtatttgggataggccagtgagaacataccacacagacacccccttctacccctgggcacctaaacccccccaaccaattccgcgtcagctttaaactcggctttcaataaaatttcaaggcctttcactgctcacttgtcggtgtctacctctataagtcactaagcactccgagcgtcagcgaggagtgcgaccctagggggggactcaacgccttcggagccgcgcgctacgccttcggctgcgcgcggcacctc

SEQ ID NO: 782 - protein, 733 aa, Alphatorquevirus sp.
MAYWWYRRRRRAPRWRRRRWRVRRPRRRRTAVRRRRGRRRVRKRRGRWRRSYRKWRRGRKRRKHKRRLVLTQWQPAFIRRCYIVGFLPLIICGENTSARNFATHSDDLISNGPYGGGMTTTKFTLRILYDEHLRWLNYWTVSNQDLDLCRYLGGTFYAYRHPTVDFIVQIHTSPPFLDTPLTGPSIHPGMLMLAKNKILIPSLKTRPNKKKHKVKIRFRPPKLFEDKWYPQSELCDTTLLTVFATACDLQFPFGSPLTDNHCVNFQVLGSAYKRHLSILPEKLNLAKDHFDRSLYSVAAYYNTFQTIAQMKPSTQQTDFTPKWSTIVNNTQLAVDGKNQSKSNDTWYLGNAYNVELAKEAAKNIRTKYLNATRQALPALLTLGDELLEYHTGIYSSIFLSAGRSYFETLGAYTDIIYNPFVDKGIGNKVWLDPLIKEDAVLDTKKAKVLIEDQPIWAALFGYTEFAAKYTGDSAITANYRLVIRCPYTDPMLVDRDNELQGFVPYSKNFGNGKMPGGSANVPLTMRIKWYPMLFHQLEVLEELVQSGPFAYKGDQKSCVLALKYIFRWKWGGNPVSHQIVRNPCKGGTRSRREPRSVQAADPKYVTPRLSFHSWDFRRGLFGAASIKRMSEESGAPVYPTGPPRKRPKRDTDPYDSQQEENSSSRHLQLQPWVHSSQEVQSEEETQVPQNLQEQLLQQLREQQQLRLHLQSLANQVLKIKAGYSIHPLLSSQA

SEQ ID NO: 783 - protein, 157 aa, Alphatorquevirus sp.
LRGKALKKAMFLGKLYRKKRRLPLSPLYTPQKTRRLLTAMWTPPAHNVRGQERQWYESCFRSHACFCGCGDFIRHLCDLANDFGRPPTAQRPPAPPPPVRPLPALPAPPNPSGSRAAWPTGGTDGDEEPRGGGDGAGGFADLADEELLSAAVEAAEE

SEQ ID NO: 784 - protein, 121 aa, Alphatorquevirus sp.
LGPLQPRSPKRRRDASPAKPTRTTPPAAPRAAAAQAPLTVPRQPSPQNQSGIQHTPPIIFPSLNKVYMFEPKGPKPIQGYEAWLDEYQTAGIWDRPVRTYHTDTPFYPWAPKPPQPIPRQL

SEQ ID NO: 785 - DNA, 3406 bp, Alphatorquevirus sp.
agacccccgctcgtgctgacacgctcgcgcgtgtcagaccacttcgggctcgcgggggtcgggaaatttgctaaacagactccgagttgccattggactctggagctgtgaatcagtaacgaaagtgagtggggccagacttcgccatagggcctttatcttcttgccattggtccgtgtcgggggtcgccgtaggcttcggactcggttttaggccttccggactacaaaattcgccattttagtgacgtcacgaccgccatcttaagtagttgaggcggacggtggcgtgagttcaaaggtcaccatcagccacacctactcaaaatggtggacaatttcttccaggtcaaaggtcacagacgccatcttaggtcacgtgacctactacgtcacggccgccattttagtttgcaaaatggccgacttccttcctctttttcaaaaaaaagcggaagtgccgccgcggtcgggactggccgggctatgggcaaggctcttaaaaaagcatgtttctcggtaaaatttacagaaagaaaaggaaagtgccactgtacggcctgccagctacaaagaaaaaattacctactgctatgagccactggagcagacctgtccaccatgcaacggggatcgaacacctctggtaccagtctgttattaacagccattctgctagctgcggttgtggcgatcctgtacgccactttacttatcttgctgagaggtatggcttcgccccaactccccgggccccgccagtagccccgacgcccaccatccgtagagccaggcctgtgcctgccgctccggagccccgtgctctaccatggcatggggatggtggaaacgaaaacgcaagtggtggtggagacgccggttcgcccgaggcagacttcgcagacgacggattagacgccctcgtcgccgcactcgacgaagaacagtaaggagacgcagacaatggaggagggggcgactaagacgcagactgtttaagcgaaaaagacgctttaagagacgcagacgaaaagctaagataaaaataactcagtggcaacctagctcagttaagagatgttttgttataggatactttccattagtaatatgtggccccggaaggtggtcagagaactttaccagtcacatagaggacaagatcagcaaaggaccctttgggggagggcacagcactagtagatggtccctaaaagtactctacgaagagttccaaagacaccacaacttttggactagaagcaacaaagaactagaattagttagattctttggaagcagttggagattttacagacacgaggacgttgactatatagtatactactctagaagggctcccctgggaggtaacatactgacagcacccagcctacacccaggggcagccatgctcagcaaacacaagataatagttcccagctttaaaaccagacccggtggaaaacccaccgtaaaaattaatattaagccccctacaacactaatagacaaatggtacttccagaaagacatttgtgacacaacctttttaaacttgaacgttgtactctgcaacctgcggtttccgttctgctcaccacaaactgacaacatttgtgtaaccttccaggtattgcatgaggtttaccacaatttcattagcataactgccaaagaattacttacaccttcaggctggaaaaaccactataaaaactttttaaatgctgcctttccaactaacagatcaattaataaattaaacacttttagcacagaaggagcctacagccacccacaaataaaaaaatatacagaaaacataacaacttcagattcgaaatactttagagataaagacggacagtggggagatgctatttatataacaaacacccaaagtcgagaacaagtaatacagctaataataaataatgcagaaaactacctaaaaaaagtacaggaagaatatgcaggacaagagaatttaaaaaacctaatacatccagttttctgtcagtacgtaggcatatttggcagtccactactaaacttccacagaataagtccagaaattccaggcctgtacaaagacataatatataatcccttaatagacaaaggcataggaaacagagtgtggatagactacctcagcaaagataacacaaagtacagccccacacaaagtaaatgttacatagcagaccttccaatgtggatggcctgctttggcctagtagactggtgcaaaaaagaaacaggcaactggggaataccagcctgggctagagtagtaatgatatgtccatacacctatcccaaattatacaacacaccagacccagaaagtggattcataccaataggatacaactttagccaaggtttcatgccagacggcaccaaatacacacccatacagatgagacacagatggtatccaaacttactaaaccagcaagcagtattagaagacataagtcagtcagggcccttctcatacagagaaaaaacaaacacagcaaacataaacgcaaaatacaaatttagatttcactttgggggcaaccctgtgtccgaacagattgttgcagacccatgcaaacaacccacctttgaaatgcccggaaccagtacactccctcctcgactacaagtcacggacccgaaactcctcggaccgcactacacattccacagctgggacaaaagacgtgactattataacggaaaaactattaagagaatgtcagaacaacaagaaacttctgagtttttattcccaggcccgaaaaaacccagagtcgatctggacgcagtgcagcctgtcgaaaaagactctttgccccagcaaagagaacagagaccctgggagacgagcgagagcgagaaagagacagaagccctctcggaagaagaagagacgggctccgtccaccagcagctcaggcagcagctcaaggagcaaaagcagctcagacagggaatcgagtgcctcttcgagcagctaataaaaacccagcagggagtccacctagatccttccctcttgtaggccccagacagtggctgtttcccgagagaaagccagcccctgcccctacctcgggagactgggccacagagtatttagcagctagagtgtttgacagacccccgagaagcaaccttaaagatacaccctactacccctacgttaaaaaccaatacaatgtgtactttgacctaacctttgaataaagtgcagcttcaaatttgcaaggccgtgggagtttcactggtcggagtctacctctaaaggtcactaagcactccgagcgttagcgaggagtgcgacccttccccctgactcaacttcttcgaagccgcgcgctacgccttcggctgcgcgcggcatctc

SEQ ID NO: 786 - protein, 743 aa, Alphatorquevirus sp.; identical to SEQ ID NO: 768

SEQ ID NO: 787 - protein, 146 aa, Alphatorquevirus sp.; identical to SEQ ID NO: 769

SEQ ID NO: 788 - protein, 123 aa, Alphatorquevirus sp.; identical to SEQ ID NO: 562

SEQ ID NO: 789 - DNA, 3405 bp, Alphatorquevirus sp.
gggcggcgcgcttcgcgcgcccacaccgcagtctaggggcaattcgggcacgggtctggccgggctatgggcaaggttctgaaaaaattcccccgttgtgttcttaaacaggacataaaatcatgccgtggagaccgccggctcataacgtccaggggcgagagagtgagtggcttgcaagcacttttcacgcacacgctgctttttgcggctgcggtgactttattgggcatcttaacagccttgctcctcgctttcctaacaaccaaggacccccgcatccaccggccctaaacaggccaccggcacagggcccagaaggccccgggggtcccatagtacctctaccagccctaccggcaccacctgacccgccaccacggcctggtggtggggaagacggtggcgacggcgcccgtggggccggtggcgccgccgaaggcgcgtatggacaagaagacctagaactgctgttcgccgccgccgaggaagacgatatgtgagtagaaggcgccgctacaggcgcagactcagacaaaggggcagacggagatacagggggcgacgaaagaagagacagaccctagtactcagacaatggcaacctgacgttaacagactgtgcagaatcacaggatggctacctcttatagtctgtggcacgggcagggcccaagacaactttatagtacactcagaggacataaccccccgaggagccgcctacgggggcaacctcacacacataacatggtgcttagaagctatataccaagaattcctcatgcacagaaacagatggtccagaagtaaccacgacctggacctctgcagataccaaggagtagtctttaaggcttacagacaccccaaagtagactacatactagcatacactagaacacctccatttcaagtaacagaactcagctacatgtcctgccatccactactcatgctcacaacaaaacacagaatagtagtaaagagccaagagaccaaaaaatggggcaaaaaatatgtaaaatttagaataaagccccccagactaatgttaaacaaatggtactttactcatgacttttgtaaagtcccactattcagcatgtgggcctcagcctgtgatctaagaaatccctggctcagagagggggccctaagccccacagtaggcttctttgccctaaagcctgacttctaccctaatttaagcattttaccaaatgaagtaactcaacaatttaacttttttctaaactctgctcacccaacacaaatagaatcacacaaagatgtcagatgggaatacacatacacaaacttaatgaggtccatatacaaccagactccagctctaaaatcctccacatatgactggcaaaactatagcacaccaggaaactatgcagcatgccattcccaatttacaacatttaaaaaacaaagatttgccaaaattaaagcagaatatgaaacagtatatcctacactaacaacacaaacaccccaatcagaagcactaacacaagaatttggaatgttctctccatactatttaacaccaacaagaataagtctagactggcacacagtataccaccacattagatacaaccccatggcagacaaaggcctaggaaacatgatatgggtagactggtgctctagaaaagaatccacctacgaccccacaagatccaaatgcatgctaaaagacctaccactatacatgcttttctatggatactgtgactgggtcactaaatccataggctcagaaacagcctggagagacatgagattaatggtggtctgtccttacacagaaccccaactcatgaaaaaaaatgacaaaacctatggctatgtaatctatggctacaactttgcaaacggaaacatgccatggttgcaaccatatatcccaatctcgtggttttgccgttggtttccttgcataacccaccaacgtgaagcaatggagtcagttgtagccacaggaccgttcatggtcagagaccaagaccgcaacagttgggacataactataggctacaaattcttatggagatgggggggctctcctctgcccactcaggcaatcgacgacccctgccagcagggaacccacccgctgcccgagcccggtacgttgcctagaatcttacaagtcagcgacccgacgcaactcggaccgaaaacaatattccacctctgggaccagaggcgtggactatttagcaaaagaagtattgagagagtgtcagaatacaaaggaactgatgacttattttcaccaggtcgcccaaagcgcccaaagctcgatacaaggcccgaaggactaccagaggagcaaaaaggagcttacaatttactccaagccctccaagactcagcccagtcggaagaaagcgaccaagaagacatgcctcccctcgaagaagaacaagtactccaagagcaaaagaaagagacgctcctcgagcagctccagcaacagaaacaccaccagcgagtcctcaagcgaggcctcagactcctcctcggagacgtcctaaaactccgccggggtctccacatagacccggtccttacatagcaccccctccatacatccctgaccttcttttccctaacactcaaaaaaaaaaaaagttttccaacttcgactgggctacagaataccagcttgctatggctttcgaccgccctctccgctactacccctcagacctccctcactacccgtggctaccaaaaaagccacctacccaaactacctatagagtatccttccaacttaaagccccccaataaaatttcaaggccgtgggactttcacctctcggtgtctgcttattaaggttaccaagcactccgagcgccagcgaggagtgcgacccccctgcccggtagcaacttcctcggggtccggcgctacgccttcggctgcgccggacgcctcggaccccccctcgacccgaatcgctcgcgcgattcggacctgcggcctcgggggggtcgggagctttattaaacagactccgagtctgtcttggacactgagggggcatacagcaacgaaagtgagtggggccagacttcgccataaggcctttatgttctcgccatttgtcagtgtcttccgggttggtgtggagatcgccattttaacttcgaccttcattttaggccctagcgggcacccgtaggcgcatactagtgacgtcacggcagccatcttggctctgacgtcaacgtcacgtggtaagggcggcgtgtaacccggaagtcatcctcgtcacgtgacctgacgtcacggccgccattttgtgctgtccgccattttgttacttccttccgctttttgtaaaaaaaaagaggaagtatgacgtagcggcgggg

SEQ ID NO: 790 - protein, 659 aa, Alphatorquevirus sp.
LCRITGWLPLIVCGTGRAQDNFIVHSEDITPRGAAYGGNLTHITWCLEAIYQEFLMHRNRWSRSNHDLDLCRYQGVVFKAYRHPKVDYILAYTRTPPFQVTELSYMSCHPLLMLTTKHRIVVKSQETKKWGKKYVKFRIKPPRLMLNKWYFTHDFCKVPLFSMWASACDLRNPWLREGALSPTVGFFALKPDFYPNLSILPNEVTQQFNFFLNSAHPTQIESHKDVRWEYTYTNLMRSIYNQTPALKSSTYDWQNYSTPGNYAACHSQFTTFKKQRFAKIKAEYETVYPTLTTQTPQSEALTQEFGMFSPYYLTPTRISLDWHTVYHHIRYNPMADKGLGNMIWVDWCSRKESTYDPTRSKCMLKDLPLYMLFYGYCDWVTKSIGSETAWRDMRLMVVCPYTEPQLMKKNDKTYGYVIYGYNFANGNMPWLQPYIPISWFCRWFPCITHQREAMESVVATGPFMVRDQDRNSWDITIGYKFLWRWGGSPLPTQAIDDPCQQGTHPLPEPGTLPRILQVSDPTQLGPKTIFHLWDQRRGLFSKRSIERVSEYKGTDDLFSPGRPKRPKLDTRPEGLPEEQKGAYNLLQALQDSAQSEESDQEDMPPLEEEQVLQEQKKETLLEQLQQQKHHQRVLKRGLRLLLGDVLKLRRGLHIDPVLT

SEQ ID NO: 791 - DNA, 3395 bp, Alphatorquevirus sp.
cgggagccggaggtgagtttacacaccgcagtctaggggcaactcgggcacgggtctggccgggctatgggcaagattcttaaaaaattcccccgttctatatgccgccaggacaccaagtcatgccgtggtctccgccaacagctaacctccaaggcagagaaaataactggctcaagtcagtttttctctcgcatgctactttctgcggctgtcctgaccctgttgggcatcttcatcgcgtttatactcgccagcagagcggcggaccgagtccccctggtacttccaccggggcaccggctctaccggcgcccccatcaccgaacccgccaccacggcctggtggagaactagaaggagaccgtggagacggtggaggagaaggcgctggggcctaccgagaagaagatttagaagaacttttcgcggcctcaagagacgacgatatgtgagtagaggccggcgccgccgatacaggcgcagacgaactcgggggcgacggagaaggggacgcagacgcaggcgcagaaagactcttatactcagacagtggaacccagatgttataaaaagatgctttatcacaggatggatgccactcattatctgtggcaccggacacacacaatacaactttataacacacatggacgatatcccccctaagaactactcctacgggggcaatttcaccaatgtgactttctcactagccagcctatatgaggagtacatgcaccacagaaacaagtggtcccgctcaaactatgacctagaactagtgagatacattagcaccaccataaaattctacagacactccaaagtagactacatagtaagctacaccaccacaggaccctttgaaacaaatgaactctcctacatgatgacacacccactaatgatgctcaccagcaaaaagcacataatagtgcccagcctagagaccaaacccagaggcagacgctccataaaaattaaaataaagcctccaaaacttatgctaaacaagtggtactttgcacatgacttttgtaaaataggcctctttcagatgtgggccacagccttaaacctacaaaacccctggctcagatcaggcactaacagcccagtcataggattctatgtacttaaaaaccaggtataccaaaacgccttctcaaacctagcagactcagacccactacaacaaagagaaacagcatacaaagagttaactaaaaaagcaacacaaccatccaacacatggtataactggcaatacacatacctgaaaccaatgaaacaaatatactaccaagcagcagctgatgccacaaacaaaaatgaaatgcaaggaagaccatacaattgggaaaactacaaaaagttctttgataaggtacaaacaaagtggcaagcaatccaacaaagtacatatgaactagttaaaaaagaatatcaaaacatatacaccaccagtgtaacatacccacctgaatgggcaaacagacaattcctagaacatgactgtggcatattcagtccatactttttatcaccagataactacacaccagagtggcacacagcatacacctatatcagatacaacccactactagacagaggaataggtaacagaatctgcgtgcagtggtgtagtgaaaagagcagtgactatgacccagtaaagagcaagtgcatgctacaagacatgccactttacatactctgctatggctacctagactttgtagtaaaacagctaggagtaaagtcagcatggacagacatgagagtggccattagaagcccctacacagagccaaaactaataggcagctcagacaaaactatgtatatccctatagggttaaattttatgaaaggagacatgccctgggacatgaactatatcccaatcaagtggtggtttaagtggtaccccatgtgcacacaccaggcttccgttttagaagcaatagtttcctgtagtccgtttatggttagagatcaggaagccaacagttgggacataaccataggctacaaagcaacattcttatggggcggttccccattacctccacagcccatcgacgacccctgccaaaaaaccacacacgaactacccgaccccgataaacaccctccaagaatacaaatatcagacccgcaagttctcggaccggcgacgctcttccactcgtgggacctcagacgtggcttcattaacacacgctctattaaacgagtgtcagaatacgcagacactaatgagtatttttcaacaggcgtcgagttcaaaagaccccgtctggacactccccaccacgggcagctatcaaaccaagaagaagacgccttatctatcctccgacaactccaggaggagcaggaagagagcagcacatcagaagaagaacaagcaccccaaaaagaagcgcagcaaaaagaaaagctactacaacagctcagagtccagcggcagcaccagcgagtcctcagacagggaatcaaacagctcatgggagacgtgctcagactccggaaaggagtccactggaaccccagcctataattctgcctccagaaccaataccagatcttttattccccaatactaaaaaaaaaaagaagttttccgtcttcgaatggcagacagaagctcaattagcagcctggttaaacaggcctatgagactgtatcctggggacaccccgttctacccgtggctaccccccaagcaaagtatcccccctacatgtagagtatgcttcaaaataaagcttgatgattaattttcaaggccgtgggagtttcacttgtcggtgtctacctctaaaagtcactaagcactccgagcgaagcgaggagtgcgacccccctgcccggtagcaacttcctcggggtccggcgctacgccttcggctgcgcccgcgcgaagcgcgccgccccccccgccgctacgtcatacttcctctttttttttaaaaaagcggaaggaagtcacaaaatggccgccgcacaaaatggcggccgtgacgtcatagtcacgtgaccagggatgcttccggggtaaggcacgccctcaccacgtgacttaaacgtcacagccaagatggcgcctgtgacgtcactaaaatgcgcctacggaggcccgcgaggctctaaaatggtggccgaagctaagtccaccgcgcatgcgcggccacgcccccgccgccattttgtacagcccgccaattttatttcaaacagaccaatcaactactactacgtacacttcctggggtgtgtcctcccactctatataagcagaagcagtgacgaatggtagagtttttcacgcccgtccgcagcgaggacgcgagcgtcagcgagcggccgagcgacccgtggg

SEQ ID NO: 792 - protein, 658 aa, Alphatorquevirus sp.
MPLIICGTGHTQYNFITHMDDIPPKNYSYGGNFTNVTFSLASLYEEYMHHRNKWSRSNYDLELVRYISTTIKFYRHSKVDYIVSYTTTGPFETNELSYMMTHPLMMLTSKKHIIVPSLETKPRGRRSIKIKIKPPKLMLNKWYFAHDFCKIGLFQMWATALNLQNPWLRSGTNSPVIGFYVLKNQVYQNAFSNLADSDPLQQRETAYKELTKKATQPSNTWYNWQYTYLKPMKQIYYQAAADATNKNEMQGRPYNWENYKKFFDKVQTKWQAIQQSTYELVKKEYQNIYTTSVTYPPEWANRQFLEHDCGIFSPYFLSPDNYTPEWHTAYTYIRYNPLLDRGIGNRICVQWCSEKSSDYDPVKSKCMLQDMPLYILCYGYLDFVVKQLGVKSAWTDMRVAIRSPYTEPKLIGSSDKTMYIPIGLNFMKGDMPWDMNYIPIKWWFKWYPMCTHQASVLEAIVSCSPFMVRDQEANSWDITIGYKATFLWGGSPLPPQPIDDPCQKTTHELPDPDKHPPRIQISDPQVLGPATLFHSWDLRRGFINTRSIKRVSEYADTNEYFSTGVEFKRPRLDTPHHGQLSNQEEDALSILRQLQEEQEESSTSEEEQAPQKEAQQKEKLLQQLRVQRQHQRVLRQGIKQLMGDVLRLRKGVHWNPSL

SEQ ID NO: 793 - DNA, 3395 bp, Alphatorquevirus sp.
cgggtgccgaaggtgagtttacacaccgaagtcaaggggcaattcgggcacgggactggccgggctatgggcaaggctcttaaaaaattcccccgctgtgttctccggcaggacacaaagtcatgccgtggagaccgccggttcataacgttccaggcagagaaaaccaatggtttgcatcgatttttcacggtcatgcttctttctgcgggtgcggtgaccctgttgggcatcttaacggcattgctcctcgctttcctaacgccggtccaccgagaccacctccagggctagaccagctgaatcccgagggcccggcgggtcccggaggtccccccgccatcttgccagctctgccggccccggcagaccctgatccggcaccacggcgtggtggtggggcagatggaggcgccgccgctggggccgccgccgccgcagaccataccgggtacgaagaaggagacctagaagatcttttcgccgccgcggccgaggacgatatgtgagtaggcggaggcgccgccgctactacaggcgcagactaagacggggcagacgcagagggcgacgaaagagacacagacagactctagtagtgaggcagtggcaacctgacgttgttaaaaagtgtaagataacaggatggatgcccctcataatctgtggctctggcagcacacagatgaactttataactcacatggacgacaccccccctatggggtacacgtacgggggcaactttgtaaatatgacttttactctagaggccatctatgaacaattcctgtaccacagaaacaggtggtccagatctaaccatgacttagaccttgccaggtacctagggatcactctaaaagcctacagacacaccacagtagactacatactcagctacaacagaacaggccccttcaacataagtgaaatgacctacatgagcacacaccctgcactcatgctactgcaaaagcacagaatagtagtgcccagcttaagaacaaagccaaggggcaaaagagccataaaaatcagaataagacccccaaaactaatgctaaccaagtggtacttcaccaaagacatctgctccatgggcctcttccagttaatggcaacaggggcagaactcacaaacccctggctcagagacaccacaaaaagcccagtaataggcttcagagtcctaaaaaacagcatatacaccaatctatctaacctaaaagagacaagcatatcaggagaaagaaaatcaatactaaacaaactacacccatcatctctaacaggctctggaaacacagccaaagggtgggaatactcctacactaaactaatggcacctatatactactcatcagtcagaaacagcacatacaactggcaaaactaccaaactaactatgcaaccacagcagcaaaatttaaggaaaagcaaacacaaagtctaactttaattaaatcagaatacctgtaccactacccaaacaatgtcacacaagtagacttcatagccgaccccactcttacacatgactggggtatatacagcccatactggctaactccaacaagaatcagcctagactgggacacaccatggacatatgtcagatacaacccactgtcagacaagggcttaggcaacagaatatatgcacagtggtgctcagaaaaaaccagtaaattagacatcacaaaaagcaagtgcatactaaaagactttccactgtgggccatggcctatggctactgtgactgggtagtaaagtgcacaggagtatccagtgcatggacagacatgagaatagcaatcatatgtccatacacagaaccggcacttgtagggtcaacagcagatgtaggcttcattccagtaagtgacaccttttgcaacggagatatgccgtttcttgcaccatacatacctattacatggtggatcaagtggtaccccatgattacacaccaaaaggaagttcttgaggcaatagttaactgtggaccgtttgtacctcgagaccagagctccccagcttgggaaataactctgggttacaaaatggattggaaatggggtggctctcccctgccttcacaggcaatcgacgacccctgccagaagtccacccacgagctacccgaccccgatagacaccctcgcatgttacaagtctctgacccgacaaagctcggaccgaagacagtttttcacaaatgggactggagacgtgggatgcttagcaaaagaagtattaaaagagtccaagaagactcaacagatgatgaatatgttgcaggacctctaccaagaaaaagaaacaagttcgatactcgagtccaaggccctccaaccccagaaaaagaaagttacagtttactccaagccctccaagagtcggggcaagagagcagctcagaggaccaagaacaagcaccccaagaaaaagaggaccagaaggaagcgctcatggagcagctccagctccagaaacaccaccagcgagtcctcaagcgaggcctcaaactcctcctcggagacgtgctccgactccggagaggagtccactgggaccccctcctgtcctaatccaaggtcccagtatcccagacctgcttttccctaacacacaaaaaaaaaagaaattttccaactacgactgggtgtgcgagtacgagctggccagatggatggatcgtcctttgcggcactacccatcagacccccctcactacccctggctaccaaaaaagcctgctacccagcctacatgtaaagtaagtttcaaattaaagcttgatgcctaaaattcaaggccgtgggtgtttcacttcatcggtgttaacctctataagtcactaagcactccgagcgaagcgaggagtgcgacccccctgcccggtagcaacttcctcggggtccggcgctacgccttcggctgcgccggacgcctcggaccccccctcgacccgaatcgctcgcgcgattcggacctgcggcctcgggggggtcgggagctttattaaacagactccgagatgccattggacactgaggggatgaacagcaacgaaagtgagtggggccagacttcgccataaggcctttatcttctcgcatgcgcgggtccccccccgcgggggggctccgcccccccggcccccccccccgtgctatgtccaccgcgcatgcgcggccacgcccccgccgccattttctacagcccgccaatttctattcaaacagaccaatcagaaccttctacgtgcacttcctggggcgtgtctacgaggtctatataagcaacagcggtgacgaatggtagagttttttctcgcccgtccgcggcgagagcgcgagcgaagcgagcgatcgagcgtcccgtggg

SEQ ID NO: 794 - protein, 648 aa, Alphatorquevirus sp.; identical to SEQ ID NO: 345

SEQ ID NO: 795 - DNA, 3389 bp, Alphatorquevirus sp.
acttccttcctcttttttgaacacaccgcagtcaaggggcaattcgggctcgggactggccgggccatgggcaagactcttaaaaagctatgtttctcggtaaaatctacaggaagaaaaggaaactgcttctgcagactgtgcgtgctccacaggcgccatcttccatgagccgctgctggtgtcctcctcggggtgatgtctccacccgcgagtcccggtggtacgaggcggttcgaggaagccacgatgctttttgtggctgtggtgatcctattcttcatttttctcgtctggttgcacgttctaaccatcagggacctccgacgccccccacggacgaccgtgcgccgcagaataccccagtgagacgcctactgcctctccccagctaccccggcgagggtcccgctcctagatggcctggtggggatggaggcgccgctggtggcgaccgaagagaaggtggagatggcggcgcgcgcgccgccgaagacgagtaccagcccgaagacctagacgagcttttcggcgctatcgaacaagaacagtaaggaggaggcgaagggggaggcggaggggctaccggcgccgttacagactgagacgctatgccagacgcaggttccgacgcaaaaagatagtcctgactcagtggaacccccagactgtcagaaaatgtataataaggggcatgatgccagtactttgggccggcatgggcacggggggcagaaactacgccgtcaggtcagatgactatgtggttaacaaggggttcgggggcaccttcgccacagagaccttctccctgaaagtcctctatgaccagtttcagaggggcttcaacaggtggtcccacactaacgaggacctagacctggcccgctacaggggctgcaggtggactttttacagacacaaagacacagactttatagtgtactttacaaacaatcctcccatgaaaaccaaccagttctcggcccctctgacgacccccggcatgctcatgcgcagcaaatttaaaatcctgatccccagcttccagaccaggcccaagggtcgcaaaacagtgacagttaggatcaggccccccaaactatttcaagacaagtggtacacccagcaggacctatgttcagttcctcttgtccaactgaacgtgaccgcagctgatttcacacatccgttcggctcaccactaactgaaactccttgcgtagagttccaggtgctgggtgacttgtacaatacatgtctcaatatcgaccttcctgaatttgataaagacggtgaaccacaaaactatagtaaatctaacaaagatgacttaaaaaagttataccaagaactcttcactaaaaagatatctggccactactggcaaacatttataaccaacagtatggtgagagcccacatagacgcagacacggcaaaaaaggctcaatctactggaaccaaagcaacgtataacactgagccattccccacagtgccaactaaacaagacttcaataactggaaaaaacagttcactgacacaagagacagcctctttctcttcgccacttaccaccctgacaaaattaaagaaaccatcaaaaaaatgagagacaacaactttgctctagagacaggccccaatgatctatatggagacagcacagctcaatatgcaggcaacactcacatgctagagtactacctgggcttttacagccccatattcctgtcagatggcaggtccaacgtagaatttttcactgcctacaaagacatagtgtataaccccctgttagacaaggccgagggcaacatggtctggttccaatatcacacaaaaccagacaacaaattcagaaaaccagaatgtcactgggagatcaaagacatgcccctgtgggccctcctcaacggctactcagactacctagagactcaaatccagtggggcgacctcagcaaagaaggcaaagtccttatcagatgcccttacactaagcccccattagtagacaaaaaagatgacacagcaggcttcgtagtctataacagaaactttggcagaggcaagtggatagacggagggggctacatccccctgcacgagagggcaaagtggtatgtcatgctaagataccagacggacgtgttccatgacatagtgacctgtggaccctggcaatatagagacgataataagaacgcccagctagtggccaaataccgcttcagcttcatgtggggaggtaacactgtgcactctcaggtcatcaggaacccgtgcaaagacaaccaagtttccggaccccgtcgacagcctagagacgtacaagtcgttgacccgcagctcgtcacgccgccgtgggtcctccacagcttcgaccagagaagaggcctctttactgagacagctctcagacgtctgctcaagcaaccactacctggcgagtatgctgttacaaccctcaggacacccctcctctttctaccctcagagttccaacgagaagacggcgctgcagaaagcgtctcaggttcaccggccaaaagaccccgtctctggccagaagagagccagacggagacgatctcctcggaggaagacccggcggagacgacgagggagctcctccagcgaaagctccgagagcagcgagcactccagttccagctccagcagttcgcggtccaactcgccaagacccaggcgaatctccacgtaaaccccctgttatccttcccgcagtaaacaaagtgtacctgtttccaccagagaaacccattccaatacaggggtaccacggatggaacacagagtttgaggcctgcgatgcctttgacaggcccccgagaaagttcctcacagacacacctacctacccctggctccccgtccccaatcctgaaataaaagtgagctttaagctcggtttcagataaacaaggccgtgggagtttcactcgtcggtgtctacctcttaaggtcactaagcactccgagcgtcagcgaggagtgcgaaagtgagtggggccagacttcgccatagggcctttatcttcttgccattggtccgtgtagggggtcgccgtaggcttcgggctcggttttaggccttccggactaccaaaatggcggattcagtgacgtcacggccgccattttaagtaggtgccgtccaggactgctgttccgggtcacagggcatcctcggcggaacctgcacaaaatggcggacaaaaacatccgggtcaaaggtcgcagctacgtcataagtcacgtgcagggatcctgctgcgtcacatgcggaagtaggccccgacacgtgactcgtcacgtgactgctacgtcacggcggccattttgtatcacaaaatggcgg

SEQ ID NO: 796 - protein, 779 aa, Alphatorquevirus sp.
MAWWGWRRRWWRPKRRWRWRRARRRRRVPARRPRRAFRRYRTRTVRRRRRGRRRGYRRRYRLRRYARRRFRRKKIVLTQWNPQTVRKCIIRGMMPVLWAGMGTGGRNYAVRSDDYVVNKGFGGTFATETFSLKVLYDQFQRGFNRWSHTNEDLDLARYRGCRWTFYRHKDTDFIVYFTNNPPMKTNQFSAPLTTPGMLMRSKFKILIPSFQTRPKGRKTVTVRIRPPKLFQDKWYTQQDLCSVPLVQLNVTAADFTHPFGSPLTETPCVEFQVLGDLYNTCLNIDLPEFDKDGEPQNYSKSNKDDLKKLYQELFTKKISGHYWQTFITNSMVRAHIDADTAKKAQSTGTKATYNTEPFPTVPTKQDFNNWKKQFTDTRDSLFLFATYHPDKIKETIKKMRDNNFALETGPNDLYGDSTAQYAGNTHMLEYYLGFYSPIFLSDGRSNVEFFTAYKDIVYNPLLDKAEGNMVWFQYHTKPDNKFRKPECHWEIKDMPLWALLNGYSDYLETQIQWGDLSKEGKVLIRCPYTKPPLVDKKDDTAGFVVYNRNFGRGKWIDGGGYIPLHERAKWYVMLRYQTDVFHDIVTCGPWQYRDDNKNAQLVAKYRFSFMWGGNTVHSQVIRNPCKDNQVSGPRRQPRDVQVVDPQLVTPPWVLHSFDQRRGLFTETALRRLLKQPLPGEYAVTTLRTPLLFLPSEFQREDGAAESVSGSPAKRPRLWPEESQTETISSEEDPAETTRELLQRKLREQRALQFQLQQFAVQLAKTQANLHVNPLLSFPQ

SEQ ID NO: 797 - protein, 154 aa, Alphatorquevirus sp.
MFLGKIYRKKRKLLLQTVRAPQAPSSMSRCWCPPRGDVSTRESRWYEAVRGSHDAFCGCGDPILHFSRLVARSNHQGPPTPPTDDRAPQNTPVRRLLPLPSYPGEGPAPRWPGGDGGAAGGDRREGGDGGARAAEDEYQPEDLDELFGAIEQEQ

SEQ ID NO: 798 - protein, 126 aa, Alphatorquevirus sp.
LARREPDGDDLLGGRPGGDDEGAPPAKAPRAASTPVPAPAVRGPTRQDPGESPRKPPVILPAVNKVYLFPPEKPIPIQGYHGWNTEFEACDAFDRPPRKFLTDTPTYPWLPVPNPEIKVSFKLGFR

SEQ ID NO: 799 - DNA, 3388 bp, Alphatorquevirus sp.
cgggagccggaggtgagtttacacaccgcagtctaggggcaattcgggcacgggtctggccgggctatgggcaagattcttaaaaagttcccccgctgcgttctggcccaggacaccaaaacatgccgtggagaccgccggcgcacgacgtcccgggccgcgagaaccagttctttgcaggatgttttcacttgcatgctgctttttgcgggtgcggtgaccttgtcggccatcttactagcattgctgctcgctttcctgctgccggaccccccgctccgccgggtctcagaccccccagaccccctgccccggccggtccgggcggtccccccggctaccttcccgctctcccggctccggcaccggagccgcctaatccagcaccacgccgtggtggtggggaagatggcgccgccgcgggtggcgccgccgatggggcagaagacgaggccgccgcctacggcgaggaagaactagaagagcttttccgcgccgccgccgaggacgatatgtaagtaggaaatggcgccggccttacaggcgcagacggaggaaggggcgacggagacgcaaacgcagacggactcacaaacccactctagtcctcagacagtggcaaccggacgttgttaggacctgctacataacaggctggatgcccctcttaatctgtggctctggaaacacccagtttaactttatcatgcacatggacgatataacccccaggggagcctcctacgggggcaacctcactaacatgacttttaccctggagggtctctttgaacagtttgagtaccacagaaacaggtggtccagaagcaaccacgacctagacatggccagataccttttcaccacaataaaactctacagacatgaaactgtagactacatagtagcctacagcaggacagggcctttccaaataagccacctcactcacctcagcactcacccactactcatgcttctctcaaaacaccgcatagtagtacccagtctcagaaccaagcccaggggcagaaagtacaaaaaaataagaataaaacctccaaaacttatgcttaacaaatggtatttcaccaaggacatatgtgacctaggtctctttcagatatgggccacgggagcagaactaagaaacccctggctcagatcaggcaccaaatccccctgcgtgggctttgctgtactaaacaactctatctacacagacctcagtaacttgccagatcacaacgcacaaagaacagcaatacaattaaaactacacccatcttcactaaatcctgcagaaaacaaaggcctatggcagtacacatacaccaaactaatggctcccatttactacaaagctgttcctaacagcacatacaattgggaaaattacagcaaccaagaacactactcaaaaacatatcagaaatggtcagaaatgaaaaatttaagactacgacaaattcaaaacgaattctcagctgtatacccacagctacccacacaaaggcccacagactccacacttctacaagacttcggcatatacagcccatactacctgacacccaccagaataagtctagactggcacacagcctacacctatgtcaggtacaacccactcacagacaaaggtataggcaacagagtatttctgcagtggtgctcagaaagcagctgcaagtggtccagcacaaaaagcaaggccacaatagtagacatgccactgtttattgccctgtatggctacatagactgggcaataaaagccacaggagtctccagcctagtaaaggacgccagactcatgattagatgcccctacacagagccccagcttgtgggggcaacagaagacgtcggcttctgcatactcagccagaccttcatgaacggagacatgcccgttcttgcaccatatatcccaatttcctggttcgttaagtggtaccccatgttggcacatcaaaaggaagccatagaggacattgtgggcagcggaccgtttatggttagggatcaggaagccagcagttgggacataaccatggggtacagagcctgttttaaatggggcgggtcgcctctgcccacacaggcgatcgacgacccctgccagaagcccacctatccactacccgaccccgatagacaccctcgcctactacaagtctcagacccgagcaagctcggcccaaaaacagtcttccacagctgggacatgcgacggggacaatttagcaaaagaagtattgaaagaatgtcagaatacacagagaatgatgaactttttgaaacaggtctgccacgaaaaaagaaaaagttcgacacgccaatcggaggactccaaggcgaggaaagaagaggcttcactttactccaagccctccaagacagccaggaagaaacggggtcagaagaccaagaacaagcaccccaaacaaaagagacggagacgcaacaactcctccaccagctccagctccagaaacaccaccagcgagtcctcagaaagggactccgagagctgttcggggacgtcctccgactccggaggggagtccacttcgaccccctccttacataggccctccaccatatatcccagatctacttttcccttgtactaataaaaaaaaaaaattctccaccttcgactgggaaacggaggctcaactaggagccatattcaagcggcccatgcgcttctatccctcagacccccctttctacccgtggttgccccccaagcgagatatccccaaaatatgtaaggtaaacttcacaataaagcttgcagagtgacacattcgaggccctcctctgtccacttagcggtgtctacctcttaaggtcaccaagcactccgagcgccagcgaggagtgcgaccctctgccctggggcaacttcctcggggtccggcgctacgcgcttcgcgctgcgccggacgcctcggaccccccctcgacccgaatcgctcgcgcgattcggacctgcggcctcgggggggtcgggggctttactaaacagactccgagttgccattggacactggagctgtgaatcagtaacgaaagtgagtggggccagacttcgccataaggcctttacgcagcgggggaactttttaagaatcttgcccatagcccggccagacccgtgcttaatccaccgcgcatgcgcggccacgcccccgccgccattttgtgcagcccgccaatttctctttcaaacagaccaatccagtactacttcgtgcacttcctggggcgtgtcctgcccctctatataagcagaaccagtgacgaatggtagagtttttcctggcccgtccgcggcgagagcgcgagcgaagcgagcgatcgagcgacccgtggg

SEQ ID NO: 800 - protein, 645 aa, Alphatorquevirus sp.
MPLLICGSGNTQFNFIMHMDDITPRGASYGGNLTNMTFTLEGLFEQFEYHRNRWSRSNHDLDMARYLFTTIKLYRHETVDYIVAYSRTGPFQISHLTHLSTHPLLMLLSKHRIVVPSLRTKPRGRKYKKIRIKPPKLMLNKWYFTKDICDLGLFQIWATGAELRNPWLRSGTKSPCVGFAVLNNSIYTDLSNLPDHNAQRTAIQLKLHPSSLNPAENKGLWQYTYTKLMAPIYYKAVPNSTYNWENYSNQEHYSKTYQKWSEMKNLRLRQIQNEFSAVYPQLPTQRPTDSTLLQDFGIYSPYYLTPTRISLDWHTAYTYVRYNPLTDKGIGNRVFLQWCSESSCKWSSTKSKATIVDMPLFIALYGYIDWAIKATGVSSLVKDARLMIRCPYTEPQLVGATEDVGFCILSQTFMNGDMPVLAPYIPISWFVKWYPMLAHQKEAIEDIVGSGPFMVRDQEASSWDITMGYRACFKWGGSPLPTQAIDDPCQKPTYPLPDPDRHPRLLQVSDPSKLGPKTVFHSWDMRRGQFSKRSIERMSEYTENDELFETGLPRKKKKFDTPIGGLQGEERRGFTLLQALQDSQEETGSEDQEQAPQTKETETQQLLHQLQLQKHHQRVLRKGLRELFGDVLRLRRGVHFDPLLT

SEQ ID NO: 801 - DNA, 3383 bp, Betatorquevirus sp.
caggtaccgaaggtgagtgaaaccaccgaagttaaggggcaatatgggctgtagcagtactggcggaccgggcaagaaaattaaaaatatactttattttacagatatgagctcatttttaactccaagcatttacagcaaaaatggccttgaaaaccaatgggtaaacggaatatttaacatgcatgacttattttgtggatgtaacgacacctggaaacacctagcagcaattttatccagacaaggaaaccaactatgcctcccttcaactactaccgacgccgctacttctacagacccagacgttaccgaagacgttggcctagaacctggagatctagaccgcttattcgaagaagatttcgacgaaggagatgggtaagaagacgacgatttttaaaatataaaaagagaaaactaaaaaacattaaattaaaacaatggcaaccagacaatattagaaaatgccacataaaaggacaactatgcttactaacatgtggacaaggtagaattaacaataattttactttaactgcagaaagctttgtacctacaggagaaccgggagggggaggatggagtataatgcaactaacattaagagctttatatgacgaatatgtacattacagaaactggtggactgtaagcaactgtggactaccactaacaagatactgtggggtgactgtaaaattttacaaaagtaatgacacagactacatagtgactgcacaacacacaggaccatttgaagtaacaagagactcatacttaaacacacaaccaagcagacacatgatgaacaaaaaatcatttattgttccaaaacttaatccagacaaaaagaaaagaccatacataaaaaaaagatttaaaccaccagcattactaacaaacaaatggtacttttcacaagacttactaaacacaccactcatactatttacagtaagctcatgctcactagaccaaatgtacgcacccaatgaccaaattagcacaaatataacatttttatcattaaatacagacctttttcaaaatccattttgggaaacagataacaaccaagcatactatccaaaagttaccggcacagtaaacacaggactatacacttttggtaatggtgaagacatagacaaacaaaagaactggacaaaattaatcccactatatgacacacaacattttaaaagaccaactgatacacacggaaacaactacacaaacaatttaacagagtttgaaaatccaacaaaatggggcaacccatttgcatattcagctcacccaaataccaatgatacaataatatactatggcacaccaccaacaaacaaaacatataatgagaccccaatattactcacaataacaggattataccaagaatgtagatacaatccatttaaagacaaagccacaggaaacaaagtatacataaaaagcacaaaacaacaacaaggcagtttcacaagcttaccaacagacaatagactattaatacaagactttcccttatggctaatattttggggctggataagctggttagaaaaatcaaaaccagtacaccacttacaagaagactaccaactagtatttcaatcaccatacatttatccaccaatgaaagcatacgtacctttagataaatactttacacatcatgaaggcctagatcttacagaaacagacaaacaacactggcaccccaaattagaattccaaatggaaacactaaacaaatttgcagaaacaggcccagctgcaccaaaaataaacaaacaaaaacaaatacaaatacatgctttttatgacttctgttttaagtggggcggatgcccagcaccaatggaaacaatctgtgacccagcagaccaagaaaaattccctaatcccaataacatcttacaagaaattacaatcgaaaatccagaaacaccaaaagaacactacatatacagatttgacgaacgacacggactgcttacaacgacagctgcaaaaagacttaaaaaagacagtgactttacaaaatattttacagaatatggaacaaaagacccaatactgcaaatcttcccaccgcaagaacaaacacaagagaaagagaccaacaaaaaaacatcggaagaactactccagcagctccagctcctgcgagaccaccaacacaacctcagagagcgaatcaacagactaacaaaaagacaaaaattattccctatgatatagacatgtttaatgaaagaagaattaaaaaccgtagatttaccccaaaagaatttgaagatgaattaatagtatcccgcatatttcgcagacgccctagaacatatatatttgacccccctgactatgaattatacaaaatacctatttttgaacctgttgtaaactttgaaataaactttaaagactaggccagcagtaattcacttgttggtgtccatttatttaagttataacctatacaaacatccaccgcctccctaacacgcaggcgcacaagggggctccgcccccttacacccccaagggggctccgcccccttacaccccaatctcctaaacaaatactcttgcttacagactcaaaacaaaacccaaaaccactccaaatcaaggaaaagaaagaggaatcagaaaacgaagaggaaacgcagctactcctccagctccaccacatccgacaccagcgaaagcagctcgaactccttctccagtcaaaacagggactaataaatataccataaaaaattgtaaaattaaagtaaaactatttccatctcctacaaaaaaccgtagaatgactccaaaagaaagagagatggaaaaagaggtggcagcaatatttaaaagaccaccaagagactttatatttgatttccctacttatccatatgtacctcctgctccccttgccaactttgacctcaatttcaaagaataaaggccaacatacttcacttgatggtgtctgtttattaaagtttaacttaaataagccaactccgcctccctaatatgttggcgccataaagggggctccgcccccttacacccccaagggggctccgcccccttacacccccaagggggctccgccccctaacaccccctaattaatattcaacaggaaaaccacctaattagaattgccgaccacaaaccgtcaaacgttgcctacacttcccttttttatactaaacttcccttttcgcagaccacacctacctaattcattaataatcagacgctattcctgggaggagctacaccagtatataactaactaccgtgacgaatggctgagtttaccccgccagacggagacgagacaggacactgactcggctgctacaggg

SEQ ID NO: 802 - protein, 678 aa, Betatorquevirus sp.
LETPSSNFIQTRKPTMPPFNYYRRRYFYRPRRYRRRWPRTWRSRPLIRRRFRRRRWVRRRRFLKYKKRKLKNIKLKQWQPDNIRKCHIKGQLCLLTCGQGRINNNFTLTAESFVPTGEPGGGGWSIMQLTLRALYDEYVHYRNWWTVSNCGLPLTRYCGVTVKFYKSNDTDYIVTAQHTGPFEVTRDSYLNTQPSRHMMNKKSFIVPKLNPDKKKRPYIKKRFKPPALLTNKWYFSQDLLNTPLILFTVSSCSLDQMYAPNDQISTNITFLSLNTDLFQNPFWETDNNQAYYPKVTGTVNTGLYTFGNGEDIDKQKNWTKLIPLYDTQHFKRPTDTHGNNYTNNLTEFENPTKWGNPFAYSAHPNTNDTIIYYGTPPTNKTYNETPILLTITGLYQECRYNPFKDKATGNKVYIKSTKQQQGSFTSLPTDNRLLIQDFPLWLIFWGWISWLEKSKPVHHLQEDYQLVFQSPYIYPPMKAYVPLDKYFTHHEGLDLTETDKQHWHPKLEFQMETLNKFAETGPAAPKINKQKQIQIHAFYDFCFKWGGCPAPMETICDPADQEKFPNPNNILQEITIENPETPKEHYIYRFDERHGLLTTTAAKRLKKDSDFTKYFTEYGTKDPILQIFPPQEQTQEKETNKKTSEELLQQLQLLRDHQHNLRERINRLTKRQKLFPMI

SEQ ID NO: 803 - protein, 113 aa, Betatorquevirus sp.
MGCSSTGGPGKKIKNILYFTDMSSFLTPSIYSKNGLENQWVNGIFNMHDLFCGCNDTWKHLAAILSRQGNQLCLPSTTTDAATSTDPDVTEDVGLEPGDLDRLFEEDFDEGDG

SEQ ID NO: 804 - DNA, 3377 bp, Betatorquevirus sp.
cgggtgccgaaggtgagtgaaaccaccgagtcaaggggcttatcgggctgaatcagtcttggcggaacgggctagtaacttaaatattttattacagaaatgacaactcgatttagacctacaaaatctacattaagacaatcaaaactaaaatggatgaaccttcttcaccactgccatgatgctttctgcgactgcgaaaacggaataacccacactattctacacatttttaaacaagaaaacaaccacaactttacacctcctgaaaaagattttataaaatcatgcctttctggagaaggtactacaattatggctggagaccacgaagaaggctttaccgaaggagatttggaagaacttttcaaagaagacgttggagaagacgccacagacgccgctgggtaagaaaaagaaaattaaaactattaactttaaaacaatggcaaccacaatacataaaaaaactaactgtaactggactatatcccatgataatgggaacaagagaaagagttgccaacaacttaaactgttatttagaaagtaaagcgcctcattttgtaccgggagggggatgcttttctatttgtaactttagtttaatgactttgtaccaagaacacctagaaataagaaactggtggaccacaagtaatgataactatccactaataagatatttaggatgtacaatgtacttatacagagaagaaaacttagactacttattttactacaacagacaaccaccaatgaatgcatcactcacaacatatcaaagcacacaaccaacagctatgctactaaacaaacatacaataaaagtacaatgtaaaaaaacaagcaaaagtagaaaaccatataaaagaataaacataaaaccaccaacacaattacaaaacaaatggtacttcagttatgatattgcaaacaccccactattgcaaaccatgaccacagcaacatcgtttgaccgcatgtttcttaactcttccagtatatccaacacaataggaattacaacattagacactaacactttcctaaaccaccaatttcaacgaacaacatctccttactcaccaagaccacatacaacactttttaaaacaaaaaacggtgcacaacaaattaccgaaatacaaataggagaattaataatattaggagaagtagaagacttaacagacggaacacaattaaaatcagttccatcaaccatgaacccaccaaatattaagtcccctacagattttcagaaaaaattttatacagcacgaatgcaacatcaatattggggaaatgtatttaaatcaagtactttttatggagaagaaagaatgatagaatctaacaaatctatagatgaccttatacaacaatacaccgaagcaacccaaaaactacaaacaggattcacatttaaaaccacaaaatgggcagaactaagatacaatccatttgcagacaagggaaaaggaaacatggcatatttactcaaaatagacagtggtttacatgcaacagaatggggacccccaacagacaaagatgtaatagcttcagacctaccactaacaacactattatggggatacttagactatcaaaggagatgcaaagaatacagagacatagacacaaaatgtattttagtcctacaatgcccatatgttcaaccaaataattttaaatttatagtaccattagaccccaacttcttagaaggaacaagcccatacagaccacaatttgagataacaccaagtgacagacaatactggcatccaaaagtatcaatgcaagtacaaactgtaaacaatatatgtttatgtgggccgggaactgtaaaattgccacctctgatatcatgtgaagctcatgtaagatataaatttcgttttaagcttggaggacaacctgcaccaatgtccatccttactaaacccgacgaacagccaaagtaccccatacccaataatctcctccaaacaccttcgttacagagtccaacaatgccgttcactcaattactgtggaactttgacgaaaggagacacgaaatcacaaaaaaagctacaaaaagaattacagaataccaaccaactgaaacaactcttttatcaattacagacccaggcagcatatgtccaacattcaaagagacagaaagcccacaagagacaacatcctcggaagaagaagaaacaccgatcgagacacaactcctcctccagcgaagaaaacaacgcaagctcagacagcagatcaagcagctcctcaaccgactaacacatttacaataactaactgtgtttttaaagtaaaattatttccagatgcaataaaacctaatagacgtatgaccgcaaaagaatatgcagaagaaatagaggatgccaaaatttggcacagagtacctagagattatatttttgatcaccccacatatccatgggttccccaactttctaaatacactgtaaactttgacttaaacgcgccgcaataaaattcaaggcctgcaaactttcactctcggtgtccatttattaaagttaaaacttatataaacatccaccaaccaactaaaacaactcttttatcaattacagacccagacagcatatgtccaacattcaaaaaaacaaaaagcccacaaaaaacaacatcctcaaaaaaaaaaaaacaccaatcaaaacacaactcctcctccaacaaaaaaaacaacgcaaactcaaacaacaaatcaaacaactcctcaaccaactaacacatttacaataactaactgtgtttttaaaataaaattatttccaaatacaataaaacctaatagacatatgaccacaaaaaaatatacaaaaaaaataaaaaataccaaaatttgacacaaaatacctaaaaattatatttttaatcaccccacatatccatgagttccccaactttctaaatacactgtaaactttaacttaaacgcgccacaataaaattcaaggcctacaaactttcactctcggtgtccatttattaaagttaaaacttatataaacatccaccacactccctaatacacaaacacagaaggggggctccgcccccttaaacccccagggggggggcagagccccccccctataaccccccttataaatattcatacaaaaaaccacaaaatttaaattaccaaccacaaacagatatgcaaattaacttccctaatatacactttacttccctaaaaattaattagtaatcaccatcacaatgggaggagcaataacaatataaaactaactacacttccgaatggctgagtttatgccgccagacggagcgcggatcacagactcagcgctgattcaggg

SEQ ID NO: 805 - protein, 674 aa, Betatorquevirus sp.
MPFWRRYYNYGWRPRRRLYRRRFGRTFQRRRWRRRHRRRWVRKRKLKLLTLKQWQPQYIKKLTVTGLYPMIMGTRERVANNLNCYLESKAPHFVPGGGCFSICNFSLMTLYQEHLEIRNWWTTSNDNYPLIRYLGCTMYLYREENLDYLFYYNRQPPMNASLTTYQSTQPTAMLLNKHTIKVQCKKTSKSRKPYKRINIKPPTQLQNKWYFSYDIANTPLLQTMTTATSFDRMFLNSSSISNTIGITTLDTNTFLNHQFQRTTSPYSPRPHTTLFKTKNGAQQITEIQIGELIILGEVEDLTDGTQLKSVPSTMNPPNIKSPTDFQKKFYTARMQHQYWGNVFKSSTFYGEERMIESNKSIDDLIQQYTEATQKLQTGFTFKTTKWAELRYNPFADKGKGNMAYLLKIDSGLHATEWGPPTDKDVIASDLPLTTLLWGYLDYQRRCKEYRDIDTKCILVLQCPYVQPNNFKFIVPLDPNFLEGTSPYRPQFEITPSDRQYWHPKVSMQVQTVNNICLCGPGTVKLPPLISCEAHVRYKFRFKLGGQPAPMSILTKPDEQPKYPIPNNLLQTPSLQSPTMPFTQLLWNFDERRHEITKKATKRITEYQPTETTLLSITDPGSICPTFKETESPQETTSSEEEETPIETQLLLQRRKQRKLRQQIKQLLNRLTHLQ

SEQ ID NO: 806 - protein, 103 aa, Betatorquevirus sp.
MTTRFRPTKSTLRQSKLKWMNLLHHCHDAFCDCENGITHTILHIFKQENNHNFTPPEKDFIKSCLSGEGTTIMAGDHEEGFTEGDLEELFKEDVGEDATDAAG

SEQ ID NO: 807 - protein, 121 aa, Betatorquevirus sp.
MSNIQRDRKPTRDNILGRRRNTDRDTTPPPAKKTTQAQTADQAAPQPTNTFTITNCVFKVKLFPDAIKPNRRMTAKEYAEEIEDAKIWHRVPRDYIFDHPTYPWVPQLSKYTVNFDLNAPQ

SEQ ID NO: 808 - DNA, 3376 bp, Alphatorquevirus sp.
gggggggggcgcgcttcgcgcgccgcccactagaaggggcaattcgggctcgggactggccgggctatgggcaaggctcttaaaaaattcccccgctctgttctccgccaggacattaaaacatgtcgtggagaccgccgagccaaaatttactcgaaagagaagacgcttggtactcagcttttcttagctcgcatactacattttgcggttgcactgaccctctgctgcatattactctcattgctggtcgccttgctaaccccatacccgttacccggcaaccggaaacccctcctaacggcctcagggggctgccggcactgccagcgccccctgaaccaccagcaccgccaccacggcctggggatggtaccggagaagaagatggcgcccgtggagaaggcgaaggtgggcgatacgcagacgaagacctagaagaactgttcgccgccgcggcagaagacgatatgtgagtagatggccgcgccgccgatacaggcgcagacgcagacgaacaagacgtaggaggggacgcaaaaagagacacagacagactcttatactaagacagtggcaaccagatgttataaaaaagtgttttatcactggctggatgcccctcattatatgtggcactggaaacactcaatttaacttcataacccatgaagacgatgtgccacccaaaggagcctcctatggaggcaacctcactaacctcaccttcaccctagaaggactgtatgacgaacacctgctccacagaaacaggtggtccagatcaaactttgatctagacctcagcagatacctgtacactgtcataaagctatacagacacgagtctgtagactacatagtcacctacaacagaacaggaccctttgagataagcccactaagctacatgaacacacaccccatgctaatgctcctaaacaaacaccacatagtggtgcccagcctaaaaacaaagcccaaaggcagaaggtccattaaaataaaaataaagccacctaaactaatgctaaacaagtggtactttgcaagagacatgtgtagaataggcctctttcaactatatgccacaggggctaacctaacaaacccctggctcagatcaggcacaaacagcccagtagtgggattctatgtacttaaaaactccatataccaagatgcctttgacaacttagcagaccaaacacacacaacagccagaaaaaatgtgtttgacaaaaaactatacccaattacaaataacccaacagacatatggcaactaacatacacctcactaatgaaaaacatatactttaaagccaaacaagaaacagctaatacaaacatgcccaatcaatataactttaaaacttacaaagaacaatatggcaaagtacatacaaaatggatgaccatagcagaagatggctacaagttagttttagaagaatacaaaaatatatacaccagcacagccacataccccccacagtgggacaatagaaactacttaagccatgactatggcatctacagtccttactttttaacaccacaaagatacagtccacagtggcacacagcatggacatatgtcagatacaacccactcacagacaaaggcataggcaacagaatctttgttcagtggtgctcagaaaaaaacagctcatatgacagcacaaaaagcaaatgcatgctacaagacatgcccctcttcatgctaacctatggctacctagactatgtactaaaatgcacaggctctaaatcagcctggacagacatgagagtctgtatcagaagtccatacacagaaccacagctcacaggcaacacagatgatattagttttgttataatatcagagaccttcatgaacggagacatgccatacttagctccacacatacccgttagtttgtggtttaagtggtaccccatgatattacaccagaaggcagctttagaaaccatagtttcctgtggaccgtttatgcccagagaccaggaagccaactcttgggacataaccgcaggttacaaagcagtttttaagtggggtgggtcccctctgcctccacagcctatcgacgacccctaccaaaaacccacccacgaaatacccgaccccgataagcaccctccaagactacaaattgcagacccgaaaatcctcggaccgtcgacagtcttccacacatgggacatcagacgtggcctctttagcacagcaagtcttaagagagtgtcagaataccaaccgcctgatgaccttttttcaacaggcgtcgcatccaaaagaccccgattcgacacaccagtccaagggcagctcgaaagccaagaagaagaaagctatcgtttactcagagctctccaaaaagagcaagagacaagcagctcggaagaagaacagccaccgaaccaagagatccaagaaaaactactcctccagctccagcagcagcgacagcaacagcgactcctcgcaaagggaatcaagcacatcctcggagatgtcctccgactccgaaaaggagtccactgggacccggtccttacatagcacctccagaacctatcccagaccttttgttccccagtactaaaaaaaaaaagaagttttcgcccttagactgggagaacgaggctcaaatagcacggtggttagacaggcctatgaggctgtatcctggggacacccccttctacccgtggctaccccgaaagccacctacccagcctacatgtagagtaagcttcaaaataaagctgaatgattaacttgcaaggccgtgggagtttcacttgtcggtgtctacctctaaaagtcactaagcactgcgagcgcaagcgagcagtgcgacccccctgcccggtagcaacttcctcggggtccggcgctacgccttcggctgcgccggacgcctcggaccccccctcgacccgaatcgctcgcgcgattcggacctgcggcctcgggggggtcgggggctttactaaacagactccgagtcgctcttggactctgagggggcatacagcaacgaaagtgagtggggccagacttcgccataaggcctttatcttctcgccatttgtcagtggcttccgggttcgcgtgggggccgccattttaacttcggccgccattttaggccctcgcgggcacccgtaggcgcgcattaatgacgtcacggcagccatgttggctgcgacgtcaaagtcacgtggtgagggcggcgtgtaacccggaagtcatcctcgtcacgtgacctgacgtcacggccgccattttgtgctgtccgccattttgtgacttccttccgctttttcaaaaaaaaagaggaagtgtgacgtagcggcg

SEQ ID NO: 809 - protein, 652 aa, Alphatorquevirus sp.
MPLIICGTGNTQFNFITHEDDVPPKGASYGGNLTNLTFTLEGLYDEHLLHRNRWSRSNFDLDLSRYLYTVIKLYRHESVDYIVTYNRTGPFEISPLSYMNTHPMLMLLNKHHIVVPSLKTKPKGRRSIKIKIKPPKLMLNKWYFARDMCRIGLFQLYATGANLTNPWLRSGTNSPVVGFYVLKNSIYQDAFDNLADQTHTTARKNVFDKKLYPITNNPTDIWQLTYTSLMKNIYFKAKQETANTNMPNQYNFKTYKEQYGKVHTKWMTIAEDGYKLVLEEYKNIYTSTATYPPQWDNRNYLSHDYGIYSPYFLTPQRYSPQWHTAWTYVRYNPLTDKGIGNRIFVQWCSEKNSSYDSTKSKCMLQDMPLFMLTYGYLDYVLKCTGSKSAWTDMRVCIRSPYTEPQLTGNTDDISFVIISETFMNGDMPYLAPHIPVSLWFKWYPMILHQKAALETIVSCGPFMPRDQEANSWDITAGYKAVFKWGGSPLPPQPIDDPYQKPTHEIPDPDKHPPRLQIADPKILGPSTVFHTWDIRRGLFSTASLKRVSEYQPPDDLFSTGVASKRPRFDTPVQGQLESQEEESYRLLRALQKEQETSSSEEEQPPNQEIQEKLLLQLQQQRQQQRLLAKGIKHILGDVLRLRKGVHWDPVLT

SEQ ID NO: 810 - DNA, 3376 bp, Alphatorquevirus sp.
cgggagccggaggtgagtttacacaccgcagtctaggggcaattcgggcacgggtctggccgggctatgggcaagactctgaaaaaattcccccgctgtgttcttcgccaggacatcaagtcatgccgtggcgaccgccggtgcataacgtcccgggcagggagaaccagtggtttgcgagtgttttccacgcgcatgcagctttttgcgggtgcggtgacgttgttggccatcttaatagcattgctcctcgctttcctaacgccggtcccccgagaccacctccagggctagaccagcccaacctcggagggccggaaggtcccggaggccccccgagagccctgccagctctgccggccccggcagaccctgacccggcaccacggcgtggtggtggggccgatggagacggcgccgctggggccgccgccgccggagaccatggaggctacgaagaaggagatctagaagatcttttcgccgcggccgccgaagacgatatgtgagtaggcgggggcgccgccgcacatacaggcgcagacgcagacggggcagacgcagggggcgacgaaagagacacaagcccaccattatactcagacagtggcaacctgacgtagtcagaccctgtaagatcacaggatggatgcccctcataatctgtgggtcaggaagcacccagtttaactttataacccacatggatgactttcctccaatgggagccacctacgggggcaactttacaaacgtgaccttctccttagaggccatctatgaacaatttctgtaccacagaaacagatggagcacctcaaaccacgacctcgacctagccaggtaccagggaaccaccttaaaactgtacagacacgagtacctagactacatagtcagctacaacagaacaggcccattccagatcagtgacatgacctacctcagcactcaccctgctcttatgctactccaaaaacacaggatagtagtacctagcttcctcactaaaccaaaaggccgcaggtctattaaaatcagaataaaacccccaaaactaatgctcagcaagtggtactttacaaaagacatttgcagcatgggcctctttcagctacaggccacagcatgcactctaaacaacccctggctgagagacaccaccaaaagtcctgtcataggctttagagtactaaaaaactcctactactcacacctatctaacctagcagacgaagaaaatgagaacagaaggcgagccataataacacacttacaccctaaaactctaacagggtcaccaccaaatgccaaaggatgggagcccacttatacaaaactaatgggccccacatactacaaagcagtgccaaacagtacatacaattggctaaattatcaaacaaactatgccataacctataacaaatttaatgaagataaaaacacaaaattagacttaattaacaaagaataccactaccactatcccgcatatgtaactaaagactttaaaacaaactcaacactcacacatgactatggaatatacagtccctactacctaacaccaaccagaattagcttagactggcaaacaccatggacttatgttagatacaatcccctggcagacaaaggcctaggaaacatagtgtactgccagtggtgctcagaaaaaacagcagatgtctccacaactaaaagcaaatgcataatgagagaccttccactatggtgcatattttatggctacgtagactgggtaattaaaagcacaggagttagctcagcagccacagacatgagggtcatgataattagcccctacacagaaccagcacttatagggtcaactccagaacagggctttgttccagtaagtgacaccttttgcaatggagacatgccgtttcttgcaccatatatcccaatcaagtggtgggttaactggtacccctgtattgcacaccaaaaggaagtaattgaggcaatagttaactgtggaccgtttgtcccacgagaccagacgaaaccctcttgggaaattaccctgggttacaaaatgaactggaaatggggtggctctcccctgccttcacaggcaatcgacgacccctgccagaagcccacccatgagctacccgaccccgatagacaccctcgcatgctacaagtctctgacccgacaaaactcggaccgaagacagtgttccacaaatgggactggagacgtgggatgcttagcaaaagaagtattaaaagagtccaagaagactcaagcgatgatgaatatgttgcagggcctttaccaagaaaaagaaacaagctggacaccaggacagcaggcctacaaacccccgaaaaagaaagctacactttactccaagccctccaagagtcaggggaagagagcccacaaagcagccaagaacaagcaccccaagaaaaagagggccagaaagaggcgctgctcgagcagctccagctccagaaacagcaccagcgagtcctcaaacgaggcctcaaactcctcctgggagacgtcctccgactccgccgaggagtccactgggaccccctcctgtcataattcagggtccctctatcccagacctgcttttccctaacacacaaaaaaaaaagaaattttccaacttcgactggtcatgcgagtacgagctggccaaatggatggatcgtcctttgcggcactacccatccgacctccctcactacccatggctaccaaaaaagccaaatacccctcctacatgtagagtaagtttcaaattaaagctcgatgcctaacattcaaggccgtgggtgtttcacttcatcggtgtctacctctaaaggtcactaagcactccgagcgcagcgaggagtgcgacccccctgcccggtagcaacttcctcggggtccggcgctacgcgcttcgcgctgcgccggacgcctcggacccccccctcgacccgaatcgctcgcgcgattcggacctgcggcctcgggggggtcggggactttactaaacagactccgagttgccattggactcaggagctgtgaatcagtaacgaaagtgagtggggccagacttcgccataaggcctccccccccccgcgggggggggctctgccccccggccccccccccgtgctgaatccaccgcgcatgcgcggccacacccccgccgccattttgtgcagcccgccaatttctatttgaacaggccaatcagcatctactacgtgcacttcctggggcgtgtcttcccggtctatataagcagaggcggtgacgaatggtagagttttttctggcccgtccgcggcgagagcgcgagcgaagcgagcgatcgagcgacccgtggg

SEQ ID NO: 811 - protein, 647 aa, Alphatorquevirus sp.
MPLIICGSGSTQFNFITHMDDFPPMGATYGGNFTNVTFSLEAIYEQFLYHRNRWSTSNHDLDLARYQGTTLKLYRHEYLDYIVSYNRTGPFQISDMTYLSTHPALMLLQKHRIVVPSFLTKPKGRRSIKIRIKPPKLMLSKWYFTKDICSMGLFQLQATACTLNNPWLRDTTKSPVIGFRVLKNSYYSHLSNLADEENENRRRAIITHLHPKTLTGSPPNAKGWEPTYTKLMGPTYYKAVPNSTYNWLNYQTNYAITYNKFNEDKNTKLDLINKEYHYHYPAYVTKDFKTNSTLTHDYGIYSPYYLTPTRISLDWQTPWTYVRYNPLADKGLGNIVYCQWCSEKTADVSTTKSKCIMRDLPLWCIFYGYVDWVIKSTGVSSAATDMRVMIISPYTEPALIGSTPEQGFVPVSDTFCNGDMPFLAPYIPIKWWVNWYPCIAHQKEVIEAIVNCGPFVPRDQTKPSWEITLGYKMNWKWGGSPLPSQAIDDPCQKPTHELPDPDRHPRMLQVSDPTKLGPKTVFHKWDWRRGMLSKRSIKRVQEDSSDDEYVAGPLPRKRNKLDTRTAGLQTPEKESYTLLQALQESGEESPQSSQEQAPQEKEGQKEALLEQLQLQKQHQRVLKRGLKLLLGDVLRLRRGVHWDPLLS

SEQ ID NO: 812 - DNA, 3374 bp, Alphatorquevirus sp.
cgggtgccgtaggtgagtttacacaccgaagtcaaggggcaattcgggcacgggactggccgggctatgggcaaggctcttaaaatatttccccgctctgttctccggcaggacacaaagtcatgccgtggagaccgccaattcataacgtcacaggccgcgaaaatcagtggttcgcagcaatttttcactctcatgcttcttggtgcggttgtggtgaccctgttgggcatcttaacagcattgctcctcgctttcctaacgccggtcccccgagaccacctccagggctagaccagcttaatcccgagggcccggcgggtcccggaggtccccccgccatcttgccagctctgccggccccggcagaccctgagccgccgccacggcgtggtggtggggcagatggaaacgccgccgcaggcctcgctatcgcagacgcacctggagggtacgcagaagacgacctagacgaccttttcgccgccgccgcggaggacgatatgtgagtaggcggaggcgccgccgctactacaggcgcagactgagacggggcagacgcagagggcgacgaagaaaacacagacagactctagtcctcaggcagtggcaaccagacgttgtaagacactgtaaaataacaggatggatgcccctagtaatctgtggctccgggagcacacagaacaattttataactcacatggacgactatccccccatgggatactcatacgggggcaacttcacaaacctcaccttctccttagagggcatatatgaacagtttatgtaccacagaaacaggtggtcccggtccaaccacgacctagacctcgccagatacagaggcacaactctaaagctttacagacaccaaaccttagactacatagtcagctacaatagaacaggcccctttcaaatcagtgacatgacctacctcagcacacacccggcattcatgctgctccaaaaacacagaatagtagtacccagcttactaaccaaacctaaaggcagaagatccataaaagtaagaataaagccaccaaaacttatgctaaacaagtggtactttacaaaagacatatgcagcatgggcctgtttcaactacaggccacagcatgcactttatacaatccctggctcagagacagcacaaaaagcccagtcataggctttagagtacttaaaaacagcatctacacaaacctcagtaacctaccagatcatgacggaaccagagaggccatcagaaacaaactacacccagaatccttgacaggacactctccaaatcaaaaaggctgggaatatagctacacaaaactaatggccccaatatactactcagccaacagaaacagcacatataactggctaaactaccaagataactatgtaaacacttatactaaatttaaagataaaatgcaagaaaacttaaaactaatacaaaaagaatacctataccactaccccaacaatgtcaccacagaccttgtaagcaagaacacacttacacatgactggggtatatacagcccctactggctaacacccaccagaataagcctagactgggacactccttggacatatgttagatacaacccactagcagacaaaggcataggcaatgctgtatatgcacaatggtgttcagaacaaaccagcaaactagattcaaaaaagtccaagtgtataatgagagacctgccactgtgggctatattctatggctatgtagactgggtaataaaatccacaggagtcagcagtgcagttacagacatgagaatagccatcaggagcccctacacagaaccggcacttatagggtcaactgaagatgtaggcttcattccagtaagtgacaccttttgcaacggagacatgccgtttcttgctccatacatccctgtgggctggtggatcaagtggtaccccatgattgcacaccaaaaggaagtctttgaggcaatagttaactgtggaccgtttgtgcccagagaccagaccaagcccagttgggaaattactctaggttacaaaatggactggttatggggtggctctcccctgccttcacaggcaatcgacgacccctgccagaagcccacccatgagcttcccgaccccgatagacaccctcgcatgctacaagtctcagacccgacaaagctcggaccgaagacagtgttccacaagtgggactggagacgtgggatgcttagcaaaagaagtattaaaagagtccaagaagactcaagcgatgatgaatatgttgcagggcctttaccacgaaaaagaaacaagctcgacaccaggaccgcaggtcttcaaacccccgaaaaagaaagttacactttactccaagccctccaagactcggcggaagagagcccctcgagccaagaacaagcaccccaagaagaaaaccaaaaagaggcgctcctacagcagctcgagctccaaaagcagcaccagcgagtcctcaaacgaggcctcaaactcctcctgggagacatcctccgactccgccgaggagtccactgggaccccctcctgtcctaattcagggtccttctatcccagacctgcttttccctaacacacaaaaaaaaaaactattttccaactacgactgggtgtgcgagtacgagctggccaaatggatggatcgccccttgcggcactacccatcagacccccctcactacccctggctaccaaaaaagcctgctacccctcctacatgtagagtaagtttcaaattaaagctcgatgcctaaaattcaaggccgtgggtgtttcacttcatcggtgtctacctctaaaagtcactaagcactccgagcgtaagcgaggagtgcgacccccctgcccggtagcaacttcctcggggtccggcgctacgccttcggctgcgccggaccgtcacggtcgccattttgtgtggcagccattttgtgacttccttccgcttttttaacttccttccgctttttgtaaaaaaaagaggatgtgtgacgtagcggggggggggcggcgcgcttcgcgcgccacccaccagggggcgctgcgcgcccccccccgcgcatgcgcgggtccccccctcggggggggctctgcccccccggcccccccccgggctaaatccaccgcgcatgcgcgaccacgcccccgccgccattttgtacagcccgccaatttctgttcaaacagaccaatcaggaccttctacgtacacttcctggggcgtgtctacgaggtctatataagcaacagcggtgacgaatggtagagtttttcttcgcccgtccgcggcgagagcgcgagcgaagcgagcgatcgagcgtcccgtggg

SEQ ID NO: 813 - protein, 678 aa, Alphatorquevirus sp.; identical to SEQ ID NO: 438

SEQ ID NO: 814 - DNA, 3364 bp, Alphatorquevirus sp.
ggaagtaggccccgctacgtcacttgtcacgtgaaggggcaattcgggctcgggactggccgggctatgggcaaggctcttaaaaaagcaatgtttctcggtaaactttacagaaagaagaggcgcctgttactgtacccgctgcacactacacagaaagcttgcaggcttctgactgatatgtggagaccccccacttacaatgtacaaggccaagaaaggcagtggtacgactcatgctttaggtctcacgctgctatgtgtggctgtggcgattttatcaggcatctttgtcatcttgctgataattttggacgccctccaactgtccctcggcctcccgcacccacacctccagtaaggccactgccagctctcccggcacctcccaatccctccggtagcagagcggcatggcctactggtggtggagacggagaagacgagccccgtggaggaggagacggcgctggaggactcgcagaactcgcagacgaagagctgctttccgccgccgtggacgtcgccgaagagtaagaaagaggagggggaggtggagaaggacttatagaaaatggcggaggggcaaaaagagacgcaggcacaagagacgcttaatactaactcagtggcaacccgcctttataagacgctgctatatagtgggctacctgcccctcataatctgcggagaaaacacctccgccagaaactttgccacccactcagacgaccttatatccaacggaccgtacggggggggcatgactaccaccaaatttactctcagaatactatatgacgaacacctcaggcaccttaactactggactgtcagtaacgaggacctagacctgtgtagatacctggggggcaccttctacgcgtacagacaccccactgtagactttattatacaaatacacaccagtcccccctttctagacactccactcacaggtcccagcatacacccgggcatgctgatgctcacaaaacacaaaatactaataccaagcctaaaaaccagacccagcaagaaacacaaagtaaaaattagattcagaccccctaaactatttcaagacaagtggtacccccagtcagagctttgcgacaccacactcataaccatctttgcaaccgcatgtgacctgcaatttccgttcggctcaccactaacgaacaacccttgcgtcaacttccaggtgctaggttccgtttacaaaaggcacctcagcatacttcctgacaaactgtcagcatataaaacctactatgacacaaacttatataacaatatagaactatatcaaacattccaaacaatagctcaaattaaacctagtgctcaagaaagtgacttttctcctaaatggcaaaagtgtcaaaatactaataagcttaacccgacaggcagtaaccaatcagaatgtaatgacacttggtattatggaaagacttatacaagtgacattaaaaaagcagctataaacattagaacaaaatacttaaaggctacaaggttagccctaccactactagcaacacatggagatgaactactagagtaccacacaggtatatacagttctatattcctatctgcaggcagaacatactttgaaaccacaggggcctacacagacataatttacaacccccttgtagacaaaggcataggaaacaaagtgtggctagaccccctaagtaaagaagacgcggtgctaaacagaaaacaggcaaaagtactgttagaagacatacccatatgggcagccctatttggatacacagaatttgcagctaaatacacaggagactctgccatatcagcaaactacagactgacaatacggtgcccctacacagaccccatgctagtagacacaaacaacgaagaccaaggctttgtgccctactctaagaactttggcaacgggaaaatgccaggagggtcctccaacgttccacttaccatgagaatcaagtggtaccccatattattccaccaactagaactcatggaagagctagtacagtctggaccgtttgcatacaggggcgacgaaaagatgtgtgtattagccataaaatataacttcagatggaaatggggaggtaaccctgtttctcaccagattgtgcgcaacccctgtaaaggagggtccggtgcccgtcgagagcctcgctcaatacaagcagttgacccgaaatacgtcacaccgacgctatccttccactcgtgggacttcagacggggactatttggcaaggcaagtattgagagaatgtcaagagaatcagaaactaatatctatcctacaggcccaccaagaaaaagaccaaaaagggacacggacccatacgactcacagcaagaagaaaactcaatttcaagacacctccagctccagccgtggatccactccagtcaagaagtccaaagcgaagaagaaacgcaagtcccggaaaacctacaagaacaactcctccagcagctccgagagcagcagcagctccgactccatctacagtccctcgcctcgcaagtcctcaaaatcagggcgggatacgggatacaccccctattatcttcccaagcctaaacaaagtctatatgtttgaccccccaggtcctaagcccatacagggctaccatgactgggtggaagagtacaccgcctgtaaatattggaacaggccccccagaaagtaccacacagattttcccttctacccagacgtccccaaagtcccagaccagataagggtctcctttaagcttggctttcaataaacacacctgttcactgtactaggccgtgggagtttcactcgtcggtgtctacctctaaaggtcactaagcactccgagcgccagcgaggagtgcgacccttccccctgactcaacttcttcggagccgcgcgctacgccttcggctgcgcgcggcacctcagacccccgctcgtgctgacacgctcgcgcgtgtcagaccacttcgggctcgcgggggtcgggaattttgctaaacagactccgagttgccattggacactgtagctgtgaatcagtaacgaaagtgagtggggccagacttcgccataaggcctttatcttcttgccatttgtccgtctcgggggtcgccgtaggcttcgggctcggttttaggccttccggactacaaaaaccgccattttagtgacgtcacggcggccattttaagtcagcgtcggggaggcgtgacgtgcagttcaaaggtcatcctcaccggaactggcacaaaatggccgccaacttcttccaggttaaaggtcgtcgctacgtcataggtgacgtcgctggtgtctgctgtaaacac

SEQ ID NO: 815 - protein, 731 aa, Alphatorquevirus sp.
MAYWWWRRRRRAPWRRRRRWRTRRTRRRRAAFRRRGRRRRVRKRRGRWRRTYRKWRRGKKRRRHKRRLILTQWQPAFIRRCYIVGYLPLIICGENTSARNFATHSDDLISNGPYGGGMTTTKFTLRILYDEHLRHLNYWTVSNEDLDLCRYLGGTFYAYRHPTVDFIIQIHTSPPFLDTPLTGPSIHPGMLMLTKHKILIPSLKTRPSKKHKVKIRFRPPKLFQDKWYPQSELCDTTLITIFATACDLQFPFGSPLTNNPCVNFQVLGSVYKRHLSILPDKLSAYKTYYDTNLYNNIELYQTFQTIAQIKPSAQESDFSPKWQKCQNTNKLNPTGSNQSECNDTWYYGKTYTSDIKKAAINIRTKYLKATRLALPLLATHGDELLEYHTGIYSSIFLSAGRTYFETTGAYTDIIYNPLVDKGIGNKVWLDPLSKEDAVLNRKQAKVLLEDIPIWAALFGYTEFAAKYTGDSAISANYRLTIRCPYTDPMLVDTNNEDQGFVPYSKNFGNGKMPGGSSNVPLTMRIKWYPILFHQLELMEELVQSGPFAYRGDEKMCVLAIKYNFRWKWGGNPVSHQIVRNPCKGGSGARREPRSIQAVDPKYVTPTLSFHSWDFRRGLFGKASIERMSRESETNIYPTGPPRKRPKRDTDPYDSQQEENSISRHLQLQPWIHSSQEVQSEEETQVPENLQEQLLQQLREQQQLRLHLQSLASQVLKIRAGYGIHPLLSSQA

SEQ ID NO: 816 - protein, 156 aa, Alphatorquevirus sp.
MGKALKKAMFLGKLYRKKRRLLLYPLHTTQKACRLLTDMWRPPTYNVQGQERQWYDSCFRSHAAMCGCGDFIRHLCHLADNFGRPPTVPRPPAPTPPVRPLPALPAPPNPSGSRAAWPTGGGDGEDEPRGGGDGAGGLAELADEELLSAAVDVAEE

SEQ ID NO: 817 - protein, 59 aa, Alphatorquevirus sp.
MFDPPGPKPIQGYHDWVEEYTACKYWNRPPRKYHTDFPFYPDVPKVPDQIRVSFKLGFQ

SEQ ID NO: 818 - DNA, 3360 bp, Alphatorquevirus sp.
cgggagccggaggtgagtttacacaccgcagtctaggggcaattcgggcacgggtctggccgggctatgggcaaggctcttaaaaaattaccccggtgtgttctccgccaggacaacaagtcatgccgtggcgaccgccggtgcataacatcccgggtagagaaaatcaatggtttgcaagcttctttcacgggcatgcttctttttgcggttgtggtgaccctgttgggcatcttaacggcattgctcatcgctttcctcacgccgctccaccgagaccacctccagggctagagcagccaaacctcggagggccggaaggtcccggaggtcccccggcacccctgccagctctgcctgccccggcagagcccgacccggcaccacgccgtggtggtggggccgatggaggcggcgccgctggggccgccgccgccgcagaccatggaggatacgacgaaggagatctagaagatcttttcgccgccgcggccgaagacgatatgtgagtaggcgggggcgccgccgcagattctggcgcagacgcagacggggcagacgcagggggcgacgaaagacacacaaacccactattgtactcagacagtggcaacccgacgtagtgagaccctgcaaaataacaggatggatgccccttattatctgtgggtcaggaagcacccagttcaacttcataacccacatggatgactttccccccatgggctacacctacgggggcaattttacaaatgtaaccttctcattagaggccatatatgaacaatttctttaccacagaaacagatggagctcctccaaccatgacctagaccttgccaggtaccagggaaccaccctaaaactatacagacacgaatacctagactacatagtcagctacaacagaacaggcccttttcagatcagcgacatgacctacctcagcactcaccctgctatgatgctacttcaaaaacatagaatagtagtacccagctttaaaacaaagccaagggggcgcaggtccataaaaattagaataaagcccccaaaactaatgctaaacaagtggtacttcacaaaagacatttgcagcatgggactcttccaactacaggccacagcatgcaccttaaacaacccctggctcagagacaccaccaagagccctgtcataggctttagagtccttaaaaactcctactactcagacctttctaacttagcagatgacgactctgagaacagaaggcgagcaattattaagcacctccacccagacacactaacaggctcaccaccaaatgccaaaggatgggaaatcacttacacaagactaatgggacccacatactacaaatcagtaccaaacagcacatacaattggctaaattatcaaacaaactatgctatagttcatgctacgtttacaaaagaaaaacaagcaaaattagacacaataaacaaggaataccattaccactaccccacatatgtaacaaaagactttacaacaaattcaacacttacacatgactatggcatatacagtccctactacttaacaccaaccagaataagcttagactggcaaacaccatggacatatataagatacaacccactagcagacaaaggcctaggaaacatagtatacgctcagtggtgctcagaaaaaacacccaatgtcagcacaactaaaagcaaatgcataatgaaagacctaccactatggtgcatattctatggctacatagactgggtaattaaaagcaccggagtaagctccgctgctacagacatgagaataatgataataagtccttacactgacccagcacttatagggtcaactccagaccaaggctttctgccagtaagtgacaccttttgcaatggagacatgccgtttcttgcaccatatgtgccaatcaagtggtgggttaactggtacccttgcattgcacaccaaaaggaagtgtttgaggcaattgttaactgtggaccgttcgtcccacgagaccagacgaaaccctcttgggaaattaccttaggttacaaaatgaactggaaatggggtggctctcccctgccttcacaggcaatcgacgacccctaccagaagcccacccatgagcttcccgaccccgatagacaccctcgcatgctacaagtctcagacccgacaaagctcggaccgaagacagtgttccacaagtgggactggagacgtgggatgcttagcaaaagaagtattaaaagagtccaagaagactcaagcgatgatgaatatgttgcagggcctttatcacgaaaaagaaacaagctcgacaccaggaccggaggtcttcaaacccccgaaaaagaaagttacactttactccaagccctccaagactcggcggaagagagcccctcgagccaagaacaagcaccccaagaagaaaaccaaaaagaggcgctcctacagcagctcgagctccaaaagcagcaccagcgagtcctcaaacgaggcctcaaactcctcctgggagacatcctccgactccgccgaggagtccactgggaccccctcctgtcctaattcagggtccttctatcccagacctgcttttccctaacacacaaaaaaaaaaactattttccaactacgactgggtgtgcgagtacgaactggccaaatggatggatcgccctttgcggcactacccatcagacccccctcactacccctggctaccaaaaaagcctgctacccctcctacatgtagagtaagtttcaaattaaagctcgatgcctaaaattcaaggccgtgggtgtttcacttcatcggtgtatacctctaaaagtcactaagcactccgagcgtaagcgaggagtgcgacccccctgcccggtagcaacttcctcggggtccggcgctacgccttcggctgcgccggacgcctcggaccccccctcgacccgaatcgctcgcgcgattcggacctgcggcctcggggggggtcgggggctttactaaacagactccgaggtgccattggacactgagcccaccagggggcgctacgcgccccccccccgcgcatgcgcgggtcccccccctcggggggggctccgcccccccggcccccccccgcgcttaatccaccgcgcatgcgcaaccacgcccccgccgccattttgtgcagcccgccaattttattttaaacagaccaatcagctactacttcgtgcacttcctggggcgtgtcctgccactgtatataaacagaagcggtgacgaatggtagagttttttctcgcccgtccgcggcgagagcgcgagcgaagcgagcgatcgagcgacccgtggg

SEQ ID NO: 819 - protein, 645 aa, Alphatorquevirus sp.
MPLIICGSGSTQFNFITHMDDFPPMGYTYGGNFTNVTFSLEAIYEQFLYHRNRWSSSNHDLDLARYQGTTLKLYRHEYLDYIVSYNRTGPFQISDMTYLSTHPAMMLLQKHRIVVPSFKTKPRGRRSIKIRIKPPKLMLNKWYFTKDICSMGLFQLQATACTLNNPWLRDTTKSPVIGFRVLKNSYYSDLSNLADDDSENRRRAIIKHLHPDTLTGSPPNAKGWEITYTRLMGPTYYKSVPNSTYNWLNYQTNYAIVHATFTKEKQAKLDTINKEYHYHYPTYVTKDFTTNSTLTHDYGIYSPYYLTPTRISLDWQTPWTYIRYNPLADKGLGNIVYAQWCSEKTPNVSTTKSKCIMKDLPLWCIFYGYIDWVIKSTGVSSAATDMRIMIISPYTDPALIGSTPDQGFLPVSDTFCNGDMPFLAPYVPIKWWVNWYPCIAHQKEVFEAIVNCGPFVPRDQTKPSWEITLGYKMNWKWGGSPLPSQAIDDPYQKPTHELPDPDRHPRMLQVSDPTKLGPKTVFHKWDWRRGMLSKRSIKRVQEDSSDDEYVAGPLSRKRNKLDTRTGGLQTPEKESYTLLQALQDSAEESPSSQEQAPQEENQKEALLQQLELQKQHQRVLKRGLKLLLGDILRLRRGVHWDPLLS

SEQ ID NO: 820 - DNA, 3360 bp, Alphatorquevirus sp.
cgggagccggaggtgagtttacacaccgcagtctaggggcaattcgggcacgggtctggccgggctatgggcaaggctcttaaaaaattaccccggtgtgttctccgccaggacaacaagtcatgccgtggcgaccgccggtgcataacatcccgggtagagaaaatcaatggtttgcaagcttctttcacgggcatgcttctttttgcggttgtggtgaccctgttgggcatcttaacggcattgctcatcgctttcctcacgccgctccaccgagaccacctccagggctagagcagccaaacctcggagggccggaaggtcccggaggtcccccggcacccctgccagctctgcctgccccggcagagcccgacccggcaccacgccgtggtggtggggccgatggaggcggcgccgctggggccgccgccgccgcagaccatggaggatacgacgaaggagatctagaagatcttttcgccgccgcggccgaagacgatatgtgagtaggcgggggcgccgccgcagattctggcgcagacgcagacggggcagacgcagggggcgacgaaagacacacaaacccactattgtactcagacagtggcaacccgacgtagtgagaccctgcaaaataacaggatggatgccccttattatctgtgggtcaggaagcacccagttcaacttcataacccacatggatgactttccccccatgggctacacctacgggggcaattttacaaatgtaaccttctcattagaggccatatatgaacaatttctttaccacagaaacagatggagctcctccaaccatgacctagaccttgccaggtaccagggaaccaccctaaaactatacagacacgaatacctagactacatagtcagctacaacagaacaggcccttttcagatcagcgacatgacctacctcagcactcaccctgctatgatgctacttcaaaaacatagaatagtagtacccagctttaaaacaaagccaagggggcgcaggtccataaaaattagaataaagcccccaaaactaatgctaaacaagtggtacttcacaaaagacatttgcagcatgggactcttccaactacaggccacagcatgcaccttaaacaacccctggctcagagacaccaccaagagccctgtcataggctttagagtccttaaaaactcctactactcagacctttctaacttagcagatgacgactctgagaacagaaggcgagcaattattaagcacctccacccagacacactaacaggctcaccaccaaatgccaaaggatgggaaatcacttacacaagactaatgggacccacatactacaaatcagtaccaaacagcacatacaattggctaaattatcaaacaaactatgctatagttcatgctacgtttacaaaagaaaaacaagcaaaattagacacaataaacaaggaataccattaccactaccccacatatgtaacaaaagactttacaacaaattcaacacttacacatgactatggcatatacagtccctactacttaacaccaaccagaataagcttagactggcaaacaccatggacatatataagatacaacccactagcagacaaaggcctaggaaacatagtatacgctcagtggtgctcagaaaaaacacccaatgtcagcacaactaaaagcaaatgcataatgaaagacctaccactatggtgcatattctatggctacatagactgggtaattaaaagcaccggagtaagctccgctgctacagacatgagaataatgataataagtccttacactgacccagcacttatagggtcaactccagaccaaggctttctgccagtaagtgacaccttttgcaatggagacatgccgtttcttgcaccatatgtgccaatcaagtggtgggttaactggtacccttgcattgcacaccaaaaggaagtgtttgaggcaattgttaactgtggaccgttcgtcccacgagaccagacgaaaccctcttgggaaattaccttaggttacaaaatgaactggaaatggggtggctctcccctgccttcacaggcaatcgacgacccctaccagaagcccacccatgagcttcccgaccccgatagacaccctcgcatgctacaagtctcagacccgacaaagctcggaccgaagacagtgttccacaagtgggactggagacgtgggatgcttagcaaaagaagtattaaaagagtccaagaagactcaagcgatgatgaatatgttgcagggcctttatcacgaaaaagaaacaagctcgacaccaggaccggaggtcttcaaacccccgaaaaagaaagttacactttactccaagccctccaagactcggcggaagagagcccctcgagccaagaacaagcaccccaagaagaaaaccaaaaagaggcgctcctacagcagctcgagctccaaaagcagcaccagcgagtcctcaaacgaggcctcaaactcctcctgggagacatcctccgactccgccgaggagtccactgggaccccctcctgtcctaattcagggtccttctatcccagacctgcttttccctaacacacaaaaaaaaaaactattttccaactacgactgggtgtgcgagtacgaactggccaaatggatggatcgccctttgcggcactacccatcagacccccctcactacccctggctaccaaaaaagcctgctacccctcctacatgtagagtaagtttcaaattaaagctcgatgcctaaaattcaaggccgtgggtgtttcacttcatcggtgtatacctctaaaagtcactaagcactccgagcgtaagcgaggagtgcgacccccctgcccggtagcaacttcctcggggtccggcgctacgccttcggctgcgccggacgcctcggaccccccctcgacccgaatcgctcgcgcgattcggacctgcggcctcggggggggtcgggggctttactaaacagactccgaggtgccattggacactgacccccaccagggggcgctacgcgcccccccccgcgcatgcgcgggtcccccccctcgggggggctccgcccccccggccccccccccgcgcttaatccaccgcgcatgcgcaaccacgcccccgccgccattttgtgcagcccgccaattttattttaaacagaccaatcagctactacttcgtgcacttcctggggcgtgtcctgccactgtatataaacagaagcggtgacgaatggtagagttttttctcgcccgtccgcggcgagagcgcgagcgaagcgagcgatcgagcgacccgtggg

SEQ ID NO: 821 - protein, 645 aa, Alphatorquevirus sp.; identical to SEQ ID NO: 819

SEQ ID NO: 822 - DNA, 3360 bp, Alphatorquevirus sp.
cgggagccggaggtgagtttacacaccgcagtctaggggcaattcgggcacgggtctggccgggctatgggcaagactcttaaaaagtttccccgctgtgttcttcgccaggacatcaagtcatgccgtggcgaccgccggtgcataacatcccgggtagggaaaaccagtggtttgcatgcttttttcactcgcatgctgctttttgcgggtgcggtgacgctgtcgggcatcttaatagcattgctcctcgctttcttaacgccgctcctccgagaccacctccagggctagaccagccgaacctcggagggccggaaggtcccggaggtccccccagagccctgccagctctgccggccccggcagagcctgagccggcaccacgccgtggtggtggggaagatggaggcggcgccgctggggccgccgccgccacagaccatggaggctacgaagaaggagatctagaagatcttttcgccgcggccgccgaagacgatatgtgagtaggcggtggcgccgccgcagtttcaggcgcagacgcagacggggcagacgcagggggcgacgaaagaaacacaagcccacccttatactgagacagtggcaacctgacgtagtcagaccctgcaaaataacaggatggatgcccctaattatctgtgggtcaggaagcacccaattcaactttataacccacatggatgactttcctcccatggggtacacctacgggggcaacttcaccaacctcaccttctccttagaaggaatatatgaacagtttttgtaccacagaaacaggtggagctcctctaaccacgacctggacctggccaggtaccagggaaccaccctaaaactgtacagacacgaatacctagactacatagttagctacaacagaacaggcccttttcagatcagtgacatgacctacctcagcactcaccctgccttcatgctactacaaaaacacaggatagtagtgcccagctttaagaccaagccacgcgggcgcaggtccataaaaattagaataaagcccccaaaactcatgctgaacaagtggtacttcacaaaagacatatgcagcatgggcctcttccagctacaggccacagcatgcaccttaaacaacccctggctcagagataccacaaaaagcccagtcataggcttcagagtacttaaaaacagcatatacacagacctcagcaacctacctgaacatgacggtcccagacaagccattagaaagagactacacccagaaagtctaacaggctcaagtccaaaccaaaaaggctgggagattagctacacaaaactaatggccccaatatattaccaagccaacaaaaacagcacatacaactggctaaactaccaagacaactatgctaatacttacacaacatttaaggacaaaatggaaaaaaatctaacccttatacaaaaagagtacacataccactaccccaacagtgtcaccacagacattgtagcaaaaaacacccttacacacgactggggcatatacagtccctactggctaactccaacaagaatcagcctagactgggaaacaccctggacatatgttagatacaacccactagcagacaagggcataggcaatgttgtatacgcacagtggtgctcagaatcaagctgcagagtagaccaaaagaagagcaagtgcataatgagagacctgccactgtgggtaatattttatggctacgtagactggatagtaaaatccacaggcgtcagcagcgcagtcactgacatgagagtagccataataagtccctacaccgagccggcacttatagggtcaacaccagacgtaggctttattccagtaagtgacaccttttgcaacggagacatgccgtttcttgccccatacatccctgtgggctggtggatcaagtggtaccccatgattgcacaccaaaaggaagtgtttgaggcaatagttaactgtggaccgtttgtcccacgagaccagaccaaaccctcttgggaaattaccatgggttacaaaatgaactggaaatggggcggctctcccctgccttcacaggcaatcgacgacccctgtcagaagcccacccatgagctacccgatcccgatagacaccctcgcatgctacaagtctcagacccgacaaagctcggaccgaagacagtgttccacaagtgggactggagacgtgggatgcttagcaaaagaagtattaaaagagtccaagaagactcaagcgatgatgaatatgttgcaggacctttgcaaagaaaaagacacaagatggataccagagcagcaggcctgcaaacccccgaaaaagaaagttacactttactccaagccctccaagactcggcagaagagaacctgtcgagccaagaacaagcaccccaagaaaaagaggtgcaggaaaaagcgctcctggagcagctccagctccagaaacagcaccagcgagtcctcaaacgaggcctcaaactcctcctgggagacgtcctccgactccgccgaggagtccactgggaccccctcctgtcataattcagggtccctttatcccagacctgcttttccctaacacacaaaaaaaaaagaaattttccaactacgactggtcggtagagtacgagctggccaaatggatggatcgtcctttgcggcactacccatccgacctccctcactacccctggctaccaaaaaagccacctacccttcctacatgtagagtaagtttcaaattaaagctagattcctaactttcaaggccgtgggtgtttcacttcatcggtgtctacctctaaaggtcactaagcactccgagcaaagcgaggagtgcgacccccctgcccggtagcaacttcctcggggtccggcgctacgccttcggctacgccggacgcctcggaccccccctcgacccgaatcgctcgcgcgattcggacctgcggcctcgggggggggtcgggggctttattaaacagactccgagatgccattggacactgccccccccaccagggggcgctgcgcgcccccccccgcgcatgcgcgggtcccccccccgcgggggggctccgcccccccggccccccccccgtgctaaatccaccgcgcacgcgcgaccacgcccccgccgccattttctgcagcccgccaatttcttttcaaacagaccaatcacaatgtactacgtgcacttcctggggcgtgtcttcccagtctatataagcagaggcagtgacgaatggtagagttttttctggcccgtccgcggcgagagcgcgagcgaagcgagcgatcgagcgacccgtggg

SEQ ID NO: 823 - protein, 661 aa, Alphatorquevirus sp.
LRQWQPDVVRPCKITGWMPLIICGSGSTQFNFITHMDDFPPMGYTYGGNFTNLTFSLEGIYEQFLYHRNRWSSSNHDLDLARYQGTTLKLYRHEYLDYIVSYNRTGPFQISDMTYLSTHPAFMLLQKHRIVVPSFKTKPRGRRSIKIRIKPPKLMLNKWYFTKDICSMGLFQLQATACTLNNPWLRDTTKSPVIGFRVLKNSIYTDLSNLPEHDGPRQAIRKRLHPESLTGSSPNQKGWEISYTKLMAPIYYQANKNSTYNWLNYQDNYANTYTTFKDKMEKNLTLIQKEYTYHYPNSVTTDIVAKNTLTHDWGIYSPYWLTPTRISLDWETPWTYVRYNPLADKGIGNVVYAQWCSESSCRVDQKKSKCIMRDLPLWVIFYGYVDWIVKSTGVSSAVTDMRVAIISPYTEPALIGSTPDVGFIPVSDTFCNGDMPFLAPYIPVGWWIKWYPMIAHQKEVFEAIVNCGPFVPRDQTKPSWEITMGYKMNWKWGGSPLPSQAIDDPCQKPTHELPDPDRHPRMLQVSDPTKLGPKTVFHKWDWRRGMLSKRSIKRVQEDSSDDEYVAGPLQRKRHKMDTRAAGLQTPEKESYTLLQALQDSAEENLSSQEQAPQEKEVQEKALLEQLQLQKQHQRVLKRGLKLLLGDVLRLRRGVHWDPLLS

SEQ ID NO: 824 - DNA, 3358 bp, Gammatorquevirus sp.
cgggtgccgaaggtgagtgaaaccaccgtagtcaaggggcaattcgggcggctgcagtctagcggaacgggcaagaaacttaaaaattccgcgcgctgtgcgcgccctatgctttattacagatgtctcttcaaaaccttcctaaatgttacaaacctcctcttgtagatccatggggacaacaagaactctggattcaaaatgtcgaattttcacatgatacatggtgcagctgtgctcattggcttagtcatcttctttctattacttgtcctcttgattctaaaaatcgtgctcggaccgtccacgagattattgacataggtcaaaattgtgataaccttttgtctttgagagccttgcccagtgtccctgcagattcatggtctggccctggagaacccggcgccgctggcgccgcagacctcgcaggtggagacgctggaggtggcccagacgaaaccgaaagaaacgtacctataccagaagacgaactgttagagcttctagaaaacgccgaaaaagacgaaaacgtaccagggtaagaaaaaaaaagcctttattgaacttaaaacaatggcaaccagaaagtataaaactctgtaaaattattggacatacacctttaaatattggatgtaatggtagacaaataagaaactatacttactggcaagactattatattcaccctaaatgtccatcaggaggaggattttcagtttataaatggtctcttgcatacttatatgaagactattgtagaagaaaaaatatttggactaaatctaactgcccatatgacttatgcagataccttggaactagaatcaaaatgtactcacacccagaagtagactttatagttacttactctagaaactatcctatggtagtagatgaaactacatacatgcttacacatccatctattttacttttaagaaaacatagagtaatagtacctagcagaaaaataaaacccaatggaaaaggatacaaaaaaatatttattaaaccacctagacaactagttaacaaatggttttttcaaaaacaatttaatgaccaagggctgtttttattacaaatagcagcagctgacttacaatatccaacaataggaccaaacagtccaaacagactagtcacacttaacattttaaacaaccaatacttttatggacaacctaactggggagacgcctcacaaacttatacaataacacaaggaacatttaatttactagacaaaaacacaaaaaccctaatagatggaaaacttatagactacaaaattccacaggatataggcacagcccagaaaaaacatttatatgcatcaggactctttaacagacaaattctaaacatacaatactacacagacgcagataaagcacgataccctacaccaactatgcaagtacaatacaacccaatgaaagacacaggtaaaggaaacaaaatatactttatctcaacattacaaacatcatggtcaccacctacaacagacagacttttatattggcaaggagaacctttatggctacaactatatggactagtagactacattttaaaagctaaaggctcttcctcagcattacaggatgccatttgtgtaatagagtcacccttcatagaaccacaaacccacaacaaaaaattcgttgtggtaggaaatccttttatgcaaggccaaactgactgcaaaaacccacctacaggaaaccaactaaacaaatggtttttaacactagaagaccaaatgcctgctttaaatgacatagtaagtgcaggcccttacatggtaaaacaaacaggatttagatgcacatgggaattacatgttgattataagtcttactttaaatggggaggtgcacaaccaccactacaaaatatttgtgacccccatttacaggaaaccttccctgtgcccgatactgtcagacaaacattacaaatcatcgatccgaaaaaacaagtcccagaatccttactccactcttgggactatagaagagggcttgttactcaaacagcttttaaaagaatgtacaaaggtctctcagatgcagagtcttcttcaccagattcctcagacgagtcagactcaccccaaagaaaaagaaagagaggagacccaccgtgcccggaagaaaaagacaactacaatatccagaccctcaaagaaatctgccaaacgccgcaaaaagaagcaggaaacatcgagcagcagctccacaacttccagcagcagcaatacaacaagaacatcaacatcttaaaattacttgcaatgttaaaacaaaaacagctgcaaatgcaactagcaatgggtatgatggagtaaaattatttccaaaaaaagaaaaaaacccaaaatttaaaggatggggtaaaataatagaagaggaatgcgctaaagcattccacagaccacccagaaaatttgtaaacgaccctccattttatccttggctacctccagtacccaaagtttcatttgcactgaagtttaagggctaggcccacaatgttcacttagtggagtatgtttaataaagtcacaccccctttctgtaaccacgcctcttttgtatacgtcatgaatatattaaaaaccggaaataaattttcgcagagcggagggttcgcgcgctacgcgcgcgaacccatacgcctagggggcgcacattaattgctcctagattgggcagcgcgcgcttgcgcgcgctgccaaatgcgcccctccctcgtgctgacacgcttgcgcgtgtcagaccactacgggctcgggggggcgcgcctgcggcgctaacttatataataaactccacagggggagctgcgctccccctgttacgtcaccccctacgtcacttcctggcgggaaatttaaaaaacgtcacaaagccacgccttaaaggggggggcaaagcccccccttaacccccccggggggggggggggggggggggggggggggggggggggggggggggcacttcctggcgggaaatttaaaaaacgtcacaaagccacgccttaaagggggggcaaagcccccccttaaaccccccggggggggcaaagccccccccactccccccctacgtcactaaccacgtgaccgcagccatattgggtgcggtcaaggcgtggccaaaaagcgcgggaaccaatcaaattaaacaactaacaaccaataaaaaaaacccacgtcacaaaaatgggtggttcctttcactctataaaactaactgcacttccgaatggctgagtttttccccgctagacggtgcggagcacaacgagcgcagcgaggagagactcagcagcagcaggg

SEQ ID NO: 825 - protein, 659 aa, Gammatorquevirus sp.
MVWPWRTRRRWRRRPRRWRRWRWPRRNRKKRTYTRRRTVRASRKRRKRRKRTRVRKKKPLLNLKQWQPESIKLCKIIGHTPLNIGCNGRQIRNYTYWQDYYIHPKCPSGGGFSVYKWSLAYLYEDYCRRKNIWTKSNCPYDLCRYLGTRIKMYSHPEVDFIVTYSRNYPMVVDETTYMLTHPSILLLRKHRVIVPSRKIKPNGKGYKKIFIKPPRQLVNKWFFQKQFNDQGLFLLQIAAADLQYPTIGPNSPNRLVTLNILNNQYFYGQPNWGDASQTYTITQGTFNLLDKNTKTLIDGKLIDYKIPQDIGTAQKKHLYASGLFNRQILNIQYYTDADKARYPTPTMQVQYNPMKDTGKGNKIYFISTLQTSWSPPTTDRLLYWQGEPLWLQLYGLVDYILKAKGSSSALQDAICVIESPFIEPQTHNKKFVVVGNPFMQGQTDCKNPPTGNQLNKWFLTLEDQMPALNDIVSAGPYMVKQTGFRCTWELHVDYKSYFKWGGAQPPLQNICDPHLQETFPVPDTVRQTLQIIDPKKQVPESLLHSWDYRRGLVTQTAFKRMYKGLSDAESSSPDSSDESDSPQRKRKRGDPPCPEEKDNYNIQTLKEICQTPQKEAGNIEQQLHNFQQQQYNKNINILKLLAMLKQKQLQMQLAMGMME

SEQ ID NO: 826 - protein, 149 aa, Gammatorquevirus sp.
LCAPYALLQMSLQNLPKCYKPPLVDPWGQQELWIQNVEFSHDTWCSCAHWLSHLLSITCPLDSKNRARTVHEIIDIGQNCDNLLSLRALPSVPADSWSGPGEPGAAGAADLAGGDAGGGPDETERNVPIPEDELLELLENAEKDENVPG

SEQ ID NO: 827 - protein, 110 aa, Gammatorquevirus sp.
LPNAAKRSRKHRAAAPQLPAAAIQQEHQHLKITCNVKTKTAANATSNGYDGVKLFPKKEKNPKFKGWGKIIEEECAKAFHRPPRKFVNDPPFYPWLPPVPKVSFALKFKG

SEQ ID NO: 828 - DNA, 3347 bp, Alphatorquevirus sp.
cgggtgccggaggtgagtttacacaccgcagtcaaggggcaattcgggctcgggactggccgggccctgggcaaggctcttaaatatgcacttttctaaaataagcagaaagaaaaggaaactgctactgcaaactgtgccgcttgcagagaacgaacggcctaccatgagctggtccagacccgtccaaaatgtttctattctcgaacaaaactggttcgaatcctgcctcagatcacacgcatgcttttgtggctgtaataatcctgttattcatttcaataacatcgctactcgctttaactatttgcctactgccaatccgcctgtgggacccccccaaccgcccacacgcccgccgtcccgcttaagaccccttcccgctctccccgcgcctcccgctgatccacaagcaccatggtctggggctggtggctcaagcggtggaggagaagaaagaaaccagcgtggaagaagtggagaacgcgcagatggagaagatttcgacgcagaagacctaaacgcacttatggccgccgtcgaagaagacgaacagtaaggaggcgccgcggtagacgactgaggaggagggggtggactaggagacggtacataagacgcagacgcagaaagaaaaagctagtactgacccagtggaacccccaggacgttaggagatgcacaataaggggcataataccccttatcatgtgcggtgcaaacactgccagttttaattatggcatgcacagcgatgacagcaccccccagccagaaaagttcgggggaggcatgagcacagtaacattcagtttgtttgtgctatatgaccagtacaccagacacctaaacaggtggtcgtacccaaacgaccagctagacctagccagatacagaggctgcaaatttaaattctacagagatacctcaacagactttatagttacctatgacattaatccacccatgaaaaacacagaactaagcagccctaacacacacccaggcatgcttatgcagcaaaaaagaaagatactcgtccctagctgggacacgtatcccagaggcagaaaatatgtcctagctaagataccaccccccaaactgtttgaagaccactggtacactcagccagacttgtgcaaagttcctcttgtaactttgcggtcaactgccgctgacctcaaacatccgttctgctcaccacaaacgaacaacccttgcaccaccttccaggtgttgcgcagccagtataacagtatgataggcttcccctttaactataacccatcagaccaaagtcaacagcagaaattaaaaacatttgaagaatggctatattcatctagcacacactatcagacatttgccactgaagctaaccttagaccgagacagtacaatgcagacggaactctaaataacaactaccaacaattacaatcccagtggacaactactatatatgctaaaaaaacagatagcaactttggctacacatcatacaacttttcaggagagactggctataagtatataacatcaattagacagtggtactggacacaactaacatcctggacagaaaaagtccctcacataaacagcacctttagcaatgccatacacccagagtttgaataccacgcgggctggtactcaaacatatttataggccccaacagatttaatatacagtttaaagcagcctacatggatgttacctacaacccaataaatgacaaaggccacctgaacaaagtgtggttccaatacagcacaaaacccaccacagactttgtagaaaagcaggccaaatgtttactgcaaaatctgcctttgtggagcatgctgtttggctacgcagagtatgtagaaagtcagctaggcccctttcaggaccacgaaacagtaggcctagtaatagtacagtgcccatacacagtaccccccatgtatgacaaagacaatccaaacatgggattcgtgttctatgacacacactttggcaacggaaagctaggcaacggactgggccaggtacccagatactggcagcagagatggtaccccatcttaaagagacaaaaacaagtcatgaatgacatctgcaagacgggaccatttgcgtacagagacgagagactgcaagctgacttgactgcaggatactcctttaagtttaactggggtggtgacttaatctaccaccaggttgtcaaaaacccatgtgactcaggaggactggtgccttccgactccagtagattcaagcgggacgtacaagttgttagcccgctcaccatgggacccagactcatcttccactcgttcgaccaaagacgggggctctttactgacagagctatcaaaagaatgtacaatgaacagattaatgttccagactttacagaacagcctaaaatcccccgaattttccccccagtcgagctcaaagaaagggaagaaaaagactcagattcggagacagagacgatcagcagctcccaagaaaaagaagccaaaaagcaagaggcgctaccagtccagcagcagctccgactccaactgcgagaacaacagcgactccgagtccacttgcagcacctcttcctgcaactccagaaaacgaaagcaaatttacatttaaacccactatctttccagcaagagataaactagacatgtttggtaacattctaaatagaaagcctacctcccaggactgggagaccgagtacataacctgtagaatatttgacaggccccccagacagcacctcacagaccctcctttctatccttggatacctaagcctaaacctgcatgccgtgtaacctttaagcttggctttcaataaacaaggccgtgggagtttcacttctcggtgtctacctctataagtcactaagctctccgagcgaagcgaggagagcgaccctaaaccaaggggcaactccctcgaagtccggcgctacgcgcttcgcgctgcgccggacatctcggaccccccctcgacccgaatcgcttgcgcgattcggacctgcggcctcgggggggtcgggggctttattaaacggactccgaggtgccattggacactgagggggtgaacagcaacgaaagtgagtggggccagacttcgccataaggcctttatcttctgccccccccccgaagaacgtcactaaccacgtgactcccacaggccaaccacagtgtatgtcgtgcacttcctgggcatggtctacgtgataatataaagaacagcacttccgaatggctgagtttttcacgcccgtccgcagcgaggagcagccagagggagatccgcgcgtcccgaggg

SEQ ID NO: 829 - protein, 754 aa, Alphatorquevirus sp.
MVWGWWLKRWRRRKKPAWKKWRTRRWRRFRRRRPKRTYGRRRRRRTVRRRRGRRLRRRGWTRRRYIRRRRRKKKLVLTQWNPQDVRRCTIRGIIPLIMCGANTASFNYGMHSDDSTPQPEKFGGGMSTVTFSLFVLYDQYTRHLNRWSYPNDQLDLARYRGCKFKFYRDTSTDFIVTYDINPPMKNTELSSPNTHPGMLMQQKRKILVPSWDTYPRGRKYVLAKIPPPKLFEDHWYTQPDLCKVPLVTLRSTAADLKHPFCSPQTNNPCTTFQVLRSQYNSMIGFPFNYNPSDQSQQQKLKTFEEWLYSSSTHYQTFATEANLRPRQYNADGTLNNNYQQLQSQWTTTIYAKKTDSNFGYTSYNFSGETGYKYITSIRQWYWTQLTSWTEKVPHINSTFSNAIHPEFEYHAGWYSNIFIGPNRFNIQFKAAYMDVTYNPINDKGHLNKVWFQYSTKPTTDFVEKQAKCLLQNLPLWSMLFGYAEYVESQLGPFQDHETVGLVIVQCPYTVPPMYDKDNPNMGFVFYDTHFGNGKLGNGLGQVPRYWQQRWYPILKRQKQVMNDICKTGPFAYRDERLQADLTAGYSFKFNWGGDLIYHQVVKNPCDSGGLVPSDSSRFKRDVQVVSPLTMGPRLIFHSFDQRRGLFTDRAIKRMYNEQINVPDFTEQPKIPRIFPPVELKEREEKDSDSETETISSSQEKEAKKQEALPVQQQLRLQLREQQRLRVHLQHLFLQLQKTKANLHLNPLSFQQEIN

SEQ ID NO: 830 - protein, 167 aa, Alphatorquevirus sp.
LAGPWARLLNMHFSKISRKKRKLLLQTVPLAENERPTMSWSRPVQNVSILEQNWFESCLRSHACFCGCNNPVIHFNNIATRFNYLPTANPPVGPPQPPTRPPSRLRPLPALPAPPADPQAPWSGAGGSSGGGEERNQRGRSGERADGEDFDAEDLNALMAAVEEDEQ

SEQ ID NO: 831 - protein, 58 aa, Alphatorquevirus sp.
MFGNILNRKPTSQDWETEYITCRIFDRPPRQHLTDPPFYPWIPKPKPACRVTFKLGFQ

SEQ ID NO: 832 - DNA, 3341 bp, Alphatorquevirus sp.
cgggtgccgaaggtgagtttacacaccggagtcaaggggcaattcgggctcgggactggccgggctatgggcaaggctcttaaaaaagcatgtttctcggcagggtttggagaaagaaaaggtcgctgccactgcccgagctgcgaactcctgcgaaaaaaccatctctaatgagctggtcccagcctctgcacaatgtcaccacccgcgagggcttcttttacgcggggtgtaagcagcttcataactgcttttgtggttgtgatgattttattaatcatcttcttcgcatccagacccagcagggtccctctccctcgcggcccttcactcctccgtcaacaccacgccctgtaatccgtagagccctgccggcaccggcggctccggacgcaccggcgccatggcgtggagctggtggtggacccgccgccgacgcagaccgtggacccggaggagatggaggagactacgcacccggagacctcgacgacctgtacgccgccgtcgacgccgaaaacgcagagtaaggaggagacggtggggaaggagacgagggcgacgaacattttacaaacgcaggtttagaaagagacgcaggcgacgaaaaaagctagttcttactcagtggaaccctcagactattagagcatgttctataaggggcacagtatgcctagtaatgtgtggacacacaaaagccagcagaaactatgctctgcactcagaagactatgtgccacaactgcatgctatgggagggtcttttagtactactacctggagcctaaaagccctatatgatgagcaccagaaattccacaacaggtggtcctaccccaacactcagctagacctagccagatacagggggtgtcgctggtggttttacagagaccccaaagtagactacatagtcacctactacacagtacctccatttaaaataaacaaatacactagtccaatgctacacccaggcatgatgatgcagtacaaaaagaaaatattagtacccagctatcaaacaaaacctaaaggcaaatccaaaattagtatttttattaagcccccagttctttttgaagacaagtggtacactcagcaagacttgtgtcccgttaatcttatgtcacttgcggttagcgcagcttcctttatacatccgttctgcccaccagaaagtgacaacatgtgtattacattccaagttttgaaacaattttattacacacaaatgagtgtaaccgcaatgaacggcacaaaagccacagacgaagacgaagccattctttcaaaactttactcaactgccagtttttggcagtctttacacacacagtctttaatttctactactcaaaaaactgctgtattttctgaccacgataagtttccaaacgtatcaaactggttaacaaaagacatagatgcaacaacatttaaaactggaaacaatagcatatatggccaagtaaattacagaccaaatacagaaaagatgacacaaatactacaatggtactttaaacaagaatcactaccaaacgatcctcacgggcaatacggaaaaccagtatattatccagccagctatcacataggaaagtacagtcccatatttttaagcccatacagaaccaatctccaatttgaaacagcataccaagacaccacatacaaccccaacacagacaaaggtttaggaaacaaaatgtggatacaatcagtaactaaaaaaaacacaaacctagactcacaatgcaaatgtttacttgaagacatacctttgtgggccatggctacaggctatggagaattttgtgagtctgaacttaactctgaagtgtggaacctatacattgtttgcgttatatgtccctacaccaagcctcaactatattcaaaaacaaacccaacacagggctgggtattctatgatacactatttggagatggcaaaatgcccaccgggtcaggcctagtacccgtgtggctacaaagcaggtggtaccccagactagtgttccaacaacaagtactacacgatatttacctcacaggaccctttagttacaaagatgacctaaagagctttactataaatgccaggtacaaattcaaattcttatggggcggcactataatccccgaacaggttattaaaaacccgtgcaaagagcaagactcgccattcacctttaccggtagacagcctcgcgacctacaaattgctgacccacaaaccatgggcccacaatgggttttccacacctgggactggcgacgaggactatttggtgaaaatgctctcaaaagagtgtcagaacaaccaagcaatgatgcagactattatgctccaccaaaaaaacctagactattccctccaacagacctccaagagcaagaaagaggctcagatttcacactgcaggaactcaggatcctctcggagagggcgccgtcgcaaacaagcgaagaagaggacccgcaagaggagcaccagctccagcagcaagagctccagctccgactccagcagcagttcagaatcaggcagcaactgcagcacctattcgtacaagtcctcaaaacccaagcaggtctccatataaacccattatttttaaaccctgcataaaccaggtgtacatgtttcctcctgacacccctaaacccattaccactgcacaagattggaaagaggagtatgaatgctgtaaatactgggatagaccccccagaaagtaccttacagaccgccccttctacccctggatgcccaaggagccccctcagtgtcgtgtcagctttaaacttggcttccaataaaatttcaaggcctttcaaatttcacttgtcggtgtttacctctataagtcactaagcactccgagcgtaagcgaggagtgcgaccctttcccctgactcaacttcttcggagccgcgcgctacgccttcggctgcgcgcggcacctcagacccccgctcgtgctgacacgcttgcgcgtgtcagaccacttcgggctcgcgggggtcgggaaatttgctaaacagactccgagttgccattggacactggagctgtgaatcagtaacgtttctttctccaaaccctgccgagaaacatgcttttttaagagccttgcccataccccggcccccccccccgaagtacgtcactaaccacgtgtctcccacaggccaatggcagtgtatatcgtgcacttcctgggcatggtctacatcataatataaagcagtgcacttccgaatggctgagttttccacgcccgtccgcagcggcagcaccacggagggtgatccccgcgtcccgaggg

SEQ ID NO: 833 - protein, 745 aa, Alphatorquevirus sp.
MAWSWWWTRRRRRPWTRRRWRRLRTRRPRRPVRRRRRRKRRVRRRRWGRRRGRRTFYKRRFRKRRRRRKKLVLTQWNPQTIRACSIRGTVCLVMCGHTKASRNYALHSEDYVPQLHAMGGSFSTTTWSLKALYDEHQKFHNRWSYPNTQLDLARYRGCRWWFYRDPKVDYIVTYYTVPPFKINKYTSPMLHPGMMMQYKKKILVPSYQTKPKGKSKISIFIKPPVLFEDKWYTQQDLCPVNLMSLAVSAASFIHPFCPPESDNMCITFQVLKQFYYTQMSVTAMNGTKATDEDEAILSKLYSTASFWQSLHTQSLISTTQKTAVFSDHDKFPNVSNWLTKDIDATTFKTGNNSIYGQVNYRPNTEKMTQILQWYFKQESLPNDPHGQYGKPVYYPASYHIGKYSPIFLSPYRTNLQFETAYQDTTYNPNTDKGLGNKMWIQSVTKKNTNLDSQCKCLLEDIPLWAMATGYGEFCESELNSEVWNLYIVCVICPYTKPQLYSKTNPTQGWVFYDTLFGDGKMPTGSGLVPVWLQSRWYPRLVFQQQVLHDIYLTGPFSYKDDLKSFTINARYKFKFLWGGTIIPEQVIKNPCKEQDSPFTFTGRQPRDLQIADPQTMGPQWVFHTWDWRRGLFGENALKRVSEQPSNDADYYAPPKKPRLFPPTDLQEQERGSDFTLQELRILSERAPSQTSEEEDPQEEHQLQQQELQLRLQQQFRIRQQLQHLFVQVLKTQAGLHINPLFLNPA

SEQ ID NO: 834 - protein, 146 aa, Alphatorquevirus sp.
MFLGRVWRKKRSLPLPELRTPAKKPSLMSWSQPLHNVTTREGFFYAGCKQLHNCFCGCDDFINHLLRIQTQQGPSPSRPFTPPSTPRPVIRRALPAPAAPDAPAPWRGAGGGPAADADRGPGGDGGDYAPGDLDDLYAAVDAENAE

SEQ ID NO: 835 - protein, 59 aa, Alphatorquevirus sp.
MFPPDTPKPITTAQDWKEEYECCKYWDRPPRKYLTDRPFYPWMPKEPPQCRVSFKLGFQ

SEQ ID NO: 836 - DNA, 3337 bp, Alphatorquevirus sp.
aaaagaggaagtatgacgtagcacaccgcagtctaggggcaattcgggcacgggtctggccgggctatgggcaagactcttaaaaaatttcctcgctctgtgctccgccaggacaccaagtcatgccgtggtctccgccgagacataatatcagaacaagagaagatctctgggtgcaatcagttgtttactcacatgacactttttgtggctgtgatagcgttcttcagcatcttactagcctcctgggtggcctacaaccagctccacctagagacccagcaccccctgccatacagagcctgccggcactgccgccagctccccaaccccctgaacaaccacggcgtggtggagatacagacgaagaccgtggagaagatggaggagacgccgctggggcctacgaaccaggagacctagaagaacttttcgccgccgccgaggaagacgatatgtgagtagagggcggcgccgccgatacaggcgcagacggagacgggggcgacgcacaaggggacgcagacgcaggcacagaaagacactcattgtcaggcagtggcaaccagacgttattaagagatgctttattactgggtggctacccctaattatctgtggaaacggacacacccaatttaactttataactcacatggacgacattccacccagaaatgcgtcctatgggggcaactttacaaatgtcacctttaaccttgcctgcttctatgaagaattcatgcaccacagaaacagatggtcagcttccaaccatgacctagaactggtcagatacctgagaaccagcctaaaactctacagacacgagtcagtagactatgtacttacctacaccaccacaggcccattcgagacaaatgaaatgtcctacatgctcactcaccctctagccatgcttctcagcaaaaaacatgtagttgtacccagcctaaagacaaaaccacacggcaaaaagtacaaaaagataacaattaaaccaccaaaactaatgctaaacaaatggtactttgccaaagacttctgccacataggcctcttccagctctgggccacaggcctagaactaagaaacccatggctcagatcaggcacaaacagcccagttataggattttatgtccttaaaaaccaagtatatcaaaacagatacagcaacttatccacacaaacacaaaatagaaaagacgcatacgaagaactaacaaaaaaaacaactgagccaaaatggtataactggcagtatacatatactaaaataatgaagcctatttattatgcagctgccaatgaatctaactccacctttaaaaacaaaacttacaattggaaaaattacaaagagaattttcaacaagtaaaacaaaaatgggaaaccataacaaaagacgcatacaacctagtagcagatgaatacagacaaatatacaccaccacactcacatatccaccaccatggagtcccactaacgatataaacactggcagacaatacctagagcatgactgtggaatatacagcccatattttctaacaccacaaatatacagcccagaatggcacacagcctggtcctacatcagatataatccgctcacagacaaaggcataggcaacagagtctgtgtacagtactgcagcgaggccagcagcgactacaacccagtaaaaagcaagtgcatgctacaagacatgcccttatggatgatgctatatggctatgcagactatgtagtaaagagtacaggcatacaatcagcctggacagacatgagagtagctatcagaagtccttacacagacccaaaactcataggcagctcagaaaacacaatgttcatacccataggcatagaattcatgaacggagacatgccagacaagaggccctacattccgttaaagtggtggtttaagtggtaccccatgattacacaccaaaaaaccgcacttgaggcaatagtttcctgtagcccgttcatgcccagagatcaggaacaagccagttgggacataactataggttacaaagcaaccttcttatggggcgggtcccccttacctccacagcccatcgacgacccctgccaaaaatccacacacgaacttcccgatcccgatagaaaccctccaagaatacaaatctcagacccgcagcacctcggaccggcgacgctattccactcgtgggacctcagacgtggattcattaatacaaaaagtattaaaagagtgtcagaacacctcgactctaatgaatatttttcaacaggcgtcgtgtccaaaaaaccccggttcgacactccccaccacgggcagctatcaaaccaagaagaagacgccttacatatcctcagacaactccagaaagagcaagaagagaccacgtccgaagaagaacaagcactccaaaaagaagaggagcaaaaagaaaagctcctacagcagctccgagtccagcgacagcaccagcgagtcctcagggagggaatcaaacacctcatgggagacgtcctccgactcagacagggagtccactggaacccaatcctgtaatacttccaccagaaccaataccagacctcctattccccaatactggtaaaaaaaaaaaattttctcccttcgactggcagtgcgagcaagaacttgcctgcctaatgaagcgtcctatgcgtttctatccctcagacaacccgttctacccgtggctaccccccaagcgagatatcccaaaaatatgtaaagtaaacttcaaaataaatttcactgaatgaatctcgaggccccgggagtttcacttagcggtgtctacctctaaaggtcactaagcactccgagcgcaagcgaggagtgcgaccccctgcccggtagcaacttcctcggggtccgacgctacgccttcggctgcgccggacgcctcggacccccgctcgtgctgacacgctcgcgcgtgtcagaccacttcgggctcgcgggggtcgggttatttattaaacagactccgagtcgctcttggactcaggagctgtgaatcagtaacgaaagtgagtggggccagacttcgccatagggcctttaacttccgggtgcgtatgggggccgccattttagcttcggtcgccattttaggccctcgcgggcctccgtaggcgcgcttttatgacgtcacaggcgccatcttggctgtgacgtttcagtcacgtggggagggaacgcctaaaccaggaagcgtccctggtcacgtgtctgtgacgtcacggccgccattttgtgcggcggccattttgtgacttccttccgctttttcaaaaa

SEQ ID NO: 837 - protein, 640 aa, Alphatorquevirus sp.
MDDIPPRNASYGGNFTNVTFNLACFYEEFMHHRNRWSASNHDLELVRYLRTSLKLYRHESVDYVLTYTTTGPFETNEMSYMLTHPLAMLLSKKHVVVPSLKTKPHGKKYKKITIKPPKLMLNKWYFAKDFCHIGLFQLWATGLELRNPWLRSGTNSPVIGFYVLKNQVYQNRYSNLSTQTQNRKDAYEELTKKTTEPKWYNWQYTYTKIMKPIYYAAANESNSTFKNKTYNWKNYKENFQQVKQKWETITKDAYNLVADEYRQIYTTTLTYPPPWSPTNDINTGRQYLEHDCGIYSPYFLTPQIYSPEWHTAWSYIRYNPLTDKGIGNRVCVQYCSEASSDYNPVKSKCMLQDMPLWMMLYGYADYVVKSTGIQSAWTDMRVAIRSPYTDPKLIGSSENTMFIPIGIEFMNGDMPDKRPYIPLKWWFKWYPMITHQKTALEAIVSCSPFMPRDQEQASWDITIGYKATFLWGGSPLPPQPIDDPCQKSTHELPDPDRNPPRIQISDPQHLGPATLFHSWDLRRGFINTKSIKRVSEHLDSNEYFSTGVVSKKPRFDTPHHGQLSNQEEDALHILRQLQKEQEETTSEEEQALQKEEEQKEKLLQQLRVQRQHQRVLREGIKHLMGDVLRLRQGVHWNPIL

SEQ ID NO: 838 - DNA, 3334 bp, Alphatorquevirus sp.
aatggcggattccgtgacgtcatggccgccatcaaggggcaattcgggctcgggactggccgggctatgggcaaggctcttaaaaagctatgtttctcggtaaaccttacagaaagaaaaggaaactgctactgcaagctgtgcgtactccacaggcgccatcttccatgagctctacctggcgagtgccccgcggcgatgtctccgcccgcgagctatgttggtaccgctcagttcgagagagccacgatgctttttgtggctgtcgtgatcctgtttttcatctttctcgtctggctgcacgttctaaccatcagggacctccgacgccccccacggacgagcgcccgccggcgtctaccccagtgaggcgcctgctgccgctgccctcctaccccggcgagggtccccaggctagatggcctggtgggcatggagaaagcgctggtggcgcccgcggaggcggtggagatggcggcgcccgcgcaggcgaagaagagtaccggcccgaagacctagacgagctgttcggcgctatcgaacaagaacagtaaggagacggaggcgagggtggcggaggggctacaggcgccggtacagactgagacgctaccgtagacggggcaggcgacgcaaaaagatagtactgactcagtggaacccccagaccaccagaaggtgcattatccgcggacttatgccagttatctgggcgggcatgggcacggggggccaaaactatgccgtccgctcagatgactttgtagtagacaaaggcttcgggggctccttcgctacagagactttctctttaagagtactgtatgaccagcaccagaagggctttaacaggtggtcccacaccaacgaggacctagaccttgcccgttacagggggtgcaaatggaccttttacagacacccagacactgactttatagtgtacttcactaacaatccccccatgaaaactaaccagtacactgcccctctcaccactcctggcatgctcatgagaagcaaatataagatactaatacctagttttaaaacaaaacccaaaggaaaaaagacaataagcttcagagccagacccccaaaactattccaagacaagtggtacactcagcaagacctctgccctgtgcccctcatccaactaaacttaaccgcagctgatttcacacatccgttcggctcaccactaactgactctccttgcgtaaggttccaagtcctcggggacttgtacaataagtgtctcaatatagaccttccgcaatttaacgccgatggtaccgttttaaccacatcctcttacagtagaggtaatacggagcagttacaagaattatataaaactctatttgttagaaaaggctgcggacactactggcaaacattcataaccaataccatggtcaaagcacacatagatgctacacaggcacaaaagtatcaacagagcacttcaggccctgaaagtggaaaagatccatttccaacaaaccctcaaagatccgaatttgaaacatggaaaaagaaattcacagaccccagagacagcaactttctctttgccacttatcacccagaaaacattacagacattatcaaaaaaatgagagacaataactttagtctagaaactggaaagaatgacctttatggtgattatcaggcccaatatactagaaacactcaccttctagactactacctgggcttctacagccccatattcttgtccagtggcagatccaatactgaattctttactgcctacagagacatagtatataatccactactagacaaaggcacaggtaatatgatttggttccaataccacacaaaaactgacaacatatttagaaaaccagagtgccactgggaaatactagacatgcccctgtgggccctctgcaacgggtacaaagagtacctagagagccaaataaaatatggtgatatcttagtagaaggcaaagtcctcataagatgcccatacaccaaacctcccctagcagaccccaacaacagtctagcaggatatgtagtctacaacacaaactttggacaaggcaagtggatcgacggcaagggctacatccccctaagacacaggagcaagtggtatgtaatgctcatgtaccagacggacgtactccatgacctagtgacttgtggaccctggcaatacagagacgataataagaactctcaactaatagccaagtacagatttactttctactggggaggtaacatggtacattctcaggtcatcaggaacccgtgcaaagacacccaagtatccggaccccgtcgacagcctagagagatacaagtcgttgacccgcaactcatcaccccgccgtgggtcctccactcgttcgaccagagacgaggaatgtttactgaaacagctatcagacgtctgctcagacaaccagtacctggcgagtatgctcctccagcactcagggtcccgctcctctttccctcctcagagttccaacgagagggagaaggtgcagaaagcgactcatcttccccggcaaagagaccgcgactctggcaagaagaggacagccagacggagacgcactcctcggaggggccggcggagacgacgagggagctcctcgagcgaaagctcagagagcagcgagtcctcaacctccaactccagcaattcgctgtacaactcgccaagacccaagcgaacctccacataaaccccctattatactcccagcagtaaataaagtatacctgtttccaccagaaaaacctactcctatacaggggtaccacgggtggaacaccgagtatgaggcctgccaggccttcgacagaccacccagaaagtacctctcagacacacctacctacccttggctccccgttcccaatcctgaaataaaagtgagctttaagctcggtttcaaatgttacaaggccgtgggagtttcactggtcggtgtctacctcttaaggtcactaagcactccgagcgtcagcgaggagtgcgacccttccccctggtgcaacgccctcggcggccgcgcgctacgccttcggctgcgcgcggcacctcggacccccgctcgtgctgacacgctcgcgcgtgtcagaccacttcgggctcgcgggggtcgggaattttgctaaacagactccgagttgctcttggacactgtagctgtgaatcagtaacgaaagtgagtggggccagacttcgccatagggcctttatcttcttgccatttgtccgtgtcgggggtcgccataggcttcgggctcggttttaggccttccggactaccaa

SEQ ID NO: 839 - protein, 782 aa, Alphatorquevirus sp.
MAWWAWRKRWWRPRRRWRWRRPRRRRRVPARRPRRAVRRYRTRTVRRRRRGWRRGYRRRYRLRRYRRRGRRRKKIVLTQWNPQTTRRCIIRGLMPVIWAGMGTGGQNYAVRSDDFVVDKGFGGSFATETFSLRVLYDQHQKGFNRWSHTNEDLDLARYRGCKWTFYRHPDTDFIVYFTNNPPMKTNQYTAPLTTPGMLMRSKYKILIPSFKTKPKGKKTISFRARPPKLFQDKWYTQQDLCPVPLIQLNLTAADFTHPFGSPLTDSPCVRFQVLGDLYNKCLNIDLPQFNADGTVLTTSSYSRGNTEQLQELYKTLFVRKGCGHYWQTFITNTMVKAHIDATQAQKYQQSTSGPESGKDPFPTNPQRSEFETWKKKFTDPRDSNFLFATYHPENITDIIKKMRDNNFSLETGKNDLYGDYQAQYTRNTHLLDYYLGFYSPIFLSSGRSNTEFFTAYRDIVYNPLLDKGTGNMIWFQYHTKTDNIFRKPECHWEILDMPLWALCNGYKEYLESQIKYGDILVEGKVLIRCPYTKPPLADPNNSLAGYVVYNTNFGQGKWIDGKGYIPLRHRSKWYVMLMYQTDVLHDLVTCGPWQYRDDNKNSQLIAKYRFTFYWGGNMVHSQVIRNPCKDTQVSGPRRQPREIQVVDPQLITPPWVLHSFDQRRGMFTETAIRRLLRQPVPGEYAPPALRVPLLFPSSEFQREGEGAESDSSSPAKRPRLWQEEDSQTETHSSEGPAETTRELLERKLREQRVLNLQLQQFAVQLAKTQANLHINPLLYSQQ

SEQ ID NO: 840 - protein, 154 aa, Alphatorquevirus sp.; identical to SEQ ID NO: 43

SEQ ID NO: 841 - protein, 199 aa, Alphatorquevirus sp.; identical to SEQ ID NO: 44

SEQ ID NO: 842 - DNA, 3333 bp, Alphatorquevirus sp.
cgggtgccggaggtgagtttacacaccgcagtcaaggggcaattcgggctcgggactggccgggctatgggcaaggctcttagggttttcgctcttaaaatgcgcttttctcgcatatacaggacgcccaaaccgaaaggtgccctgtcactgccgcctgtgccagctacaccggctaaacgggctcagggtgatatgagctggagaccacccgttcacgatggggcaggtatcgacaggcagttctttgaatcctgctttcgatgccactccggttgttgtggctgtgacaattttattgctcatctcaatttactggctgctcgctatggttttactggggggccggcgccgcctggtggtcctggggcgctccccgcactgagacgggcgctgccggcgcccccggcgccagagcctaaccccgaacagccatggcgtggagctggtggtggcagagatggcgccgacgaccgtggggccgacgaagacgctggaggaaactacgcagccgaagacctagacgccctgttcgccgccgtcgcaggagacgtcgaagaacgagagtaaggaggcgccgcggtggtcggtggggacgcagacgggggcgacgcacttttaagagacgcagacgcaggcgaccctactataaacctaaaaagaaactagttcttacccagtggcacccccagactgtaagacgatgtgccataaggggcatgattcccctaatactgtgcgggcacactacctggaacagaaactatgccatgcgtagcgaagactacccagaacagggtagatatccctttggggggtccgtcagtaccactacgtggtcccttagggtgctgttcgacgagcatcagaaacacagaaatacatggagctaccccaacacccagctagacctagccagatacaaacgctgcagattcacattttacagacacaaaaagactgactttatagtcacctggagccgcaggcccccctttaagcttaacaagtacagcaccgccatgatgcacccaggcatgatgatgcagcagaaatataaattattaatcccaagctgggacactaaacctaagggcagacccaaagtgtccgttacaattaggccccccaccctctttgaggacaagtggtatacgcaacaggatctatgtgatgtaaatcttgtgtcacttgcggtttctgcggcgagcttctcacatccgttcagccaaccgtcaagtaacaacatttgcacaaccttccaggtccttaaagataattactacccagttataggcgttttaactaactataataatcaaaaagcaggcaatgacaaagactacaaagcaaacacagacgacttagaaaactggctgtacaaaacaggcagtctataccacacatttcacacacaagaatacttaaatccaagtagaaaatttgaccaaaaatcaggtgcagcaaaagaaatttatgaaaaagtgtggctaggtaaaaacaatgcaaactttcaaacaggcaaatcgtccctgtttggctttaacacatacaaacctgacaaagacaagttacttaacattagaaagcagtactttgaaacactaacacaagaaaatgacttacacagcaaatatggtaaagccaatgcagagcaatttgagtaccacctggggtggtactcccccatatttctaagcagacacagaagcaacttagagtttgccacagcataccaggatgtcacttacaatccaaactgtgacaggggcaagggcaacagaatctggttccagtacggaaccaagatggacacctggttcagtgagaaacagagcaagtgtgttttagtagatttgcccctgtggtgcatgttctatggctatgctgacttcatagaggcagagctaggcatttctgccgagatccacaatgtaggcatagtagtagtccagtgcccctacacgttcccccccatgtttgacaaaacacagccagacaaaggatacgtgttttatgacatgctgtttgggtcaggaaagatgccagacggttcaggccaagtacccatctactggcagcagagatggtacccccgtatggcctttcagctacaagtcatgcacgacataacactaacagggccctttagctacaaagatgatctagtaatgacagagctggccgccaaatacaggttcgatttcttatggggtggcaatatgatttccgaacagattatcaagaacccgtgcagagacgaaggcatggaaccctcctaccccggtagactccgtagggacatacaaattgttgacccacgctccgtgggccctccctgggttttccatacctgggactacagacggggactctttggttcagaggctatcaaaagagtgtcaacaaaaccgactgatgatgactggattacagtgccttacaaaaagccaaagtattttccccccacagaaagaggagaccaaaatcaagaagaaggctggtctttacaggtgcaaaacctcctcatatcgtcagaagagacagaagcgaaagcccagacggaggagcagcagcagcagcagcagctcctccgactccaactccaagagcaacagcagctcggagtcagactcagactgctctgtcaagagctgctcaaaacgcaagcgggtctccacatgaaccccctgttcttctcccagcaactaacagggtttacatgttccccccagagccggcagttagaccaatcttaggcaggcaggcctgggaggacgagttcaccacctgcaagtactgggaccgtcccgccagggtaaaccacacagacaggccttactacccttgggcacctactccccccccccaatttcatgtatccttcaaacttggctggaaataaacttgcaaggccgtggaactctcgcttgtcggtgtctacctcttaaggtcactaagcactccgagcgttagcgaggagtgcgaccctccgccaaggggcaactccctcggagtccggcgctacgccttcggctgcgccggacacctcggaccccccctccacccgaaacgcttgcgcgtttcggaccttcggcgtcgggggggtaggtttatagtagggtcgcctgcgtctgcgtctcttaaaagtgcgtcgccccccgaagtccgtcactaaccacgtgacctctttccgccaatcagagtctacatcgtgcacttcctgggcatggtctacatcctcatataaagcggtgtacttccgaatggctgagtttttcacgcccgtccgcagcggcagcaccacggagggtgacaaccgcgtcccgaggg

SEQ ID NO: 843 - protein, 774 aa, Alphatorquevirus sp.
MAWSWWWQRWRRRPWGRRRRWRKLRSRRPRRPVRRRRRRRRRTRVRRRRGGRWGRRRGRRTFKRRRRRRPYYKPKKKLVLTQWHPQTVRRCAIRGMIPLILCGHTTWNRNYAMRSEDYPEQGRYPFGGSVSTTTWSLRVLFDEHQKHRNTWSYPNTQLDLARYKRCRFTFYRHKKTDFIVTWSRRPPFKLNKYSTAMMHPGMMMQQKYKLLIPSWDTKPKGRPKVSVTIRPPTLFEDKWYTQQDLCDVNLVSLAVSAASFSHPFSQPSSNNICTTFQVLKDNYYPVIGVLTNYNNQKAGNDKDYKANTDDLENWLYKTGSLYHTFHTQEYLNPSRKFDQKSGAAKEIYEKVWLGKNNANFQTGKSSLFGFNTYKPDKDKLLNIRKQYFETLTQENDLHSKYGKANAEQFEYHLGWYSPIFLSRHRSNLEFATAYQDVTYNPNCDRGKGNRIWFQYGTKMDTWFSEKQSKCVLVDLPLWCMFYGYADFIEAELGISAEIHNVGIVVVQCPYTFPPMFDKTQPDKGYVFYDMLFGSGKMPDGSGQVPIYWQQRWYPRMAFQLQVMHDITLTGPFSYKDDLVMTELAAKYRFDFLWGGNMISEQIIKNPCRDEGMEPSYPGRLRRDIQIVDPRSVGPPWVFHTWDYRRGLFGSEAIKRVSTKPTDDDWITVPYKKPKYFPPTERGDQNQEEGWSLQVQNLLISSEETEAKAQTEEQQQQQQLLRLQLQEQQQLGVRLRLLCQELLKTQAGLHMNPLFFSQQLTGFTCSPQSRQLDQS

SEQ ID NO: 844 - protein, 167 aa, Alphatorquevirus sp.
MGKALRVFALKMRFSRIYRTPKPKGALSLPPVPATPAKRAQGDMSWRPPVHDGAGIDRQFFESCFRCHSGCCGCDNFIAHLNLLAARYGFTGGPAPPGGPGALPALRRALPAPPAPEPNPEQPWRGAGGGRDGADDRGADEDAGGNYAAEDLDALFAAVAGDVEERE

SEQ ID NO: 845 - protein, 159 aa, Alphatorquevirus sp.; identical to SEQ ID NO: 94

SEQ ID NO: 846 - DNA, 3332 bp, Alphatorquevirus sp.
cgggtgccggaggtgagtttacacaccgcagtcaaggggcaattcgggctcgggactggccgggccctgggcaaggctcttaaaaaagctatgtttctacgcagagctcaccagaaaaggatactgctactgcaaattgtgccagctacaccgcaggcacctgccatgagctttcgcgcacccaccattcaaggtggagtccgagaccagcaatggttcgaggcctgtattcgatcacacgccgctttctgtggctgtggcgatcccgtgcttcattttaataacattgctgctcgctttcactatctgcctgctacctcctcgcctctggaccctaccggaggagcgccgccgcgccgcccgcagctacgccgccttgcagcgctcccggcggcgccccccagcacctctgagagccagccatggcgtggtggtggtggagacgatggcgccggtggcccagacgccgctggaggacccgtcgccgacgccgagtacgaaccagaagacctagacgacctgttcgccgctatcgaagcaaatacacagtaaggaggcgaaggcggagagggtggcgagggcgacgtaggcgcagactgtacagacgcagatacactataaggagaaaaagaaagaaactcatactgaaacagtggcagcccgccaatgttagaaaatgcaaaataaggggcctgtttccaatagttatctgtggacacggcaagagtgccaataactatgccctacactcggacgacgtactaccaatgagacaggcttttggaggggctctaagcactgtatcttttagcctaaaagtactgtatgatcagtatttaagacacctgaacagatggagcacctcaaacgatgtgctagaccttgccaggtacctaggatgcaccttttggttttacagagacaaaaaaactgactacttagtgcagtatgacatctctgctccctacaagctagacaaagacagcggaccgtcctaccatccaggagtactcatgcaagccaaacacaaagtactagtgcccagttttgacacgcaccccaaaggaaaagctaaagtaaaaattagaattaagccccccaaactttttatagataagtggtactctcaagaggatctgtgtaccgttaatcttgtaacatttgtggtcagcctagcttccttctcacatccgttctgcccaccactaacgaacaacccttgtgtaaccttccaagtgttgaacaacttctacaattccgttataggttcctcaattaatgttgcagacactacagtaaactcagtcttcaataactttttatataacaaaggagccttttaccaacaagtactagtagactcttacattaaagaaattaaaacaaatcctgatggctctcctgtagttgcaggccctaacgatagaccctcaacaagcgaaatgagtgcttataacgaatgggtaaaatctaaatttaaagtaccaggaacatctgttcactacaacttttgcacatacaaacctgacagtgccaaattaaatacacttagacaatactactttcattgggaaactgcacagtccacaaaccataaatttaatgtagaacacgtaccacacgcgggcacaaaacctacaaaagactggtgggagtatagaacaggcctattttcacctatatttcttagtccatacagaaccagtcccatagacagctggttgctggcatacagagacgtgtcctacaatccactaaatgacaagggagtaggcaaccgagtatggatgcagagtctagtaaaaccagacacccagttcacactgccctcatgtgtatttgtactagaagacaaacccctgtggtgctgtttctatggctatactgactttataaagagtgtcagagagggccaagacatagactttgaaaacattatttgcattcagtgtccttacacagagcctcctctatatgaaaagcacaaccccaacatgggcttcgtagtatatgacagcaactttggcaatggcaaatggctagacggaaccgggttcgtcccggtagaataccagtgccgctggcggccctgcatagctttccagcaacaggtactaacagacattaccatgagcgggcccttcagctacaaagacgatgttaaaaacacctgcatacaggccaaatacagatttgactttaaatggggcggcaatattctttatcagcagaccatcagaaacccatgtaaagacggacaagctaccgattcccatagacagcctagagacgtacaagtcactgacccgcttaccatgggaccccgatacgctttccaccaatgggactggcgacgtgggtggcttagtgacaaagctctcaaaagaatgctccagaaaccgctcgattttgaactgtatccaatcaatccaaagagacctagactattccctcccacagaagcaggagaaggagaggtcccaaaagaaagctcattttcagaggaagaaagcgagccgtcctcgcaagaagagacgaggccggagaggctccagctcaagctccgacagcagctccgagagcagcgagagctccgagtccacctcaagcacctcttccagcagctcctcaagacacaagcggggctccacctcaacccgctcttattcaaccagcaataaacaaagttcttctgtttccagaaatgggtccaaagcccgctcctactagtggagactgggaaacagaataccaggcctgtaaattctgggacagacctcccagaaaatttctcaccgatacacccttttatccctggatgcctccggcacccccaaaattctctgttagtttcaaactaggcttcaaaccctaaataaacaaggccatacactgttcacttgtcggtgtctacctctataagtcactaagcactccgagcgaagcgaggagtgcgacccccctacccggtagcaacttcttcggagtccggcgctacgccttcggctgcgccggacacctcagaccccccctccacccgaaacgcttgcgcgtttcggaccttcggcgtcgggggggtcgggggctttattaaacagactccgagttgccattggacactgtagctgtgaatcagtaacgaaagtccccggccccccccccgaagttcgtcactaaccacgtgactcccgcaggccaaccactcgctactacgtacacttcctgggctggacctttcccgagatataagtaagtgcacttccgaatggctgagttttccacgcccgtccgcagcgaggtagccacggagggaataccgcgcgtcccgaggg

SEQ ID NO: 847 - protein, 752 aa, Alphatorquevirus sp.
MAWWWWRRWRRWPRRRWRTRRRRRVRTRRPRRPVRRYRSKYTVRRRRRRGWRGRRRRRLYRRRYTIRRKRKKLILKQWQPANVRKCKIRGLFPIVICGHGKSANNYALHSDDVLPMRQAFGGALSTVSFSLKVLYDQYLRHLNRWSTSNDVLDLARYLGCTFWFYRDKKTDYLVQYDISAPYKLDKDSGPSYHPGVLMQAKHKVLVPSFDTHPKGKAKVKIRIKPPKLFIDKWYSQEDLCTVNLVTFVVSLASFSHPFCPPLTNNPCVTFQVLNNFYNSVIGSSINVADTTVNSVFNNFLYNKGAFYQQVLVDSYIKEIKTNPDGSPVVAGPNDRPSTSEMSAYNEWVKSKFKVPGTSVHYNFCTYKPDSAKLNTLRQYYFHWETAQSTNHKFNVEHVPHAGTKPTKDWWEYRTGLFSPIFLSPYRTSPIDSWLLAYRDVSYNPLNDKGVGNRVWMQSLVKPDTQFTLPSCVFVLEDKPLWCCFYGYTDFIKSVREGQDIDFENIICIQCPYTEPPLYEKHNPNMGFVVYDSNFGNGKWLDGTGFVPVEYQCRWRPCIAFQQQVLTDITMSGPFSYKDDVKNTCIQAKYRFDFKWGGNILYQQTIRNPCKDGQATDSHRQPRDVQVTDPLTMGPRYAFHQWDWRRGWLSDKALKRMLQKPLDFELYPINPKRPRLFPPTEAGEGEVPKESSFSEEESEPSSQEETRPERLQLKLRQQLREQRELRVHLKHLFQQLLKTQAGLHLNPLLFNQQ

SEQ ID NO: 848 - protein, 161 aa, Alphatorquevirus sp.
LGKALKKAMFLRRAHQKRILLLQIVPATPQAPAMSFRAPTIQGGVRDQQWFEACIRSHAAFCGCGDPVLHFNNIAARFHYLPATSSPLDPTGGAPPRRPQLRRLAALPAAPPSTSESQPWRGGGGDDGAGGPDAAGGPVADAEYEPEDLDDLFAAIEANTQ

SEQ ID NO: 849 - protein, 60 aa, Alphatorquevirus sp.; identical to SEQ ID NO: 504

SEQ ID NO: 850 - DNA, 3327 bp, Alphatorquevirus sp.
tcaaaggtcaggggtcagccttccgctttagtcaaggggcaattcgggctcgggactggccgggctatgggcaaggctcttaaaaatgcacttttctaggatatccagaaagaaaaggctgctgctactgcaaacagtgccagctccacagaaaactgtcaaacttttaagaggtatgtggagtcctcccactgacgatgaacatatccgcgagcgaaaatggttcctcgccactgtttactctcactctgctttctgtggctgcaatgatcctgtcggtcacctctgtcgcttggctactctttctgaccgtccggagaacccgggaccctccgggggacgtcgtgctcctttcatcggggtcctacccgctctcccggctgctaccgagcagcccggtgatcgagcaccatggcctatgggtggtggaggagacgccgcaggagatggaagagatggaggagaaggcccaggtggagacgcccatggaggacccgcagacgcagacctgctagacgccgtggacgccgcagaacagtaaggagacgcaggcgcgggaggtggaggaggcgttatagaaagtggaggagaaagggcagacgcaggagaaaaaagaaacttataataagacaatggcagccaaactacaccagaaaatgcaacatagtaggctacatgccagtaattatgtgtggagaaaacactctaataagaaactatgccacacacgcagacgactgctactatccgggaccctttgggggcggcatggccacccagaaatttacactcagaatcctgtacgatgactacaaaaggtttatgaactactggacctcctcaaacgaggacctagacctctgtagatacaggggagtcaccctatacttcttcagacacccagaagtagactttataataattataaacaccacacctccgtttacagacacagagatcacaggacctagcatacatccgggcatgatggccctaaacaagagagccaggttcattcccagcctaaagactagacctagcagaagacacatagttaaaattaaagtgggggcccccaaactgtacgaggacaagtggtacccccagtcagaactctgtgacatgcccctcctaaccgtctacgctaccgcagcggatatgcaatatccgttcggctcaccactaactgacactcctgttgtaagcttccaagtattgcgcagcatgtacaacgacgcccttagcatacttccctctaactttgaagatgacaatagtacaggcaaaaaactttacaatgaaatatgtagttatttaccatactacaacacaacagaaacaatagcacagctaaagagatatatagaaaatactgaaaaaactacacaaatgcccaatccatggcaatcaaagtatgttaatactactccctttaccactgcagcaaatactattacacaaaaaacatacaccacattttcagacacctggtacaggggcacagcatacacacaagctatcactagtgtgccactcgccgcagcaaaattatatgaaagccaaacaaaaaaactgctgtctacaacattcacaggagggtccccgtacctagagtaccacggaggcctgtacagctccatatggctatcagcaggccgatcctactttgaaacaaagggagcatacacagacatctgctacaacccctacacagacagaggagaaggcaacatggtgtggatagactggctatcaaaaacagactccatttatgacaagaaccgcagcaaatgccttatagaaaagctacccctatgggcagcagtatacgggtacgcagaatactgtgccaagagcaccggagactcaaacatagacatgaacgccagagtagtgataaggtgcccctacaccaccccccagatgatagacaccagcaacgaactgaggggcttcatagtatacagctttaactttggcaggggcaaaatgcccggaggcagcagcgaggtacccataagaatgagagccaagtggtacccctgtctctttcaccaaaaagaggttctagaagccatagggcagtcgggccccttcgcctaccactgtgaccaaaagaaagcagtgctaggtctaaaatacaggtttcactggatatggggcggaaaccccgtgtttccacaggttgttagaaacccctgcaaagacacacacggttcctcgggccctagaaagcctcgctcagtacaaatcattgacccgaagtacaacacaccagagctcacaatccacgcgtgggatttcagacgtggcttctttggcccaaaagctattaagagaatgcaacaacaaccaacagatgctgaacttcttccaccaggccgcaagaggagcaggcgagacaccgaagccctccaaagcagccaagaaaagcaaaaagaaagcttacttttcaaacagctccagctccagcgacgagtacccccgtgggaaagctcgcaggcctcggagacagaggcagagagcgaaaaagagcaagagggaaccctctcccagcagctccgagagcagcttcaccagcaaaagctcctcggcaagcagctcagggaaatgttcctacaactccacaaaatccaacaaaatcaacacgtcaaccctaccttattgccaagggatcaggctttaatctgctggtctcagattcagtaattaacatgtttggagaccctaaaccctacaaaccctccagcaacgactggaaagaagagtacgaggccgctaaatgttgggacaggccccccagatctaaccttagagacaaacccttttatccctgggcccccccaaacaatccctacaaagtaaactttaaactaggcttccaataaagctaggccgtgggagtttcacttgtcggtgtctgcttcttaaagtcgccaagcactccgagcgtaagcgaggagtgcgaccctcccccccggtagcaacttcttcggagtccggcgctacgccttcggctgcgccggacacctcagaccccccctccacccgaaacgcttgcgcgtttcggaccttcggcgtcgggggggtcgggagctttattaaacagactccgagttgccattggacactggagctgtgaatcagtaacgaaagtgagtggggccagacttcgccataaggcctttatcttcttgccattggtcagtgtcgggggtcgccataggcttcgggctcggttttaggccttccggactaccaaaatggcggattccgtgacgtcatggccgccattttgagtaaggcggaacaggctgtcaccccgtg

SEQ ID NO: 851 - protein, 765 aa, Alphatorquevirus sp.
MAYGWWRRRRRRWKRWRRRPRWRRPWRTRRRRPARRRGRRRTVRRRRRGRWRRRYRKWRRKGRRRRKKKLIIRQWQPNYTRKCNIVGYMPVIMCGENTLIRNYATHADDCYYPGPFGGGMATQKFTLRILYDDYKRFMNYWTSSNEDLDLCRYRGVTLYFFRHPEVDFIIIINTTPPFTDTEITGPSIHPGMMALNKRARFIPSLKTRPSRRHIVKIKVGAPKLYEDKWYPQSELCDMPLLTVYATAADMQYPFGSPLTDTPVVSFQVLRSMYNDALSILPSNFEDDNSTGKKLYNEICSYLPYYNTTETIAQLKRYIENTEKTTQMPNPWQSKYVNTTPFTTAANTITQKTYTTFSDTWYRGTAYTQAITSVPLAAAKLYESQTKKLLSTTFTGGSPYLEYHGGLYSSIWLSAGRSYFETKGAYTDICYNPYTDRGEGNMVWIDWLSKTDSIYDKNRSKCLIEKLPLWAAVYGYAEYCAKSTGDSNIDMNARVVIRCPYTTPQMIDTSNELRGFIVYSFNFGRGKMPGGSSEVPIRMRAKWYPCLFHQKEVLEAIGQSGPFAYHCDQKKAVLGLKYRFHWIWGGNPVFPQVVRNPCKDTHGSSGPRKPRSVQIIDPKYNTPELTIHAWDFRRGFFGPKAIKRMQQQPTDAELLPPGRKRSRRDTEALQSSQEKQKESLLFKQLQLQRRVPPWESSQASETEAESEKEQEGTLSQQLREQLHQQKLLGKQLREMFLQLHKIQQNQHVNPTLLPRDQALICWSQIQ

SEQ ID NO: 852 - protein, 161 aa, Alphatorquevirus sp.
LAGLWARLLKMHFSRISRKKRLLLLQTVPAPQKTVKLLRGMWSPPTDDEHIRERKWFLATVYSHSAFCGCNDPVGHLCRLATLSDRPENPGPSGGRRAPFIGVLPALPAATEQPGDRAPWPMGGGGDAAGDGRDGGEGPGGDAHGGPADADLLDAVDAAEQ

SEQ ID NO: 853 - protein, 66 aa, Alphatorquevirus sp.
LLVSDSVINMFGDPKPYKPSSNDWKEEYEAAKCWDRPPRSNLRDKPFYPWAPPNNPYKVNFKLGFQ

SEQ ID NO: 854 - DNA, 3327 bp, Alphatorquevirus sp.
tcaaaggtcaggggtcagccttccgctttagtcaaggggcaattcgggctcgggactggccgggctatgggcaaggctcttaaaaatgcacttttctaggatatccagaaagaaaaggctgctgctactgcaaacagtgccagctccacagaaaactgtcaaacttttaagaggtatgtggagtcctcccactgacgatgaacatatccgcgagcgaaaatggttcctcgccactgtttactctcactctgctttctgtggctgcaatgatcctgtcggtcacctctgtcgcttggctactctttctgaccgtccggagaacccgggaccctccgggggacgtcgtgctcctttcatcggggtcctacccgctctcccggctgctaccgagcagcccggtgatcgagcaccatggcctatgggtggtggaggagacgccgcaggagatggaagagatggaggagaaggcccaggtggagacgcccatggaggacccgcagacgcagacctgctagacgccgtggacgccgcagaacagtaaggagacgcaggcgcgggaggtggaggaggcgttatagaaagtggaggagaaagggcagacgcaggagaaaaaagaaacttataataagacaatggcagccaaactacaccagaaaatgcaacatagtaggctacatgccagtaattatgtgtggagaaaacactctaataagaaactatgccacacacgcagacgactgctactatccgggaccctttgggggcggcatggccacccagaaatttacactcagaatcctgtacgatgactacaaaaggtttatgaactactggacctcctcaaacgaggacctagacctctgtagatacaggggagtcaccctatacttcttcagacacccagaagtagactttataataattataaacaccacacctccgtttacagacacagagatcacaggacctagcatacatccgggcatgatggccctaaacaagagagccaggttcattcccagcctaaagactagacctggcagaagacacatagttaaaattaaagtgggggcccccaaactgtacgaggacaagtggtacccccagtcagaactctgtgacatgcccctcctaaccgtctacgctaccgcagcggatatgcaatatccgttcggctcaccactaactgacactcctgttgtaagcttccaagtattgcgcagcatgtacaacgacgcccttagcatacttccctctaactttgaagatgacaatagtacaggcaaaaaactttacaatcaaatatgtagttatttaccatactacaacacaacagaaacaatagcacagctaaagagatatatagaaaatactgaaaaaactacacaaatgcccaatccatggcaatcaaagtatgttaatactactccctttaccactgcagcaaatactattacacaaaaaacatacaccacattttcagacacctggtacaggggcacagcatacacacaagctatcactagtgtgccactcgccgcagcaaaattatatgaaagccaaacaaaaaaactgctgtctacaacattcacaggagggtccccgtacctagagtaccacggaggcctgtacagctccatatggctatcagcaggccgatcctactttgaaacaaagggagcatacacagacatctgctacaacccctacacagacagaggagaaggcaacatggtgtggatagactggctatcaaaaacagactccatttatgacaagaaccgcagcaaatgccttatagaaaagctacccctatgggcagcagtatacgggtacgcagaatactgtgccaagagcaccggagactcaaacatagacatgaacgccagagtagtgataaggtgcccctacaccaccccccagatgatagacaccagcaacgaactgaggggcttcatagtatacagctttaactttggcaggggcaaaatgcccggaggcagcagcgaggtacccataagaatgagagccaagtggtacccctgtctctttcaccaaaaagaggttctagaagccatagggcagtcgggccccttcgcctaccactgtgaccaaaagaaagcagtgctaggtctaaaatacaggtttcactggatatggggcggaaaccccgtgtttccacaggttgttagaaacccctgcaaagacacacacggttcctcgggccctagaaagcctcgctcagtacaaatcattgacccgaagtacaacacaccagagctcacaatccacgcgtgggatttcagacgtggcttctttggcccaaaagctattaagagaatgcaacaacaaccaacagatgctgaacttcttccaccaggccgcaagaggagcaggcgagacaccgaagccctccaaagcagccaagaaaagcaaaaagaaagcttacttttcaaacagctccagctccagcgacgagtacccccgtgggaaagctcgcaggcctcggagacagaggcagagagcgaaaaagagcaagagggaaccctctcccagcagctccgagagcagcttcaccagcaaaagctcctcggcaagcagctcagggaaatgttcctacaactccacaaaatccaacaaaatcaacacgtcaaccctaccttattgccaagggatcaggctttaatctgctggtctcagattcagtaattaacatgtttggagaccctaaaccctacaaaccctccagcaacgactggaaagaagagtacgaggccgctaaatgttgggacaggccccccagatctaaccttagagacaaacccttttatccctgggcccccccaaacaatccctacaaagtaaactttaaactaggcttccaataaagctaggccgtgggagtttcacttgtcggtgtctgcttcttaaagtcgccaagcactccgagcgtaagcgaggagtgcgaccctcccccccggtagcaacttcttcggagtccggcgctacgccttcggctgcgccggacacctcagaccccccctccacccgaaacgcttgcgcgtttcggaccttcggcgtcgggggggtcgggagctttattaaacagactccgagttgccattggacactggagctgtgaatcagtaacgaaagtgagtggggccagacttcgccataaggcctttatcttcttgccattggacagtgtcgggggtcgccataggcttcgggctcggttttaggccttccggactaccaaaatggcggattccgtgacgtcatggccgccattttgagtaaggcggaacaggctgtcaccccgtg

SEQ ID NO: 855 - protein, 765 aa, Alphatorquevirus sp.
MAYGWWRRRRRRWKRWRRRPRWRRPWRTRRRRPARRRGRRRTVRRRRRGRWRRRYRKWRRKGRRRRKKKLIIRQWQPNYTRKCNIVGYMPVIMCGENTLIRNYATHADDCYYPGPFGGGMATQKFTLRILYDDYKRFMNYWTSSNEDLDLCRYRGVTLYFFRHPEVDFIIIINTTPPFTDTEITGPSIHPGMMALNKRARFIPSLKTRPGRRHIVKIKVGAPKLYEDKWYPQSELCDMPLLTVYATAADMQYPFGSPLTDTPVVSFQVLRSMYNDALSILPSNFEDDNSTGKKLYNQICSYLPYYNTTETIAQLKRYIENTEKTTQMPNPWQSKYVNTTPFTTAANTITQKTYTTFSDTWYRGTAYTQAITSVPLAAAKLYESQTKKLLSTTFTGGSPYLEYHGGLYSSIWLSAGRSYFETKGAYTDICYNPYTDRGEGNMVWIDWLSKTDSIYDKNRSKCLIEKLPLWAAVYGYAEYCAKSTGDSNIDMNARVVIRCPYTTPQMIDTSNELRGFIVYSFNFGRGKMPGGSSEVPIRMRAKWYPCLFHQKEVLEAIGQSGPFAYHCDQKKAVLGLKYRFHWIWGGNPVFPQVVRNPCKDTHGSSGPRKPRSVQIIDPKYNTPELTIHAWDFRRGFFGPKAIKRMQQQPTDAELLPPGRKRSRRDTEALQSSQEKQKESLLFKQLQLQRRVPPWESSQASETEAESEKEQEGTLSQQLREQLHQQKLLGKQLREMFLQLHKIQQNQHVNPTLLPRDQALICWSQIQ

SEQ ID NO: 856 - protein, 161 aa, Alphatorquevirus sp.; identical to SEQ ID NO: 852

SEQ ID NO: 857 - protein, 66 aa, Alphatorquevirus sp.; identical to SEQ ID NO: 853

SEQ ID NO: 858 - DNA, 3321 bp, Gammatorquevirus sp.
cgggagcccgaggtgagtgaaaccaccgaggtctaggggcaattcgggctagggcagtctagcggaacgggcaagaaacttaaaactattattctttcagatgctgtgcagcaaagacttctttaataaaagtgaatacaacaatgaaaccaaagaacaaatgtggctaagtattataggagacgcccatgactccatttgcagatgccaattttgttttgcacacttactagcttgtatttttcccattggacacacagacagaaatcttacaattaatcaaatacttgcaagagactacaaagaaaaatgccattctggtggaggaggagacgccgttggtggaatggcagaacccgctaccaaagaagaaccagaagatacagaagaaaacccagatacagaagacgccgccttcgcagagctcctcgccgccgcagaaaaagaagacgctaccacaaggtaagaagaaagaaaaagactataccaattagacagtggcaacctgactctattgtaaactgcaaaattaaaggcagcactgtcttagtactaggaggtgaaggaaaacaactagtatgctacacaaatgtaaaacaatcatgggtgcccccaaaggcaccaggaggaggaggatttggctgtgaaatatttagtctcggcagtctatatgaacaatataaattccatcaaaacatatggacaaaaacaaatatagccaaagacttgtgtagattcatgtgggtaaaactaaccttttacagacacccagacacagactttattatttcataccagagacaaccaccatttgatattaaaaaagaaacatacacatactgtcatccacaactaatgctactagcaaaacataaaatactactactaagcaaattcacaaagcctacaggaagaataaaaaagactaaaaaaatcaaaccacctaaacaaatgataacaaagtggttctttcaagaacacttttccacagaaccattattacttctgcaagcagctgcctgcaactttaactactctaacttaggctgctgtaatactaatccagtatctaccttcttctacttaaacacagggttttacaaacaagctaactgggatgctaacactcctacagggtatcagccataccctacagtagtaggtacactatacttctggtcaaaaactgcctgggataaaaaaacagaaaaaaagtcagatcccaaatttaaacctacaacatatcaaaaaccacaaaattacaatgacagtacttcatacacaaaaggctggtttcaatcagcaatactatcaagctctcaagtaacaacagatgaagaaggcacacatcctttaggcttgcaccctacaaacatatgtagatacaatccagcactagactcaggcaaaggaaatgctgtatggcttgtttctaactactccactgactggagaaaaccaactacagacagaacattaatttatgaaggcctaccactgtacttaatgttatatggcttcctaagctatgtacaatatgtaaagaaagcaaaagactttctaacacattacatagtagcaattgactgtccaacagccttttataaatatgctcaagtaggagctgaaggccccatagtaccacttgacaacacatttgtaaatggacaggcaccatacagagaagacctaacagatgccatgaaaatacactgggcaccaaatgtatacaatcaactagaaatattaaacacactagttgaaagtggaccactagttccaaaatactctcaaaacaaaaatagtacatgggaacttgactgtttttataattttttctttaagtggggcggtccagaacttacagaaccagccattgcagacccacaccttcaggcaacttatgaagttcccgatactttcaaagcagcagtacaaatcagggacccaaggaaacaaaaagctagctcaattttacacccatgggacatcagacatggaatatttacaaaaacagctcttaaaagaatgtactcaaacctctcaactgactcaactttccaacctgatacagaacaaattcaaccaaagaaaaagaaagttacaggccccacactccaaatcccacaagaagaagaggaggatctccaagcctgtctcctctcactctacgaagaaagtaccttccaagaaacacagaaccaagacatccagcagctcatccagcagcagcacgaaaagcagcagcagctcaagtggaacatcctcagagtcctctcagacatgaaagaacaacagaatctactcaaactacaaacaggcttcctaaactaaccagatttaaaaagggctttgaaagagaaacagaaaaccaactagccagtgccttttctagaccccctagactttttaaagaagacaaaccattttacccatggctaccccaaccaacccccattgtaaactttcaccttaattacaaattctaggcctacaatgtacacttagtggagtatgtttatataagtttgcacccaaaaaaaactgtaaaataaaaaaaaaaaaaaaaaaaataaaaaattgcaaaatttcggcgctcgcgcgcgctgcgcgcgcgcgagcgccgtcacgcgccggcgctcgcgcgccgcgcgtatgtgctaacacaccacgcacctagattggggtgcgcgcgctagcgcgcgcaccccaatgcgccccgccctcgttccgacccgcttgcgcgggtcggaccacttcgggctcgggggggcgcgcctgcggcgcttatttactaaacagactccgagtcgccatttggcccccctaagctccgcccccctcatgaatattcataaaggaaaccacaaaattagaattgccgaccacaaactgccatatgctaattagttccccttttacacagtaaaaaggggaagtggggggggggggggggggggccccccccccccccccccggggggggggggggggggggggggggggggggggggggggggggggggggggggcccccccccacaccccccggggggggggcaaagccccccccccgcaccccccctacgtcacagactccgcccccgccgccatcttgggtgcggctgggcggagactaaactggcgggaaccaataaatttatactttcactttccaattaaaacctgccacatcacactaaaggggaggagccaataaacctatataactaactacactgacgaatggctgagtttaccccgctagacggtgcagggaccggatcgagcgcagcgaggaggtccccagctgcccgtggg

SEQ ID NO: 859 - protein, 674 aa, Gammatorquevirus sp.
MPFWWRRRRRWWNGRTRYQRRTRRYRRKPRYRRRRLRRAPRRRRKRRRYHKVRRKKKTIPIRQWQPDSIVNCKIKGSTVLVLGGEGKQLVCYTNVKQSWVPPKAPGGGGFGCEIFSLGSLYEQYKFHQNIWTKTNIAKDLCRFMWVKLTFYRHPDTDFIISYQRQPPFDIKKETYTYCHPQLMLLAKHKILLLSKFTKPTGRIKKTKKIKPPKQMITKWFFQEHFSTEPLLLLQAAACNFNYSNLGCCNTNPVSTFFYLNTGFYKQANWDANTPTGYQPYPTVVGTLYFWSKTAWDKKTEKKSDPKFKPTTYQKPQNYNDSTSYTKGWFQSAILSSSQVTTDEEGTHPLGLHPTNICRYNPALDSGKGNAVWLVSNYSTDWRKPTTDRTLIYEGLPLYLMLYGFLSYVQYVKKAKDFLTHYIVAIDCPTAFYKYAQVGAEGPIVPLDNTFVNGQAPYREDLTDAMKIHWAPNVYNQLEILNTLVESGPLVPKYSQNKNSTWELDCFYNFFFKWGGPELTEPAIADPHLQATYEVPDTFKAAVQIRDPRKQKASSILHPWDIRHGIFTKTALKRMYSNLSTDSTFQPDTEQIQPKKKKVTGPTLQIPQEEEEDLQACLLSLYEESTFQETQNQDIQQLIQQQHEKQQQLKWNILRVLSDMKEQQNLLKLQTGFLN

SEQ ID NO: 860 - protein, 121 aa, Gammatorquevirus sp.
MLCSKDFFNKSEYNNETKEQMWLSIIGDAHDSICRCQFCFAHLLACIFPIGHTDRNLTINQILARDYKEKCHSGGGGDAVGGMAEPATKEEPEDTEENPDTEDAAFAELLAAAEKEDATTR

SEQ ID NO: 861 - protein, 111 aa, Gammatorquevirus sp.
LSPLTLRRKYLPRNTEPRHPAAHPAAARKAAAAQVEHPQSPLRHERTTESTQTTNRLPKLTRFKKGFERETENQLASAFSRPPRLFKEDKPFYPWLPQPTPIVNFHLNYKF

SEQ ID NO: 862 - DNA, 3320 bp, Alphatorquevirus sp.
tggccgccataggtgagtttacacaccgcagtcaaggggcaattcgggctcgggactggccgggccccgggcaaggctcttaaaaaatgcactttcgcagagtgcaagcgaaaaggaaactgctactgcaaactgtgcgagctccaccgaaggcacctgccatgagcttcaccacacctactattaatgccagcattcgagagcagcaatggttcgagtccatccttagatcacaccagtcgttctgtggctgtggtgatcccgtgcttcattttactaaccttgctactcgctttaactatctgtctgctacctcttcgcctctggaccctcccggcccaccgccgcgaggccgccagacgctccgccgcctcccggcgctcccttcagcccccgcgaccccttctagagaaccagcatggcctactggttcagaaggtggggctggaggccgaggcgccggtggagaaggtggcgccgccgtcgaaggagactaccgagaagaagaactagacgagctgttcgcggccttggaagaagacgcaaaccaagggtaaggaggcgccgcagaactcgcaaacgtacctacagacgggggtggagacgcagaaggtacataagacgagggcgacgcaaaaagaaacttgtactaactcagtggaacccggcagtagttaagaggtgcaacattaagggcggacttccaataattatatgcggagagcccagggcagcctttaactatggctaccacatggaggactacactcctcaacctttccccttcggagggggaatgagcacagtgactttctctctgaaaggcttgtatgaccagtacctgaaacaccaaaacaggtggactttttcaaacgaccagctagacctggccagatacaggggctgtaaactaaggttctacagaagccccgtttgtgactttatagtacactacaacctaatacctccactaaaaatgaaccagtttacaagtcccaacacgcacccgggactacttatgctcagcaaacacaagataataattcccagctttcaaacaagacctgggggcagacgctttgttaaaataagacttaatccccccaaactatttgaagacaagtggtacactcagcaagacctgtgcaaggttccgctcgttagtattacagcaactgcggctgacttgcggtatccgttctgctcaccacaaacgaacaacccttgcaccaccttccagacactgcgcaagaactaccacacagttataggaacttcctttaaggaccaagagtccacacaagagtttgaaaaatggttatatctaacaccatctcactatcaaacatttgccacagaggagagactaggcagaatacctagtacatttccagatggaagcaacaacacagaaaaaaacgcatggcaacaagcatggtctaaacaagcacaaccctactcaccagaagcataccctcaaaccaccattacaggaatgcagacagatggcactataacaaatgaaagtggacaaatgtacaaagtgccatatgacagtaatttcggcttcccaacttacataccacaaataaggtacatacatgctagaagacaaaaaaacttctactttgaagttaataatcccataagtaaaaaaatatggccacaacccagtacaacaacaccctcagtagattactatgaatacagactgggatggttcagtaacatatttataggccccaacagatacaacttacagttccaaacagcatacgtagacaccacatataacccactcatggacaaaggcaagggcaacaaaatatggttccaatacctaagtaaaaaaggcacagattacaatgaaaaacaatgctactgcacccttgaagacatgcccctctgggcaatgtgctttggatacacagactatgtagagactcaactaggaccaaatgtagaccatgaaacagctggactcataattataatctgtccttacactcaaccaccaatgtatgacaaacaaaggcctaactggggatacgtagtatatgacacaaactttggcaatggaaaaatgccctccggaactggccaagtcccagtatactggcaatgcagatggagacccatgctgtggttccaagagcaagtactaaatgacatctcaaagactggaccgtacgcctacagagacgaatataaaaatgtacagctgactatgtactacaactttatttttaactgggggggcgacatgtattacccacaggtcgttaaaaacccctgtggagactccggaatcgttcccggttccggtagattcactcgagaagtacaagtcgttagcccgctttccatgggaccggcctacatcttccactacttcgacaccaggaggggcttctttaatgaaaaagctcttaaaagaatgcaacaacaacaagaatttgatgaatcttttacattcaaacctaagagacccaaactttctacagcagccacagaaatcctccagcacgaagaagactcgtcttcaggggaaggaaaatcgccactacagcaagaagagaaagaagcagaagtcctcgaaacgccacaagtacagctccagctccagcgaaacatccaggagcagctcgcaatcaagcagcagctccaattcctcctgctccaactcctcaagacccaatccaatttgcacttaaacccacaatttttaagcccttcataaaatatgacatgtttggggacccccttcctcaccccccaacagcccaagactgggccacagaatatgagtgctgtaaggcgtttaacagaccacctagaaacaacctaaaagacacccccttctacccctgggtccctaaacctaaacctcaattccgtgtatcttttaaacttggttttcaataaacaaggccgtgggagtctcacttgtcggtgtcaacctcttaaggtcactaagcactccgagcgtaagcgaggagtgcgaccctcccccctggggcaactccctcgaagtccggcgctacgcgcttcgcgctgcgccggacatctcggaccccccctccacccgaaacgcttgcgcgtttcggaccttcggcgtcgggggggtcgggggctttactaaacagactccgaggtgccattggacactgagggggtgaacagcaacgaaagtgagtggggccagacttcgccataaggcctttatcttcttgccatttgtcagtgtccggggtcgccataggcttcggcctccattttaggccttccggactaccaaaatggcggattccgtgacgtca

SEQ ID NO: 863 - protein, 773 aa, Alphatorquevirus sp.
MAYWFRRWGWRPRRRWRRWRRRRRRLPRRRTRRAVRGLGRRRKPRVRRRRRTRKRTYRRGWRRRRYIRRGRRKKKLVLTQWNPAVVKRCNIKGGLPIIICGEPRAAFNYGYHMEDYTPQPFPFGGGMSTVTFSLKGLYDQYLKHQNRWTFSNDQLDLARYRGCKLRFYRSPVCDFIVHYNLIPPLKMNQFTSPNTHPGLLMLSKHKIIIPSFQTRPGGRRFVKIRLNPPKLFEDKWYTQQDLCKVPLVSITATAADLRYPFCSPQTNNPCTTFQTLRKNYHTVIGTSFKDQESTQEFEKWLYLTPSHYQTFATEERLGRIPSTFPDGSNNTEKNAWQQAWSKQAQPYSPEAYPQTTITGMQTDGTITNESGQMYKVPYDSNFGFPTYIPQIRYIHARRQKNFYFEVNNPISKKIWPQPSTTTPSVDYYEYRLGWFSNIFIGPNRYNLQFQTAYVDTTYNPLMDKGKGNKIWFQYLSKKGTDYNEKQCYCTLEDMPLWAMCFGYTDYVETQLGPNVDHETAGLIIIICPYTQPPMYDKQRPNWGYVVYDTNFGNGKMPSGTGQVPVYWQCRWRPMLWFQEQVLNDISKTGPYAYRDEYKNVQLTMYYNFIFNWGGDMYYPQVVKNPCGDSGIVPGSGRFTREVQVVSPLSMGPAYIFHYFDTRRGFFNEKALKRMQQQQEFDESFTFKPKRPKLSTAATEILQHEEDSSSGEGKSPLQQEEKEAEVLETPQVQLQLQRNIQEQLAIKQQLQFLLLQLLKTQSNLHLNPQFLSPS

SEQ ID NO: 864 - protein, 156 aa, Alphatorquevirus sp.
MHFRRVQAKRKLLLQTVRAPPKAPAMSFTTPTINASIREQQWFESILRSHQSFCGCGDPVLHFTNLATRFNYLSATSSPLDPPGPPPRGRQTLRRLPALPSAPATPSREPAWPTGSEGGAGGRGAGGEGGAAVEGDYREEELDELFAALEEDANQG

SEQ ID NO: 865 - protein, 58 aa, Alphatorquevirus sp.
MFGDPLPHPPTAQDWATEYECCKAFNRPPRNNLKDTPFYPWVPKPKPQFRVSFKLGFQ

SEQ ID NO: 866 - DNA, 3319 bp, Alphatorquevirus sp.
gcgctacgcgcggtgagtttacacaccgcagtcaaggggcaattcgggctcgggactggccgggctgtgggcaaggctcttagggttatcgctcttaaaaagctatgtttgttggcagggtctggagaaagaaaagggaagtgctactgtccgcactgcgagctacaaaaacgcctaggcgggctatgagctggcgaccaccggtccaccatgccgcggagatcgatagaaactggtatcaatcagtttataagtcccacgccgcttgctgtggctgtggcaattttgtgctgcatcttaatactctggctgatcgctacgggtttgcttcggggccatcaccgccaggtgatccgggcccgcgtcccccggcgcagctaagaaggcacaacgctaccgagaaccccaatagcgctcccagagccctgccatggcgtggggatggtggagaagacgctggacgtggcccagaaggaggcgatggaggcaatggaggcgccgcagacgactaccgagaagaagacctagacgccctgttcgccgccgtcgacagagacgagtaaggaggcgcttttaccgggggaggcgaaggggatggcgacgcagacggtacataagacgcagacgcagagtaagacgcaaaaaactagtactgactcagtggcagccagccaccagacgcaaatgtgttataaagggggttctgccccttgtgtggtgcggctacctccgcagcggcagaaactacgccctgcactctgacgataccccaaaacaaggagagccctttggagggtctcttagcaccacatcctttaacctaaaagtactgtatgaccagcatcaaagaggactgaacagatggactttccccaacgaccaactagacctagctagatacaagggctgcaaattcacattctacagaaacaaactgactgactttatagcccagtatgacatagctgctccctttgcactagacaaaaacagcagcccctcttatgccccagggataatgatgcaggccaaaaacaaaatacttattcccagctacaacactaaaccaaggggtcgccaaaaaatttcagttaaaatacctccccccaaactatttgtagataagtggtactcacaagaggacctctgttccgttaatcttgtgtcacttgcggtttctgcggctgactttgtacatccgttcggctcaccacaaactgacactccttgtgtaaccttccaggtttgcgagagcttcctcaattctgtaataggctttagctctactaaacaaaaacaagtactagatgaaatgtacaacaaaaatcaatattgggcctcacatctcactccatttttcactacaggccttaaaaatccatatccagccgttcccgaaacagcatcacctccaaactcagtaacagcattacacacattaactgcatcacaaataagaataggtggagacacttcatatcaatggtatccatacaacatgaaagcatacaaatcaaaactagatagcattagaaagcaatactttgactggcttactataaaacttccacaaccaacacaatcagactatggaatgccaaacccacatccaacacctacaaatgattactatgaataccacctaggcctttttagccctatatttataggtcccactagaacagcaaacatgtttccagcagcatactttgactgtacatacaaccctttaaatgacaaaggagtaggcaaccacgtatggttccagtacaacagcaaagcagacacacaaatagccacaactggcctatactgccacatacaagacaagcccctgtgggcagccctttatggctacgaagactttgtagaatcagtactaggtcccaatgtagatgctgaatctgtaggccttgtaatagttatatgtccatacaccataccacctttatatgacaaaaaaaatccaggcatgggctggatattttatgacagtaaatttggaaatggcaaatggctagacggcaggggacatattcctgtatactggcagacccgctggcgccctgaaatgatgttccaacatgaggttataagagacattgttcaaacaggaccctttagctacaaagacgaacttaaaaactctgtactggtagcaaaatacaagttctactttacatggggcggtaacatggtgtctcaacagagcattagaaacccctgcaagacgaacgaacacgactccgactccaatagatacactagaacagtacaagttgttgacccgcttaccatgggaccccgctgggtattccacgcctgggactggagacggggctatgttagcgaacaagctctcaagagagtgtcagaaaaacctcttgactatgaagagtattttaaaaagccaaagagacctagaatattccctttatcagaaggagcagaccagtcccacaggctcgaagaagactcaagttccgaggaagaaaaatcgctatcactcatcgaagagacgaccccggcgatccaggagcagttcagaaagcagctcaagcgacagcagcgactcgggcagcagctcaaactcctccaactacacctcctcaaaacgcaagcgggtctccaaataaaccccctattatttacccatgcataaacaaagtgtacatgtttccagaaagggcaccaaaaccttctcccagcaagggagactgggaaacagagtaccaggcctgtcgtcactgggacagacctcctagaaagtacctgtcagatacaccttactacccctgggtacctccagcacctaagttttctgtaagcttcaagcttggatttaaaccctaaataaaatgcaaagccgtggaactttcacttgtcggtgtctacctcttaaggtcactaagcactccgtgagtggggccagacttcgccataaggcctttatcttcttgccattggtccgtcacgggggttgccataggcttcggccttcattttaggcctctaaaactaccaaaatggcggtttcagtgacgtcacggcggccattttaagtaagcaggaagcagctccactatatacaaaatggcggcggagcacttccggcttgcccaagatggtggccaaaaacatccgggtcaaaggtgacagctacgtcacaagtcacgtggggaggcttggcatataacccggaagtcaatcctctcacgtggcctgtcacgtgactgctacgtcacggcggccattttgtttaacaaaatggcggacttccttccgcttttttaaaagtaacggcccagcggcggcgcgc

SEQ ID NO: 867 - protein, 743 aa, Alphatorquevirus sp.
MAWGWWRRRWTWPRRRRWRQWRRRRRLPRRRPRRPVRRRRQRRVRRRFYRGRRRGWRRRRYIRRRRRVRRKKLVLTQWQPATRRKCVIKGVLPLVWCGYLRSGRNYALHSDDTPKQGEPFGGSLSTTSFNLKVLYDQHQRGLNRWTFPNDQLDLARYKGCKFTFYRNKLTDFIAQYDIAAPFALDKNSSPSYAPGIMMQAKNKILIPSYNTKPRGRQKISVKIPPPKLFVDKWYSQEDLCSVNLVSLAVSAADFVHPFGSPQTDTPCVTFQVCESFLNSVIGFSSTKQKQVLDEMYNKNQYWASHLTPFFTTGLKNPYPAVPETASPPNSVTALHTLTASQIRIGGDTSYQWYPYNMKAYKSKLDSIRKQYFDWLTIKLPQPTQSDYGMPNPHPTPTNDYYEYHLGLFSPIFIGPTRTANMFPAAYFDCTYNPLNDKGVGNHVWFQYNSKADTQIATTGLYCHIQDKPLWAALYGYEDFVESVLGPNVDAESVGLVIVICPYTIPPLYDKKNPGMGWIFYDSKFGNGKWLDGRGHIPVYWQTRWRPEMMFQHEVIRDIVQTGPFSYKDELKNSVLVAKYKFYFTWGGNMVSQQSIRNPCKTNEHDSDSNRYTRTVQVVDPLTMGPRWVFHAWDWRRGYVSEQALKRVSEKPLDYEEYFKKPKRPRIFPLSEGADQSHRLEEDSSSEEEKSLSLIEETTPAIQEQFRKQLKRQQRLGQQLKLLQLHLLKTQAGLQINPLLFTHA

SEQ ID NO: 868 - protein, 152 aa, Alphatorquevirus sp.
MFVGRVWRKKREVLLSALRATKTPRRAMSWRPPVHHAAEIDRNWYQSVYKSHAACCGCGNFVLHLNTLADRYGFASGPSPPGDPGPRPPAQLRRHNATENPNSAPRALPWRGDGGEDAGRGPEGGDGGNGGAADDYREEDLDALFAAVDRDE

SEQ ID NO: 869 - protein, 59 aa, Alphatorquevirus sp.
MFPERAPKPSPSKGDWETEYQACRHWDRPPRKYLSDTPYYPWVPPAPKFSVSFKLGFKP

SEQ ID NO: 870 - DNA, 3314 bp, Alphatorquevirus sp.
agacccccgctcgtgctgacacgctcgcgcgtgtcagaccacttcgggctcgcgggggtcgggaaatttgctaaacagactccgagttgccattggacactgtagctgtgaatcagtaacgaaagtgagtggggccagacttcgccataaggcctttatcttcttgccattggtccgtgtcgggggtcgccgtaggcttcgggctcggttttaggccttccggactacaaatatggccgtttccgtgacgtcacggccgccattttaagtcagcgccggggagggtcacgtacagttcaaaggtcatcctcaccggaactgatacaaaatggccgccaattccttccgggtcaaaggtcagcgctacgtcataggtgacgtagctggtgtctgctgtaaacacggaagtaggccccggcctgcgagctccaaagaaaaaaccacctgcaatgagccagtggtgcccgcctgtacacagtgttcagggtcgcaaccaccagtggtatgaagcctgctatcgtggtcatgctgcttactgtggctgtggcgattttattaggcaccttgttgctctgggtgatcagtttggttttaggcctggtccccgtgctcccggcgcgcctggggtagggggacccccgcctccgctccgtagagcgctgcccgcacccccggcggccgctccggagccccagcagggcaacaacaacaacaaccagcagctggacagatggcctggggatggtggagacgacgccggcgagggtggctccggagcctatggaggagacgcaggactgccagaagacgatttagacggcctgctcgccgctatagacgacgaagagtaaggagaaaaagacgatggaggagggggcgacccagacgcagactgtacaaacgcaggagacgctttaagagacgcagacgcaggagacctaagataaaacttacacagtggcagcctagcactgtcaaacgctgctttataatagggtacattcccgggattatatgcggccccggaaaatggtcagagaactttaccagtcacatagaggacaagatagccgtgggaagctatggtggggggcacagtaccagtaggtggtccctaaaagtactgtacgaggagttccagaagcaccacaacttctggaccaaaagcaataaggagctagacctcgccaggttctttggcagcacatggacattttacagacacgaagatgtagactacatagtaacatataacagaaaagcccctctgggaggtaacatactaacagcacccagcatgcacccaggagtagccatgctaagcaaacacaaaatagtagtacccagttttaagaccagaccaggaggcaaacccacagttaaatttagaataaagccccccacaactttcatagataaatggtactttcagaaagacatatgtgaccttacactactaaacttgaacgttgtagcctgcaacttgcggtttccgttctgctcaccacaaacgaacaacattaacgtaaccttccaggtgttacatgaggtttaccacaacttcctctctataactgacgagcagttaacccaaactaactcaagttgggaattgtactataagaaatttttagatgaagtatttaaaacagagagagacgcaaacaaattaaacacatttgcaaccgagggagctttccatgcaccacagatagaaaagtataaaaaaccacttcaaaaagatgaatactttaaaacaaaagacgctctgtggggagatagcatacacatattaaatagtggacaaatacaaggtacacaacaaatacaatccttagaacaactaaaaaaaaaaatagtagacaatgcaaaaaactatgttaaaaaagtagtacaagaactaggaggtgaccaggtaaaaagattcatacatggaatgttcacacagtggacaggcatatttagccctgcattcttagactacagcagaataagcccagaaataccaggtttatataaagacattatttataacccacttactgacaaaggcataggaaacggagtatggatagactactgcagcaaaaaagacaccaaatatgaccctacaaagagcaaatgtggcatatttgacctacctctctggatgtgctgctttggcctggtagactggtgcaaaaaagagacaggacagtggggcataccttcctgggccagagtaattataaaaagtccttacacctttccaagacttataaactcagcagatgaaagtgagggctgggtaccaattggatacaacttttccaaaggttatatgccagacggcacaaagtacactcccatactaatgagacacaaatggtaccccaaccttttacaccagcaatcagtactagaagacatatccaggagcggtccctttagctaccaagagaaaaaccttagtgcaaacataacagcaaaatacaaatttagatggcattttgggggcaaccctgtgtttgaacaggttgtcgcagacccctgccaacaaacaacctatgaaatgcccggagccggtacgatgcctcgcagagtacaagtcactgacccgaaactcatcgggccacactacaccttccacagctgggacctcagacgtgactattttagcagaaaaagtattaagagaatgtcagaacaacaagaaacttctgagtttcttttctcaggcccaaaaaaaccccgaatcgatttggacgcagtgcaaattgtcgaaaaagactctttgcaccaagaaagaaaacaaaaaccctgggagagcagccagtcggaaacagagacagaagccccctcggaagaagaagaaacgagctcggtacaccagcagctccagcagcaactccgagagcaaaagcagctccggaggggaatcgagtgcctcttccagcagctgataaaaacccagcagggagtccacatagatccctcccttgtgtaggcccacaacagtggctgtttcccgagagaaagcctaagccccctcccagcaagggagactgggaaacagagtatgcagcatgcaaagcttttaacagaccgcctagattctttctaacagaccaacctttctacccttactgcaaaaacatgtacaatgtaacctttaagctcggttttaaataaacaaggccgtgggagtttcacttgtcggtgtctacctctaaaggtcactaagcactccgagcgtcagcgaggagtgcgacccttccccctgactcaacttcttcggagccgcgcgctacgccttcggctgcgcgcggcacctc

SEQ ID NO: 871 - protein, 751 aa, Alphatorquevirus sp.
MAWGWWRRRRRGWLRSLWRRRRTARRRFRRPARRYRRRRVRRKRRWRRGRPRRRLYKRRRRFKRRRRRRPKIKLTQWQPSTVKRCFIIGYIPGIICGPGKWSENFTSHIEDKIAVGSYGGGHSTSRWSLKVLYEEFQKHHNFWTKSNKELDLARFFGSTWTFYRHEDVDYIVTYNRKAPLGGNILTAPSMHPGVAMLSKHKIVVPSFKTRPGGKPTVKFRIKPPTTFIDKWYFQKDICDLTLLNLNVVACNLRFPFCSPQTNNINVTFQVLHEVYHNFLSITDEQLTQTNSSWELYYKKFLDEVFKTERDANKLNTFATEGAFHAPQIEKYKKPLQKDEYFKTKDALWGDSIHILNSGQIQGTQQIQSLEQLKKKIVDNAKNYVKKVVQELGGDQVKRFIHGMFTQWTGIFSPAFLDYSRISPEIPGLYKDIIYNPLTDKGIGNGVWIDYCSKKDTKYDPTKSKCGIFDLPLWMCCFGLVDWCKKETGQWGIPSWARVIIKSPYTFPRLINSADESEGWVPIGYNFSKGYMPDGTKYTPILMRHKWYPNLLHQQSVLEDISRSGPFSYQEKNLSANITAKYKFRWHFGGNPVFEQVVADPCQQTTYEMPGAGTMPRRVQVTDPKLIGPHYTFHSWDLRRDYFSRKSIKRMSEQQETSEFLFSGPKKPRIDLDAVQIVEKDSLHQERKQKPWESSQSETETEAPSEEEETSSVHQQLQQQLREQKQLRRGIECLFQQLIKTQQGVHIDPSLV

SEQ ID NO: 872 - protein, 155 aa, Alphatorquevirus sp.
LVSAVNTEVGPGLRAPKKKPPAMSQWCPPVHSVQGRNHQWYEACYRGHAAYCGCGDFIRHLVALGDQFGFRPGPRAPGAPGVGGPPPPLRRALPAPPAAAPEPQQGNNNNNQQLDRWPGDGGDDAGEGGSGAYGGDAGLPEDDLDGLLAAIDDEE

SEQ ID NO: 873 - protein, 123 aa, Alphatorquevirus sp.; identical to SEQ ID NO: 170

SEQ ID NO: 874 - DNA, 3313 bp, Gammatorquevirus sp.
cgggagcccgaggtgagtgaaaccaccgaggtctaggggcaattcgggctagggcagtctagcggaacgggcaagaaacttaaaacaatgctttgttttacagatgtcaaaagttcaagctaaagacttttatactcccacaccctacaatcaagaaacgaaaaatcaaatatggatgtctcaaattagtgattctcacgataatttctgcaattgtcacactccctttgctcacttacttgccagtatctttcctgttggtcaccaagataggaatctcacaattaatcaaattcttctcagagattacagagaaaaatgccgttctggtggaatagaagaagaaagccctggtggggccgttggagaaaaagatggacctacaaaagaaaaaacaccagaagaagaagacctagaaaacggagacatagaagaacttttagacgccgtcgccgccgcagaagaacatacaaggtaagaagaaaaagaaaattaataactgtaaagcaatggcaaccagataaaattttaaactgtaaaattaaaggatatgatactttagttttaggagcagaaggaaaacaattggtatgctataccaatgttaaacaagcttggacacctccaaaaactcctgggggagggggatttggtgtacagcaatactcacttggatacttgtatgaacaatatatttttagaaaaaatatatggactaaatcaaatatagcactagacctagtaagatatataagagccaaatttacattttacagacacccagaaacagactttattgtacggtatgatagacaaccaccatttacaatagatgaattgacataccctttaacacacccagctcaacttatgctcgcaaaacataaattctttgtactcagtacagctacaaaaccacttggtagactaacaaaaaggaaaataattaaaccacctaaacaaatgctaactaaatggttttttcaagaagactttagcaaagcaggactactacaactaacagcagctgcagcaaatttaaggtatgcaaacctaggctgctgcaacacaaaccaaattattacagcattctccataaacacttcatttttccaacaaggaaactgggcaataggcacaggagacagatacaaaccctacctagcaatacctaccacactatactactggccagaaaaaccaccaagcaaggaagacgagagaagagaatacaacaagaaatacatgttcacacaacaaataacttcatataatgactcagttagctatgaaaaaggctactttagcactaaagtactaacagccaaattttactcacaagaccaaatggataacacaggccttgccaatttaccactactttcatttagatataatccagccttagactcaggaaaaggaaatgcaatttggctacacaactcactaactacatcatatgataaaccagcaatagacaaaacccttatactacaaggcctacccctgtggcaaatgctatggggctggcttagctatgtacaatacattaaaaaagccactgacttttttacatcccacattataatactacaaagtcctgctattaaacctgcaccaacagcctcaccacaaacatactacattccactatcaacagactttgtaaatggcaagcctccttacaatgagccacttaccacctggtggagagcacactggtatcccaacatatatgaccaactacctgtactaaatgctattgtagaatctggcccttttgtacctaaatactcacaaactaaaaacagtacatgggaactaaaatacacttacaattttttctttaagtggggaggtccagacattacagaaccagcagtggctgaccccagccaacaacaaacatatcctgtacccgataaaatgtcagaggcagtacaaattagggaccctgccaaacaaaagtttgaatcaatcctgcatccctgggactacagacgtggcctcattaaagaatcagctcttaaaagaattcgagacaacctctcaattgattcaactttccaaccagatgaaacacctaaaaaaaaaagaaaaacagttggtccctgtcttacagtgccaggagaggaagaacaagaaatacagaaatgtctccaagaactcttcgaagaaagtacctaccaagaaatccaagaagaaacatcaatccagcagctcatccaacagcagcaccagcaccagcagcagctcaagtggaacatgctcagactaatatcagacttgaaagaaaaacagagacaattacaactacaaacgggttttataagttaacaccattcaaaccaggttttgaacaacaaacagagagagaacttgctatagcttttaaaagaccacccagattatttaaagaagacaaacccttttatccatggctacccaaaccaacacctattgttaactttcaccttaactacaaattctaggccaacactgttcacttagcggtgtttgtttaataaagtttgcaccccaaaaaaaattgtaaaattaaaaaaaaaaaaaaaaataaaaaattgcaaaaattcggcgctcgcgcgcgctgcgcgcgcgcgagcgccgtcacgcgccggcgctcgcgcgccgcgcgtatgtgctaacacaccacgcgcgcgctgcgcgcgcgcgagtgccgtcacgcgccggcgctcgcgcgccgcgcgtatgtgctaacacaccacgcacctagattggggtgcgcgcgctagcgcgcgcaccccaatgcgccccgccctcgttccgacccgcttgcgcgggtcggaccacttcgggctcgggggggcgcgcctgcggcgcttatttactaaacagactccgagtcgccatttggcccccctaagctccgcccccctcatgaatattcataaaggaaaccacaaaattagaattgccgaccacaaactgccatatgctaattagttccccttttacacagtaaaaaggggaagtgggggggcagagcccccccacaccccccgcgggggggggcaaagccccccccgcaccccccctacgtcacaagccacgcccccgccgccatcttgggtgcggcagggcggggtttcaaatggcgggacccaatcattttatactttcaatttccaattaaaacctgccacgtcacaacaaaggggaggagactttaaaactatataaccaagtgacgtgacgaatggctgagtttaccccgctagacggtgcagggaccggatcgagcgcagcgaggaggtccccggctgcccatggg

SEQ ID NO: 875 - protein, 672 aa, Gammatorquevirus sp.
MPFWWNRRRKPWWGRWRKRWTYKRKNTRRRRPRKRRHRRTFRRRRRRRRTYKVRRKRKLITVKQWQPDKILNCKIKGYDTLVLGAEGKQLVCYTNVKQAWTPPKTPGGGGFGVQQYSLGYLYEQYIFRKNIWTKSNIALDLVRYIRAKFTFYRHPETDFIVRYDRQPPFTIDELTYPLTHPAQLMLAKHKFFVLSTATKPLGRLTKRKIIKPPKQMLTKWFFQEDFSKAGLLQLTAAAANLRYANLGCCNTNQIITAFSINTSFFQQGNWAIGTGDRYKPYLAIPTTLYYWPEKPPSKEDERREYNKKYMFTQQITSYNDSVSYEKGYFSTKVLTAKFYSQDQMDNTGLANLPLLSFRYNPALDSGKGNAIWLHNSLTTSYDKPAIDKTLILQGLPLWQMLWGWLSYVQYIKKATDFFTSHIIILQSPAIKPAPTASPQTYYIPLSTDFVNGKPPYNEPLTTWWRAHWYPNIYDQLPVLNAIVESGPFVPKYSQTKNSTWELKYTYNFFFKWGGPDITEPAVADPSQQQTYPVPDKMSEAVQIRDPAKQKFESILHPWDYRRGLIKESALKRIRDNLSIDSTFQPDETPKKKRKTVGPCLTVPGEEEQEIQKCLQELFEESTYQEIQEETSIQQLIQQQHQHQQQLKWNMLRLISDLKEKQRQLQLQTGFIS

SEQ ID NO: 876 - protein, 124 aa, Gammatorquevirus sp.
MSKVQAKDFYTPTPYNQETKNQIWMSQISDSHDNFCNCHTPFAHLLASIFPVGHQDRNLTINQILLRDYREKCRSGGIEEESPGGAVGEKDGPTKEKTPEEEDLENGDIEELLDAVAAAEEHTR

SEQ ID NO: 877 - protein, 126 aa, Gammatorquevirus sp.
LSYSARRGRTRNTEMSPRTLRRKYLPRNPRRNINPAAHPTAAPAPAAAQVEHAQTNIRLERKTETITTTNGFYKLTPFKPGFEQQTERELAIAFKRPPRLFKEDKPFYPWLPKPTPIVNFHLNYKF

SEQ ID NO: 878 - DNA, 3310 bp, Alphatorquevirus sp.
cggtgacgtataagttcaaaggtcaccgcgctcaaggggcaattcgggctcgggactggccgggccctgggcaaggctcttaaaaaagccatgtttctcggtaaactttacagaaagaaaagggcactgtcactgcgcggcctgccaactccaaaggcgaaactacctgcaatgagttggagtcccccgctgcacaaccccaatgggatcgagagaaacctgtacgaggcattctttcgcatgcatgctgcagcttgtggttgcggcgatcttgttggccatcttactgtactggctggtcggtatggtgctcctcctcgtcccccggcccccggggctcccagaccacaaataagacgccagctggcccttcccgcgccccccgctgatccacagcaggccaacccacaatggcctggtggggacggtggagaagatggcgctggaggccccgccgctggcggcgccgtcgcagacgccgagtaccaagaagacgagctcaacgccctgttcgacgccgtcgaacaagaagagtaaggaggaggcgatgggggaggcggaggtggagacgggggtacaggcgcagactgagactgagacgcagacgaaagcgaaagcgcagactgatactgactcagtggcaccccgctaaagtaaggaggtgcagaatatcgggggtcctgcccatgatactatgcggggcgggcaggagtagctttaactacggactgcacagcgatgactttactaaacagaaaccaaacaaccagaacccgcacggcgggggcatgagcactgtaacttttaacctaaaagtgctctttgaccagtacgaaaggttcatgaacaagtggtcgtaccccaacgaccagctagacctggccagatacaagggctgtaaattcaccttctacagacacccagaagtagactttttagctcagtatgacaacgttccccctatgaaaatggacgaactgaccgctcccaacactcaccccgcactgctgctacagagcaaacacagggtaaagatatacagctggaaaaccaggccatttggccctaaaaaagtaacagtaaaagtagggcccccaaaattgtttgaagacaagtggtacagccagtctgacttgtgcaaggtatcccttgtcagttggcggttaaccgcatgtgactttaggtttccgttctgctcaccacaaactgacaacccttgtgtaaccttccaggtgctaggagaacagtattacgaagtctttggaacttccatattggacgttcctacaaaccattccagagaaatatccatatttgaagattggctatataaacaatgcacccactatcaaacatttgccacagacagcagattagccccccaaaaaaaaacaaactcacaaacgaaccaaacatataaccccagtggcaatacagaaactgcaacatggacacaaacaaactactcctcatttaaaccaggcaacagagacagcaactatggttactgcacttacacagtaaatgatcaaacattccaagccattaaaaaatacagaaatcaaagattcaaatggctaacaacatacactggacaaaatcacataaacagcacatttgccaaaggcaaatatgaacaatacgagtaccacctagggtggtactctaacatattcataggcaaccttagacacaacttagcattccgcccagcatacatagatgtcacatacaaccccacagtagacaaaggcaaaggcaacattgtgtggtttcaatacctaacaaaacccaccacacagctaataagatcacaggcaaaatgcctaatagaagacctgccactatactgtgccttttttggttacgaagactacatacagagaacactaggtccttaccaagacatagaaacagtaggtgttatatgctttataagtccttacacagaacctccctgtattagaaaagaagagggcaaaaaggactggggcttcgtattttatgacaccaactttggaaacggaaagactccagagggcataggccaagtacacccttactggatgcagaggtggagagtcatggcccagtttcaaaaagaaactcaaaacagaatcgccagaagcggaccgtttagctacagagacgagataccctcagccacactgactgccaactacaagttctactttaactgggggggcgactctatatttccacagattattaagaacccctgcccagacaccgggctgcgacccagtggcaatagagagcctcgctcagtacaagttgttagcccgctcatcatgggaccagaattcatattccaccgctgggactggcgacgggggttctataatccaaaagctctcaaaagaatgcttgaaaaatcagataatgatgcagagtcttcaacaggcccaaaagtgcctcggtggtttccagcactccacgaccaagagcaagaaagcgacttcgattcccaggaaacaaggtcgcagtcctcgcaagaagaagccgctcaagaagccctccaagacgtccaagagacgtcggtacagcagcacctcctcaagcagttccgagagcagcgggtactcggacagcaactccgcctcctcatgctccaactcaccaagacgcaaagcaatctccacataaatccccgcgtccttggccttgcataaataaagtgtacatgttttccccacaaaaacccaagcgcatacacgggtaccacgggtgggaaacagagtatcaggcctgcaaagcctttaacaggccccctagaaacttcctgtcagacaaacccatctatccctggctcccccgccctcaacctgaattcaaagtcagttttaagctcggttttcaataaacaaggccgtgggaatttcacttgtcggtgtctacctcttaaggtcactaagcactccgagcgtcagcgaggagtgcgacccttccccctggtgcaacgccctcggcggccgcgcgctacgccttcggctgcgcgcggcacctcggacccccgctcgtgctgacacgctcgcgcgtgtcagaccacttcgggctcgcgggggtcgggaattttgctaaacagactccgagttgccattggacactgtagctgtgaatcagtaacgaaagtgagtggggccagacttcgccataaggcctctatcttcttgccattggtccgtgtcgggggttgccgtaggcttcgggctcggttttaggccttccggactacaaaaaccgccattttagtgacgtcacggcagccattttaagtaagcatggcggg

SEQ ID NO: 879 - protein, 760 aa, Alphatorquevirus sp.
MAWWGRWRRWRWRPRRWRRRRRRRVPRRRAQRPVRRRRTRRVRRRRWGRRRWRRGYRRRLRLRRRRKRKRRLILTQWHPAKVRRCRISGVLPMILCGAGRSSFNYGLHSDDFTKQKPNNQNPHGGGMSTVTFNLKVLFDQYERFMNKWSYPNDQLDLARYKGCKFTFYRHPEVDFLAQYDNVPPMKMDELTAPNTHPALLLQSKHRVKIYSWKTRPFGPKKVTVKVGPPKLFEDKWYSQSDLCKVSLVSWRLTACDFRFPFCSPQTDNPCVTFQVLGEQYYEVFGTSILDVPTNHSREISIFEDWLYKQCTHYQTFATDSRLAPQKKTNSQTNQTYNPSGNTETATWTQTNYSSFKPGNRDSNYGYCTYTVNDQTFQAIKKYRNQRFKWLTTYTGQNHINSTFAKGKYEQYEYHLGWYSNIFIGNLRHNLAFRPAYIDVTYNPTVDKGKGNIVWFQYLTKPTTQLIRSQAKCLIEDLPLYCAFFGYEDYIQRTLGPYQDIETVGVICFISPYTEPPCIRKEEGKKDWGFVFYDTNFGNGKTPEGIGQVHPYWMQRWRVMAQFQKETQNRIARSGPFSYRDEIPSATLTANYKFYFNWGGDSIFPQIIKNPCPDTGLRPSGNREPRSVQVVSPLIMGPEFIFHRWDWRRGFYNPKALKRMLEKSDNDAESSTGPKVPRWFPALHDQEQESDFDSQETRSQSSQEEAAQEALQDVQETSVQQHLLKQFREQRVLGQQLRLLMLQLTKTQSNLHINPRVLGLA

SEQ ID NO: 880 - protein, 156 aa, Alphatorquevirus sp.
LGKALKKAMFLGKLYRKKRALSLRGLPTPKAKLPAMSWSPPLHNPNGIERNLYEAFFRMHAAACGCGDLVGHLTVLAGRYGAPPRPPAPGAPRPQIRRQLALPAPPADPQQANPQWPGGDGGEDGAGGPAAGGAVADAEYQEDELNALFDAVEQEE

SEQ ID NO: 881 - protein, 59 aa, Alphatorquevirus sp.; identical to SEQ ID NO: 665

SEQ ID NO: 882 - DNA, 3308 bp, Alphatorquevirus sp.
cgggtgccggaggtgagtttacacaccgcagtcaaggggcaattcgggctcgggactggccgggctttgggcaaggctctgaaaaaagctatgtttattggcaggcactaccgaaagaaaagggcgctgctactgctatctgtgcattctgcaaagacaaaagggaaacttctaaaagctatgtggactcccccacgcaatgatcaacactaccttaactggcaatggtacagttcagtacttagctcccactctgctatgtgcggctgtcccgacgctatcgctcatcttaatcatcttgctaatctgcttcgtgccccgcaaaatccgcccccgcctgataatccaagacccctacccgtgcgagcactgcctgctctcccggctgcccacgaggcggccggtgatcgagcaccatggcctatgggtggtggaggagacgccgcaggcgctggcggaggtggagacgccgaccatggaggcgccgctggaggacccgcagacgcagacctgctagacgccgtggccgccgcagaaacgtaaggagacggcgcagagggaggtggagaaggaggtacaggaggtggaaaagaaaaggcagacgtagaagaaaagcaaaaataataataagacagtggcagccaaactacagaagaagatgtaatatagtaggctaccttcctatacttatctgtggtgaaaatactgtttctaaaaactatgccacacactcagacgatactaactatccaggaccctttgggggtggcatgaccacagacaaattcagcctaagaatactatatgatgaatacaaaagatttatgaactactggacagcctcaaatgaggacctagatttgtgtagatatttaggagttactttctacttttttagacacccagaagtagactttatcataaaaataaacaccatgcccccattcttagacacagcgataacagcacctagcatacacccaggcctcatggccctagacaaaagagccagatggattccatctcttaaaaacagaccaggcaaaaaacactacataaaaattaaagtaggggctcctaaaatgttcacagataaatggtaccctcaaacagacctttgtgacatgacactgctaactgtctatgcaaccgcagcggatatgcaatatccgttcggctcaccactaactgacactgtggttgttaacttccaggttctgcaatccatgtatgacgaggtaattagcatattacctgacgaaaaaacaaatagaagtaatcttctatgtagtatagcaaactacatacccttttataataccacacaaacaatagctcaattaaaaccatttgtagacgctggaggctacacatcaggaacaacaacaaccacctggtcgtccttattaaacacaacaaaatttacaacaactacaacaaccacatacacatacccaggaactacatccacaacagtaacatttttaacagcaaatgacagctggtacagaggtacagtttataaagatgacattaagaaggtgcgtgagaaagcagctgagttatactttaaaacaacacaaaaactactaggaaacacattccatggctcagatgaaacacttgaataccatggaggcctatacagctccatttggctctcaccaggtagatcctactttgaaacaccaggtgcatacacagacattaaatataacccttttacagacagaggagaaggcaacatgctgtggatagactggcttagtaaaaaaaacatgatatatgacaaagtgcaaagcaagtgcctagtagcagacctaccactgtgggcagcagcatatgggtatttagaattctgctctaaaagcacaggagacacaaacatacacatgaatgccagactgctaataagaagtccctttacagacccccaactaatagtacacacaaaccccaataaaggctttgtaccttattctttaaactttggaaatggtaaaatgccaggaggtagtagcaacgttcccataagaatgagagctaaatggtaccccactctatttcaccaacaagaagttctagagtccctagcacagtcaggaccctttgcttatcactcagacattaaaaaagtatctctaggcataaaataccgttttaagtggatctggggtggaaaccccgttcgccaacaggttgttagaaatccctgcaaagaaccccactcctcgggcaatagagtccctagaagcatacaaatcgttgacccgaaatacaactcaccggaacttaccatccatgcctgggacttcagacgtggcttctttggcccgaaagctattcaaagaatgcaacaacaaccaactgctactgaatttttttcagcaggccgcaagagacccagaagggacacagaagtatatcagtccgaccaagaaaaggagcaaaaagaaagctcgcttttccccccagtcaagctcctccgaagagtccccccgtgggaggactcggaacaggagcaaagcgggtcgcaaagctcagaggaagagacggcgaccctctcccagcagctcaaacagcagctgcagcagcagcgagtcctgggagtcaaactcagactcctgttcaaccaagtccaaaaaatccaacaaaatcaagatatcaaccctaccttgttaccaagggggggggatctagcatccttttttcaggctgtaccataaacatgtttgcagaccctaaaccttactgcccctccagcaatgactggaaggaggagtttgaggcctgtagaatatgggatagacccgccagacaaaaccttagagacacccccttctacccctgggcccccaaacataatccttacaatgtaagctttaaacttggcttcaaataaactaggccgtgggagtttcacttgtcggtgtctacctctataagtcactaagcactccgagcgcagcgaggagtgcgacccttccccctggtgcaacgccctcggcggccgcgcgctacgccttcggctgcgcgcggcacctcggacccccgctcgtgctgacacgcttgcgcgtgtcagaccacttcgggctcgcgggggtcgggaattttactaaacagactccgagttgccattggacactggagctgtgaatcagtaacgaaagtgagtggggccagacttcgccataaggcctttatcttcttgccattttaatataagtagctgcacttccgaatggctgagttttccacgcccgtccgcagcggtgaagccacggagggaactcagcgcgtcccgaggg

SEQ ID NO: 883 - protein, 769 aa, Alphatorquevirus sp.
MAYGWWRRRRRRWRRWRRRPWRRRWRTRRRRPARRRGRRRNVRRRRRGRWRRRYRRWKRKGRRRRKAKIIIRQWQPNYRRRCNIVGYLPILICGENTVSKNYATHSDDTNYPGPFGGGMTTDKFSLRILYDEYKRFMNYWTASNEDLDLCRYLGVTFYFFRHPEVDFIIKINTMPPFLDTAITAPSIHPGLMALDKRARWIPSLKNRPGKKHYIKIKVGAPKMFTDKWYPQTDLCDMTLLTVYATAADMQYPFGSPLTDTVVVNFQVLQSMYDEVISILPDEKTNRSNLLCSIANYIPFYNTTQTIAQLKPFVDAGGYTSGTTTTTWSSLLNTTKFTTTTTTTYTYPGTTSTTVTFLTANDSWYRGTVYKDDIKKVREKAAELYFKTTQKLLGNTFHGSDETLEYHGGLYSSIWLSPGRSYFETPGAYTDIKYNPFTDRGEGNMLWIDWLSKKNMIYDKVQSKCLVADLPLWAAAYGYLEFCSKSTGDTNIHMNARLLIRSPFTDPQLIVHTNPNKGFVPYSLNFGNGKMPGGSSNVPIRMRAKWYPTLFHQQEVLESLAQSGPFAYHSDIKKVSLGIKYRFKWIWGGNPVRQQVVRNPCKEPHSSGNRVPRSIQIVDPKYNSPELTIHAWDFRRGFFGPKAIQRMQQQPTATEFFSAGRKRPRRDTEVYQSDQEKEQKESSLFPPVKLLRRVPPWEDSEQEQSGSQSSEEETATLSQQLKQQLQQQRVLGVKLRLLFNQVQKIQQNQDINPTLLPRGGDLASFFQAVP

SEQ ID NO: 884 - protein, 158 aa, Alphatorquevirus sp.
LGKALKKAMFIGRHYRKKRALLLLSVHSAKTKGKLLKAMWTPPRNDQHYLNWQWYSSVLSSHSAMCGCPDAIAHLNHLANLLRAPQNPPPPDNPRPLPVRALPALPAAHEAAGDRAPWPMGGGGDAAGAGGGGDADHGGAAGGPADADLLDAVAAAET

SEQ ID NO: 885 - protein, 57 aa, Alphatorquevirus sp.
MFADPKPYCPSSNDWKEEFEACRIWDRPARQNLRDTPFYPWAPKHNPYNVSFKLGFK

SEQ ID NO: 886 - DNA, 3304 bp, Alphatorquevirus sp.
caaaggttactagctacgtcacacaccgcagtctaggggcaattcgggcacgggtctggccgggctatgggcaagactcttaaaaaatttccttgctctgtgctccgccaggacatcaagtcatgccgtggtctccgccgagacataatatcacaacaagagaagatctctgggtgcaatcagttatttattcacatgacactttttgtggctgtgatagtgttcttcagcatcttactagcctcctgggtggcctacaaccagctccacctagagacccagcaccccctgccacacggagcctgccggcactgccgccagctccgcaaccccctgaagaaccacggcgtggtggagatacagacggaggccgtggagaagatggaggagacgccgctggggcctacgaaccaggagacctagaagaacttttcgccgccgccgcggaagacgatatgtgagtagagggcggcgccgccgatacaggcgcagacggagacgggggcgacgcagaaggggacgcagacgcaggcacagaaagacactcattgtcaggcagtggcaaccagacgttattaagagatgctttattactgggtggctacccctaattatctgtggaaatggacacacccaatttaactttataactcacatggacgacattccacccagaaatgcgtcctatgggggcaactttacaaatgtcacctttaaccttgcctgcttctatgaagaattcatgcaccacagaaacaaatggtcagcctccaaccatgacctagaactggtcagatacctcagaaccagcctaaaactgtacagacacgactcagtagactatatagttacctacaccaccacaggcccattcgagacaaatgaaatgtcctacatgctaactcaccctctagccatgcttctcagcaaaaaacatgtagttgtacccagcctaaagacaaaaccacacggcaaaaagtacaaaaagataacaatcaaacccccaaaactaatgctaaacaaatggtactttgccaaagacttctgccacataggcctcttccagctctgggctacaggcctagaactaagaaacccatggctcaggtcaggcacaaacagcccagttataggattctatgtccttaaaaaccaaatatatcaaaacagatacagcaatctgtctacagaaacacaaaaaagaaaagatgcatatgacgaactaacaaaagagaatggctccaaatggtacaattggcaatacacatacacaaaagtaatgaaacctatatactatgctgctgccaatgatcctactaacacacgttttaaaaccaaaccctataattggaaaaattacaaagaaaactttaaagcagtacaaactaagtggacaaatacagtaaaagatgcatatgaactagtagcagatgaatacagacaaatatacaccaccacactcacatatccaccaccatgggaacccactaacacttcagatataaacactggcagacaatacctagagcatgactgtggaatatacagcccatattttataacaccacaaatatacagcccagaatggcacacagcctggtcctacatcagatataatcccctcacagacaaaggcataggcaacagagtctgtgtgcagtactgcagcgaggccagcagtgactacaacccagtaaaaagcaagtgcatgctacaagacatgcccttgtggatgatgctgtatggctatgcagactatgtagtaaagagtacaggcatacagtcagcctggacagacatgagagtggccatcaggagcccctacacagacccaaaactcataggcagctcagaaaacacaatgttcattcccataggcatagaattcatgaacggagacatgccagacaagaggccctacattccgttaaagtggtggtttaagtggtaccccatgattacacaccaaaaaaccgcacttgaggcaatagtttcctgcagcccgttcatgcccagagatcaggaacaagccagttgggacataactgtaggttacaaagcaaccttcttatggggcgggtcccccttacctccacagcccatcgacgacccctgccaaaaatccacacacgaacttcccgaccccgatagaaaccctccaagaatacaaatctcagacccgcagcacctcggaccggcgacgctgttccactcgtgggacctcagacgtggatacattaatacaaaaagtattaaaagagtgtcagaacacctcgactctaatgaatatttttcaacaggcgtcgtatccaaaaaaccccgattcgacacaccccaccacgggcagctatcaaaccaagaagaagacgccttacatatactccgacaactccaaaaagagcaagaagagagcacctccgaagaagaacaagcactccaaaaagaagaggagcaaaaagaaaaactcctacagcagctccgagtccagcgacagcaccagcgagtcctcagggagggaatcaaacacctcatgggagacgtcctccgactcagacagggagtgcactggaacccaatcctgtaatccttccagcagaaccaataccagacctcctattccccaatactggtaaaaaaaaaaaattttctcccttcgaatggcagtgcgagcaagaactggcctgtctaatgaaacggcctatgcgtttctatccctcagacagcccgttctacccatggctaccccccaagcaagatatcccaaaaatatgtaaagtaaacttcaaaataaatttcagtgaatgaatctcgaggccccgggagtttcacttagcggtgtctacctctaaaggtcactaagcactccgagcgcaagcgaggagtgcgaccccctgcccggtagcaacttcctcggggtccggcgctacgccttcggctgcgccggacgcctcggacccccgctcgtgctgacacgctcgcgcgtgtcagaccacttcgggctcgcgggggtcgaaaaatttattaaacagactccaggttgccattagacactaaagctgtgaatcagtaacgaaagtgagtggggccaaacttcgccatagggcctttatcttctcgccattaaatcgtgagggggtcgccatagacttcagccttgttttcaggccttccggactacaaaaatggcgaatttcatgacgtcacagccgccattttaaataaggcaaaaataactccactttctcacaaaatggcggcaaagcacttccgacttgcccaaaatggcgggcaagctcttccgggt

SEQ ID NO: 887 - protein, 642 aa, Alphatorquevirus sp.; identical to SEQ ID NO: 550

SEQ ID NO: 888 - DNA, 3303 bp, Alphatorquevirus sp.
cgggtgccggaggtgagtttacacaccggagtcaaggggcaattcgggctcgggactggccgggctatgggcaaggctcttaaaaatgcacttttctaggtgcagtagaaagaaaaggacactgtcactgttaccactgcaccattcacagaaaactaggccatctgtgaaaggtatgtggagacccccgactcgaaatgcatttactattcaacgtgactggttctacagttgctttcactcccacgcttctatgtgtggctgtgctgattttattagtcatttcaatcatatcgctgctatgctcggccgtccggaagaccagaaccctcctccgccacccggggctctgagacccctacccgctctcccggcctcctccgagacacccggtgatcgagcaccatggcctatgggtggtggtggaggcgacggaggcgcccatggaggaggaggagatggcgccgctggagacgtcgccggagaccccgcagacgccgacctcgtcgccgctatcgacgccgcagaacagtaaggagacgcggcagggggaggtggactaggagatatagacgatggcgccgcaagggcaaacgaagaggcaaaaaaaagattatcataaaacagtggcagcccaactacactcgcagatgcaacatagtgggctacatgcctctcctaatctgtggggaaaatactgttgctacaaactatgccactcactcagacgacagctactaccccggaccctttggggggggaatgactacagacaaatttactctaagaatactgtatgatgagtacaagaggtttatgaactactggaccgcctcaaacgaggacctagacctctgtagatacctaggagctactctatatgtgtttagacacccagaagtagactttatactaattataaacacctcccctccatttctagacacagaaataacagggcccagcatacacccaggcatgatggccctcaacaaaagagccaggtggatacctagcttaaaaaacagaccaggcagaaagcactatgtaaagattaaagtaggagccccccgaatgttcacagataagtggtacccccagacagacctctgtgacatgacactcctaacgatttttgccagtgcggcggatatgcaatatccgttcggctcaccactaactgacactatagttgtgtcattccaagttctgcaatccatgtacaacgactgcctaagtgtacttcctgaaaattttacagagtcaacaggcaaaggcgcccagctatataaaaaaataattaatcatttaccctactacaacaccacacaaacacaagcacaatttaaaagatttgtagaaaacagtgcagcaaccaacggtgacaatatatgggcaaactacataaatactagtaagttctcaaaaattgaagaatcaaagaatgatacaaacataggaggcccttacacctgttattcagactcatggtacaaaggcacagtatacaatgacaaaattaaacacatacctgaaaaagcaagtaaattatactacgaacaaaccaaaaaacttattggcattacatttacaggatccacacacatactacactactgtggaggcctatattcttccgtatggctatcagcaggtagatcctactttgaaaccaaaggcccatacacagacatcacttacaaccccttttcagacagaggagagggtaatatgctatggatagactggctaactaaagatgactcagcttactcaaaaacaagtagcaagtgcctcatagaacacttgcccctgtgggccgcagtatacggatacaaagaatactgcagcaaagtcacaggagacacaaacatagaacacaactgtagatgtgttataagaagcccctacacagtaccacagctattagaccacaacaatcccctcagaggttacgtgccttatagcataaactttggaaatggtaaaatgccaggcggtagcagcctagtacccattagaatgagagccaagtggtaccccactcttttccaccaaaaagaagtactagaggccatagcgcaggcgggcccctttgcataccactcagacattaaaaaagtgtccctgggcataaagtacagatttaagtgggtatggggtggcaaccccgtgtcccaacaggttgttaaaaacccctgcaagaccacccaaggttcctcgggcaatagagtgcctcgatcaatacaagtcgttgacccgcggtacaacgcgccagagctcaccatacacgcgtgggacttcagacatgggttctttggcagaaaagctattaagagaatgcaagaacaaccaatacctcatgacactttttcagcagggttcaaacgcagtcgccgagacacagaagcactccaatccagtcaagaagagcaacaaaaagaaaacttacttttcccagtccagcagctcaagcgagtccccccgtgggagacctcgcaagagagccaaagcgaggaagaaaactcgcaaaaacaggagaccctctcccagcaactcagagaccagctgcacaagcagcggctcatgggagagcaactccgatcgctcctctaccaaatgcagagggtccaacaaaatcaacacataaaccctatgttattgccaaagggtctggcattaacttctatttctcacaatgtaatatagatatgtttggtgaccccaaaccctacaagccctcctccaatgactggaaggaggagtacgaagccgcaaagtactgggacagaccccccagacacgacctgagaagcacccccttctacccctgggcccccacccccaaaccatacaatgtcaactttgccctcaactacaaataaacggtggccgtgggagtttcacttgtcggtgtctacctcttaaggtcactaagcactccgagcgtaagcgaggagtgcgaccctctaccaaggggcaactccctcgaagtccggcgctacgcgcttcgcgctgcgccggacatctcggaccccccccccccggggggaggcaatgcctccccccccccgcgcgcatgcgcgcgggtccccccccctccggggggctccgccccccggccccccccgttgtgctacgtcactaaccacgtgttccccgcaggccaaccacagtctatgtcgtgcacttcctgggcatggtctacgtgataatataagtaacagcacttccgaatggctgagttttccacgcccgtccgcagagagggagccacggaggggatcccgaacgtcccgaggg

SEQ ID NO: 889 - protein, 767 aa, Alphatorquevirus sp.; identical to SEQ ID NO: 285

SEQ ID NO: 890 - protein, 159 aa, Alphatorquevirus sp.; identical to SEQ ID NO: 286

SEQ ID NO: 891 - protein, 57 aa, Alphatorquevirus sp.; identical to SEQ ID NO: 287

SEQ ID NO: 892 - DNA, 3301 bp, Gammatorquevirus sp.
cgggtgccgaaggtgagtgaaaccaccgtagtcaaggggcaattcgggcggctgcagtctagcggaacgggcaagaaacttaaaaattccgcgcgctgtgcgcgccctatgttttattacagatgtctcttcaaaacgtacctaaatgttacaaacctcctcttgtagatccatggggacaacaagaactctggatacaaaatgtcgaattttcacatgatacatggtgcagctgtgctcattggcttagtcatcttctttctattacttgtcctcttgattctaaaaatcgcgctcggaccgtccacgagattattgacataggtcaaaattgtgataaccttttgtctttgagagccttgcccagtgtccctgcagatccatggtctggccctggagagcccggcgccgctggcgccgcagaccacgcaggtggagacgctggaggtggcccagacgaaaccgaaagagacgcacctatacccgaagacgaactgttcgagcttctagaaaacgcagaaaaagacgaaaacgtaccagggtaagaaaaaaaaaacctttattgaacttaaaacaatggcagccagaaagcataaaactatgtaaaattattggacatacacctttaaatattggatgtaacggaagacaaatctataattatacatattggcaagactactacatacatccaaaatgtccatctggagggggattttcagtatataaatggtctttagcatacctatatgaagactactgtagaagaaaaaatatatggacaaaatctaactgcccatatgacttatgcagatacctaggaactagaattaaattttattcacacccagaagtagactatgtagcttcatactcaagaaactaccctatggtagtagatgaaacaacttacatgttaacacacccatctatactactactcagaaaacacagagtaataatacctagcagaaaaacaaaacctaacggaaaaggttacaaaaaaatatttataaaaccacctagacaacttgtaaacaaatggttttttcaaaaacaatttaatgaccagggtctatttttactacaaatagctgcaacagacttacaataccccaacataggcccaaactctccaaacagactagtaacattaaacattttaaacaaccaatacttttatggacaaccaaactggggagacgcctcaggaacatacacaatcaccgaaggaaaactacacctccttggaaaaaacacaaaaacacttattgatggaaaactaatagactatacaattcccaatgacataggtactcaaaagaaaaaacattactatgattcaggcctatttaacagaaaaatgcttaacatacaatattacactgacacagaactctcctcatatccaacaccaacaatgcaagttcaatacaaccctatgagagacacaggcaaaggaaacaaaatatactttatatctaccttacaaactagctggggaccaccaaccacagacagacttttattttggcaaggtgaacctctatggctacaactatatggcctaacagactacattttgaaagccaaagggacttcctctgccctacaggatgccatttgtgtaatagagtcaccatggatagaaccacaaacccacaacaaaaaattcgttgtggtaggaaatccatttatgcaaggacaaactgactgcaaaaacccacctacaggaacacaactaaacaaatggtttttaactttagaagatcaaatgccagcattaaatgacattgtaacagcaggaccatacatggtaaaacaaacaggttttagatgcacatgggaaatgcatgtagactataaatcttattttaaatggggaggtgcacaaccaccactacaaaatatttgtgacccccatttacaggaaaccttccctgtgcccgatactgtcagacaaacattacaaatcatcgatccgaaaaaacaagtcccagaatccttactccactcttgggactatagacgagggcttgttactcaaacagctcttaaacgaatgtacaaaggtctctcagatgcagagtcttcttcggcagatacctcagaagagtcagactcaccccaaagaaaaagaaagagaggagacccgccgtgcccggaagaaaaagacaactacaatatccagaccctcaaagaaatctgccaaacgccgcaagaaacaggaaacatcgagcagcagctccacaacttccagcagcagcaatacaacaaaaacatcaacatcttaaaattacttgcaatgttaaaacaaaaacagctgcaaatgcaactagcaatgggtatgatggagtaaaactatttccaaaaaaagaaaaaaacccaaaatttaaagggtggggtaaaattatagaagaagaatgcgcaaaagcattccacagacctcccagaaaatttgtaaatgaccctccattttacccttggttacctccagtacccaaagtttcatttgcactgaagtttaagggctaggcccacaatgttcacttagtggagtatgtttaataaagtcacaccccctttctgtaaccacgcctcttttgtatacgtcatgaatatattaaaaaccggaaataaattttcgcagagcggagggttcgcgcgctacgcgcgcgaacccatacgcctagggggcgcacattaattgctcctagattgggcagcgcgcgctagcgcgcgctgccaaatgcgcccctccctcgtgctgacacgcttgcgcgtgtcagaccactacgggctcgggggggcgcgcctgcggcgctaacttatataataaactccacagggggagctgcgctccccctgttacgtcaccccctacgtcacttcctggcgggaaattcaaaatacgtcacaaaaccacgcccaaaagggggggcaaagccccccccttaaaccccccgggggggacaaagcccccctcactccacgcccaaaaggggggggcaaagcccccccttaaaccccccgggggggggcaaagccccccccactcccccccatacgtcacagaccacgtgaccgccgccatcttgggcgcggtctaggcgtggttaaaaaaagcgggaaccaatcaaattaaacatcacacaaccaatcacaaaccacctacgtcacaaaaatgggtggttcctttcactctataaaactaactgcacttccgaatggctgagtttttccccgctagacggtgcagagcacaacgagcgcagcgaggagagactcagcagcagcaggg

SEQ ID NO: 893 - protein, 658 aa, Gammatorquevirus sp.
MVWPWRARRRWRRRPRRWRRWRWPRRNRKRRTYTRRRTVRASRKRRKRRKRTRVRKKKPLLNLKQWQPESIKLCKIIGHTPLNIGCNGRQIYNYTYWQDYYIHPKCPSGGGFSVYKWSLAYLYEDYCRRKNIWTKSNCPYDLCRYLGTRIKFYSHPEVDYVASYSRNYPMVVDETTYMLTHPSILLLRKHRVIIPSRKTKPNGKGYKKIFIKPPRQLVNKWFFQKQFNDQGLFLLQIAATDLQYPNIGPNSPNRLVTLNILNNQYFYGQPNWGDASGTYTITEGKLHLLGKNTKTLIDGKLIDYTIPNDIGTQKKKHYYDSGLFNRKMLNIQYYTDTELSSYPTPTMQVQYNPMRDTGKGNKIYFISTLQTSWGPPTTDRLLFWQGEPLWLQLYGLTDYILKAKGTSSALQDAICVIESPWIEPQTHNKKFVVVGNPFMQGQTDCKNPPTGTQLNKWFLTLEDQMPALNDIVTAGPYMVKQTGFRCTWEMHVDYKSYFKWGGAQPPLQNICDPHLQETFPVPDTVRQTLQIIDPKKQVPESLLHSWDYRRGLVTQTALKRMYKGLSDAESSSADTSEESDSPQRKRKRGDPPCPEEKDNYNIQTLKEICQTPQETGNIEQQLHNFQQQQYNKNINILKLLAMLKQKQLQMQLAMGMME

SEQ ID NO: 894 - protein, 149 aa, Gammatorquevirus sp.
LCAPYVLLQMSLQNVPKCYKPPLVDPWGQQELWIQNVEFSHDTWCSCAHWLSHLLSITCPLDSKNRARTVHEIIDIGQNCDNLLSLRALPSVPADPWSGPGEPGAAGAADHAGGDAGGGPDETERDAPIPEDELFELLENAEKDENVPG

SEQ ID NO: 895 - protein, 109 aa, Gammatorquevirus sp.
LPNAARNRKHRAAAPQLPAAAIQQKHQHLKITCNVKTKTAANATSNGYDGVKLFPKKEKNPKFKGWGKIIEEECAKAFHRPPRKFVNDPPFYPWLPPVPKVSFALKFKG

SEQ ID NO: 896 - DNA, 3301 bp, Alphatorquevirus sp.
cgggtgccgtaggtgagtttacacaccggagtcaaggggcaattcgggctcgggactggccggaccccgggcaaggctcttaaaaaaggcatgtttcttggtaggccttggagaaagaaaagggcactgctactgtctggcctgcgaactccaaagaaaaaaccacctgcaatgagccagtggtgcccgcctgtccacagcgttcagggtcgcaaccaccagtggtatgaagcctgctaccgcggccatgctgcttattgtggctgtagcaattttattagtcaccttgttgctctgggtgatcagtttggtttcaggccgggtccccgcgctcccggcgccccgggagtagggggaccccctccgccgctccgtagagcgctgcccgcacccccggcggccgctccggagccccaacaggagaacaacaacaacaacctgcagctgcagagatggcctggggatggtggaaacgccgcagacgcggatggctccgccgctggggatggaggcgccgccgcagacctgccagaagacgagctagatgggctgctcgccgagctcgacgacgaagagtaaggaggcgcagactaaggaggagggggcgaccgagacgcaggacttttaaacgtaggaggcgacgcagacgctttaagagaaagcctaagataaaactgactcagtggcagccagacatagtcaggcggtgctttataaggggctttctagctgctgtgatatgcggacagggcaccttctccaacaactacagtagccacctggaggacagaatagccaggggaggctttggagggggccacagcaccatgaggttctcactaaaagtattctatgaggagcacttaaggagactaaactactggacttgctccaacaaggacctagaactagtcagatacttctacaccacagtaaccttctacaggcaccccactcaggactttatagccaggtacaacagaaaaacccccttagggggcaacatactaacagctccatcactgcacccaggcagcatgatgaccagcaaacacagaataatgatacccagtctagagaccagacccaagggaaaaaagactgttaaagtaagaatagcagcccccactctatttactgacaagtggtacttttccaaagacgtttgtgacttgacattgctaaacttggacgttacaatggccgacttgcggtttccgttctgctcaccacaaactgacaatccttgcatcacttggcaaaccctttcctctgtgtacaacaacttcctctctattaccatattccaaggcacctcagagacacaacaaattcaagaatttttaaaagctgctataccaaataaagaacatgccagagtactaaatacttttaaaacagaaggcaattacagtcaccctcaaatacctaaagcaacagcacaacaatctaaaccaacagacaacgaaacacaatactttggagagctagatggcctatggggagaccctatattcatgcccttaaaccaaacagtagaaaacttaagagcacacatactaaaaaacatgcaaaattacaataaaaaactaaaacaagagtttccagccatgacaggctcagcagcacacacacacctcacaggtatatttggcagcagctggctaaaccctggaagaataagtccagaagtactaggcctctacacagaaataatttacaacccatacaaagataaaggcacaggcaaccacatatggatagactcacttactagaaacaacaaccactttaaagagggtcagagcaagtgtcacttacaagacatgcccctttggatgatggtatttgggtacacagactgggtaaaaaaagagcttaatcagtgggacgcacccttaaactacagaataatgatgataagcccatacacatttccaatgatgtacaaacaagacgaccctacctacggatttgtaccaatcagctacaaattttcctcaggcctaatgccagacggcagcagctacatcccttttagctttaggggcaagtggtaccccaacctactaaaccaacagcaggtattagaagacctcagcagatcaggaccctttgcacccaagacaaatgtccctagtgccaccctagtaatgaaatacaagagcagatttaactttggtggcaatcctatatctgaacaggttattagagacccctgcacacaaccaacctacgacatacccggtgccaatacgctccctcgagcaatacaagttatcgacccgaaagtcctcggcccaggttacagcttcaggtcgttcgacatcagacgtggatactttagcacgacgagtattaaaagagtgtcagaacaatcagaaactactgagtttctattcccaggcccaaaaaaacccagaatcgatcttcaaaagtacgagccaccagaagacgtctacagtacactccaaaaagaaacgagaccgtgggagagcagccaggaagaagagacagaagccccatcagaagaagaagaagagagacccctccgagagcagctgcagcagcagctccgagagcagcatcaactccgaaagggaatccagcacctcttccagcagctagtcaaaacacagcagggagtccacgtaaacccatgcctacagtagggcctgcacagtggcttttcccagagagaaagccggccccgccgcccaccagcggcgactgggctacagagttcctaacagctaaaatatttgacaggccagtcaggagcaacctaaaagacatccctttctacccctacgtgaagcaccaatacaatgtctactttggcctaaactatcaataaagctcagctcaaacttgcaaggccgtgggagtttcacttgtcggtgtctacctctaaaggtcactaagcactccgagcgtcagcgaggagtgcgacccttccccctgactcaacttcttcggagccgcgcgctacgccttcggctgcgcgcggcacctcagacccccgctcgtgctgacacgcttaaagcgtctgcgtcgcctcctacgtttaaaagtcctgcgtctcggtcgcccccgcggggggctccgccccccggccccccccgtgcaacgtcaccaacctacgtgtccgtctcccataggccggacaccgtctacgtcatacacttcctgggcatggtctacatcctaatataaagcgcagcacttccgaatggctgagtttttgctgtccgtccgcagcgaggaacgaccacggagggcgatccgcgcgtcccgaggg

SEQ ID NO: 897 - protein, 739 aa, Alphatorquevirus sp.
MAWGWWKRRRRGWLRRWGWRRRRRPARRRARWAARRARRRRVRRRRLRRRGRPRRRTFKRRRRRRRFKRKPKIKLTQWQPDIVRRCFIRGFLAAVICGQGTFSNNYSSHLEDRIARGGFGGGHSTMRFSLKVFYEEHLRRLNYWTCSNKDLELVRYFYTTVTFYRHPTQDFIARYNRKTPLGGNILTAPSLHPGSMMTSKHRIMIPSLETRPKGKKTVKVRIAAPTLFTDKWYFSKDVCDLTLLNLDVTMADLRFPFCSPQTDNPCITWQTLSSVYNNFLSITIFQGTSETQQIQEFLKAAIPNKEHARVLNTFKTEGNYSHPQIPKATAQQSKPTDNETQYFGELDGLWGDPIFMPLNQTVENLRAHILKNMQNYNKKLKQEFPAMTGSAAHTHLTGIFGSSWLNPGRISPEVLGLYTEIIYNPYKDKGTGNHIWIDSLTRNNNHFKEGQSKCHLQDMPLWMMVFGYTDWVKKELNQWDAPLNYRIMMISPYTFPMMYKQDDPTYGFVPISYKFSSGLMPDGSSYIPFSFRGKWYPNLLNQQQVLEDLSRSGPFAPKTNVPSATLVMKYKSRFNFGGNPISEQVIRDPCTQPTYDIPGANTLPRAIQVIDPKVLGPGYSFRSFDIRRGYFSTTSIKRVSEQSETTEFLFPGPKKPRIDLQKYEPPEDVYSTLQKETRPWESSQEEETEAPSEEEEERPLREQLQQQLREQHQLRKGIQHLFQQLVKTQQGVHVNPCLQ

SEQ ID NO: 898 - protein, 162 aa, Alphatorquevirus sp.
MFLGRPWRKKRALLLSGLRTPKKKPPAMSQWCPPVHSVQGRNHQWYEACYRGHAAYCGCSNFISHLVALGDQFGFRPGPRAPGAPGVGGPPPPLRRALPAPPAAAPEPQQENNNNNLQLQRWPGDGGNAADADGSAAGDGGAAADLPEDELDGLLAELDDEE

SEQ ID NO: 899 - protein, 65 aa, Alphatorquevirus sp.
MPTVGPAQWLFPERKPAPPPTSGDWATEFLTAKIFDRPVRSNLKDIPFYPYVKHQYNVYFGLNYQ

SEQ ID NO: 900 - DNA, 3297 bp, Alphatorquevirus sp.
cgggagccggaggtgagtttacacaccgcagtctaggggcaattcgggcacgggtctggccgggctatgggcaaggctcttaaaaaattaccccggtgtgttctccgccaggacaacaagtcatgccgtggcgaccgccggtgcataacatcccgggtagagaaaatcaatggtttgcaagcttctttcacgggcatgcttctttttgcggttgtggtgaccctgttgggcatcttaacggcattgctcatcgctttcctcacgccgctccaccgagaccacctccagggctagagcagccaaacctcggagggccggaaggtcccggaggtcccccggcacccctgccagctctgcctgccccggcagagcccgacccggcaccacgccgtggtggtggggccgatggaggcggcgccgctggggccgccgccgccgcagaccatggaggatacgacgaaggagatctagaagatcttttcgccgccgcggccgaagacgatatgtgagtaggcgggggcgccgccgcagattctggcgcagacgcagacggggcagacgcagggggcgacgaaagacacacaaacccactattgtactcagacagtggcaacccgacgtagtgagaccctgcaaaataacaggatggatgccccttattatctgtgggtcaggaagcacccagttcaacttcataacccacatggatgactttccccccatgggctacacctacgggggcaattttacaaatgtaaccttctcattagaggccatatatgaacaatttctttaccacagaaacagatggagctcctccaaccatgacctagaccttgccaggtaccagggaaccaccctaaaactatacagacacgaatacctagactacatagtcagctacaacagaacaggcccttttcagatcagcgacatgacctacctcagcactcaccctgctatgatgctacttcaaaaacatagaatagtagtacccagctttaaaacaaagccaagggggcgcaggtccataaaaattagaataaagcccccaaaactaatgctaaacaagtggtacttcacaaaagacatttgcagcatgggactcttccaactacaggccacagcatgcaccttaaacaacccctggctcagagacaccaccaagagccctgtcataggctttagagtccttaaaaactcctactactcagacctttctaacttagcagatgacgactctgagaacagaaggcgagcaattattaagcacctccacccagacacactaacaggctcaccaccaaatgccaaaggatgggaaatcacttacacaagactaatgggacccacatactacaaatcagtaccaaacagcacatacaattggctaaattatcaaacaaactatgctatagttcatgctacgtttacaaaagaaaaacaagcaaaattagacacaataaacaaggaataccattaccactaccccacatatgtaacaaaagactttacaacaaattcaacacttacacatgactatggcatatacagtccctactacttaacaccaaccagaataagcttagactggcaaacaccatggacatatataagatacaacccactagcagacaaaggcctaggaaacatagtatacgctcagtggtgctcagaaaaaacacccaatgtcagcacaactaaaagcaaatgcataatgaaagacctaccactatggtgcatattctatggctacatagactgggtaattaaaagcaccggagtaagctccgctgctacagacatgagaataatgataataagtccttacactgacccagcacttatagggtcaactccagaccaaggctttctgccagtaagtgacaccttttgcaatggagacatgccgtttcttgcaccatatgtgccaatcaagtggtgggttaactggtacccttgcattgcacaccaaaaggaagtgtttgaggcaattgttaactgtggaccgttcgtcccacgagaccagacgaaaccctcttgggaaattaccttaggttacaaaatgaactggaaatggggtggctctcccctgccttcacaggcaatcgacgacccctaccagaagcccacccatgagcttcccgaccccgatagacaccctcgcatgctacaagtctcagacccgacaaagctcggaccgaagacagtgttccacaagtgggactggagacgtgggatgcttagcaaaagaagtattaaaagagtccaagaagactcaagcgatgatgaatatgttgcagggcctttatcacgaaaaagaaacaagctcgacaccaggaccggaggtcttcaaacccccgaaaaagaaagttacactttactccaagccctccaagactcggcggaagagagcccctcgagccaagaacaagcaccccaagaagaaaaccaaaaagaggcgctcctacagcagctcgagctccaaaagcagcaccagcgagtcctcaaacgaggcctcaaactcctcctgggagacatcctccgactccgccgaggagtccactgggaccccctcctgtcctaattcagggtccttctatcccagacctgcttttccctaacacacaaaaaaaaaaactattttccaactacgactgggtgtgcgagtacgaactggccaaatggatggatcgccctttgcggcactacccatcagacccccctcactacccctggctaccaaaaaagcctgctacccctcctacatgtagagtaagtttcaaattaaagctcgatgcctaaaattcaaggccgtgggtgtttcacttcatcggtgtatacctctaaaagtcactaagcactccgagcgtaagcgaggagtgcgacccccctgcccggtagcaacttcctcggggtccggcgctacgccttcggctgcgccggacgcctcggaccccccctcgacccgaatcgctcgcgcgattcggacctgcggcctcgggggggtcgggggctttactaaacagactccgaggtgccattggacactgagctccgcccccccggccccccccccgcgcttaatccaccgcgcatgcgcaaccacgcccccgccgccattttgtgcagcccgccaattttattttaaacagaccaatcagctactacttcgtgcacttcctggggcgtgtcctgccactgtatataaacagaagcggtgacgaatggtagagttttttctcgcccgtccgcggcgagagcgcgagcgaagcgagcgatcgagcgacccgtggg

SEQ ID NO: 901 - protein, 645 aa, Alphatorquevirus sp.; identical to SEQ ID NO: 819

SEQ ID NO: 902 - DNA, 3297 bp, Alphatorquevirus sp.
cgggagccggaggtgagtttacacaccgcagtctaggggcaattcgggcacgggtctggccgggctatgggcaagactcttaaaaagtttccccgctgtgttcttcgccaggacatcaagtcatgccgtggcgaccgccggtgcataacatcccgggtagggaaaaccagtggtttgcatgcttttttcactcgcatgctgctttttgcgggtgcggtgacgctgtcgggcatcttaatagcattgctcctcgctttcttaacgccgctcctccgagaccacctccagggctagaccagccgaacctcggagggccggaaggtcccggaggtccccccagagccctgccagctctgccggccccggcagagcctgagccggcaccacgccgtggtggtggggaagatggaggcggcgccgctggggccgccgccgccgcagaccatggaggctacgaagaaggagatctagaagatcttttcgccgcggccgccgaagacgatatgtgagtaggcggtggcgccgccgcagtttcaggcgcagacgcagacggggcagacgcagggggcgacgaaagaaacacaagcccacccttatactgagacagtggcaacctgacgtagtcagaccctgcaaaataacaggatggatgcccctaattatctgtgggtcaggaagcacccaattcaactttataacccacatggatgactttcctcccatggggtacacctacgggggcaacttcaccaacctcaccttctccttagaaggaatatatgaacagtttttgtaccacagaaacaggtggagctcctctaaccacgacctggacctggccaggtaccagggaaccaccctaaaactgtacagacacgaatacctagactacatagttagctacaacagaacaggcccttttcagatcagtgacatgacctacctcagcactcaccctgccttcatgctactacaaaaacacaggatagtagtgcccagctttaagaccaagccacgcgggcgcaggtccataaaaattagaataaagcccccaaaactcatgctgaacaagtggtacttcacaaaagacatatgcagcatgggcctcttccagctacaggccacagcatgcaccttaaacaacccctggctcagagataccacaaaaagcccagtcataggcttcagagtacttaaaaacagcatatacacaaacctcagcaacctacctgaacaggacggtaccagacaagccattagaaaaagactacacccagaaagtctaacaggctcaagtccaaaccaaaaaggctgggagattagctacacaaaactaatggccccaatatattaccaagccaacaaaaacagcacatacaactggctaaactaccaagacaactatgataatacttacaaagcatttaaattaaaaatggaacaaaatctaaagcttatacaaaaagagtacacataccactaccccaacaatgtcaccacagacattgtagaaaaaaacacccttacacacgactggggcatatacagtccctactggctaactccaacaagaatcagcctagactgggaaacaccctggacatatgttagatacaacccactagcagacaagggcataggcaatgttgtatacgcacagtggtgctcagaatcaagctgcagagtagaccaaaagaagagcaagtgcataatgagagacctgccactgtgggtaatattttatggctacgtagactggatagtaaaatccacaggcgtcagcagcgcagtcactgacatgagagtagccataataagtccctacaccgagccggcacttatagggtcaacaccagacgtaggctttattccagtaagtgacaccttttgcaacggagacatgccgtttcttgccccatacatccctgtgggctggtggatcaagtggtaccccatgattgcacaccaaaaggaagtgtttgaggcaatagttaactgtggaccgtttgtcccacgagaccagaccaaaccctcttgggaaattaccatgggttacaaaatgaactggaaatggggcggctctcccctgccttcacaggcaatcgacgacccctgtcagaagcccacccatgagctacccgatcccgatagacaccctcgcatgctacaagtctcagacccgacaaagctcggaccgaagacagtgttccacaagtgggactggagacgtgggatgcttagcaaaagaagtattaaaagagtccaagaagactcaagcgatgatgaatatgttgcaggacctttgcaaagaaaaagacacaagatggataccagagcagcaggcctgcaaacccccgaaaaagaaagttacactttactccaagccctccaagactcggcagaagagaacctgtcgagccaagaacaagcaccccaagaaaaagaggtgcaggaaaaagcgctcctggagcagctccagctccagaaacagcaccagcgagtcctcaaacgaggcctcaaactcctcctgggagacgtcctccgactccgccgaggagtccactgggaccccctcctgtcataattcagggtccctgtatcccagacctgcttttccctaacacacaaaaaaaaaagaaattttccaactacgactggtcggtagagtacgagctggccaaatggatggatcgtcctttgcggcactacccatccgacctccctcactacccctggctaccaaaaaagccacctacccttcctacatgtagagtaagtttcaaattaaagctagattcctaactttcaaggccgtgggtgtttcacttcatcggtgtctacctctaaaggtcactaagcactccgagcaaagcgaggagtgcgacccccctgcccggtagcaacttcctcggggtccggcgctacgccttcggctgcgccggacgcctcggaccccccctcgacccgaatcgctcgcgcgattcggaccccccccaccagggggcgctgcgcgcccccccccccgcgcatgcgcgggtcccccccccgcgggggggctccgcccccccggcccccccccgtgctaaatccaccgcgcacgcgcgaccacgcccccgccgccattttctgcagcccgccaatttcttttcaaacagaccaattacaatgtactacgtgcacttcctggggcgtgtcttcccagtctatataagcagaggcagtgacgaatggtagagttttttctggcccgtccgcggcgagagcgcgagcgaagcgagcgatcgagcgacccgtggg

SEQ ID NO: 903 - protein, 661 aa, Alphatorquevirus sp.
LRQWQPDVVRPCKITGWMPLIICGSGSTQFNFITHMDDFPPMGYTYGGNFTNLTFSLEGIYEQFLYHRNRWSSSNHDLDLARYQGTTLKLYRHEYLDYIVSYNRTGPFQISDMTYLSTHPAFMLLQKHRIVVPSFKTKPRGRRSIKIRIKPPKLMLNKWYFTKDICSMGLFQLQATACTLNNPWLRDTTKSPVIGFRVLKNSIYTNLSNLPEQDGTRQAIRKRLHPESLTGSSPNQKGWEISYTKLMAPIYYQANKNSTYNWLNYQDNYDNTYKAFKLKMEQNLKLIQKEYTYHYPNNVTTDIVEKNTLTHDWGIYSPYWLTPTRISLDWETPWTYVRYNPLADKGIGNVVYAQWCSESSCRVDQKKSKCIMRDLPLWVIFYGYVDWIVKSTGVSSAVTDMRVAIISPYTEPALIGSTPDVGFIPVSDTFCNGDMPFLAPYIPVGWWIKWYPMIAHQKEVFEAIVNCGPFVPRDQTKPSWEITMGYKMNWKWGGSPLPSQAIDDPCQKPTHELPDPDRHPRMLQVSDPTKLGPKTVFHKWDWRRGMLSKRSIKRVQEDSSDDEYVAGPLQRKRHKMDTRAAGLQTPEKESYTLLQALQDSAEENLSSQEQAPQEKEVQEKALLEQLQLQKQHQRVLKRGLKLLLGDVLRLRRGVHWDPLLS

SEQ ID NO: 904 - DNA, 3290 bp, Gammatorquevirus sp.
cgggagcccgaggtgagtgaaaccaccgaggtctaggggcaattcgggctagggcagtctagcggaacgggcaagaaacttaaatagtatttttttttttagaatgaacaacattactgctgcagactttcacaaacctacaacctacaatgttgataccttaaatcaaatatggatgtctcagataagtgattcccatgacatttggtgcaactgctcaggtccttttgctcatttgcttgcttctatttttcctcctggtcataaagaccgtgatctcacagttaatcaaattattaaaagagactacaaagcatcatgccattctggtgggccagaagaaagaaaccctggtacaacaactggattcgctaccggcgcaaatataaaagaagaagatggcccagaagacgacgtagaaggcctacttttcgccgccgccgccgccgccgcagaagaaaaagacaggtaagaagaaaaagacaaaaaataatagttaaacaatggcaaccagaatctattgttaaatgtaaaataaaaggactaggatgtttagttgctggggctcaaggtagacaagctttttgctatacaaacagtaaatatgattatccacaacctaaagctccaggcggcggtggctttggagctgaactgttttctctacaatatttatatgatgaatggatagctagaagaaatatatggactaaaagcaatgactataaagaccttgttagatttacaggagcaacattttacttatacaaacatcctacaacagactttgtttttaactacaataatcaaccaccttttttactagaaaaagatttttacaatgacttacacccacaatcactgttacttgcaaaacatcacagagttatacccagcagagaaagaaaaccactaggaaaaccatatgtaaaagttaaaattaaaccacctaaacaaatgctcactaagtggtttttccaacaagactttgccacacaaggcttattttcaatacatgcagcagctgcaaacatgcaatgggcatactataatccagaccaacagagcagatgccttacactttactcattaaatactaaattttttgctaacactgactgggcagccacacatacaggcacacagttatacctgccttacaaccagtggccacacacagcaggactaaccttctggacaatagataacaaaggtaataaacatccacataaaattaaccctcaaaactatctccaaagtgttaattacaatgaaggctttttttctcaatatgtattgcaagctcagaaaattactaaggccacagaaaatacacctaccgagtatgacagatatccaccagctatggccaccttacctatagctgcttttagatataatccagaagaagatacaggacaaggaaatgtagtttggctaaccagtactctttcaaacacacactgggacagaccacaactatcagacttagtaatagtaggcaaacctctttggatggccttctatggctttgaaagctttatacaaaaaactaagcatgacaaaggttggctactatcaggattttatgtatgtaaatgcccatacttaaaaactttatcaacaacaactcaacaaacatttgcctttatagacctcgattttatacaaggaaaactaccctatggagaaacagttacagaccaaaaaaaagctctatggtaccctaatgtagaaaaccaagttaatactattgcatccctagtacagtgtggaccctatatacctaaatatgcctatcaagatcaaagtacctgggaactaacctacaaatatatcttttattttaagtggggaggcccatatgtgtcagaccagcctgttcaaaatcccaaaacacaaggaaagtaccccgtacccgatacagtcacacaagcaatacaaattagcaacccgctcaaacaaacctgtaaagcaatgcttagagactgggactacagaaggggtattgttacaacaacagctcttaaaagaatgtcagaacacctcccaactgattcatctgtccaatctgatgacacagaaactccaaaaaaaaagaaaaaaacaacagcagaaataccctactaccaggaaaagacagaagagatgcagagctgtctcctctcgctcttcgaagaaagtacatgccaagaaccagaaaacctccagcagctcatcctccaccagcagcagcagcagcaaaagctcaagtcaaacatcctcaagctcctaatggacctaaaacaccaacaaagaattctacaacatcacacaggcatagaataactgaatttaaacctggttttgaacaagaaacagaaaaacagttagcagaagcatttaaaagacccataagaaaatttaaagaagaccccccattttatccctggttacccattacccccattgtttgctttaaccttaattataaatgctaggccgacactgttcacttagcggtgtttgtttatataagtttacaccccaaaaaaattgtaaaataaaaaaaaaaaaaaaaaaaaataaaaaattgcaaaaattcggcgctcgcgcgcgctgcgcgcgcgcgagcgccgtcacgcgccggcgctcgcgcgccgcgcgtatgtgctaacacaccacgcacctagattggggtgcgcgcgctagcgcgcgcaccccaatgcgccccgccctcgttccgacccgcttgcgtgggtcggaccacttcgggctcggggggggcgcgcctgcggcgcttatttactaaacagactccgagtcgccatttggcccccccccctaagctccgcccccctcatgaatattcataaaggaaaccacaaagcccccccccctaagctccgcccccctcatgaatattcataaaggaaaccacaaaattagaattgccgaccacaaactgccatatgctaattagttccccttttacacagtaaaaaggggaagtggggggggcatagcccccccacaccccccgcgggggggggcaaacccccccccgcaccccccctacgtcacaaaccacgcccccgccgccatcttgggtgcggcagggcggagactaaaatggcggcaaccaatcactttatactttcactttccaattaaaacatgccacgtcacactaacagggcgaagactaaaaactatatattaaactactgtgacgaatggctgagtttaccccgctagacggtgcagggaccggatcgagcgcagcgaggaggtccccggctgcccttggg

SEQ ID NO: 905 - protein, 669 aa, Gammatorquevirus sp.; identical to SEQ ID NO: 289

SEQ ID NO: 906 - protein, 122 aa, Gammatorquevirus sp.; identical to SEQ ID NO: 290

SEQ ID NO: 907 - protein, 107 aa, Gammatorquevirus sp.; identical to SEQ ID NO: 291

SEQ ID NO: 908 - DNA, 3289 bp, Gammatorquevirus sp.
cgggagcccgaggtgagtgaaaccaccgaggtctaggggcaattcgggctagggcagtctagcggaacgggcaagaaacttaaatagtatttttttttttagaatgaacaacattactgctgcagactttcacaaacctacaacctacaatgttgataccttaaatcaaatatggatgtctcagataagtgattcccatgacatttggtgcaactgctcaggtccttttgctcatttgcttgcttctatttttcctcctggtcataaagaccgtgatctcacagttaatcaaattattaaaagagactacaaagcatcatgccattctggtgggccagaagaaagaaaccctggtacaacaactggattcgctaccggcgcaaatataaaagaagaagatggcccagaagacgacgtagaaggcctacttttcgccgccgccgccgccgccgcagaagaaaaagacaggtaagaagaaaaagacaaaaaataatagttaaacaatggcaaccagaatctattgttaaatgtaaaataaaaggactaggatgtttagttgctggggctcaaggtagacaagctttttgctatacaaacagtaaatatgattatccacaacctaaagctccaggcggcggtggctttggagctgaactgttttctctacaatatttatatgatgaatggatagctagaagaaatatatggactaaaagcaatgactataaagaccttgttagatttacaggagcaacattttacttatacaaacatcctacaacagactttgtttttaactacaataatcaaccaccttttttactagaaaaagatttttacaatgacttacacccacaatcactgttacttgcaaaacatcacagagttatacccagcagagaaagaaaaccactaggaaaaccatatgtaaaagttaaaattaaaccacctaaacaaatgctcactaagtggtttttccaacaagactttgccacacaaggcttattttcaatacatgcagcagctgcaaacatgcaatgggcatactataatccagaccaacagagcagatgccttacactttactcattaaatactaaattttttgctaacactgactgggcagccacacatacaggcacacagttatacctgccttacaaccagtggccacacacagcaggactaaccttctggacaatagataacaaaggtaataaacatccacataaaattaaccctcaaaactatctccaaagtgttaattacaatgaaggctttttttctcaatatgtattgcaagctcagaaaattactaaggccacagaaaatacacctaccgagtatgacagatatccaccagctatggccaccttacctatagctgcttttagatataatccagaagaagatacaggacaaggaaatgtagtttggctaaccagtactctttcaaacacacactgggacagaccacaactatcagacttagtaatagtaggcaaacctctttggatggccttctatggctttgaaagctttatacaaaaaactaagcatgacaaaggttggctactatcaggattttatgtatgtaaatgcccatacttaaaaactttatcaacaacaactcaacaaacatttgcctttatagacctcgattttatacaaggaaaactaccctatggagaaacagttacagaccaaaaaaaagctctatggtaccctaatgtagaaaaccaagttaatactattgcatccctagtacagtgtggaccctatatacctaaatatgcctatcaagatcaaagtacctgggaactaacctacaaatatatcttttattttaagtggggaggcccatatgtgtcagaccagcctgttcaaaatcccaaaacacaaggaaagtaccccgtacccgatacagtcacacaagcaatacaaattagcaacccgctcaaacaaacctgtaaagcaatgcttagagactgggactacagaaggggtattgttacaacaacagctcttaaaagaatgtcagaacacctcccaactgattcatctgtccaatctgatgacacagaaactccaaaaaaaaagaaaaaaacaacagcagaaataccctactaccaggaaaagacagaagagatgcagagctgtctcctctcgctcttcgaagaaagtacatgccaagaaccagaaaacctccagcagctcatcctccaccagcagcagcagcagcaaaagctcaagtcaaacatcctcaagctcctaatggacctaaaacaccaacaaagaattctacaacatcacacaggcatagaataactgaatttaaacctggttttgaacaagaaacagaaaaacagttagcagaagcatttaaaagacccataagaaaatttaaagaagaccccccattttatccctggttacccattacccccattgtttgctttaaccttaattataaatgctaggccgacactgttcacttagcggtgtttgtttatataagtttacaccccaaaaaaattgtaaaataaaaaaaaaaaaaaaaaaaaataaaaaattgcaaaaattcggcgctcgcgcgcgctgcgcgcgcgcgagcgccgtcacgcgccggcgctcgcgcgccgcgcgtatgtgctaacacaccacgcacctagattggggtgcgcgcgctagcgcgcgcaccccaatgcgccccgccctcgttccgacccgcttgcgtgggtcggaccacttcgggctcgggggggcgcgcctgcggcgcttatttactaaacagactccgagtcgccatttggcccccccccctaagctccgcccccctcatgaatattcataaaggaaaccacaaagcccccccccctaagctccgcccccctcatgaatattcataaaggaaaccacaaaattagaattgccgaccacaaactgccatatgctaattagttccccttttacacagtaaaaaggggaagtggggggggcatagcccccccacaccccccgcgggggggggcaaacccccccccgcaccccccctacgtcacaaaccacgcccccgccgccatcttgggtgcggcagggcggagactaaaatggcggcaaccaatcactttatactttcactttccaattaaaacatgccacgtcacactaacagggcgaagactaaaaactatatattaaactactgtgacgaatggctgagtttaccccgctagacggtgcagggaccggatcgagcgcagcgaggaggtccccggctgcccttggg

SEQ ID NO: 909 - protein, 669 aa, Gammatorquevirus sp.; identical to SEQ ID NO: 289

SEQ ID NO: 910 - protein, 122 aa, Gammatorquevirus sp.; identical to SEQ ID NO: 290

SEQ ID NO: 911 - protein, 107 aa, Gammatorquevirus sp.; identical to SEQ ID NO: 291

SEQ ID NO: 912 - DNA, 3289 bp, Gammatorquevirus sp.
cgggagcccgaggtgagtgaaaccaccgaggtctaggggcaattcgggctagggcagtctagcggaacgggcaagaaacttaaatagtatttttttttttagaatgaacaacattactgctgcagactttcacaaacctacaacctacaatgttgataccttaaatcaaatatggatgtctcagataagtgattcccatgacatttggtgcaactgctcaggtccttttgctcatttgcttgcttctatttttcctcctggtcataaagaccgtgatctcacagttaatcaaattattaaaagagactacaaagcatcatgccattctggtgggccagaagaaagaaaccctggtacaacaactggattcgctaccggcgcaaatataaaagaagaagatggcccagaagacgacgtagaaggcctacttttcgccgccgccgccgccgccgcagaagaaaaagacaggtaagaagaaaaagacaaaaaataatagttaaacaatggcaaccagaatctattgttaaatgtaaaataaaaggactaggatgtttagttgctggggctcaaggtagacaagctttttgctatacaaacagtaaatatgattatccacaacctaaagctccaggcggcggtggctttggagctgaactgttttctctacaatatttatatgatgaatggatagctagaagaaatatatggactaaaagcaatgactataaagaccttgttagatttacaggagcaacattttacttatacaaacatcctacaacagactttgtttttaactacaataatcaaccaccttttttactagaaaaagatttttacaatgacttacacccacaatcactgttacttgcaaaacatcacagagttatacccagcagagaaagaaaaccactaggaaaaccatatgtaaaagttaaaattaaaccacctaaacaaatgctcactaagtggtttttccaacaagactttgccacacaaggcttattttcaatacatgcagcagctgcaaacatgcaatgggcatactataatccagaccaacagagcagatgccttacactttactcattaaatactaaattttttgctaacactgactgggcagccacacatacaggcacacagttatacctgccttacaaccagtggccacacacagcaggactaaccttctggacaatagataacaaaggtaataaacatccacataaaattaaccctcaaaactatctccaaagtgttaattacaatgaaggctttttttctcaatatgtattgcaagctcagaaaattactaaggccacagaaaatacacctaccgagtatgacagatatccaccagctatggccaccttacctatagctgcttttagatataatccagaagaagatacaggacaaggaaatgtagtttggctaaccagtactctttcaaacacacactgggacagaccacaactatcagacttagtaatagtaggcaaacctctttggatggccttctatggctttgaaagctttatacaaaaaactaagcatgacaaaggttggctactatcaggattttatgtatgtaaatgcccatacttaaaaactttatcaacaacaactcaacaaacatttgcctttatagacctcgattttatacaaggaaaactaccctatggagaaacagttacagaccaaaaaaaagctctatggtaccctaatgtagaaaaccaagttaatactattgcatccctagtacagtgtggaccctatatacctaaatatgcctatcaagatcaaagtacctgggaactaacctacaaatatatcttttattttaagtggggaggcccatatgtgtcagaccagcctgttcaaaatcccaaaacacaaggaaagtaccccgtacccgatacagtcacacaagcaatacaaattagcaacccgctcaaacaaacctgtaaagcaatgcttagagactgggactacagaaggggtattgttacaacaacagctcttaaaagaatgtcagaacacctcccaactgattcatctgtccaatctgatgacacagaaactccaaaaaaaaagaaaaaaacaacagcagaaataccctactaccaggaaaagacagaagagatgcagagctgtctcctctcgctcttcgaagaaagtacatgccaagaaccagaaaacctccagcagctcatcctccaccagcagcagcagcagcaaaagctcaagtcaaacatcctcaagctcctaatggacctaaaacaccaacaaagaattctacaacatcacacaggcatagaataactgaatttaaacctggttttgaacaagaaacagaaaaacagttagcagaagcatttaaaagacccataagaaaatttaaagaagaccccccattttatccctggttacccattacccccattgtttgctttaaccttaattataaatgctaggccgacactgttcacttagcggtgtttgtttatataagtttacaccccaaaaaaattgtaaaataaaaaaaaaaaaaaaaaaaaataaaaaattgcaaaaattcggcgctcgcgcgcgctgcgcgcgcgcgagcgccgtcacgcgccggcgctcgcgcgccgcgcgtatgtgctaacacaccacgcacctagattggggtgcgcgcgctagcgcgcgcaccccaatgcgccccgccctcgttccgacccgcttgcgtgggtcggaccacttcgggctcggggggggcgcgcctgcggcgcttatttactaaacagactccgagtcgccatttgcccccccccctaagctccgcccccctcatgaatattcataaaggaaaccacaaagcccccccccctaagctccgcccccctcatgaatattcataaaggaaaccacaaaattagaattgccgaccacaaactgccatatgctaattagttccccttttacacagtaaaaaggggaagtggggggggcatagcccccccacaccccccgcgggggggggcaaacccccccccgcaccccccctacgtcacaaaccacgcccccgccgccatcttgggtgcggcagggcggagactaaaatggcggcaaccaatcactttatactttcactttccaattaaaacatgccacgtcacactaacagggcgaagactaaaaactatatattaaactactgtgacgaatggctgagtttaccccgctagacggtgcagggaccggatcgagcgcagcgaggaggtccccggctgcccttggg

SEQ ID NO: 913 - protein, 669 aa, Gammatorquevirus sp.; identical to SEQ ID NO: 289

SEQ ID NO: 914 - protein, 122 aa, Gammatorquevirus sp.; identical to SEQ ID NO: 290

SEQ ID NO: 915 - protein, 107 aa, Gammatorquevirus sp.; identical to SEQ ID NO: 291

SEQ ID NO: 916 - DNA, 3288 bp, Alphatorquevirus sp.
cgggtgccggaggtgagtttacacaccgcagtcaaggggcaattcgggcacgggactggccgggctatgggcaagattcttaaaaaatttccccgatccctttgtcgccaggacataaaaacatgccgtggagaccgccggtacatagtgtccaggggcgagaggatcagtggttcgcaggcttttttcacagccacgcttcattttgcggttgcggtgacgctgttggccatcttaatagcattgctcatcgctttcctcgcgccggtccaccaaggccccctccggggctagagcagcctaaccccccggagcagggccccgccgggcccggagggccgcccgccatcttggccctgccggctccgcccgcggagcctgacgacccgcagccacgccgtggtggtggggacggtggcgccgccgctggcgccgcaggcgaccgtggagaccgagactacgacgaagaagagctagacgagcttttccgcgccgccgccgaagacgatttgtaagtaggagatggcgccggccttacaggcgcaggaggagacgcgggcgacgcagacgcagacgcagacgcagacataagcccaccctagtactcagacagtggcaacccgacgttatcagacactgtaagataacaggatggatgcccctcattatctgtggaaaggggtccacccagttcaactacatcacccacgcggacgatatcacccccaggggagcctcctacgggggcaacttcacaaacatgactttctccctggaagccatatatgaacagtttctgtaccacagaaacaggtggtcggcctccaaccacgacctagaactctgcaggtacaagggtaccaccctaaaactatacagacacccagatgtagattacatagtcacctacagcagaacaggacccttcgagatcagccacatgacctacctcagtactcaccccctgctaatgctgctaaacaagcaccacatagtggtgcccagcctaaagactaagcccaggggcagaaaggccataaaagtaaggataaggcccccaaaactcatgaacaacaagtggtacttcaccagagacttctgtaacataggcctcttccagctctgggccacaggcttagaactcagaaacccctggctcagaatgagcaccctgagcccctgcataggcttcaatgtccttaaaaacagcatctacaccaacctcagcaacctgccacaataccaacaagccagattaaacattattaacaacacacttcacccacatgacataacaggtgcaaacaacaaaaagtggcagtacacatacacaaagcttatggcccctatttactattcagcaaacagggccagcacctatgactgggaaaattacagcaaggaaactaactaccatcagacatatctaaaattcaaccaaaaaagagaagacaaacttacaaaaattaaaaaagagtggcagatgctttatccacatcaatctacagcactgccagagtcctatgaccttttacaagagtatggcctatacagcccatactacctaaaccccacgagaataaacctagactggatgaccccctacacacacgtaaggtacaaccccctggtagacaaaggcttcggaaacagaatatacatccagtggtgctcagaggcagatgtcagctacaacaaaacaaagtccaagtgtctgctacaagacatgcccctgtttttcatggcctatggctacatagactgggcaataaaaaacacaggagtgtcttcactagtgagggacgccagaatctgcatcaggtgtccctacacagagccacagctcgtgggatccacagaagacataggctttgtacccatctcagaaactttcatgaggggcgacatgccggtacttgcaccatacataccgttaagctggttttgcaagtggtatcccaacatagctcaccaaaaggaagtccttgaggcaatcatttcctgcagccccttcatgccccgtgaccaggacatgaacggttgggatatcacaatcggttacaaaatggacttcttatggggcggttcccctctcccctcacagccaatcgacgacccctgccagcagggaacccacccgattcccgaccccgataagcaccctcgcctcctacaagtctcgaacccgaaactactcggaccgaggacagtgttccacaagtgggacatcagacgtgggcagtttagcaaaagaagtattaaaagagtgtcagaatactcaagcgatgatgaatctcttgcgccaggtctcccatcaaagcgaaacaagctcgactcggcgttcagaggagaaaacccagagcaaaaagaatgctattctctcctcaaagcgctcgaggaagaagagaccccagaagaagaagaaccagcaccccaagaaaaagcccagaaagaggagctactccaccagctccagctccaaagacgccaccagcgagtcctcagacgagggctcaagctcgtctttacagacatcctccgactccgccagggagtccactggaaccccgagctcacatagagcccccaccttacatacccgaccttctttttcccaatactggtaaaaaaaaaaagttctctcccttcgactgggagacagaagcccagctggcggggtggatgcggcggcctatgcgcttctatccctcagacacccctcactacccgtggctaccccccgagcgagatatcccgaaaatatgtaacataaacttcaaaataaagcttcaagagtaagtgattcgaggccctcctctgttcacttagcggtgtctacctcttaaggtcactaagcactccgagcgccagcgaggagtgcgaccctctaccaaggggcaacttcctcggggtccggcgctacgcgcttcgcgctgcgccggacgcgtcggaccccccctcgacccgaatcgctcgcgcgattcggaccgggggcgctgcgcgccccccccccccgcgcatgcgcggggccccccccgcgggggggctccgcccccccggcccccccccgtgctaagtccaccgcgcatgcgcgaacacgcccccgccgccattttgttcagcccgccaatttctctttcaaacaggccaatcagctactacttcgtgcacttcctggggcgtgtcctccccctctatataagcagaggcggtgacgaatggtagagtttttcctggcccgtccgcggcgagagcgcgagcgaagcgagcgatcgagcgtcccgtggg

SEQ ID NO: 917 - protein, 641 aa, Alphatorquevirus sp.
MPLIICGKGSTQFNYITHADDITPRGASYGGNFTNMTFSLEAIYEQFLYHRNRWSASNHDLELCRYKGTTLKLYRHPDVDYIVTYSRTGPFEISHMTYLSTHPLLMLLNKHHIVVPSLKTKPRGRKAIKVRIRPPKLMNNKWYFTRDFCNIGLFQLWATGLELRNPWLRMSTLSPCIGFNVLKNSIYTNLSNLPQYQQARLNIINNTLHPHDITGANNKKWQYTYTKLMAPIYYSANRASTYDWENYSKETNYHQTYLKFNQKREDKLTKIKKEWQMLYPHQSTALPESYDLLQEYGLYSPYYLNPTRINLDWMTPYTHVRYNPLVDKGFGNRIYIQWCSEADVSYNKTKSKCLLQDMPLFFMAYGYIDWAIKNTGVSSLVRDARICIRCPYTEPQLVGSTEDIGFVPISETFMRGDMPVLAPYIPLSWFCKWYPNIAHQKEVLEAIISCSPFMPRDQDMNGWDITIGYKMDFLWGGSPLPSQPIDDPCQQGTHPIPDPDKHPRLLQVSNPKLLGPRTVFHKWDIRRGQFSKRSIKRVSEYSSDDESLAPGLPSKRNKLDSAFRGENPEQKECYSLLKALEEEETPEEEEPAPQEKAQKEELLHQLQLQRRHQRVLRRGLKLVFTDILRLRQGVHWNPELT

SEQ ID NO: 918 - DNA, 3287 bp, Gammatorquevirus sp.
cgggagcccgaggtgagtgaaaccaccgaggtctaggggcaattcgggctagggcagtctagcggaacgggcaagaaacttaaatagtatttttttttttagaatgaacaacattactgctgcagactttcacaaacctacaacctacaatgttgataccttaaatcaaatatggatgtctcagataagtgattcccatgacatttggtgcaactgctcaggtccttttgctcatttgcttgcttctatttttcctcctggtcataaagaccgtgatctcacagttaatcaaattattaaaagagactacaaagcatcatgccattctggtgggccagaagaaagaaaccctggtacaacaactggattcgctaccggcgcaaatataaaagaagaagatggcccagaagacgacgtagaaggcctacttttcgccgccgccgccgccgccgcagaagaaaaagacaggtaagaagaaaaagacaaaaaataatagttaaacaatggcaaccagaatctattgttaaatgtaaaataaaaggactaggatgtttagttgctggggctcaaggtagacaagctttttgctatacaaacagtaaatatgattatccacaacctaaagctccaggcggcggtggctttggagctgaactgttttctctacaatatttatatgatgaatggatagctagaagaaatatatggactaaaagcaatgactataaagaccttgttagatttacaggagcaacattttacttatacaaacatcctacaacagactttgtttttaactacaataatcaaccaccttttttactagaaaaagatttttacaatgacttacacccacaatcactgttacttgcaaaacatcacagagttatacccagcagagaaagaaaaccactaggaaaaccatatgtaaaagttaaaattaaaccacctaaacaaatgctcactaagtggtttttccaacaagactttgccacacaaggcttattttcaatacatgcagcagctgcaaacatgcaatgggcatactataatccagaccaacagagcagatgccttacactttactcattaaatactaaattttttgctaacactgactgggcagccacacatacaggcacacagttatacctgccttacaaccagtggccacacacagcaggactaaccttctggacaatagataacaaaggtaataaacatccacataaaattaaccctcaaaactatctccaaagtgttaattacaatgaaggctttttttctcaatatgtattgcaagctcagaaaattactaaggccacagaaaatacacctaccgagtatgacagatatccaccagctatggccaccttacctatagctgcttttagatataatccagaagaagatacaggacaaggaaatgtagtttggctaaccagtactctttcaaacacacactgggacagaccacaactatcagacttagtaatagtaggcaaacctctttggatggccttctatggctttgaaagctttatacaaaaaactaagcatgacaaaggttggctactatcaggattttatgtatgtaaatgcccatacttaaaaactttatcaacaacaactcaacaaacatttgcctttatagacctcgattttatacaaggaaaactaccctatggagaaacagttacagaccaaaaaaaagctctatggtaccctaatgtagaaaaccaagttaatactattgcatccctagtacagtgtggaccctatatacctaaatatgcctatcaagatcaaagtacctgggaactaacctacaaatatatcttttattttaagtggggaggcccatatgtgtcagaccagcctgttcaaaatcccaaaacacaaggaaagtaccccgtacccgatacagtcacacaagcaatacaaattagcaacccgctcaaacaaacctgtaaagcaatgcttagagactgggactacagaaggggtattgttacaacaacagctcttaaaagaatgtcagaacacctcccaactgattcatctgtccaatctgatgacacagaaactccaaaaaaaaagaaaaaaacaacagcagaaataccctactaccaggaaaagacagaagagatgcagagctgtctcctctcgctcttcgaagaaagtacatgccaagaaccagaaaacctccagcagctcatcctccaccagcagcagcagcagcaaaagctcaagtcaaacatcctcaagctcctaatggacctaaaacaccaacaaagaattctacaacatcacacaggcatagaataactgaatttaaacctggttttgaacaagaaacagaaaaacagttagcagaagcatttaaaagacccataagaaaatttaaagaagaccccccattttatccctggttacccattacccccattgtttgctttaaccttaattataaatgctaggccgacactgttcacttagcggtgtttgtttatataagtttacaccccaaaaaaattgtaaaataaaaaaaaaaaaaaaaaaaataaaaaattgcaaaaattcggcgctcgcgcgcgctgcgcgcgcgcgagcgccgtcacgcgccggcgctcgcgcgccgcgcgtatgtgctaacacaccacgcacctagattggggtgcgcgcgctagcgcgcgcaccccaatgcgccccgccctcgttccgacccgcttgcgcgggtcggaccacttcgggctcgggggggcgcgcctgcggcgcttatttactaaacagactccgagtcgccatttggcccccccccctaagctccgcccccctcatgaatattcataaaggaaaccacaaaattagaattgccgaccacaaactgccatatgctaattagttccccttttacacagtaaaaaggggaagtggggggggggggggggggggggggggggggggggggggggggggggggggggggggggggggcatagcccccccacaccccccgcgggggggggcagagccccccccgcaccccccctacgtcacaaaccacgcccccgccgccatcttgggtgcggcagggcggagactaaaatggcggcaaccaatcactttatactttcactttccaattaaaacatgccacgtcacactaacagggcgaagactaaaaactatatattaaactactgtgacgaatggctgagtttaccccgctagacggtgcagggaccggatcgagcgcagcgaggaggtccccggctgcccttggg

SEQ ID NO: 919 - protein, 669 aa, Gammatorquevirus sp.; identical to SEQ ID NO: 289

SEQ ID NO: 920 - protein, 122 aa, Gammatorquevirus sp.; identical to SEQ ID NO: 290

SEQ ID NO: 921 - protein, 107 aa, Gammatorquevirus sp.; identical to SEQ ID NO: 291

SEQ ID NO: 922 - DNA, 3286 bp, Alphatorquevirus sp.
cccgtgcttaatccaccgcgcatgcgcgaccacgcccccgccgccattttatgcaacccgccaatttctctttcaaacaggccaatcagctactactttgtgcacttcctggggcgtgtcctgccactgtatataagcagaggcagtgacgaatggtagagtttttcctggcccgtccgcggcgagagcgcgagcgaagcgagcgatcgagcgtcccgtgggcgggtgccggaggtgagtttacacaccgcagtcaaggggcaattcgggcacgggactggccgggctatgggcaagattcttaaaaaattcccccgatccctctgccgccaggacataaaaacatgccgtggagaccgccggtgcatagtgtccaggggcgagaggatcagtggttcgcgagcttttttcacggccacgcttcgttttgcggctgcggtgaccctgttgagcatcttaatagcattgctggtcgctttcctcgcgccggtccacccagaccccctccagggctacagcagcctaaccccccgcagcagggcccggccgggcccgaagggccgcccgccatcttagccctaccggctccgcccgcggagcctgacgacccgcagccacgccgtggtggtggggacgctggcgccgccgctggcgccgcaggcgaccgtggagaccgagactacgacgaagaagagctagacgagcttttccgcgccgccgccgaagacgatttgtaagtaggagatggcgccggccttacaggcgcaggaggagacgcgggcgacgcagacgcagacgcagacgcagacataagcccaccctagtactgagacagtggcaacccgacgttatcagacactgtaagataacaggatggatgcccctcattatctgtggaaaggggtccacccagttcaactacatcacccacgcagacgatatcaccccaaggggagcctcctacgggggcaacttcacaaacatgactttctctctggaggccatatatgaacagtttgtgtaccacagaaacaggtggtcggcctccaaccacgacctagaactctgcaggtacaggggtaccaccttaaaactctacaggcacccagaagtagactacatagtcacctacagcaggacaggccctttcgagatcagccacatgacctacctgagcactcacccactgctaatgctgctaaacaagcaccacatagtggtgcccagcctaaagactaagcccaggggcagaaaggccataaaagtgagaataaggcccccaaaactcatgaacaacaagtggtactttaccagagacttctgtaacataggcctcttccagctctgggccacaggcttagaactcagaaacccctggctcagaatgagcaccctcagcccctgcataggcttcaatgtccttaaaaacagcatctacaccaaccttagcaacctgccacaacacaaacaagccagattagacattataaacaacacacttcacccacatgaaattacaggaccaaacaacaaaaagtggcagtacacttacaccaaactcatggcccctatttactatgcagcaaacagggccagcacctatgactgggaaaattacagcaatgaaactaactacaacaacacatatcttaaatttgatcaaaaaagaaatgaaaaattaaccaaaatcagaaaagagtggcagatgctgtatccacaacaacctacagcactgccagactcctatgacctcctacaggagtatggcctatacagcccatactaccttaaccccacaagaataaacctagactggatgaccccctacacacacgttaggtacaacccccttgtagacaagggctttggaaacagaatatacatccagtggtgctcagagtcagatgttagctacaacagaacaaagtccaagtgtctcttacaagacatgcccctctttttcatggcctatggctacatagactgggcaataaaaaacacaggcgtgtcctcactagtcaaagacgccagaatctgcatcaggtgtccctacacagagccacagctagtggggtccacagaagacataggctttgtacccatctcagagaccttcatgaggggcgacatgccggtacttgcaccatacataccgttgagctggttttgcaagtggtatcccaacatagctcaccagaaggaagtccttgaggcaatcatttcctgcagccccttcatgccccgtgaccaggacatgaacggttgggatatcacaatcggttacaaaatggacttcttatggggcggttcccctctcccctcacagccaatcgacgacccctgccagcagggaacccacccgattcccgaccccgataagcaccctcgcctcctacaagtctcgaacccgaaactactcggaccgaggacagtgttccacaagtgggacatcagacgtgggcagtttagcaaaagaagtattaagagagtgtcagaatactcaagcgatgatgaatctcttgcgccaggtctcccatcaaagcgaaacaagctcgactcggcgttcagaggagaaaatcgagagcaaaaagaatgctattctctcctcaaagcgctcgaagaagaggagaccccagaagaagaagaaccagcaccccaagaaaaagcccagaaagaggagctactccaccagctccagctccagagacgccaccagcgagtcctcagacgagggctcaagctcgtctttacagacatcctccgactccgccagggagtccactggaaccccgagctcacatagagcccccaccttacatacccgacctgctttttcccaattctggtaaaaaaaaaaaattctctaccttcgactgggagacagaggcccagctggcggggtggatgcggcggcctatgcgcttctatccctcagacacccctcactacccgtggctaccccccgagcgagatatcccgaaaatatgtaacataaacttcaaaataaaacttcaagagtgagtgattcgaggccctcctctgttcacttagcggtgtctacctcttaaggtcaccaagcactccgagcgccagcgaggagtgcgaccctccaccaaggggcaacttcctcggggtccggcgctacgcgcttcgcgctgcgccgcacgcctcggaccccccctcgacccgaatcgctcgcgcgattcggacctgcggcctcgggggggccagtcccgtgcccgaattgccccttgactgcggtgtgtaaactcacctccggcccccc

SEQ ID NO: 923 - protein, 658 aa, Alphatorquevirus sp.
LRQWQPDVIRHCKITGWMPLIICGKGSTQFNYITHADDITPRGASYGGNFTNMTFSLEAIYEQFVYHRNRWSASNHDLELCRYRGTTLKLYRHPEVDYIVTYSRTGPFEISHMTYLSTHPLLMLLNKHHIVVPSLKTKPRGRKAIKVRIRPPKLMNNKWYFTRDFCNIGLFQLWATGLELRNPWLRMSTLSPCIGFNVLKNSIYTNLSNLPQHKQARLDIINNTLHPHEITGPNNKKWQYTYTKLMAPIYYAANRASTYDWENYSNETNYNNTYLKFDQKRNEKLTKIRKEWQMLYPQQPTALPDSYDLLQEYGLYSPYYLNPTRINLDWMTPYTHVRYNPLVDKGFGNRIYIQWCSESDVSYNRTKSKCLLQDMPLFFMAYGYIDWAIKNTGVSSLVKDARICIRCPYTEPQLVGSTEDIGFVPISETFMRGDMPVLAPYIPLSWFCKWYPNIAHQKEVLEAIISCSPFMPRDQDMNGWDITIGYKMDFLWGGSPLPSQPIDDPCQQGTHPIPDPDKHPRLLQVSNPKLLGPRTVFHKWDIRRGQFSKRSIKRVSEYSSDDESLAPGLPSKRNKLDSAFRGENREQKECYSLLKALEEEETPEEEEPAPQEKAQKEELLHQLQLQRRHQRVLRRGLKLVFTDILRLRQGVHWNPELT

SEQ ID NO: 924 - DNA, 3285 bp, Gammatorquevirus sp.
cgggagcccgaggtgagtgaaaccaccgaggtctaggggcaattcgggctagggcagtctagcggaacgggcaagaaacttaaatagtatttttttttttagaatgaacaacattactgctgcagactttcacaaacctacaacctacaatgttgataccttaaatcaaatatggatgtctgagataagtgattcccatgacatttggtgcaactgctcaggtccttttgctcatttgcttgcttctatttttcctcctggtcataaagaccgtgatctcacagttaatcaaattattaaaagagactacaaagcatcatgccattctggtgggccagaagaaagaagccctggtacaacaactggattcgctaccggcgcaaatataaaagaagaagatggcccagaagacgacgtagaaggcctacttttcgccgccgccgccgccgccgcagaagaaaaagacaggtaagaagaaaaagacaaaaaataatagttaaacaatggcaaccagaatctattgttaaatgtaaaataaaaggactaggatgtttagttgctggggctcaaggtagacaagctttttgctatacaaacagtaaatatgattatccacaacctaaagctccaggcggcggtggctttggagctgaactgttttctctacaatatttatatgatgaatggatagctagaagaaatatatggactaaaagcaatgactataaagaccttgttagatttacaggagcaacattttacttatacaaacatcctacaacagactttgtttttaactacaataatcaaccaccttttttactagaaaaagatttttacaatgacttacacccacactcactgttacttgcaaaacatcacagagttatacccagcagagaaagaagaccactaggaaaaccatatgtaaaagttaaaattaaaccacctaaacaaatgctcactaagtggtttttccaacaagactttgccacacaaggcttattttcaatacatgcagcagctgcaaacatgcaatgggcatactataatccagaccaacagagcagatgccttacactttactcattaaatactaaattttttgctaacactgactgggcagccacacatacaggcacacagatatacctgccttacaaccagtggccacacacaacaggactaaccttctggacaatagataacaaaggtggtaaacatccacatgtaatttgccctaaaacctatcacgacagtgttaattacactgaaggctttttttctcaatatgtattgcaagctcagaaaattactacctaccaagaaacagatgtaaagaaatatgacacatatgctgcagctatggccaccttacctatagctgcttttagatataatccagaagaagatacaggacaaggaaatgtagtttggctaaccagtactctttcaaacacacactgggacagaccacaactatcagacttagtaatagtaggcaaacctctttggatggccttctatggctttgaaagctttatacaaaaaactaagcatgacaaaggttggctactatcaggattttatgtatgtaaatgcccatacttaaaaactttatcaacaacaactcaacaaacatttgcctttatagacctcgattttatacaaggtaaactaccctatggagaaacagttacagaccaaaaaaaagctctatggtaccctaatgtagaaaaccaagttaatactattgcatccctagtacagtgtggaccctatatacctaaatatgcctatcaagatcaaagtacctgggaactaacctacaaatatatcttttattttaagtggggaggcccatatgtgtcagaccagcctgttcaaaatcccaaaacacaaggaaagtaccctgtacccgatacagtcacacaagcaatacaaattagcaacccgctcaaacaaacctgtaaagcaatgcttagagactgggactacagaaggggtattgttacaacaacagctcttaaaagaatgtcagaacacctcccaactgattcatctgtccaatctgatgacacagaaactccaaaaaaaaagaaaaagacaacagcagaaataccctactaccaggaaaagacagaagagatgcagagctgtctcctctcgctcttcgaagaaagtacatgccaagaaccagaaaacctccagcagctcatcctccaccagcagcagcagcagcaaaagctcaagtcaaacatcctcaagctcctaatggacctaaaacaccaacagagaattctacaacatcacacaggcatagaatgactgaatttaaacctggttttgaacaagaaacagaaaaacagttagcagaagcatttaaaagacccataagaaaatttaaagaagaccccccattttatccctggttacccattacccccattgtttgctttaaccttaattataaatgctaggccgacactgttcacttagcggtgtttgtttatataagtttacaccccaaaaaaattgtaaaataaaaaaaaaaaaaaaaaaaaataaaaaattgcaaaaattcggcgctcgcgcgcgctgcgcgcgcgcgagcgccgtcacgcgccggcgctcgcgcgccgcgcgtatgtgctaacacaccacgcacctagattggggtgcgcgcgctagcgcgcgcaccccaatgcgccccgccctcgttccgacccgcttgcgcgggtcggaccacttcgggctcgggggggcgcgcctgcggcgcttatttactaaacagactccgagtcgccatttgccccccctaagctccgcccccctcatgaatattcataaaggaaaccacaaaattagaattgccgaccacaaactgccatatgctaattagttccccttttacacagtaaaaaggggaagtggggggggcatagcccccccacaccccccgcggggggggcagagcccccccccgcaccccccctacgtcacaaaccacgcccccgccgccatcttgggtgcggcagggcggccccccctacgtcacaaaccacgcccccgccgccatcttgggtgcggcagggcggagactaaaatggcggcaaccaatcactttatactttcactttccaattaaaacatgccacgtcacactaacagggcggagactaaaaactatatattaaactactgtgacgaatggctgagtttaccccgctagacggtgcagggaccggatcgagcgcagcgaggaggtccccggctgcccttggg

SEQ ID NO: 925 - protein, 669 aa, Gammatorquevirus sp.
MPFWWARRKKPWYNNWIRYRRKYKRRRWPRRRRRRPTFRRRRRRRRRKRQVRRKRQKIIVKQWQPESIVKCKIKGLGCLVAGAQGRQAFCYTNSKYDYPQPKAPGGGGFGAELFSLQYLYDEWIARRNIWTKSNDYKDLVRFTGATFYLYKHPTTDFVFNYNNQPPFLLEKDFYNDLHPHSLLLAKHHRVIPSRERRPLGKPYVKVKIKPPKQMLTKWFFQQDFATQGLFSIHAAAANMQWAYYNPDQQSRCLTLYSLNTKFFANTDWAATHTGTQIYLPYNQWPHTTGLTFWTIDNKGGKHPHVICPKTYHDSVNYTEGFFSQYVLQAQKITTYQETDVKKYDTYAAAMATLPIAAFRYNPEEDTGQGNVVWLTSTLSNTHWDRPQLSDLVIVGKPLWMAFYGFESFIQKTKHDKGWLLSGFYVCKCPYLKTLSTTTQQTFAFIDLDFIQGKLPYGETVTDQKKALWYPNVENQVNTIASLVQCGPYIPKYAYQDQSTWELTYKYIFYFKWGGPYVSDQPVQNPKTQGKYPVPDTVTQAIQISNPLKQTCKAMLRDWDYRRGIVTTTALKRMSEHLPTDSSVQSDDTETPKKKKKTTAEIPYYQEKTEEMQSCLLSLFEESTCQEPENLQQLILHQQQQQQKLKSNILKLLMDLKHQQRILQHHTGIE

SEQ ID NO: 926 - protein, 122 aa, Gammatorquevirus sp.
MNNITAADFHKPTTYNVDTLNQIWMSEISDSHDIWCNCSGPFAHLLASIFPPGHKDRDLTVNQIIKRDYKASCHSGGPEERSPGTTTGFATGANIKEEDGPEDDVEGLLFAAAAAAAEEKDR

SEQ ID NO: 927 - protein, 107 aa, Gammatorquevirus sp.
LSPLALRRKYMPRTRKPPAAHPPPAAAAAKAQVKHPQAPNGPKTPTENSTTSHRHRMTEFKPGFEQETEKQLAEAFKRPIRKFKEDPPFYPWLPITPIVCFNLNYKC

SEQ ID NO: 928 - DNA, 3285 bp, Gammatorquevirus sp.
cgggtgccgaaggtgagtgaaaccaccgtagtcaaggggcaattcgggcggctgcagtctagcggaacgggcaagaaacttaaaaattccgcgcgctgtgcgcgccctatgctttattacagatgtctcttcaaaaccttcctaaatgttacaaacctcctcttgtagatccatggggacaacaagaactctggattcaaaatgtcgaattttcacatgatacatggtgcagctgtgctcattggcttagtcatcttctttctattacttgtcctcttgattctaaaaatcgtgctcggaccgtccacgagattattgacataggtcaaaattgtgataaccttttgtctttgagagccttgcccagtgtccctgcagattcatggtctggccctggagaacccggcgccgctggcgccgcagacctcgcaggtggagacgctggaggtggcccagacgaaaccgaaagaaacgtacctataccagaagacgaactgttagagcttctagaaaacgccgaaaaagacgaaaacgtaccagggtaagaaaaaaaaagcctttattgaacttaaaacaatggcaaccagaaagtataaaactctgtaaaattattggacatacacctttaaatattggatgtaatggtagacaaataagaaactatacttactggcaagactattatattcaccctaaatgtccatcaggaggaggattttcagtttataaatggtctcttgcatacttatatgaagactattgtagaagaaaaaatatttggactaaatctaactgcccatatgacttatgcagataccttggaactagaatcaaaatgtactcacacccagaagtagactttatagttacttactctagaaactatcctatggtagtagatgaaactacatacatgcttacacatccatctattttacttttaagaaaacatagagtaatagtacctagcagaaaaataaaacccaatggaaaaggatacaaaaaaatatttattaaaccacctagacaactagttaacaaatggttttttcaaaaacaatttaatgaccaagggctgtttttattacaaatagcagcagctgacttacaatatccaacaataggaccaaacagtccaaacagactagtcacacttaacattttaaacaaccaatacttttatggacaacctaactggggagacgcctcacaaacttatacaataacacaaggaacatttaatttactagacaaaaacacaaaaaccctaatagatggaaaacttatagactacaaaattccacaggatataggcacaccccacaaaaaacatttatatgcatcaggactctttaacagacaaattctaaacatacaatactacacagacgcagataaagcacgataccctacaccaactatgcaagtacaatacaacccaatgaaagacacaggtaaaggaaacaaaatatactttatctcaacattacaaacatcatggtcaccacctacaacagacagacttttatattggcaaggagaacctttatggctacaactatatggactagtagactacattttaaaagctaaaggctcttcctcagcattacaggatgccatttgtgtaatagagtcacccttcatagaaccacaaacccacaacaaaaaattcgttgtggtaggaaatccttttatgcaaggccaaactgactgcaaaaacccacctacaggaaaccaactaaacaaatggtttttaacactagaagaccaaatgcctgctttaaatgacatagtaagtgcaggcccttacatggtaaaacaaacaggatttagatgcacatgggaattacatgttgattataagtcttactttaaatggggaggtgcacaaccaccactacaaaatatttgtgacccccatttacaggaaaccttccctgtgcccgatactgtcagacaaacattacaaatcatcgatccgaaaaaacaagtcccagaatccttactccactcttgggactatagaagagggcttgttactcaaacagcttttaaaagaatgtacaaaggtctctcagatgcagagtcttcttcaccagattcctcagacgagtcagactcaccccaaagaaaaagaaagagaggagacccaccgtgcccggaagaaaaagacaactacaatatccagaccctcaaagaaatctgccaaacgccgcaaaaagaagcaggaaacatcgagcagcagctccacaacttccagcagcagcaatacaacaagaacatcaacatcttaaaattacttgcaatgttaaaacaaaaacagctgcaaatgcaactagcaatgggtatgatggagtaaaattatttccaaaaaaagaaaaaaacccaaaatttaaaggatggggtaaaataatagaagaggaatgcgctaaagcattccacagaccacccagaaaatttgtaaacgaccctccattttatccttggctacctccagtacccaaagtttcatttgcactgaagtttaagggctaggcccacaatgttcacttagtggagtatgtttaataaagtcacaccccctttctgtaaccacgcctcttttgtatacgtcatgaatatattaaaaaccggaaataaattttcgcagagcggagggttcgcgcgctacgcgcgcgaacccatacgcctagggggcgcacattaattgctcctagattgggcagcgcgcgcttgcgcgcgctgccaaatgcgcccctccctcgtgctgacacgcttgcgcgtgtcagaccactacgggctcgggggggcgcgcctgcggcgctaacttatataataaactccacagggggagctgcgctccccctgttacgtcaccccctacgtcacttcctggcgggaaatttaaaaaacgtcacaaagccacgccttaaagggggggcaaagcccccccccttaaaccccccggggggggggcaaagccggggggggaaaaccccccccttaaaccccccgggggggggcaaaccccccccccactccccccctacgtcactaaccacgtgaccgcagccatattgggtgcggtcaaggcgtggccaaaaagcgcgggaaccaatcaaattaaacaactaacaaccaataaaaaaaacccacgtcacaaaaatgggtggttcctttcactctataaaactaactgcacttccgaatggctgagtttttccccgctagacggtgcggagcacaacgagcgcagcgaggagagactcagcagcagcaggg

SEQ ID NO: 929 - protein, 659 aa, Gammatorquevirus sp.
MVWPWRTRRRWRRRPRRWRRWRWPRRNRKKRTYTRRRTVRASRKRRKRRKRTRVRKKKPLLNLKQWQPESIKLCKIIGHTPLNIGCNGRQIRNYTYWQDYYIHPKCPSGGGFSVYKWSLAYLYEDYCRRKNIWTKSNCPYDLCRYLGTRIKMYSHPEVDFIVTYSRNYPMVVDETTYMLTHPSILLLRKHRVIVPSRKIKPNGKGYKKIFIKPPRQLVNKWFFQKQFNDQGLFLLQIAAADLQYPTIGPNSPNRLVTLNILNNQYFYGQPNWGDASQTYTITQGTFNLLDKNTKTLIDGKLIDYKIPQDIGTPHKKHLYASGLFNRQILNIQYYTDADKARYPTPTMQVQYNPMKDTGKGNKIYFISTLQTSWSPPTTDRLLYWQGEPLWLQLYGLVDYILKAKGSSSALQDAICVIESPFIEPQTHNKKFVVVGNPFMQGQTDCKNPPTGNQLNKWFLTLEDQMPALNDIVSAGPYMVKQTGFRCTWELHVDYKSYFKWGGAQPPLQNICDPHLQETFPVPDTVRQTLQIIDPKKQVPESLLHSWDYRRGLVTQTAFKRMYKGLSDAESSSPDSSDESDSPQRKRKRGDPPCPEEKDNYNIQTLKEICQTPQKEAGNIEQQLHNFQQQQYNKNINILKLLAMLKQKQLQMQLAMGMME

SEQ ID NO: 930 - protein, 149 aa, Gammatorquevirus sp.; identical to SEQ ID NO: 826

SEQ ID NO: 931 - protein, 110 aa, Gammatorquevirus sp.; identical to SEQ ID NO: 827

SEQ ID NO: 932 - DNA, 3282 bp, Alphatorquevirus sp.
cgggagccggaggtgagtttacacaccgcagtctaggggcaattcgggcacgggtctggccgggctatgggcaagactcttaaaaagtttccccgctgtgttcttcgccaggacatcaagtcatgccgtggcgaccgccggtgcataacatcccgggtagggaaaaccagtggtttgcatgcttttttcactcgcatgctgctttttgcgggtgcggtgacgctgtcgggcatcttaatagcattgctcctcgctttcttaacgccgctcctccgagaccacctccagggctagaccagccgaacctcggagggccggaaggtcccggaggtccccccagagccctgccagctctgccggccccggcagagcctgagccggcaccacgccgtggtggtggggaagatggaggcggcgccgctggggccgccgccgccacagaccatggaggctacgaagaaggagatctagaagatcttttcgccgcggccgccgaagacgatatgtgagtaggcggtggcgccgccgcagtttcaggcgcagacgcagacggggcagacgcagggggcgacgaaagaaacacaagcccacccttatactgagacagtggcaacctgacgtagtcagaccctgcaaaataacaggatggatgcccctaattatctgtgggtcaggaagcacccaattcaactttataacccacatggatgactttcctcccatggggtacacctacgggggcaacttcaccaacctcaccttctccttagaaggaatatatgaacagtttttgtaccacagaaacaggtggagctcctctaaccacgacctggacctggccaggtaccagggaaccaccctaaaactgtacagacacgaatacctagactacatagttagctacaacagaacaggcccttttcagatcagcgacatgacctacctcagcactcaccctgccttcatgctactacaaaaacacaggatagtagtgcccagctttaagaccaagccacgcgggcgcaggtccataaaaattagaataaagcccccaaaactcatgctgaacaagtggtacttcacaaaagacatatgcagcatgggcctcttccagctacaggccacagcatgcaccttaaacaacccctggctcagagataccacaaaaagcccagtcataggcttcagagtacttaaaaacagcatatacacagacctcagcaacctacctgaacatgacggtcccagacaagccattagaaagagactacacccagaaagtctaacaggctcaagtccaaaccaaaaaggctgggagattagctacacaaaactaatggccccaatatattaccaagccaacaaaaacagcacatacaactggctaaactaccaagacaactatgctaatacttacacaacatttaaggacaaaatggaaaaaaatctaacccttatacaaaaagagtacacataccactaccccaacagtgtcaccacagacattgtagcaaaaaacacccttacacacgactggggcatatacagtccctactggctaactccaacaagaatcagcctagactgggaaacaccctggacatatgttagatacaacccactagcagacaagggcataggcaatgttgtatacgcacagtggtgctcagaatcaagctgcagagtagaccaaaagaagagcaagtgcataatgagagacctgccactgtgggtaatattttatggctacgtagactggatagtaaaatccacaggcgtcagcagcgcagtcactgacatgagagtagccataataagtccctacaccgagccggcacttatagggtcaacaccagacgtaggctttattccagtaagtgacaccttttgcaacggagacatgccgtttcttgccccatacatccctgtgggctggtggatcaagtggtaccccatgattgcacaccaaaaggaagtgtttgaggcaatagttaactgtggaccgtttgtcccacgagaccagaccaaaccctcttgggaaattaccatgggttacaaaatgaactggaaatggggcggctctcccctgccttcacaggcaatcgacgacccctgtcagaagcccacccatgagctacccgatcccgatagacaccctcgcatgctacaagtctcagacccgacaaagctcggaccgaagacagtgttccacaagtgggactggagacgtgggatgcttagcaaaagaagtattaaaagagtccaagaagactcaagcgatgatgaatatgttgcaggacctttgcaaagaaaaagacacaagatggataccagagcagcaggcctgcaaacccccgaaaaagaaagttacactttactccaagccctccaagactcggcagaagagaacctgtcgagccaagaacaagcaccccaagaaaaagaggtgcaggaaaaagcgctcctggagcagctccagctccagaaacagcaccagcgagtcctcaaacgaggcctcaaactcctcctgggagacgtcctccgactccgccgaggagtccactgggaccccctcctgtcataattcagggtccctttatcccagacctgcttttccctaacacacaaaaaaaaaagaaattttccaactacgactggtcggtagagtacgagctggccaaatggatggatcgtcctttgcggcactacccatccgacctccctcactacccctggctaccaaaaaagccacctacccttcctacatgtagagtaagtttcaaattaaagctagattcctaactttcaaggccgtgggtgtttcacttcatcggtgtctacctctaaaggtcactaagcactccgagcaaagcgaggagtgcgacccccctgcccggtagcaacttcctcggggtccggcactacgccttcggctgcgccggacgcctcggaccccccctcgacccgaatcgccccccaccagggggcgctgcgcgcccccccccccgcgcatgcgcgggtcccccccccgcgggggggctccgcccccccccggcccccccccgtgctaaatccaccgcgcacgcgcgaccacgcccccgccgccattttctgcagcccgccaatttctttttaaacagaccaatcacaatgtactacgtgcacttcctggggcgtgtcttcccagtctatataagcagaggcagtgacgaatggtagagttttttctggcccgtccgcggcgagagcgcgagcgaagcgagcgatcgagcgacccgtggg

SEQ ID NO: 933 - protein, 661 aa, Alphatorquevirus sp.; identical to SEQ ID NO: 823

SEQ ID NO: 934 - DNA, 3280 bp, Alphatorquevirus sp.
cgggagccggaggtgagtttacacaccgcagtctaggggcaattcgggcacgggtctggccgggctatgggcaagattcttaaaaagtttccccgctgtgtcctacgccaggacacaaaaacatgccgtggagaccgccggcgcacgacgtccagggcagagagaaccagttctttgcgggatgttttcacatgcatgctgctttctgcgggtgcggtgaccttgtcggccatcttggtagcattgctgctcgctttcctgctgccggaccccccgctccgccgggcctcagacctccgagaccccctgccccggccggtcccggcggtccccccggctaccttcccgctctcccggctccggcaccggagccgcctaatccagcaccacgccgtggtggtggggaagatggcgccgccgcgggtggcgccgcagatggagcagaagaagaggccgccgcgtacggcgaggaagaactagaagagcttttccgcgccgccgccgaggacgatatgtaagtaggagatggcgccgaccttacaggcgcaggaggaggaaggggcgacggagacgcagacgcagacggactcacaaacccaccctagtaatgagacagtggcaaccggacgttgttaggacctgctacatcacagggtggatgcccctcatcatctgtggccaaggacagacccagtttaactttatcatgcacatggacgatatcaccccccggggagcctcctacgggggcaacctcactaacataacatggaccctagagggcctgtgggaacagttccagtaccacagaaacaggtggtcgcgcagcaaccacgacctagacctagccaggtacattttcaccacccttaagttttacagacacgaaactgtagactacatagtaagctacaccagaacaggacctttccaaatgggacacctcactcacctcagcactcaccctctcctaatgctactctcaaaacaccacatagtagtacccagcctaaagacgaaacctgggggcagaaagtacaaaaaaatcagaattaagcccccaaaactaatgttaaacaagtggtacttcaccaaagacatctgtgacctaggcctctttcaactgtgggccacgggagcagagctcagaaacccctggttaagatcaggcacacagagcccctgcataggcttcagtgtactcaacaactcctactacaccaacctcagcaacctgccacaacacaataacgccagagcacaaatacaaatgtcatttcacccatcaagcttaatacctgacacaagcaaaaacttgtggcagtacacatacacaggcctcatgtcaaaatactactacaaaggcaacccaaacagcacatatgacttccaaaattatagcaatagtgagaactataaaaatacatataataaatggaatgaggaaaaaacaacaagactaaaaaaactacaagaccagtgggacaaagtatacccacaactacaaacacaaagacccacagacagcacactcctacaggactttggcatatacagccccttctatctaacacccaccagaatcagcctagactggcgcaccacctacacacacgtgaggtacaacccactcacagacaagggcataggcaacagagtgtacctacagtggtgctcagagagtagctgcaagtacaaccccacaaagagcaagtgccccatagtagacatgccactattcatagccttctatggctacatagactggtgcatcaaatgcacaggcaactctggcctcgtaaaagacgccagaatcatggtgaggtgtccctacaccgagccccaactagtaggggccacagaggacgtgggcttctgcctcctcagtaataccttcatgaacggagacatgcccgtactagccccctatatcccaatttcctggttcgttaagtggtaccccatgattgcacaccaaaaggaaaccgttgaggccatagtttcctgtggaccgttcatgcccagagatcaggaagccaaaagttgggacataaccatgggttacagatcctgtttcaaatgggacgggtcgcctctgcccacacaggccatcgacgacccctgccagaagcccacgcaccctcttcccgaccccgatagacaccctcgcctcctacaagtctcagacccgacaaaactcggccccaagaccatattccacagatgggacatgcgtcgaggacagtttagcaaaagaagtattgaaagaatgtcagaatacacagaatatgatgaatattttgaaacaggtctaccatcaaaaagaaaaaagttcgacacgccggcagaaggactccaaggagagcaaagaaaagcctacgatttactccaagccctcgaagcgagtcaagaagggtcggggtcagaagaccaagaacaagcacccccacaagagacggagacgcagcaactcctccagcagctccagctccagaaacaccaccagcgagtcctcagacagggcctcaaacacctcctcggggacgtcctccgactccgacgaggagtccactgggaccccctccttacatagaaccgccgccattcatccccgatcttctttttccttctactaacaaaaaaaaaaaaaattctccaaattcgactgggaaacggaggctcagctagggcaggcattcaagcgtcctatgcgcttctatccctcagacaacccttactacccgtggttgccccccaagcgagatatccccaaaatatgtaaagtaaacttccaaataaagcttgcagagtaacacattcgaggccctcctctgctcacttagcggtgtctacctcttaaggtcaccaagcactccgagcgcaagcgaggagtgcgaccctctgccctggggcaaattcctcggggtccagcgctacgcgcttcgcgctgcgccggacgcctcggaccccccccccccccacctgggggcgctgcgcgcccccccccgcgcatgcgcggggccccccccggggggggctccgcccccccggcccccccccgtgtctaaatccaccgcgcatgcgcggccacgcccccgccgccattttgtgcagcccgccaatttctctttcaaacagaccaatcagaagactctacgtgcacttcctggggtgtgtcttcgaagagtatataggcacaggcggtgacgaatggtagagtttttcctggcccgtccgcggcgagagcgcgagcgaagcgagcgatcgagcgacccgtggg

SEQ ID NO: 935 - protein, 661 aa, Alphatorquevirus sp.
MRQWQPDVVRTCYITGWMPLIICGQGQTQFNFIMHMDDITPRGASYGGNLTNITWTLEGLWEQFQYHRNRWSRSNHDLDLARYIFTTLKFYRHETVDYIVSYTRTGPFQMGHLTHLSTHPLLMLLSKHHIVVPSLKTKPGGRKYKKIRIKPPKLMLNKWYFTKDICDLGLFQLWATGAELRNPWLRSGTQSPCIGFSVLNNSYYTNLSNLPQHNNARAQIQMSFHPSSLIPDTSKNLWQYTYTGLMSKYYYKGNPNSTYDFQNYSNSENYKNTYNKWNEEKTTRLKKLQDQWDKVYPQLQTQRPTDSTLLQDFGIYSPFYLTPTRISLDWRTTYTHVRYNPLTDKGIGNRVYLQWCSESSCKYNPTKSKCPIVDMPLFIAFYGYIDWCIKCTGNSGLVKDARIMVRCPYTEPQLVGATEDVGFCLLSNTFMNGDMPVLAPYIPISWFVKWYPMIAHQKETVEAIVSCGPFMPRDQEAKSWDITMGYRSCFKWDGSPLPTQAIDDPCQKPTHPLPDPDRHPRLLQVSDPTKLGPKTIFHRWDMRRGQFSKRSIERMSEYTEYDEYFETGLPSKRKKFDTPAEGLQGEQRKAYDLLQALEASQEGSGSEDQEQAPPQETETQQLLQQLQLQKHHQRVLRQGLKHLLGDVLRLRRGVHWDPLLT

SEQ ID NO: 936 - DNA, 3274 bp, Alphatorquevirus sp.
cgggtgccggaggtgagtttacacaccgcagtcaaggggcaattcgggctcgggactggccgggctatgggcaaggctcttaaaaagccatgtttctcggtaaactttacagaaagaaaaggaaactgctactgcaggctgtgcgtgctccacaggcgccatcttccatgagctccacctggcgagtgccccgcggcgatgtctccgcccgcgagctatgttggtaccgctcagttcgagagagccacgatgctttttgtggctgtcgtgatcctgtttttcatctttctcgtctggctgcacgttctaaccatcagggacctccgacgccccccacggacgagcgcccggcggcgtctaccccagtgaggcgcctgctgccgctgccctcctaccccggcgagggtccccaggctagatggcctggtggggatggagaaggcgctggtggcgcccgcggaggcggtggagatggcggcgcccgcgcaggcgaagaagagtaccggcccgaagacctagacgagctgttcggcgctatcgaacaagaacagtaaggagacggaggcgagggtggcggaggggctacaggcgccggtacagactaagacgcttacgtagacgcggcaggcgacgcaaaaagatagtactgactcagtggaacccccagactgtgagaaagtgctttatcagaggacttatgcctgtactgtgggcgggcatgggcacggggggccacaactacgccgtccgctcagatgactttgtagtagacagaggcttcgggggctccttcgccacagagacatttacactgaaggtcctttatgaccagtatcaaagaggcttcaacaggtggtcccacaccaacgaagaccttgacctagccagatacactggctgcaaatggaccttctatagacagcaagacacagactttatagtgtactttactaacaatccccccatgaaaaccaaccagcacacagcccctctcaccactccaggcatgctcatgagaagcaagtataaaatcctaataccaagctttaaaactagacccagaggcagaaaatctatatcagtcagaataagaccccctaagctattccaggacaagtggtatactcaacaagacctctgcccagttcctcttgtccaactgaacgtaaccgcagctgatttcacacatccgttcggctcaccactaactgacagtccttgcataagattccaggtactaggagacttgtacaactcatgtctcaatatagaccttcctcaatttgactctgacactggaaaaataaaagaagacccaccatacaacagagaaaataaaaatcagttacaaactttatacactaccttgtttaacagccgccagtcaggggtctactggcaaacattcataacaaacaccatggtaaaagcacacatagacgctaagaaagctcaaaacgccgttaataacgtacaaccaagagcagatccatcctataatgcagagccattccccaccaagccagaaaagtcaaagtttgagaattggaaaaaacaatttacagacacaagagacagtaactttctattcgccacatatcacccagacatgatacactcaaccatagcagaaatgagaaacaataactttgatctagaaacaggacccaatgacaaatatggtaatttctctagccaatacaccagaaacgcacacatgctagactactacctagggttctacagtcccatattcctgtctgatggcagatccaacacagaattctttacagcctacagggacatagtatataaccctctgttagacaaggccacaggtaacatgatatggttccagtaccacacaaagacagacaatatatacaacaaacaaacctgccactgggaaatactagatatgcccctgtgggccctctgcaacggctatgtagagtacctagagagccaaataaagtacggggacatacttacagaaggcaaagtcctaataagatgtccctacaccaagcctgcgctaacagaccccaaagactcactggcaggatacgtggtgtacaacaccaactttggaagaggcaagtggatagatggcaaaggctacatcccccttcacgagagaagcaagtggtacgtgatgctcagataccagactgacgtactccatgacatagtgacttgtggaccctggcagtacagagacgataacaaaaactctcagctcatagccaagtacagattcaagttctactggggaggtaacatggtgcattctcaggtcatcaggaacccgtgcaaagacacccaagtgtccggaccccgtcgacagcctcgcgaagtacaagtcgttgacccgcaactcatcaccccgccgtgggtcctccactcgttcgaccagagacgaggaatgtttactgagggagctatcagacgtctgctcaagcaaccaatacctggcgagtatgctcctacaccactcagggtcccgctcctctttccctcctcagagttccaacgagagggagaaggtgcagaaagcgactcatcttccccggcaaaaagaccgcgactctggcaagaagaggccagccagacggagacggagtcctcggaggggccggcggagacgacgagggagctcctccagcgaaagctcagagagcagcgagtcctcaacctccaactccagcatttcgcagtacaactcgccaagacacaagcgaacctccacataaaccccctattatactcccagccttaaacaaggtgtatctattcccccctgacaaacccactcccatacaggggtaccacgggtggaacacggagttcgaggcctgccacgccttcgacagaccacccagaagatacctctcagacacacctacctacccttggctccccatccccaatcctgaaataaaagtgagctttaagctcggtttcaaatcttacaaggccgtgggagtctcactggtcggtgtctacctcttaaggtcactaagcactccgagcgtcagcgaggagtgcgtgcgtctcagtctcagtctgcgtctgtacccccgtctccacctccgcctccccccgaagatcgtcactaaccacgtgactcccgcaggccaaccatgtgctacgtagtacacttcctgggcagagtctacctcataatataagtagctgcacttccgaatggctgagttttccacgcccgtccgcagcgagatcgcgacggaggagcgatcgagcgtcccgaggg

SEQ ID NO: 937 - protein, 786 aa, Alphatorquevirus sp.
MAWWGWRRRWWRPRRRWRWRRPRRRRRVPARRPRRAVRRYRTRTVRRRRRGWRRGYRRRYRLRRLRRRGRRRKKIVLTQWNPQTVRKCFIRGLMPVLWAGMGTGGHNYAVRSDDFVVDRGFGGSFATETFTLKVLYDQYQRGFNRWSHTNEDLDLARYTGCKWTFYRQQDTDFIVYFTNNPPMKTNQHTAPLTTPGMLMRSKYKILIPSFKTRPRGRKSISVRIRPPKLFQDKWYTQQDLCPVPLVQLNVTAADFTHPFGSPLTDSPCIRFQVLGDLYNSCLNIDLPQFDSDTGKIKEDPPYNRENKNQLQTLYTTLFNSRQSGVYWQTFITNTMVKAHIDAKKAQNAVNNVQPRADPSYNAEPFPTKPEKSKFENWKKQFTDTRDSNFLFATYHPDMIHSTIAEMRNNNFDLETGPNDKYGNFSSQYTRNAHMLDYYLGFYSPIFLSDGRSNTEFFTAYRDIVYNPLLDKATGNMIWFQYHTKTDNIYNKQTCHWEILDMPLWALCNGYVEYLESQIKYGDILTEGKVLIRCPYTKPALTDPKDSLAGYVVYNTNFGRGKWIDGKGYIPLHERSKWYVMLRYQTDVLHDIVTCGPWQYRDDNKNSQLIAKYRFKFYWGGNMVHSQVIRNPCKDTQVSGPRRQPREVQVVDPQLITPPWVLHSFDQRRGMFTEGAIRRLLKQPIPGEYAPTPLRVPLLFPSSEFQREGEGAESDSSSPAKRPRLWQEEASQTETESSEGPAETTRELLQRKLREQRVLNLQLQHFAVQLAKTQANLHINPLLYSQP

SEQ ID NO: 938 - protein, 154 aa, Alphatorquevirus sp.
MFLGKLYRKKRKLLLQAVRAPQAPSSMSSTWRVPRGDVSARELCWYRSVRESHDAFCGCRDPVFHLSRLAARSNHQGPPTPPTDERPAASTPVRRLLPLPSYPGEGPQARWPGGDGEGAGGARGGGGDGGARAGEEEYRPEDLDELFGAIEQEQ

SEQ ID NO: 939 - protein, 188 aa, Alphatorquevirus sp.
LARRGQPDGDGVLGGAGGDDEGAPPAKAQRAASPQPPTPAFRSTTRQDTSEPPHKPPIILPALNKVYLFPPDKPTPIQGYHGWNTEFEACHAFDRPPRRYLSDTPTYPWLPIPNPEIKVSFKLGFKSYKAVGVSLVGVYLLRSLSTPSVSEECVRLSLSLRLYPRLHLRLPPKIVTNHVTPAGQPCAT

SEQ ID NO: 940 - DNA, 3273 bp, Gammatorquevirus sp.
cgggagcccgaggtgagtgaaaccagcgaggtctaggggcaattcgggctagggcagtctagcggaatgggcaagaaacttaaaattatttttattttacagatgcaacacatttctgcaaaggacttttacaaaccaacaccatttaactgtgacacaaaaaatcaaatatggatgtcacagatagctgatgctcatgacaatatctgtcactgccatcatccttttgctcacctgcttgctaatatttttcctcctagtcataaggaccgtgatcttacaattaaccaaatcctgcaaagagactacagagaaaaatgcctttctggtggagacgtagaagaaaaccttggtttggccgttggagacgctacaaaagaagatatacaaccagaaagaggagaagaagaccttataaaagacgaagaactacaagatttaatcgcaagcggaggagacgcagaaaatacaaggtaaggaaaaaaagaaaaaccttacctgtacaacaatggcaaccagatagcattagaaaatgtaaaattaagggtttgggactcttagtactaggagctgaaggaaaacaaatggactgttactccgtagagaaacaaaaatatgtacctccaaaaaacccaggtggaggaggctttggctgtgaaacatacagccttgaatacttatatgaacaatggacattccataataatatttggactcacacaaatattaacagagacctatgcagatacctttggtgtaaaatagttattttcagacatcctcacacagactttatagtacaatatgacagacagcctccttttgatttaactaaagaaacatatccatcatgtcacccacaacaaatgctactacaaaaacatcacaaaattatacttagcagagatagcaaacctaatggcaaatattcaaagaaaataattattaaaccaccaaaacaaatgttaacaaaatggttttttactcatgaattctgtaaatatgatttatttctaattaaggcagcagctgcctcttttagatttggatacttaagctgctgtaaccaaagccaactagttaatatatactcactcaacacatactggtatcaagacgccagctggggacaaaacagaactgaaaccacaccgtatcttcctataccaactataatgaaagggttaacataccaagtaaagacaaatacaggctaccaaaaagtaaaaatgccagatgaagcctttatctctcgaaaagaaagcctgtcttatgacaatgggtggtttagatccagccttttacaagccacaggaatatattcaggtgaaacactaacagctactacacctgtagtgggtgctagatacaacccaaacatagacacaggaaaaaacaacaaaatttacctttcatctattactactacacactatgaccctccaacattagacaaaactatactaatagaaggcatgcccttatggctgggtttatatgggttcctttcatatgtagaaaccataaaaacagctccaggatttctagaactacatgtactattaatacaatccccagcaattttatgttcacaagtaccacaaagctgcaaaatatttttaccactagacttaagctttattaaaggcctaaacccatgggaccaacctgtagttagaaaccatgacaagtcaaactggtacccctctataaaacaccaaagaaaagctttaaatgccataatagaatcaggcccctacatacctaaatatccagaaacaaaagacagtacatgggaactaaaaatgaaatatgcatttcttttcaagtggggcggaccacaaaccacagatgaagttgttaaagacccatacacatttaccacatatgatgttcccgataaaatgtcaaaaacaatacaaatacagaacccaacaaaacaaataccaggcagccaattatatccctgggactaccgaaggggactcattaaaaaccaagctcttaaaagaatgcaagacaaccaatcaactgatacagagtttgaatatgttacagagggactgccaccaaaaaagaaaaagagacagggaaaccacctcagaaacccccaagaagaaacggaggaaatccagacatgtctccaacaactcttcgaagaaaataccttccaagaaatccagacagacgaggacatacacctcctcatccagcagcagcaccagcagcagcagcaaatcaagagagacatcctcaagctcatcatgaacataaaacacaaacaaaacctactgagtctacacacgggaatgataacctaagatttaaacctggttttgaagaagaaacagaaagagatctagcaagaatttttaaaagacctgtaagaacatttaagcatgacacacccttttacccctggttaccaccttcacccattgttaattttcaccttaattttaaaggctaggccttcaatgtacacttagtggtggatgtttaataaagtttaccccccaaaaaaaaaaaaaaaaaaaaaataaaaaattgtaaaaattcggcgctcgcgcgcgctgcgcgcgcgcgagcgccgtcacgcgccggcgctcgcgcgccgcgcgtatgtgctaacacaccacgcacctagattggggtgcgcgcgctagcgcgcgcaccccaatgcgccccgccctcgttccgacccgcttgcgcgggtcggaccacttcgggctcgggggggcgcgcctgcggcgcttatttactaaacagactccgagttgccatttggcccccctaagctccgcccccctcatgaatattcataaaggaaaccacaaaattagaattgccgaccacaaactgccatatgctaattagttccccttttacacagtaaaaaggggaagtggggggggggggggggggggggggggggggggggggggggggggggggggggggaaaaaggggatgtggggggggcatagcccccccacaccccccgcgggggggggcaaagccccccccgcaccccccctgcgtcacaagccacgcccccgccgccatcttgggtgcggcagggcggacactaaaatggcgggatccaatcagtttatactttcactttccaattaaaacacgccacgtaacaacaaaggggtggagtgtttaatactatataagtaactgcagtgacgaatggctgagtttaccccgctagacggtgcagggaccggatcgagcgcagcgaggaggtccacagctgcccgtggg

SEQ ID NO: 941 - protein, 667 aa, Gammatorquevirus sp.
MPFWWRRRRKPWFGRWRRYKRRYTTRKRRRRPYKRRRTTRFNRKRRRRRKYKVRKKRKTLPVQQWQPDSIRKCKIKGLGLLVLGAEGKQMDCYSVEKQKYVPPKNPGGGGFGCETYSLEYLYEQWTFHNNIWTHTNINRDLCRYLWCKIVIFRHPHTDFIVQYDRQPPFDLTKETYPSCHPQQMLLQKHHKIILSRDSKPNGKYSKKIIIKPPKQMLTKWFFTHEFCKYDLFLIKAAAASFRFGYLSCCNQSQLVNIYSLNTYWYQDASWGQNRTETTPYLPIPTIMKGLTYQVKTNTGYQKVKMPDEAFISRKESLSYDNGWFRSSLLQATGIYSGETLTATTPVVGARYNPNIDTGKNNKIYLSSITTTHYDPPTLDKTILIEGMPLWLGLYGFLSYVETIKTAPGFLELHVLLIQSPAILCSQVPQSCKIFLPLDLSFIKGLNPWDQPVVRNHDKSNWYPSIKHQRKALNAIIESGPYIPKYPETKDSTWELKMKYAFLFKWGGPQTTDEVVKDPYTFTTYDVPDKMSKTIQIQNPTKQIPGSQLYPWDYRRGLIKNQALKRMQDNQSTDTEFEYVTEGLPPKKKKRQGNHLRNPQEETEEIQTCLQQLFEENTFQEIQTDEDIHLLIQQQHQQQQQIKRDILKLIMNIKHKQNLLSLHTGMIT

SEQ ID NO: 942 - protein, 136 aa, Gammatorquevirus sp.
MGKKLKIIFILQMQHISAKDFYKPTPFNCDTKNQIWMSQIADAHDNICHCHHPFAHLLANIFPPSHKDRDLTINQILQRDYREKCLSGGDVEENLGLAVGDATKEDIQPERGEEDLIKDEELQDLIASGGDAENTR

SEQ ID NO: 943 - protein, 110 aa, Gammatorquevirus sp.
MSPTTLRRKYLPRNPDRRGHTPPHPAAAPAAAANQERHPQAHHEHKTQTKPTESTHGNDNLRFKPGFEEETERDLARIFKRPVRTFKHDTPFYPWLPPSPIVNFHLNFKG

SEQ ID NO: 944 - DNA, 3272 bp, Gammatorquevirus sp.
cgggtgccgaaggtgagtgaaaccaccgtagtcaaggggcaattcgggcggctgcagtctagcggaacgggcaagaaacttaaaaattccgcgcgctgtgcgcgccctatgttttattacagatgtctcttcaaaacgtacctaaatgttacaaacctcctcttgtagatccatggggacaacaagaactctggatacaaaatgtcgaattttcacatgatacatggtgcagctgtgctcattggcttagtcatcttctttctattacttgtcctcttgattctaaaaatcgcgctcggaccgtccacgagattattgacataggtcaaaattgtgataaccttttgtctttgagagccttgcccagtgtccctgcagatccatggtctggccctggagagcccggcgccgctggcgccgcagaccacgcaggtggagacgctggaggtggcccagacgaaaccgaaagagacgcacctatacccgaagacgaactgttcgagcttctagaaaacgcagaaaaagacgaaaacgtaccagggtaagaaaaaaaaaacctttattgaacttaaaacaatggcagccagaaagcataaaactatgtaaaattattggacatacacctttaaatattggatgtaacggaagacaaatctataattatacatattggcaagactactacatacatccaaaatgtccatctggagggggattttcagtatataaatggtctttagcatacctatatgaagactactgtagaagaaaaaatatatggacaaaatctaactgcccatatgacttatgcagatacctaggaactagaattaaattttattcacacccagaagtagactatgtagcttcatactcaagaaactaccctatggtagtagatgaaacaacttacatgttaacacacccatctatactactactcagaaaacacagagtaataatacctagcagaaaaacaaaacctaacggaaaaggttacaaaaaaatatttataaaaccacctagacaacttgtaaacaaatggttttttcaaaaacaatttaatgaccagggtctatttttactacaaatagctgcaacagacttacaataccccaacataggcccaaactctccaaacagactagtaacattaaacattttaaacaaccaatacttttatggacaaccaaactggggagacgcctcaggaacatacacaatcaccgaaggaaaactacacctccttggaaaaaacacaaaaacacttattgatggaaaactaatagactatacaattcccaatgacataggtaatcaaaagaaaaaacattactatgattcaggcctatttaacagaaaaatgcttaacatacaatattacactgacacagaactctcctcatatccaacaccaacaatgcaagttcaatacaaccctatgagagacacaggcaaaggaaacaaaatatactttatatctaccttacaaactagctggggaccaccaaccacagacagacttttattttggcaaggtgaacctctatggctacaactatatggcctaacagactacattttgaaagccaaagggacttcctctgccctacaggatgccatttgtgtaatagagtcaccatggatagaaccacaaacccacaacaaaaaattcgttgtggtaggaaatccatttatgcaaggacaaactgactgcaaaaacccacctacaggaacacaactaaacaaatggtttttaactttagaagatcaaatgccagcattaaatgacattgtaacagcaggaccatacatggtaaaacaaacaggttttagatgcacatgggaaatgcatgtagactataaatcttattttaaatggggaggtgcacaaccaccactacaaaatatttgtgacccccatttacaggaaaccttccctgtgcccgatactgtcagacaaacattacaaatcatcgatccgaaaaaacaagtcccagaatccttactccactcttgggactatagacgagggcttgttactcaaacagctcttaaacgaatgtacaaaggtctctcagatgcagagtcttcttcggcagatacctcagaagagtcagactcaccccaaagaaaaagaaagagaggagacccgccgtgcccggaagaaaaagacaactacaatatccagaccctcaaagaaatctgccaaacgccgcaagaaacaggaaacatcgagcagcagctccacaacttccagcagcagcaatacaacaaaaacatcaacatcttaaaattacttgcaatgttaaaacaaaaacagctgcaaatgcaactagcaatgggtatgatggagtaaaactatttccaaaaaaagaaaaaaacccaaaatttaaagggtggggtaaaattatagaagaagaatgcgcaaaagcattccacagacctcccagaaaatttgtaaatgaccctccattttacccttggttacctccagtacccaaagtttcatttgcactgaagtttaagggctaggcccacaatgttcacttagtggagtatgtttaataaagtcacaccccctttctgtaaccacgcctcttttgtatacgtcatgaatatattaaaaaccggaaataaattttcgcagagcggagggttcgcgcgctacgcgcgcgaacccatacgcctagggggcgcacattaattgctcctagattgggcagcgcgcgctagcgcgcgctgccaaatgcgcccctccctcgtgctgacacgcttgcgcgtgtcagaccactacgggctcgggggggcgcgcctgcggcgctaacttatataataaactccacagggggagctgcgctccccctgttacgtcaccccctacgtcacttcctggcgggaaattcaaaatacgtcacaaaaccacgcccaaaagggggggcaaagcccccccttaaaccccccgggggggggcaaagcccccccccactcccccccatacgtcacagaccacgtgaccgccgccatcttgggcgcggtctaggcgaccacgtgaccgccgccatcttgggcgcggtctaggcgtggttaaaaaaagcgggaaccaatcaaattaaacatcacacaaccaatcacaaaccacctacgtcacaaaaatgggtggttcctttcactctataaaactaactgcacttccgaatggctgagtttttccccgctagacggtgcagagcacaacgagcgcagcgaggagagactcagcagcagcaggg

SEQ ID NO: 945 - protein, 658 aa, Gammatorquevirus sp.
MVWPWRARRRWRRRPRRWRRWRWPRRNRKRRTYTRRRTVRASRKRRKRRKRTRVRKKKPLLNLKQWQPESIKLCKIIGHTPLNIGCNGRQIYNYTYWQDYYIHPKCPSGGGFSVYKWSLAYLYEDYCRRKNIWTKSNCPYDLCRYLGTRIKFYSHPEVDYVASYSRNYPMVVDETTYMLTHPSILLLRKHRVIIPSRKTKPNGKGYKKIFIKPPRQLVNKWFFQKQFNDQGLFLLQIAATDLQYPNIGPNSPNRLVTLNILNNQYFYGQPNWGDASGTYTITEGKLHLLGKNTKTLIDGKLIDYTIPNDIGNQKKKHYYDSGLFNRKMLNIQYYTDTELSSYPTPTMQVQYNPMRDTGKGNKIYFISTLQTSWGPPTTDRLLFWQGEPLWLQLYGLTDYILKAKGTSSALQDAICVIESPWIEPQTHNKKFVVVGNPFMQGQTDCKNPPTGTQLNKWFLTLEDQMPALNDIVTAGPYMVKQTGFRCTWEMHVDYKSYFKWGGAQPPLQNICDPHLQETFPVPDTVRQTLQIIDPKKQVPESLLHSWDYRRGLVTQTALKRMYKGLSDAESSSADTSEESDSPQRKRKRGDPPCPEEKDNYNIQTLKEICQTPQETGNIEQQLHNFQQQQYNKNINILKLLAMLKQKQLQMQLAMGMME

SEQ ID NO: 946 - protein, 149 aa, Gammatorquevirus sp.; identical to SEQ ID NO: 894

SEQ ID NO: 947 - protein, 109 aa, Gammatorquevirus sp.; identical to SEQ ID NO: 895

SEQ ID NO: 948 - DNA, 3272 bp, Alphatorquevirus sp.
cgggtgccggaggtgagtttacacaccgcagtcaaggggcaattcgggctcgggactggccgggctatgggcaaggctcttaaagcgtacgtcccccgctatgtttctcggcagggtgtggaggaaacagaaaaggaaagtgcttctgctggctgtgcgagttacacagaaaacatcttccatgagtatctggcgtccccccctcgggaatgtctcctacagggagagaaattggcttgaggccgccgaacgatcccacagttctttttgtggctgtggtgattttattcttcatattactaatttggctgcacgctttgctattcaggggcccccgccggagggtcctccccctcggccgaggccgccgctcctgagagcgctgccggcccccgaggtccgcagggagacgcgcacagagaacccgggcgcctccggtgagccatggcctggcgatggtggtggcagagacgatggcgccgccgcccgtggccccgcagacggtggagacgcctacgacgccggagacctcgacgacctgttcgccgccgtcgaagaagagcaacagtaaggaggcggaggtggaggggcagacgtgggcgacgcacatacacccgacgcgcggtcagacgcagacgcagacccagaaagagacttgtactgactcagtggagcccccaaacagtgagaaactgctccatcaggggtatagtgcccatggtaatatgcggacacacaaaagggggtagaaactacgccatccacagcgaagatttcactacacagatacaacccttcgggggcagttttagcacgaccacctggtcgctgaaagtactctgggacgaacaccaaaaatttcaaaacaggtggtcctatccaaacacacagctagacctcgccaggtacaagggagtcacattctggttctacagagaccagaaaacagactatatagtacaatggagcagaaatcctccctttaaactgaacaaatacagcagccccatgtatcaccctggaatgatgatgcaggcaaaaaagaaactagttgtacctagtttccagactagacccaaaggcaaaaagagatacagagtaagaataagaccccccaacatgtttgctgacaagtggtacactcaagaggacctgtgtccggtacctcttgtgcaaattgtggtttctgcggccagcctgctacatccgttctgcccaccacaaacgaacaacccttgcatcaccttccaggttttgaaagacatatattacaattgcataggagttaactctacacagcaaccactctatgaggcacttacaaagacattatataccagccgtacatactatgaaacagtacaagtactggcacaattatcccccaacttccagccagcccttaaacccacatcagctaactcaaacgtaggaaaaacattaggagacgcagtaacagaactcaaatacaacacaggaagtttttatacaaaacagaacccagtatttggcatgtgtaagtaccaaccaacgcaagaaatcatgaagaaagccaatgagtggttctgggacaaccttatgcatgataatgacttacatgcctcatatggcaaagccaacttaaaatgcatggagtaccacacaggcatatacagctccatattcctaagtccccagagaggaatagaattcccagcagcataccaagacgtcacatacaatccaaactgtgatagagcagtaggtaacagggtctggttccaatacagtacaaaaatggacacaaacttcgatgtcaccaaatgcaaatgcgtcgtagaaaacttacccctgtgggcggccttccatggctacgcagactttatagagcaggagctcagcataagctcagaaatccacaactttggcgtagtggtgtttcaatgcccatacacctttcccccctgctacgacaaaaagacaccaagcaagggctacgtattctatgacaccacctttggtaatggaaagatgccagacggatcaggacacatacccgtatactggcagcaaagatggtggatcagactagccttccaggtacaagtcatgcacgactttgtgctaacaggcccctttagctacaaagatgacctagcaaacaccacactcacagcaaggtacaaattcagattcaaatggggcggtaatatcatccccgaacagattatcaagaacccgtgtcagagagagcagtccctcgcttcctaccccgatagacaacgtcgcgacctacaagttgttgacccatcaaccatgggcccgatctacaccttccacacatgggactggcgacgggggctttttggtgcagatgctatccagagagtgtcacaaaaaccgggagatgctctccgctttacaaaccctttcaagagacccagatatcttcccccgacagacagagaagactaccgacaagaagaagacttcgctttacaggaaaaaagacggcgcacatccacagaagaagtccaggacccggagagccccccgcaaaacgcgccgctcgtacagcagcagcagcagcagcgggagctctcagtccagctcgcggagcagcagcgactcggagtccaactccgatacatcctccaagaagtcctcaaaacgcaagcgggtctccacctaaaccccctattattaggcccgccaaaaacaaggtctatctctttgagccccccagaggcctgctcccaatagtgggcaaagaggcctgggaggacgagtacctcacctgcaagcactgggatcgccctcccagaaccaaccacctagacatgcccacctatccctggatgcccacaaacttcaaagtcagcttcaaacttggatttaaaccctaaataaaaatatcaaggccgtacactgttcacttgtcggtgtctacctctataagtcactaagcactccgagcgcagcgaggagtgcgaccctacggggtgggtgcaacgccctcggcagccgcgcgctacgccttcggctgcgcgcggcacctcggacccccgctcgtgctgaggggccccccccccgcggggggctccgccccccggtcccccccccgaagatcgtcactgaccacgtgactcctctcgcccaatcagagtctacgtcgtccatttcctgggcatggtctacatcctgatataagtagctgcacttccgaatggctgagttttccacgcccgtccgcggcgagatcgcgacgcaggagcgatcgagcgtcccgaggg

SEQ ID NO: 949 - protein, 765 aa, Alphatorquevirus sp.
MAWRWWWQRRWRRRPWPRRRWRRLRRRRPRRPVRRRRRRATVRRRRWRGRRGRRTYTRRAVRRRRRPRKRLVLTQWSPQTVRNCSIRGIVPMVICGHTKGGRNYAIHSEDFTTQIQPFGGSFSTTTWSLKVLWDEHQKFQNRWSYPNTQLDLARYKGVTFWFYRDQKTDYIVQWSRNPPFKLNKYSSPMYHPGMMMQAKKKLVVPSFQTRPKGKKRYRVRIRPPNMFADKWYTQEDLCPVPLVQIVVSAASLLHPFCPPQTNNPCITFQVLKDIYYNCIGVNSTQQPLYEALTKTLYTSRTYYETVQVLAQLSPNFQPALKPTSANSNVGKTLGDAVTELKYNTGSFYTKQNPVFGMCKYQPTQEIMKKANEWFWDNLMHDNDLHASYGKANLKCMEYHTGIYSSIFLSPQRGIEFPAAYQDVTYNPNCDRAVGNRVWFQYSTKMDTNFDVTKCKCVVENLPLWAAFHGYADFIEQELSISSEIHNFGVVVFQCPYTFPPCYDKKTPSKGYVFYDTTFGNGKMPDGSGHIPVYWQQRWWIRLAFQVQVMHDFVLTGPFSYKDDLANTTLTARYKFRFKWGGNIIPEQIIKNPCQREQSLASYPDRQRRDLQVVDPSTMGPIYTFHTWDWRRGLFGADAIQRVSQKPGDALRFTNPFKRPRYLPPTDREDYRQEEDFALQEKRRRTSTEEVQDPESPPQNAPLVQQQQQQRELSVQLAEQQRLGVQLRYILQEVLKTQAGLHLNPLLLGPPKTRSISLSPPEACSQ

SEQ ID NO: 950 - protein, 171 aa, Alphatorquevirus sp.
LAGLWARLLKRTSPAMFLGRVWRKQKRKVLLLAVRVTQKTSSMSIWRPPLGNVSYRERNWLEAAERSHSSFCGCGDFILHITNLAARFAIQGPPPEGPPPRPRPPLLRALPAPEVRRETRTENPGASGEPWPGDGGGRDDGAAARGPADGGDAYDAGDLDDLFAAVEEEQQ

SEQ ID NO: 951 - protein, 187 aa, Alphatorquevirus sp.
MGLATGAFWCRCYPESVTKTGRCSPLYKPFQETQISSPDRQRRLPTRRRLRFTGKKTAHIHRRSPGPGEPPAKRAARTAAAAAAGALSPARGAAATRSPTPIHPPRSPQNASGSPPKPPIIRPAKNKVYLFEPPRGLLPIVGKEAWEDEYLTCKHWDRPPRTNHLDMPTYPWMPTNFKVSFKLGFKP

SEQ ID NO: 952 - DNA, 3272 bp, Gammatorquevirus sp.
cgggagcccgaggtgagtgaaaccaccgaggtctaggggcaattcgggctagggcagtctagcggaacgggcaagaaacttaaaatatatactttttttttagatgtccagattctactgcaaaacaaaatacaatgcagctacacttaatcaaatgtggatgtctatgatagctgattcacatgatattcactgtgattgtaaagctccatttgctcatctgctagacaacatttttccagaaggccacactgacagaaacaaaactgttggtgctataataacaagagatttacaacaatgcctttctggtggagaagaagacgaagaccatggtatacatcttggagaaagcgccgctaccgcaggcgcttcacaaataaaagaagaagaaagccatacaaaagaagaagacaaagaactagaagacttactcgccgccgtcgaaaaagaacatacaaggtaagaagaaagaaaaaaagtcttactttaaagcaatggcaacctgatagaattagaaaatgtacaattaaaggaagagggactctagttatgggagcccatggaagacaaatgatatgctacactaatgttaaagatagactcacaccttccagagcgccgggtgggggtggctttggagttgaaagatttactttagaatacttataccaacaatggaaagccagacataacatatggacaacaacaaaccaaaatacagaccttggtagatacctaggctgcaaaataactctttacagacatccagacacagattttatactaagatatgatagacaaggcccttttaatttagaaaaagaaacatacatgagtatgcagccacaagaaatgctacttagtaaacacaaaaaaatactattatcaaaactaaccaaccctttaggcaaacttaaaactactttgaaaataggtccacctaaattactaaccaacaaatggatatttcaatcagaactagctaaagttgacttactgcaactaagtgcaactgcctgcaattttagataccccaccttaggttgctgcaatgaaaacagagttttaaacttatatgcactagacacagacttctaccaagatcctaaatggatgcaaaaacatacaccaaccaatccatggaaaccttattcaacaatagacaaaaatatccagttccactacaaaactcaacaaggtggagaaggcacagtacaagtagacacagatcaaagtaaatggcttacactggcaagtggttggtttcaaccaaaaattttagctgcatataaagtaacacagtcaggaaccacaaaagctttattacctatggtactgctcagatataatccagcagctgatgaaggaccaggaaatatggtaacaattgtagaccttgtaggaggctcatggcaaggcccttaccaagaacaatacacaataagaaatgttcctttgtggttagcattaactggctatccaagctttgtagttgccaagtcaggagacaaaggtgtacttaaacacagtatgatttgtgttaatagtcctgcattaactagattacctactgcatccacacaaaagctattcccactgctaggatctaaatttgtaaatggaaaacctccttatgatcaacctttaactccagacatgagtaccaactggtatcccacatatgaacaccaacaagaacctttaaatgacatagtatgctgcggaccactaactcctaaattttataaccaaacaaacagcacatgggaattacaatatttttaccgtttttactttaagtggggaggcccagaaattggagatccaccagtggatgaccccaaaggaaaaacagaagccactgacctatattcaatcacaaggccaatacaaattaccaacccactcaaaaataaaactgaatccctactacacccctgggatatcagacggggccttattacaaaaagagcttttgaaagaatgtgccaaaacctcgagactgatacagatttctacccagatgcagaaacgccaaaaaagaaaaagagagttacctgcgaactcagaaatccccaagaagaagtccaggaagtccaagactgcctcctgtcgctctgccaaacacaagaatcggaggaagaagaccccaacaacctccagcagctcatcctcaagcaaaagcagcagcagctccagctcaagcacaacatcttaatattactatcagatctgaaagcaaagcaaaactctttgagactacaaacaggcaatttagagtagaaccatttaaacctggctttgaacaagaaactgaggcagaaatgtctagagcattttgcagacccccaagaacatacaaaaatgaccctccattttacccttggttacctccaacaccacttgtaaattttaaccttaattacaaatgctaggccaacaatgtacacttagtaaagcatgtttaataaagtttgcacccaaaaaaaaagtatatattttaagtttcttgcccgttccgctagactgccctagcctagacatttctgcctcagtttcttgttcaaagccaggtttaaatggttctactgcaaaacaaaaacaaaaaaaaaataaaaattcggcgctcgcgcgcgctgcgcgcgcgcgagcgccgtcacgcgccggcgctcgcgcgccgcgcgtatgtgctaacacaccacgcacctaaattggggtgcgcgcgctagcgcgcgcaccccaatgcgccccgccctcgttccgacccgcttgcgcgggtcggaccacttcgggctcgggggggcgcgcctgcggcgcttatttactaaacagactccgagttgccatttggccccccctaagctccgccccctcatgaatattcattaaggaaaccacagaattagaattgccgaccacaaactgccatatgctaattacttcccctttttcacagtaaaaaggggaagtgggggggcagagccccccccacaccccccgcggggggggcagagcccccccccgcaccccccctacgtcacaggccacgcccccgccgccatgttgggtgcggctaggcggggactaaattggcggcaaccaatcattttatactttcactttccaattgaaataagccacgtcactacaaaggggtggagactttaaaactatataaccaagtggggtgacgaatggctgagtttaccccgctagacggtgcaaggaccggatcgagcgcagcgaggaggtcccaggctgcccaaggg

SEQ ID NO: 953 - protein, 661 aa, Gammatorquevirus sp.
MPFWWRRRRRPWYTSWRKRRYRRRFTNKRRRKPYKRRRQRTRRLTRRRRKRTYKVRRKKKSLTLKQWQPDRIRKCTIKGRGTLVMGAHGRQMICYTNVKDRLTPSRAPGGGGFGVERFTLEYLYQQWKARHNIWTTTNQNTDLGRYLGCKITLYRHPDTDFILRYDRQGPFNLEKETYMSMQPQEMLLSKHKKILLSKLTNPLGKLKTTLKIGPPKLLTNKWIFQSELAKVDLLQLSATACNFRYPTLGCCNENRVLNLYALDTDFYQDPKWMQKHTPTNPWKPYSTIDKNIQFHYKTQQGGEGTVQVDTDQSKWLTLASGWFQPKILAAYKVTQSGTTKALLPMVLLRYNPAADEGPGNMVTIVDLVGGSWQGPYQEQYTIRNVPLWLALTGYPSFVVAKSGDKGVLKHSMICVNSPALTRLPTASTQKLFPLLGSKFVNGKPPYDQPLTPDMSTNWYPTYEHQQEPLNDIVCCGPLTPKFYNQTNSTWELQYFYRFYFKWGGPEIGDPPVDDPKGKTEATDLYSITRPIQITNPLKNKTESLLHPWDIRRGLITKRAFERMCQNLETDTDFYPDAETPKKKKRVTCELRNPQEEVQEVQDCLLSLCQTQESEEEDPNNLQQLILKQKQQQLQLKHNILILLSDLKAKQNSLRLQTGNLE

SEQ ID NO: 954 - protein, 120 aa, Gammatorquevirus sp.
MSRFYCKTKYNAATLNQMWMSMIADSHDIHCDCKAPFAHLLDNIFPEGHTDRNKTVGAIITRDLQQCLSGGEEDEDHGIHLGESAATAGASQIKEEESHTKEEDKELEDLLAAVEKEHTR

SEQ ID NO: 955 - protein, 125 aa, Gammatorquevirus sp.
LRTQKSPRRSPGSPRLPPVALPNTRIGGRRPQQPPAAHPQAKAAAAPAQAQHLNITIRSESKAKLFETTNRQFRVEPFKPGFEQETEAEMSRAFCRPPRTYKNDPPFYPWLPPTPLVNFNLNYKC

SEQ ID NO: 956 - DNA, 3270 bp, Gammatorquevirus sp.
cgggagcccgaggtgagtgcaaccaccgaggtctaggggcaattcgggctagggcagtctagcggaacgggcaagaaacttaaaatactttatttttcagatgtcagaaatatctttcaaagacttctactgtccaacaccttacaataaggaaactaaaaatcaaatttggatgtcccaaattgctgattctcatgacaatatctgcgactgcaagtatcctttttgccatctgcttgcttctatttttcctcctggccatcaagaccgcgatctatcaattaaccaaatactgttcagagattacagagaaaaatgcctttctggtggagacgcagacaaaagagatggtatggcaagtttaggtggaaaagaagaccctataaaacaagaagaagaagatatagaagaaagagaactagatggcctgctcgccgccgccgcagacgccgcagaaggcacaaggtaagaaaaaagaaacaaaaaattactctgaaacaatggcagccagactctattaaaaaatgtaagattaaagctataagtactcttgttatgggagcagatggatcccaatataaatgctacacaaacgaagccacatcctaccctccaccaaaagagccttctggaggaggttttggagtagaaatttttactctacaacacatgtacaatttatataaagctcacaaatgcatatggactacttccaatgaatatatggacttagctagatacactggatgtagatttatattttacagacatagatccacagactttgttatttcctatgacctacagcctccttttactatagacaaatttacatatccacaagctcacccattaaatcaatttttacaaagaaaaaaaagaatactatacagtcttaaaactaaaccatggggcccatctaaagttattttaaaaattaagcctacaaaaatgctatcaactaaatggttttttcaaagagaacttgctaaaataccactactaaaaattcaagcagctgcttgtgatcttagctatgctaacatgggaaagacatggcaaagtaacatgttatctatatattttttaaacacagcattttatcaagaaagcaattggggtaactcaggccttagccattacctaccatacaaaacaattagtgctaacttatactactggtctaaagacaacagaggaaataaaataaaaatacaagccaacacagcaacttactataccacagttaattataatcgtggatactttgatacaagaattttaaatgcttattctataacactttcagaatcacaggacaccccatcaacaatggctgtaactcctgtttctgtaggcagatacaatccattaacagacacaggagaaggcaatgagctgtgggctgtttccagcctcactgaacactatgaccatccagctacagacaaagttttaatttttaaaggctatccactatggttaatgttttttggctttaaaaactacatagaacaagaaaaaggagataaaagatttttagactcctacttttttgtttttaaatgtccaagcatgcaaatactccaatctgtagtaaaacaagattactttccatttatagaccaatcttttctaaatggaaacatgccttatggtgaatacttagatgaaaacaaaaaaacattctggtatccaacaataaaaaaacaactagaaacaataaacactattgttacattaggcccatttataccaaaatttaaagatgacagagacagtacatgggaattaaactataaatgttcattttattttaagtggggaggacaacaaattacagaaaaacttgcaatggatcccagcaaacaagaccaatttgataacccctataacatgcagcagggaatacagatatccaacccacaaacacaaacatgggaaacaacactgcaccactgggactacaggagagacatacttacaaagacagctattaaaagaatgcgagacaacctcgaaactgatacagatgtcacaacaattattacaggcaaaccaccaaaacagagaaagatcacaggggaaatacaagcactccaacaagaaaacaaagagatccaagcatgtctccactcactcttcgaagaagataccttccaagaagaggagagtctccgagagctcatcaagcagcaacacaacaagcaacaccagctcaagcaaaacctcttacacctcatctcagacctaaagaaacaacaacaacatattcaaatgcaaacaggaatcctacattaactaaatttaaaccaggttttgaacaaacaacagaaagagaacttgcaatagcttttaaaagacctgtaagaacttataaagaggaccctccattttacccatggctacctcctgctccccttgttgtaaactttaaccttaactataaaggctaggccaacactgtacacttagtggtgtttgtttaataaagtttactccccaaaaaaattgtaaaaaaaaaaaaaaaaaaaaaaaataaaaattccaaaaattcgccgctcgcgcgcgctgcgcgcgcgcgagcgccgtcacgcgccggcgctcgcgcgccgcgcgtatgtgctaacacaccacgcacctagattggggtgcgcgcgctagcgcgcgcaccccaatgcgccccgccctcgttccgacccgcttgcgcgggtcggaccacttcgggctcggggggggcgcgcctgcggccgccctcgttccgacccgcttgcgcgggtcggaccacttcgggctcgggggggcgcgcctgcggcgctaatttactaaacagactccgagtcgccatttgccccccgtaagctccgcccccctcatgaatattcataaaggaaaccacaaaattagaattgccgaccacaaactgccatatgctaattagttccccttttaccttgtaaaaaggggaagtggggggggcagagcccccccacaccccccgcgggggggggccaagccccccccgcaccccccctacgtcacaggccacgcccccgccgccatcttgggtgcggcagggcgggggctaaaatggcgggacccaatcactttatactttcactttccaattaaaacacgccacgtcaactacacggggaggggccactgaaactatataactaagtggggtggcgaatggctgagtttaccccgctagacggtgcggggaccggatcgagcacagcgaggaggtccccagctgcccatggg

SEQ ID NO: 957 - protein, 661 aa, Gammatorquevirus sp.
MPFWWRRRQKRWYGKFRWKRRPYKTRRRRYRRKRTRWPARRRRRRRRRHKVRKKKQKITLKQWQPDSIKKCKIKAISTLVMGADGSQYKCYTNEATSYPPPKEPSGGGFGVEIFTLQHMYNLYKAHKCIWTTSNEYMDLARYTGCRFIFYRHRSTDFVISYDLQPPFTIDKFTYPQAHPLNQFLQRKKRILYSLKTKPWGPSKVILKIKPTKMLSTKWFFQRELAKIPLLKIQAAACDLSYANMGKTWQSNMLSIYFLNTAFYQESNWGNSGLSHYLPYKTISANLYYWSKDNRGNKIKIQANTATYYTTVNYNRGYFDTRILNAYSITLSESQDTPSTMAVTPVSVGRYNPLTDTGEGNELWAVSSLTEHYDHPATDKVLIFKGYPLWLMFFGFKNYIEQEKGDKRFLDSYFFVFKCPSMQILQSVVKQDYFPFIDQSFLNGNMPYGEYLDENKKTFWYPTIKKQLETINTIVTLGPFIPKFKDDRDSTWELNYKCSFYFKWGGQQITEKLAMDPSKQDQFDNPYNMQQGIQISNPQTQTWETTLHHWDYRRDILTKTAIKRMRDNLETDTDVTTIITGKPPKQRKITGEIQALQQENKEIQACLHSLFEEDTFQEEESLRELIKQQHNKQHQLKQNLLHLISDLKKQQQHIQMQTGILH

SEQ ID NO: 958 - protein, 122 aa, Gammatorquevirus sp.
MSEISFKDFYCPTPYNKETKNQIWMSQIADSHDNICDCKYPFCHLLASIFPPGHQDRDLSINQILFRDYREKCLSGGDADKRDGMASLGGKEDPIKQEEEDIEERELDGLLAAAADAAEGTR

SEQ ID NO: 959 - protein, 109 aa, Gammatorquevirus sp.
MSPLTLRRRYLPRRGESPRAHQAATQQATPAQAKPLTPHLRPKETTTTYSNANRNPTLTKFKPGFEQTTERELAIAFKRPVRTYKEDPPFYPWLPPAPLVVNFNLNYKG

SEQ ID NO: 960 - DNA, 3267 bp, Alphatorquevirus sp.
cgggtgccggaggtgagtttacacaccgcagtcaaggggcaattcgggcacgggactggccgggctatgggcaaggctcttaaaaaattcccccgttgtgttctccggcaggacaccaagtcatgccgtggagaccgccggtgcataacgtcccgggcagggagaatcagtggttcgcagcgttttttcactcacatgctgctttctgcgggtgtggtgaccctgttgggcatcttgttagcattgctcctcgctttcctaacgccggtccaccgagaccacctccagggctagaacagcaaaaccccgagggcccggcgggtcccggaggtccccccgccatcttgccagctctgccggccccggcagaccctgagccgccgccacggcgtggtggtggggcagatggaggcgccgctggaggcctcgctatcgcagacgcacctggagggtacgcagaagacgacctagacgaacttttcgccgccgccgccgaggacgatatgtgagtaggcggaggcgccgccgctactacaggcgcagactgagacggggcagacgcagagggcgacgaaagagacacagacagactctagtcctcaggcagtggcaaccagacgttgtaagacactgtaaaattacaggatggatgcccctcatcatctgtggctccgggagcacacagaacaattttataactcacatggacgactttcctcccatgggctcctcctacgggggcaactttacaaacctcaccttctccttagagggcatatatgaacagtttttataccacagaaacaggtggtcccggtccaaccatgacctagacctagccagatacaaaggcacaactctaaaactgtacagacaccacagcttagactacatagtaagctacaacagaacaggcccttttcagatcagtgacatgacctacctcagcacacaccctgcatttatgctgctacaaaaacacagaatagttgtacccagcttactcacaaagcctaaaggcaagagatctattaaagtgagaataaagcccccaaaactcatgctaaacaagtggtactttacaaaagatatatgtagcatgggtctctttcagctgcaggccacagcatgcaccctatacaatccctggctgagagacaccaccaaaagcccagtaataggctttagagtacttaaaaacagcatttacacaaacctcagtaacctaccagagcatgacggagccagagaagctattagaaaaaaactacacccagaatccctaacaggacattctcccaatcaaaaaggctgggaatatagctacaccaaactaatggctccaatatactactctgctaacagaaacagcacatacaactggctaaattaccaagataattatctagccacctattctaaatttaaagcaaaaatgatagaaaacctaaacctaatacaaaaagaatacctatatcattaccctaacaatgtcaacacagaccttataaaaagaaacacactaacacatgactggggcatatacagtccctactggcttacacccacaagaataagcctagactgggaaacaccctggacatatgttagatacaacccactagcagacaaaggcataggcaatgctgtatatgcacagtggtgctctgaggctacctgcaaactagaccccaaaaagtccaagtgcataatgagagacctaccactatgggctatatgctatggttatgtagactgggtagtaaaatccacaggagtaagcagtgcagtaacagacatgagaatagccatcagaagcccctacactgaaccagcacttatagggtcaagtgaagacataggctacattccagtaagtgacaccttttgcaacggagacatgccgtttcttgctccatacatccctgtgggctggtggatcaagtggtaccccatgattgcacaccaaaaggaagtccttgaggcaatagttaactgtggaccgtttgtgcccagagaccagaccactcccagttgggaaattaccctaggttacaaaatggactggttatggggtggctctcccctgccttcacaggcaatcgacgacccctgccagaagcccacccacgaacttcccgaccccgatagacaccctcgcatgttacaagtctctgacccgacaaagctcggaccgaagacagtgttccacaaatgggactggagacgtgggatgcttagcaaaagaagtattaagagagtccaagaagactcaacagatgatgaatatgttgcagggcctgtaccaagaaaaagaaacaaattcgatactcgagcccaagggctccaaagccccgaaaaagaaagctacactttactccaagccctccaagagtcggggcaagagagcagctccgaggaccaagaacaagcaccccaacaaaaagaggcagaagagaaagcgctcctggagcagctccagctccagaaacagcaccagcgagtcctcaagcgaggcctcaaactcctcctgggagacgtcctccgactccgccgaggagtccactgggaccccctcctgtcataattcagggtccctttatcccagacctgcttttccctgacacacaaaaaaaaaaaaaattttccaacttcgactgggctacagaataccagctagctgccgctttcgaccgcccagtccgccactaccctaccgacccccctcactacccgtggctaccaaaaaagcccactatccagcctacatgtagggtaagtttcaaattaaagctcgatgcctaactttcaaggccgtgggtgtttcacttcatcggtgtctacctctataagtcactaagcactccgagcgtaagcgaggagtgcgacccccctgcccggtagcaacttcctcggggtccggcgctacgccttcggctgcgccggacgcctcggaccccccctcgacccgaatcgctcgcgcgattcggacctgcggcctcgggggggggtcgggagctttattaaacagactccgagatgccattggacactgaggtccaccgcgcatgcgcggccacgcccccgccgccattttgtgcagcccgccaatttctgttcaaacaggccaatgaggaccttctacgtacacttcctggggcgtgtctatgaagtctatataagcaatgacggtgacgaatggtagagtttattttgcccgtccgcggcgagagcgcgagcgaagcgagcgatcgagcgtcctgtggg

SEQ ID NO: 961 - protein, 680 aa, Alphatorquevirus sp.
LRRGRRRGRRKRHRQTLVLRQWQPDVVRHCKITGWMPLIICGSGSTQNNFITHMDDFPPMGSSYGGNFTNLTFSLEGIYEQFLYHRNRWSRSNHDLDLARYKGTTLKLYRHHSLDYIVSYNRTGPFQISDMTYLSTHPAFMLLQKHRIVVPSLLTKPKGKRSIKVRIKPPKLMLNKWYFTKDICSMGLFQLQATACTLYNPWLRDTTKSPVIGFRVLKNSIYTNLSNLPEHDGAREAIRKKLHPESLTGHSPNQKGWEYSYTKLMAPIYYSANRNSTYNWLNYQDNYLATYSKFKAKMIENLNLIQKEYLYHYPNNVNTDLIKRNTLTHDWGIYSPYWLTPTRISLDWETPWTYVRYNPLADKGIGNAVYAQWCSEATCKLDPKKSKCIMRDLPLWAICYGYVDWVVKSTGVSSAVTDMRIAIRSPYTEPALIGSSEDIGYIPVSDTFCNGDMPFLAPYIPVGWWIKWYPMIAHQKEVLEAIVNCGPFVPRDQTTPSWEITLGYKMDWLWGGSPLPSQAIDDPCQKPTHELPDPDRHPRMLQVSDPTKLGPKTVFHKWDWRRGMLSKRSIKRVQEDSTDDEYVAGPVPRKRNKFDTRAQGLQSPEKESYTLLQALQESGQESSSEDQEQAPQQKEAEEKALLEQLQLQKQHQRVLKRGLKLLLGDVLRLRRGVHWDPLLS

SEQ ID NO: 962 - DNA, 3264 bp, Gammatorquevirus sp.
cgggagcccgaggtgagtgaaaccaccgaggtctaggggcaattcgggctagggcagtctagcggaacgggcaagaaacttaaaatactttatttttcagatgtcagaaatatgtttcaaagacttctactgtccaacaccttacaataaggaaactaaaaatcaaatttggatgtcccaaattgctgattctcatgacaatatctgcgactgcaagtatcctttttgccatttgcttgcttctatttttcctcctggccatcaagaccgcaatctctcaattaaccagatactgcttagagattacacagaaaaatgcctttctggtggagacgcagacaaaagagatggtatggcaggtttagatggaaaagaagaccttataaaacaagaagaagaagatatcgaagaaagaaaactagatggcctgctcgccgccgccgcagacgccgcagaaggcacaaggtaagaaaaaagaaacaaaaaattactctaaaacaatggcaaccagactctattaaaaaatgtaagattaaagccatatctactctagttatgggagcagatggatcccaatataaatgctacacaaacgaagcagcatcctaccctccacctaaagagccttctggaggaggttttggagtagaaatttttactctacaacacatgtacaatttatataaagctcacaaatgcatatggactacttccaatgaatatatggacttagccagatacactggctccaaatttattttctacagacatagaactacagactttattatttcctatgacctgcagcctccatttactatagacaaatatacatatccacaagcacacccacttaatcaatttttacaaaggaaaaaaagaatactatatagtcttaaaactaaaccctggggcccatctaaagttattctaaaaattaaacctactaaaatgttatcaacaaaatggttttttcaaagagaacttgctaaaataccacttctaaaaattcaagcagctgcttgtgatctaagctatgcaaacatgggaaaaacatggcaaagtaacatgttatcaatctattttttaaacacagcattttatcaggaaagcaattggggtaactcaggcattagccattacctaccatataaaacaattaatactaatttatattactggtataaagacagcagaggaaataaaagtaatataaaagtagatacaagtacttactataccacagttaactacaatacaggatattttaataccaaagttttaaatgcttatgctataacaacttcacacacccaagactccccagtagctatggctctaacccctgtttctgtaggcagatacaatccactaacagacacaggagaaggcaatgagctatgggctgtttccagcctcactgaacactatgaccatccagctacagacaaagttttaatttttaaaaactatccactatggttaatgttctatggctttaaaaactacatagaacaagaaaaaggagataaaagatttctagactcctacttttttgtttttagatgtccaagcatgcaaatactacaatctgtagtaaaacaagactactttccatttatagaccaatcttttctaaatggcaatatgccatatggtgaatacttagatgaaaacaaaaaaaaattttggtatccaacaataaaaaaacaactagaaacaattaacacaattgttaccttaggaccatttataccaaagtttaaagatgatagagacagtacatgggaattaaactataaatgttcattttattttaagtggggaggacaacagattacagaaaaacttgcaatggatcccagcaaacaagaccaatttgataacccctataacatgcagcagggaatacagatatccaacccacaaacacaaacatgggaaacaacactgcaccactgggactacaggagagacatacttacaaagacagctattaaaagaatgcgagaaaacctcgacactgatacagatgtcacaacaattattacaggcaaaccaccaaaacagagaaagatcacaggagaaatacaagcactccaacaagaaaacaaagagatccaagcatgtctccactcactcttcgaagaagataccttccaagaagaggagagtctccgagagctcatcaagcagcaacacaacaagcaacaccagctcaagcaaaacctcctacacctcatctcagacctaaagaaacaacaacaacaccttcaaatgcaaacaggaatcctacattaaccagatttaaaccaggttttgaagaaacaacagaaagagaacttgcaattgcttttaaaagacctataagaacttttaaagaagaccctccattttacccatggctaccccctgctccccttgttgtaaactttaacctcaactttaaatactaggccaacactgtacacttagtagtgtttgtttaataaagtttgctccccaaaaaaatgtaaaaaaaaaaaatagattgataacatgttactttgccatgtttttcccatgtttgcatagaaaaaaaaaaaaaaaaaaaaaaaataaaaaattgcaaaaattcggcgctcgcgcgcgctacgcgcgcgcgagcgccgtcacgcgccggcgctcgcgcgccgcgcgtatgtgctaacacaccacgcacctagattggggtgcgcgcgctagcgcgcgcaccccaatgcgccccgccctcgttccgacccgcttgcgcgggtcggaccacttcgggctcgggggggcgcgcctgcggcgcttatttactaaacagactccgagttgccatttggcccccctaagctccgcccccctcatgaatattcataaaggaaaccacaaaattagaattgccgaccacaaactgccatatgctaattagttccccttttacacagtaaaaaggggaagtggggggggcagaccccccccacaccccccgcgggggggggcaaagccccccccgcaccccccctacgtcacaaaccacgcccctgccgccatcttgggtgcggcagggcgggggctaaaatggcgggacccaatcagtttatagttttaatacccaattaaaacatgccacgtcacaagcaaggggtggagactttcactctatataactaagtgcggtgacgaatggctgagtttaccccgctagacggtgcagggaccggatcgagcgcagcgaggaggtccccggctgcccatggg

SEQ ID NO: 963 - protein, 661 aa, Gammatorquevirus sp.
MPFWWRRRQKRWYGRFRWKRRPYKTRRRRYRRKKTRWPARRRRRRRRRHKVRKKKQKITLKQWQPDSIKKCKIKAISTLVMGADGSQYKCYTNEAASYPPPKEPSGGGFGVEIFTLQHMYNLYKAHKCIWTTSNEYMDLARYTGSKFIFYRHRTTDFIISYDLQPPFTIDKYTYPQAHPLNQFLQRKKRILYSLKTKPWGPSKVILKIKPTKMLSTKWFFQRELAKIPLLKIQAAACDLSYANMGKTWQSNMLSIYFLNTAFYQESNWGNSGISHYLPYKTINTNLYYWYKDSRGNKSNIKVDTSTYYTTVNYNTGYFNTKVLNAYAITTSHTQDSPVAMALTPVSVGRYNPLTDTGEGNELWAVSSLTEHYDHPATDKVLIFKNYPLWLMFYGFKNYIEQEKGDKRFLDSYFFVFRCPSMQILQSVVKQDYFPFIDQSFLNGNMPYGEYLDENKKKFWYPTIKKQLETINTIVTLGPFIPKFKDDRDSTWELNYKCSFYFKWGGQQITEKLAMDPSKQDQFDNPYNMQQGIQISNPQTQTWETTLHHWDYRRDILTKTAIKRMRENLDTDTDVTTIITGKPPKQRKITGEIQALQQENKEIQACLHSLFEEDTFQEEESLRELIKQQHNKQHQLKQNLLHLISDLKKQQQHLQMQTGILH

SEQ ID NO: 964 - protein, 122 aa, Gammatorquevirus sp.
MSEICFKDFYCPTPYNKETKNQIWMSQIADSHDNICDCKYPFCHLLASIFPPGHQDRNLSINQILLRDYTEKCLSGGDADKRDGMAGLDGKEDLIKQEEEDIEERKLDGLLAAAADAAEGTR

SEQ ID NO: 965 - protein, 109 aa, Gammatorquevirus sp.
MSPLTLRRRYLPRRGESPRAHQAATQQATPAQAKPPTPHLRPKETTTTPSNANRNPTLTRFKPGFEETTERELAIAFKRPIRTFKEDPPFYPWLPPAPLVVNFNLNFKY

SEQ ID NO: 966 - DNA, 3261 bp, Gammatorquevirus sp.
cgggagcccgaggtgagtgaaaccaccgaggtctaggggcaactcgggctagggcagtctagcggaacgggcaagaaacttaaaatatatttgttttctagatgctgtcacacaaagactttgccagaaaaactaaatacaatattgatacccaaaatcaaatatggatgtctggcattgctgactctcatgacacttggtgtgattgtgatactccattcgcgcatcttctagcaagtatttttccacctggccacaaagatagaaattctaccataaaccaaatactatacagagactataaacaaaaatgcctttctggtggaggcgcagacaaagatactggagacccagaagattctggaaaaataaaacaagaaaatacaacagaagaagatggcctcgcaggcgcagaagaagaactcgcagaactactcgccgccgcagaagaaggagaaaatacaaggtaaaaagaaaaagacaaactttaccagtaagacaatggcaacctgataaaattgttaaatgtaaaattaaaggagtagatgtactagttttaggtggggagggtaaacagcttgtatgttatactaatgtaaaagatgcatggacaccacctaaagcaccagggggtggagggtttggctgtcagcaatatagcttaagctggttatatgaacaatatgtttttagaaacaatatatggacaaagagtaacataggattagacctttgtagatacttgcattgtagacttacattttatagacacccagacacagactttattatatcctatgaaagacaaccaccatttgacatagacaaatggacttatcctagctgtcacccaaaaaacttgctactaggaaaacacaaaatattgttattaagcaaagcaactaaaccaaatggaaaactaaccaaaagaattttaattaaaccacccaagcaaatgctaaccaaatggttctttcaagaacactttgcacatgcaggattatttttagttaaagctgcagcatgcaacttcagatacagccacttaggctgctgtaacaccaacagaattactactctattttatttaaacccaggcttttaccaacaaggtaactggtctgcacacacctctacaggttatcagccatatttaacagtaccaacagcactatatttttggagcaaagacaacaaattgactaaatatacaaagccacaaacttatgataaatcaattgactataccacaggctggtttaaaaaagaaatattatctgctgttaaagtaaccacagacgagaccggagaaaaaccaactgccagtactccagtaaacatatgcaggtacaatcctgcagtagacagtggcaaaggcaacaccatatggttagtctccactttaacaaataactaccataaaccaacaagtgacaaatatattattatttcaggcctgcctttatatgaaatgctatatggctttttaagctttgtgcaaatgattaaaaagacacctcagtttttacaaacacacatactagccatagaatcaccagcactcaaaccttatgcacaaataggagcagaaggcccaataatacctctagacaacacctttgtaaatggacaagcaccatacaatgaagtactaactaccagtatgaaagctaactggtggccaaatgtatataatcaactacaaatattaaattttatagtagagagtggaggctatgtaccaaagtatagccaaacaaaagaaagtacatgggaattacaatatatgtacaattttctttttaagtggggaggtccagaaatttcagaacagcctgttgcagatccaacattacaggggacatatgaagtacccgatactttcacaggaacaatacaaattagggacccagctaaacaaagtgcaatgtcaatcctccatccctgggacatcagacatggaatgtttacaaaaacagctcttaaaagaatgcaatcaaacatctcaactgattcaactttccaagcagatacagaagaagttcccaggaaaaaaaagaaagttacaggtccccagatgtcagtcccacaagaagagcaagaagagatccagagatgtctccactcactcttcgaaagcgatacctaccaagaaacggaggacccacaaaaaatcaaagacctcatcaagcagcagcacctcaagcagagagagctcaagtacaacatcctcagactcatctcagacctcaaagagcagcaaaacatcctgaaacttcaaacaggctatgtcacttaaccagatttaaaaaaggttttgaatgggacactgaaagacaactagcacatgcatttaacagaccccccagactttttaaagaagacccacctttctatccatggctaccccgctttgaacccattgtaaactttcaccttaattataaattctaggcctacaactttcacttagtggtgtatgtttatataagtctcacccccaaaaaaataataaaattgtaaaaaaaaaaaaaaaaataaaaaattgcaaaaattcggcgctcgcgcgcgctgcgcgcgcgcgagcgccgtcacgcgccggcgctcgcgcgccgcgcgtatctgctaacacaccacgctcctagattggggtgcgcgcgctagcgcgcgcaccccaatgcgccccgccctcgttccgacccgcttgcgcgggtcggaccacttcgggctcgggggggcgcgcctgcggcgcttatttactaaacagactcccagtcgccatttgggggggggcgcgcctgcggcgcttatttactaaacagactcccagtcgccatttggccccccctaagctccgcccccctcatgaatattcataaaggaaaccacaaaattagaattgccgaccacaaactgccatatgctaataacttccccttttacactgtaaaaaggggaagtggggggggcagagcccccccacaccccccgcgggggggggcaaggcccccccccgcaccccccctacgtcacaggccacgcccccgccgccatcttgggtgcggcagggcgggggctaaaatggcgggacccaatcattttatactttcagtttccaatcacaacctgccacatcacacctaatgggcggagactttaaaactatataaccaagtggggtgacgaatggctgagtttaccccgctagacggtgcagggaccggatcgagcgcagcgaggaggtccccggctgcccaaggg

SEQ ID NO: 967 - protein, 662 aa, Gammatorquevirus sp.
MPFWWRRRQRYWRPRRFWKNKTRKYNRRRWPRRRRRRTRRTTRRRRRRRKYKVKRKRQTLPVRQWQPDKIVKCKIKGVDVLVLGGEGKQLVCYTNVKDAWTPPKAPGGGGFGCQQYSLSWLYEQYVFRNNIWTKSNIGLDLCRYLHCRLTFYRHPDTDFIISYERQPPFDIDKWTYPSCHPKNLLLGKHKILLLSKATKPNGKLTKRILIKPPKQMLTKWFFQEHFAHAGLFLVKAAACNFRYSHLGCCNTNRITTLFYLNPGFYQQGNWSAHTSTGYQPYLTVPTALYFWSKDNKLTKYTKPQTYDKSIDYTTGWFKKEILSAVKVTTDETGEKPTASTPVNICRYNPAVDSGKGNTIWLVSTLTNNYHKPTSDKYIIISGLPLYEMLYGFLSFVQMIKKTPQFLQTHILAIESPALKPYAQIGAEGPIIPLDNTFVNGQAPYNEVLTTSMKANWWPNVYNQLQILNFIVESGGYVPKYSQTKESTWELQYMYNFLFKWGGPEISEQPVADPTLQGTYEVPDTFTGTIQIRDPAKQSAMSILHPWDIRHGMFTKTALKRMQSNISTDSTFQADTEEVPRKKKKVTGPQMSVPQEEQEEIQRCLHSLFESDTYQETEDPQKIKDLIKQQHLKQRELKYNILRLISDLKEQQNILKLQTGYVT

SEQ ID NO: 968 - protein, 122 aa, Gammatorquevirus sp.
MLSHKDFARKTKYNIDTQNQIWMSGIADSHDTWCDCDTPFAHLLASIFPPGHKDRNSTINQILYRDYKQKCLSGGGADKDTGDPEDSGKIKQENTTEEDGLAGAEEELAELLAAAEEGENTR

SEQ ID NO: 969 - protein, 112 aa, Gammatorquevirus sp.
MSPLTLRKRYLPRNGGPTKNQRPHQAAAPQAERAQVQHPQTHLRPQRAAKHPETSNRLCHLTRFKKGFEWDTERQLAHAFNRPPRLFKEDPPFYPWLPRFEPIVNFHLNYKF

SEQ ID NO: 970 - DNA, 3259 bp, Alphatorquevirus sp.
ttttagtggaaggtgagtttacacaccgcagtcaaggggcaattcgggctcgggactggccgggctatgggcaaggctcttaatgcgatcgcttttaaaaagaaatgtttattggcagggcttacagaaagaaaaggaaagtgccactgcctggcctgccagctacaccgcagaaacagcctagcatgagctggtccagacccgtgcacgatgccagaggaattgagcgtaactggtatgaatccacctaccgagctcacgctgcttgttgcgggtgcggaaattttattcatcatattaacaatttggctactcgctacggctttgctcctggcgccccgccacctggtggtccaaggccgaggccgccagtaccagtagacggctctagacccgcgctgccatggcgtggtggtggcgaacacggtggagatggcgccaacccagaaggcgatggagacggtggcgcagacgcaggagactaccgcgcagaagagctagaagagctgttcgccgccgtcgaaggagaccagtaaggaggcgccggtgggggaggcgtagatatagacgggggtacagacgcaggacttggctcagacgcagacgaagacgtacccgacgcaaactagtactgactcagtggcagccccagactcgcagaaaatgtaacataataggctacctccccatactgtggtgcgggtacctaaggagtgccaataactacgcctaccactctgacgattgcactaaacagcctgacccctttggaggggctcttagcactacctcctttgacctaaaagtgctatttgaccagcaccagcgaggtctcaataaatggacgttccctaacgaccagctagacctagccagatacaggggctgcgaactcactttttacaggactaaagccacagactttattggggtttatgacattacagctccttacaagttagacaagtacagctgccccagctaccaccctggaaaaatgatgtttcaaaaaaagaaaatactaattcctagctatgacactaaccctaagggtcctcagaaaattaaggttaagatccctccccctaaactgttcgttgacaagtggtatacgcaagaggacctgtgcgacgttaatcttatgtcacttgcggtttctgcggcttcctttacacatccgttcggctcaccactaacgaacaacccttgtgtaaccttccaggtgcttgactcaatatactatgctgtaataggctttagtgcaccagaacagaaaagacaagaagttttagacactttatactcacaaaatgcttactggtccagccacttaactccatactttcttgctggccttaaaaaaccctttccacagaatgaatcactctttacagtaccagcaggctctgctaccgacagtcttatgacaggcataggaacaactaccaacaaaaacaactcaataactatagcaggagacagtaactataactggtacccctataatgtatcacattttaaagccgaggtacataaaataagaaaacaatactttttatgggaaacagaggaagccccacaagctacatctacactaggaaaacaccacacgtggacaaaacccaccacagaccactacgaataccacctgggcctctttagtcctatattcataggcccaactagaagtaacaagatatttgccacagcataccaagatgtaacttacaaccccctaaacgacaagggagtgggcaaccacatatggtttcagtataactcaaaaatagatactaatatagcacaacagggctgctactgccaccttgaaaacatacccctgtgggcaggcttttatggctactctgactttgtagatcaagaactaggcccctttgtagacggagagaccgtaggctttgtgtgctgtatatgtccatacacagaacccccaatgttcagaaaagacaatccaggccagggctacgtgttttatgaccagttctttggcaatggcaagtggattgacggacgtggacacatagaaccatactggctgtgcaggtggagaccagaaatgctgttccagcacatggtaatgagagacatagtacagactggaccgtttagctacaaagacgaaagcaaaaactgtgtacttaccatgaaatacaaatttaaatttacctggggcggcaatatggtctcccaacagacaatcagaaacccctgcaagacggacgcaccctccagtaccggtagacagcctagagagttacaaattgttgacccgcagtccatgggtcccaaatgggtattccacgcctgggactggagacgtggcttccttaatgacacagctctcaaacgcttgcgagaaaaaccactcgattatgaagagtatagcaaaaagccaaaaagacctagacttttccctgttacagagaggggcaaagagttccagcagcaaggagaaggctccgattcggaggaagaaaaatacccgtcatttacagaagagcaaacgaaggagaacatacagcagcacctccagctccagctccgaaagcaacagcgactcggagagcagctccgactcctgcagaaccacctgctcaaaacgcaagcgggtctccacctaaaccccctattatttatccagcagtaaacaaggtacttctatttgagcccagtgggcccagacctctaaccaccgcagaggactggcgcactgagtaccagtgttgcaagcactgggacaggccccctcgcaaatttcacacagatactcctttctatccctgggcccctaaacctcatccttaccaagttagctttaaaataggcttttctcaataaacaaggcattttactgttcacttgtcggtgtcaacctctataagtcactaagcactccgagcgaagcgaggagtgcgacccttccacggcgcgccccctactgccctggtgcaacgccctcggcggccgcgcgctacgccttcggctgcgcgcggcacctcggacccccgctcgtgctgacacgctcgcgcgtgtcagaccacttcgggctcgcgggggtcgggaaatttgctaaacagactccgagttgccattggacactgtagctgtgaatcagtaacgaaagtgagtggggccagacttcgccataaggcctttatcttcttgccattggtccgtaacaagggtcgccataggcttcgggctcggttttaggccttccggactacaaaaaccgcca

SEQ ID NO: 971 - protein, 754 aa, Alphatorquevirus sp.
MAWWWRTRWRWRQPRRRWRRWRRRRRLPRRRARRAVRRRRRRPVRRRRWGRRRYRRGYRRRTWLRRRRRRTRRKLVLTQWQPQTRRKCNIIGYLPILWCGYLRSANNYAYHSDDCTKQPDPFGGALSTTSFDLKVLFDQHQRGLNKWTFPNDQLDLARYRGCELTFYRTKATDFIGVYDITAPYKLDKYSCPSYHPGKMMFQKKKILIPSYDTNPKGPQKIKVKIPPPKLFVDKWYTQEDLCDVNLMSLAVSAASFTHPFGSPLTNNPCVTFQVLDSIYYAVIGFSAPEQKRQEVLDTLYSQNAYWSSHLTPYFLAGLKKPFPQNESLFTVPAGSATDSLMTGIGTTTNKNNSITIAGDSNYNWYPYNVSHFKAEVHKIRKQYFLWETEEAPQATSTLGKHHTWTKPTTDHYEYHLGLFSPIFIGPTRSNKIFATAYQDVTYNPLNDKGVGNHIWFQYNSKIDTNIAQQGCYCHLENIPLWAGFYGYSDFVDQELGPFVDGETVGFVCCICPYTEPPMFRKDNPGQGYVFYDQFFGNGKWIDGRGHIEPYWLCRWRPEMLFQHMVMRDIVQTGPFSYKDESKNCVLTMKYKFKFTWGGNMVSQQTIRNPCKTDAPSSTGRQPRELQIVDPQSMGPKWVFHAWDWRRGFLNDTALKRLREKPLDYEEYSKKPKRPRLFPVTERGKEFQQQGEGSDSEEEKYPSFTEEQTKENIQQHLQLQLRKQQRLGEQLRLLQNHLLKTQAGLHLNPLLFIQQ

SEQ ID NO: 972 - protein, 143 aa, Alphatorquevirus sp.
MFIGRAYRKKRKVPLPGLPATPQKQPSMSWSRPVHDARGIERNWYESTYRAHAACCGCGNFIHHINNLATRYGFAPGAPPPGGPRPRPPVPVDGSRPALPWRGGGEHGGDGANPEGDGDGGADAGDYRAEELEELFAAVEGDQ

SEQ ID NO: 973 - DNA, 3253 bp, Betatorquevirus sp.
cgggagccgaaggtgagtgaaaccaccgcagtctaggggcaattcgggctagttcagtctggcggaacgggcaagaaacttaaaatattttgttttttttagatgagcaaattctataaaccaattcaactaagcttaaaacaccgcgacctgaattggattaacacgcaagtagcaattcatgatcttcactgccaatgtgacaaccctctaaaacatattattattggaataattgaaagagagccttctttaaagttcgacaaagaagaatcagctaaaattctaaaatgccttactactaccgacgaagatgggagccgaaggtgagtgaaaccaccgcagtctaggggcaattcgggctagttcagtatggcggaacgggcaagaaacttaaaatattttgttttttttagatgagcaaatactataaaccaattcaactaagcttaaaacaccgcgacctgaattggattaacacacaagtagcaattcatgatcttcactgccaatgtgacaaccctctaaaacatatcattattggaataattgaaagagagccttctttaaagttcaacaaagaagaatcagctaaaattctaaaatgccttactactaccgacgaagatggagacgccgtagacgcccttggagacggagatttagaggcccttttcgcccaagacgtttttggacaagaagatacagggtaagacgatttaaaagaaaattacctaaaatacctataaaacaatggcaacccagtactataaaaaaactaactgtaaaaggacaatacccactattcagtggtacaacagaaagaattggtaatgataatactgcttatattgaccaaattgctcctcatgactttccttcaggaggactatacagtataactgtatttaccttagctggactatacgaactacatgaaaaagctagaaattggtggacaacaagtaattgtaatttaccattaataagatttatgggggctaccataaaattgtatgcatctactaatgttgactatgtaactgtacctgtaaactgtggggaacttaaagctaatgaatcactctttcaatcaacacagccatcaattcttaccttaaaccacagaaagaaaatattactatgcaaaaacacaacacacacaaagagaccatacaaaaaaattagaattaaaccaccagcactattatttaacaaatggtatttccaaaaagaattagctaactatccactagctatgatactaacatctgccgccagttttgacagatactacctaccttcatcagcagtaacagaaacaataggatttaaatccttaaacacaaaattttttcaacaacataactttaaacagaaacaaccagtagaaccctattcacctaaaccacacacatacatatttgctattggaggtacagttacaatagatactgccaaaagagaaaaccttattttacttggaaacactctagattatcaactaggatcccaaataggtcaaatggcggtaaccaaacccgaaagctggcaaaaacaagttgaccagtacttcgaaaaaagaactaactggggaaaccctttcaaacccacatattttgactttgacccagacgctggattaatattcttatacacaataaaggctggagaaacacttaaagacaaacttaaaggcctaagtagtggctttattaaagaccagggctttttagcaccaagtatgccattttacatagactgcagatacaatccacaagcagacatgaagcacaatgccacatttgtaacaagaataacagaaggcacacaaacatgggaaaaaccaaaagacacacacttatacactgaaggactacccttatgggacttactatggggatggagagactttctattaaaatctggatcaccacaacacctagacacagactatatacaagtaattatatctgatcacatatcgccaaaagaatatgactattacgtgccaattgatggatttatgttagctggaaaaagcccatattcagaccacattaaaccatatgaccaagacaactggcacccaaaagtaaactttcaattacaaagtgtagcacacattcttcaatcaggcccagcaacagctaaactaccagacaaacaaagtgcagaagcacacatgacctatcgctttcattttaaggttggaggatgcccaccaaaaatggacaatgtatgcaacccaaaaacacaaccagactaccctcaacccggtaacatcgtatcatcaattttattacagaatccagaatacccaatccaatactacctcaactcatttgatgaaagaaggggaatgctcacagagagagctgcaaaaagaatcaaaaaagacacggagactaaagaaactttttttaaacctacaggacaaactctcatgtccctcagaccagcatcccctcaaacaacatcgacagaggactcatcggaggaggaagaaaacgaaaaagagacacagaaaatcatctccagacaccaccgaaagcagcgaaacctccagcgacgaatcatggagctcctccaattaacacaaaatatgtaataaaacaatgtcgagttaaagtaaacttgtttgaaccagaaaaacctaaaaatagacttctaaatgcacaagaaagagaaacagacttatggttagctaaaatatttaagagaccatgtactcattatactcatgatatacctttttacccatggcttccccctactcctaaagtacccaaagttaattttgacttaaaatttactgaataaaggcctgcattatttcacttagtggtgtccatttatttaagtctcaactaatataaaccaacaccgcctccctacattgctggcctagcagggggctccgccccctgcaacccccaggggggacacccccctaaaaccccccgataaaccacaaaatttgcattgccgaccacaaacgaatagaaaaccacaaaatttgcattgccaaccacaaacgaacaggaaaccacaaaatttgcattgccgaccacaaacgaatatgctaattaaacttcctttttttacaccatacttccttaaaaataaattagtaaacagcgtcacactaggcggagctaccacactataaatttaacaacacattcgaatggctgagtttatgccgccagacggagacaggatcacgcagtgactccgggctgaacttggg

SEQ ID NO: 974 - protein, 668 aa, Betatorquevirus sp.
MPYYYRRRWRRRRRPWRRRFRGPFRPRRFWTRRYRVRRFKRKLPKIPIKQWQPSTIKKLTVKGQYPLFSGTTERIGNDNTAYIDQIAPHDFPSGGLYSITVFTLAGLYELHEKARNWWTTSNCNLPLIRFMGATIKLYASTNVDYVTVPVNCGELKANESLFQSTQPSILTLNHRKKILLCKNTTHTKRPYKKIRIKPPALLFNKWYFQKELANYPLAMILTSAASFDRYYLPSSAVTETIGFKSLNTKFFQQHNFKQKQPVEPYSPKPHTYIFAIGGTVTIDTAKRENLILLGNTLDYQLGSQIGQMAVTKPESWQKQVDQYFEKRTNWGNPFKPTYFDFDPDAGLIFLYTIKAGETLKDKLKGLSSGFIKDQGFLAPSMPFYIDCRYNPQADMKHNATFVTRITEGTQTWEKPKDTHLYTEGLPLWDLLWGWRDFLLKSGSPQHLDTDYIQVIISDHISPKEYDYYVPIDGFMLAGKSPYSDHIKPYDQDNWHPKVNFQLQSVAHILQSGPATAKLPDKQSAEAHMTYRFHFKVGGCPPKMDNVCNPKTQPDYPQPGNIVSSILLQNPEYPIQYYLNSFDERRGMLTERAAKRIKKDTETKETFFKPTGQTLMSLRPASPQTTSTEDSSEEEENEKETQKIISRHHRKQRNLQRRIMELLQLTQNM

SEQ ID NO: 975 - protein, 98 aa, Betatorquevirus sp.
MSKYYKPIQLSLKHRDLNWINTQVAIHDLHCQCDNPLKHIIIGIIEREPSLKFNKEESAKILKCLTTTDEDGDAVDALGDGDLEALFAQDVFGQEDTG

SEQ ID NO: 976 - protein, 61 aa, Betatorquevirus sp.
LFEPEKPKNRLLNAQERETDLWLAKIFKRPCTHYTHDIPFYPWLPPTPKVPKVNFDLKFTE

SEQ ID NO: 977 - DNA, 3253 bp, Gammatorquevirus sp.
cgggagcccgaggtgagtgaaaccaccgaggtctaggggcaattcgggctagggcagtctagcggaacgggcaagaaacttaaaactattttattttctagatgtctgacttcttaaaattctacagaccaaccccatacaacaaagaaacaaaagaacaaatatggggaactgtctttactgatacccatgatgaattctgtggatgtacagagcctgcagctcattttttgagcacactctttccaccagaccatccagcaagaaaccaaaccattgattcctttattaaaagttgctacaaaagacaaatatgcctttttggtggcaaagaagaaaaagatggtactaccgaggcagacgcagaccttactacaaaagaaactacaaaacaaaaagaagaagaagatttaacagaagaaaatataaaagaccttatcgccgccgcagaaagcgcagaagcaaggtaagaagaaaaaaaaaaactattactttaaaacaatggcaaccagagactattagaaaatgtaaaattaaaggacatatatgccatgttttaggaggtgaaggtagacaatttgcttgctatacagacacacaatatgactggaacttacctacaacacctgggggaggtgggtttggagttgaaaaatttaccttgcagtttttatataatgaaaacaaaagaaaccataacatatggactacatcaaattcaatgctagacctagtaagatatacaggcacaacctttagattttacagacactctcacctagactttatagttcactatcaaagaaactatcctatgcaactagaaaaatatacatatgcatttacacacccagctacacttctactattaaaacacaaaaaaattgtaccaagctttttaactgcaccacttaaaaaaaaaagatatgtaactgtaaaaattaaaccaccaacacaaatgataaacaaatggttttttcaaagtggattttcagacacaggactatttactttacacacaacagtctgtgacttaagatatcaaagactaggctgctgtaacagcaacagattagttagcttttacatattaaatccccaattctatcagtggggagattggggaaacaaatctagtgataccaacccatacaaaccatactctcaagcacagtctggaacttacacaggcacagactataaaggagccacaatatctgtatcaatagatacatcaacatatgacaaaagtatatcatatgggtcaggatggtttacatctaaactactacaaatagcagacttaacctctccatctgaagttgacccagtaaaagcatccagatacaacccaacaatagacacaggcataggcaataaagtatgggtaacaagtatattaaaaagagacataggcccaccaacaacagacacacaactaattctagaagagctaccactctggcaacttttatttggagccttaaactacataaataaaattaaacaagacaaatattttttaaaatcatattttttagtattccaaactaaatttgcagagccagcagctggtacccccaactacttcatgcctatagataaaacatttataatgggtcaaaacccatatggcagattttcaaaacatgaccctaactcacactggttcccaaatgtttctaatcaattagaaacaattaatgccatagtacaatcaggaccctacatgccaaaattagacaatataaaacaaagtacatgggaactagactcatcatatactgtttatcttaagtttggtggtgccacattgcctgatgcctatgcagcagatccaagtaaacaagccaactatgaagtcccagatatgttcaacaaagcagtacaaatctgcaatccgtcaaagcaggacccaagatccattttgcatgcctgggacttcagaagaggctttgctacaaaatcagctcttaaaagaatgcgagaccaccaagaaactgatacatctttccaatactctacagataccgaagcctcaccacaaaaaaagaaaaaaacaaccaactcactcccactcaaagagaaagatcaagaagaagaagaagcctgtctcctctctctcttcgaagaagatacatgccaagaatcacaggcatcgcaagacctctaccagctcatccagcagcaaaagcagcagcagcaacagatcaagtacaaccttctcaacctcatctcaaagctgaaaacaaaacagaaaataatacaactacaaacaggtctcctagattaactttaataaaacctggctttgaaatggaaacagaacttgaactttgcaatgcttttaaaagataccccagaaaataccatgaagacccctgtacttatccatggttacctgaaccaattccaaaagtttgctttgcacttagatttaaatactaggcattcaatgtacacttagtaaagcatgtttaataaagtttacaccccaaaaaaaactgtaaaaataaaaaaaaaaaaaaaaaaataaaaaattgcaaaaattcggcgctcgcgcgcgctgcgcgcgcgcgagcgccgtcacgcgccggcgctcgcgcgccgcgcgtatgtgctaacactccacgcacctagattggggtgcgcgcgctagcgcgcgcaccccaatgcgccccgccctcgttccgacccgcttgcgcgggtcggaccacttcgggctcgggggggcgcgcctgcggcgcttatttactaaacagactccgagtcgccatttggccccccctaagctccgcccccctcatgaatattcataaaggaaaccacaaaattaccccccctaagctccgcccccctcatgaatattcataaaggaaaccacaaaattagaattgccgaccacaaactgccatatgctaattagttccccttttacacagtaaaaaggggaagtgggggggcagagcccccccacaccccccgcggggggggcaaagcccccccccgcaccccccctacgtcacagaccacgcccccgccgccatcttgggtgcggcagggcgggggctaaaatggcgggacccaatcattttatactttcactttccaattaaaacctgacacgtcacaacaaagaggcggagactataaaactatataaccaagtggggtggcgaatggctgagtttaccccgctagacggtgcagggaccgacagagcgcagcgaggaggtccccggctgcccatggg

SEQ ID NO: 978 - protein, 665 aa, Gammatorquevirus sp.
LLQKTNMPFWWQRRKRWYYRGRRRPYYKRNYKTKRRRRFNRRKYKRPYRRRRKRRSKVRRKKKTITLKQWQPETIRKCKIKGHICHVLGGEGRQFACYTDTQYDWNLPTTPGGGGFGVEKFTLQFLYNENKRNHNIWTTSNSMLDLVRYTGTTFRFYRHSHLDFIVHYQRNYPMQLEKYTYAFTHPATLLLLKHKKIVPSFLTAPLKKKRYVTVKIKPPTQMINKWFFQSGFSDTGLFTLHTTVCDLRYQRLGCCNSNRLVSFYILNPQFYQWGDWGNKSSDTNPYKPYSQAQSGTYTGTDYKGATISVSIDTSTYDKSISYGSGWFTSKLLQIADLTSPSEVDPVKASRYNPTIDTGIGNKVWVTSILKRDIGPPTTDTQLILEELPLWQLLFGALNYINKIKQDKYFLKSYFLVFQTKFAEPAAGTPNYFMPIDKTFIMGQNPYGRFSKHDPNSHWFPNVSNQLETINAIVQSGPYMPKLDNIKQSTWELDSSYTVYLKFGGATLPDAYAADPSKQANYEVPDMFNKAVQICNPSKQDPRSILHAWDFRRGFATKSALKRMRDHQETDTSFQYSTDTEASPQKKKKTTNSLPLKEKDQEEEEACLLSLFEEDTCQESQASQDLYQLIQQQKQQQQQIKYNLLNLISKLKTKQKIIQLQTGLLD

SEQ ID NO: 979 - DNA, 3252 bp, Alphatorquevirus sp.
cgggtgccggaggtgagtttacacaccgcagtcaaggggcaattcgggctcgggactggccgggctatgggcaaggctcttaaaaagctatgtttcttggtaaactttacagaaagaagaggcgcctgtcactgtccccactgcacactccacaaaaaacttgcaggtttctgagtgctatgtggagaccccccgtacacaatgtccgcggccaggagagacagtggtacgagtcctgctttcgttctcacgcttctttttgtggctgtggtgattttattcggcatctttgtcatctggcgaatgattttggacgtcctcctaccgttcctcaacccccggcacctccacctccagtaaggccactgccagctctcccggcacccccaaacccctccggtagcagagcaacatggcctactggtggtggaaacgtagaagacgaggcccgtggagaaggagacggcgctggaggcttcgcagatctcgcagacgaggagctgctttccgccgccgcagacgtcgcagaagagtaagaaaaaggagggggaggtggaggaggacttatagaaaatggcggaggggcagaaagagacgaaagcacaagagacgcttagtactgactcaatggcaacccgcctttatcagacgctgctatatagtgggctttctgccccttttaatatgcggggaaaacacctccggcagaaactttgccacccactcagacgacctcatatccaacggaccttacggggggggtatgacaaccactaaatttactttaagaatactctatgacgaacatttaagactccttaactactggactgttagtaacgaggacctagacctgtgtagataccttggagggaccttctacgcgtacagacaccccactgtagactttataatacaaattcacaccagtccccccttcctagacactcccctgacgggtcccagcatacacccaggcatgctaatgctcacaaaaaacaaaatactaatacccagcctaaaaacaagacctagcaagaaacacaaagtaaaaattagattcaggcctcctaaactgtttcaagacaagtggtacccccagtcagagctctgtgacacaacactactaaccgtctttgcaaccgcatgtgacctgcaatttccgttcggctcaccactaacgaacaacccttgcgtcaacttccaggtactaggttccgtttacaaacggcacctcagtatacttcctgataaactagctacctatgaaacacactataaagctaacctatatgaaatagtacaatactatgatacatttcaaactatagcacaaataaaacccagcgccacacaatcagacttcagtcccacatggaatgagatacaaaataaaacaactttaaatacatcaggctcaaaccagttagtaagcaatgacacctggtacttaggccatacatatgtaaaagaaaaagtacaacaagcagcttataacattagagaaaaatacttaaatgctacaagaaaagcactaccagcactagcaacactaggagacaaaatgttagaataccacacaggcatttacagctccatattcttatctgcaggcagatcttactttgaaaccctaggagcctacacagatatagtttacaacccactagtagacaaaggcataggtaacaaagtgtggctagatcccttatcaaaagaagacgcagtattaaacagaaaacaagcaaaagtactaatagaagacatacccttatgggcagccctatttggctacacagaatttgcagccaaatacacaggagactctgccataacagctaactacagacttacactacggtgcccctacacagaccccatgctaacagacaaaaacaacgaagaccaaggctttgtaccctactctaagaactttggaaacggaaaaatgcccggaggcagtgccaacgtcccactgactatgagaatcaggtggtaccccatactgttccatcaactagaattgctagaagaaataattcagtctggaccgtttgcatacaagggcgacgaaaaaagctgtgtgttagctgtaaagtacattttcagatggaaatggggaggtaaccctgtgtctcaccagattgtgcgaaacccctgcaaagggggctccggttcccgtagagagcctcgctcaatacaagcagctgacccgaagtacatcactccgagactatcgttccactcgtgggactttagacgaggattatttggcatccaaagtattaaaagaatgtcggaagaatcaacagctcctgtctatcctacaggcccaccaagaaaaagaccaaaaagagacaccgacccgtacgactcgcaacaagaagaaagctcgatttcaacgcacctccagctccagccctggatccactccagccaagaagtccaaagcgaagaagagacgcaagtcccggaaaacatacaagaacaactcctccagcagctccgagagcagcagcagctcaggatccatctccagtccctcgcctcacaagtcctcaaaatcagggcgggatacgggatacaccccctattatcttcccaagcctaaacaaggtttttatgtttgagcctaaaggccccaaacccatacatggctacgaggcctggttagatgagtaccagacagcaggtgtgtgggataggccagttagaacataccacacagacatacccttttacccctgggcacccaaaaaacccccccccgaccaattccgcgtcagctttaaacttggctttcaataaaatttcaaggcctttgactgctcacttgtcggtgtctacctctataagtcactaagcactccgagcgccagcgaggagtgcgaccctagggggggactcaacgccttcggagccgcgcgctacgccttcggctgcgcgcggcacctcagacccccgctcgtgctgacacgctcgcgcgtgtcagaccacttcgggctcgcggggcccggccagtcccgagcccgaattgccccttgactgcggtgtgtaaactcacccccggcccccccccgtcgtggatcgtcactaaccacgtgactctcacaggccaaccacagtctatgtcgtacacttcctgggcatggtctacgtgataatataagacggcgcacttccgaatggctgagttttcgccgcccgtccgcagcgagatcgcgacggaggagcgatcgagcgtcccgaggg

SEQ ID NO: 980 - protein, 732 aa, Alphatorquevirus sp.
MAYWWWKRRRRGPWRRRRRWRLRRSRRRGAAFRRRRRRRRVRKRRGRWRRTYRKWRRGRKRRKHKRRLVLTQWQPAFIRRCYIVGFLPLLICGENTSGRNFATHSDDLISNGPYGGGMTTTKFTLRILYDEHLRLLNYWTVSNEDLDLCRYLGGTFYAYRHPTVDFIIQIHTSPPFLDTPLTGPSIHPGMLMLTKNKILIPSLKTRPSKKHKVKIRFRPPKLFQDKWYPQSELCDTTLLTVFATACDLQFPFGSPLTNNPCVNFQVLGSVYKRHLSILPDKLATYETHYKANLYEIVQYYDTFQTIAQIKPSATQSDFSPTWNEIQNKTTLNTSGSNQLVSNDTWYLGHTYVKEKVQQAAYNIREKYLNATRKALPALATLGDKMLEYHTGIYSSIFLSAGRSYFETLGAYTDIVYNPLVDKGIGNKVWLDPLSKEDAVLNRKQAKVLIEDIPLWAALFGYTEFAAKYTGDSAITANYRLTLRCPYTDPMLTDKNNEDQGFVPYSKNFGNGKMPGGSANVPLTMRIRWYPILFHQLELLEEIIQSGPFAYKGDEKSCVLAVKYIFRWKWGGNPVSHQIVRNPCKGGSGSRREPRSIQAADPKYITPRLSFHSWDFRRGLFGIQSIKRMSEESTAPVYPTGPPRKRPKRDTDPYDSQQEESSISTHLQLQPWIHSSQEVQSEEETQVPENIQEQLLQQLREQQQLRIHLQSLASQVLKIRAGYGIHPLLSSQA

SEQ ID NO: 981 - protein, 148 aa, Alphatorquevirus sp.
MFLGKLYRKKRRLSLSPLHTPQKTCRFLSAMWRPPVHNVRGQERQWYESCFRSHASFCGCGDFIRHLCHLANDFGRPPTVPQPPAPPPPVRPLPALPAPPNPSGSRATWPTGGGNVEDEARGEGDGAGGFADLADEELLSAAADVAEE

SEQ ID NO: 982 - protein, 128 aa, Alphatorquevirus sp.
LDPLQPRSPKRRRDASPGKHTRTTPPAAPRAAAAQDPSPVPRLTSPQNQGGIRDTPPIIFPSLNKVFMFEPKGPKPIHGYEAWLDEYQTAGVWDRPVRTYHTDIPFYPWAPKKPPPDQFRVSFKLGFQ

SEQ ID NO: 983 - DNA, 3247 bp, Alphatorquevirus sp.
cgggtgccggaggtgagtttacacaccgcagtcaaggggcaattcgggctcgggactggccgggctatgggcaaggctcttaaaaagccatgtttctcggtaaaccttacagaaagaaaaggaaactgctactgcagactgtgcgtgctccacaggcgccatcttccatgagctctacatggagagtgccccgcggcgatgtctccgcccgcgaactatcttggtaccgctccgtccgagacagccacgatgctttttgtggctgtcgtgatcctgtttttcatctttctcgtctggctgcacgttctaaccatcaaggacccccgacgccccccacggacgagcgcccgtcgacgtctaccccagtgaggcgcctgctgccgctgccctcctaccccggcgagggtccccaggctagatggcctggtggggatggagaaggcgctggtggcgcccgcggaggcggtggagattgcgacgcccgcgcaggcgaagaagagtaccggcccgaagacctagacgagctgttcggcgctatcgaacaagaacagtaaggaggcgaaggcgagggtggcggaggggctacaggcgccggtacagactgagacgctaccgtagacggggcaggcgacgcaaaaagatagtactgactcagtggaacccccagactgtcagaaaatgctttatcagaggacttatgccagtactgtgggcgggcatgggcacggggggccacaactacgccgtccgctcagatgactttgtagtagacagaggcttcgggggctccttcgccacagagactttctccctcagggtcctctttgaccagtaccagaggggcttcaataggtggtctcacaccaacgaggacctagacctggcccgctacatagggtgcaaatggactttttacagacacccagacactgactttatagtttactttacaaacaatccccctatgaaaaccaaccagcacacagcccctcttactactccaggcatgctcatgaagagcaaatataagatactagtgcccagctttaagaccagacccaaaggcagaaagacagtgtcagtaaaaataagaccccccaaactatttcaggacaagtggtacactcagcaggacctctgtccggtaccccttgtccaactgaacgtaaccgcagctgatttcacacatccgttcggctcaccactaactgaaactccttgcataaacttccaagttttagggaacttgtacaacaagtgtctaaatatagaccttccgcaattctcagaggatggaaacatacaggactccagttacactagagaaaacagaaaggatctggagaccctctataagaccctctttgttaacccccacgcaggcaattactggcaaacattcatctccaacacaatgattaaagctcatattaatgctaacacagcaaaaagctacacgcagccgccaaatggaacatcaaatgcaaacacaccatttcctacagttccagaagctactcagtttggcatctggaacaagaaactcatagaccccagagacagcaactttctgtttgctacctatcatccagaaaacataaaagacactataaaaacaatgagagacaacaactttgctctcaccacaggcaaaaatgacatatatggagactacaccgcggcctacaccagaaacacccacatgctagactactacctaggcttttatagccccatattcctttccagcggcaggtccaacacagagttctggaccgcctacagagacatagtatataatcccctcttagacaaaggcacaggcaacatgatctggttccagtatcatacaaaaacagacaatatataccgaaaaccagagtgccactgggagatactagacatgcccctgtgggccctctgcaacggatatgtagagtacctagagagccaaatcaaatatggggacatcctactagagggcaaagtcctcattagatgcccctacaccaaacccccactagtagaccccaacaatagccaagctgggtacgtggtattcaacaccaccttcggccagggaaagtggatcgacggcaagggctacattcccctacacgagaggagcaagtggtacgtcatgctcagataccagactgacgtactccatgacatagtgacttgtggaccctggcagtacagagacgataacaaaaactctcagctcatagccaagtacagattcaagttctactggggaggtaacatggtgcattctcaggtcatcagaaacccgtgcaaagacacccaagtatccggaccccgtcgacagcctcgcgaagtacaagtcgttgacccgcaactcatcaccccgccgtgggtcctccactcgttcgaccagagacgaggaatgtttactgagggagctatcagacgtctgctcaagcaaccaatacctggcgagtatgctcctacaccactcagagtcccgctcctctttccgtcctcagagttccaacgagagggagaagatgcagaaagcggctcagattcaccaccaaagagaccgcgactctggcaagaagaggccagccagacgcagacggagtcctcggaggagccgacggagacgacgagggagctcctcgagcgaaagctcagagagcagcgagtcctcaacctccaactccagcatgtcgcagtacaactcgccaaaacccaagcgaacctccacataaaccccctattatattcccagcagtaaacagggtctacctattttcaccaaacaaacccactcctatacaggggtaccacgggtggaatactgagttcgaggcctgccaggccttcgacagaccacccagaaagtatctctcagacacacctacgtatccttggctccccgtccccaatcctgaaataaaggtgagctttaagctcggtttcaaatcttacaaggccgtgggagtttcactggtcggtgtctacctcctaaggtcactaagcactccgagcgtcagcgaggagtgcgacccttccccctggtgggggctccgccccccggtcccccccccgaagtacgtcactaaccacgtgactcccgcaggccaaccacagtctatgtcgtgcacttcctgggcatggtctacgtgattatataaagcggcgcacttccgaatggctgagttttccacgcccgtccgcagcgagatcgcgacggaggagcgatcgagcgtcccgaggg

SEQ ID NO: 984 - protein, 781 aa, Alphatorquevirus sp.
MAWWGWRRRWWRPRRRWRLRRPRRRRRVPARRPRRAVRRYRTRTVRRRRRGWRRGYRRRYRLRRYRRRGRRRKKIVLTQWNPQTVRKCFIRGLMPVLWAGMGTGGHNYAVRSDDFVVDRGFGGSFATETFSLRVLFDQYQRGFNRWSHTNEDLDLARYIGCKWTFYRHPDTDFIVYFTNNPPMKTNQHTAPLTTPGMLMKSKYKILVPSFKTRPKGRKTVSVKIRPPKLFQDKWYTQQDLCPVPLVQLNVTAADFTHPFGSPLTETPCINFQVLGNLYNKCLNIDLPQFSEDGNIQDSSYTRENRKDLETLYKTLFVNPHAGNYWQTFISNTMIKAHINANTAKSYTQPPNGTSNANTPFPTVPEATQFGIWNKKLIDPRDSNFLFATYHPENIKDTIKTMRDNNFALTTGKNDIYGDYTAAYTRNTHMLDYYLGFYSPIFLSSGRSNTEFWTAYRDIVYNPLLDKGTGNMIWFQYHTKTDNIYRKPECHWEILDMPLWALCNGYVEYLESQIKYGDILLEGKVLIRCPYTKPPLVDPNNSQAGYVVFNTTFGQGKWIDGKGYIPLHERSKWYVMLRYQTDVLHDIVTCGPWQYRDDNKNSQLIAKYRFKFYWGGNMVHSQVIRNPCKDTQVSGPRRQPREVQVVDPQLITPPWVLHSFDQRRGMFTEGAIRRLLKQPIPGEYAPTPLRVPLLFPSSEFQREGEDAESGSDSPPKRPRLWQEEASQTQTESSEEPTETTRELLERKLREQRVLNLQLQHVAVQLAKTQANLHINPLLYSQQ

SEQ ID NO: 985 - protein, 154 aa, Alphatorquevirus sp.
MFLGKPYRKKRKLLLQTVRAPQAPSSMSSTWRVPRGDVSARELSWYRSVRDSHDAFCGCRDPVFHLSRLAARSNHQGPPTPPTDERPSTSTPVRRLLPLPSYPGEGPQARWPGGDGEGAGGARGGGGDCDARAGEEEYRPEDLDELFGAIEQEQ

SEQ ID NO: 986 - protein, 193 aa, Alphatorquevirus sp.
LARRGQPDADGVLGGADGDDEGAPRAKAQRAASPQPPTPACRSTTRQNPSEPPHKPPIIFPAVNRVYLFSPNKPTPIQGYHGWNTEFEACQAFDRPPRKYLSDTPTYPWLPVPNPEIKVSFKLGFKSYKAVGVSLVGVYLLRSLSTPSVSEECDPSPWWGLRPPVPPPKYVTNHVTPAGQPQSMSCTSWAWST

SEQ ID NO: 987 - DNA, 3241 bp, Alphatorquevirus sp.
cccccgaagaacgtcactaaccacgtgactcccgcaggccaatcacagtgtatgtcgtgcacttcctgggcatgatctacgagataatataaagaacagcacttccgaatggctgagtttttcacgcccgtccgcagcgaggagcagccgaagggagatccgcgcgtcccgagggcgggtgccggaggtgagtttacacaccgcagtcaaggggcaattcgggctcgggactggccgagccccgggcaaggctcttaaaaatgcacttttctaaaataagcagaaagaaaaggaaactgctactgcaaactgtgccgcttgcagagagccaacggattaccatgagctggtccagacccacccaaaatgtttatacttgtgaacaaaactggtttgagtcctgcctcagatcacactcatgcttttgtggctgtaataatcctgttattcattttaataacattgctactcgctttaactatctgcctactgccaatccgcctgtgggacccccccaaccgcccacacgcccgccgtcccgcttgagaccccttcccgctctccccgcgcctcccgctgatccacaagcaccatggcctggggctggtggctcaagcggtggaggagaagaaagaaaccagcgtggaagaagtggagaacgcgccgatggagaagatttcgacgcagaagacctaaacgcacttatggccgccgtcgaagaagacgaacagtaaggaggcgccgcgttagacgacttaggaggagggggtggactaggagacggtacataagacgcaaacgcagaaagaaaaagctagtactgactcagtggaacccccaagacgtgaggagatgcacaataaggggcataataccccttataatgtgcggtgcaaacactgccagttttaactatggcatgcacagcgatgacagcactccccagccagaaaagttcgggggaggcatgagcacagttacatttagcctctatgtgttgtatgaccagtacaccagacacctaaacaggtggtcgtaccccaacgaccagctagacctagccagatacataggctgtaaatttaaattctacagagacacacacacagactttatagttacctatgacataaatccacccatgaaaaacacagaactcagcagccccagcactcatccaggcatgctaatgcaacaaaagagaaaagtactagtccctagctgggacacctatcctagaggcagaaaatatgtactagttaaaataccaccccccaaactatttgaagaccactggtacactcagccagacttatgcaaagttcctcttgtaactttgcggtcaactgccgctgacctcaaacatccgttctgctcaccacaaacgaacaacccttgcaccaccttccaggtgttgcgcgaacagtataacgacatgataggcttcccctttaattataacgcatcagatgaaagacagcaacaaacattaaaaacatttgaaaactggctatactcatccagcacacactatcagacatttgcaaccgaggctaaccttagacccagacagtacaatgcagacggaactctaaacccaaactatgcagacctacaatccaggtggacaagtattatatatggaaaaaagacagacagcaactttgggtacacatcctacaacttttcaggtgagacaggctataaatttgtaacagaaatcagacagtggtactggacacaactaacatcctggacacaaaaagtacctcacataaacaccacctttgccaatgccatatatccagagtttgaataccacgctggctggtactcaaacatttttataggccccaacagattcaacgtacagtttagagcagcctacatggatgtcacatacaacccaataaatgacaagggccagttaaacaaaatatggttccagtatagcacaaaacccaccacagagtttgtaccaaaacaggccaaatgccttttagaaaacctacctctgtggagtatgctatttggctactcagaatatgtagagagccagctaggcccctttcaggaccacgagacagtaggcctagtagtagtgcagtgtccatacacagtaccccccatgtatgacaagaacaaaccaaacatgggatacgtgttctatgacacccactttggcaacggaaagctaggcaacggactaggccaggtacccagatactggcagcaaagatggtaccccatcttaaagagacagaaacaagttatgaatgacatctgcaagactggaccgtttgcatacagagacgagagactgcaagctgacttgactgcaggatactcctttagatttaactggggtggtgacttaatctaccaccaggttgtcaaaaacccatgtgactcaggaggactggtgccttccgactccaatagactcaagcgggacgtacaagttgttagcccgctcaccatgggacccagactcatcttccactcgttcgaccaaagacgggggctctttactgacagagctatcaaaagaatgtacgatgaacagattgatgttccagactttacagaacagcctaaaatcccccgacttttccccccagtcgaactcaaagaaagggaagaaaaagactcaggttcggagacggagagcatcagcagttcccaagaaaaagaagcacaaaagcaagcggcgctaccagtccagcagcagctccgactccaactgcgagaacaacagcgactccgagtccacttgcagcacctcttcctccaactccagaaaaccaaagcaaatttacatttaaacccactatctttccagcaagagataagctagacatgtttggtgagattatagatagaaagcctacctcccaagattgggagaccgaatacgtaacctgtaagatatttaacaggccccccagacaacacctcacagaccctcctttctatccctggatgcctaagcctaaacctacatgccgtgtaacctttaagcttggctttcaataaacaaggccgtgggagtttcacttgtcggtgtctacctctataagtcactaagctctccgagcgaagcgaggagagcgaccctagaccaaggggcaactccctcgaagtccggcgctacgcgcttcgcgctgcgccggacatctcggacccccccgagcccgaattgccccttgactgcggtgtgtaaactcacctccggcacccg

SEQ ID NO: 988 - protein, 754 aa, Alphatorquevirus sp.
MAWGWWLKRWRRRKKPAWKKWRTRRWRRFRRRRPKRTYGRRRRRRTVRRRRVRRLRRRGWTRRRYIRRKRRKKKLVLTQWNPQDVRRCTIRGIIPLIMCGANTASFNYGMHSDDSTPQPEKFGGGMSTVTFSLYVLYDQYTRHLNRWSYPNDQLDLARYIGCKFKFYRDTHTDFIVTYDINPPMKNTELSSPSTHPGMLMQQKRKVLVPSWDTYPRGRKYVLVKIPPPKLFEDHWYTQPDLCKVPLVTLRSTAADLKHPFCSPQTNNPCTTFQVLREQYNDMIGFPFNYNASDERQQQTLKTFENWLYSSSTHYQTFATEANLRPRQYNADGTLNPNYADLQSRWTSIIYGKKTDSNFGYTSYNFSGETGYKFVTEIRQWYWTQLTSWTQKVPHINTTFANAIYPEFEYHAGWYSNIFIGPNRFNVQFRAAYMDVTYNPINDKGQLNKIWFQYSTKPTTEFVPKQAKCLLENLPLWSMLFGYSEYVESQLGPFQDHETVGLVVVQCPYTVPPMYDKNKPNMGYVFYDTHFGNGKLGNGLGQVPRYWQQRWYPILKRQKQVMNDICKTGPFAYRDERLQADLTAGYSFRFNWGGDLIYHQVVKNPCDSGGLVPSDSNRLKRDVQVVSPLTMGPRLIFHSFDQRRGLFTDRAIKRMYDEQIDVPDFTEQPKIPRLFPPVELKEREEKDSGSETESISSSQEKEAQKQAALPVQQQLRLQLREQQRLRVHLQHLFLQLQKTKANLHLNPLSFQQEIS

SEQ ID NO: 989 - protein, 167 aa, Alphatorquevirus sp.
LAEPRARLLKMHFSKISRKKRKLLLQTVPLAESQRITMSWSRPTQNVYTCEQNWFESCLRSHSCFCGCNNPVIHFNNIATRFNYLPTANPPVGPPQPPTRPPSRLRPLPALPAPPADPQAPWPGAGGSSGGGEERNQRGRSGERADGEDFDAEDLNALMAAVEEDEQ

SEQ ID NO: 990 - protein, 58 aa, Alphatorquevirus sp.; identical to SEQ ID NO: 609

SEQ ID NO: 991 - DNA, 3239 bp, Alphatorquevirus sp.
ggacccccgctcgtgctgacacgcttgcgcgtgtcagaccacttcgggctcgcgggggtcgggaaatttgctaaacagactccgagttgccattggactcaggagctgtgaatctgtaacgaaagtgagtggggccagacttcgccataaggcctttatcttcttgccattggatagtgcaaggggtcgccataggcttcggcctcggttttaggccttccggactacaaaaatcgccatattggtgacgtcacggccgccattttaagtaaggcggaagtttctccactatacaaaatggcggcggagcacttccggcttgcccaaaatggcgggcaagctcttcctcgggactggccgggctatgggcaaggctcttaaaaaagcatgtttctcggtaaaccttacagaaagaaaaggaaactgcttttgtgctctctgcgtactgcatcgaaagcacttaccttctcgatgagctggtccagacccatccacaatgttactgcactggaaagaaattggtaccagggtgttatccacactcatgctgcttgctgtggctgcggtaaccctggggcgcacttcgctgccttggtacagcgctacaactcaaccacaatgcaacaccagcatttactgccaccagcatcccctataaggtccccaaaccagatccgtagagcccgggccctgcccgcggctccggagcagcctccggcactaccatggcatggtggtggtggagaaggagacgccgcccgcggtggagaaggagacgctggaggagacgaccccgtgtacgagccaggagacctagacgccctgtacgccgccgtcgaagaagagtaaggagagggagacgggggtggaggagactatacagacgatggagacgcagggggcgacgcagacacaaacgaaaaaaactggtaatgagacagtggaaccccagcactgtaacaaaatgctttatagtgggctacctgcccattattatttgtggacagggtacctgtgccatgaactatgcatctcactgcgatgacatagagtaccctggacctctgggagggggactgacctccatgaggtttactttaagaatactgtatgaccagtacaccaggggacagaacttttggacaaaaagcaacgaggacctagacttagccagattcctgggatcccgatggactttttacagacacccagaagtagactttatagttacctgggagacctcagccccttttacagactctatagtatcaggaccacaccaacacccaggcatacagatgctcatgaaaaagaaaatactcataccaagttttagaacaaaacccaagggtcgcagcactataaaagttaaaatacacccccctaagctcatgatagacaagtggtacccacaaactgaattctgtgaagtaactcttctaacgatacatgccacagcatgtgacctgcggtttccgttctgctcaccacaaacgaacacttcctgcatacagttcctcgttttggcaggaaattacagtggttacattagcatattacctgacaaagcaaacaaacaccaacttacaaactttataactactaatgttacagaacaatcaaatgtaggcaacacattagccacaccatacatgctaaaatatccaccaccaaccaagaaacaaggcacaggcacaccaccatatacttcaccagacagccaagatggagatactatatacgaaaagctaggtgaaacaatactttcgaataacgacgtctggtttaaaaaagctaaaaccgcatggactaacttacattcacattatggcatacccacatcagaaggcctggaataccacacaggattttttagtgctatattcttatccccagtaagactaaactcacagtttccaggcttctataacaccattaaatacaacccactaacagacaaaggagagggaaacagaatctggtgcgacccttgcaataaagaatcattcacgtacagcccaccacagagcaaatttttaatagaaaacatacagctatgggcagcagtatcaggctatttagactactgcacaaaagccagcaaagacgaaagctttaaatacaactacagagtactcatacagtgtccatacacagtgccacaactgtacacacaaacacaaccagaaaaaggctacataccatacagcaacaactttggcatgggcaaaatgcccaatgacagctccgtaataccagttaggtggagatgcaggtggtatccagccctctggaaccaacagcaggtattagaggacatattcatgtgtggaccctttgcatacaagggagaacaaccctcagccacccttaacacaaagtatgcatttaagtggctctggggtggcaaccgtatcttccaacaggttgtcaaagacccctgctcacaccagcaagaccaggcagttggtcccagtagaaagcctagagcagtacaagtctttgacccgaagtaccaagcaccagagtggacgttccacgcgtgggacctcagacgcggcctatttggcagacaagctattaagagagtgtcagcaaaaccaacagctgatgagattttgtcaacaggtccaaagcgacccagggtggaagtccccgcgttcgaagaggggcaagaaaaaagcttacttttcagacaaagaaaacacctcctctgggaagagagcacagaggaagagacagaagcccaatcagaagaggagcaagaggaggaggagcagcagcagctcctcagacgaatccagcaacagcgggagttgggacgaggcctcagatgcctcttccagcaactgacccgcacccagatgggtttgcacgtggacccccaattattggcccctgtataaataaagtatacatgtttcctcccgcagagcccaaacccatctcaggctacgaagcctggaaagatgagtttgagacctgttccgcctggaacagaccccccagaaagtaccacacagacacccccttttacccctggatgcccaaagaccaattccgtgtaacctttaagcttggctttcattaaaatttctacgccatggaactttcacttgtcggtgtctacctctataagtcactaagcactccgagcgaagcgaggagtgcgaccctagggggtgggtgcaacgccctcggcagccgcgcgctacgccttcggctgcgcgcggcacctc

SEQ ID NO: 992 - protein, 726 aa, Alphatorquevirus sp.
MAWWWWRRRRRPRWRRRRWRRRPRVRARRPRRPVRRRRRRVRRGRRGWRRLYRRWRRRGRRRHKRKKLVMRQWNPSTVTKCFIVGYLPIIICGQGTCAMNYASHCDDIEYPGPLGGGLTSMRFTLRILYDQYTRGQNFWTKSNEDLDLARFLGSRWTFYRHPEVDFIVTWETSAPFTDSIVSGPHQHPGIQMLMKKKILIPSFRTKPKGRSTIKVKIHPPKLMIDKWYPQTEFCEVTLLTIHATACDLRFPFCSPQTNTSCIQFLVLAGNYSGYISILPDKANKHQLTNFITTNVTEQSNVGNTLATPYMLKYPPPTKKQGTGTPPYTSPDSQDGDTIYEKLGETILSNNDVWFKKAKTAWTNLHSHYGIPTSEGLEYHTGFFSAIFLSPVRLNSQFPGFYNTIKYNPLTDKGEGNRIWCDPCNKESFTYSPPQSKFLIENIQLWAAVSGYLDYCTKASKDESFKYNYRVLIQCPYTVPQLYTQTQPEKGYIPYSNNFGMGKMPNDSSVIPVRWRCRWYPALWNQQQVLEDIFMCGPFAYKGEQPSATLNTKYAFKWLWGGNRIFQQVVKDPCSHQQDQAVGPSRKPRAVQVFDPKYQAPEWTFHAWDLRRGLFGRQAIKRVSAKPTADEILSTGPKRPRVEVPAFEEGQEKSLLFRQRKHLLWEESTEEETEAQSEEEQEEEEQQQLLRRIQQQRELGRGLRCLFQQLTRTQMGLHVDPQLLAPV

SEQ ID NO: 993 - protein, 153 aa, Alphatorquevirus sp.
MFLGKPYRKKRKLLLCSLRTASKALTFSMSWSRPIHNVTALERNWYQGVIHTHAACCGCGNPGAHFAALVQRYNSTTMQHQHLLPPASPIRSPNQIRRARALPAAPEQPPALPWHGGGGEGDAARGGEGDAGGDDPVYEPGDLDALYAAVEEE

SEQ ID NO: 994 - protein, 125 aa, Alphatorquevirus sp.
LGREHRGRDRSPIRRGARGGGAAAAPQTNPATAGVGTRPQMPLPATDPHPDGFARGPPIIGPCINKVYMFPPAEPKPISGYEAWKDEFETCSAWNRPPRKYHTDTPFYPWMPKDQFRVTFKLGFH

SEQ ID NO: 995 - DNA, 3234 bp, Alphatorquevirus sp.
cgggtgccggaggtgagtttacacaccgcagtcaaggggcaattcgggctcgggactggccgggctatgggcaaggctcttaaagcgtacgtcccccgctatgtttctcggcagggtgtggaggaaacagaaaaggaaagtgcttctgctggctgtgcgagctacacagaagacatcttccatgagtatctggcgtccccccctcgggaatgtctcctacagggagagaaattggcttcaggccgtcgaaagatcccacaattctttttgtggctgtggtgattttattcttcatctcactaatttggctgcacgctttgctcttcaggggcccccgccggagggtggtccacctcggccgaggccgccgctcctgagagcgctgccggcccccgagatccgcagggagacgcgcacggagaacccgggcgcctccgatgagccatggcctggcgatggtggtggcagagacgatggcgccgccgcccgtggccccgcagacggtggagacgcctacgacgccggagacctcgacgacctgttcgccgccgtcgaagaagagcaacagtaaggaggcggaggtggaggggcagacgtgggcgacgcacatacacccgacgcgcggtcagacgcagacgcagacccagaaagaaacttgtactgactcagtggagcccccagacagtcagaaactgttcaataaggggcatagtgcccatggtaatatgcggacacaccagagcaggtagaaactatgcccttcacagcgaggactttaccactcagataagaccctttggaggcagcttcagcacgaccacctggtccctaaaagtgctgtgggacgaacaccagaaattccaaaacagatggtcctacccaaacacacagctggacctagccaggtacaggggggtcaccttctggttctacagagaccagaaaacagactatatagtacaatggagcagaaatcctccctttaaactaaacaaatacagcagctccatgtaccaccctggcatgatgatgcaggcaaaaaagaaactggtggtccctagtttccagaccagacctaaaggcaaaaagagatacagagtcacaataaggccccccaacatgttcaatgacaagtggtacactcaagaggacctgtgtccggtacctcttgtgcaaattgtggtttctgcggcgagcctgctacatccgttctgctcaccacaaacgaacaacccttgcatcactttccaagttttgaaagacatttactcagaatgcataggagttaactcttccaaagaaacaacatattcaattctacaaaacaagctttactcagaatgcacatactttcaaaccacacaagttttagctcagttatctccagtatttcagcccgcaaaaaaacctgtaggaggaagggtagagtcaactaccacaacactaggcaacaaggtaccagaactaaaaccaaataacgaattccatacaggcaacaacccagtgtttggcatgtgttcatataaacccaccacagagatactaaccaaagcaaacgactggttctgggagaatctcatggttagaagtgatttacattccacatatggcaaggcaacccttaaatgcatggagtaccacacaggcatttacagctccatattcctaagtccccaaaggtccctagaattcccagcagcataccaagatgtcacatacaacccaaactgtgacagagccataggcaaccgtgtatggttccaatatagcacaaaaatggacacaaactttaatgaactacagtgtaaatgtgtgttaacaaacatgcccttgtgggcggcctttaacggctacccagactttatagaacaagaactcagtatcagcacagagatacacaactttggcatagtatgtttccagtgcccctacacctttcccccctgctatgacaaaacgaacccaaacaaaggctacgtgttctatgacaccacctttgggaacggaaaaatgccagacgggtcaggccacattcccgtctactggcagcagagatggtggatcagactagcctttcaggtacaagtcatgcatgactttgtactcactggcccctttagctacaaagatgacctagcaaacaccacactcacagccaggtacaagttcagattcaaatggggcggtaatatcatccccgaacagattatcaagaacccgtgtcagagacagcagtccctcggttcctaccccgatagacaacgtcgcgacctacaagttgttgacccatcaaccatgggcccgatctacaccttccacacatgggactggcgacgggggctttttggtgcagatgctatccagagagtgtcacaaaaatcgggagatgctctccgctttacaaaccctttcaagagacccagatatcttcccccgacagacggagaagactaccgacaagaagaagacttcgctttacaggaaaaaagaaggcgcacatccacagaagaagtccaggacccggagagccccccgcaaagcgcgccgctcctacagcagcagcagcagcagcgggagctctcactccagctcgcggagcagcagcgactcggagtccaactccgattcatcctccaagaagtcctcaaaacgcaagcgggtctccacctaaaccccctattattaggcccgccacaaacaaggtctatctctttgagcccccccccaaaggcctcctcccaatagtgggcagagaggcctgggaggacgagtacaccacttgcaagtactgggaccgtccccccagagtgaaccacttagacatgcccagctatccctggatgcccacaaacttcaaagtcagcttcaaacttggatttaaaccctaaataaaaatttcaaggccgtacactgttcacttgtcggtgtctacctctataagtcactaagcactccgagcgcagcgaggagtgcgaccctagggggtgggtgcaacgccctcggcggccgcgcgctacgccttcggctgcgcgcggcgggctccgccccccggtcccccccccccgaagatcgtcactaaccacgtgactcctctcgcccaatcagagtctatgtcgtgcatttcctgggcatggtctacatcctcatataaagcggtgcacttccgaatggctgagttttccacgcccgtccgcggcgagatcgcgacgcaggagcgatcgagcgtcccgaggg

SEQ ID NO: 996 - protein, 766 aa, Alphatorquevirus sp.
MAWRWWWQRRWRRRPWPRRRWRRLRRRRPRRPVRRRRRRATVRRRRWRGRRGRRTYTRRAVRRRRRPRKKLVLTQWSPQTVRNCSIRGIVPMVICGHTRAGRNYALHSEDFTTQIRPFGGSFSTTTWSLKVLWDEHQKFQNRWSYPNTQLDLARYRGVTFWFYRDQKTDYIVQWSRNPPFKLNKYSSSMYHPGMMMQAKKKLVVPSFQTRPKGKKRYRVTIRPPNMFNDKWYTQEDLCPVPLVQIVVSAASLLHPFCSPQTNNPCITFQVLKDIYSECIGVNSSKETTYSILQNKLYSECTYFQTTQVLAQLSPVFQPAKKPVGGRVESTTTTLGNKVPELKPNNEFHTGNNPVFGMCSYKPTTEILTKANDWFWENLMVRSDLHSTYGKATLKCMEYHTGIYSSIFLSPQRSLEFPAAYQDVTYNPNCDRAIGNRVWFQYSTKMDTNFNELQCKCVLTNMPLWAAFNGYPDFIEQELSISTEIHNFGIVCFQCPYTFPPCYDKTNPNKGYVFYDTTFGNGKMPDGSGHIPVYWQQRWWIRLAFQVQVMHDFVLTGPFSYKDDLANTTLTARYKFRFKWGGNIIPEQIIKNPCQRQQSLGSYPDRQRRDLQVVDPSTMGPIYTFHTWDWRRGLFGADAIQRVSQKSGDALRFTNPFKRPRYLPPTDGEDYRQEEDFALQEKRRRTSTEEVQDPESPPQSAPLLQQQQQQRELSLQLAEQQRLGVQLRFILQEVLKTQAGLHLNPLLLGPPQTRSISLSPPPKASSQ

SEQ ID NO: 997 - protein, 171 aa, Alphatorquevirus sp.
LAGLWARLLKRTSPAMFLGRVWRKQKRKVLLLAVRATQKTSSMSIWRPPLGNVSYRERNWLQAVERSHNSFCGCGDFILHLTNLAARFALQGPPPEGGPPRPRPPLLRALPAPEIRRETRTENPGASDEPWPGDGGGRDDGAAARGPADGGDAYDAGDLDDLFAAVEEEQQ

SEQ ID NO: 998 - protein, 188 aa, Alphatorquevirus sp.
MGLATGAFWCRCYPESVTKIGRCSPLYKPFQETQISSPDRRRRLPTRRRLRFTGKKKAHIHRRSPGPGEPPAKRAAPTAAAAAAGALTPARGAAATRSPTPIHPPRSPQNASGSPPKPPIIRPATNKVYLFEPPPKGLLPIVGREAWEDEYTTCKYWDRPPRVNHLDMPSYPWMPTNFKVSFKLGFKP

SEQ ID NO: 999 - DNA, 3234 bp, Betatorquevirus sp.
cgggtgccgaaggtgagtgaaaccaccgtagtcaaggggcaattcgggctagctcagtctggcggaatgggcaagaaacttaaattattttatgttttaggtatgtcatctgtatggaagaaaccaacatactcattgagacaacaagaactacaatggctgaatttagtacacaccgcccatgatcaattttgccactgcgacgacccaactcttcacctgttaattataattaaccgcggatctaaagcaccaaaaccagaagttgatattaaaaatatacaatgcctgcttactggaattaccgcagaaaaagaagatactacccaagaagacgtcgtaacaggtttcgacgatggagagctagaaaaactatttacagaaactatagaagaagaaactggacccgcagacgcaaggtaaaaaaaagacttagaaaaagaaagcttaaaaaaattattgtaaaacaatttcaacctaaaaaaattgttaaatgtaaaattgttggacataaatgcctatttcaaggaagtcctttaagaagcagtaacaactatataatgtactgttatagttttgtacctaagtatttcccagggggaggaggatggtcaatacttgtacatagcctaggtagcctttatgaagactttaaacacttaaaaaattactggacttctagtaatgttgctttacctctagttagatacctaggatgtgaatttacattttatcaatcagactatacagattattgtgttgtatgggataattgctggccactagtagatacacctttaacacacgcagacagctgccctagcagaatattacaaagaaaacataaaacaataataccaagcagatacacacaaaaaagaaaaaaaccatacaaaaaagttagagtaacaccacccactcaaatgatgaaccgttggtactttcaaaaggacatttgcgacacacctttagtaatgctaaccgcaactgccatttccttaacacatccattttgtgaccctaaagctaaaagtaacaatatttcactatgggcactaaatccacacagatatagaaatccaaactttcaaagtccaccaataacaaacggctactcaccatttaaagcagataacatagcagaccatccaaacatctacttatgggcttctcatgaaccaataacccaacaaaaacatctaaaaaacgctataccattggcaaatacaaaagacaataaaataggagtacctctattcgaattaggtaaaaacaacgactttgacagcaataacaaatttgaaaactggggaaacccatttgaacacacacacttaaatagcgacgaaatgtcactatacatatcaaaaacaggacctacagataaagaagtaaaaaactggctaacatatactagcacagatccacaaaatgaacttacattagtagtaggaccaaatttatatgagtgtagatacaatccagaaagagacacaggtgaaggaaacaaagcatacttaataaacaactcttcagccacaaacctagaacccccaagtaacgaaaacttaataattgaaggctttccacttccagttatgctttggggatggacagactttgtaaaaaaactaaaacaaacaatagacattgacaaaaactacatactagtaattgtatcaccattttttcaagaaaaacttccatactatatttttctagatgaagactttaaagatggctttgaaccatttacaagtaacttagaaaacaaccaacacataaaaactgcttacaatcaacaacactggtaccctaaatacctatttcaaacacaatccatagaaaaaatatgtagatgtggcccagcatgtcccagaccaacagacgaaaaatacttacaagcattttacagatacaaattttattttaaatggggaggctgtcctaaacaactagaaaaagtaaatgatccttgttcacagtctaaatggcccactcccgataacttcacaccaagacttgaaattacgagtcctaacgaacacccacaaacacaactctatgattgggactgggaagaagaatatgttaaagaagaagctattagacgaatacaagcttacacagaatctcctaaatcaatactcttccttacagactccaaaaacaacccaaagccactccaaaagacacaagaaaaagaagcaccggacaacgaagaggaaacgaaactactcctccagctccacagactccgaaaccagcgacagctcatccaactccaactccagtcgaaactaacaaccctaaatttatcataaaaaaatcaaagactcaaataaaactatttcccagtcccaaaaagaacagaagaatgactccaaaagaaatggaagacgaaaaattactagcatctatatttaaaagacctaaaagagactttatatatgatactcctacttatccatggcttcctcctacaccccttgcaaactttgacttaaattacaaagaataaaggccaacatacttcaacttgacgtgtctgtttatataagtttaactttaataaacgaactccgcctccccattatgttggcgccaaaagggggcaccgcccccttacacccccaagggggctccgcccccttacacccccaagggggctccgcccccttacacccccttataaatattcaacaggaaaaccacctaatttaaattgccgaccacaaaccgtcttttacttcccttttttacctacacttccccttttactacttattattcattacattaattagtactctacgtaattccggggaggagactataacatatataactaactacacttccgaatggctgagtttatgccgccagtcgtagactgcaccacttcagtgactgcaggctgagcttgggcgggtgccgaaggtgagtgaaaccaccgtagtcaaggggcaattgggctccgcccccttacacccccttataaatattcaacaggaaaaccacctaatttaaattgccgaccacaaaccgtcttttacttcccttttttacctacacttccccttttactacttattattcattacattaattagtactctacgtaattccggggaggagactataacatatataactaactacacttccgaatggctgagtttatgccgccagtcgtagactgcaccacttcagtgactgcaggctgagcttggg

SEQ ID NO: 1000 - protein, 679 aa, Betatorquevirus sp.
MPAYWNYRRKRRYYPRRRRNRFRRWRARKTIYRNYRRRNWTRRRKVKKRLRKRKLKKIIVKQFQPKKIVKCKIVGHKCLFQGSPLRSSNNYIMYCYSFVPKYFPGGGGWSILVHSLGSLYEDFKHLKNYWTSSNVALPLVRYLGCEFTFYQSDYTDYCVVWDNCWPLVDTPLTHADSCPSRILQRKHKTIIPSRYTQKRKKPYKKVRVTPPTQMMNRWYFQKDICDTPLVMLTATAISLTHPFCDPKAKSNNISLWALNPHRYRNPNFQSPPITNGYSPFKADNIADHPNIYLWASHEPITQQKHLKNAIPLANTKDNKIGVPLFELGKNNDFDSNNKFENWGNPFEHTHLNSDEMSLYISKTGPTDKEVKNWLTYTSTDPQNELTLVVGPNLYECRYNPERDTGEGNKAYLINNSSATNLEPPSNENLIIEGFPLPVMLWGWTDFVKKLKQTIDIDKNYILVIVSPFFQEKLPYYIFLDEDFKDGFEPFTSNLENNQHIKTAYNQQHWYPKYLFQTQSIEKICRCGPACPRPTDEKYLQAFYRYKFYFKWGGCPKQLEKVNDPCSQSKWPTPDNFTPRLEITSPNEHPQTQLYDWDWEEEYVKEEAIRRIQAYTESPKSILFLTDSKNNPKPLQKTQEKEAPDNEEETKLLLQLHRLRNQRQLIQLQLQSKLTTLNLS

SEQ ID NO: 1001 - protein, 118 aa, Betatorquevirus sp.
MGKKLKLFYVLGMSSVWKKPTYSLRQQELQWLNLVHTAHDQFCHCDDPTLHLLIIINRGSKAPKPEVDIKNIQCLLTGITAEKEDTTQEDVVTGFDDGELEKLFTETIEEETGPADAR

SEQ ID NO: 1002 - DNA, 3232 bp, Alphatorquevirus sp.
cgggtgccggaggtgagtttacacaccgcagtcaaggggcaattcgggctcgggactggccgggctatgggcaaggctcttaaaaagccatgtttctcggtaaactctacagaaagaaaaggaaactgctactgcaagctgtgcgagctccacaggcgccatctcctatgagccgctgctggtgtcccccccggggtgatgtcgcctctcgcgaagcccggtggtacgacgcggttcgaggaagccacgatgctttttgtggctgtggtgatcctgttcttcatttttctcgtctggttgcacgttctaaccatcagggacctccgacgcccccctcgcacgaccgtgcgccgtcgcgtaccccagtaagacacctgctgcctctccccagctaccccggcgagggtccggctcctagatggcctactggggatggaggcgccggtggtggcgaccgaagagaaggtggcgatggcggcgcgcgcgccgccgacgaagagtaccggcccgaagacctagacgagcttttcggcgctatcgaacaagaacagtaaggaggaggcgcagggggaggcggaggggctaccggcgccgttacagactgagacgctatgccagacgtagattaaaacgcaaaaagatagtactgactcagtggaacccccagactgtcagaaaatgtactataagaggtctcatgcccgtcctgtgggcgggcatgggcaaggggggccacaactacgccgtccgctcagatgactatactataaaagggggctttggcggctcttttgccacagagaccttcagtctcagagtactgttcgaccagtaccagaggggcttcaacaggtggtccttcagtaaccaggacctagacctggccctctactatggctgcaaatggacattttacagacaccaagacacagactttattatatacttcaccaacaatccccccatgaaaaccaaccagttctctgctcccctgaccactccgggcatgctaatgaaaaacaaatataagatactactgcccagctttaaaaccagacccagggggcgaaagtctatctctgtgagaataagaccccctaaactgtttcagcataagtggtacacccagcaggacctgtgcacagttcctcttgtccaactgaacgtgaccgcagctgatttcacacatccgttcggctcaccactaactgacactccttgcataaccttccaggtgctaggtgacttgtataacgaatgtcttaatatagaccttcctcaatttacaaaagacggtgacatagataacacatcaacaacttaccagagaccaaatcaagaacaacttaaaaaattatataaaactctgtttactaaacctgattcctcacactactggcagacattcatagtaaactctatggtcagagcccacattgatgcaaaagaagcccaaaaaggaaccaacggacaaccatttcccacagtacctactaaaaatgaatttgatacctggaaaaataaattcacagaccaaagagacagcaactttctttttgccacataccatccagacagaatcaaaaacgaattaaaaagaatgagagacaataactttgcattagagacaggccccaatgacaaatatgggtccttccaggcccagtacaccagaaacacacacatgctggactactacctcggcttctacagccccatattcctctctgatggcagatcaaatgtagaattctttacagcatacagagacatagtgtacaatcccctcctagacaaagccgagggcaacatgatctggttccagtaccacacaaagacagacaacaaatacagaaaaccagagtgccactgggagataacagacatgcccctgtgggccctctgcaacgggtacgaggagtacctagagagccagataaaatatggagacgccaaagtagagggcaaggtcctcatcagatgtccctacaccaagcctcctctcacagaccctaaagaccctactgcaggatttgtagtttacaaccagaactttggacggggaaagtggatagacggagggggctacatccccctacacgagaggagcaagtggtacgtgatgctaaagtaccagactgacgtcctacacgacatagtgacttgtggaccgtggcagtacagggacgacaacagaaacagtcagcttatagccaagtactccttcagattcaagtggggcggtaaccttgtccactcccaggtcatcagaaacccgtgtaaagacaaccaagtatccggtccccgtagacagcctagagacgtacaagtcgttgacccgcaactcgtctcgccgccctgggtcctccacaacttcgaccagagacgaggaatgtttactcaggcagctatcagacgtctgctacagcaaccaatgcctggcgagtatgttgctccagcccaacacgtacccctcctcttcctaccctcagagtaccaacgcgaagacggaagtgtcgaagacaacttcagttcaccggccaaaagaccccgcacctcgtacgaagagagccagacgcagacggactcctcctcggagggggacccggcggagacgacgaggcagctcctccagcgaaagctccgagagcagcgagcactccagttccagctccaacacttcgctctccaactcgccaaaacccaggcgaatctgcacataaaccccctattatctttcccgcagtgaacagggtctttttgttccccccagagggtcctaaacccatagtaggtacggaggcctggcaggatgagtactgcacctgcaaacactgggacagaccacctagaacccaccacacagacacccccttttatccctgggccccccaacaattccgtgtgtgcttcaaacttggctttaaataaaattgctaggccgtggaactctcactgctcggtgtctacctcttaaggtcactaagcactccgagcgtcagcgaggagtgcggggcccccccccccctccggggggctccgcccccccggccccccccgtcgtggatcgtcactaaccacgtgactcccacaggccaaccacagtctatgtcgtgcacttcctgggcatggtctacgtgataatataagacggcgcacttccgaatggctgagttttcgccgcccgtccgcagcgagatcgcgacggaggagcgatcgagcgtcccgaggg

SEQ ID NO: 1003 - protein, 776 aa, Alphatorquevirus sp.
MAYWGWRRRWWRPKRRWRWRRARRRRRVPARRPRRAFRRYRTRTVRRRRRGRRRGYRRRYRLRRYARRRLKRKKIVLTQWNPQTVRKCTIRGLMPVLWAGMGKGGHNYAVRSDDYTIKGGFGGSFATETFSLRVLFDQYQRGFNRWSFSNQDLDLALYYGCKWTFYRHQDTDFIIYFTNNPPMKTNQFSAPLTTPGMLMKNKYKILLPSFKTRPRGRKSISVRIRPPKLFQHKWYTQQDLCTVPLVQLNVTAADFTHPFGSPLTDTPCITFQVLGDLYNECLNIDLPQFTKDGDIDNTSTTYQRPNQEQLKKLYKTLFTKPDSSHYWQTFIVNSMVRAHIDAKEAQKGTNGQPFPTVPTKNEFDTWKNKFTDQRDSNFLFATYHPDRIKNELKRMRDNNFALETGPNDKYGSFQAQYTRNTHMLDYYLGFYSPIFLSDGRSNVEFFTAYRDIVYNPLLDKAEGNMIWFQYHTKTDNKYRKPECHWEITDMPLWALCNGYEEYLESQIKYGDAKVEGKVLIRCPYTKPPLTDPKDPTAGFVVYNQNFGRGKWIDGGGYIPLHERSKWYVMLKYQTDVLHDIVTCGPWQYRDDNRNSQLIAKYSFRFKWGGNLVHSQVIRNPCKDNQVSGPRRQPRDVQVVDPQLVSPPWVLHNFDQRRGMFTQAAIRRLLQQPMPGEYVAPAQHVPLLFLPSEYQREDGSVEDNFSSPAKRPRTSYEESQTQTDSSSEGDPAETTRQLLQRKLREQRALQFQLQHFALQLAKTQANLHINPLLSFPQ

SEQ ID NO: 1004 - protein, 154 aa, Alphatorquevirus sp.
MFLGKLYRKKRKLLLQAVRAPQAPSPMSRCWCPPRGDVASREARWYDAVRGSHDAFCGCGDPVLHFSRLVARSNHQGPPTPPSHDRAPSRTPVRHLLPLPSYPGEGPAPRWPTGDGGAGGGDRREGGDGGARAADEEYRPEDLDELFGAIEQEQ

SEQ ID NO: 1005 - protein, 190 aa, Alphatorquevirus sp.
LGPPQLRPETRNVYSGSYQTSATATNAWRVCCSSPTRTPPLPTLRVPTRRRKCRRQLQFTGQKTPHLVRREPDADGLLLGGGPGGDDEAAPPAKAPRAASTPVPAPTLRSPTRQNPGESAHKPPIIFPAVNRVFLFPPEGPKPIVGTEAWQDEYCTCKHWDRPPRTHHTDTPFYPWAPQQFRVCFKLGFK

SEQ ID NO: 1006 - DNA, 3230 bp, Gammatorquevirus sp.
cgggagcccgaggtgagtgaaaccaccgaggtctaggggcaattcgggctagggcagtctagcggaacgggcaagaaacttaaaacaatatttgttttacagatgtccagattctacaaagaagtaccatacaacaaagataccaaatgtcaaatgtggatgtctatgattagtgatggtcatgatattcactgtggatgttgtcaaccatttgcacacctactagacagcatttttccagagggacacgcagacagaaacaaaaccattgaacaaataatacaaagagatttacagctatgccattctggtggaacagaagaagaagaccatggtatcccacttggaggaagcgccgctacagaaagacccgctacagaaaatataaaagaagaagaagacctagacgccctacttatcgccgccgccgccgccgtagaagatacaaggtaaggagaaaaaaaaaaagaataactatacaacaatggcagccagacaaaatagttaaatgtaaaattataggatatggatacctggtggcaggaactgaaggaaaccaatttagatgttatacaaatgataaacataactatggacaaccaaaagctccaggcggtggcggttttggctgtgaacaatatacacttgaatatttatataaagaatgggaagctcatagatgcatatggactagatctaatgactacctagacctagtaagatacacaggctgcatattttatttttatagacatcctaaaacagactttatcatatggtatgacagacaaccaccatttaaatttacaactactacttacttagaaacacatccactatccatgttactaaaaagacaccataaagtaataagatctctagaacataacccaaaaagcaaaccatatgttaaagtaaaaataccaccaccaaaacaaatgataaccaaatggtttttccaaccagacttagcagatgtaccattatttaaactctgtggatctgccagcaactttggatactcactctatggacccaatacacaaagccccaacttaaccatatatgccttaaacacagatttctatgttatacacaattgggcagatgcaagcttaactagtggatatcaaccatactcaggtgtcgctacaaatattagatttaaatataaaataggcaacagaacaggtgaagtaggacctcctgcaaagaactatgaaacatccatttcatatgacaacggctggtttaggccagaaatattaaatgcatatgaagttcatcagggtgacacaaccatatacaacagaccagtgtcaataggcagatacaatcctgaagaagacaatggtaaaggcaatagaatatggctcacaagcattatagcaaacaaaggctgggccccacctactgacaaagatttaattataggtgaaattcctctatatatggcattttggggtttgtgggactatattgctcagtctagaaaaacagaagaatacttagcagtatcaatgtttgtagttaaatctgactacataaaaataattttaggaggcccacaccaaaaagtatggccaataatagactggtcctttatacaaggtaaaatgccatgggatgaatcccttactatacaagaaaagtccaaatggtaccctacatgctacaagcaaacccaaactataaacaattttgtagagtgtggaccatactgtccaaaatatgcaaacttacctgtttctacttggcaactaccttacaaatataaattttactttaaatggggtggaccccagacaggagagaacattgttcaagatcccaaagaccaagaaaaatatcccgttcccgatactttcacagaagcaatacaaatcagagacccgctcaggcaacacccaaaaacactccttagatcctgggacttcagaagggacattgttacaaaatcagctcttaaaagaatgcaagaaaacttatcaactgatgaatctgaacaatctgatttctcagaaacaccaaaaaagaaaaagaaagtcacaacagagatcccatgcagcgaccaagaagagaaggacctccaaacatgtctcctctcactctgcgaaaaagataccttcccagaagagacagaagacctcaagcagctcatctaccagcagtatcacaagcagcaacagctcaagaacaacctctacaagctcctcaaaaacctaaagaaaacccaagcacaccttcaaatgcaaacaggcatgcattaacccgctttaaaaaaggctttgaatgggacactgaactagaactagcttcagcatttaacagaccacccagactttttaaagaagactcccctttctacccctggttacccaaaccaacacctattgtaaactttcaccttaattacaaattctaggcctacactgttcacttagtggtatatgtttatataagtcacacccccaaaaaaattgtaaaataaaaaaaaaaaaaaaaaataaaaaattgcaaaaattcggcgctcgcgcgcgctgcgcgcgcgcgagcgccgtcacgcgccggcgctcgcgcgccgcgcgtatgtgctaacacaccacgcacctagattggggtgcgcgcgctagcgcgcgcaccccaatgcgccccgccctcgttccgacccgcttgcgcgggtcggaccacttcgggctcgggggggcgcgcctgcggcgcttatttactaaacagactccgagttgccatttggcccccccttagctccgcccccctcataaatattcataaaggaaaccacataatttcccccccttagctccgcccccctcataaatattcataaaggaaaccacataatttgaattgccgaccacaaactgccatatgctaattagttcccctttttcacagtaaaaaggggaagtggggggggccaagcccccccacaccccccgcgggggggggcagagccccccccgcacccccccctacgtcactaaccacgcccccgccgccatcttgggtgcggcagggcgggggctaaaatggcgggacccaatcattttatactttcactttccaattaaacactgccacgtcaaaacaaagaggtggagactttaaaactatataaccaagtactgtggcgaatggctgagtttaccccgctagacggtgcagggaccggatcgagcgcagcgaggaggtccccggctgcccgtggg

SEQ ID NO: 1007 - protein, 656 aa, Gammatorquevirus sp.
MPFWWNRRRRPWYPTWRKRRYRKTRYRKYKRRRRPRRPTYRRRRRRRRYKVRRKKKRITIQQWQPDKIVKCKIIGYGYLVAGTEGNQFRCYTNDKHNYGQPKAPGGGGFGCEQYTLEYLYKEWEAHRCIWTRSNDYLDLVRYTGCIFYFYRHPKTDFIIWYDRQPPFKFTTTTYLETHPLSMLLKRHHKVIRSLEHNPKSKPYVKVKIPPPKQMITKWFFQPDLADVPLFKLCGSASNFGYSLYGPNTQSPNLTIYALNTDFYVIHNWADASLTSGYQPYSGVATNIRFKYKIGNRTGEVGPPAKNYETSISYDNGWFRPEILNAYEVHQGDTTIYNRPVSIGRYNPEEDNGKGNRIWLTSIIANKGWAPPTDKDLIIGEIPLYMAFWGLWDYIAQSRKTEEYLAVSMFVVKSDYIKIILGGPHQKVWPIIDWSFIQGKMPWDESLTIQEKSKWYPTCYKQTQTINNFVECGPYCPKYANLPVSTWQLPYKYKFYFKWGGPQTGENIVQDPKDQEKYPVPDTFTEAIQIRDPLRQHPKTLLRSWDFRRDIVTKSALKRMQENLSTDESEQSDFSETPKKKKKVTTEIPCSDQEEKDLQTCLLSLCEKDTFPEETEDLKQLIYQQYHKQQQLKNNLYKLLKNLKKTQAHLQMQTGMH

SEQ ID NO: 1008 - protein, 116 aa, Gammatorquevirus sp.
MSRFYKEVPYNKDTKCQMWMSMISDGHDIHCGCCQPFAHLLDSIFPEGHADRNKTIEQIIQRDLQLCHSGGTEEEDHGIPLGGSAATERPATENIKEEEDLDALLIAAAAAVEDTR

SEQ ID NO: 1009 - protein, 120 aa, Gammatorquevirus sp.
MQRPRREGPPNMSPLTLRKRYLPRRDRRPQAAHLPAVSQAATAQEQPLQAPQKPKENPSTPSNANRHALTRFKKGFEWDTELELASAFNRPPRLFKEDSPFYPWLPKPTPIVNFHLNYKF

SEQ ID NO: 1010 - DNA, 3230 bp, Gammatorquevirus sp.
cgggagcccgaggtgagtgaaaccaccgaggtctaggggcaattcgggctagggcagtctagcggaacgggcaagaaacttaaaacaatatttgttttacagatgtccagattctacaaagaagtaccatacaacaaagataccaaatgtcaaatgtggatgtctatgattagtgatggtcatgatattcactgtggatgttgtcaaccatttgcacacctactagacagcatttttccagagggacacgcagacagaaacaaaaccattgaacaaataatacaaagagatttacagctatgccattctggtggaacagaagaagaagaccatggtatcccacttggaggaagcgccgctacagaaagacccgctacagaaaatataaaagaagaagaagacctagacgccctacttatcgccgccgccgccgccgtagaagatacaaggtaaggagaaaaaaaaaaagaataactatacaacaatggcagccagacaaaatagttaaatgtaaaattataggatatggatacctggtggcaggaactgaaggaaaccaatttagatgttatacaaatgataaacataactatggacaaccaaaagctccaggcggtggcggttttggctgtgaacaatatacacttgaatatttatataaagaatgggaagctcatagatgcatatggactagatctaatgactacctagacctagtaagatacacaggctgcatattttatttttatagacatcctaaaacagactttatcatatggtatgacagacaaccaccatttaaatttacaactactacttacttagaaacacatccactatccatgttactaaaaagacaccataaagtaataagatctctagaacataacccaaaaagcaaaccatatgttaaagtaaaaataccaccaccaaaacaaatgataaccaaatggtttttccaaccagacttagcagatgtaccattatttaaactctgtggatctgccagcaactttggatactcactctatggacccaatacacaaagccccaacttaaccatatatgccttaaacacagatttctatgttatacacaattgggcagatgcaagcttaactagtggatatcaaccatactcaggtgtcgctacaaatattagatttaaatataaaataggcaacagaacaggtgaagtaggacctcctgcaaagaactatgaaacatccatttcatatgacaacggctggtttaggccagaaatattaaatgcatatgaagttcatcagggtgacacaaccatatacaacagaccagtgtcaataggcagatacaatcctgaagaagacaatggtaaaggcaatagaatatggctcacaagcattatagcaaacaaaggctgggccccacctactgacaaagatttaattataggtgaaattcctctatatatggcattttggggtttgtgggactatattgctcagtctagaaaaacagaagaatacttagcagtatcaatgtttgtagttaaatctgactacataaaaataattttaggaggcccacaccaaaaagtatggccaataatagactggtcctttatacaaggtaaaatgccatgggatgaatcccttactatacaagaaaagtccaaatggtaccctacatgctacaagcaaacccaaactataaacaattttgtagagtgtggaccatactgtccaaaatatgcaaacttacctgtttctacttggcaactaccttacaaatataaattttactttaaatggggtggaccccagacaggagagaacattgttcaagatcccaaagaccaagaaaaatatcccgttcccgatactttcacagaagcaatacaaatcagagacccgctcaggcaacacccaaaaacactccttagatcctgggacttcagaagggacattgttacaaaatcagctcttaaaagaatgcaagaaaacttatcaactgatgaatctgaacaatctgatttctcagaaacaccaaaaaagaaaaagaaagtcacaacagagatcccatgcagcgaccaagaagagaaggacctccaaacatgtctcctctcactctgcgaaaaagataccttcccagaagagacagaagacctcaagcagctcatctaccagcagtatcacaagcagcaacagctcaagaacaacctctacaagctcctcaaaaacctaaagaaaacccaagcacaccttcaaatgcaaacaggcatgcattaacccgctttaaaaaaggctttgaatgggacactgaactagaactagcttcagcatttaacagaccacccagactttttaaagaagactcccctttctacccctggttacccaaaccaacacctattgtaaactttcaccttaattacaaattctaggcctacactgttcacttagtggtatatgtttatataagtcacacccccaaaaaaattgtaaaataaaaaaaaaaaaaaaaaataaaaaattgcaaaaattcggcgctcgcgcgcgctgcgcgcgcgcgagcgccgtcacgcgccggcgctcgcgcgccgcgcgtatgtgctaacacaccacgcacctagattggggtgcgcgcgctagcgcgcgcaccccaatgcgccccgccctcgttccgacccgcttgcgcgggtcggaccacttcgggctcgggggggcgcgcctgcggcgcttatttactaaacagactccgagttgccatttggcccccccttagctccgcccccctcataaatattcataaaggaaaccacataatttgaattgccgaccacaaactgccatatgctaattagttcccctttttcacagtaaaaaggggaagtggggggggggccatatgctaattagttcccctttttcacagtaaaaaggggaagtgggggggggccaagcccccccacaccccccgcgggggggggcagagccccccccgcaccccccctacgtcactaaccacgcccccgccgccatcttgggtgcggcagggcgggggctaaaatggcgggacccaatcattttatactttcactttccaattaaacactgccacgtcaaaacaaagaggtggagactttaaaactatataaccaagtactgtggcgaatggctgagtttaccccgctagacggtgcagggaccggatcgagcgcagcgaggaggtccccggctgcccgtggg

SEQ ID NO: 1011 - protein, 656 aa, Gammatorquevirus sp.; identical to SEQ ID NO: 1007

SEQ ID NO: 1012 - protein, 116 aa, Gammatorquevirus sp.; identical to SEQ ID NO: 1008

SEQ ID NO: 1013 - protein, 120 aa, Gammatorquevirus sp.; identical to SEQ ID NO: 1009

SEQ ID NO: 1014 - DNA, 3229 bp, Gammatorquevirus sp.
cgggagcccgaggtgagtgaaaccaccgaggtctaggggcaattcgggctagggcagtctagcggaacgggcaagaaacttaaaacaaattctttttttttagatgtcaaagattcaagctaaagacttttatactcccacacccttcaatcaagagacaaaaaatcaaatatggatgtctcaaattgctgatgctcacgataatatctgccattgtaaccatccctttgctcatctgcttgccaatatctttcctgtgggtcacaaagatcgcgatctcacaattaatcaaattcttttgagagactacaaagaaaaatgccattctggtggaacagaagaagaaagccatggtacggacgctggaggcacaggcggaggtttcaaaggtataaaagaagaaagccacgaagaagatttgccagaagacgaactagaaggcttactcgccgccgcagaagaaagcgcaaggtaagaagaaaaagaaaaaaaattaatatacaacaatggcaaccagaaagcattgttaaatgtaaaattaagggcttctctactttagtactgggggcagaaggcagacagtatatttgttggactaatgaagcccttgactacactcagccaaaagcaccagggggaggaggatttggctgtgaaaatataactttagaatggttatatcatgaacatagagcacacaactgtatatggaccaaaagcaatcaatacaaagatctatgcagatatacaggttgtaaaataactttatttagacacccaaatatagactttatttttcaatacaacctacaaggtccatttaacataacaaaattcacatatacagacatacaaccacagaacatgctactacaaccccataacagactaattcttagccaaaaaacaaaaccccatggcaaacttgctgttaaagttaaaataaaaccaccaaaacaaatgactaccagatggttttttgctaaagaattttcagaagctgtactagtacaactaaaagctgtagcctgttcatttacatttcctagaatagcacctaaggcacaaagtcaaatggtaacagtttactacttaaatgaaagcttttatccatctccaatttggggacaagtacacccaggtggctacatacctattagtacaagaacaggtatatataaattctcaaatacaaaaaccaaacctgcatactcagactttacaattaacacaaacacctttgaaagaggagaagcaggatattatgcctccattaactattccacaggcttttttaatgccaaagtactaaatgcatccaaagttacaataaataatgtagaatttggctcactacctttactaactgcaagatacaatcccaacgatgacacaggagatggaaatgtagtttatgcactttctattctacaaaattcatataacccaccaacagtacaatcagactatgttattagaggtcaaccactatggatggcatttcatggcttttggagctggattaaatatttatcaaaagacaaagcattttacacacactatatgtttgttgttcagagccgtgccataaaacccatctcacaaaacacagcacaaaaaagatttgcatttcttgacttatcttttatatctggcaaactaccttttgatgaatatttatctgacaatgaaaagaagctgtggtatccaaaagcacaataccagactgaaactataaattcttttgttcaatctggaccatttatacctaaactttcaaacataccagaaagcacttgggaattagactacaaatataacttttactttaaatggggtggtccacagattacagacagaccagttgacgaccctcaataccaaccagactaccctgttcccggttaccgcacagaagcagtacagatatccaatcccaaaacccttgcgacagaaactctgctccatgaatgggacttcagaaggggcattgttacacacacagctcttaaaagaatgtcagaaaactttgaatctgaaacagatatctactctgatgactcaggaacaccaaaaaagaaaagaaagatcaccaaagaactcccataccaaagaccacagcaagaagccctcaaaacatgtctccaggagctctgcgaagaaaatacctgccaagaaacaccacaaacattacaagagctcatccagcagcagcagcagcagcagcagctcaaacacaacatcctccagctcctcacaaagctaaagaaggaccaacgctttttgggacttcaaacaggccttctagaatgacaccctttaaaaaaggctttgaaatggacacagaaagacagttagcacaagcattcaaaagaccccctagactgtttaaagaagacactcccttttacccctggttacccagaccagtgccccttgttaactttcaccttaattttaagttctaggcctccaaatttcacttagtggtggatgtttatataagtttgcaccccaaaaaaattgtaaaataaaaaaaaaaaaaaaaaaataaaaaattgcaaaaattcggcgctcgcgcgcgctgcgcgcgcgcgagcgccgtcacgcgccggcgctcgcgcgccgcgcgtatgtgctaacacaccacgcacctagatttgggtgcgcgcgctagcgcgcgcacccaaatgcgccccgccctcgttccgacccgcttgcgcgggtcggaccacttcgggctcgggggggcgcgcctgcggcgcttatttactaaacagactccgagtcgccatttggccccccctaagctccgcccccctcatgaatattcataaaggaaaccacaaaattagaattgccgaccacaaactgccatatgctaattagttccccttttacacagtaaaaaggggaagtggggggggggggggcgccccccccccccccccccccccggcgggggggggggggggggggggggggggggggggggggggggggggggggggcccgccgccatcttgggtgcggctgggcgggggctaaaatggcgggacccaatcattttatactttcactttccaattaacacccgccacgtcaaaacaaaggggtggagactctaaaactatataaccaagtaacctgacgaatggctgagtttaccccgctagacggtgcagggaccggatcgagcgcagcgaggaggtccccggctgcccatggg

SEQ ID NO: 1015 - protein, 664 aa, Gammatorquevirus sp.
MPFWWNRRRKPWYGRWRHRRRFQRYKRRKPRRRFARRRTRRLTRRRRRKRKVRRKRKKINIQQWQPESIVKCKIKGFSTLVLGAEGRQYICWTNEALDYTQPKAPGGGGFGCENITLEWLYHEHRAHNCIWTKSNQYKDLCRYTGCKITLFRHPNIDFIFQYNLQGPFNITKFTYTDIQPQNMLLQPHNRLILSQKTKPHGKLAVKVKIKPPKQMTTRWFFAKEFSEAVLVQLKAVACSFTFPRIAPKAQSQMVTVYYLNESFYPSPIWGQVHPGGYIPISTRTGIYKFSNTKTKPAYSDFTINTNTFERGEAGYYASINYSTGFFNAKVLNASKVTINNVEFGSLPLLTARYNPNDDTGDGNVVYALSILQNSYNPPTVQSDYVIRGQPLWMAFHGFWSWIKYLSKDKAFYTHYMFVVQSRAIKPISQNTAQKRFAFLDLSFISGKLPFDEYLSDNEKKLWYPKAQYQTETINSFVQSGPFIPKLSNIPESTWELDYKYNFYFKWGGPQITDRPVDDPQYQPDYPVPGYRTEAVQISNPKTLATETLLHEWDFRRGIVTHTALKRMSENFESETDIYSDDSGTPKKKRKITKELPYQRPQQEALKTCLQELCEENTCQETPQTLQELIQQQQQQQQLKHNILQLLTKLKKDQRFLGLQTGLLE

SEQ ID NO: 1016 - protein, 123 aa, Gammatorquevirus sp.
MSKIQAKDFYTPTPFNQETKNQIWMSQIADAHDNICHCNHPFAHLLANIFPVGHKDRDLTINQILLRDYKEKCHSGGTEEESHGTDAGGTGGGFKGIKEESHEEDLPEDELEGLLAAAEESAR

SEQ ID NO: 1017 - protein, 109 aa, Gammatorquevirus sp.
MSPGALRRKYLPRNTTNITRAHPAAAAAAAAQTQHPPAPHKAKEGPTLFGTSNRPSRMTPFKKGFEMDTERQLAQAFKRPPRLFKEDTPFYPWLPRPVPLVNFHLNFKF

SEQ ID NO: 1018 - DNA, 3228 bp, Alphatorquevirus sp.
cgggtgccggaggtgagtttacacaccgcagtcaaggggcaattcgggctcgggactggccgggctatgggcaaggctcttaaaaaaagccatgttttttggtcggccttacagaaagaaaagggcactgttactgctacgcgtgcgagctccagaggcgaaaccacctgctatgagctggagacccccggtgcacaaccccaatgggattgagagaaacctgtgggaggcattctttcgcatgcatgcttcagcttgtggttgtggcgatcttgttggccatattactatactggctggtcggtatggtgctcctcctcgtcccccggcccccgggactcccagaccaccgctgagacgccagctggcccttccggcgcccccccgctgatccgcagcaggccaacccagcatggcctggtggggacggtggagaagatggcgctgggggccccgccgctggcggcgccgtcgcagacgccgagtaccaagaagacgagctcaacgccctgttcgacgccgtcgagcaagaagagtaaggaggaggcgatgggggaggcggaggtggagacgggggtacagacgcagactgagactcagacgcagacgcagacgaaagcgaaagatagtactgactcagtggaacccagctaaagtcaggagatgtaccattaagggggtactccccatgatcttgtgcggggcaggacgctcagggtttaactatggactgcacagcgacgactacaccacccagaaaccccttggccagaacccccacgggggcggcatgagcacagtgacttttagccttcaggttctctatgaccagtatcagaggtttatgaacaagtggtcgtactctaacgaccaactagacctcgccaggtactttggctgcaccttctggttctacagacacccagaagtggactttgtagctcagtttgacaacgttccccccatgaaaatggacgagaacacagcccctaacactcacccgtcattcttactacaaaacaaacacagggttaaaatccccagctttaaaaccaagccgtttggcagaaaaaaagttagagttaaagtggggccccccaaactgtttgaagacaaatggtacagccaacatgacctgtgtaaggttcccctagtcagttggcggttaaccgcagctgacttcagatttccgttctgctcaccacaaactgacaacccttgctacaccttccaggtattgcatgaagagtattacccagtaataggcacttctgctttagaacagggaactaattacaattcatcaggcatatgtacattagaaacgtttttatatggaaaatgtacccactatcaaacatttgccacagacacaagactaaaccctcaaagacccataacaggcaacaacaacaaaacttataatcctagtggagccacagaagcaattatatggagtcaagatgactttaacaactttaaaaagcacacagacagcaactatggctactgcacctactgcccaaacgacgacttaattcaaaaaattaaaaactacagagacaaaagattccagtggctaactgaaatgccacaaacaaacacctgccacataaatgccacctacgcccgaggaaaaattaaacagtgggaatatcacctaggctggtactcaaatatatttataggcaacctaagacacaacctagcattccgaacagcatacattgacattacctacaaccccattacagacaaaggagaaggcaacattgtatggttccaatatgccaccaaacccaacacacaatacatagacagccaggcaaaatgcactattagagacatacccctatatgctgccttttatggctacgaagactacatacaaagaacactaggcccctaccaagatgtagaaaccctgggtataatctgtgttaaatgtccctacacagatccccctctagttcacaagtctgcagataaaaaagactggggctatgtattttacgacatgcactttggcaacggaaaaaccccagaaggacttggccaggtgcacccttactggatgcaaagatggagaccctacgtacagtttcaaaaagacactatgaacaagatagccagaaccggaccgttcagctacagagacgacatgccttccatcactttgactgccgggtacaagtttcgttttaactgggggggcgactctatatttccacagattattaaaaacccctgcccagacagtggggtacgaccttcatccagtagagagcgtcgctcagtacaagtcgttagcccgctcacaatggggccagaatacatattccaccggtgggactggcgacggggcttctttaatcaaaaagctctcaaaagaatgcttgaaaaatcaattaatgatagagagtatccaacaggcccaaaggtccctcgatggtttcccccactcgacaaccaagagcaagaaggcgcctcagattcagaagcgacaagctcgcagtcctcgcaagaagaagccgctcaagaagccctccaagaagtccaagaggcgacgctacagcagcacctcctccagcagtaccgagagcagcgacgaatcggaaagcaactccaactcgtcatgctccaactcaccaaaacgcagagcaacctgcacataaatccccgtgtgcttggccatgcataaataaagtctacatgtttcccccagaaaaacccatgcccatacacgggtaccacgggtgggagacagagtatcaggcctgcaaagcctttgacaggccccctagaaactacctttcagacaaacccatctatccctggcttccccgctctcaacctgaatttaaagtcagttttaagcttggttttcaataaacaaggccgtgggaatttcacttgtcggtgtctacctcttaaggtcactaagcactccgagcgttagcgaggagtgcgacccttccccctggtgcaacgccctcggcggccgcgcgctaccgaggaggagcaccataccgaccagccagtatagtaatatggccaacaagatcgtcactaaccacgtgactcccgcaggccaaccatgtgctacgtcgtgcacttcctgggcggagtctacctaataatataagtagctgcacttccgaatggctgagttttccacgcccgtccgcagcgagatcgcgacggaggagcgatcgagcgtcccgaggg

SEQ ID NO: 1019 - protein, 762 aa, Alphatorquevirus sp.
MAWWGRWRRWRWGPRRWRRRRRRRVPRRRAQRPVRRRRARRVRRRRWGRRRWRRGYRRRLRLRRRRRRKRKIVLTQWNPAKVRRCTIKGVLPMILCGAGRSGFNYGLHSDDYTTQKPLGQNPHGGGMSTVTFSLQVLYDQYQRFMNKWSYSNDQLDLARYFGCTFWFYRHPEVDFVAQFDNVPPMKMDENTAPNTHPSFLLQNKHRVKIPSFKTKPFGRKKVRVKVGPPKLFEDKWYSQHDLCKVPLVSWRLTAADFRFPFCSPQTDNPCYTFQVLHEEYYPVIGTSALEQGTNYNSSGICTLETFLYGKCTHYQTFATDTRLNPQRPITGNNNKTYNPSGATEAIIWSQDDFNNFKKHTDSNYGYCTYCPNDDLIQKIKNYRDKRFQWLTEMPQTNTCHINATYARGKIKQWEYHLGWYSNIFIGNLRHNLAFRTAYIDITYNPITDKGEGNIVWFQYATKPNTQYIDSQAKCTIRDIPLYAAFYGYEDYIQRTLGPYQDVETLGIICVKCPYTDPPLVHKSADKKDWGYVFYDMHFGNGKTPEGLGQVHPYWMQRWRPYVQFQKDTMNKIARTGPFSYRDDMPSITLTAGYKFRFNWGGDSIFPQIIKNPCPDSGVRPSSSRERRSVQVVSPLTMGPEYIFHRWDWRRGFFNQKALKRMLEKSINDREYPTGPKVPRWFPPLDNQEQEGASDSEATSSQSSQEEAAQEALQEVQEATLQQHLLQQYREQRRIGKQLQLVMLQLTKTQSNLHINPRVLGHA

SEQ ID NO: 1020 - DNA, 3228 bp, Alphatorquevirus sp.
gggccagacttcgccataaggcctttatctttcaaggggcaattcgggctcgggactggccgggctatgggcaaggctcttaaaaagctatgtttctcggtaaactctacagaaagaaaaggaaactgctactgcagcctgtgcgtgctccacaggcgccatcttccatgagccgctgctggtgtccgccgcgcggggatgtctcctcccgcgagtccggctggtacgaggcggttcgaagaagccacgatgctttttgtggctgtggtgattctgttcttcatctttctcgtctggctgcacgttttaaccatcagggacctcagacgccccccccggacgaccgcccgtcgcagactccctcagtgagacgcctgctgccgctgccctcctaccccggcgagggccccgcgcctagatggcctggtggggatggaggcgccgctggtggcggccgcggagacggtggcgctggaggcgtccgcgccgccgaagacgagtaccaacccgaagacctcgacgagcttttcggcgctatagaacaagaacagtaaggaggcgccggagggggcggcggaggggctacaggcgacggtatagagtcaggcgactgtacagacgtagatacaaaagaaaaaagatagtactgactcagtggaacccccagactactagaaaatgcaccataaagggcctcatgccagtactctgggcgggaatgggtacggggggccagaactatgcggtgcgctccgacgacttcaccctaaaggggttcgggggctccttcgccacagagacttttagcctaaaggtgctctatgaccagtatcagaggggctttaacatatggactcacactaacgagcagctagacctcgccctgtactacgggtgcaagtgggtgttctacagacacgccaccactgactttataatacacttcaccaacaatcctcccatgaaaacaaaccagttcacggcacccctcaccactccaggcatgctcatgaggagcaagtacaaaatattgctgcccagctttaaaaccaggcccaagggcagaaagtccgtgactgttagaataaagccccccaaactcttccagcacaagtggtacacccagcaagacctgtgttcagttcctcttgtccaactgaacgtgaccgcagcggatatgcaacatccgttcggctcaccactaactgacactccttgcgtcagcttccaggtgctgggtgacttgtacaataactgcctaaatatagatcttcctcaatttgaagcaacaggagaaatttcaagctctactaactaccaaagagaaaatgcaaatcaattaatagaattatataaaactctattcacaaaacaatccagtggtcacttctggcaaacattcctaacaaatactatggtaaaggcacatatagatgcagacaaagcacagcaagccatgcaacaaacaagtacacagccaacatataacactacaggtttccccacaatacccgcagcagaggagtttgctacttggaaagttaaattcactgaccagagagacagcaactttctctttgcaacctatcacccagaacaaattaaagagattattaaaagaatgagagacaataactttaaattagaaacagggcctaatgacaagtatgggcaatatcaggcccagtatacaagaaacacccatatgctagactactacctgggcttctatagccccatattcttaagcagcggcagatccaatatagagttctttacagcatacagagacatagtatacaatcccctattagacaaggccacaggtaacagaatatggttccagtaccacacaaaatgtgataacaagttcaaaaaaccagaatgccactgggaaatagaagacatgcccctgtgggccctctgtaacgggtacaaagagtatctagaaagccaaataaaatacggggacatactagtagaaggcaaagtcctcatcagatgtccatacacacaacctccactagtagataagaacgatcccactgccgggtttgtagtattcaatgagaactttggcaaaggaaagtggatagacggagggggctacatccccctacacgagagaagcaagtggtacgtgatgctcagataccagactgacgtactccatgacatagtgacctgcggaccgtggcagtacagggacgacgacaaaaactctcaactggtggccaagtactactttcgctttaaatggggtggcaacgtaatgcattctcaggttatcagaaacccgtgtccagaccaccaagtatccggaccccgtcgacagcctagagaagtacaagtcgttgacccgcaactcatcacgcccccctgggtcctccacacgttcgaccagagacgaggactctttactgagacagctatcaaacgtctgctcaagcaaccaatacctggcgagtataatactcaacccccaagggtcccactcctctttctaccctcagcattccagagagaagacggaagtgcagaaagcgactcaggttcaccggccaaaagaccccggtactcgttcgaagagagccagacgccgagcctctcctcggaggagaacccggcggagacgacgagggagatcctcctccgaaagctccgagagcagcgagcactccagttccagcttcagcacttcgcagtccaactcgccaaaacccaagcgaacctccacgtaaaccccctgtcattctaccccccataaaccaagtcttcatgtttcctcccgagggccctaaacccataaagggtcccgaggcctgggcggacgagtacttcaccgccgcccactggaacagaccccctagaacccatcacacagacacccccttctatccgtgggtcccaaaacagtatcgtgtcagctttaaacttggctttcaataaaattactacgccgtgggagtctcgctggtcggtgtctacctcttaaggtcactaagcactccgagcgtcagcgaggagtgcgaccctctgccctggtgcaacgccctcggcggccgcgcgctacgccttcggctgcgcgcggcacctcggacccccgctcgtgctgacgcgctcgcgcgcgtcagaccacttcgggctcgcgggggtcgggaaatttgctaaacagactccgagttgccattggacactgtagccgtgaatcagtaacgaaagtgagtg

SEQ ID NO: 1021 - protein, 782 aa, Alphatorquevirus sp.; identical to SEQ ID NO: 422

SEQ ID NO: 1022 - protein, 154 aa, Alphatorquevirus sp.; identical to SEQ ID NO: 423

SEQ ID NO: 1023 - protein, 56 aa, Alphatorquevirus sp.; identical to SEQ ID NO: 424

SEQ ID NO: 1024 - DNA, 3226 bp, Alphatorquevirus sp.
cgggtgccggaggtgagtttacacaccgcagtcaaggggcaattcgggctcgggactggccgggctatgggcaaggcttttaaaaaagctacccccttaactatgtttctcggcagagtttaccgccgcaagaaaaggaaagtgcttctgtccctggtgcatactccacagaaaacaccttcctccatgaaccgctggttacccccggcacacgatgcccgcggaattgagaggcagtggtatgactgtgtttggcgcagtcacgctgcttgctgtggctgtggtgattttattagtcatattaatgatctggcgcatcgttttggacgtcctccgaattccagaccacctgctactccccagccgccggctgtgagagccctcccggcactgccggcccctgagccatggtctggcgcagggggcgacgctggcgccggtggagatggcgccgcaagccgcggtggaggagatggagacgctggagacgtcgcagacgaagacctgctagacgccgtcgacctcgcagagtaaggagacgcaggggagggtggcggcgctcctacagacggtggaagagacgcagggggcgacgcagacataaaaagaaacttatactgactcagtggcaacccgcggttgtcaaaaaatgcagaatagtgggctacgaccccataataatatgtggactgaacagaaccagccacaactccacaactcacgcagaggactacactacaggcaaccaggcctttggggggggactgtgcaccaccaaatacactctaagaatactgttccaagagtacatggcccaccacaactactggacggccagcaacagagacctggagctggccaggtacctgggggcttctattatattttttaaacaccccacagtagactttgtagccagagtcagaaccatgcctccctttaacgacactgacatcacagccgcatcccttcacccgggaatgcttatgctagctaagaaaaaaataattattcccagtctgaaaaccagaccaagcaaaaaacactatgtaaagataaagataggggcccccaagctatttgaagataagtggtactctcagagagacctctgtgacacaactcttgtggttatagaggcaacggttgcagacttgcaatatccgttcggctcaccactaacgaacagcatctgttgcaacttccaggttcttaacagcaactatgacaacgccctgagcacccttataggaactcagggagacaaagacagagatcaatgctataaatttctgttaaatacaatcacctactataacacctctcaagtactagcacagctaaacaagttcttacctgcctccaacacagttaacctctctgaatcaaatgccgcaaattccattaacccatccaaccaaacacaaaatacatacacatccacaaatatacagatacacaacaatacactgtatggaggagcagcatactttagcacatcaggacaaaataatccaccaaagaaaatgaaagaggccaacaaagcatacactaaagcagctataaaaattctaggcaattggaattttactagcatgaactcatcctcagaatcggagttatcagagctaaactactttgactattacacaggcatgttttccagcatatttttagccagcggcaggtcaaactgggaggtaaaaggcagctacacagacataacatacaaccccctagtagacaagggagagggcaacatgatctggatagactggatcaccaaaggtgacaccatctactctgaaaataaaagcaaatgcttgctcaaagacctgcccatgtgggccctgtgctatggctacgcagactatgtacttaagtgcacaggagtctccagcataaaaaacgaggccagaatagtcatgaggtgtccctacacgtacccccaactaataaaacacacaaaccccaactttggcttcgtagtgtacagtgacaactttggacgcggacgcatgccggggggcgaccctgtaccgagcaccagaaacagagtgcactggtacatcaccataacccaccagactgaagtgctagagtgcatctcccagaccggaccgtttgcctaccacagcgacgaacgcaaagcagtactgactataaaatacaacttcagatggaaatggggaggcaaccctgtgttccaacagattcttagagacccctgcacgggatcctccggctccggtccccgtagagtgcctcgctcaatacaagtcgatgacccgaagcaccagacaccagagtacatgtggcacgcgtgggacttcagacgtggactctttagccagaaaggtattaagagagtgtcagaacaaccaacagatgttgaccttcctacaggcaggggcaagagacccaagagagacacagacggcccgcaagagcaaggccaagaagaaggctcgtgttccatcagacgagtcctccagcagtggctccactccagtcaggagcagagccaagaaagcgaagaagaagcagccccgacgacgctctcgcaagagctacaaaaacaactcaagcagcagcagctcatgggaaagcagctccgagagctcagtctccaactcgcccaagtccaagcggggggacaccttcacccccttttacaatgccatgcataaataaagtatacatgtttccccccatgacctttactccctccagcagagactggaaagaggagtacgaggcctgcagagtctgggacagacctcccagaaacgacctaagaaggccccctttctatccctggatgcctcctacgcacaatgtaagctttaagctctccttcaaataaatgttggccgtgggagtttcacttgtcggtgtctacctctataagtcactaagcactccgagcgtaagcgaggagtgcgaccctctgccctggtgcaacgccctcggcggccgcgcgctacgccttcggctgcgcgcggcacggggccccccccccgcggggggctccgccccccggcccccccccccgaagtccgtcactaaccacgtgactcccaacagccaaccgctgatctacgtgattcacttcctgggctgtacctacgtgctaatataaggcggcgcacttccgaatggctgagttttccacgcccgtccgcagcggtggagcaggcgagcagcgacccccgcgtcccgaggg

SEQ ID NO: 1025 - protein, 760 aa, Alphatorquevirus sp.; identical to SEQ ID NO: 591

SEQ ID NO: 1026 - protein, 155 aa, Alphatorquevirus sp.; identical to SEQ ID NO: 592

SEQ ID NO: 1027 - protein, 62 aa, Alphatorquevirus sp.; identical to SEQ ID NO: 593

SEQ ID NO: 1028 - DNA, 3226 bp, Alphatorquevirus sp.
cgggagccggaggtgagtttacacaccgcagtctaggggcaattcgggcacgggtctggccgggctatgggcaaggttctgaaaaaattcccccgttgtgttcttaaacaggacataaaatcatgccgtggagaccgccggctcataacgtccaggggcgagagagtgagtggcttgcaagcacttttcacgcacacgctgctttttgcggctgcggtgactttattgggcatcttaacagccttgctcctcgctttcctaacaaccaaggacccccgcatccaccggccctaaacaggccaccggcacagggcccagaaggccccgggggtcccatagtacctctaccagccctaccggcaccacctgacccgccaccacggcctggtggtggggaagacggtggcgacggcgcccgtggggccggtggcgccgccgaaggcgcgtatggacaagaagacctagaactgctgttcgccgccgccgaggaagacgatatgtgagtagaaggcgccgctacaggcgcagactcagacaaaggggcagacggagatacagggggcgacgaaagaagagacagaccctagtactcagacaatggcaacctgacgttaacagactgtgcagaatcacaggatggctacctcttatagtctgtggcacgggcagggcccaagacaactttatagtacactcagaggacataaccccccgaggagccgcctacgggggcaacctcacacacataacatggtgcttagaagctatataccaagaattcctcatgcacagaaacagatggtccagaagtaaccacgacctggacctctgcagataccaaggagtagtctttaaggcttacagacaccccaaagtagactacatactagcatacactagaacacctccatttcaagtaacagaactcagctacatgtcctgccatccactactcatgctcacaacaaaacacagaatagtagtaaagagccaagagaccaaaaaatggggcaaaaaatatgtaaaatttagaataaagccccccagactaatgttaaacaaatggtactttactcatgacttttgtaaagtcccactattcagcatgtgggcctcagcctgtgatctaagaaatccctggctcagagagggggccctaagccccacagtaggcttctttgccctaaagcctgacttctaccctaatttaagcattttaccaaatgaagtaactcaacaatttaacttttttctaaactctgctcacccaacacaaatagaatcacacaaaaatgtcagatggaaatacacatacacaaacttaatgaggtccatatacaaccagactccatctctaaaatcctccacatatgactggcaaaactatagcacaccaggaaactatgcagcatgccattcccaatttacaacatttaaaaaacaaagatttgccaaaattaaagcagaatatgaaacagtatatcctacactaacaacacaaacaccccaatcagaagcactaacacaagaatttggaatgttctctccatactatttaacaccaacaagaataagtctagactggcacacagtataccaccacattagatacaaccccatggcagacaaaggcctaggaaacatgatatgggtagactggtgctctagaaaagaatccacctacgaccccacaagatccaaatgcatgctaaaagacctaccactatacatgcttttctatggatactgtgactgggtcactaaatccataggctcagaaacagcctggagagacatgagattaatggtggtctgtccttacacagaaccccaactcatgaaaaaaaatgacaaaacctatggctatgtaatctatggctacaactttgcaaacggaaacatgccatggttgcaaccatatatcccaatctcgtggttttgccgttggtttccttgcataacccaccaacgtgaagcaatggagtcagttgtagccacaggaccgttcatggtcagagaccaagaccgcaacagttgggacataactataggctacaaattcttatggagatgggggggctctcctctgcccactcaggcaatcgacgacccctgccagcagggaacccacccgctgcccgagcccggtacgttgcctagaatcttacaagtcagcgacccgacgcaactcggaccgaaaacaatattccacctctgggaccagaggcgtggactatttagcaaaagaagtattgagagagtgtcagaatacaaaggaactgatgacttattttcaccaggtcgcccaaagcgcccaaagctcgatacaaggcccgaaggactaccagaggagcaaaaaggagcttacaatttactccaagccctccaagactcagcccagtcggaagaaagcgaccaagaagacatgcctcccctcgaagaagaacaagtactccaagagcaaaagaaagagacgctcctcgagcagctccagcaacagaaacaccaccagcgagtcctcaagcgaggcctcagactcctcctcggagacgtcctaaaactccgccggggtctccacatagacccggtccttacatagcaccccctccatacatccctgaccttcttttccctaacactcaaaaaaaaaaaaagttttccaacttcgactgggctacagaataccagcttgctatggctttcgaccgccctctccgctactacccctcagacctccctcactacccgtggctaccaaaaaagccacctacccaaactacctatagagtatccttccaacttaaagccccccaataaaatttcaaggccgtgggactttcacctctcggtgtctgcttattaaggttaccaagcactccgagcgccagcgaggagtgcgacccccctgcccggtagcaacttcctcggggtccggcgctacgccttcggctgcgccggacgcctcggcccccccgggggggggggctccgcccccccggcccccccccgtgctgtattcaccgcgcatgcgcgaccacgcccccgccgccattttgtgaagcccgccaaattcttttcaaacaggccaatcagcatctactacgtacacttcctggggtgtgtcctgccactgtatataagccagaggggtgacgaatggtagagttttttttcgcccgtccgcggcgagagcgcgagcgaagcgagcgatcgagcgacccgtggg

SEQ ID NO: 1029 - protein, 659 aa, Alphatorquevirus sp.
LCRITGWLPLIVCGTGRAQDNFIVHSEDITPRGAAYGGNLTHITWCLEAIYQEFLMHRNRWSRSNHDLDLCRYQGVVFKAYRHPKVDYILAYTRTPPFQVTELSYMSCHPLLMLTTKHRIVVKSQETKKWGKKYVKFRIKPPRLMLNKWYFTHDFCKVPLFSMWASACDLRNPWLREGALSPTVGFFALKPDFYPNLSILPNEVTQQFNFFLNSAHPTQIESHKNVRWKYTYTNLMRSIYNQTPSLKSSTYDWQNYSTPGNYAACHSQFTTFKKQRFAKIKAEYETVYPTLTTQTPQSEALTQEFGMFSPYYLTPTRISLDWHTVYHHIRYNPMADKGLGNMIWVDWCSRKESTYDPTRSKCMLKDLPLYMLFYGYCDWVTKSIGSETAWRDMRLMVVCPYTEPQLMKKNDKTYGYVIYGYNFANGNMPWLQPYIPISWFCRWFPCITHQREAMESVVATGPFMVRDQDRNSWDITIGYKFLWRWGGSPLPTQAIDDPCQQGTHPLPEPGTLPRILQVSDPTQLGPKTIFHLWDQRRGLFSKRSIERVSEYKGTDDLFSPGRPKRPKLDTRPEGLPEEQKGAYNLLQALQDSAQSEESDQEDMPPLEEEQVLQEQKKETLLEQLQQQKHHQRVLKRGLRLLLGDVLKLRRGLHIDPVLT

SEQ ID NO: 1030 - DNA, 3226 bp, Alphatorquevirus sp.
cgggtgccggaggtgagtttacacaccgcagtcaaggggcaattcgggcacgggactggccgggctatgggcaagattcttaaaaaatttccccgatccctttgtcgccaggacataaaaacatgccgtggagaccgccggtacatagtgtccaggggcgagaggatcagtggttcgcaggcttttttcacagccacgcttcattttgcggttgcggtgacgctgttggccatcttaatagcattgctcatcgctttcctcgcgccggcccaccaaggccccctccggggctagagcagcctaaccccccggagcagggcccggccgggcccggagggccgcccgccatcttggccctgccggctccgcccgcggagcctgacgacccgcagccacgccgtggtggtggggacggtggcgccgccgctggcgccgcaggcgaccgtggagaccgagactacgacgaagaagagctagacgagcttttccgcgccgccgccgaagacgatttgtaagtaggagatggcgccggccttacaggcgcaggaggagacgcgggcgacgcagacgcagacgcagacgcagacataagcccaccctagtactcagacagtggcaacccgacgttatcagacactgtaagataacaggatggatgcccctcattatctgtggaaaggggtccacccagttcaactacatcacccacgcggacgatatcacccccaggggagcctcctacgggggcaacttcacaaacatgactttctccctggaagccatatatgaacagtttctgtaccacagaaacaggtggtcggcctccaaccacgacctagaactctgcaggtacaagggtaccaccctaaaactatacagacacccagatgtagattacatagtcacctacagcagaacaggacccttcgagatcagccacatgacctacctcagtactcaccccctgctaatgctgctaaacaagcaccacatagtggtgcccagcctaaagactaagcccaggggcagaaaggccataaaagtaaggataaggcccccaaaactcatgaacaacaagtggtacttcaccagagacttctgtaacataggcctcttccagctctgggccacaggcttagaactcagaaacccctggctcagaatgagcaccctgagcccctgcataggcttcaatgtccttaaaaacagcatctacaccaacctcagcaacctgccacaataccaacaagagagattaaacattattaacaacacacttcacccacaggacataacaggtgcaaacaacaaaaagtggcagtacacatacacaaagcttatggcccctatttactattcagcaaacagggccagcacctatgactgggaaaattacagcaaggaaactaactacaatcacacatatgtaaaattctcagaaaaaagagctgagaaacttgtaaaaattaaaaaagagtggcagatgctttatccacaacaaactacaggactgccacaatcctatgaccttttacaagagtatggcctatacagcccatactacctaaaccccacgagaataaacctagactggatgaccccctacacacacgtaaggtacaaccccctggtagacaaaggcttcggaaacagaatatacatccagtggtgctcagaggcagatgtcagctacaacagaacaaagtccaagtgtctgctacaagacatgcccctgtttttcatggcctatggctacatagactgggcaataaaaaacacaggagtgtcttcactagtgagggacgccagaatctgcatcaggtgtccctacacagagccacagctcgtgggatccacagaagacataggctttgtacccatctcagaaactttcatgaggggcgacatgccggtacttgcaccatacataccgttaagctggttttgcaagtggtatcccaacatagctcaccaaaaggaagtccttgaggcaatcatttcctgcagccccttcatgccccgtgaccaggacatgaacggttgggatatcacaatcggttacaaaatggacttcttatggggcggttcccctctcccctcacagccaatcgacgacccctgccagcagggaacccccccgattcccgaccccgataagcaccctcgcctcctacaagtctcgaacccgaaactactcggaccgaggacagtgttccacaagtgggacatcagacgtgggcagtttagcaaaagaagtattaaaagagtgtcagaatactcaagcgatgatgaatctcttgcgccaggtctcccatcaaagcgaaacaagctcgactcggcgttcagaggagaaaacccagagcaaaaagaatgctattctctcctcaaagcgctcgaggaagaagagaccccagaagaagaagaaccagcaccccaagaaaaagcccagaaagaggagctactccaccagctccagctccagagacgccaccagcgagtcctcagacgagggctcaagctcgtctttacagacatcctccgactccgccagggagtccactggaaccccgagctcacatagagcccccaccttacatacccgaccttctttttcccaatactggtaaaaaaaaaaagttctctcccttcgactgggagacagaagcccagctggcggggtggatgcggcggcctatgcgcttctatccctcagacacccctcactacccgtggctaccccccgagcgagatatcccgaaaatatgtaacataaacttcaaaataaagcttcaagagtaagtgattcgaggccctcctctgttcacttagcggtgtctacctcttaaggtcactaagcactccgagcgccagcgaggagtgcgaccctctaccaaggggcaacttcctcggggtcccccccccaccagggggcgctgcgcgcccccccccccgcgcatgcgcggggccccccccgcggggggggctccccccccccggccccccccccgtgctaagtccaccgcgcatgcgcgaacacgcccccgccgccattttgttcagcccgccaatttctctttcaaacaggccaatcagctactacttcgtgcacttcctggggcgtgtcctccccctctatataagcagaggcggtgacgaatggtagagtttttcctggcccgtccgcggcgagagcgcgagcgaagcgagcgatcgagcgtcccgtggg

SEQ ID NO: 1031 - protein, 641 aa, Alphatorquevirus sp.
MPLIICGKGSTQFNYITHADDITPRGASYGGNFTNMTFSLEAIYEQFLYHRNRWSASNHDLELCRYKGTTLKLYRHPDVDYIVTYSRTGPFEISHMTYLSTHPLLMLLNKHHIVVPSLKTKPRGRKAIKVRIRPPKLMNNKWYFTRDFCNIGLFQLWATGLELRNPWLRMSTLSPCIGFNVLKNSIYTNLSNLPQYQQERLNIINNTLHPQDITGANNKKWQYTYTKLMAPIYYSANRASTYDWENYSKETNYNHTYVKFSEKRAEKLVKIKKEWQMLYPQQTTGLPQSYDLLQEYGLYSPYYLNPTRINLDWMTPYTHVRYNPLVDKGFGNRIYIQWCSEADVSYNRTKSKCLLQDMPLFFMAYGYIDWAIKNTGVSSLVRDARICIRCPYTEPQLVGSTEDIGFVPISETFMRGDMPVLAPYIPLSWFCKWYPNIAHQKEVLEAIISCSPFMPRDQDMNGWDITIGYKMDFLWGGSPLPSQPIDDPCQQGTPPIPDPDKHPRLLQVSNPKLLGPRTVFHKWDIRRGQFSKRSIKRVSEYSSDDESLAPGLPSKRNKLDSAFRGENPEQKECYSLLKALEEEETPEEEEPAPQEKAQKEELLHQLQLQRRHQRVLRRGLKLVFTDILRLRQGVHWNPELT

SEQ ID NO: 1032 - DNA, 3225 bp, Alphatorquevirus sp.
tttatgccggaggtgagtttacacaccgcagtcaaggggcaattcgggctcgggactggtcgggctatgggcaaggctcttaaaaagatgcgtttctctaatatcgcccgcagaaagaaaaggaaactgtcactgctacctgtgcaccctccacaggagacacctaccatgagctttgtagaacccttactgagcagcaaccacagagagatagcatactaccatggctgtgttcagatgcacaaagccttctgtggctgtgacaactttctcacccacctgcaacgcatagcaacatacatctctgttaaccagcacactccacccagcacaccctcaaacaccctccgtagagcccgggccctacccgcggctccggagccggctccatggcgtggtcctggtggtggcagaggaggcgccgaaggtggccgtggagacgcagaaggtggaggagactacgcacaagaagacctagacgccctgttcgacgccgtcgcaagagatacagagtaaggagacggaggcggtggggaaggaaacgtgggcgacgcacataccttagacgcagacttaaaaagagaaagagacgaaaaaagctcagactgactcagtggaaccctagcacaataaggggatgtacaattaaaggtatggcccccctaataatatgcggccacaccatggccggcaataactttgccatccgaatggaggactatgtatctcaggttagaccattcggagggtccttcagtaccaccacctggagcctaaaagtactgtgggacgagcacacgagattccacaacacctggagctaccccaacactcagctagatctagcaagatttaaaggagtaaccttctacttctacagggacaaagacacagactttatagtaacatacagctcagttccaccatttaaaatagacaaatactcctcagccatgctacacccaggcatgctcatgcaaagaaaaaaaaagatattaatacccagctttacaaccagaccaagaggccgaaagaaaattaaagtacacataaaacctcctgtattatttgaagacaaatggtacacccagcaggacctgtgcgacgttaatcttttgtcacttgcggtttctgcggcttcctttagacatccgttctgcccaccacaaactgacaacatttgcataaccttccaagtgttgaaagacttttactatacccaaatgtcagttacaccagacgaaaacaacaaaaaaaaagatgacactatacttgacacattatactcaactgcagaatattatcaaactgttcacacaacaggcattattaacaaaacacaaagagtagctaagtttcaaacctctaacaatacacttgcagatttatccggaatggcaacctatttaaatccaccatccactactacaggaaaccaaacattagcaactggtaacaactcaatctatggctttccatcatacaatccacagaaagacaaattgaagtccatagcaaactggttctggaaacaagaaactaacactgaaaatgttgttacaggctcatattcaatgcctactaacccagcagtaagctatcacctaggaaaatacagtccaatatacttaagttcatacagaactaacctacaatttagaacagcatacacagatgtcacatacaatccactaaatgacaaaggtaaaggaaaccaaatatgggtacaatatgtaacaaaaccagatacaaaattcaatgccacacaatgcaaatgtcacatagtagacatacccctctgggcagcattccatgggtacatagactttatacaaagtgaattaggcatacaagaagaaatactaaacattgccattatagtagttatatgcccatacacaaaacctaaactaattcacaatcctccaaatgaaaacgaagggtttgtattctatgacacacaatttggagatggtaaaatgccagaaggcacaggcctagtccccatctactaccaaaacaggtggtatcccagaataaagttccagagccaagtagtgcatgactttgtactaacaggcccctttagctacaaagatgaccttaaaagcacagtactaacagtagaatacaagttcaaattcttatggggcggcaatatgattcccgaacaggttatcagaaacccttgtaaaacagaaggacacgatctccctcacaccagtagattccatcgcgacttacaagttgttgacccacagaccgtgggcccccaatgggcgctccacacctgggactggcgacgtggactctttggttcagaggctatcaaaagagtgtctgaacaacaaatacatgatgagctgtattaccaaccttcaaagaaacctcgattcctccctccagtatcaggcctccaagagcaagaaagagactacagttcgcaggaggagaaaatccagtcctcctcagaagaagaggaggaccagaagaaaaaagaacaaaaacagcagcagcgactccacctccagttccaagagcagcagcgactcggaaaccaactccgactcatcttccgagagctacagaaaacccaagcgggtctccacataaatcctatgttatcaaaccggctgtaaataaagtttacctttttcctcccgaggggcctaaacccatctctggctacagagcatgggaagacgagttcacctgctgtaagtactgggacaggcctagtagaattaaccacacagacccccctttctacccctggatgcctaagtacaatgtaacctttaaacttggctggaaataaaatttcaaggccgtacactgttcacctgtcggtgtctacctctataagtcactaagcactccgagcgcagcgaggagtgcgaccctcccccccggtagcaacttcttcggagtccggcgctacgccttcggctgcgccggacacctcagaccccccctccacccgaaacgcttgcgcgtttcggaccttcggcgtcgggggggtcgggagctttattaaacagactccgaggtgctcttggacactgaggggacgtacagcaacgaaagtgagtggggccagacttcgccatagggcctttatcttcttgccatttgtccgtgtccggggtcgccataggctttggcctagttttcaggccttccggactacaaaaatggcgcattccgtgacgtcatggccgccat

SEQ ID NO: 1033 - protein, 749 aa, Alphatorquevirus sp.
MAWSWWWQRRRRRWPWRRRRWRRLRTRRPRRPVRRRRKRYRVRRRRRWGRKRGRRTYLRRRLKKRKRRKKLRLTQWNPSTIRGCTIKGMAPLIICGHTMAGNNFAIRMEDYVSQVRPFGGSFSTTTWSLKVLWDEHTRFHNTWSYPNTQLDLARFKGVTFYFYRDKDTDFIVTYSSVPPFKIDKYSSAMLHPGMLMQRKKKILIPSFTTRPRGRKKIKVHIKPPVLFEDKWYTQQDLCDVNLLSLAVSAASFRHPFCPPQTDNICITFQVLKDFYYTQMSVTPDENNKKKDDTILDTLYSTAEYYQTVHTTGIINKTQRVAKFQTSNNTLADLSGMATYLNPPSTTTGNQTLATGNNSIYGFPSYNPQKDKLKSIANWFWKQETNTENVVTGSYSMPTNPAVSYHLGKYSPIYLSSYRTNLQFRTAYTDVTYNPLNDKGKGNQIWVQYVTKPDTKFNATQCKCHIVDIPLWAAFHGYIDFIQSELGIQEEILNIAIIVVICPYTKPKLIHNPPNENEGFVFYDTQFGDGKMPEGTGLVPIYYQNRWYPRIKFQSQVVHDFVLTGPFSYKDDLKSTVLTVEYKFKFLWGGNMIPEQVIRNPCKTEGHDLPHTSRFHRDLQVVDPQTVGPQWALHTWDWRRGLFGSEAIKRVSEQQIHDELYYQPSKKPRFLPPVSGLQEQERDYSSQEEKIQSSSEEEEDQKKKEQKQQQRLHLQFQEQQRLGNQLRLIFRELQKTQAGLHINPMLSNRL

SEQ ID NO: 1034 - protein, 170 aa, Alphatorquevirus sp.
MPEVSLHTAVKGQFGLGTGRAMGKALKKMRFSNIARRKKRKLSLLPVHPPQETPTMSFVEPLLSSNHREIAYYHGCVQMHKAFCGCDNFLTHLQRIATYISVNQHTPPSTPSNTLRRARALPAAPEPAPWRGPGGGRGGAEGGRGDAEGGGDYAQEDLDALFDAVARDTE

SEQ ID NO: 1035 - DNA, 3225 bp, Alphatorquevirus sp.
tttatgccggaggtgagtttacacaccgcagtcaaggggcaattcgggctcgggactggtcgggctatgggcaaggctcttaaaaagatgcgtttctctaatatcgcccgcagaaagaaaaggaaactgtcactgctacctgtgcaccctccacaggagacacctaccatgagctttgtagaacccttactgagcagcaaccacagagagatagcatactaccatggctgtgttcagatgcacaaagccttctgtggctgtgacaactttctcacccacctgcaacgcatagcaacatacatctctgttaaccagcacactccacccagcacaccctcaaacaccctccgtagagcccgggccctacccgcggctccggagccggctccatggcgtggtcctggtggtggcagaggaggcgccgaaggtggccgtggagacgcagaaggtggaggagactacgcacaagaagacctagacgccctgttcgacgccgtcgcaagagatacagagtaaggagacggaggcggtggggaaggaaacgtgggcgacgcacataccttagacgcagacttaaaaagagaaagagacgaaaaaagctcagactgactcagtggaaccctagcacaataaggggatgtacaattaaaggtatggcccccctaataatatgcggccacaccatggccggcaataactttgccatccgaatggaggactatgtatctcaggttagaccattcggagggtccttcagtaccaccacctggagcctaaaagtactgtgggacgagcacacgagattccacaacacctggagctaccccaacactcagctagatctagcaagatttaaaggagtaaccttctacttctacagggacaaagacacagactttatagtaacatacagctcagttccaccatttaaaatagacaaatactcctcagccatgctacacccaggcatgctcatgcaaagaaaaaaaaagatattaatacccagctttacaaccagaccaagaggccgaaagaaaattaaagtacacataaaacctcctgtattatttgaagacaaatggtacacccagcaggacctgtgcgacgttaatcttttgtcacttgcggtttctgcggcttcctttagacatccgttctgcccaccacaaactgacaacatttgcataaccttccaagtgttgaaagacttttactatacccaaatgtcagttacaccagacgaaaacaacaaacaaaaagatgacactatacttgacacattatactcaactgcagaatattatcaaactgttcacacaacaggcattattaacaaaacacaaagagtagctaagtttcaaacctctaacaatacacttgcagatttatccggaatggcaacctatttaaatccaccatccactactacaggaaaccaaacattagcaactggtaacaactcaatctatggctttccatcatacaatccacagaaagacaaattgaagtccatagcaaactggttctggaaacaagaaactaacactgaaaatgttgttacaggctcatattcaatgcctactaacccagcagtaagctatcacctaggaaaatacagtccaatatacttaagttcatacagaactaacctacaatttagaacagcatacacagatgtcacatacaatccactaaatgacaaaggtaaaggaaaccaaatatgggtacaatatgtaacaaaaccagatacaaaattcaatgccacacaatgcaaatgtcacatagtagacatacccctctgggcagcattccatgggtacatagactttatacaaagtgaattaggcatacaagaagaaatactaaacattgccattatagtagttatatgcccatacacaaaacctaaactaattcacaatcctccaaatgaaaacgaagggtttgtattctatgacacacaatttggagatggtaaaatgccagaaggcacaggcctagtccccatctactaccaaaacaggtggtatcccagaataaagttccagagccaagtagtgcatgactttgtactaacaggcccctttagctacaaagatgaccttaaaagcacagtactaacagtagaatacaagttcaaattcttatggggcggcaatatgattcccgaacaggttatcagaaacccttgtaaaacagaaggacacgatctccctcacaccagtagattccatcgcgacttacaagttgttgacccacagaccgtgggcccccaatgggcgctccacacctgggactggcgacgtggactctttggttcagaggctatcaaaagagtgtctgaacaacaaatacatgatgagctgtattaccaaccttcaaagaaacctcgattcctccctccagtatcaggcctccaagagcaagaaagagactacagttcgcaggaggagaaaatccagtcctcctcagaagaagaggaggaccagaagaaaaaagaacaaaaacagcagcagcgactccacctccagttccaagagcagcagcgactcggaaaccaactccgactcatcttccgagagctacagaaaacccaagcgggtctccacataaatcctatgttatcaaaccggctgtaaataaagtttacctttttcctcccgaggggcctaaacccatctctggctacagagcatgggaagacgagttcacctgctgtaagtactgggacaggcctagtagaattaaccacacagacccccctttctacccctggatgcctaagtacaatgtaacctttaaacttggctggaaataaaatttcaaggccgtacactgttcacctgtcggtgtctacctctataagtcactaagcactccgagcgcagcgaggagtgcgaccctcccccccggtagcaacttcttcggagtccggcgctacgccttcggctgcgccggacacctcagaccccccctccacccgaaacgcttgcgcgtttcggaccttcggcgtcgggggggtcgggagctttattaaacagactccgaggtgctcttggacactgaggggacgtacagcaacgaaagtgagtggggccagacttcgccatagggcctttatcttcttgccatttgtccgtgtccggggtcgccataggctttggcctagttttcaggccttccggactacaaaaatggcgcattccgtgacgtcatggccgccat

SEQ ID NO: 1036 - protein, 749 aa, Alphatorquevirus sp.
MAWSWWWQRRRRRWPWRRRRWRRLRTRRPRRPVRRRRKRYRVRRRRRWGRKRGRRTYLRRRLKKRKRRKKLRLTQWNPSTIRGCTIKGMAPLIICGHTMAGNNFAIRMEDYVSQVRPFGGSFSTTTWSLKVLWDEHTRFHNTWSYPNTQLDLARFKGVTFYFYRDKDTDFIVTYSSVPPFKIDKYSSAMLHPGMLMQRKKKILIPSFTTRPRGRKKIKVHIKPPVLFEDKWYTQQDLCDVNLLSLAVSAASFRHPFCPPQTDNICITFQVLKDFYYTQMSVTPDENNKQKDDTILDTLYSTAEYYQTVHTTGIINKTQRVAKFQTSNNTLADLSGMATYLNPPSTTTGNQTLATGNNSIYGFPSYNPQKDKLKSIANWFWKQETNTENVVTGSYSMPTNPAVSYHLGKYSPIYLSSYRTNLQFRTAYTDVTYNPLNDKGKGNQIWVQYVTKPDTKFNATQCKCHIVDIPLWAAFHGYIDFIQSELGIQEEILNIAIIVVICPYTKPKLIHNPPNENEGFVFYDTQFGDGKMPEGTGLVPIYYQNRWYPRIKFQSQVVHDFVLTGPFSYKDDLKSTVLTVEYKFKFLWGGNMIPEQVIRNPCKTEGHDLPHTSRFHRDLQVVDPQTVGPQWALHTWDWRRGLFGSEAIKRVSEQQIHDELYYQPSKKPRFLPPVSGLQEQERDYSSQEEKIQSSSEEEEDQKKKEQKQQQRLHLQFQEQQRLGNQLRLIFRELQKTQAGLHINPMLSNRL

SEQ ID NO: 1037 - protein, 170 aa, Alphatorquevirus sp.; identical to SEQ ID NO: 1034

SEQ ID NO: 1038 - DNA, 3224 bp, Betatorquevirus sp.
cgggagccgaaggtgagtgaaaccaccgtagtctaggggcaattcgggctagatcagtctggcggaacgggcaagaaacttaaaatatatatatttttcaggtatgttttcattatggaagacaccaacatcatccaagagacaacaagaactacaatggatgaatattgttaacagctgtcacgaccaattctgccactgcgaaaaaccaactcttcacctactttactgcatcaacaaattttcttctgctcaaaaaccagaaacagatttaagaaacatagaatgcctgcttactggcgtccgtaccactactggagaagacaaaaaagaagacgaaggtggattcctagaaggagaactagaagatcttttcaaagaaaacgaacccgatactccagaaaaagatactggagaaaaaaggtaaagaaatttaaatttcctaaaaaacgtaaagctaaaactgttaaggaatttgaaccaacaaaagttaatcgctgtaaaattgtgggatttaaatgtttaattgaaggaaacaaagacagactaagcagaaactatattcaatatatttactctatagcccctaaacactggccttccggaggaggatggtcactacttgtttttagcttaacaagtttatgggaagattatgaacatttacaaaatatatggacaagtagcaatgttggtttaccactagtaaaatatagaggtgtaaaatttaaattctatcaaagccactttacagactatgttgtatggtatgatacatgctggccaatggtagacacagaactacaacatgcagatttagcaccttcaagaatgatagccagaagacacaaaattataatacctgctacaaccacaagaaaaaaaagaaagccatacaaaacagtctacatacgaccaccagcacaaatgcaaacacactggtactttcaaagagatatttgcaaaacaccactagtaatgctaggagtaactgctgtagacttaaagtttccatttaattatccagactcaagaaacaacaccactagaatacaatgccttagcacactagtttttcaaaatcccaactttggagaatatccacaaagcacaggatactctccgaaaaaaaatgaacaaaatgaaagtctatatttatatgcaacacacagaaacattccaaatgaatggaaaaaagatgacataggtgacttatacccactaactaacacaaaagactttcaaatgggtaaaccaataaaagacataactacaaataatcccgcaagctggggaaatccattttattttcactttttaaccgacacatctactgaaaacaactttacaattgtcataactaaatcatcaccagtagatatgatgaatgaatacaaaacaatgacgaacaaattttctaaatcaataacagctgtatcaggtcccctactttatgaatgctcatacaatccagcaaaagacacaggttctactaatcaagcttacatagtaagtaaccacttagtaaatacatgggaaccaccttcaaatgaaaatcacataatagaaggccttcccctacctgttttactatggggatggacagactggataattaaaataaaacaaacagtatctcctgaaaaataccaaataatagtaattaaaaccaaacaatttgacccagaactaccatactatgtacctatagactttgactttacacaaggttatgacccatacactcctaaaacatacgatacacctcatgaaattaacacatttaacaaatcacactggtatccaaaaataatatttcaacaacaacaaatagaaaagctatgtcaatcaggtaacaatgtacctagaccaatagacaatgtatacattcaagctttttgtcaatacaaattttactttacatggggaggttgtccaaaacaactagaaaaagcttatgatccatgtttacagcctgtatggcccacagccgataaactcactggaagagttgaaatcacgaatcctacaacctacccacaaacagaattatatgactgggactgggaagaagactatgttacagaaagagctatacaaagaattaaactgtacacaacaacttatgcaccaactctctcatctgcagccaacaaaaaccagccgaaagccctcaaaaaagtccaagaaaaagaaccatcggaagagacggaggaggcaaagctcttccagcagctccacaacctcagaatgcagcgaaaactcctggagcagcaagtccagcaaagaagactaaaataataataaaagacagtacaattagagttaagctatttccagaaacccgtactaaaaatcgcagacttacttcaaaagaactagaaactgaaaaagagcttgctagactgtttaaaagacccatgcgtacatatattcatgataaacctttctacccatggtgtgtacctgaaccagttgtaaactttgaccttaactataaatacaaataaaattcaaggccttcagtaattcacagagtggagtccatttatataagttaaaccttaataaacagacaccgcctccctatcaatagggcgccaaaacttaaaagggggctccgcccccttacacccccaagggggctccgcccccttacacccccaagggggctccgcccccttacaccccctaattaatattcaacaggaaaaccacctaattagaattgccgaccacaaaccgtctctaacttcccttttttacattacttcccctttcactcattattattcattacattaattagtaatcaccgtaattccggggaggagactttaaactatttaaccaagtacacctccgaatggctgagtttatgccgccagacggagactgaatcacaacagtgacttcaggctgatctcgggcgggagccgaaggtgagtgaaaccaccgtagtctaggggcaattcgggctagcccctaattaatattcaacaggaaaaccacctaattagaattgccgaccacaaaccgtctctaacttcccttttttacattacttcccctttcactcattattattcattacattaattagtaatcaccgtaattccggggaggagactttaaactatttaaccaagtacacctccgaatggctgagtttatgccgccagacggagactgaatcacaacagtgacttcaggctgatctcggg

SEQ ID NO: 1039 - protein, 707 aa, Betatorquevirus sp.
LSRPILPLRKTNSSPTLLHQQIFFCSKTRNRFKKHRMPAYWRPYHYWRRQKRRRRWIPRRRTRRSFQRKRTRYSRKRYWRKKVKKFKFPKKRKAKTVKEFEPTKVNRCKIVGFKCLIEGNKDRLSRNYIQYIYSIAPKHWPSGGGWSLLVFSLTSLWEDYEHLQNIWTSSNVGLPLVKYRGVKFKFYQSHFTDYVVWYDTCWPMVDTELQHADLAPSRMIARRHKIIIPATTTRKKRKPYKTVYIRPPAQMQTHWYFQRDICKTPLVMLGVTAVDLKFPFNYPDSRNNTTRIQCLSTLVFQNPNFGEYPQSTGYSPKKNEQNESLYLYATHRNIPNEWKKDDIGDLYPLTNTKDFQMGKPIKDITTNNPASWGNPFYFHFLTDTSTENNFTIVITKSSPVDMMNEYKTMTNKFSKSITAVSGPLLYECSYNPAKDTGSTNQAYIVSNHLVNTWEPPSNENHIIEGLPLPVLLWGWTDWIIKIKQTVSPEKYQIIVIKTKQFDPELPYYVPIDFDFTQGYDPYTPKTYDTPHEINTFNKSHWYPKIIFQQQQIEKLCQSGNNVPRPIDNVYIQAFCQYKFYFTWGGCPKQLEKAYDPCLQPVWPTADKLTGRVEITNPTTYPQTELYDWDWEEDYVTERAIQRIKLYTTTYAPTLSSAANKNQPKALKKVQEKEPSEETEEAKLFQQLHNLRMQRKLLEQQVQQRRLK

SEQ ID NO: 1040 - protein, 122 aa, Betatorquevirus sp.
LAERARNLKYIYFSGMFSLWKTPTSSKRQQELQWMNIVNSCHDQFCHCEKPTLHLLYCINKFSSAQKPETDLRNIECLLTGVRTTTGEDKKEDEGGFLEGELEDLFKENEPDTPEKDTGEKR

SEQ ID NO: 1041 - DNA, 3223 bp, Alphatorquevirus sp.
cattttaggccttccggactaccaaaatggctcaaggggcaattcgggctcgggactggccgggccccgggcaaggctcttaaaaagcatgtttctcggtaaactgtacagaaagaaaaggaaagtgccactgcaagctctgccagtaccaccgcctaaacggactagcatgagctgggtacaaccggtatctaacgcccatgttcgagaacaacaatggttcgagtccaccgttagaagccacgacgctttctgtggctgtggtgattccgtgcttcattttactaaccttgctactcgctttaaccgtctgcatgctgcccattcgcctctggatccgccctacccccctcccccgaggcgggcgcgtgtgagaggcctgccggccctccccgctcctgaaaacccaccggcgccatggcctggcgctggtggagacgccgctggaaacccagaaggcggcccgcgtggacaaagtaccggagacgccgctggagacgatttcgaccccgcagacctagaagatctactcgccgccgtggaagaagacgaacagtaaggaggcgccgcgttaggcgactgaggcggaggagggggtggactaggagacggtacttgagacgcagaaagagacgaaagctagtactgactcaatggaaccccagcactgtcagacgctgcaatatcaggggcataataccccttatcatgtgcggggcaaacactgccagttttaactatggcatgcacagcgacgacagcactcctcagccagagaaatttgggggcggcatgagcacagtgacttttagcctatatgtactgtatgaccagttcaccagacacatgaacaggtggtcgtaccccaacgaccagctagacctcgccagatacaaaggctgctcttttaaaatgtacagacaccccacaactgactttatactgacttatgacaacaatccccccatgaaaaacactatatacagctctcctaacacacacccaggcatcctcatgcaacagaaacacagagtactaatacccagctggctcacctttcctaaaggcagaaaatatgtaaaggttaaaatacctccacctaagttatttgaagaccactggtacactcagcctgacttatgcaaagtaccgctcgttactctgcggtcaaccgcagctgacttcagacatccgttctgctcaccacaaacgaacaacccttgcaccaccttccaggtgttgcgagacaagtacaacgaagttattggacttccttttgcaaacactggctctaatacaactgttagtcaacaaattacctcctttgagacttggctatatgaatccagcacacactatcaaacatttcaaacagagcaaatgtttagaccaaaacaatacaatgcagatggctcacagtggaaccaataccaaaaaatgctttctcagtggactacaaaaatttaccacagaaaaacagacagtaactatggatattgctcctataactttagtaagaatgcagaaggctaccagtatgctacacaaatgagacaacactactggacacaactaacaacactcacaagcacagtaccacacataaactctacctttgctaatgctaccactccagaatatgaataccacacaggctggttttcaccagtatttataggcccaaacagacacaacatacaatttagaacagcatacatggatgttacatacaaccctctaaatgacaaaggtctatttaacagagtatggttccaatacagcactaaacctacaacagagtttaaccctatgcaatgcaaatgtgtagtagaaaacatcccactgtggtcagctttatttggctacagtgaatatgtagaaagccaactaggcccctttcaagaccatgaaacagtaggcctagtagtagtacaatgcccctacacagtgccatcactatatgacaaagacagaaaagacatgggctacatattttatgacacaaactttggcaatggaaaactagtcaatggcagcggccaggtgcccagatactggcaacagagatggtaccccatactcaaaagacaaaaacaagtaatgaatgacatctgcaagactggacctttcagctacagagacgaactgcttcaggtggacttggcagcctcttacaccttcaaatttaactgggggggcgacttactctaccaccaggtcatcaaaaacccgtgcgactcctcaggactggcacccaccgactccggtagattcaagcgggacgtacaagttgttagcccgctcaccatgggtcccagactcctcttccactcgtttgaccaaagacgggggttctttactgaaagagctatcaaacgaatgcatgatgaacaaattaatgttccagactttacacagcagcctaaaatcccccgcattttcccaccagtcgagctccaagaccaaagagaacaagcagaagaagactcgcgttcggaggcgctctcgctcacctcctcccaagaaaaagaagcagaagcccaagaaagtctaccgatacagcagcagctcagaaaacaactcagacagcaacagcagttgcgagtccacttgcagcacctcttcctccaactccaaaaaacaaaagcccatttacatttaaacccactatttttcccccaagagaacatgtagacatgttcggtaactactatgatagaaagccaacagcctcagactggaaaactgaatatgagtgctgtagggcctttgatagaccccctagaagcaaccttaaagacagccccttctacccctggatgccaaaacagtctcagtttcgtgtaaccttcaaacttggcttctaataaaatttgctaggccgtgcaactttcacttgtcggtgtctacctctaaaggtcactaagctctccgagcgcagcgaggagagcgacccttccccctgactcaacttcttcggagccgcgcgctacgccttcggctgcgcgcggcacctcagacccccgctcgtgctgacacgcttgcgcgtgtcagaccacttcgggctcgcgggggtcgggagttttattaaacagactccaggttgccattggacactggagctgtgaatcagtaacgaaagtgagtggggccagacttcgccataaggcctttatcttcttgccatttgtccgtgtcgggggtcgccataggcttcggcctc

SEQ ID NO: 1042 - protein, 758 aa, Alphatorquevirus sp.
MAWRWWRRRWKPRRRPAWTKYRRRRWRRFRPRRPRRSTRRRGRRRTVRRRRVRRLRRRRGWTRRRYLRRRKRRKLVLTQWNPSTVRRCNIRGIIPLIMCGANTASFNYGMHSDDSTPQPEKFGGGMSTVTFSLYVLYDQFTRHMNRWSYPNDQLDLARYKGCSFKMYRHPTTDFILTYDNNPPMKNTIYSSPNTHPGILMQQKHRVLIPSWLTFPKGRKYVKVKIPPPKLFEDHWYTQPDLCKVPLVTLRSTAADFRHPFCSPQTNNPCTTFQVLRDKYNEVIGLPFANTGSNTTVSQQITSFETWLYESSTHYQTFQTEQMFRPKQYNADGSQWNQYQKMLSQWTTKIYHRKTDSNYGYCSYNFSKNAEGYQYATQMRQHYWTQLTTLTSTVPHINSTFANATTPEYEYHTGWFSPVFIGPNRHNIQFRTAYMDVTYNPLNDKGLFNRVWFQYSTKPTTEFNPMQCKCVVENIPLWSALFGYSEYVESQLGPFQDHETVGLVVVQCPYTVPSLYDKDRKDMGYIFYDTNFGNGKLVNGSGQVPRYWQQRWYPILKRQKQVMNDICKTGPFSYRDELLQVDLAASYTFKFNWGGDLLYHQVIKNPCDSSGLAPTDSGRFKRDVQVVSPLTMGPRLLFHSFDQRRGFFTERAIKRMHDEQINVPDFTQQPKIPRIFPPVELQDQREQAEEDSRSEALSLTSSQEKEAEAQESLPIQQQLRKQLRQQQQLRVHLQHLFLQLQKTKAHLHLNPLFFPQENM

SEQ ID NO: 1043 - protein, 167 aa, Alphatorquevirus sp.
LAGPRARLLKSMFLGKLYRKKRKVPLQALPVPPPKRTSMSWVQPVSNAHVREQQWFESTVRSHDAFCGCGDSVLHFTNLATRFNRLHAAHSPLDPPYPPPPRRARVRGLPALPAPENPPAPWPGAGGDAAGNPEGGPRGQSTGDAAGDDFDPADLEDLLAAVEEDEQ

SEQ ID NO: 1044 - protein, 56 aa, Alphatorquevirus sp.
MFGNYYDRKPTASDWKTEYECCRAFDRPPRSNLKDSPFYPWMPKQSQFRVTFKLGF

SEQ ID NO: 1045 - DNA, 3222 bp, Alphatorquevirus sp.
cgggagccgaaggtgagtttacacaccgcagtctaggggcaattcgggcacgggtctggccgggcaatgggcaagattcttaaaaaatttccccgttctgtgctccggcaggacaccaagtcatgccgtggtctccgccgagacataacatcagaacgagagaggatctgtggattcaatcagttatttattcacatgacactttttgtggctgtaataatattcttgagcatattactggcctcctgggtggcctacaaccagctccacctagagacccagcaccccctaccatccggagcctgccggcactgccgccagctccgcaaccccctgaacaactacggcgtggtggagatacagacggaggccttggagaagatggaggagacgcaggtggcgcctaccaagatcaagatctagaagaacttttcgccgccgcaagagaagacgatatgtgagtagatggcggcgccgccgatacaggcgcagactcagacgggggcgacgaaaaaggggacgcagacgcagacgcagaaagactttaatattaagacaatggaacccagacgttatcaggagatgctttataacagggtggatgccactcataatatgtggcaccggacacatacaatataactttatcacccaccaagacgatctgcctcccgccaagagcggatacggaggcaacttcacaaacatcacattctcactagccagcctctatgaggagctcatgcaccacagaaaccactggtctaaatccaactatgacctagaactagtcagatacctcagcactactataaagctatacagacacgaatcagtagactacatagtcagctacaccaccacaggccccttcgagacaaatgaactctcctacatgtccacacatccactgttcatgctactcagtaaaaaacatgtagtagtacccagcttaaaaactaaacccaaaggcagacggtggataaagctaaagatatcaccaccaaaactaatgctaaacaagtggtactttgcccatgacttttgtaaaataggcctcttccagctgtgggccacagcctgtaacctttcaaacccctggctcagatcaggcacagacagcccctgcataaccttctatgttctaaaaaaccaagtgtacggaaacagaatgtccaacctagcacaagactctagtaaagacgaaagaaaaaacgcatataaagagctgtggccaacaactacatcaactgataacaattggtaccaatggcaatatacatacctaaaacctatgaaaaatatttactatcaagccgccaacgaacaaactaataaaagtgagatgcaaggcaaaacatataactggcaaaactataaaaactactttacaaaagtaaaaactaaatgggatagtatacaagaaagtaactatgaattagtaagaaaagaatacaataacatatacacaaccagcgccacatggcctcccagttgggacaacagacaatacttagaacatgactgtggcatattcagcccctactttctatcccctgacaactacacaccagaatggcacacagcatactcatctgtcagatacaatcctctaacagacagaggcataggcaacagaatctgtctgcagtggtgcagcgaggccagcacagactaccagcccaccaaaagcaaatgcatgatacaagacctgcctttatacataatgtgctatggttacctagactactgcatcaaagagctaggcataaagtcagcctggacagacctcagagtagccattagaagcccctacactgatccaaaactaataggatcttcagacaaaaccatgtttattccaatatcagaaacattcatgagaggagacatgccccacaaactaccctacataccagtaaagtggtggtttaagtggtatcctatgtgcacacaccaggcttccgttcttgaagcaatagtttcctgtagtccgttcatggtcagagatcaagatgccaacagttgggacataaccatgggctacagctcaaaattcttatggggcggctcccccttaccttcacagcctatcgacgacccctgccaaaaaaccacccacgaccttcccgaccccgatagaaaccctccacgaatacaaatcgcagacccgcaagtgctcggaccggcgacgctcttccactcgtgggacatcagacgtggactcattaacactagagctattaaaagagtgtcagaatacgcggatactaacgaacatttttcaacaggcgtcgagttcaaaagaccccgactggacactccccaccaaggacagcagctatcaaaccaagaagaagacgccttgtctatccttcgccaactccaagcagaacaagaagagaacacgtcgtcggaagaagaacaagcaccccaaagccaagaggtacaaaaagagaaaatactcaagcagctcagagtccagcgacagcagcaacacctcctcagacagggaatcaaacagctcctgggagacgtgctcagactccggaaaggagtccactggaaccccagcctataataattccagcagatcctataccagatctcttgttccccagtactaaaaaaaaacgcaaattttctcccttagactgggagaacgaggctcaaatagcagggtggttagacagacctatgaggctgtatcctggggacacccccttctacccgtggctaccccgcaagcccgttacccaacctacatgtaaagtaaccttcaaaataaagctagatgattaacttgcaaggccgtgggagtttcactggtcggtgtctacctcttaaggtcactaagcactccgagcgccagcgaggagtgcgaccccctgccctgtagcaacttcctcggggtccggcgctacgccttcggctgcgccggacgcctcggttaatattaaagtctttctgcgtctgcgtctgcgtcccctttttcgtcgccccccgtgctaactccgccgcgcatgcgcgaccacgcccccgccgccattttctacagcccgccaattttatttcaaacagaccaatcacaatctactacgtacacttcctggggtgtgtcctcccactcaatataagcaacagcactgacgaatggtagagttttttctgcccgtccgcggcgaggacgcgagcgtagcgagcggccgagcgacccgtggg

SEQ ID NO: 1046 - protein, 659 aa, Alphatorquevirus sp.
MPLIICGTGHIQYNFITHQDDLPPAKSGYGGNFTNITFSLASLYEELMHHRNHWSKSNYDLELVRYLSTTIKLYRHESVDYIVSYTTTGPFETNELSYMSTHPLFMLLSKKHVVVPSLKTKPKGRRWIKLKISPPKLMLNKWYFAHDFCKIGLFQLWATACNLSNPWLRSGTDSPCITFYVLKNQVYGNRMSNLAQDSSKDERKNAYKELWPTTTSTDNNWYQWQYTYLKPMKNIYYQAANEQTNKSEMQGKTYNWQNYKNYFTKVKTKWDSIQESNYELVRKEYNNIYTTSATWPPSWDNRQYLEHDCGIFSPYFLSPDNYTPEWHTAYSSVRYNPLTDRGIGNRICLQWCSEASTDYQPTKSKCMIQDLPLYIMCYGYLDYCIKELGIKSAWTDLRVAIRSPYTDPKLIGSSDKTMFIPISETFMRGDMPHKLPYIPVKWWFKWYPMCTHQASVLEAIVSCSPFMVRDQDANSWDITMGYSSKFLWGGSPLPSQPIDDPCQKTTHDLPDPDRNPPRIQIADPQVLGPATLFHSWDIRRGLINTRAIKRVSEYADTNEHFSTGVEFKRPRLDTPHQGQQLSNQEEDALSILRQLQAEQEENTSSEEEQAPQSQEVQKEKILKQLRVQRQQQHLLRQGIKQLLGDVLRLRKGVHWNPSL

SEQ ID NO: 1047 - DNA, 3221 bp, Gammatorquevirus sp.
cgggagcccgaggtgagtgaaaccaccgaggtctaggggcaattcgggctagggcagtctagcggaacgggcaagaaacttaaatttatttttactttacagatgcaaaacctatctcacaaggacttctttaaaccaacaccttataatacagatacaaaaaatcaaatatggatgtcacaaattgctgactctcatgacaatatctgtcactgcaacagtccttttgggcacctgcttgcttctatttttcctcctggtcataaggaccgtgatcttacaattaatcaaatactacaaagagactacaaagcactatgcctttctggtggagacgcagaaacaagccatggtttcgcagattcaggtacaaaactaaaagaaggtttagaaaaagaaagagaagattccctagacggagaagatatagaaaaactactcgccgccgccgcagaagaaaggtaagaagaaaacttaaaaaaataactctaaaacaatggcaaccagaaagcataaaaaaatgtaaaattataggtttttcatgccttgtactaggagctaatggaagacaaatgtactgttatacaaatgtagctgatcattataccatagcaaaagccccagggggtggaggatttggctgtgaacttataaccctaaaatggctatatgatcaatatactgcacataacaatatttggacagcctcaaatgaatacaaagacttagtaagatatacaggatgtacaataactgtttttagacatccatatgttgattttataattcaatactcactgcaaggcccatttacattaaacaaatatacatacccacaactgcaaccacaaaatgccctgctttctaaacataagagaataattctaagccgacaaaatgcaccacacaaaaaacaagctgtaaagattaaaattaaaccaccaaaactcatgtccacaaaatggttttttcaaaaagaattttgtgagtatgcactagtacaactatgtgccactgcatgctcattttcctttcctagaatacaaccaaactcacagaacctaattattactctgtatgctttaaatccatctttttactttaacagcaactggctagccactagctcacaaggctacagaaatataactgcacaacagtttccactatattttgagcacaacataaaaggcattacaaatccatatgaactaaaccccaacaacattccatcaacagtagaagaaccatataaaacagacatatatttgtacacaacatcatacaaatatggctttttttcacctcaagttatgactgccacaaaggtatacacaaacaaagcgtctccagaaacttctaaaattgctaacttaccacttatagtacttagatacaatccaaacacagatgatggctatggcaatgaaatttacttaacaagcctacacaaaggtcactatgataaaccaacagtaacacctgattatatgtttccaggagtccctctttggatgggactatatggctacggaaactaccttatacaatccagtaaagacaaaggattattaactacacacatgtttattttaaaatccagatcactacatccaatatcacaagctactaaagatgtatactacccaataattaatacagatatggcttttggtagacttccctatgatgaatatataacaagtacaaaaaaaaatgcatggtatccaactggtgaaatgcaagatgatgctctaaacaatatagtaatgacaggtccattccaacctaaatttaacaatattactaatagcacctgggaacttgactataaatacaaatttttttttaagtggggaggcccatacacacaagaacccgtggcagaagacccttgtaaaaaaggaaccttccctacactcaatacaatccaacaaacaatacagattaagaacccagaaaaacttagtccagaatcccttttacatgactgggacttcagaagggggattgttacagcaacagctcttaaaagaatgtcagaaaacctcgaaactgatacatctctcgaatctgatgaatcagagacaccaaagaagaaaagaaaagtcagcaaagagatgccatgcttcaatcaaaaggaagagaaaatcaaaaaatgtctcctctcactctgcgaagagcctacctaccaagaaaccccggaaaacctccagcagctcatccagcagcagcagcagcagcagcaccagctcaagagaaacatctacaagctcctcaaacacctgaaacatggacaacaacaagtacaactccaaacaggagttttagagtagaaccattccaacctggatttgaatgggaaacagaatgtgaatgtgcaaaagcattttgcagaccacccagacattataaaaatgatcccccattttacccctggcttccacctgcacccaaagtcatttttaaccttaatttcaaagactaggccaacaatgtacacttagtaaaggatgtttatataagttacaccccaataaaattgtaataaaaaaaaaaaaaaaaaaaaaaataaaaaattgcaaaaattcggcgctcgcgcgcgctgcgcgcgcgcgagcgccgtcacgcgccggcgctcgcgcgccgcgcgtatgtgctaacacaccacgcacctagattggggtgcgcgcgctagcgcgcgcaccccaatgcgccccgccctcgttccgacccgcttgcgcgggtcggaccacttcgggctcggggggggcgcgcctgcggcgcttatttactaaacagactccgagttgccatttggccccccctaagctccgcccccctcatgaatattcataaaggaaaccacaaaattagccatatgctaattagttccccttttgcacagtgaaaaggggaagtggggggggcagagcccccccacaccccccgcggggggggcacagcccccccccgcaccccccctacgtcacaaaccacgcccccgccgccatcttgggtgcggcagggcgggggctaaaatggcgggacccaatcaatttatactttcactttccaattaaaacctgccacatcactacaaaggggtggagactttaaaactatataactaagtgtggtggcgaatggctgagtttaccccgctagacggtgcagggaccggatcgagcgcagcgaggaggtccccggctgcccgtggg

SEQ ID NO: 1048 - protein, 672 aa, Gammatorquevirus sp.
MPFWWRRRNKPWFRRFRYKTKRRFRKRKRRFPRRRRYRKTTRRRRRRKVRRKLKKITLKQWQPESIKKCKIIGFSCLVLGANGRQMYCYTNVADHYTIAKAPGGGGFGCELITLKWLYDQYTAHNNIWTASNEYKDLVRYTGCTITVFRHPYVDFIIQYSLQGPFTLNKYTYPQLQPQNALLSKHKRIILSRQNAPHKKQAVKIKIKPPKLMSTKWFFQKEFCEYALVQLCATACSFSFPRIQPNSQNLIITLYALNPSFYFNSNWLATSSQGYRNITAQQFPLYFEHNIKGITNPYELNPNNIPSTVEEPYKTDIYLYTTSYKYGFFSPQVMTATKVYTNKASPETSKIANLPLIVLRYNPNTDDGYGNEIYLTSLHKGHYDKPTVTPDYMFPGVPLWMGLYGYGNYLIQSSKDKGLLTTHMFILKSRSLHPISQATKDVYYPIINTDMAFGRLPYDEYITSTKKNAWYPTGEMQDDALNNIVMTGPFQPKFNNITNSTWELDYKYKFFFKWGGPYTQEPVAEDPCKKGTFPTLNTIQQTIQIKNPEKLSPESLLHDWDFRRGIVTATALKRMSENLETDTSLESDESETPKKKRKVSKEMPCFNQKEEKIKKCLLSLCEEPTYQETPENLQQLIQQQQQQQHQLKRNIYKLLKHLKHGQQQVQLQTGVLE

SEQ ID NO: 1049 - protein, 120 aa, Gammatorquevirus sp.
MQNLSHKDFFKPTPYNTDTKNQIWMSQIADSHDNICHCNSPFGHLLASIFPPGHKDRDLTINQILQRDYKALCLSGGDAETSHGFADSGTKLKEGLEKEREDSLDGEDIEKLLAAAAEER

SEQ ID NO: 1050 - protein, 120 aa, Gammatorquevirus sp.
MLQSKGRENQKMSPLTLRRAYLPRNPGKPPAAHPAAAAAAAPAQEKHLQAPQTPETWTTTSTTPNRSFRVEPFQPGFEWETECECAKAFCRPPRHYKNDPPFYPWLPPAPKVIFNLNFKD

SEQ ID NO: 1051 - DNA, 3221 bp, Gammatorquevirus sp.
cgggagcccgaggtgagtgaaaccaccgaggtctaggggcaattcgggctagggcagtctagcggaacgggcaagaaacttaaatttatttttactttacagatgcaaaacctatctcacaaggacttctttaaaccaacaccttataatacagatacaaaaaatcaaatatggatgtcacaaattgctgactctcatgacaatatctgtcactgcaacagtccttttgggcacctgcttgcttctatttttcctcctggtcataaggaccgtgatcttacaattaatcaaatactacaaagagactacaaagcactatgcctttctggtggagacgcagaaacaagccatggtttcgcagattcaggtacaaaactaaaagaaggtttagaaaaagaaagagaagattccctagacggagaagatatagaaaaactactcgccgccgccgcagaagaaaggtaagaagaaaacttaaaaaaataactctaaaacaatggcaaccagaaagcataaaaaaatgtaaaattataggtttttcatgccttgtactaggagctaatggaagacaaatgtactgttatacaaatgtagctgatcattataccatagcaaaagccccagggggtggaggatttggctgtgaacttataaccctaaaatggctatatgatcaatatactgcacataacaatatttggacagcctcaaatgaatacaaagacttagtaagatatacaggatgtacaataactgtttttagacatccatatgttgattttataattcaatactcactgcaaggcccatttacattaaacaaatatacatacccacaactgcaaccacaaaatgccctgctttctaaacataagagaataattctaagccgacaaaatgcaccacacaaaaaacaagctgtaaagattaaaattaaaccaccaaaactcatgtccacaaaatggttttttcaaaaagaattttgtgagtatgcactagtacaactatgtgccactgcatgctcattttcctttcctagaatacaaccaaactcacagaacctaattattactctgtatgctttaaatccatctttttactttaacagcaactggctagccactagctcacaaggctacagaaatataactgcacaacagtttccactatattttgagcacaacataaaaggcattacaaatccatatgaactaaaccccaacaacattccatcaacagtagaagaaccatataaaacagacatatatttgtacacaacatcatacaaatatggctttttttcacctcaagttatgactgccacaaaggtatacacaaacaaagcgtctccagaaacttctaaaattgctaacttaccacttatagtacttagatacaatccaaacacagatgatggctatggcaatgaaatttacttaacaagcctacacaaaggtcactatgataaaccaacagtaacacctgattatatgtttccaggagtccctctttggatgggactatatggctacggaaactaccttatacaatccagtaaagacaaaggattattaactacacacatgtttattttaaaatccagatcactacatccaatatcacaagctactaaagatgtatactacccaataattaatacagatatggcttttggtagacttccctatgatgaatatataacaagtacaaaaaaaaatgcatggtatccaactggtgaaatgcaagatgatgctctaaacaatatagtaatgacaggtccattccaacctaaatttaacaatattactaatagcacctgggaacttgactataaatacaaatttttttttaagtggggaggcccatacacacaagaacccgtggcagaagacccttgtaaaaaaggaaccttccctacactcaatacaatccaacaaacaatacagattaagaacccagaaaaacttagtccagaatcccttttacatgactgggacttcagaagggggattgttacagcaacagctcttaaaagaatgtcagaaaacctcgaaactgatacatctctcgaatctgatgaatcagagacaccaaagaagaaaagaaaagtcagcaaagagatgccatgcttcaatcaaaaggaagagaaaatcaaaaaatgtctcctctcactctgcgaagagcctacctaccaagaaaccccggaaaacctccagcagctcatccagcagcagcagcagcagcagcaccagctcaagagaaacatctacaagctcctcaaacacctgaaacatggacaacaacaagtacaactccaaacaggagttttagagtagaaccattccaacctggatttgaatgggaaacagaatgtgaatgtgcaaaagcattttgcagaccacccagacattataaaaatgatcccccattttacccctggcttccacctgcacccaaagtcatttttaaccttaatttcaaagactaggccaacaatgtacacttagtaaaggatgtttatataagttacaccccaataaaattgtaataaaaaaaaaaaaaaaaaaaaaaataaaaaattgcaaaaattcggcgctcgcgcgcgctgcgcgcgcgcgagcgccgtcacgcgccggcgctcgcgcgccgcgcgtatgtgctaacacaccacgcacctagattggggtgcgcgcgctagcgcgcgcaccccaatgcgccccgccctcgttccgacccgcttgcgcgggtcggaccacttcgggctcggggggggcgcgcctgcggcgcttatttactaaacagactccgagttgccatttggccccccccctaagctccgcccccctcatgaatattcataaaggaaaccacaaaatgccatatgctaattagttccccttttgcacagtgaaaaggggaagtggggggggcagagcccccccacaccccccgcggggggggcacagcccccccccgcaccccccctacgtcacaaaccacgcccccgccgccatcttgggtgcggcagggcgggggctaaaatggcgggacccaatcaatttatactttcactttccaattaaaacctgccacatcactacaaaggggtggagactttaaaactatataactaagtgtggtggcgaatggctgagtttaccccgctagacggtgcagggaccggatcgagcgcagcgaggaggtccccggctgcccgtggg

SEQ ID NO: 1052 - protein, 672 aa, Gammatorquevirus sp.; identical to SEQ ID NO: 1048

SEQ ID NO: 1053 - protein, 120 aa, Gammatorquevirus sp.; identical to SEQ ID NO: 1049

SEQ ID NO: 1054 - protein, 120 aa, Gammatorquevirus sp.; identical to SEQ ID NO: 1050

SEQ ID NO: 1055 - DNA, 3218 bp, Alphatorquevirus sp.
cgggtgccggaggtgagtttacacaccgcagtcaaggggcaattcgggctcgggactggccgggctatgggcaaggctcttaaagcgtacgtcccccgctatgtttctcggcagggtgtggaggaaacagaaaaggaaagtgcttctgctggctgtgcgagctacacagaagacatcttccatgagtatctggcgtccccccctcgggaatgtctcctacagggagagaaattggcttcaggccgtcgaaagatcccacaattctttttgtggctgtggtgattttattcttcatctcactaatttggctgcacgctttgctcttcaggggcccccgccggagggtggtccacctcggccgaggccgccgctcctgagagcgctgccggcccccgagatccgcagggagacgcgcacggagaacccgggcgcctccgatgagccatggcctggcgatggtggtggcagagacgatggcgccgccgcccgtggccccgcagacggtggagacgcctacgacgccggagacctcgacgacctgttcgccgccgtcgaagaagagcaacagtaaggaggcggaggtggaggggcagacgtgggcgacgcacatacacccgacgcgcggtcagacgcagacgcagacccagaaagaaacttgtactgactcagtggagcccccagacagtcagaaactgttcaataaggggcatagtgcccatggtaatatgcggacacaccagagcaggtagaaactatgcccttcacagcgaggactttaccactcagataagaccctttggaggcagcttcagcacgaccacctggtccctaaaagtgctgtgggacgaacaccagaaattccaaaacagatggtcctacccaaacacacagctggacctagccaggtacaggggggtcaccttctggttctacagagaccagaaaacagactatatagtacaatggagcagaaatcctccctttaaactaaacaaatacagcagctccatgtaccaccctggcatgatgatgcaggcaaaaaagaaactggtggtccctagtttccagaccagacctaaaggcaaaaagagatacagagtcacaataaggccccccaacatgttcaatgacaagtggtacactcaagaggacctgtgtccggtacctcttgtgcaaattgtggtttctgcggcgagcctgctacatccgttctgctcaccacaaacgaacaacccttgcatcactttccaagttttgaaagacatttactcagaatgcataggagttaactcttccaaagaaacaacatattcaattctacaaaacaagctttactcagaatgcacatactttcaaaccacacaagttttagctcagttatctccagtatttcagcccgcaaaaaaacctgtaggaggaagggtagagtcaactaccacaacactaggcaacaaggtaccagaactaaaaccaaataacgatttccatacaggcaacaacccagtgtttggcatgtgttcatataaacccaccacagagatactaaccaaagcaaacgactggttctgggagaatctcatggttagaagtgatttacattccacatatggcaaggcaacccttaaatgcatggagtaccacacaggcatttacagctccatattcctaagtccccaaaggtccctagaattcccagcagcataccaagatgtcacatacaacccaaactgtgacagagccataggcaaccgtgtatggttccaatatagcacaaaaatggacacaaactttaatgaactacagtgtaaatgtgtgttaacaaacatgcccttgtgggcggcctttaacggctacccagactttatagaacaagaactcagtatcagcacagaggtacacaactttggcatagtatgtttccagtgcccctacacctttcccccctgctatgacaaaacgaacccaaacaaaggctacgtgttctatgacaccacctttgggaacggaaaaatgccagacgggtcaggccacattcccgtctactggcagcagagatggtggatcagactagcctttcaggtacaagtcatgcatgactttgtactcactggcccctttagctacaaagatgacctagcaaacaccacactcacagccaggtacaagttcagattcaaatggggcggtaatatcatccccgaacagattatcaagaacccgtgtcagagacagcagtccctcggttcctaccccgatagacaacgtcgcgacctacaagttgttgacccatcaaccatgggcccgatctacaccttccacacatgggactggcgacgggggctttttggtgcagatgctatccagagagtgtcacaaaaatcgggagatgctctccgctttacaaaccctttcaagagacccagatatcttcccccgacagacggagaagactaccgacaagaagaagacttcgctttacaggaaaaaagaaggcgcacatccacagaagaagtccaggacccggagagccccccgcaaagcgcgccgctcctacagcagcagcagcagcagcgggagctctcactccagctcgcggagcagcagcgactcggagtccaactccgattcatcctccaagaagtcctcaaaacgcaagcgggtctccacctaaaccccctattattaggcccgccacaaacaaggtctatctctttgagccccccaaaggcctcctcccaatagtgggcagagaggcctgggaggacgagtacaccacttgcaagtactgggaccgtccccccagagtgaaccacttagacatgcccagctatccctggatgcccacaaacttcaaagtcagcttcaaacttggatttaaaccctaaataaaaatttcaaggccgtacactgttcacttgtcggtgtctacctctataagtcactaagcactccgagcgcagcgaggagtgcgaccctagggggtgggtgcaacgccctcggcggccgcgcgctacgccttcggctgcgcgcggccccggccccccccccgaagatcgtcactaaccacgtgactcccgcaggccaaccagagtctatgtcgtgcacttcctgggcatggtctacgtaataatataaagcgctgcacttccgaatggctgagttttccacgcccgtccgcggcgagatcgcgacggaggagcgatcgagcgtcccgaggg

SEQ ID NO: 1056 - protein, 765 aa, Alphatorquevirus sp.
MAWRWWWQRRWRRRPWPRRRWRRLRRRRPRRPVRRRRRRATVRRRRWRGRRGRRTYTRRAVRRRRRPRKKLVLTQWSPQTVRNCSIRGIVPMVICGHTRAGRNYALHSEDFTTQIRPFGGSFSTTTWSLKVLWDEHQKFQNRWSYPNTQLDLARYRGVTFWFYRDQKTDYIVQWSRNPPFKLNKYSSSMYHPGMMMQAKKKLVVPSFQTRPKGKKRYRVTIRPPNMFNDKWYTQEDLCPVPLVQIVVSAASLLHPFCSPQTNNPCITFQVLKDIYSECIGVNSSKETTYSILQNKLYSECTYFQTTQVLAQLSPVFQPAKKPVGGRVESTTTTLGNKVPELKPNNDFHTGNNPVFGMCSYKPTTEILTKANDWFWENLMVRSDLHSTYGKATLKCMEYHTGIYSSIFLSPQRSLEFPAAYQDVTYNPNCDRAIGNRVWFQYSTKMDTNFNELQCKCVLTNMPLWAAFNGYPDFIEQELSISTEVHNFGIVCFQCPYTFPPCYDKTNPNKGYVFYDTTFGNGKMPDGSGHIPVYWQQRWWIRLAFQVQVMHDFVLTGPFSYKDDLANTTLTARYKFRFKWGGNIIPEQIIKNPCQRQQSLGSYPDRQRRDLQVVDPSTMGPIYTFHTWDWRRGLFGADAIQRVSQKSGDALRFTNPFKRPRYLPPTDGEDYRQEEDFALQEKRRRTSTEEVQDPESPPQSAPLLQQQQQQRELSLQLAEQQRLGVQLRFILQEVLKTQAGLHLNPLLLGPPQTRSISLSPPKASSQ

SEQ ID NO: 1057 - protein, 171 aa, Alphatorquevirus sp.; identical to SEQ ID NO: 997

SEQ ID NO: 1058 - protein, 187 aa, Alphatorquevirus sp.
MGLATGAFWCRCYPESVTKIGRCSPLYKPFQETQISSPDRRRRLPTRRRLRFTGKKKAHIHRRSPGPGEPPAKRAAPTAAAAAAGALTPARGAAATRSPTPIHPPRSPQNASGSPPKPPIIRPATNKVYLFEPPKGLLPIVGREAWEDEYTTCKYWDRPPRVNHLDMPSYPWMPTNFKVSFKLGFKP

SEQ ID NO: 1059 - DNA, 3216 bp, Alphatorquevirus sp.
gtgaatcagtaacgaaagtgagtggggccagacaaggggcaattcgggctcgggactggccgggctatgggcaaggctcttagggtcttcattcttaaaatgtttctcggcagagtgtaccgccagaagaaaaggaaactgctactgctggctgtgcagactgcaccggagacatcttccatgagtctgtggcggcccccgatgagacatgtccccgcaagggagagagattgggttgaagccacgttcagagcccacgctgctttttgtggctgtcctaatcctgttattcatttcactagtgtacttgcacgttttaatcttcaaggaggcccgcagacaccaccggacgagccgggtgagggtgcgccggtgctgagggccctaccggccccgagcccgcgcagacgccacaccgccaccgaaaacccggggcctgagccatggcctactggtggcgccgccgcaagtggccgtggagacgcagatggaggcgctggagacgccgccgacgagtaccgagacgaagatatagacgacctgttcgccgctatcgaaagagatacacagtaaggagacggaggaggaggagagggtggcgggggcgacgcagacgcagactgtatagacgcagagccaccattaggcgaaagagacggactctagtaatcagacaatggcagccaaacaacataagaaaatgtagaataaggggcctactacctatgctaatatgcgggcacggtaacagcgccaacaactatgccataaggtcagacgatacagtgcccaccagaactccttttggaggaggactcagcacagtacatttctctctaaaggtgctctatgaccagcacctaaggggtctcaacaggtggagcacctctaatgacatactagacctggccagataccatggctgcactttctggttctacagagacctcaaaacagactacatagttcagtacaacataaccactcccttcacaatagacaaagacagtagtcccagctatcacccaggtatgctcatgcaaacaaagcacaagatattagtacccagctatgacacacatcccaggggcaagcctaaaattagggtccgcataccaccccccaaaatgttcatagataaatggtatgctcagaacgacctctgtgaggttcctcttgtgacatttgtggtcagcctagcttcctttacacatccgttctgcccaccactaactgaaaacccttgcatcactttccaagttctgcaaaatttctataacagttacataggttacaacattaacaatgctaacacatatcaaaatatatttaaagactatctatataaggaggcagccttttatcaacaagtactagtatcctcctacattaaaaagatagactataatccagatggaagccccacatcacaaaatggaaacacaacacaacccactaatccatttccaagcctaggcacatttaatacatgggttaccacaggagtaacaattgatagtactgatcataacggagataaaggaaaaagtaagaaatttataacaggacacacaaatgtacactttaacttttgtacatacaacccaaacatacacgaactcacaacacttagaagatactacttttactgcgaaacagcacaaagtgtaacatcaaaaccatttgatactccacacgtccctcaacactacactaggcctacacatgacaattttgaatacagaataggggccttctctccaatattcctcagtccttttagaacaagccctatagaaaactggcctatggcatacagagacatctcatacaatcccctaaatgacaaaggagtaggaaataaaatctggtaccagagcatcacaaaacaagacacccaattcacactaccaagctgcacatttgtgcttgaagacaaaccgctgtgggccatgtgttatggatacagagactttataaagagcaccagagagagacaagacatagactttgatggcctagtctgcataatatctccctacaccgtaccgccactgtatgacaacgaccacacacagactggatttgtagtgtatgacagcctgtttggaaatggaaaatggttggacggcagcgggttcatacccgtggagtaccagtgcagatggagagtctgcctggcatttcaacaacaagtactgactgacatagccatgactggaccgttcagttacaaagacgactataaaaacacttgcatacaagcaaagtacaaatttaacttcagatggggtggtaatatgctctatcagcagaccatcaaaaatccctgcacggacggacaccctaccgactcccatagagagcctagaagcatacaagtgtctgacccgcttaccgtgggacccagatactgcttccaccagtgggactggagacgtgggttccttggtgacaaagctctcaaaagaatgttacaaaaaccgctcgattttgaactatatccagtcactccaaagagacccagaatattcccccccacagaaggagagcaagaaagccaaaggcaagaaagaagctccagttcagaggaagaaagcatccttatctcgcaagaagagaaagtaccgacggaggcactccaagtccacctccgaaagcagctcagacagcagcgagagctacgattccagctcaagcacctcttccaccagctctgcaaaacccaagcgggtctccacctcaaccccctactatttacccagcagtaaacagggtgtatatgttcccagaggtggctccaaggcccgctcctactagtggagactgggccacggagctggaggcctgcaaggcatgggatagacccatgaggcagaacctccaagatacccccttctacccctggatgcctaacaacttcagggtcagcttcagactcggttttaaaccctaaataaaaatttcaaggccgtgcactgttcacttgtcggtgtctacctcttaaagtcactaagcactccgagcgtcagcgaggagtgcgacccttccccctggtgcaacgccctcggcggccgcgcgctacgccttcggctgcgcgcggcacctcggacccccgctcgtgctgacacgctcgcgcgtgtcagaccacttcgggctcgcgggggtcgggaaatttgctaaacagactccgagttgccattggactcaggagct

SEQ ID NO: 1060 - protein, 775 aa, Alphatorquevirus sp.
MAYWWRRRKWPWRRRWRRWRRRRRVPRRRYRRPVRRYRKRYTVRRRRRRRGWRGRRRRRLYRRRATIRRKRRTLVIRQWQPNNIRKCRIRGLLPMLICGHGNSANNYAIRSDDTVPTRTPFGGGLSTVHFSLKVLYDQHLRGLNRWSTSNDILDLARYHGCTFWFYRDLKTDYIVQYNITTPFTIDKDSSPSYHPGMLMQTKHKILVPSYDTHPRGKPKIRVRIPPPKMFIDKWYAQNDLCEVPLVTFVVSLASFTHPFCPPLTENPCITFQVLQNFYNSYIGYNINNANTYQNIFKDYLYKEAAFYQQVLVSSYIKKIDYNPDGSPTSQNGNTTQPTNPFPSLGTFNTWVTTGVTIDSTDHNGDKGKSKKFITGHTNVHFNFCTYNPNIHELTTLRRYYFYCETAQSVTSKPFDTPHVPQHYTRPTHDNFEYRIGAFSPIFLSPFRTSPIENWPMAYRDISYNPLNDKGVGNKIWYQSITKQDTQFTLPSCTFVLEDKPLWAMCYGYRDFIKSTRERQDIDFDGLVCIISPYTVPPLYDNDHTQTGFVVYDSLFGNGKWLDGSGFIPVEYQCRWRVCLAFQQQVLTDIAMTGPFSYKDDYKNTCIQAKYKFNFRWGGNMLYQQTIKNPCTDGHPTDSHREPRSIQVSDPLTVGPRYCFHQWDWRRGFLGDKALKRMLQKPLDFELYPVTPKRPRIFPPTEGEQESQRQERSSSSEEESILISQEEKVPTEALQVHLRKQLRQQRELRFQLKHLFHQLCKTQAGLHLNPLLFTQQ

SEQ ID NO: 1061 - protein, 168 aa, Alphatorquevirus sp.
MGKALRVFILKMFLGRVYRQKKRKLLLLAVQTAPETSSMSLWRPPMRHVPARERDWVEATFRAHAAFCGCPNPVIHFTSVLARFNLQGGPQTPPDEPGEGAPVLRALPAPSPRRRHTATENPGPEPWPTGGAAASGRGDADGGAGDAADEYRDEDIDDLFAAIERDTQ

SEQ ID NO: 1062 - protein, 79 aa, Alphatorquevirus sp.
LQNPSGSPPQPPTIYPAVNRVYMFPEVAPRPAPTSGDWATELEACKAWDRPMRQNLQDTPFYPWMPNNFRVSFRLGFKP

SEQ ID NO: 1063 - DNA, 3215 bp, Alphatorquevirus sp.
cgggagccggaggtgagtttacacaccgcagtctaggggcaattcgggcacgggtctggccgggctatgggcaagactcttaaaaaattcccccgctgtgttctccgccaggacatcaagtcatgccgtggcgaccgccggtgcataacgtcccgggcagggagaaccagtggtttgcgagcgtttttcacgcacatgcagctttttgcggctgtggtgacactgtcgggcaccttactagcattgctcctcgctttcctaacgccggtcctccgagaccacctccagggctagaccagcccaacctcggagggccggaaggtcccggaggtccccccagagccctgccagctctgccggccccggcagaccctgaaccggcaccacgccgtggtggtggggaagatggaggcggcgccgctggggccgccgccgccggagaccatggaggctacgaagaaggagatctagaagatcttttcgccgcggccgccgaagacgatatgtgagtaaacggtggcgccgccgcagtttcaggcgcagacgcagacggggcagacgcagggggcgacgaaagagacacaaacccacccttgtactcagacagtggcaacctgacgtagtcagaccctgcaaaataacaggatggatgcccctaattatctgtgggtcaggaagcacccagttcaactttataacccacatggatgactttcctccaatggggtacacctacgggggcaacttcaccaacctcaccttttccttagaagcagtatatgaacagtttctgtaccacagaaacagatggagctcctctaaccatgacctagacctagccaggtaccagggaaccaccctaaaactatacagacacgaatacctagactacatagttagctacaacagaacagggccttttcagatcagtgacatgacctacctcagcactcaccctgccttcatgctactgcaaaaacacaggatagtagtgcccagctttaagaccaagccacacggacgcaggtccataaaaatcagaataaagcccccaaaactcatgctcaacaagtggtacttcacaaaagacatatgcagcatgggcctcttccagctacaggccacagcatgcaccttaaacaacccctggctcagagacaccacaaaaagcccagttataggcttcagagtacttaaaaacagcatatacacaaacctcagcaacctgcctgagcatgaaggtgtcagagaatccattagaaaaagactgcacccagagtctctcacaggacactccccaaacaaaaaaggttgggagattagctacacaaaactaatggctccaatatactactcagccaacagaaacagcacatataactggctaaactatcaagagaactatgctaccacctacgcaaaattcaaagagaaaatgactgacaatttaaagttaatacaaaaagaatacttataccactaccccagcaataccaccatagaccttgtaggcaaaaacagccttacacatgactggggcatatacagtccctactggctaactccaacaagaatcagcctagactgggaaacaccctggacatatgttaaatacaacccactagcagacaaaggcataggcaatgttgtatacgcacagtggtgctcagaacagagctgcaaactagaccaaaagaagagcaagtgcataataaaagacctgccactgtgggtaatattttatgaatacgtagactggctaattaaatccacaggcgtcagcagcgcagtcactgacatgagaatagccatcataagcccctacaccgacccagcacttatagggtcaacaccagacacaggcttcattccagtaagtgacaccttttgcaacggagacatgccgtttcttgctccatacatccccgtgggctggtggatcaagtggtaccccatgattgcacaccaaaaggaagtgtttgaggcaatagttaactgtggaccgtttgtcccacgagaccagacaaaaccctcttgggaaattaccatgggttacaaaatgaactggaaatggggcggctctcccctgccttcacaggcaatcgacgacccctgtcagaagcccacccatgaactacccgatcccgatagacaccctcgcatgctacaagtctcagacccgacaaaactcggaccgaagactgtgttccacaagtgggactggagacgtgggatgcttagcaaaagaagtattaaaagagtccaagaagactcaagcgatgatgaatatgttgcaggacctttgcaaagaaaaagacacaagatggacaccagagcagcaggcctgcaaagccccgaaaaagaaagctacactttactccaagccctccaagattccgcggaagagaccctctcgagccaagaacaagcaccccaagaagaagaggtccagaaagaagcgctcgtggagcagctccagctccagaaacagcaccagcgactcctcaaacgaggcctcaaactcctcctgggagacgtcctccgactccgccgaggagtccactgggaccccctcctgtcataattcagggtccctgtatcccagacctgcttttccctaacacacaaaaaaaaaagaaattttccaacttcgactggtcatgcgagtacgagctggccagatggatggatcgtcctttgcggcactacccatccgacctccctcactacccctggctaccaaaagagccacgtacccttcctacatgtagagtaagtttcaaattaaaactagattcctaactttcaaagccgtgggtgtttcacttcatcggtgtctacctctaaaggtcactaagcactccgagcgaagcgaggagtgcgacccccctgcccggtagcaacttcctcggggtccggcgctacgccttcggcctgtctctttgtgtataagagacagccccccgcgggggggctccgcccccccggcccccccccgtgcttaatccaccgcgcatgcgcgaccacgcccccgccgccattttgtgcagcccgccaattttactttaaacagaccaatcacaatctactacgtgcacttcctggggcgtgtctttccagtctatataagcagagacggtgacgaatggtagagttttttctcgcccgtccgcggcgagagcgcgagcgaagcgagcgatcgagcgacccgtggg

SEQ ID NO: 1064 - protein, 644 aa, Alphatorquevirus sp.
MPLIICGSGSTQFNFITHMDDFPPMGYTYGGNFTNLTFSLEAVYEQFLYHRNRWSSSNHDLDLARYQGTTLKLYRHEYLDYIVSYNRTGPFQISDMTYLSTHPAFMLLQKHRIVVPSFKTKPHGRRSIKIRIKPPKLMLNKWYFTKDICSMGLFQLQATACTLNNPWLRDTTKSPVIGFRVLKNSIYTNLSNLPEHEGVRESIRKRLHPESLTGHSPNKKGWEISYTKLMAPIYYSANRNSTYNWLNYQENYATTYAKFKEKMTDNLKLIQKEYLYHYPSNTTIDLVGKNSLTHDWGIYSPYWLTPTRISLDWETPWTYVKYNPLADKGIGNVVYAQWCSEQSCKLDQKKSKCIIKDLPLWVIFYEYVDWLIKSTGVSSAVTDMRIAIISPYTDPALIGSTPDTGFIPVSDTFCNGDMPFLAPYIPVGWWIKWYPMIAHQKEVFEAIVNCGPFVPRDQTKPSWEITMGYKMNWKWGGSPLPSQAIDDPCQKPTHELPDPDRHPRMLQVSDPTKLGPKTVFHKWDWRRGMLSKRSIKRVQEDSSDDEYVAGPLQRKRHKMDTRAAGLQSPEKESYTLLQALQDSAEETLSSQEQAPQEEEVQKEALVEQLQLQKQHQRLLKRGLKLLLGDVLRLRRGVHWDPLLS

SEQ ID NO: 1065 - DNA, 3215 bp, Gammatorquevirus sp.
cgggagcccgaggtgagtgcaaccaccgaggtctaggggcaattcgggctaggtctaggggcaattcgggctagggcagtctagcggaacgggcaagaaacttaaaactatattttatttcagatgtcacagttctttaaagactgtacctacaatcatgaaaccagagaacagatgtggatgagtgttgttactgactttcatgacagcatttgctcatgcacatcaccagttgcccacctaattgatattgtttttcctgaagggcataaagataaagatctaactataagacacattcttaatagagatctaaaatcatgcctttctggtggaatagaagaaagaggttttggtggggcaacagaaggtggagaacaaaaagatggacaagaagaaagaaaagaagacaaagatatagaagatacagacttagaaggcctactcgccgccgtagaagacgcagaaaaaaggtaagaagaaaaagaaaagctataccaatagttcagtggcagcctgactctataagaaactgtaaaattaaaggatacagtgctttagtgctgggagctgaaggaactcaatatctctgctataccaatgaaagattttcaattgttccacctcaatatgcaggaggtggaggctttggtatacagacctacacactgcagtacctatatgaagaaaataaatttaaaaacaacatatggactgcaagtaatctattcacagacttgtgtagatacctaaaagtgaaattttacttttatagacaccaaaaagcagactttattatttcatacagcaggcaaggaccatttgcattaaataagtacacctacactatggcacatccatatatgctaatgcaaagtagacacaaaaaaatactgctgagtaaacttattaatcctaaaggaaaaataactaaaaaaatgacagtcagaccaccaaaacaaatgatcagcaaatggtttttccaaaagcaattctctacacaaaatttactacaacttacagcagcagcagctagctttgcataccccagactaagctgctgcaatgaaaatcaaacagttactatttactatttaaacccacaattctttactcacagtacatgggctagagctcttagtagatactatgaaccttatgataacattgcacaagacattactttttactaccaagatggtaggcaaactaaaacctttcaaccaattaaatgctacaaagagcaagaaaaaccagaacaacaatactataaatccattagctatgaggatggctggttttcaaaaaaaatattaacagccactaaagttacaagccaggatgtaacctatggtcatctacctgtatctgcatgcagatacaacccaacagaagacaatggagtaggtaacatggtatacctaagtagcattttaacaggattttttgacaagccaagtgaaaaagacttagtatatcaaaatgccccactatggcttatttttcatggatactacagctttataaaaaagataaaagactccagttttatgagcctccacatgtttattattaaaagcccttttttaaagccttcaccatcagccatcacaaaagactactttccaatagtagatttaaactttactataggccttaacccatacaaagcatatataagttccacacaaaaaaagttatggtatccatcctgtgaacaccaaatagaaaccattaacagcattgtacaaacaggaccatatatacctaaatattcagatgacagagacagtacatgggaactcccttaccattatcttttttattttaagtggggaggcccagaaacaccacaacaagaaattgcagatccaaagacaaaaaacatctatactgtacccgatacaatcgagggaacagtacagatatgcaaccccctcaaactatcaactgaatccttactacacaactgggacattagaaggggcctcattacagaaacagctcttaaaagaatgtgcgaggacatcgaaactgatacaactttccaaccagatacagaccagccacctccaaaaagaccaagagttacaggagagctacaacacatacaagaaaccaaccaagagatccaagcatgtctccaggcgctctgcaaagaagatacctaccaagaaacgccacaaacacaagaagacatcatccagctcatcaacaagcagcaagagcaacagcagcagctcaagcacaacatcataatgctactacaagaaatgaaacacaaacagcaaatgcttcaactaacaacaggccttatagactaaccccaattaaacctggctttgaaatggagacagaactagaactctgcaatgcttttaaaagataccctcgcaaataccatgaagacccttgtacatacccctggcttccaaatcctgtacccagagtttgttttgcccttagatttaagcactaggcattcaacttacacttagtaaagcatgtttaataaagtttaaccccccaaaaaaaaaaaaaaaaaaaaaataaaaaattgcaaaaattcggcgctcgcgcgcgctgcgcgcgcgcgagcgccgtcacgcgccggcgctcgcgcgccgcgcgtatgtgctaacacaccacgcacctagatttgggtgcgcgcgctagcgcgcgcacccaaatgcgccccgccctcgttccgacccgcttgcgcgggtcggaccacttcgggctcgggggggcgcgcctgcggcgcttatttactaaacagactccgagtcgccatttggcccccctaagctccgcccccctcatgaatattcataaaggaaaccacaaaattagaattgccgaccacaaactgccatatgctaattagttccccttttacacagtaaaaaggggaagtgggggggcagagcccccccacaccccccgcggggggggcggagcccccccccgcaccccccctacgtcacaggccacgcccccgccgccatcttgggtgcggttgggcggggactaaaatggcggcacccaataattttatacttttactttccaattaaaacacgccacgtcactaaaaaggggtggagtcttacaaactatataactaactgtactgacgaatggctgagtttaccccgctagacggtgcagggaccggatcgagcgcagcgaggaggtccccggctgcccaaggg

SEQ ID NO: 1066 - protein, 667 aa, Gammatorquevirus sp.
MPFWWNRRKRFWWGNRRWRTKRWTRRKKRRQRYRRYRLRRPTRRRRRRRKKVRRKRKAIPIVQWQPDSIRNCKIKGYSALVLGAEGTQYLCYTNERFSIVPPQYAGGGGFGIQTYTLQYLYEENKFKNNIWTASNLFTDLCRYLKVKFYFYRHQKADFIISYSRQGPFALNKYTYTMAHPYMLMQSRHKKILLSKLINPKGKITKKMTVRPPKQMISKWFFQKQFSTQNLLQLTAAAASFAYPRLSCCNENQTVTIYYLNPQFFTHSTWARALSRYYEPYDNIAQDITFYYQDGRQTKTFQPIKCYKEQEKPEQQYYKSISYEDGWFSKKILTATKVTSQDVTYGHLPVSACRYNPTEDNGVGNMVYLSSILTGFFDKPSEKDLVYQNAPLWLIFHGYYSFIKKIKDSSFMSLHMFIIKSPFLKPSPSAITKDYFPIVDLNFTIGLNPYKAYISSTQKKLWYPSCEHQIETINSIVQTGPYIPKYSDDRDSTWELPYHYLFYFKWGGPETPQQEIADPKTKNIYTVPDTIEGTVQICNPLKLSTESLLHNWDIRRGLITETALKRMCEDIETDTTFQPDTDQPPPKRPRVTGELQHIQETNQEIQACLQALCKEDTYQETPQTQEDIIQLINKQQEQQQQLKHNIIMLLQEMKHKQQMLQLTTGLID

SEQ ID NO: 1067 - protein, 117 aa, Gammatorquevirus sp.
MSQFFKDCTYNHETREQMWMSVVTDFHDSICSCTSPVAHLIDIVFPEGHKDKDLTIRHILNRDLKSCLSGGIEERGFGGATEGGEQKDGQEERKEDKDIEDTDLEGLLAAVEDAEKR

SEQ ID NO: 1068 - protein, 113 aa, Gammatorquevirus sp.
MSPGALQRRYLPRNATNTRRHHPAHQQAARATAAAQAQHHNATTRNETQTANASTNNRPYRLTPIKPGFEMETELELCNAFKRYPRKYHEDPCTYPWLPNPVPRVCFALRFKH

SEQ ID NO: 1069 - DNA, 3213 bp, Alphatorquevirus sp.
cgggtgccggaggtgagtttacacaccgcagtcaaggggcaattcgggctcgggactggccgagccccgggcaaggctcttaaaaatgcacttttctaaaataagcagaaagaaaaggaaactgctactgcaaactgtgccgcttgcagagagccaacggattaccatgagctggtccagacccacccaaaatgtttatacttgtgaacaaaactggtttgagtcctgcctcagatcacactcatgcttttgtggctgtaataatcctgttattcattttaataacattgctactcgctttaactatctgcctactgccaatccgcctgtgggacccccccaaccgcccacacgcccgccgtcccgcttgagaccccttcccgctctccccgcgcctcccgctgatccacaagcaccatggcctggggctggtggctcaagcggtggaggagaagaaagaaaccagcgtggaagaagtggagaacgcgccgatggagaagatttcgacgcagaagacctaaacgcacttatggccgccgtcgaagaagacgaacagtaaggaggcgccgcgttagacgacttaggaggagggggtggactaggagacggtacataagacgcaaacgcagaaagaaaaagctagtactgactcagtggaacccccaagacgtgaggagatgcacaataaggggcataataccccttataatgtgcggtgcaaacactgccagttttaactatggcatgcacagcgatgacagcactccccagccagaaaagttcgggggaggcatgagcacagttacatttagcctctatgtgttgtatgaccagtacaccagacacctaaacaggtggtcgtaccccaacgaccagctagacctagccagatacataggctgtaaatttaaattctacagagacacacacacagactttatagttacctatgacataaatccacccatgaaaaacacagaactcagcagccccagcactcatccaggcatgctaatgcaacaaaagagaaaagtactagtccctagctgggacacctatcctagaggcagaaaatatgtactagttaaaataccaccccccaaactatttgaagaccactggtacactcagccagacttatgcaaagttcctcttgtaactttgcggtcaactgccgctgacctcaaacatccgttctgctcaccacaaacgaacaacccttgcaccaccttccaggtgttgcgcgaacagtataacgacatgataggcttcccctttaattataacgcatcagatgaaagacagcaacaaacattaaaaacatttgaaaactggctatactcatccagcacacactatcagacatttgcaaccgaggctaaccttagacccagacagtacaatgcagacggaactctaaacccaaactatgcagacctacaatccaggtggacaagtattatatatggaaaaaagacagacagcaactttgggtacacatcctacaacttttcaggtgagacaggctataaatttgtaacagaaatcagacagtggtactggacacaactaacatcctggacacaaaaagtacctcacataaacaccacctttgccaatgccatatatccagagtttgaataccacgctggctggtactcaaacatttttataggccccaacagattcaacgtacagtttagagcagcctacatggatgtcacatacaacccaataaatgacaagggccagttaaacaaaatatggttccagtatagcacaaaacccaccacagagtttgtaccaaaacaggccaaatgccttttagaaaacctacctctgtggagtatgctatttggctactcagaatatgtagagagccagctaggcccctttcaggaccacgagacagtaggcctagtagtagtgcagtgtccatacacagtaccccccatgtatgacaagaacaaaccaaacatgggatacgtgttctatgacacccactttggcaacggaaagctaggcaacggactaggccaggtacccagatactggcagcaaagatggtaccccatcttaaagagacagaaacaagttatgaatgacatctgcaagactggaccgtttgcatacagagacgagagactgcaagctgacttgactgcaggatactcctttagatttaactggggtggtgacttaatctaccaccaggttgtcaaaaacccatgtgactcaggaggactggtgccttccgactccaatagactcaagcgggacgtacaagttgttagcccgctcaccatgggacccagactcatcttccactcgttcgaccaaagacgggggctctttactgacagagctatcaaaagaatgtacgatgaacagattgatgttccagactttacagaacagcctaaaatcccccgacttttccccccagtcgaactcaaagaaagggaagaaaaagactcaggttcggagacggagagcatcagcagttcccaagaaaaagaagcacaaaagcaagcggcgctaccagtccagcagcagctccgactccaactgcgagaacaacagcgactccgagtccacttgcagcacctcttcctccaactccagaaaaccaaagcaaatttacatttaaacccactatctttccagcaagagataagctagacatgtttggtgagattatagatagaaagcctacctcccaagattgggagaccgaatacgtaacctgtaagatatttaacaggccccccagacaacacctcacagaccctcctttctatccctggatgcctaagcctaaacctacatgccgtgtaacctttaagcttggctttcaataaacaaggccgtgggagtttcacttgtcggtgtctacctctataagtcactaagctctccgagcgaagcgaggagagcgaccctagaccaaggggcaactccctcgaagtccggcgctacgcgcttcgcgctgcgccggacatctcggacccccccgtaccgtctcctagtccaccccctcctcctaagtcgtcactaaccacgtgactcccgcaggccaatcacagtgtatgtcgtgcacttcctgggcatgatctacgagataatataaagaacagcacttccgaatggctgagtttttcacgcccgtccgcagcgaggagcagccgaagggagatccgcgcgtcccgaggg

SEQ ID NO: 1070 - protein, 754 aa, Alphatorquevirus sp.; identical to SEQ ID NO: 988

SEQ ID NO: 1071 - protein, 167 aa, Alphatorquevirus sp.; identical to SEQ ID NO: 989

SEQ ID NO: 1072 - protein, 58 aa, Alphatorquevirus sp.; identical to SEQ ID NO: 609

SEQ ID NO: 1073 - DNA, 3212 bp, Gammatorquevirus sp.
cgggagcccgaggtgagtgaaaccaccgaggtctaggggcaattcgggctagggcagtctagcggaacgggcaagaaacttaaatttatttttactttacagatgcaaaacctatctcacaaggacttctttaaaccaacaccttataatacagatacaaaaaatcaaatatggatgtcacaaattgctgactctcatgacaatatctgtcactgcaacagtccttttgggcacctgcttgcttctatttttcctcctggtcataaggaccgtgatcttacaattaatcaaatactacaaagagactacaaagcactatgcctttctggtggagacgcagaaacaagccatggtttcgcagattcaggtacaaaactaaaagaaggtttagaaaaagaaagagaagattccctagacggagaagatatagaaaaactactcgccgccgccgcagaagaaaggtaagaagaaaacttaaaaaaataactctaaaacaatggcaaccagaaagcataaaaaaatgtaaaattataggtttttcatgccttgtactaggagctaatggaagacaaatgtactgttatacaaatgtagctgatcattataccatagcaaaagccccagggggtggaggatttggctgtgaacttataaccctaaaatggctatatgatcaatatactgcacataacaatatttggacagcctcaaatgaatacaaagacttagtaagatatacaggatgtacaataactgtttttagacatccatatgttgattttataattcaatactcactgcaaggcccatttacattaaacaaatatacatacccacaactgcaaccacaaaatgccctgctttctaaacataagagaataattctaagccgacaaaatgcaccacacaaaaaacaagctgtaaagattaaaattaaaccaccaaaactcatgtccacaaaatggttttttcaaaaagaattttgtgagtatgcactagtacaactatgtgccactgcatgctcattttcctttcctagaatacaaccaaactcacagaacctaattattactctgtatgctttaaatccatctttttactttaacagcaactggctagccactagctcacaaggctacagaaatataactgcacaacagtttccactatattttgagcacaacataaaaggcattacaaatccatatgaactaaaccccaacaacattccatcaacagtagaagaaccatataaaacagacatatatttgtacacaacatcatacaaatatggctttttttcacctcaagttatgactgccacaaaggtatacacaaacaaagcgtctccagaaacttctaaaattgctaacttaccacttatagtacttagatacaatccaaacacagatgatggctatggcaatgaaatttacttaacaagcctacacaaaggtcactatgataaaccaacagtaacacctgattatatgtttccaggagtccctctttggatgggactatatggctacggaaactaccttatacaatccagtaaagacaaaggattattaactacacacatgtttattttaaaatccagatcactacatccaatatcacaagctactaaagatgtatactacccaataattaatacagatatggcttttggtagacttccctatgatgaatatataacaagtacaaaaaaaaatgcatggtatccaactggtgaaatgcaagatgatgctctaaacaatatagtaatgacaggtccattccaacctaaatttaacaatattactaatagcacctgggaacttgactataaatacaaatttttttttaagtggggaggcccatacacacaagaacccgtggcagaagacccttgtaaaaaaggaaccttccctacactcaatacaatccaacaaacaatacagattaagaacccagaaaaacttagtccagaatcccttttacatgactgggacttcagaagggggattgttacagcaacagctcttaaaagaatgtcagaaaacctcgaaactgatacatctctcgaatctgatgaatcagagacaccaaagaagaaaagaaaagtcagcaaagagatgccatgcttcaatcaaaaggaagagaaaatcaaaaaatgtctcctctcactctgcgaagagcctacctaccaagaaaccccggaaaacctccagcagctcatccagcagcagcagcagcagcagcaccagctcaagagaaacatctacaagctcctcaaacacctgaaacatggacaacaacaagtacaactccaaacaggagttttagagtagaaccattccaacctggatttgaatgggaaacagaatgtgaatgtgcaaaagcattttgcagaccacccagacattataaaaatgatcccccattttacccctggcttccacctgcacccaaagtcatttttaaccttaatttcaaagactaggccaacaatgtacacttagtaaaggatgtttatataagttacaccccaataaaattgtaataaaaaaaaaaaaaaaaaaaaaaataaaaaattgcaaaaattcggcgctcgcgcgcgctgcgcgcgcgcgagcgccgtcacgcgccggcgctcgcgcgccgcgcgtatgtgctaacacaccacgcacctagattggggtgcgcgcgctagcgcgcgcaccccaatgcgccccgccctcgttccgacccgcttgcgcgggtcggaccacttcgggctcggggggggcgcgcctgcggcgcttatttactaaacagactccgagttgccatttggcccccccctaagctccgcccccctcatgaatattcataaaggaaacgccatatgctaattagttccccttttgcacagtgaaaaggggaagtggggggggcagagcccccccacaccccccgcggggggggcacagcccccccccgcaccccccctacgtcacaaaccacgcccccgccgccatcttgggtgcggcagggcgggggctaaaatggcgggacccaatcaatttatactttcactttccaattaaaacctgccacatcactacaaaggggtggagactttaaaactatataactaagtgtggtggcgaatggctgagtttaccccgctagacggtgcagggaccggatcgagcgcagcgaggaggtccccggctgcccgtggg

SEQ ID NO: 1074 - protein, 672 aa, Gammatorquevirus sp.; identical to SEQ ID NO: 1048

SEQ ID NO: 1075 - protein, 120 aa, Gammatorquevirus sp.; identical to SEQ ID NO: 1049

SEQ ID NO: 1076 - protein, 120 aa, Gammatorquevirus sp.; identical to SEQ ID NO: 1050

SEQ ID NO: 1077 - DNA, 3212 bp, Gammatorquevirus sp.
cgggagcccgaggtgagtgaaaccaccgaggtctaggggcaattcgggctagggcagtctagcggaacgggcaagaaacttaaatttatttttactttacagatgcaaaacctatctcacaaggacttctttaaaccaacaccttataatacagatacaaaaaatcaaatatggatgtcacaaattgctgactctcatgacaatatctgtcactgcaacagtccttttgggcacctgcttgcttctatttttcctcctggtcataaggaccgtgatcttacaattaatcaaatactacaaagagactacaaagcactatgcctttctggtggagacgcagaaacaagccatggtttcgcagattcaggtacaaaactaaaagaaggtttagaaaaagaaagagaagattccctagacggagaagatatagaaaaactactcgccgccgccgcagaagaaaggtaagaagaaaacttaaaaaaataactctaaaacaatggcaaccagaaagcataaaaaaatgtaaaattataggtttttcatgccttgtactaggagctaatggaagacaaatgtactgttatacaaatgtagctgatcattataccatagcaaaagccccagggggtggaggatttggctgtgaacttataaccctaaaatggctatatgatcaatatactgcacataacaatatttggacagcctcaaatgaatacaaagacttagtaagatatacaggatgtacaataactgtttttagacatccatatgttgattttataattcaatactcactgcaaggcccatttacattaaacaaatatacatacccacaactgcaaccacaaaatgccctgctttctaaacataagagaataattctaagccgacaaaatgcaccacacaaaaaacaagctgtaaagattaaaattaaaccaccaaaactcatgtccacaaaatggttttttcaaaaagaattttgtgagtatgcactagtacaactatgtgccactgcatgctcattttcctttcctagaatacaaccaaactcacagaacctaattattactctgtatgctttaaatccatctttttactttaacagcaactggctagccactagctcacaaggctacagaaatataactgcacaacagtttccactatattttgagcacaacataaaaggcattacaaatccatatgaactaaaccccaacaacattccatcaacagtagaagaaccatataaaacagacatatatttgtacacaacatcatacaaatatggctttttttcacctcaagttatgactgccacaaaggtatacacaaacaaagcgtctccagaaacttctaaaattgctaacttaccacttatagtacttagatacaatccaaacacagatgatggctatggcaatgaaatttacttaacaagcctacacaaaggtcactatgataaaccaacagtaacacctgattatatgtttccaggagtccctctttggatgggactatatggctacggaaactaccttatacaatccagtaaagacaaaggattattaactacacacatgtttattttaaaatccagatcactacatccaatatcacaagctactaaagatgtatactacccaataattaatacagatatggcttttggtagacttccctatgatgaatatataacaagtacaaaaaaaaatgcatggtatccaactggtgaaatgcaagatgatgctctaaacaatatagtaatgacaggtccattccaacctaaatttaacaatattactaatagcacctgggaacttgactataaatacaaatttttttttaagtggggaggcccatacacacaagaacccgtggcagaagacccttgtaaaaaaggaaccttccctacactcaatacaatccaacaaacaatacagattaagaacccagaaaaacttagtccagaatcccttttacatgactgggacttcagaagggggattgttacagcaacagctcttaaaagaatgtcagaaaacctcgaaactgatacatctctcgaatctgatgaatcagagacaccaaagaagaaaagaaaagtcagcaaagagatgccatgcttcaatcaaaaggaagagaaaatcaaaaaatgtctcctctcactctgcgaagagcctacctaccaagaaaccccggaaaacctccagcagctcatccagcagcagcagcagcagcagcaccagctcaagagaaacatctacaagctcctcaaacacctgaaacatggacaacaacaagtacaactccaaacaggagttttagagtagaaccattccaacctggatttgaatgggaaacagaatgtgaatgtgcaaaagcattttgcagaccacccagacattataaaaatgatcccccattttacccctggcttccacctgcacccaaagtcatttttaaccttaatttcaaagactaggccaacaatgtacacttagtaaaggatgtttatataagttacaccccaataaaattgtaataaaaaaaaaaaaaaaaaaaaaaataaaaaattgcaaaaattcggcgctcgcgcgcgctgcgcgcgcgcgagcgccgtcacgcgccggcgctcgcgcgccgcgcgtatgtgctaacacaccacgcacctagattggggtgcgcgcgctagcgcgcgcaccccaatgcgccccgccctcgttccgacccgcttgcgcgggtcggaccacttcgggctcggggggggcgcgcctgcggcgcttatttactaaacagactccgagttgccatttggcccccccccctaagctccgcccccctcatgaatattcataaaggaagccatatgctaattagttccccttttgcacagtgaaaaggggaagtggggggggcagagcccccccacaccccccgcggggggggcacagcccccccccgcaccccccctacgtcacaaaccacgcccccgccgccatcttgggtgcggcagggcgggggctaaaatggcgggacccaatcaatttatactttcactttccaattaaaacctgccacatcactacaaaggggtggagactttaaaactatataactaagtgtggtggcgaatggctgagtttaccccgctagacggtgcagggaccggatcgagcgcagcgaggaggtccccggctgcccgtggg

SEQ ID NO: 1078 - protein, 672 aa, Gammatorquevirus sp.; identical to SEQ ID NO: 1048

SEQ ID NO: 1079 - protein, 120 aa, Gammatorquevirus sp.; identical to SEQ ID NO: 1049

SEQ ID NO: 1080 - protein, 120 aa, Gammatorquevirus sp.; identical to SEQ ID NO: 1050

SEQ ID NO: 1081 - DNA, 3211 bp, Betatorquevirus sp.
cgggagccgaaggtgagtgaaaccaccgtagtctaggggcaattcgggctagatcagtctggcggaacgggcaagaaacttaaaaatattttattttacagatatgtattctttatggaagaatcaatcatactcaaagagacaactagaactccaatggattaacgccaccaacaacatccacgacctattctgccactgcgacaaccccacttttcatctactttactgcattaacaagttttctagtgctcaaaaacccgaaactgatcttcgaaacatacaatgcctgcttactggagagcgaatcgctacagaagataccaacaaagaagacgccggagaccctactggatttctagatggagagctagaagacctcttcaaagaagaagatacagaagaaaaagatactcctaccgaaaggtaaagagacgctttaaactaaaaaaagctaaaaaaataactttaaaacaatttcaaccttatactatacaaaaatgtaaagttataggatacaaatgcttatttcaaggcagtacaaaaaacttacctgtaaactatatacaatatatatattccactgtaccacctttttggccgggaggcggagggtggagcataatggtttttagcttaacttctttatttgaagactgggaacatttagaaaacatatggactaaaagtaacttaggattaccacttgtaaaatatagaggatgcattttaaaactataccaaagctatgacacagactatgtagcagtttatgacagatgttggcctatggtagacacagaactaacacacccaaacgcagcacctagtagaatgctacaaaacaaacataaaattgttataccctccagaaaaacaaaccctagaaaaaaaccatataaaaaagtttttattaaaccaccgtctcaaatgataacacaatggtattttcaaagagatatttgcaaactaccactattcatgttaacaaccactgcagtagacctattatatccattttgtaatccacatgcctcatcaaacaacataacattatattcacttaacccatacacttttcaaaacctaaattttacagaatatggcacgtcgggatactcaccaaaaacaataaacaatgttgcttattacctatatgctagtactgaacaaaatttatcaacgctaaaaaaaaaagacattttcacattcattccactacttaacaccaaagactaccaaccaggacaaccatacacagacggttataaagatacaccagaaagttggggaaatcccttccaccataactacttaacagatgacaaagaaactccaaactatacaatttacatttcctcaagcacaactactacatttaaatcaaacgctaaaaacagcgaagacgaaacaacaattagagttactccaattacaggccccatgctttatcaattaagatataatccatcaaaagacaaaggagacacaaacaaaatatatctagtaagcacatctacttcagataaaacaattactccaccaccaaatgaaaatttagttatagaaggcctaccactatttattttactatggagttggacagactgggtaattaaagctaaaataacaacagacataacaaaatacagaactttagttatagacacaaaaatgtttgacactgaattaccacactatattttattagacaaagactttagagaaggaaaagacccatacacaccagatcatacagacggaacaataatacaccctaattactataacagtaaaaactggcacccaaaactactatttcaacaacaaagtttaagagaaattgccatgtcaggccctgctgtacacagagatactaaccataaatatatacaagcatactgcaaatacaaatttctattcacatggggaggctgcccaaagcaactaccaaaaccatttgaaccttgcttacagccaaaatggaccacagccaataacatccctggaagacttgaaattacgaatccacaacatgaccccaaaacagaattatatgactgggactgggatgaagactatgttacagcagaagctgtcgaacgagttaaatgctacacaaaaactgattcaaaaactctctcaacagcaaacagaaacctgccaaaaagcatcacgaaaacatcaaagaaagagaaaacaccagaaaaagaggagcaggaaatactccaacagctcctccagctccgacagcagcgacagctcctccagctccaactgaagtcttacctaccataaaaataaaaaccggcaatataaaagcctatttgttccctccagtaaaaaaaaatagactaatgaatgcctgggaacaacaagaagaaaagcaagatgcagctatatggtgtagaccgcaaagaaaatatttgtatgataagcctacttatcctttctttcctccaactcctataataccaaaaattaactttgatttaatgtattctgaataaacttttcaacgccaacaattttcacttagtggtgtccatttattaaagtttaacttaaataaacagtcaccgcctccctatcaatagggcgccaaaatttaaagggggctccgcccccttacacccccaagggggctccgcccccttacacccccaagggggctccgcccccttacaccccctaataaatattcaacaggaaaaccacctaattagaattgccgaccacaaacggtctcttacttcccctttttacagctacttccctttttactaattattattcatgacattaattaatactcactgtaattccggggaggagctacatacctatataactaactacacttccgaatggctgagtttatgccgccagacggaggctgtatcacttcagtgactacagactgatcttgggcgggagccgaaggtgagtgaaaccaccgtagtctaggcccctaataaatattcaacaggaaaaccacctaattagaattgccgaccacaaacggtctcttacttcccctttttacagctacttccctttttactaattattattcatgacattaattaatactcactgtaattccggggaggagctacatacctatataactaactacacttccgaatggctgagtttatgccgccagacggaggctgtatcacttcagtgactacagactgatcttggg

SEQ ID NO: 1082 - protein, 670 aa, Betatorquevirus sp.
MPAYWRANRYRRYQQRRRRRPYWISRWRARRPLQRRRYRRKRYSYRKVKRRFKLKKAKKITLKQFQPYTIQKCKVIGYKCLFQGSTKNLPVNYIQYIYSTVPPFWPGGGGWSIMVFSLTSLFEDWEHLENIWTKSNLGLPLVKYRGCILKLYQSYDTDYVAVYDRCWPMVDTELTHPNAAPSRMLQNKHKIVIPSRKTNPRKKPYKKVFIKPPSQMITQWYFQRDICKLPLFMLTTTAVDLLYPFCNPHASSNNITLYSLNPYTFQNLNFTEYGTSGYSPKTINNVAYYLYASTEQNLSTLKKKDIFTFIPLLNTKDYQPGQPYTDGYKDTPESWGNPFHHNYLTDDKETPNYTIYISSSTTTTFKSNAKNSEDETTIRVTPITGPMLYQLRYNPSKDKGDTNKIYLVSTSTSDKTITPPPNENLVIEGLPLFILLWSWTDWVIKAKITTDITKYRTLVIDTKMFDTELPHYILLDKDFREGKDPYTPDHTDGTIIHPNYYNSKNWHPKLLFQQQSLREIAMSGPAVHRDTNHKYIQAYCKYKFLFTWGGCPKQLPKPFEPCLQPKWTTANNIPGRLEITNPQHDPKTELYDWDWDEDYVTAEAVERVKCYTKTDSKTLSTANRNLPKSITKTSKKEKTPEKEEQEILQQLLQLRQQRQLLQLQLKSYLP

SEQ ID NO: 1083 - protein, 123 aa, Betatorquevirus sp.
LAERARNLKIFYFTDMYSLWKNQSYSKRQLELQWINATNNIHDLFCHCDNPTFHLLYCINKFSSAQKPETDLRNIQCLLTGERIATEDTNKEDAGDPTGFLDGELEDLFKEEDTEEKDTPTER

SEQ ID NO: 1084 - protein, 60 aa, Betatorquevirus sp.
LFPPVKKNRLMNAWEQQEEKQDAAIWCRPQRKYLYDKPTYPFFPPTPIIPKINFDLMYSE

SEQ ID NO: 1085 - DNA, 3210 bp, Alphatorquevirus sp.
gccataaggcctttatcttcttgccatttagtcaaggggcaattcgggctcgggactggccgggctatgggcaaggctcttaaagcttatcactctaaaaaatgtttcttggcaggccttacaggaaaaagaaaaggacgctgtcactgtctggcgtgccagctccaccggctaaacggtctcgggagatgacctggcgccccccggttcacaatgccgccggcattgataggcagttttttgaagcctgctttcgatgccacgctggttgctgtgggtgcggcagttttattaatcatcttaatgtactggctgctcgctatggctttactggggggccggcgccgccaggtggtcctgggccgcgtgcgcaagtgaggcccgcgcttccagcgccggagcccgacccccacgccgagaaccgtgagccatggcgtggagctggtggtggcaacgatggagacggcgccgctggaaacccaggaggcgccgctggagacgcctacgatggagaagacctagacgcgctgttcgccgccgtcgccgaggacgcagagtaaggaggcggaggtgggcgcgtagacgggggcgacgcagacgatacgctaccagacgaaagagacgtatcaggggtcgccgctatagaaagaaactagtactaactcagtggcaccccagtactatgagacgctgtctaataaagggcatagttccaatggtgatatgcggccacaccagatggaactacaactacgccctccacagcgaggactacaccgaggagggccgctaccctcacggagggtccctcagcaccactacgtggtcccttaaggttctctatgacgaataccttaaacaccgcaacctctggggctatcccaacaatcagctagaccttgccaggtacaaaggtgccaggttcaccttctacagacacaaaaagactgactttatagtgtactttaacagaaagcctccctttaaacttaacaaatacagctgcccttcctatcaccccggcatgcttatgcagcagagacacaagatactaatacccagctacgacaccaaacccaagggcaggccaaaaataactgttagaataaagccccccactctgttagaggacaagtggtacacccagcaggacctgtgtaacgttaacctgttgcaacttgtggtttctgcggctgactttcaacatccgttctgctcaccacaaacgaacactccaaccacaaccttccaggtgttgaaagacatatattatgacaccatgagcatatctgaccctacagacagctacagtagtgttaataatttaactgaaacaaacactttttccaacttttcaaccaagttagaaaatattttatacacacgggcgtcctactggaactcgttccacgccacagagtacgtaaacccaaacattatttacaaagatggagacaaactttttaaagacaatgcagagttaacaaagtggatgacacaaagtagcaaaacaggttttttaactaaaaacaacacttcatttggtaataatagttatagaccaaataaagacaagataacaacagcaagaaacatttactggaatgccctagtgggcaccaacgacctggccactaacataggccaggccagagcagaacggtttgagtaccacctaggctggtactcacctatatttctcagcagacacagaagcaacctgaactttgccagggcctaccaagacgttacatacaacccaaactgtgacaggggagttaaaaatagagtgtggattcagtctctcactaaacccaccacagagtttgacgagaaaaggtgcaagtgcgttgtagaaaacctgcctctgtggagcgccctgtactgctaccaggactttgtagaagaagagctaggtacatcttcggagatactcaactcatgcttactggtagtgcagtgcccgtacacttctccacccatgtatgacaaaaaactacctaacaagggattcgtattctacgactccctgtttggagacggcaaaatgtctgacggacgcggacaggtagacattttctggcaacagcgatggtaccctcgcttagccactcagatgcaagtaatgcatgacattaccaaaaccggacccttttcctaccgagacgacctagtatcaacacaactgactgcaaagtacacctttgactttatgtggggcggtaatatgatctccacacagatcatcaagaacccctgcaaagacagtggactggaacccgcctaccccagtagactccgtcgcgacttacaaattgttgacccatactccatgggcccccagttctcattccacaactgggactacagacatggtctatttggccaagacgctatcgacagagtgtcaaaacaaccaaaagatgctgcagactatcctaacccatacaaaaggcctagatattttccacccacagaccaagccgttcaagagcaagaagaagacttcaatttcctcaaaacagcaccgtcgtcctcagaagagagcgatcaagaagtcctcgaaaaaacgcaagtactccagttccagccagagcagcacaagcaactccacctgcagctcgcagagcagcagcgaatgggagaccaactcagattcctactccaacaaatgttcaaaacccaagccaatctgcacctaaacccatatacatacacccagctataaacaaagtgttcatgttccccccagagggtcccaggcctatcacaacccgggagggatgggaagacgagtactgcaccgccaaacactggggcagacccgtccgttcgtactacacggacatccccttctatccagaggttcctaaagtaccccctcaattctctgtaactttcaaactcggctggaaataaaaatacaaggcctttcactgttcacttgtcggtgtctacctcttaaggtcactaagcactccgagcgttagcgaggagtgcgacccttccccctggtgcaacgccctcggcggccgcgcgctacgccttcggctgcgcgcggcacctcggacccccgctcgtgctgacacgcttgcgcgtgtcagaccacttcgggctcgcgggggtcgggaattttactaaacagactccgagttgccattggacactggagctgtgaatcagtaacgaaagtgagtggggccagacttc

SEQ ID NO: 1086 - protein, 765 aa, Alphatorquevirus sp.
MAWSWWWQRWRRRRWKPRRRRWRRLRWRRPRRAVRRRRRGRRVRRRRWARRRGRRRRYATRRKRRIRGRRYRKKLVLTQWHPSTMRRCLIKGIVPMVICGHTRWNYNYALHSEDYTEEGRYPHGGSLSTTTWSLKVLYDEYLKHRNLWGYPNNQLDLARYKGARFTFYRHKKTDFIVYFNRKPPFKLNKYSCPSYHPGMLMQQRHKILIPSYDTKPKGRPKITVRIKPPTLLEDKWYTQQDLCNVNLLQLVVSAADFQHPFCSPQTNTPTTTFQVLKDIYYDTMSISDPTDSYSSVNNLTETNTFSNFSTKLENILYTRASYWNSFHATEYVNPNIIYKDGDKLFKDNAELTKWMTQSSKTGFLTKNNTSFGNNSYRPNKDKITTARNIYWNALVGTNDLATNIGQARAERFEYHLGWYSPIFLSRHRSNLNFARAYQDVTYNPNCDRGVKNRVWIQSLTKPTTEFDEKRCKCVVENLPLWSALYCYQDFVEEELGTSSEILNSCLLVVQCPYTSPPMYDKKLPNKGFVFYDSLFGDGKMSDGRGQVDIFWQQRWYPRLATQMQVMHDITKTGPFSYRDDLVSTQLTAKYTFDFMWGGNMISTQIIKNPCKDSGLEPAYPSRLRRDLQIVDPYSMGPQFSFHNWDYRHGLFGQDAIDRVSKQPKDAADYPNPYKRPRYFPPTDQAVQEQEEDFNFLKTAPSSSEESDQEVLEKTQVLQFQPEQHKQLHLQLAEQQRMGDQLRFLLQQMFKTQANLHLNPYTYTQL

SEQ ID NO: 1087 - protein, 152 aa, Alphatorquevirus sp.; identical to SEQ ID NO: 146

SEQ ID NO: 1088 - protein, 59 aa, Alphatorquevirus sp.; identical to SEQ ID NO: 147

SEQ ID NO: 1089 - DNA, 3209 bp, Alphatorquevirus sp.
cattttaggccttccggactaccaaaatggctcaaggggcaattcgggctcgggactggccgggccctgggcaaggctcttaaaaatgcacttttctaaaataagcagaaagaaaaggaaactgctactgcaaactgtgccgcttgcagagatcgaacggactaccatgagctggtccagacccgtccaaaatgtttccattctcgaacaaaactggttcgaatcctgcctcagatcacacgcatgcttctgtggctgtaataatcctattattcattttaataacattgctactcgctttaactatttgcctactgccaatccgcctgtgggaccctcccaaccgcccacacgcccgccgtcccgcttgagaccccttcccgctctccccgcgcctcccgctgatccacaagcaccatgggctggggctggtggctcaagcggtggaggagaagaaagaaaccagcgtggaagaagtggagaacgcgcagatggagaagatttcgacgcagaagacctaaacgcacttatggccgccgtcgaagaagacgaacagtaaggaggcgccgcggtagacgactgaggaggagggggtggactaggagacggtacataagacgcagacgcaaaaagaaaaagctagtactgacccagtggaacccccaggacgttaggagatgcacaataaggggcataataccccttatcatgtgcggtgcaaacactgccagttttaattatggcatgcacagcgatgacagcaccccccagccagagaagttcgggggaggcatgagcacagtaacattcagtttatttgtactatatgaccagtacaccagacacctaaacaggtggtcgtacccaaacgaccagctagacctagccagatacagaggctgcaaatttaaattctacagagacacctcaacagactttatagtcacctatgacattaatccacccatgaaaaacacagaactaagcagccctaacacacacccaggcatgcttatgcagcaaaaaagaaaggtactcgtccctagctgggacacgtatcccagaggcagaaaatatgtcctagttaagataccaccccccaaactgtttgaagaccactggtacactcagccagacttgtgcaaagttcctcttgtaactttgcggtcaactgccgctgacctcaaacatccgttctgctcaccacaaacgaacaacccttgcaccaccttccaggtgttgcgcacccagtataacagtatgataggcttcccctttaactataacccatcagaccaaactcaaacacaaaagttacaaacatttgaaaaatggctatattcatctagcacacactatcagacatttgccactgaagctaaccttagacccagacagtacaatgcagacggaactcaaaataaggactacagcaagttacaatccacctggacaactactatatatgcaaaaaaaacagatagcaactttggctacacatcatacaacttttcaggagaggatggctataagtatgtaacacaaattagacagtggtactggacacaactaacatcctggacacaaacagtccctcacataaacagcaccttttccaatgccattcacccagagtttgaataccacgcgggctggtactcaaacatatttataggccccaacagatttaatatacagtttagagcagcctacatggatgtcacctacaacccaataaatgacaaaggccacctgaacaaagtatggttccagtacagcacaaaacccaccacagactttgtagaaaagcaggccaaatgtttactgcaaaacctgcctttgtggagcatgctgttcggctactcagagtatgtagaaagtcagctaggcccctttcaggaccacgaaacagtaggcctagtaatagtacagtgcccatacacagtaccccccatgtatgacaaagacaatccagacatggggttcgtgttctatgacacacactttggcaacggaaagctaggcaacggactgggccaggtacccagatactggcagcagagatggtaccccatcttaaagagacagaaacaagtcatgaatgacatctgcaagacgggaccatttgcgtacagagacgagagactgcaagctgacttgactgcaggatactcatttaagtttaactggggtggtgacttaatctaccaccaggttgtcaaaaacccatgcgactcaggaggactggtgccttccgactccagtagattcaagcgggacgtacaagttgttagcccgctcaccatgggacccagactcatcttccactcgttcgaccaaagacgggggctctttactgacagagctatcaaaagaatgtacgatgaacagattaatgttccagactttacagaacagcctaaaatcccccgacttttccccccagtcgagctcaaagaaagggaagaaaaagactcagattcggagacagagacgatcagcagctcccaagaaaaagaagcgaaaaggcaagaggcgctaccagtccagcagcagctccgactccaactgcgagaacaacagcgactccgagtccacttgcagcacctcttcctccaactccagaaaaccaaagcaaatttacatttaaacccactatcttttcagcaagagataagctagacatgtttggtaacattatagatagaaagcctacctcccaggactgggagacagagtacatagcctgtagaatatttgacaggccccccagacagcaactcacagaccctcctttctatccttggatgcctaagcctaaacctgcatgccgtgtaacctttaagcttggctttcaataaacaaggccgtgggagtttcacttctcggtgtctacctctataagtcactaagctctccgagcgaagcgaggagagcgaccctaaaccaaggggcaactccctcgaagtccggcgctacgcgcttcgcgctgcgccggacatctcggaccccccctcgacccgaatcgcttgcgcgattcggacctgcggcctcggggggggtcgggggctttattaaacagactccgaggtgccattggacactgagggggtgaacagcaacgaaagtgagtggggccagacttcgccataaggcctttatcttcttgccatttgtcagtgttcggggtcgccataggcttcggcctc

SEQ ID NO: 1090 - protein, 754 aa, Alphatorquevirus sp.
MGWGWWLKRWRRRKKPAWKKWRTRRWRRFRRRRPKRTYGRRRRRRTVRRRRGRRLRRRGWTRRRYIRRRRKKKKLVLTQWNPQDVRRCTIRGIIPLIMCGANTASFNYGMHSDDSTPQPEKFGGGMSTVTFSLFVLYDQYTRHLNRWSYPNDQLDLARYRGCKFKFYRDTSTDFIVTYDINPPMKNTELSSPNTHPGMLMQQKRKVLVPSWDTYPRGRKYVLVKIPPPKLFEDHWYTQPDLCKVPLVTLRSTAADLKHPFCSPQTNNPCTTFQVLRTQYNSMIGFPFNYNPSDQTQTQKLQTFEKWLYSSSTHYQTFATEANLRPRQYNADGTQNKDYSKLQSTWTTTIYAKKTDSNFGYTSYNFSGEDGYKYVTQIRQWYWTQLTSWTQTVPHINSTFSNAIHPEFEYHAGWYSNIFIGPNRFNIQFRAAYMDVTYNPINDKGHLNKVWFQYSTKPTTDFVEKQAKCLLQNLPLWSMLFGYSEYVESQLGPFQDHETVGLVIVQCPYTVPPMYDKDNPDMGFVFYDTHFGNGKLGNGLGQVPRYWQQRWYPILKRQKQVMNDICKTGPFAYRDERLQADLTAGYSFKFNWGGDLIYHQVVKNPCDSGGLVPSDSSRFKRDVQVVSPLTMGPRLIFHSFDQRRGLFTDRAIKRMYDEQINVPDFTEQPKIPRLFPPVELKEREEKDSDSETETISSSQEKEAKRQEALPVQQQLRLQLREQQRLRVHLQHLFLQLQKTKANLHLNPLSFQQEIS

SEQ ID NO: 1091 - protein, 167 aa, Alphatorquevirus sp.; identical to SEQ ID NO: 723

SEQ ID NO: 1092 - protein, 58 aa, Alphatorquevirus sp.; identical to SEQ ID NO: 724

SEQ ID NO: 1093 - DNA, 3209 bp, Gammatorquevirus sp.
cgggagcccgaggtgagtgaaaccaccgaggtctaggggcaattcgggctagggcagtctagcggaacgggcaagaaacttaaaactatgctttatttcagatgtcacacttttttaaagaatgtacctacaacaaagagaccagagaacaaatgtggatgagtgttaccactgatttccatgactccatttgcagctgtacaactccaattgctcactttctagacattatatttccagaaggacatcaagacaaagaccacaccataagacaaatacttaccagagactttaaagcatgcctttctggtggaatagaagaaagaggttttggtggggaaacaggcgctacagaagaaagagatggcctaaaagaagaaaaagaagacccagatatagaagatacagaactaaacgcacttctcgccgccgtagaagacgcagaaaaaaggtaagaagaaaaagaaagactttacctattttacaatggcaacctgactctattagaaactgtaaaattaaagggtataactgtttagtattaggagctgatggaactcaatacctatgctatactaatgaaagatttacatttactccaccacagtatgcaggagggggtggatttggagtacaaacatttaccttacaatatttatatgaggaaagtaaatttagaaacaacatatggactgcctcaaatttatatacagacttatgcagataccttagagctaagttttacttttatagacaccaaaaatgtgactttgtattagcatactctagacaaggcccattccaattaaacaaatacacatataccatgacccatccatatatgctaatgcaagctagacacaaaaaaatattactaagtaaactagttaacccaaagggtaaactgtataaaaaattaattataagaccaccaaagcaaatgatcagtaaatggttttttcaaaaacaattttcaacccaaaacttactgcagctatcagcagctgcagctagctttgcttatcccagactatcctgttgtaatgaaaatcaaacacttactgtatactatttaaatcctcagttctttcagcacagtacatggggtcaagtactaggaaaaacatactataaaccatatgatcacatatcagaaaacataatctttacatatccagatggtagatctacaaaaacatacagcccaatacctgactttaaaaaaaaaacagaatcacaacaatactatgaaagcatttcatatgaaaatggctggttttcaaagaaagtgttaactgccacaaaagtagaagaccatagccaagcatatgcacatttgcctatagctgcatgtagatataatccagcagaagacaatggtcaaggtaataaagtatacttagtatcaattttaacagggtactttgacaagccttcagataaagatttactatatgaaaatgcacccctatggctcattttctatggctactggagttttattaaaaaaataaaagacccaagcttcatgagcctacacatgtttgttattagaagccaatttttaaaacctcaaccatcagctatcacaaaagacttttttccaattatagatttaaactttacaataggtttaaatccttacaaagcatacatttcttcaacacaaaaaaaactgtggtaccctacatgtgaccaccaaatagaaactataaatagctttgtacaaacaggtccatacatacccaagtattcagatgacagggacagtacatgggaactcccttaccattatctgttttattttaagtggggaggccctgaaacaccaccaaaagaaattgcagatccaaaaacaaaaaacatctatactgtgcccgatacaatcgaaggagcagtacagatatgcaaccccctcaagctctcaacagagagcctacttcacaactgggatattagaaggggcctcattacagaaacagctcttaaaagaatgtgcgaagacttcgaaactgatacaactttccaaccagatacagaccagccacctcccaaacgacccaagctggcaggagaactacaacacatccaagaaacaaacaaagagatccaaacatgtctccaggcgctctgcgaagaaaatacctaccaagaaacgccacaaacacaagaagacatcatcaagctcatcaacaagcagcaggagcagcagcagcaactcaagcacaacatcataatgctcctacaagaaatgaaacacaaacaacaaatgctacaactaaccacaggactcctagactaacaccaataaaaccaggctttgaaatggaaactgaactagaactttgcaatgcctttaaaagatacccaagaaaatttcatgaagacccctgtacatatccctggctaccaaatcccatacctaaagtctgttttgcccttagatttaagcactaggcattcactgttcacttagtaaagcatgtttaataaagttaacaccccaaaaaaattgtaaaaaaaaaaaaaaaaaaaataaaaaattgcaaaaattcggcgctcgcgcgcgctgcgcgcgcgcgagcgccgtcacgcgccggcgctcgcgcgccgcgcgtatgtgctaacacaccacgcacctagattggggtgcgcgcgctagcgcgcgcaccccaatgcgccccgccctcgttccgacccgcttgcgcgggtcggaccacttcgggctcgggggggcgcgcctgcggcgcttatttactaaacagactccgagtcgccatttggcccccccccccctaagctccgcccccctcatgaatattcataaaggaaaccacaaaatttgaattgccaaccacaaactgccatatgctaattacttccccttttacacagtaaaaaggggaagtggggggggggagagcccccccacaccccccgcggggggggcaaagcccccccccgcaccccccctacgtcactaaccacgcccccgccgccatcttgggtgcggcggggcggggaataaaatggcgggaaccaatcattttatactttcactttccaattaaaatttgccacatcacagcaaaggggtggagactttaaaactatataaccaagtggggtggcgaatggctgagtttaccccgctagacggtgcagggaccggatcgagcgcagcgaggaggtccccggctgcccatggg

SEQ ID NO: 1094 - protein, 667 aa, Gammatorquevirus sp.
MPFWWNRRKRFWWGNRRYRRKRWPKRRKRRPRYRRYRTKRTSRRRRRRRKKVRRKRKTLPILQWQPDSIRNCKIKGYNCLVLGADGTQYLCYTNERFTFTPPQYAGGGGFGVQTFTLQYLYEESKFRNNIWTASNLYTDLCRYLRAKFYFYRHQKCDFVLAYSRQGPFQLNKYTYTMTHPYMLMQARHKKILLSKLVNPKGKLYKKLIIRPPKQMISKWFFQKQFSTQNLLQLSAAAASFAYPRLSCCNENQTLTVYYLNPQFFQHSTWGQVLGKTYYKPYDHISENIIFTYPDGRSTKTYSPIPDFKKKTESQQYYESISYENGWFSKKVLTATKVEDHSQAYAHLPIAACRYNPAEDNGQGNKVYLVSILTGYFDKPSDKDLLYENAPLWLIFYGYWSFIKKIKDPSFMSLHMFVIRSQFLKPQPSAITKDFFPIIDLNFTIGLNPYKAYISSTQKKLWYPTCDHQIETINSFVQTGPYIPKYSDDRDSTWELPYHYLFYFKWGGPETPPKEIADPKTKNIYTVPDTIEGAVQICNPLKLSTESLLHNWDIRRGLITETALKRMCEDFETDTTFQPDTDQPPPKRPKLAGELQHIQETNKEIQTCLQALCEENTYQETPQTQEDIIKLINKQQEQQQQLKHNIIMLLQEMKHKQQMLQLTTGLLD

SEQ ID NO: 1095 - protein, 117 aa, Gammatorquevirus sp.
MSHFFKECTYNKETREQMWMSVTTDFHDSICSCTTPIAHFLDIIFPEGHQDKDHTIRQILTRDFKACLSGGIEERGFGGETGATEERDGLKEEKEDPDIEDTELNALLAAVEDAEKR

SEQ ID NO: 1096 - protein, 113 aa, Gammatorquevirus sp.
MSPGALRRKYLPRNATNTRRHHQAHQQAAGAAAATQAQHHNAPTRNETQTTNATTNHRTPRLTPIKPGFEMETELELCNAFKRYPRKFHEDPCTYPWLPNPIPKVCFALRFKH

SEQ ID NO: 1097 - DNA, 3208 bp, Alphatorquevirus sp.
cattttaggccttccggactaccaaaatggctcaaggggcaattcgggctcgggactggccgggccctgggcaaggctcttaaaaatgcacttttctaaaataagcagaaagaaaaggaaactgctactgcaaactgtgccgcttgcagagatcgaacggactaccatgagctggtccagacccgtccaaaatgtttccattctcgaacaaaactggttcgaatcctgcctcagatcacacgcatgcttctgtggctgtaataatcctattattcattttaataacattgctactcgctttaactatttgcctactgccaatccgcctgtgggaccctcccaaccgcccacacgcccgccgtcccgcttgagaccccttcccgctctccccgcgcctcccgctgatccacaagcaccatgggctggggctggtggctcaagcggtggaggagaagaaagaaaccagcgtggaagaagtggagaacgcgcagatggagaagatttcgacgcagaagacctaaacgcacttatggccgccgtcgaagaagacgaacagtaaggaggcgccgcggtagacgactgaggaggagggggtggactaggagacggtacataagacgcagacgcaaaaagaaaaagctagtactgacccagtggaacccccaggacgttaggagatgcacaataaggggcataataccccttatcatgtgcggtgcaaacactgccagttttaattatggcatgcacagcgatgacagcaccccccagccagagaagttcgggggaggcatgagcacagtaacattcagtttatttgtactatatgaccagtacaccagacacctaaacaggtggtcgtacccaaacgaccagctagacctagccagatacagaggctgcaaatttaaattctacagagacacctcaacagactttatagtcacctatgacattaatccacccatgaaaaacacagaactaagcagccctaacacacacccaggcatgcttatgcagcaaaaaagaaaggtactcgtccctagctgggacacgtatcccagaggcagaaaatatgtcctagttaagataccaccccccaaactgtttgaagaccactggtacactcagccagacttgtgcaaagttcctcttgtaactttgcggtcaactgccgctgacctcaaacatccgttctgctcaccacaaacgaacaacccttgcaccaccttccaggtgttgcgcacccagtataacagtatgataggcttcccctttaactataacccatcagaccaaactcaaccacaaaagttaaaaacatttgaaaaatggctatattcatctagcacacactatcagacatttgccactgaagctaaccttagacccagacagtacaatgcagacggaactcaaaataaggactacagcaagttacaatccacctggacaactactatatatgcaaaaaaaacagatagcaactttggctacacatcatacaacttttcaggagaggatggctataagtatgtaacacaaattagacagtggtactggacacaactaacatcctggacacaaacagtccctcacataaacagcaccttttccaatgccattcacccagagtttgaataccacgcgggctggtactcaaacatatttataggccccaacagatttaatatacagtttagagcagcctacatggatgtcacctacaacccaataaatgacaaaggccacctgaacaaagtatggttccagtacagcacaaaacccaccacagactttgtagaaaagcaggccaaatgtttactgcaaaacctgcctttgtggagcatgctgttcggctactcagagtatgtagaaagtcagctaggcccctttcaggaccacgaaacagtaggcctagtaatagtacagtgcccatacacagtaccccccatgtatgacaaagacaatccagacatggggttcgtgttctatgacacacactttggcaacggaaagctaggcaacggactgggccaggtacccagatactggcagcagagatggtaccccatcttaaagagacagaaacaagtcatgaatgacatctgcaagacgggaccatttgcgtacagagacgagagactgcaagctgacttgactgcaggatactcatttaagtttaactggggtggtgacttaatctaccaccaggttgtcaaaaacccatgcgactcaggaggactggtgccttccgactccagtagattcaagcgggacgtacaagttgttagcccgctcaccatgggacccagactcatcttccactcgttcgaccaaagacgggggctctttactgacagagctatcaaaagaatgtacgatgaacagattaatgttccagactttacagaacagcctaaaatcccccgacttttccccccagtcgagctcaaagaaagggaagaaaaagactcagattcggagacagagacgatcagcagctcccaagaaaaagaagcgaaaaggcaagaggcgctaccagtccagcagcagctccgactccaactgcgagaacaacagcgactccgagtccacttgcagcacctcttcctccaactccagaaaaccaaagcaaatttacatttaaacccactatcttttcagcaagagataagctagacatgtttggtaacattatagatagaaagcctacctcccaggactgggagacagagtacatagcctgtagaatatttgacaggccccccagacagcaactcacagaccctcctttctatccttggatgcctaagcctaaacctgcatgccgtgtaacctttaagcttggctttcaataaacaaggccgtgggagtttcacttctcggtgtctacctctataagtcactaagctctccgagcgaagcgaggagagcgaccctaaaccaaggggcaactccctcgaagtccggcgctacgcgcttcgcgctgcgccggacatctcggaccccccctcgacccgaatcgcttgcgcgattcggacctgcggcctcgggggggtcgggggctttattaaacagactccgaggtgccattggacactgagggggtgaacagcaacgaaagtgagtggggccagacttcgccataaggcctttatcttcttgccatttgtcagtgttcggggtcgccataggcttcggcctc

SEQ ID NO: 1098 - protein, 754 aa, Alphatorquevirus sp.
MGWGWWLKRWRRRKKPAWKKWRTRRWRRFRRRRPKRTYGRRRRRRTVRRRRGRRLRRRGWTRRRYIRRRRKKKKLVLTQWNPQDVRRCTIRGIIPLIMCGANTASFNYGMHSDDSTPQPEKFGGGMSTVTFSLFVLYDQYTRHLNRWSYPNDQLDLARYRGCKFKFYRDTSTDFIVTYDINPPMKNTELSSPNTHPGMLMQQKRKVLVPSWDTYPRGRKYVLVKIPPPKLFEDHWYTQPDLCKVPLVTLRSTAADLKHPFCSPQTNNPCTTFQVLRTQYNSMIGFPFNYNPSDQTQPQKLKTFEKWLYSSSTHYQTFATEANLRPRQYNADGTQNKDYSKLQSTWTTTIYAKKTDSNFGYTSYNFSGEDGYKYVTQIRQWYWTQLTSWTQTVPHINSTFSNAIHPEFEYHAGWYSNIFIGPNRFNIQFRAAYMDVTYNPINDKGHLNKVWFQYSTKPTTDFVEKQAKCLLQNLPLWSMLFGYSEYVESQLGPFQDHETVGLVIVQCPYTVPPMYDKDNPDMGFVFYDTHFGNGKLGNGLGQVPRYWQQRWYPILKRQKQVMNDICKTGPFAYRDERLQADLTAGYSFKFNWGGDLIYHQVVKNPCDSGGLVPSDSSRFKRDVQVVSPLTMGPRLIFHSFDQRRGLFTDRAIKRMYDEQINVPDFTEQPKIPRLFPPVELKEREEKDSDSETETISSSQEKEAKRQEALPVQQQLRLQLREQQRLRVHLQHLFLQLQKTKANLHLNPLSFQQEIS

SEQ ID NO: 1099 - protein, 167 aa, Alphatorquevirus sp.; identical to SEQ ID NO: 723

SEQ ID NO: 1100 - protein, 58 aa, Alphatorquevirus sp.; identical to SEQ ID NO: 724

SEQ ID NO: 1101 - DNA, 3208 bp, Alphatorquevirus sp.
cgggtgccggaggtgagtttacacaccgaagtcaaggggcaattcgggctcgggactggccgggctatgggcaaggctcttaaaaaagccatgtttctcggtaaactttacagaaagaaaagggcactgctactgccttgcctgccaactccaaagaaaaaactacctactgatatgagctactggtgtcctcctgttcacgatgtacgcgggcgcgaacatcagtggtatgaggcttgttaccgctctcatggtgctatgtgtggctgtggcaattttattaatcatcttgcttatctgggtgagcgttatggcttccgaccgggcaatagaggccctggctcgtctggtgtaggaggcccgccaccccagctccgtcgagccctgccggcacccccggctccggagccgtcccagcaggctaacaacaacaacaaccagagatggcctggggatggtggaaacgaaggaggcgccgctggtggagaggcctcttcaggagacgtcgctttgccagaagacgacctcgatggactgctcgccgccctagacgacgaagagtaaggaggcgcagacgatggaggagggggcgaccaagacgcagacagtttaaaaagagacgctacagacgtaggagaaagagacagaaaataattataaaacagtggcaaccagggatggtcagacgctgctatataatagggtacatggcgggactaataagtgggcacggaacttttgccagaaactatagcagccacttagaggacagaataagcaagggaccctttggagggggacacgccactttaaggttctccctaacagtactctacaacgagtttctaagacacttaaacttttggacatatagtaacgaaaacctagagctagccaggtactttggggccacattcaccttttacagacaccctacagcagactttatagtcacctacaacagaaaaactccactaggaggaaacatactaacagcaccctcactacacccaggaaatgccatgctaacaaaaagaaaaatacttatacccagcctagaaaccagaccaaagggcaaaaaatacaaaaaactaagaataggaccccccactctactaactgacaagtggtactttcaaaaggacatttgcgacttaacactgttaaacctcaacgtggtgcaagcggacttgcggtttccgttctgctcaccacaaactgacaacacttgcatcagtttccaggttctaagttccgtttataacggcttcattagcataaccaactgggatgatagtggactagataacagaataaaagactttttaagagcagcatttccaatatcaggaacaaaactaacatctttaaaccaattaaacacttttagaacagaaggatgctttagccacccacagctacataaaccatcaacacttagttcaccaccaagtacagtacaagcaaaccaatactttgccacactagacgggttgtggggagacccaatatacaacaactcacttaacagctcaaccccagcctcaaatagtaaaccaacacaagatgatataataaataaaatactaaacaacatgacaaattactggaataaatttaaacaagaggaatttccaatagaatggagaggaaaaaaatgcttctgtcacctaacaggcattttcagccctccattcctaacatcaggcagaataagcccagaaatatttggactgtacaaagaaataatttacaacccttacacagacaaaggcaaaggtaacatggtgtggatagacccacttagcaaagaaggcttcatatacagtgacaaacaaagcaaatgtctactaaaagacatgccactatggtgtgcactatttggatacacagactggattaaaaaagaactaaacaactgggaagcaccatttaattacagattactaatagtatgcccgtacacattcccaaaactatacaacgagacactaccaacatacgggtacgtgccctacagctaccaatttgggtcaggacaaatgccagacggcagtaactacgtacctataaagtggagaggcaaatggtatccaaacatgatacaccaacaaagagttatggaggatatagcaataacaggcccctttgcaccaaaacaaaacgtacctagcgtacaaatgagcataaaatacaaatttaaatttaactggggtggaaatcctattcttgaacagattgtcagagacccctgcacacaacccacctacgaaatacccggagccagtaacgtccctccaagagtacaagtcattgacccgagggtcgtcgggccacacctcacattcaaaagctgggacattaggcgtgaccaatttagctcaaaaagtattaaaagaatgtcagaacaatcagaaattgctgaaccttttttcgaaggcccaaaaaggccaagaatcgacctccagccacaagcgcagcaagaagaagactccggtacgagactccagagagaaccgagaccctgggagtcggaagaagagatggagagcagccagcaaagcgaagaagagacgacgttatccgtccgagagcagttgcagcagcaataccaagagcagctcagaatcagacagggaatcaaacacctcttcgagcagctagtaaaaacccagcagggagtccacgtacatccatccctcttgtaggcccaaaacagtatatgttcccagagagggccccaaaaccagcccccaggagcggggactgggagatggagtacctcatgtgtaaaatctttaacaggccccccagaagcaaccttacagacatccctttctacccctactgcaaaaaacaatacaatgtaacctttcagcttaactacaaataaactaggccgtgggagtttcacttgtcggtgtctacctcttaaggtcactaagcactccgagcgttagcgaggagtgcgacccttccccctgactcgcgcatgcgcggggccccccccgcggggggctccgccccccggccccccccgtgctacgtcactaaccacgtggcattcgcaggccaaccctggtgtacgtcgtgcacttcctgggcgtggtgtatgtaattatataaagcgcagcacttccgaatggctgagtttttgctgcccgtccgcggagaggaaccacggcaggggatccgaacgtcccaaggg

SEQ ID NO: 1102 - protein, 754 aa, Alphatorquevirus sp.
MAWGWWKRRRRRWWRGLFRRRRFARRRPRWTARRPRRRRVRRRRRWRRGRPRRRQFKKRRYRRRRKRQKIIIKQWQPGMVRRCYIIGYMAGLISGHGTFARNYSSHLEDRISKGPFGGGHATLRFSLTVLYNEFLRHLNFWTYSNENLELARYFGATFTFYRHPTADFIVTYNRKTPLGGNILTAPSLHPGNAMLTKRKILIPSLETRPKGKKYKKLRIGPPTLLTDKWYFQKDICDLTLLNLNVVQADLRFPFCSPQTDNTCISFQVLSSVYNGFISITNWDDSGLDNRIKDFLRAAFPISGTKLTSLNQLNTFRTEGCFSHPQLHKPSTLSSPPSTVQANQYFATLDGLWGDPIYNNSLNSSTPASNSKPTQDDIINKILNNMTNYWNKFKQEEFPIEWRGKKCFCHLTGIFSPPFLTSGRISPEIFGLYKEIIYNPYTDKGKGNMVWIDPLSKEGFIYSDKQSKCLLKDMPLWCALFGYTDWIKKELNNWEAPFNYRLLIVCPYTFPKLYNETLPTYGYVPYSYQFGSGQMPDGSNYVPIKWRGKWYPNMIHQQRVMEDIAITGPFAPKQNVPSVQMSIKYKFKFNWGGNPILEQIVRDPCTQPTYEIPGASNVPPRVQVIDPRVVGPHLTFKSWDIRRDQFSSKSIKRMSEQSEIAEPFFEGPKRPRIDLQPQAQQEEDSGTRLQREPRPWESEEEMESSQQSEEETTLSVREQLQQQYQEQLRIRQGIKHLFEQLVKTQQGVHVHPSLL

SEQ ID NO: 1103 - protein, 165 aa, Alphatorquevirus sp.
MGKALKKAMFLGKLYRKKRALLLPCLPTPKKKLPTDMSYWCPPVHDVRGREHQWYEACYRSHGAMCGCGNFINHLAYLGERYGFRPGNRGPGSSGVGGPPPQLRRALPAPPAPEPSQQANNNNNQRWPGDGGNEGGAAGGEASSGDVALPEDDLDGLLAALDDEE

SEQ ID NO: 1104 - protein, 122 aa, Alphatorquevirus sp.
LGVGRRDGEQPAKRRRDDVIRPRAVAAAIPRAAQNQTGNQTPLRAASKNPAGSPRTSIPLVGPKQYMFPERAPKPAPRSGDWEMEYLMCKIFNRPPRSNLTDIPFYPYCKKQYNVTFQLNYK

SEQ ID NO: 1105 - DNA, 3208 bp, Alphatorquevirus sp.
cgggtgccggaggtgagtttacacaccgaagtcaaggggcaattcgggctcaggactggccgggctttgggcaaggctcttaaatatgcacttttctcgaataagcagaaagaaaaggaaagtgctactgctttgcgtgccagcaactaagaaaaaaccaactgctatgagcttctggagacctccggtgcacaatgtcacggggatccagcgcctgtggtacgagtcctttcaccgtggccatgctgctttttgtggttgtggggatcctatattacacattactgcacttgctgagacatatggccatccaacaggcccgagaccttctgggtcatcgggaatagaccccactccgcccatccgtagagccaggcctgccccggccgctccggaaccctcacaggttgactccagaccggccctgccatggcatggagatggtggaagcgacggaggcgctggtggctccgcaagcggtggacccgtggcagacttcgcagacgatggcctcgaccagctcgtcgccgccctagacgacgaagagtaaggaggcgcagacgatggaggagggggcgacctagacgcagactgtaccgacgctacagacgcaaaaaacgtaggagacgaaagcccaaaatagtgttaaaacaatggcagccagacattacaaaaaggtgctacataataggctacattcctgccataatatgtggggctggcacctggtcccacaactacaccagccacctgttagacattatccccaagggaccctttggaggagggcacagcactatgagattctccctaaaagtactctttgaagaacacctgagacacttaaacttctggacaaggagcaaccaagacctagaactcataagatactttagatgctcctttaaattttatagagactcagacacagactacatagtaaagtacagcagaaaaactcccctgggaggcaacagactgacagcacctagcctacaccccggggtacaaatgcttagcaaaaacaaaatattagtacctagctacgctacaaaacccaagggtggtagctatgtaaaagtaaccatagcaccccccacactactaactgacaagtggtactttagcaaagacgtttgtgacacaacattggttaacatagacgttgtactctgcaacttgcggtttccgttctgctcaccacaaactgacaacccttgcatcacattccaagttctgcattccatctacaacgacttcctctctatagtagatactgacaactataaaaatcagtttgttacaaacctatctacaaaagtaggtactgactggggcaaaagacttaacactttcagaacagaaggctgctactcacacccaaaactacccaaaaagacagtaacacctgcaaatgatacaacatactttactgtaccagacggtttgtggggagatgcagtatttaatacaaaccatcgcagcataataactaaaaatatggaatcttatagcacctcagcaaaaaatagaggagtgcaaggagaccctgcattctcacacctaacaggcatatactcacctccctggctaacaccagggagaatatccccagaagtacctggactttacacagacgtgacttacaacccatacgctgacaaaggagtgggcaacagaatatgggttgactactgtagtaaaaaaggcaacaaatatgacaacacaagtaaatgccttttagaagacctgccactatggatggcctcctttggctacgtagactgggtaaaaaaagagactggcaactggggcattccactatgggccagagtacttataagaagcccatatactgttccaaaactatataacgaagcagaccccaactacggatgggttccaatctcctactactttggagaaggcaaaatgccaaacggagacatgtacgtaccatttaaagtaagaatgaaatggtacccttcaatgtggaaccaagaaccagttttaaatgacttagcaaagagcggaccgtttgcatacaaaaacaccaaaacaagtgtgactgtgactgccaaatataaatttacatttaacttcgggggcaaccccgtaccctcacagattgtacaagatccctgcacacagcccacctacgacatccccggcaccggtaacctgcctcgcagaatacaagtcattgacccgaaagtcctcggtccccactattccttccaccggtgggacttcaggcgtggcctctttggctcacaagctattaaaagagtgtcagaacaaccaacaacttctgagtttttattctcaggcccaaagagacccagaatcgatcaaggcccttacatgccgccagaaaaaggctcaggttcactccaaagagaaccgagaccgtggagcagctcggagaccgaggcagagacagaagccccctcggaagaggagccggagaaccaagaagaacaagtactccagttgcagctcagacagcagctccgagaacagcgaaaactcagacagggaatccagtgcctattcgagcaactaataacaacccagcagggagtccacaaaaacccattgttagagtaggccccgagcagtggctgtttcctgagagaaagccaaagccaccgccctcagcccaagactgggccgaggaatacactgcctgtaaatactgggatagaccacctagaaaattccttacagatatgccattctatactcactgcaaaaccaattacaatgtaacctttatgcttaactatcaataaacatgccaccttcactgttctaggccgtgggagtttcacttgtcggtgtctacctctaaaagtcactaagcactccgagcgccagcgaggagtgcgaccctccccccggtagcaacttcttcggagtccggcgctacgccttcggctgcgccggacacccgcccagtagggggcgccatgcgcccccccccgcgcatgcgcggggcccccccccacggggggctccgccccccggcccccccccgtgctacgtcactaaccacgtgcactccacagaccagtccaagtctacgtcgtgcacttcctgggcatggtttacatcctgatataagtaactgcacttccgaatggctgagttttccacgcccgtccgcggagaggagccacggcaggggatccgaacgtcctgaggg

SEQ ID NO: 1106 - protein, 726 aa, Alphatorquevirus sp.
MAWRWWKRRRRWWLRKRWTRGRLRRRWPRPARRRPRRRRVRRRRRWRRGRPRRRLYRRYRRKKRRRRKPKIVLKQWQPDITKRCYIIGYIPAIICGAGTWSHNYTSHLLDIIPKGPFGGGHSTMRFSLKVLFEEHLRHLNFWTRSNQDLELIRYFRCSFKFYRDSDTDYIVKYSRKTPLGGNRLTAPSLHPGVQMLSKNKILVPSYATKPKGGSYVKVTIAPPTLLTDKWYFSKDVCDTTLVNIDVVLCNLRFPFCSPQTDNPCITFQVLHSIYNDFLSIVDTDNYKNQFVTNLSTKVGTDWGKRLNTFRTEGCYSHPKLPKKTVTPANDTTYFTVPDGLWGDAVFNTNHRSIITKNMESYSTSAKNRGVQGDPAFSHLTGIYSPPWLTPGRISPEVPGLYTDVTYNPYADKGVGNRIWVDYCSKKGNKYDNTSKCLLEDLPLWMASFGYVDWVKKETGNWGIPLWARVLIRSPYTVPKLYNEADPNYGWVPISYYFGEGKMPNGDMYVPFKVRMKWYPSMWNQEPVLNDLAKSGPFAYKNTKTSVTVTAKYKFTFNFGGNPVPSQIVQDPCTQPTYDIPGTGNLPRRIQVIDPKVLGPHYSFHRWDFRRGLFGSQAIKRVSEQPTTSEFLFSGPKRPRIDQGPYMPPEKGSGSLQREPRPWSSSETEAETEAPSEEEPENQEEQVLQLQLRQQLREQRKLRQGIQCLFEQLITTQQGVHKNPLLE

SEQ ID NO: 1107 - protein, 164 aa, Alphatorquevirus sp.
LAGLWARLLNMHFSRISRKKRKVLLLCVPATKKKPTAMSFWRPPVHNVTGIQRLWYESFHRGHAAFCGCGDPILHITALAETYGHPTGPRPSGSSGIDPTPPIRRARPAPAAPEPSQVDSRPALPWHGDGGSDGGAGGSASGGPVADFADDGLDQLVAALDDEE

SEQ ID NO: 1108 - protein, 56 aa, Alphatorquevirus sp.
LFPERKPKPPPSAQDWAEEYTACKYWDRPPRKFLTDMPFYTHCKTNYNVTFMLNYQ

SEQ ID NO: 1109 - DNA, 3207 bp, Alphatorquevirus sp.
cgggtgccggaggtgagtttacacaccggagtcaaggggcaattcgggctcgggactggccgggctatgggcaaggctcttaaggtaatcattcttaatatgtttctcggcagaccttacagacaaaagaaaaggaaactgcttctgcagaacctgtcagctacaacgccgcaacctattgctatgacctcctgggtgccccctacacaacatgtctctgcccgcgaagaagactggttccgaggagtctactgtactcatagagctttctgtggctgtggtgatcctgttagccatcttgctgctctggctgctgcatttggttttcaaccagggccgccgccgagtggtggtcctagggagaggctcacaccaccagtagtccgctccggcctgcctgcgctgccgcctccggccaatccgggaccctcacgaccatgtggtggttccgaaggaggccgtggaggagaaggccgcagagacgctggagatggcgccgctggagacgacgacctgcccggagagtccgtagaagagctgctagacctgctcgacgacgcagagtaaggagactgaggcggaggaggggttgggtgcgccgaacaataattagacgtaggaggaggtggaggaggcgcagaaaaaagataaatatccagcagtggaaccccccgaccgtcagaaaatgcgtggttaccgggtacctccctttgctcatctgtggcactgggaccaccggaaccacctacagaaactatggcagtcacacaactgactacaaaaagtacgacccctacggaggaggggtcagtaccatgcagttcacctttcagaacttgtacgaagagtacgagaaacaccacaataggtggtccaaatccaatgtggacctagaacttatcagatacaaaggctgcaagtttacactgtacagacaccctgaagtagactttatattcgggtacaacagaaagtggcccttcacagacagcttgctcacatgccccgcactgcagccgggcattcaactggccaccatgaaaaacagaaagataatactgcctagctataagactaaacccaaggggcccataaaaaagactataaggattaaaccccccaccatgttcaccgaccgttggtactttcaaaacgacttccgttccgttcctctggtaaccacacaagccgtaaccgcaagcctgcggtttccgatgtgctcaccacaaacggacaacatttgcatatacttccaggttttaggcaactggtacaacactgcatgcagcatctcccccacacacctcaacaacaactacttagcttttaaaaaccatctcaccaatcactataacgtccaaaatccatctaaagaacctacaggaggcccagtaggtacggtttttaatacctttaaaacacaggaacacgtagtagaccccaaatgggacacatttaaacaacagaatcccactaacgctaccacaaacaaatatcttcaagtctccagcctgtggggagaccacgtatatacaaaagagattgttgctgcattctttaacaacgcagacaacatgtacaacgccaggaaaaatgtcagtttccaagaagccaaagaacttaatcacaaaacaggcttctacagctcaatctttctatcccgagagagactgagcccggacttcccaggcatatataaagaagtagtctataaccccctgaatgacaagggcataggcaacaaagtatggatagactggtgtacaaaaaatgacacccagttcagagacgtccccggacgcctcaccatagcagacgtgcccctgtatgcggccctcctgggatacgaggactactgcatcaaatactaccacgacaaaggcctgcctaaagaagtcagggttaccatacagtgtccctacacagagccccctctgtatgacaaggacaacacagacatgggattcctaccctatgactacaattttggaaatggaaaaatgccagatggaaacggatacatccccatggagtaccgtttcaggtggtatctgtgcatgttccaccaaaaaaactggatgaatgacatagttcagtgcggacccttcgcgtatcagggagaccaacggagctgcgttctcatgtgcaaatacaaattcaactttctctttgggggcaaccccattccacagcaaactctcaaagacccagccacacagccgaccttcccagtgcccggtgccggtccactccttactagactacaaatcacggacccgaggctgcaggaagaaggctacctccttcggaagtgggacatcagacgtggcttctttggccacaaagctatcaagagaatgtaccaacaacaaaaatttgctgaatctgttacaggccctccaaaacggagcaagttcgaggtccccgcagacaccctcgcagaaggctcctgttcactggaaagaaaacacctcacctggtccgacgagagccaagcccagacagagacagagagcgaagtccaagaagaagaggaggagaaaagcatacacctccacctccgaaagcaataccgagagcagcagcagctcagatgccagctcgagcacctgatactagaagtggcaaagacccagcaacacctccacgcccccattttccattgctaggtaaacctgccttactgtttcccgacagagttccctatcagcccaccaaagaagactgggccacagagtatgcagcggcagcagcttttgatagaccccccagacctactctaacatctacccccttctacccctggatgccaaaaccttaccaagtaaccttcaaactaggctttaaggcccaataaaaattgctaggccgtgggagtttcacttgtcggtgtctgcttattaaggtcactaagcactccgagcgtcagcgaggagtgcgaccctgggggtgggtgcaacgccctcggcggccgcgcgctacgccttcggctgcgcgcggcacctcggggggctccgccccccggcccccccccccgaagatcgtcactaaccacgtgactctccacagcgaaccagtgtgctacgtgattcacttcctgggcgtgacttatgtactaatataagacagtgcacttccgaatggctgagttttccacgcccgtccgcagcggcaacaccacggagggtgttctccgcgtcccgaggg

SEQ ID NO: 1110 - protein, 743 aa, Alphatorquevirus sp.
MWWFRRRPWRRRPQRRWRWRRWRRRPARRVRRRAARPARRRRVRRLRRRRGWVRRTIIRRRRRWRRRRKKINIQQWNPPTVRKCVVTGYLPLLICGTGTTGTTYRNYGSHTTDYKKYDPYGGGVSTMQFTFQNLYEEYEKHHNRWSKSNVDLELIRYKGCKFTLYRHPEVDFIFGYNRKWPFTDSLLTCPALQPGIQLATMKNRKIILPSYKTKPKGPIKKTIRIKPPTMFTDRWYFQNDFRSVPLVTTQAVTASLRFPMCSPQTDNICIYFQVLGNWYNTACSISPTHLNNNYLAFKNHLTNHYNVQNPSKEPTGGPVGTVFNTFKTQEHVVDPKWDTFKQQNPTNATTNKYLQVSSLWGDHVYTKEIVAAFFNNADNMYNARKNVSFQEAKELNHKTGFYSSIFLSRERLSPDFPGIYKEVVYNPLNDKGIGNKVWIDWCTKNDTQFRDVPGRLTIADVPLYAALLGYEDYCIKYYHDKGLPKEVRVTIQCPYTEPPLYDKDNTDMGFLPYDYNFGNGKMPDGNGYIPMEYRFRWYLCMFHQKNWMNDIVQCGPFAYQGDQRSCVLMCKYKFNFLFGGNPIPQQTLKDPATQPTFPVPGAGPLLTRLQITDPRLQEEGYLLRKWDIRRGFFGHKAIKRMYQQQKFAESVTGPPKRSKFEVPADTLAEGSCSLERKHLTWSDESQAQTETESEVQEEEEEKSIHLHLRKQYREQQQLRCQLEHLILEVAKTQQHLHAPIFHC

SEQ ID NO: 1111 - protein, 166 aa, Alphatorquevirus sp.
MGKALKVIILNMFLGRPYRQKKRKLLLQNLSATTPQPIAMTSWVPPTQHVSAREEDWFRGVYCTHRAFCGCGDPVSHLAALAAAFGFQPGPPPSGGPRERLTPPVVRSGLPALPPPANPGPSRPCGGSEGGRGGEGRRDAGDGAAGDDDLPGESVEELLDLLDDAE

SEQ ID NO: 1112 - protein, 135 aa, Alphatorquevirus sp.
LFTGKKTPHLVRREPSPDRDRERSPRRRGGEKHTPPPPKAIPRAAAAQMPARAPDTRSGKDPATPPRPHFPLLGKPALLFPDRVPYQPTKEDWATEYAAAAAFDRPPRPTLTSTPFYPWMPKPYQVTFKLGFKAQ

SEQ ID NO: 1113 - DNA, 3204 bp, Alphatorquevirus sp.
cgggtgccggaggtgagtttacacaccgcagtcaaggggcaattcgggctcgggactggccgggctatgggcaaggcttttaaaaaagctacccccttaactatgtttctcggcagagtttaccgccgcaagaaaaggaaagtgcttctgtccctggtgcatactccacagaaaacaccttcctccatgaaccgctggttacccccggcacacgatgcccgcggaattgagaggcagtggtatgactgtgtttggcgcagtcacgctgcttgctgtggctgtggtgattttattagtcatattaatgatctggcgcatcgttttggacgtcctccgaattccagaccacctgctactccccagccgccggctgtgagagccctcccggcactgccggcccctgagccatggtctggcgcagggggcgacgctggcgccggtggagatggcgccgcaagccgcggtggaggagatggagacgctggagacgtcgcagacgaagacctgctagacgccgtcgacctcgcagagtaaggagacgcaggggagggtggcggcgctcctacagacggtggaagagacgcagggggcgacgcagacataaaaagaaacttatactgactcagtggcaacccgcggttgtcaaaaaatgcagaatagtgggctacgaccccataataatatgtggactgaacagaaccagccacaactccacaactcacgcagaggactacactacaggcaaccaggcctttggggggggactgtgcaccaccaaatacactctaagaatactgttccaagagtacatggcccaccacaactactggacggccagcaacagagacctggagctggccaggtacctgggggcttctattatattttttaaacaccccacagtagactttgtagccagagtcagaaccatgcctccctttaacgacactgacatcacagccgcatcccttcacccgggaatgcttatgctagctaagaaaaaaataattattcccagtctgaaaaccagaccaagcaaaaaacactatgtaaagataaagataggggcccccaagctatttgaagataagtggtactctcagagagacctctgtgacacaactcttgtggttatagaggcaacggttgcagacttgcaatatccgttcggctcaccactaacgaacagcatctgttgcaacttccaggttcttaacagcaactatgacaacgccctgagcacccttataggaactcagggagacaaagacagagatcaatgctataaatttctgttaaatacaatcacctactataacacctctcaagtactagcacagctaaacaagttcttacctgcctccaacacagttaacctctctgaatcaaatgccgcaaattccattaacccatccaaccaaacacaaaatacatacacatccacaaatatacagatacacaacaatacactgtatggaggagcagcatactttagcacatcaggacaaaataatccaccaaagaaaatgaaagaggccaacaaagcatacactaaagcagctataaaaattctaggcaattggaattttactagcatgaactcatcctcagaatcggagttatcagagctaaactactttgactattacacaggcatgttttccagcatatttttagccagcggcaggtcaaactgggaggtaaaaggcagctacacagacataacatacaaccccctagtagacaagggagagggcaacatgatctggatagactggatcaccaaaggtgacaccatctactctgaaaataaaagcaaatgcttgctcaaagacctgcccatgtgggccctgtgctatggctacgcagactatgtacttaagtgcacaggagtctccagcataaaaaacgaggccagaatagtcatgaggtgtccctacacgtacccccaactaataaaacacacaaaccccaactttggcttcgtagtgtacagtgacaactttggacgcggacgcatgccggggggcgaccctgtaccgagcaccagaaacagagtgcactggtacatcaccataacccaccagactgaagtgctagagtgcatctcccagaccggaccgtttgcctaccacagcgacgaacgcaaagcagtactgactataaaatacaacttcagatggaaatggggaggcaaccctgtgttccaacagattcttagagacccctgcacgggatcctccggctccggtccccgtagagtgcctcgctcaatacaagtcgatgacccgaagcaccagacaccagagtacatgtggcacgcgtgggacttcagacgtggactctttagccagaaaggtattaagagagtgtcagaacaaccaacagatgttgaccttcctacaggcaggggcaagagacccaagagagacacagacggcccgcaagagcaaggccaagaagaaggctcgtgttccatcagacgagtcctccagcagtggctccactccagtcaggagcagagccaagaaagcgaagaagaagcagccccgacgacgctctcgcaagagctacaaaaacaactcaagcagcagcagctcatgggaaagcagctccgagagctcagtctccaactcgcccaagtccaagcggggggacaccttcacccccttttacaatgccatgcataaataaagtatacatgtttccccccatgacctttactccctccagcagagactggaaagaggagtacgaggcctgcagagtctgggacagacctcccagaaacgacctaagaaggccccctttctatccctggatgcctcctacgcacaatgtaagctttaagctctccttcaaataaatgttggccgtgggagtttcacttgtcggtgtctacctctataagtcactaagcactccgagcgtaagcgaggagtgcgaccctctgccctggtgcaacgccctcggcggccgcgcgctacgccttcggctgcgcgcgggggtccgccccccggccccccccccccgaagtccgtcactaaccacgtgactcccaacagccaaccgctgatctacgtgattcacttcctgggctgtacctacgtgctaatataaggcggcgcacttccgaatggctgagttttccacgcccgtccgcagcggtggagcaggcgagcagcgacccccgcgtcccgaggg

SEQ ID NO: 1114 - protein, 760 aa, Alphatorquevirus sp.; identical to SEQ ID NO: 591

SEQ ID NO: 1115 - protein, 155 aa, Alphatorquevirus sp.; identical to SEQ ID NO: 592

SEQ ID NO: 1116 - protein, 62 aa, Alphatorquevirus sp.; identical to SEQ ID NO: 593

SEQ ID NO: 1117 - DNA, 3201 bp, Alphatorquevirus sp.
cgaaagtgagtggggccagacttcgccgcagtcaaggggcaattcgggctcgggactggccgggctatgggcaaggctcttagggttatcgctctttaaaacatgtttcttggcagggtctggagaaagaaaaggcaagtgccactgcaaacactgccagtggtgccgctttcacaacctacacgtatgagcagccagtggagaccccctgttcacaatgtccaggggctggagcgaaattggtatgagtccttcttccgcggccatgcttgcttttgtggttgtggtgatgctgttactcatattaatcatctggcggctcgttttggacgtcctcctggtacatcaactccccgaggaccacagacaccttcagtaacctcgttcccggccctgccggcccctgagcccacgcccgagccatggcgtggcgccggtggcgatggcggccatggtggaaacgccggaggcgccgccggtggagaaggagacgccggagacccagacgacgccgcccttatcgacgccgtcgacctcgcagagtaaggaggcgcagggggcggtggaggcgcgcttacagacgttgggggcgacgcagacgcagacgcagacacaaaaagagacttgtactgactcagtggcagccccctattgtaaaaaggtgctttataattgggtacgaccctataattatctgtggtattaacagaaccacctttaactacactacacactcagaagactacacatacaacaatgaaagctttgggggcggactctgtacaacacagtacaccctaagaatcctattccaagaaaaactagctcagcacaacttttggacagccagcaacgaagacctagacctagctagatatctaggaggcacatttatattcttcagacacccaacagtagactttctagttagagttcgcaccagtcctccctttgaggacacagacatgactgcactgtcactacacccaggcatgatgatgctcagcaaaaaagtaattaaagtacctagcctaaaaaccagaccctccagaaaacactatgtaaagatcaggtttgggccccccaaactgtttgaagacaagtggtaccctcagaacgagctgtgtgatgtaactttggtcagcatacaggcaaccacagctgatttccaatatccgttcggctcaccactaacgaactccatctgttgcaacttccaggttcttaacagtaactatgacggtgcacttagcatactgcacctatctaatgatacaacatctcttatacacactgccagacaaaagtgctataactttttattaaaacaatacagttactacaacacaaaacaagttgtagcccagctaaaatatggctggaaccctaaccaaaatccaacaatgccttcaacaaacaatgccgaacactctaaaccaccagaacagctaacaaaagagaacattaagaactcatacccacactgggacacaaaatacgggggcttagcatatggaaacagcacaacaaaccctggcactactacatcgccaactgacttatatcaatcaatgttaacaggcaacaagttttataccacagcaggcaaacaattaattaaaacatttacacctatagaacactataacaatagtacgaaaagtccaaacacaaacatattcgactactatacaggcatgtttagcagcatatttttatctagtgggagaagcaacccagaagtaaaaggcagctacacagacatctcatacaatccacttacagacaaaggggtgggaaacaaactgtggatagactggctctcaaaagcagacactatatacgaccccaaaaaaagcaaatgcctactaaaagactttcccttgtgggcactatgctacggatacgcagactactgcagaaaagtcaccggagactcgggagtcttttacaacgccagaatagtcatgagatgtccctacacctacccacaacttataaaacacaacaatgaagactggggctttgtaccttatagcgagaactttggactcggacggctaccggggggcgaccctaatcctccaaccagaatgagactacactggtaccccatgatactacaccagacagaagtattagagtgcatagcacaatcgggaccctttgcataccacggagacgaaagaaagactgtactgagtgccaaatacaaattcaggtggaagtggggaggtaatcctgtgtttcaacaggttcttagagacccctgcaccggcggtgccgtggcgccccacaccagtcgacaccctcgcgcagtacaagtatatgacccgaagcaccaggccccggagtacctgttccacaagtgggacttcaggaggggactctttagcactaaaggtattaaaagagtgtcagaacaaccaacaaatgatgagtttcttacagggagcagcaagagacccaagaaagacacaaaggccagggtcgaggaccaagaagatcaaaaagaaagcttacatttcagagtcccagagctcaggccgtggctcccctccagccaggaaacggagagccaaagcgagcaagaagaaacagtcccgaaaacggtacaagaacaactacaagagcagctccagcaacagcgactcatgggactccaactcagaaacgtctgtctccagctcgcaagagtccaagcggggcacagtctccaccccgttttccaatgccatgtataaacaaggtgtttatatttcctgagagacagcccaagcagccccctaccagcaaagactggcaggaggaattcgaggcctgtaagcactgggacaggcctgcaagacctagcttagatagaccccctttctacccctggatgcccagggaacccccaacttgtcgtgtaaccttcaagcttggctggcaataaaattacaaggccgtgggagtttcacttgtcggtgtctgcttattaaggtcactaagcactccgagcgctagcgaggagtgcgaccctccgccctgggcccacttcttcggagccgcgcgctacgccttcggctgcgcgcggcacctcagacccccgctcgtgctgacacgctcgcgcgtgtcagaccacttcgggctcgcgggggtcgggaattttgctaaacagactccgagttgccattggacactgtagccgtgaatcagtaa

SEQ ID NO: 1118 - protein, 773 aa, Alphatorquevirus sp.
MAWRRWRWRPWWKRRRRRRWRRRRRRPRRRRPYRRRRPRRVRRRRGRWRRAYRRWGRRRRRRRHKKRLVLTQWQPPIVKRCFIIGYDPIIICGINRTTFNYTTHSEDYTYNNESFGGGLCTTQYTLRILFQEKLAQHNFWTASNEDLDLARYLGGTFIFFRHPTVDFLVRVRTSPPFEDTDMTALSLHPGMMMLSKKVIKVPSLKTRPSRKHYVKIRFGPPKLFEDKWYPQNELCDVTLVSIQATTADFQYPFGSPLTNSICCNFQVLNSNYDGALSILHLSNDTTSLIHTARQKCYNFLLKQYSYYNTKQVVAQLKYGWNPNQNPTMPSTNNAEHSKPPEQLTKENIKNSYPHWDTKYGGLAYGNSTTNPGTTTSPTDLYQSMLTGNKFYTTAGKQLIKTFTPIEHYNNSTKSPNTNIFDYYTGMFSSIFLSSGRSNPEVKGSYTDISYNPLTDKGVGNKLWIDWLSKADTIYDPKKSKCLLKDFPLWALCYGYADYCRKVTGDSGVFYNARIVMRCPYTYPQLIKHNNEDWGFVPYSENFGLGRLPGGDPNPPTRMRLHWYPMILHQTEVLECIAQSGPFAYHGDERKTVLSAKYKFRWKWGGNPVFQQVLRDPCTGGAVAPHTSRHPRAVQVYDPKHQAPEYLFHKWDFRRGLFSTKGIKRVSEQPTNDEFLTGSSKRPKKDTKARVEDQEDQKESLHFRVPELRPWLPSSQETESQSEQEETVPKTVQEQLQEQLQQQRLMGLQLRNVCLQLARVQAGHSLHPVFQCHV

SEQ ID NO: 1119 - protein, 147 aa, Alphatorquevirus sp.
MFLGRVWRKKRQVPLQTLPVVPLSQPTRMSSQWRPPVHNVQGLERNWYESFFRGHACFCGCGDAVTHINHLAARFGRPPGTSTPRGPQTPSVTSFPALPAPEPTPEPWRGAGGDGGHGGNAGGAAGGEGDAGDPDDAALIDAVDLAE

SEQ ID NO: 1120 - protein, 85 aa, Alphatorquevirus sp.
LSPARKSPSGAQSPPRFPMPCINKVFIFPERQPKQPPTSKDWQEEFEACKHWDRPARPSLDRPPFYPWMPREPPTCRVTFKLGWQ

SEQ ID NO: 1121 - DNA, 3200 bp, Gammatorquevirus sp.
cgggagcccgaggtgagtgaaaccaccgaggtctaggggcaactcgggctagggcagtctagcggaacgggcaagaaacttaaaaccatatttgttttacagatgtccaaaattcaagctaaagacttttatactcccacaccctttaaccaagaaacgaaaactcaaatttggatgtctcaaattgctgattctcacgacaatatctgcaattgtaatcaccccttttctcatctgcttgcctctatctttcctgtgggtcacaaagatcgtgatctttcaattaatcaaattcttctaagagattatagagaaaaatgcctttctggtggcgccgacgcagaaagccctggtttgggagattcaggtacaacaggaggtttcaaaggcataaaagaagagtccacagaagaagatttaccaaaagaagaaatagaagagctcctcgccgccgcagaagacgccgctacaaggtaagaagaaaaaaaagaaaaattactattcaacaatggcagccagaaagcattaaaaaatgtaaaattaaagggcaaggtaccattgttttaggagctgaaggaactcaatatagatgttatacaactgtaaaaaatgagtggactaatcctaaagtagctggaggtggaggatttggagttgaactttttacattaaaatatctatatagagaatataaagctaagcataatatttggacagctacaaatgaatataaagacttatgcagatacactggatgcaaatttatattttatagacaccctgaaactgattttatattatcatatgacatacagccaccatttacaattagtaaatatacctatatgttccaccatccaatgcttgcattacaaagaagacacaaaaaacttttattgagcacagccacaaaaccaactggcagactaacaaaaagattcaaaataagaccacctaaacaacttattaccaaatggttctttcaagaagactttgcagactatggcttagtatcaatatcagccacagcttgtaactttagatatccatggcttggggtctctaatgaaaatttaataattaccttatactacttacaaccagaattctacccacactcagactgggcacaagtccactcaactgcctggaacccattaggagcaggatcagcttctaaaacaccagaaaacttatattactattactacaatgacagaaatgtacttacagaatggcaaatgaaagcatttactggcacacacccatattacaattcactaagcatagataaaggatggttttgccctcaagtacttagagctgtacaagttaaatcaaacccagacacgcatgcacaatcaataactccatgtggagtacttagatataacccagcagaagacactggtaaaggcaacaaaatttgggtaacagatatactagccagcagctatgctgaaccaaaagatgaagacttaataatgcaagattatccactatatatgatgttttatggatatacatcatatttacagcaagttaaacatgaatctgtttcatttaaaggaaaaatgtttgttgtgcagagtaatgcactaaaaagagttagaggagaatccacaaaaaactattacccactcatagacaaatctttttgctatggtaaaggtcctaacatgacagaccccatactattcactggcagtatctggtacccctccatatatggccaaagagactctataaatgctatagtaaactgtggaccactaacaccaaaatacaatgaaactaaaaatagtacatggcaatgcaattatttttatgatttttattttaagtggggaggtgcatacccaccagaccaagaagttgaagacccaaccacaaaaggaaaatatcctgtgcccgatcacatctcccaaaatgtacaaattgctgacccacaaaaacaaagatattcaaaaatattcaaaagctgggactacagaaggggagcacttacaaacaaagctattaaaagaatgcaggaaaacctctcatctgatgagtcttgttcaacagattcaacaacatgctcctcagcaaaaagaagaagagtactccccacactccaggacccgaagaaagaaaacaaagaaatccagaaatgtctcctctcactctgcgaagaacctacatggcaagagcaagaaaaaacaccagacctcatccagctcatccaccagcagcacgagcagcagcagctactcaagcacaacctcttaaccttaatagcagatctaaaagccaaacagaggaatctactacaccaaacaggatttctaggttaaccagatttaaacctggttttgaatggcaaacagaatgtgaactagcacaagcattcagaagaccccctagattgtttaaagaggacacccctttttacccctggcttcctttagaaccccgtgttaactttcaccttaattttaaattctaggccgacactgttcacttagtagagtttgtttatataagtttgcaccccaaaaaaattgtaaaataaaaaaaaaaaaaaaaaaataaaaaattgcaaaaattcggcgctcgcgcgcgctgcgcgcgcgcgagcgccgtcacgcgccggcgctcgcgcgccgcgcgtatgtgctaacacaccacgcacctagattggggtgcgcgcgctagcgcgcgcaccccaatgcgccccgccctcgttccgacccgcttgcgcgggtcggaccacttcgggctcgggggggcgcgcctgcggcgcttatttactaaacagactccgagtcgccatttggccccccctaagctccgcccccctcatgaatattcataaaggaaaccacaaaattagaattgccgaccacaaactgccatatgctaattagttccccttttacacagtaaaaagaggaagtgggggggccccccccgcaccccccctacgtcacaggccacgcccccgccgccatcttgggtgcggcagggcgggggctaaaatggcgggacccaatcattttatactttcactttccaattaaaacacaccacgtcacaacaaaggggtggagactttaaaactatataaccaagtgtagtggcgaatggctgagtttatcccgctagacggtgcagggaccggatcgagcgcagcgaggaggtccccggctgcccatggg

SEQ ID NO: 1122 - protein, 672 aa, Gammatorquevirus sp.
MPFWWRRRRKPWFGRFRYNRRFQRHKRRVHRRRFTKRRNRRAPRRRRRRRYKVRRKKRKITIQQWQPESIKKCKIKGQGTIVLGAEGTQYRCYTTVKNEWTNPKVAGGGGFGVELFTLKYLYREYKAKHNIWTATNEYKDLCRYTGCKFIFYRHPETDFILSYDIQPPFTISKYTYMFHHPMLALQRRHKKLLLSTATKPTGRLTKRFKIRPPKQLITKWFFQEDFADYGLVSISATACNFRYPWLGVSNENLIITLYYLQPEFYPHSDWAQVHSTAWNPLGAGSASKTPENLYYYYYNDRNVLTEWQMKAFTGTHPYYNSLSIDKGWFCPQVLRAVQVKSNPDTHAQSITPCGVLRYNPAEDTGKGNKIWVTDILASSYAEPKDEDLIMQDYPLYMMFYGYTSYLQQVKHESVSFKGKMFVVQSNALKRVRGESTKNYYPLIDKSFCYGKGPNMTDPILFTGSIWYPSIYGQRDSINAIVNCGPLTPKYNETKNSTWQCNYFYDFYFKWGGAYPPDQEVEDPTTKGKYPVPDHISQNVQIADPQKQRYSKIFKSWDYRRGALTNKAIKRMQENLSSDESCSTDSTTCSSAKRRRVLPTLQDPKKENKEIQKCLLSLCEEPTWQEQEKTPDLIQLIHQQHEQQQLLKHNLLTLIADLKAKQRNLLHQTGFLG

SEQ ID NO: 1123 - protein, 124 aa, Gammatorquevirus sp.
MSKIQAKDFYTPTPFNQETKTQIWMSQIADSHDNICNCNHPFSHLLASIFPVGHKDRDLSINQILLRDYREKCLSGGADAESPGLGDSGTTGGFKGIKEESTEEDLPKEEIEELLAAAEDAATR

SEQ ID NO: 1124 - protein, 143 aa, Gammatorquevirus sp.
LFNRFNNMLLSKKKKSTPHTPGPEERKQRNPEMSPLTLRRTYMARARKNTRPHPAHPPAARAAAATQAQPLNLNSRSKSQTEESTTPNRISRLTRFKPGFEWQTECELAQAFRRPPRLFKEDTPFYPWLPLEPRVNFHLNFKF

SEQ ID NO: 1125 - DNA, 3200 bp, Alphatorquevirus sp.
cgggtgccggaggtgagtttacacaccggagtcaaggggcaattcgggctcgggactggccgggctatgggcaaggctcttaaggtaatcattcttaatatgtttctcggcagaccttacagacaaaagaaaaggaaactgcttctgcagaacctgtcagctacaacgccgcaacctattgctatgacctcctgggtgccccctacacaacatgtctctgcccgcgaagaagactggttccgaggagtctactgtactcatagagctttctgtggctgtggtgatcctgttagccatcttgctgctctggctgctgcatttggttttcaaccagggccgccgccgagtggtggtcctagggagaggctcacaccaccagtagtccgctccggcctgcctgcgctgccgcctccggccaatccgggaccctcacgaccatgtggtggttccgaaggaggccgtggaggagaaggccgcagagacgctggagatggcgccgctggagacgacgacctgcccggagagtccgtagaagagctgctagacctgctcgacgacgcagagtaaggagactgaggcggaggaggggttgggtgcgccgaacaataattagacgtaggaggaggtggaggaggcgcagaaaaaagataaatatccagcagtggaaccccccgaccgtcagaaaatgcgtggttaccgggtacctccctttgctcatctgtggcactgggaccaccggaaccacctacagaaactatggcagtcacacaactgactacaaaaagtacgacccctacggaggaggggtcagtaccatgcagttcacctttcagaacttgtacgaagagtacgagaaacaccacaataggtggtccaaatccaatgtggacctagaacttatcagatacaaaggctgcaagtttacactgtacagacaccctgaagtagactttatattcgggtacaacagaaagtggcccttcacagacagcttgctcacatgccccgcactgcagccgggcattcaactggccaccatgaaaaacagaaagataatactgcctagctataagactaaacccaaggggcccataaaaaagactataaggattaaaccccccaccatgttcaccgaccgttggtactttcaaaacgacttccgttccgttcctctggtaaccacacaagccgtaaccgcaagcctgcggtttccgatgtgctcaccacaaacggacaacatttgcatatacttccaggttttaggcaactggtacaacactgcatgcagcatctcccccacacacctcaacaacaactacttagcttttaaaaaccatctcaaaactcactataacgtccaaaattcatctaagaaacctacaggaggcccagtaggtacggtttttaatacctttaaaacacaggaacacgtagtagaccccaaatgggacgtatataaacaagagaatcccagtaccgctagcgcaaacaaatatcttcaagtctccagcctgtggggagaccacgtatataaaccagacattgttgatgcattctttcaaaacgcagacaaaatgtacaccgccagaaaaaatgtcagtttccaagaagccaaagaacttaatcacaaaacaggcttctacagctcaatctttctatcccgagagagactgagcccggacttcccaggcatatataaagaagtagtctataaccccctgaatgacaagggcataggcaacaaagtatggatagactggtgtacaaaaaatgacacccagttcagagacgtccccggacgcctcaccatagcagacgtgcccctgtatgcggccctcctgggatacgaggactactgcatcaaatactaccacgacaaaggcctgcctaaagaagtcagggttaccatacagtgtccctacacagagccccctctgtatgacaaggacaacacagacatgggattcctaccctatgactacaattttggaaatggaaaaatgccagatggaaacggatacatccccatggagtaccgtttcaggtggtatctgtgcatgttccaccaaaaaaactggatgaatgacatagttcagtgcggacccttcgcgtatcagggagaccaacggagctgcgttctcatgtgcaaatacaaattcaactttctctttgggggcaaccccattccacagcaaactctcaaagacccagccacacagccgaccttcccagtgcccggtgccggtccactccttactagactacaaatcacggacccgaggctgcaggaagaaggctacctccttcggaagtgggacatcagacgtggcttctttggccacaaagctatcaagagaatgtaccaacaacaaaaatttgctgaatctgttacaggccctccaaaacggagcaagttcgaggtccccgcagacaccctcgcagaaggctcctgttcactggaaagaaaacacctcacctggtccgacgagagccaagcccagacagagacagagagcgaagtccaagaagaagaggaggagaaaagcatacacctccacctccgaaagcaataccgagagcagcagcagctcagatgccagctcgagcacctgatactagaagtggcaaagacccagcaacacctccacgcccccattttccattgctaggtaaacctgccttactgtttcccgacagagttccctatcagcccaccaaagaagactgggccacagagtatgcagcggcagcagcttttgatagaccccccagacctactctaacatctacccccttctacccctggatgccaaaaccttaccaagtaaccttcaaactaggctttaaggcccaataaaaattgctaggccgtgggagtttcacttgtcggtgtctgcttattaaggtcactaagcactccgagcgtcagcgaggagtgcgaccctgggggtgggtgcaacgccctcggcggccgcgcgctacgccttcggctgcgcgcggggggggctccgccccccggccccccccccgaagatcgtcactaaccacgtgactctccacagcgaaccagtgtgctacgtgattcacttcctgggcgtgacttatgtactaatataagacagtgcacttccgaatggctgagttttccacgcccgtccgcagcggcaacaccacggagggtgttctccgcgtcccgaggg

SEQ ID NO: 1126 - protein, 743 aa, Alphatorquevirus sp.
MWWFRRRPWRRRPQRRWRWRRWRRRPARRVRRRAARPARRRRVRRLRRRRGWVRRTIIRRRRRWRRRRKKINIQQWNPPTVRKCVVTGYLPLLICGTGTTGTTYRNYGSHTTDYKKYDPYGGGVSTMQFTFQNLYEEYEKHHNRWSKSNVDLELIRYKGCKFTLYRHPEVDFIFGYNRKWPFTDSLLTCPALQPGIQLATMKNRKIILPSYKTKPKGPIKKTIRIKPPTMFTDRWYFQNDFRSVPLVTTQAVTASLRFPMCSPQTDNICIYFQVLGNWYNTACSISPTHLNNNYLAFKNHLKTHYNVQNSSKKPTGGPVGTVFNTFKTQEHVVDPKWDVYKQENPSTASANKYLQVSSLWGDHVYKPDIVDAFFQNADKMYTARKNVSFQEAKELNHKTGFYSSIFLSRERLSPDFPGIYKEVVYNPLNDKGIGNKVWIDWCTKNDTQFRDVPGRLTIADVPLYAALLGYEDYCIKYYHDKGLPKEVRVTIQCPYTEPPLYDKDNTDMGFLPYDYNFGNGKMPDGNGYIPMEYRFRWYLCMFHQKNWMNDIVQCGPFAYQGDQRSCVLMCKYKFNFLFGGNPIPQQTLKDPATQPTFPVPGAGPLLTRLQITDPRLQEEGYLLRKWDIRRGFFGHKAIKRMYQQQKFAESVTGPPKRSKFEVPADTLAEGSCSLERKHLTWSDESQAQTETESEVQEEEEEKSIHLHLRKQYREQQQLRCQLEHLILEVAKTQQHLHAPIFHC

SEQ ID NO: 1127 - protein, 166 aa, Alphatorquevirus sp.; identical to SEQ ID NO: 1111

SEQ ID NO: 1128 - protein, 135 aa, Alphatorquevirus sp.; identical to SEQ ID NO: 1112

SEQ ID NO: 1129 - DNA, 3196 bp, Betatorquevirus sp.
cgggtgctgaaggtgagtgaaaccaccgaaatcaaggggcaatatgggctcagtcagtctagcggaatgggcaactaactaaattatattttacagaatgtcagactactacaaaccaataacatggagcagaaaacactgcaaccttaattggattaacagcattgttactgtacatgaccttcaatgcgcctgcaacaatccactaaaacacacaataattggaataattaaccaagaaccatctatcaaatttaacaaagaagaatctacaaaaatacaaaaatgccttactactggagaccaagaagaaggcgatattttagaaaatattggagaaggagacctagaggcctttttcgccgcagactttggagaagaagacgcagaaacacggtaagaaaaagaaaactaaaaaaagtaatagtaagacaatggcaaccaagtactatacgaaaactaaaaataagaggaatgtacccattatatgaaggaaacagagagagaatttctaataactttaaccaatgggccgcatcaatagccccccatggatttcctggaggcggactatggtcaattataagattttctctatactctctgtatgaactacaccttaaaggcagaaactggtggacaatgtcaaactgctctttaccactaataaaataccaaggatgcagcattaaattttacaaatctactaatacagactatataacagtattcacaacttgtggagatatgacagcaaacttagaaacctatcactcctcacaaccatcaattttaaacttaaacaaaagaaaaataataatgacatgtaaagaaaataatcaatataaaaaaccctacaaaaaaaaatttataaaaccacctccactatttgaaaacaaatggtactttcaaagagatatagccaaaataccattattaatgctaataacatcatcatgcagtttagacagatggtacataagctcaaaatcagaatccaacacattaggatttatatcattaaacactgacttctttgtttaccataactttaaaaagccaccaataacaacaggctatataccaaacgcaacattctcattatacacatcaggaacaaatgttaaattaaatgaattaaaatggtcaaacttaatttacttaggaaacacaaaagatatgcaaccaggaaaaacaataggtagtatgcaaggaaacacacctacagacaaattaaacaaatatttttctgatataaaaaactggggaaatcccttttttccagcctactttcacgaagaataccctaactattttacaacaatgaacaaaattgataaaattaaagacctagcaaaaagtagccttaataacaaagtaagtgaatttacaaacctatcacaagacttattttgggaatgcagatacaatcccgaaaatgactctagcagaaatgcttactttattacagatatagaaacattaagaccatgggaaaacccatcaaaagataatttaacagaacaaggtttaccactatggctattactacatggcactatagattatcaccaaaaactaggagacatacaacacctaatgacagatcacatactatgcataacatcagactacatttcaccaacaaaagactactacgtaccactagacagagactttttagctggacatagtccctacacagacatagtaagagacaatgacaaactatactggttccctaaacttaattttcaacaaagaacaattaatgacatagtttcagtaggacctggaacaccaaaacttccaccagacataagctcagaggctcacattgaatataaatttcattttaagcttggaggatgtccaccacaaatggacgacgtttgcgaccctaactcaagatcaaaatggcccactcccagtaacctcatatcatcaactttattgcagagtccagaaacaccaatcgaatactaccttagcagctttgaccaaagacgaggactactcacaaacaaagctgcaaaaagaattaaaaaagactttgggcctaaagaaactttgcttcaatttacaggacaaactacaacagaagtaccgatacaaagcccagagacatcatcatcagaggaaacaaccgaggaaaaagagaaagaagagatacagctccagttcagacaccacagaagaaagcaaaggaaactccagcagcgaatcctccagctcctagacctactccaggaataataataaaaaagagtaacataagggtacaactgtttgaaactcctaaacctaacagaccacttacaccccaagaaaaacaaactgatctagaaatagctaaatggctaaagcgcccagtacgctacttttttaatgatcctccattttatccctggttggtacctgaacctaaagttaactttaaacttaactatgtagaataaaggcctgcattaattcacttgaggtgtccatttgtattatttaaaacttaaataaacagtcaccgcctcccaaaaaccgccggcgcacagggggctacgccccctgtaacccccagggggggacaccccccctaaacccccccgaaaaaccacaaaatttaaattgccgaccacaaacgaacaggaaaccacaaaatttgcattgccgaccacaaacgaacaggaaaaccacataatttgcattgccgaccacaaaccgtcactgagttccctttttttaccaaacttccccttttaatcataaatattcattaaattaattaatactccgcctaattccggggaggagcattaaaactatataactaagtatactttcgaatggctgagtttacgccgccagacggagacagaatcacttcagtgacttcgggctgatcaagggcgggagccggaggtgagtgaaaccaccgtagtctaggggcaattcgggctagttgccgaccacaaacgaacaggaaaaccacataatttgcattgccgaccacaaacggtaactaacttcctcaaacagcacttacttcctcatttacttatgaatattcattacattaattattaaacacacgtcaaataggaggagttaacaacactataaaactaactacaatgacgaatggctgagtttatgccgctagacggagacgaagacaacactgacttcggctgactgaggg

SEQ ID NO: 1130 - protein, 656 aa, Betatorquevirus sp.
MPYYWRPRRRRYFRKYWRRRPRGLFRRRLWRRRRRNTVRKRKLKKVIVRQWQPSTIRKLKIRGMYPLYEGNRERISNNFNQWAASIAPHGFPGGGLWSIIRFSLYSLYELHLKGRNWWTMSNCSLPLIKYQGCSIKFYKSTNTDYITVFTTCGDMTANLETYHSSQPSILNLNKRKIIMTCKENNQYKKPYKKKFIKPPPLFENKWYFQRDIAKIPLLMLITSSCSLDRWYISSKSESNTLGFISLNTDFFVYHNFKKPPITTGYIPNATFSLYTSGTNVKLNELKWSNLIYLGNTKDMQPGKTIGSMQGNTPTDKLNKYFSDIKNWGNPFFPAYFHEEYPNYFTTMNKIDKIKDLAKSSLNNKVSEFTNLSQDLFWECRYNPENDSSRNAYFITDIETLRPWENPSKDNLTEQGLPLWLLLHGTIDYHQKLGDIQHLMTDHILCITSDYISPTKDYYVPLDRDFLAGHSPYTDIVRDNDKLYWFPKLNFQQRTINDIVSVGPGTPKLPPDISSEAHIEYKFHFKLGGCPPQMDDVCDPNSRSKWPTPSNLISSTLLQSPETPIEYYLSSFDQRRGLLTNKAAKRIKKDFGPKETLLQFTGQTTTEVPIQSPETSSSEETTEEKEKEEIQLQFRHHRRKQRKLQQRILQLLDLLQE

SEQ ID NO: 1131 - protein, 100 aa, Betatorquevirus sp.
MSDYYKPITWSRKHCNLNWINSIVTVHDLQCACNNPLKHTIIGIINQEPSIKFNKEESTKIQKCLTTGDQEEGDILENIGEGDLEAFFAADFGEEDAETR

SEQ ID NO: 1132 - protein, 57 aa, Betatorquevirus sp.
LFETPKPNRPLTPQEKQTDLEIAKWLKRPVRYFFNDPPFYPWLVPEPKVNFKLNYVE

SEQ ID NO: 1133 - DNA, 3195 bp, Alphatorquevirus sp.
cgggtgccgtaggtgagtttacacaccgaagtcaaggggcaattcgggcacgggactggccgggctatgggcaaggctcttaaaaaattaccccgctgtgttcttcggcaggacacaaagtcatgccgtggagaccgccggtccataacgtgccaggtagagagaatcaatggtttgcagcgttctttcacggtcatgctgctttctgcgggtgtggtgaccctgttgggcatcttaacggcattgctcctcgctttcctaacgccggtccaccgagaccacctccagggctagaccagcttaatcccgagggcccggcaggtcccggagggccccccgccatcttgccagctctgccggccccggcagaccctgaaccggcaccacggcgtggtggtggggcagatggaggcgccgccgctggggccgccgccgccgcagaccataccgggtacgaagaaggagacctagaagatcttttcgccgccgcggccgaggacgatatgtgagtaggcggaggcgccgccgctactacaggcgcagactgagacggggcagacgcagagggcgacgaaagagacacagacagactctagtagtgaggcagtggcaacctgacgttgttaaaaagtgtaaaataacaggatggatgcctcttataatctgtggctctggaagcacacagatgaactttataactcacatggacgatactccccctatgggatacacctacgggggcaactttgtaaatataactttcagtctagaggccatctatgaacaattcctgttccacagaaacaggtggtccagatctaaccatgacttagacctggccaggtacctaggaaccactctaaaactttacagacaccaaacagtagactatataattagctacaacagaacaggcccctttaatataagtgaaatgacttacatgagcacacacccggctctcatgctactacaaaaacatagaatagttgtacccagcttcagaaccaagccaaaaggcaaaagagccataaaaattagaataagggccccaaaactaatgctcaccaagtggtacttcacaaaagacatttgctccatgggcctctttcaactcatggcaacagctgcagaacttacaaacccgtggctcagaaacaccacaaaaagcccagtaattggcttcagagtcttaaaaaacagcttatacacatgcctttccaacttaaaagaccaaacagtagaaggtgaaagaaaatctatacaaaatagattacacccagaaaacctacataactcaggacctaatgctaaaggctgggaatacacatacacaaaactaatggcatctatatactactcagccaacagaaacagcacctacaactggcaaaactatcaaactaactatacaaacacatatcaaaaatttaaagaaaaaagaacagcaaacttaaagttaattaaagcagaatacctatatcattaccctaacaatgtcacacaaactgactttatatcagactacacactaacacacgactggggcatatacagcccctactacctaacacccaccagaattagcctagactgggacacaccatggacatatgtaagatacaacccactatcagacaaaggcataggtaacagaatatatgcacagtggtgctcagaaaaatccagtaaattagacacctcaaagagcaagtgcatactaaaagacttcccactgtgggccatggcatatggctactgtgactgggtggtgaagtgcacaggagtgtccagtgcatggacagacatgagaatagccattagatgtccctacacagaaccagcacttatagggtcaacagaagatgtaggcttcattccaataagtgacaccttttgcaacggagacatgccgtttcttgcaccatacatacctattacatggtggattaagtggtaccccatgattacacaccaaaaggaagttcttgaggcaatagttaactgtggaccgtttgtaccccgagaccaaacttccccagcttgggaaataaccatgggttacaaaatggattggaaatggggcggctctcccctgccttcacaggcaatcgacgacccctgccagaagtccacccacgaacttcccgaccccgatacacaccctcgcatgttacaagtctctgacccgacaaagctcggaccgaagacagtttttcacaaatgggactggagacgtgggatgcttagcaaaagaagtattaaaagagtccaagaaaactcaacagatgatgaatatgttgcaggacctataccaaggaaaaaaaacaaactcgatactcgagtccaaggccctccaaccccagaaaaagaaagctatactttactccaagccctccaagagtcggggcaagagagcagctcagaggaccaacaacaagcaccccaagaaaaagaggaccagaaggaagcgctcatggagcagctccagctccagaaacaccaccagcgagtcctcaagcgaggcctcaaactcctcctcggagacgtgctccgactccggagaggagtccactgggaccccctcctgtcctaattcaaggtcccagtatcccagacctgcttttccctaacacacaaaaaaaaaaacgattttccaactacgactgggtgtgcgagtacgagctggccagatggatggatcggcccttgcggcactacccatcagacccccctcactacccctggctaccaaaaaagcctcctacccctcctacatgtagagtaagtttcaaattaaagctcgatgcctaaaattcaaggccgtgggtgtttcacttcatcggtgtctacctctaaaagtcaccaagcactccgagcgtaagcgaggagtgcgacccccctgcccggtagcaacttcctcggggtccggcactacgccttcggctgcgccggacgcctcggaccccccctcgacccgaatcgctcaccgcgcatgcgcggccacgcccccgccgccattttgtgcagcccgccaatttctgttcaaacagaccaatcaggaccttctacgtgcacttcctggggcgtgtctacgaggtttatataagcaacagcggtgacgaatggtagagtttttcttcgcccgtccgcggcgagagcgcgagcgaagcgagcgatcgagcgtcccgtggg

SEQ ID NO: 1134 - protein, 683 aa, Alphatorquevirus sp.
LRRGRRRGRRKRHRQTLVVRQWQPDVVKKCKITGWMPLIICGSGSTQMNFITHMDDTPPMGYTYGGNFVNITFSLEAIYEQFLFHRNRWSRSNHDLDLARYLGTTLKLYRHQTVDYIISYNRTGPFNISEMTYMSTHPALMLLQKHRIVVPSFRTKPKGKRAIKIRIRAPKLMLTKWYFTKDICSMGLFQLMATAAELTNPWLRNTTKSPVIGFRVLKNSLYTCLSNLKDQTVEGERKSIQNRLHPENLHNSGPNAKGWEYTYTKLMASIYYSANRNSTYNWQNYQTNYTNTYQKFKEKRTANLKLIKAEYLYHYPNNVTQTDFISDYTLTHDWGIYSPYYLTPTRISLDWDTPWTYVRYNPLSDKGIGNRIYAQWCSEKSSKLDTSKSKCILKDFPLWAMAYGYCDWVVKCTGVSSAWTDMRIAIRCPYTEPALIGSTEDVGFIPISDTFCNGDMPFLAPYIPITWWIKWYPMITHQKEVLEAIVNCGPFVPRDQTSPAWEITMGYKMDWKWGGSPLPSQAIDDPCQKSTHELPDPDTHPRMLQVSDPTKLGPKTVFHKWDWRRGMLSKRSIKRVQENSTDDEYVAGPIPRKKNKLDTRVQGPPTPEKESYTLLQALQESGQESSSEDQQQAPQEKEDQKEALMEQLQLQKHHQRVLKRGLKLLLGDVLRLRRGVHWDPLLS

SEQ ID NO: 1135 - DNA, 3195 bp, Alphatorquevirus sp.
cgggagccgaaggtgagtttacacaccgcagtctaggggcaattcgggcacgggtctggccgggctatgggcaagattcttaaaaaatttccccgctctgttgttcggcaggacaccaagtcatgccgtggtctccgccgagacataacatcagaacgagagaggatctgtggattcaatcagttatttattcacatgacactttttgtggctgtgataatattcttgagcatattactggcctcctgggtggcctacaaccagctccacctagagacccagcaccccctaccatacggagcctgccggcactgccgccagctccacaaccccctgaacagtcacggcgtggtggagatacagacggaggccgtggagaagatggaggagacgccgctggggcctacgaacccgaagacctagaagaacttttcgccgccgccgagcaagacgatatgtgagtagagggcggcgccgccgatacaggcgcagacggagacgggggcgacgcagacggggacgcagacgcaggcacagaaagacactcattgtcaggcaatggcaaccagacgttataaagagatgctttattaccgggtggctgcccctaattatctgtggaaacggacacacccaatttaactttataactcacatggatgacattccaccccggaatgcatcctacgggggcaacttcacgaacttgacctttaaccttgcctgcttctatgacgaatttatgcaccacagaaacaggtggtcagcctccaaccatgacctagagctagtaagatacctcaaaaccagcattaaactctacagacacgagtcagtagactatatagtcagctacaccaccacaggcccctttgagacaaatgaaatgtcctacatgctcactcaccctctggccatgctcctcagcaaaaaacatgtagttgtgcccagccttaagacaaaaccacacggcagaaagtacaaaaaaataacaatcaagcccccaaaactcatgctaaacaagtggtactttgctgcagacttctgccacataggcctcttccagctgtgggccacaggcctagaactcagaaatccttggctcagatcaggcacaaacagcccagttataggcttctatgtgcttaaaaatcaggtgtatcaaaacagatacagcaacctaaacacagcagaagcattacaaaaaagaaaagatgcatacaatgaactaacaaaaagcaatggagaaaagtggtacaattggcaatatacatacaataaaattatgaagccaatatactacgcagcctcaaatgattctggtaaccaagagatgaaaggacaaacatataattggaaaaattacaaacaacatttttcaaaagtacaaactaaatttaacgcaacacttcaaagtgcctatagcttagtaagagaggaataccaacaactatacaccaccactgtaacatatccaccaaactttgaaaacagacaatacctatcacatgactgcggaatatacagtccatactttatcacaccacaaatatacagcccagagtggcacacagcctggtcttatattagatacaaccccctcacagacaaaggcataggaaacagagtctgtgcccaatactgcagcgaagccagcagcgactataacccagtaaaaagcaagtgcatgctacaagacatgcccttgtggatgatgctgtatggctacgcagactatgtaataaagagcacaggcatacagtcagcctggacagacatgagagtggccatcagaagtccctatacagaccccaaactcgtaggctcatcagaaaacacaatgttcatcccaataggcacagaattcatgaacggagacatgccagataagagaccctacattccgttaacctggtggtttaagtggtaccccatgattacacaccaaaaaaccgcacttgaagcaatagtttcctgcagccccttcatgcccagagaacaggaagcaaccagttgggacatatccataggttacaaagcaacattcttatggggcgggtcccccttacctccacagcccatcgacgacccctgccaaaaaggcaaacacgaactacccgatcccgatagaaaccctccaagaatacaaatatcagacccgcaacacctcggaccgcagacgctcttccactcgtgggacctcagacgtggatacattaatacaaaaagtattaaaagagtgtcggaacacctcgacgctaatgagtatttttcaacaggcgtcgcgtccaaaagaccccgattcgaaacaccccaccacgggcagctatccaaccaagaagaagacgccttatctatcctcagacaactccagaaagaacaagaagagagcagcacatcagaagaagaacaagtactccaaaagcaagaagaccaaaaagaaaagctcctacagcagctccgagtccagcgacagcaccagcgagtcctcagggaaggaatcaaacacctcatgggagacgtcctcagactcagacagggagtccattggaacccaatcctataatacttccaccagagccaataccagacctgctattccccaatacttctaaaaaaaaaaagttctctcccttcgattggcagtgcgagcaggagcttgcatgtttaatgaagcggcctatgcgcttctatccctcagacagcccattctacccgtggctaccccccaagcgagatatcccaactatatgtaaagtaaacttcaaaataaacctgagtgattaaaattcgaggccccgggagtttcacttagcagtgtctacctctaaaggtcactaagcactccgagcgccagcgaggagtgcgaccctggggggtgggtgcaacgccctcggcggccgcgcgctacgccttcggctgcgcgcggggggacccccccccggggggggggggctccgcccccccggcccccccccttgctaaatccaccgcgcatgcgcgaccacacccccgccgccattttgtgcagcccgccaatttctgttcaaacagaccaatcagagtctactacgtacacttcctggggtgtgtcctgccactcaatataagcagcagcggtgacgaatggtagagttttttccgcccgtccgcagcgaggacgcgagcgtagcgagcggccgagcgacccgtggg

SEQ ID NO: 1136 - protein, 654 aa, Alphatorquevirus sp.
LPLIICGNGHTQFNFITHMDDIPPRNASYGGNFTNLTFNLACFYDEFMHHRNRWSASNHDLELVRYLKTSIKLYRHESVDYIVSYTTTGPFETNEMSYMLTHPLAMLLSKKHVVVPSLKTKPHGRKYKKITIKPPKLMLNKWYFAADFCHIGLFQLWATGLELRNPWLRSGTNSPVIGFYVLKNQVYQNRYSNLNTAEALQKRKDAYNELTKSNGEKWYNWQYTYNKIMKPIYYAASNDSGNQEMKGQTYNWKNYKQHFSKVQTKFNATLQSAYSLVREEYQQLYTTTVTYPPNFENRQYLSHDCGIYSPYFITPQIYSPEWHTAWSYIRYNPLTDKGIGNRVCAQYCSEASSDYNPVKSKCMLQDMPLWMMLYGYADYVIKSTGIQSAWTDMRVAIRSPYTDPKLVGSSENTMFIPIGTEFMNGDMPDKRPYIPLTWWFKWYPMITHQKTALEAIVSCSPFMPREQEATSWDISIGYKATFLWGGSPLPPQPIDDPCQKGKHELPDPDRNPPRIQISDPQHLGPQTLFHSWDLRRGYINTKSIKRVSEHLDANEYFSTGVASKRPRFETPHHGQLSNQEEDALSILRQLQKEQEESSTSEEEQVLQKQEDQKEKLLQQLRVQRQHQRVLREGIKHLMGDVLRLRQGVHWNPIL

SEQ ID NO: 1137 - DNA, 3191 bp, Alphatorquevirus sp.
cgggtgccggaggtgagtttacacaccggagtcaaggggcaattcgggctcgggactggccgggctatgggcaaggctcttaaggtaatcattcttaatatgtttctcggcagaccttacagacaaaagaaaaggaaactgcttctgcagaacctgtcagctacaacgccgcaacctattgctatgacctcctgggtgccccctacacaacatgtctctgcccgcgaagaagactggttccgaggagtctactgtactcatagagctttctgtggctgtggtgatcctgttagccatcttgctgctctggctgctgcatttggttttcaaccagggccgccgccgagtggtggtcctagggagaggctcacaccaccagtagtccgctccggcctgcctgcgctgccgcctccggccaatccgggaccctcacgaccatgtggtggttccgaaggaggccgtggaggagaaggccgcagagacgctggagatggcgccgctggagacgacgacctgcccggagagtccgtagaagagctgctagacctgctcgacgacgcagagtaaggagactgaggcggaggaggggttgggtgcgccgaacaataattagacgtaggaggaggtggaggaggcgcagaaaaaagataaatatccagcagtggaaccccccgaccgtcagaaaatgcgtggttaccgggtacctccctttgctcatctgtggcactgggaccaccggaaccacctacagaaactatggcagtcacacaactgactacaaaaagtacgacccctacggaggaggggtcagtaccatgcagttcacctttcagaacttgtacgaagagtacgagaaacaccacaataggtggtccaaatccaatgtggacctagaacttatcagatacaaaggctgcaagtttacactgtacagacaccctgaagtagactttatattcgggtacaacagaaagtggcccttcacagacagcttgctcacatgccccgcactgcagccgggcattcaactggccaccatgaaaaacagaaagataatactgcctagctataagactaaacccaaggggcccataaaaaagactataaggattaaaccccccaccatgttcaccgaccgttggtactttcaaaacgacttccgttccgttcctctggtaaccacacaagccgtaaccgcaagcctgcggtttccgatgtgctcaccacaaacggacaacatttgcatatacttccaggttttaggcaactggtacaacactgcatgcagcatctcccccacacacctcaacaacaactactcagcttttaaaaatcatctcacaactcactataacgtccaaagtcaatctaaacaacctacaggaggcccagtaggtacggtttttaatacctttaaaacacaggaacacgtagtagaccccaaatgggacgtatataaacaagagaatcccagtaccgctagcgcaaacaaatatcttcaagtctccagcctgtggggagaccacgtatataaaccagacattgttgatgcattctttcaaaacgcagacaaaatgtacaccgccagaaaaaatgtcagtttccaagaagccaaagaacttaatcacaaaacaggcttctacagctcaatctttctatcccgagagagactgagcccggacttcccaggcatatataaagaagtagtctataaccccctgaatgacaagggcataggcaacaaagtatggatagactggtgtacaaaaaatgacacccagttcagagacgtccccggacgcctcaccatagcagacgtgcccctgtatgcggccctcctgggatacgaggactactgcatcaaatactaccacgacaaaggcctgcctaaagaagtcagggttaccatacagtgtccctacacagagccccctctgtatgacaaggacaacacagacatgggattcctaccctatgactacaattttggaaatggaaaaatgccagatggaaacggatacatccccatggagtaccgtttcaggtggtatctgtgcatgttccaccaaaaaaactggatgaatgacatagttcagtgcggacccttcgcgtatcagggagaccaacggagctgcgttctcatgtgcaaatacaaattcaactttctctttgggggcaaccccattccacagcaaactctcaaagacccagccacacagccgaccttcccagtgcccggtgccggtccactccttactagactacaaatcacggacccgaggctgcaggaagaaggctacctccttcggaagtgggacatcagacgtggcttctttggccacaaagctatcaagagaatgtaccaacaacaaaaatttgctgaatctgttacaggccctccaaaacggagcaagttcgaggtccccgcagacaccctcgcagaaggctcctgttcactggaaagaaaacacctcacctggtccgacgagagccaagcccagacagagacagagagcgaagtccaagaagaagaggaggagaaaagcatacacctccacctccgaaagcaataccgagagcagcagcagctcagatgccagctcgagcacctgatactagaagtggcaaagacccagcaacacctccacgcccccattttccattgctaggtaaacctgccttactgtttcccgacagagttccctatcagcccaccaaagaagactgggccacagagtatgcagcggcagcagcttttgatagaccccccagacctactctaacatctacccccttctacccctggatgccaaaaccttaccaagtaaccttcaaactaggctttaaggcccaataaaaattgctaggccgtgggagtttcacttgtcggtgtctgcttattaaggtcactaagcactccgagcgtcagcgaggagtgcgaccctgggggtgggtgcaacgccctcggcggccgcgcgctacgccttcggctgcgcgcggcacctcgcccccccccccccgaagatcgtcactaaccacgtgtctctccacagcgaaccagtgtgctacgtgattcacttcctgggcgtgacttatgtactaatataagacagtgcacttccgaatggctgagttttccacgcccgtccgcagcggcaacaccacggagggtgttctccgcgtcccgaggg

SEQ ID NO: 1138 - protein, 743 aa, Alphatorquevirus sp.
MWWFRRRPWRRRPQRRWRWRRWRRRPARRVRRRAARPARRRRVRRLRRRRGWVRRTIIRRRRRWRRRRKKINIQQWNPPTVRKCVVTGYLPLLICGTGTTGTTYRNYGSHTTDYKKYDPYGGGVSTMQFTFQNLYEEYEKHHNRWSKSNVDLELIRYKGCKFTLYRHPEVDFIFGYNRKWPFTDSLLTCPALQPGIQLATMKNRKIILPSYKTKPKGPIKKTIRIKPPTMFTDRWYFQNDFRSVPLVTTQAVTASLRFPMCSPQTDNICIYFQVLGNWYNTACSISPTHLNNNYSAFKNHLTTHYNVQSQSKQPTGGPVGTVFNTFKTQEHVVDPKWDVYKQENPSTASANKYLQVSSLWGDHVYKPDIVDAFFQNADKMYTARKNVSFQEAKELNHKTGFYSSIFLSRERLSPDFPGIYKEVVYNPLNDKGIGNKVWIDWCTKNDTQFRDVPGRLTIADVPLYAALLGYEDYCIKYYHDKGLPKEVRVTIQCPYTEPPLYDKDNTDMGFLPYDYNFGNGKMPDGNGYIPMEYRFRWYLCMFHQKNWMNDIVQCGPFAYQGDQRSCVLMCKYKFNFLFGGNPIPQQTLKDPATQPTFPVPGAGPLLTRLQITDPRLQEEGYLLRKWDIRRGFFGHKAIKRMYQQQKFAESVTGPPKRSKFEVPADTLAEGSCSLERKHLTWSDESQAQTETESEVQEEEEEKSIHLHLRKQYREQQQLRCQLEHLILEVAKTQQHLHAPIFHC

SEQ ID NO: 1139 - protein, 166 aa, Alphatorquevirus sp.; identical to SEQ ID NO: 1111

SEQ ID NO: 1140 - protein, 135 aa, Alphatorquevirus sp.; identical to SEQ ID NO: 1112

SEQ ID NO: 1141 - DNA, 3189 bp, Alphatorquevirus sp.
cgggtgccggaggtgagtttacacaccgcagtcaaggggcaattcgggctcgggactggccgggctatgggcaaggctcttaaaaaagcatgttcctcggtaaactttacagaaagaaaaggcaagtgctactgcaccagctgtaccctgcagagaaaacacctcctgctatgagctactggcgaccacccaccagaaatgtaccgggacaagagcagggctggtacgacgccattttcagttctcacaatgctttttgtggttgtggtgatcctattggtcatgctaacaatctggcggctcgttttggacgttctggacgatccagacacccagcgacgcctgacacaccaccaccaataaggcctctgccagccctgcccgcgccggaccctccggcgcccccaagacgccacgctagaacggagaaccagccatggcctggtactggtggcgccgcaggcgaccgtggagatggagacggcggcgccgccggaggaggagacgacctcggttccgacgccgtagaagagctgctcgacctgctcgacgacccagagtaaggaggcgaaaatggaggggagggtactggagacgaaagactgtaagacgcaggagacggagaaagagacagaaaaagattaaactgactcagtggaaccccgccactgttaaaaaatgcataatcaagggctacatacccttgataatatgcggtaccggcagcaccggcaccacctacagaaactttgcctcccacatgaacgactatacaaagtacgacccctttgggggaggcatgagcaccatgatgttcaccctgcagggtctgtacgaggagtacgaaaaacaccacaacagctggtccagaagcaacctggacctagaactgtgtagatataaagggtgcaagtttaccatgtacaggcaccccgagactgactttattttctggtacaacagaaagctgccctttaatgacactcagctgacgggtccagaaatgcagccgggaatagccatgtgcagtagaaaaaagaaaatactaattaagagctttaaaacaaagcctaaggggcccatgacagtgtcagttaagattcccccccccaccctgttctctgaccgttggtactttcaaaaggacttggccaacgttccgttgctaaccacaaaagccatagcttgcagtttgcggtttccgttctgccgaccacaaactgacaacagttgcgtatacttccttgtactgcaagactggtacaaccagtgcctaagcatagcccccacccatgtagaaactaactggctagcattaaaacagcgaatacaatcagaatatgacgccactacgggctcaactgtaccaaaacacggctggatgggcactgtgtttaatacttttaaaacagaagaacacataaaatgccctcctgccaaagaacaaaaacaaacagaccctgctaacgcaagtgacaactgctacaaaaatgtaagcagtttatggggagaccacgtatatgagaaaagcaaaataataactgcatggcaaggtaaccatgacaactactggaatgccagaaagagtcaaacatttagcgagtcaaaggcactgagtcacaaaactggactttacagctctatgttcctgtcaaacagtagattaagtccagactttccaggcctatacaaagaaataatttacaacccatacctagacaaaggcacaggaaacagagtatggatagactggtgcactaaaaatgactctcaattcagagacacaccggggagagtccccatagtagacgtgcccctgtacgcggccttcctggggtactcagactactgcaaaaagtattaccacgacccgggcataatgaaagaggttaggttaactatccagtgcccctacacgaacccacctctgtatgacaaagacaacacagacatgggatacgtgccctacgactacaactttggggacgggaagatgcccgacggagcggggtacatacccatagcctacagatttaagtggtacgtttgcatgttccaccaacaaaactttatgaatgacatagtgcagtgcggaccgttcgcgtacccgggcgaccagaaaaactgtgtgcttgcctgcaaatacagcttcaaattcttatttggaggcaaccctattccccaacagactatcaaagatcccaagacgcagcccgactttccagtgcccggtaccggtcaattcccttttcgagtacaagtcgttaacccgaggcacatcgacgaaggggcgctcttccgacgctgggatatcaggcggggatggtacagcaataaagctattaaaagaatgcaagaaaaacagagagatgctgactttattgcaggacctccaaaaaaaccaagattcgaggtccccgccgcgcagcaagaagaaaactcgccttcacaggagcgaagattggagctctggtacggatcgacaacggaaaccgagaccgaagcagaagcccaagaagaagagacgcaaacggtccagcagcagctcaaccagcagctccgagaacaaagaaaactggggaaggcgatcaacaacatcttcaaacagctcataaagacccagcaacacctccacgcccccattatccactagtgggtggtcccaaatacctctttccagagaggctgcccaaaccttacaccacccaagactgggagaccgagtaccagtgctgcaaggcctgggacagacctcccagaaataatctttcagacccccctttctatccctggatgccccgagatcagtaccgtgtaacctttaagctaggcttccaataaactaggccgtgggagtttcacttgtcggtgtctgcttcttaaggtcaccaagcactccgagcgtagcgaggagtgcgaccctctctctgtggggcccacttcttcggagccgcgcgctacgccttcggctgcgcgcggcacctcagccgcggggggctccgccccccggcccccccccgtgctacgtcactaaccacgtgcactccgcaggccaaccaccgtgtatgtcgtgcacttcctgggcgtggtctacgtcataatataagtaacagcacttccgaatggctgagttttccacgcccgtccgcagcggtagcaccacggagggatacaaccgcgtcccgaggg

SEQ ID NO: 1142 - protein, 738 aa, Alphatorquevirus sp.
MAWYWWRRRRPWRWRRRRRRRRRRPRFRRRRRAARPARRPRVRRRKWRGGYWRRKTVRRRRRRKRQKKIKLTQWNPATVKKCIIKGYIPLIICGTGSTGTTYRNFASHMNDYTKYDPFGGGMSTMMFTLQGLYEEYEKHHNSWSRSNLDLELCRYKGCKFTMYRHPETDFIFWYNRKLPFNDTQLTGPEMQPGIAMCSRKKKILIKSFKTKPKGPMTVSVKIPPPTLFSDRWYFQKDLANVPLLTTKAIACSLRFPFCRPQTDNSCVYFLVLQDWYNQCLSIAPTHVETNWLALKQRIQSEYDATTGSTVPKHGWMGTVFNTFKTEEHIKCPPAKEQKQTDPANASDNCYKNVSSLWGDHVYEKSKIITAWQGNHDNYWNARKSQTFSESKALSHKTGLYSSMFLSNSRLSPDFPGLYKEIIYNPYLDKGTGNRVWIDWCTKNDSQFRDTPGRVPIVDVPLYAAFLGYSDYCKKYYHDPGIMKEVRLTIQCPYTNPPLYDKDNTDMGYVPYDYNFGDGKMPDGAGYIPIAYRFKWYVCMFHQQNFMNDIVQCGPFAYPGDQKNCVLACKYSFKFLFGGNPIPQQTIKDPKTQPDFPVPGTGQFPFRVQVVNPRHIDEGALFRRWDIRRGWYSNKAIKRMQEKQRDADFIAGPPKKPRFEVPAAQQEENSPSQERRLELWYGSTTETETEAEAQEEETQTVQQQLNQQLREQRKLGKAINNIFKQLIKTQQHLHAPIIH

SEQ ID NO: 1143 - protein, 157 aa, Alphatorquevirus sp.; identical to SEQ ID NO: 302

SEQ ID NO: 1144 - protein, 123 aa, Alphatorquevirus sp.; identical to SEQ ID NO: 303

SEQ ID NO: 1145 - DNA, 3188 bp, Alphatorquevirus sp.
cgggtgccgtaggtgagtttacacaccggagtcaaggggcaattcgggctcgggactggccggaccccgggcaaggctcttaaaaaaggcatgtttcttggtaggccttggagaaagaaaagggcactgctactgtctggcctgcgaactccaaagaaaaaaccacctgcaatgagccagtggtgcccgcctgtccacagcgttcagggtcgcaaccaccagtggtatgaagcctgctaccgcggccatgctgcttattgtggctgtagcaattttattagtcaccttgttgctctgggtgatcagtttggtttcaggccgggtccccgcgctcccggcgccccgggagtagggggaccccctccgccgctccgtagagcgctgcccgcacccccggcggccgctccggagccccaacaggagaacaacaacaacaacctgcagctgcagagatggcctggggatggtggaaacgccgcagacgcggatggctccgccgctggggatggaggcgccgccgcagacctgccagaagacgagctagatgggctgctcgccgagctcgacgacgaagagtaaggaggcgcagactaaggaggagggggcgaccgagacgcaggacttttaaacgtaggaggcgacgcagacgctttaagagaaagcctaagataaaactgactcagtggcagccagacatagtcaggcggtgctttataaggggctttctagctgctgtgatatgcggacagggcaccttctccaacaactacagtagccacctggaggacagaatagccaggggaggctttggagggggccacagcaccatgaggttctcactaaaagtattctatgaggagcacttaaggagactaaactactggacttgctccaacaaggacctagaactagtcagatacttctacaccacagtaaccttctacaggcaccccactcaggactttatagccaggtacaacagaaaaacccccttagggggcaacatactaacagctccatcactgcacccaggcagcatgatgaccagcaaacacagaataatgatacccagtctagagaccagacccaagggaaaaaagactgttaaagtaagaatagcagcccccactctatttactgacaagtggtacttttccaaagacgtttgtgacttgacattgctaaacttggacgttacaatggccgacttgcggtttccgttctgctcaccacaaactgacaatccttgcatcacttggcaaaccctttcctctgtgtacaacaacttcctctctattaccatattccaaggcacctcagagacacaacaaattcaagaatttttaaaagctgctataccaaataaagaacatgccagagtactaaatacttttaaaacagaaggcaattacagtcaccctcaaatacctaaagcaacagcacaacaatctaaaccaacagacaacgaaacacaatactttggagagctagatggcctatggggagaccctatattcatgcccttaaaccaaacagtagaaaacttaagagcacacatactaaaaaacatgcaaaattacaataaaaaactaaaacaagagtttccagccatgacaggctcagcagcacacacacacctcacaggtatatttggcagcagctggctaaaccctggaagaataagtccagaagtactaggcctctacacagaaataatttacaacccatacaaagataaaggcacaggcaaccacatatggatagactcacttactagaaacaacaaccactttaaagagggtcagagcaagtgtcacttacaagacatgcccctttggatgatggtatttgggtacacagactgggtaaaaaaagagcttaatcagtgggacgcacccttaaactacagaataatgatgataagcccatacacatttccaatgatgtacaaacaagacgaccctacctacggatttgtaccaatcagctacaaattttcctcaggcctaatgccagacggcagcagctacatcccttttagctttaggggcaagtggtaccccaacctactaaaccaacagcaggtattagaagacctcagcagatcaggaccctttgcacccaagacaaatgtccctagtgccaccctagtaatgaaatacaagagcagatttaactttggtggcaatcctatatctgaacaggttattagagacccctgcacacaaccaacctacgacatacccggtgccaatacgctccctcgagcaatacaagttatcgacccgaaagtcctcggcccaggttacagcttcaggtcgttcgacatcagacgtggatactttagcacgacgagtattaaaagagtgtcagaacaatcagaaactactgagtttctattcccaggcccaaaaaaacccagaatcgatcttcaaaagtacgagccaccagaagacgtctacagtacactccaaaaagaaacgagaccgtgggagagcagccaggaagaagagacagaagccccatcagaagaagaagaagagagacccctccgagagcagctgcagcagcagctccgagagcagcatcaactccgaaagggaatccagcacctcttccagcagctagtcaaaacacagcagggagtccacgtaaacccatgcctacagtagggcctgcacagtggcttttcccagagagaaagccggccccgccgcccaccagcggcgactgggctacagagttcctaacagctaaaatatttgacaggccagtcaggagcaacctaaaagacatccctttctacccctacgtgaagcaccaatacaatgtctactttggcctaaactatcaataaagctcagctcaaacttgcaaggccgtgggagtttcacttgtcggtgtctacctctaaaggtcactaagcactccgagcgtcagcgaggagtgcgcccccgcgcatgcgcgcggggccccccccccgcggggggctccgccccccggccccccccgtgcaacgtcaccaacctacgtgtccgtctcccataggccggacaccgtctacgtcatacacttcctgggcatggtctacatcctaatataaagcgcagcacttccgaatggctgagtttttgctgtccgtccgcagcgaggaacgaccacggagggcgatccgcgcgtcccgaggg

SEQ ID NO: 1146 - protein, 739 aa, Alphatorquevirus sp.; identical to SEQ ID NO: 897

SEQ ID NO: 1147 - protein, 162 aa, Alphatorquevirus sp.; identical to SEQ ID NO: 898

SEQ ID NO: 1148 - protein, 65 aa, Alphatorquevirus sp.; identical to SEQ ID NO: 899

SEQ ID NO: 1149 - DNA, 3187 bp, Alphatorquevirus sp.
cgggagccggaggtgagtttacacaccgcagtctaggggcaattcgggcacgggtctggccgggctatgggcaagattcttaaaaagtttccccgctgtgtcctacgccaggacacaaaaacatgccgtggagaccgccggcgcacgacgtccagggcagagagaaccagttctttgcaggatgttttcacatacatgctgctttctgcgggtgcggtgaccttgtcggccatcttgctagcattgctgctcgctttcctgctgccggaccccccgctccgccaggcctcagacctccgagaccccctgccccggccggtccgggcggtccccccggctaccttcccgctctcccggctccggcaccggagccgcctaacccagcaccacgccgtggtggtggggaagatggcgccgccgcgggtggcgccgccgatgggggagaagaagaggccgccgcgtacggcgaggaagaactagaagagcttttccgcgccgccgccgaggacgatatgtaagtaggagatggcgccggccttacaggcgcagacggaggaaggggcgacggagacgcagacgcagacggactcacaaacccaccctagtaatgagacagtggcaaccggacgttgttaggacctgctacatcacagggtggatgcccctcatcatctgtggccaaggacagacccagtttaactttataatgcacatggacgatatcaccccccggggagcctcctacgggggcaacctcactaacataacatggaccctagagggcctgtgggaacagttccagtaccacagaaacaggtggtcgcgcagcaaccacgacctagacctagccaggtacctatttaccacccttaagttttacagacacgacagtgtagactacatagtgagctacaccagaacaggacctttccaaatggggcacctcactcacctcagcactcaccctcttctcatgctactttcaaaacaccacgtagtagtgcccagcctaaaaacaaaatctgggggcagaaagtacaaaaaaatcagaatcaagcccccaaaactaatgttaaacaagtggtacttcaccaaagacatctgtgacctgggcctctttcaactgtgggccacgggagcagagctcagaaacccctggttaagatcaggcacacaaagcccctgcataggcttctctgtactcaacaactcctactacaccaacctcagcaaccttccagaccacaaaaacactagagaagcaattcaagcatcattccatccagcaaaactagatcaagacacaaacaaaaacctgtggcaatacacatacacaggcctcatgtcaaagtactactacaaaggcaaccaaaacagcacatatgacttccaaaattacagcacaaatgaaaattatacaaagacatataataaatggttagaggataaaaactcaagacttaaaaagctacaagaccagtggaaaaaagtgtacccacaactaaccgcacaaatgcccacagacacaacactcctacaagactttggcatatacagccccttctacctcacacccgtcagaatcagcctagactggcgtaccacctacacacacgtgagatacaacccactcacagacaagggcataggcaacagagtgtacctacagtggtgctcagagagtagctgcaaatacagccccacaaagagcaagtgcgccatagtagacatgccactattcatagccttctatggctacatagactggtgcatcaaatgcacaggcaactctggcctagtaaaagacgccagaatcatggtcaggtgtccctacaccgagccccaactagtgggggccacagaagacgtgggcttctgcctcctcagtaataccttcatgaacggagacatgcccgtgctggccccctatatcccaatttcctggttcgttaagtggtaccccatgattgcacaccaaaaggaaaccgttgaggccatagtttcctgtggaccgttcatgcccagagatcaggaagccaagagttgggacataaccatgggttacagatcctgtttcaaatggggcgggtcgcctctgcccacacaggccatcgacgacccctgccagaagcccacgcaccctcttcccgatcccgatagacaccctcgcctcctacaagtgtcagacccgacaaagctcggccccaagaccatattccacagatgggacatgcgacgcggacagtttagcaaaagaagtattgaaagaatgtcagaatacacagaatatgatgaatattttgaaacaggtctgccatcaaaaagaaaaaagttcgacacgccggcagaaggactccaaggagagcaaagaaaagcctacgatttactccaagccctcgaggcgagccaagaagagtcggggtcagaagaccaagaacaagtacccccacaagagacgcagacgcagcaactcctccagcagctccagctccagaaacaccaccagcgagtcctcagacagggcctcaaacacctcctcggggacgtcctccgactccgacgaggagtccactgggaccccctccttacatagaaccgccaccgttcatccccgatcttctttttccttctactaacaaaaaaaaaaaattctccaaattcgactgggaaacggaggctcagctagggcagatattcaggcgtcctatgcgcttctatccctcagacaacccttactacccgtggttgccccccaagcgagatatccccaaaatatgtaaggtaaacttccaaataaagcttgcagagtaacacattcgaggccctcctctgttcacttagcggtgtctacctcttaaggtcaccaagcactccgagcgttagcgaggagtgcgaccctttaccctggggcaacttcctcggggtccggcgctacgcgcttcgcgctgcgccgtacgcctcggaccccccctcgacccgaatcgctcgcgcgattcgggcccccgccgccattttgtgcagcccgccaatttctctttcaaacagaccaatcaggaggctctacgtacacttcctggggtgtgtcttcgaagagtatataagcagaggcggtgacgaatggtagagttttttctggcccgtccgcggcgagagcgcgagcgaagcgagcgatcgagcgacccgtggg

SEQ ID NO: 1150 - protein, 661 aa, Alphatorquevirus sp.
MRQWQPDVVRTCYITGWMPLIICGQGQTQFNFIMHMDDITPRGASYGGNLTNITWTLEGLWEQFQYHRNRWSRSNHDLDLARYLFTTLKFYRHDSVDYIVSYTRTGPFQMGHLTHLSTHPLLMLLSKHHVVVPSLKTKSGGRKYKKIRIKPPKLMLNKWYFTKDICDLGLFQLWATGAELRNPWLRSGTQSPCIGFSVLNNSYYTNLSNLPDHKNTREAIQASFHPAKLDQDTNKNLWQYTYTGLMSKYYYKGNQNSTYDFQNYSTNENYTKTYNKWLEDKNSRLKKLQDQWKKVYPQLTAQMPTDTTLLQDFGIYSPFYLTPVRISLDWRTTYTHVRYNPLTDKGIGNRVYLQWCSESSCKYSPTKSKCAIVDMPLFIAFYGYIDWCIKCTGNSGLVKDARIMVRCPYTEPQLVGATEDVGFCLLSNTFMNGDMPVLAPYIPISWFVKWYPMIAHQKETVEAIVSCGPFMPRDQEAKSWDITMGYRSCFKWGGSPLPTQAIDDPCQKPTHPLPDPDRHPRLLQVSDPTKLGPKTIFHRWDMRRGQFSKRSIERMSEYTEYDEYFETGLPSKRKKFDTPAEGLQGEQRKAYDLLQALEASQEESGSEDQEQVPPQETQTQQLLQQLQLQKHHQRVLRQGLKHLLGDVLRLRRGVHWDPLLT

SEQ ID NO: 1151 - DNA, 3187 bp, Alphatorquevirus sp.
agacccccgctcgtgctgacacgctcgcgcgtgtcagaccacttcgggctcgcgggggtcgggaattttactaaacagactccgagttgccattggacactgtagctgtgaatcagtaacgaaagtgagtggggccagacttcgccataaggcctttaattcgggctcgggactggccgggctatgggcaaggctcttagggttatcgctctttaaaacatgtttctcggcagggtctggagaaagaaaaggcaagtgccactgccgacactgccagtggtgccgcttccacaacctacacgtatgagcagccagtgtagaccccctgttcacaatgtccaggggctggagcgaaattggtatgagtccttcttccgcggccatgcttgtttttgtggttgtggtgatgctgttactcatattaatcatctggcggctcgttttggacgtcctcctgctacctcaactccccgaggaccacagacaccttcagtgaccccgttcccggccctgccggcccctgagcccacgcccgagccatggcgtggcgccggtggcgatggcggccgtggtggagacgccggaggcgccgccgctggagaaggagacgccggagacccagacgacgccgcccttatcgacgccgtcgacctcgcagagtaaggaggcgcagggggcggtggaggcgcgcttacagacgttgggggcgacgcagacgcagacgaaagcacaaaaagagacttgtactgactcagtggcagccagcagtagttaaaaggtgcttaatagtagggtacgaccccataattatctgtggcattaacagaacctccttcaactacactacacactcagaggactttacttttaataatgaaagctttggtggggggttatgcactgctcagtacaccctaagaatactattccaagaaaaactagcccagcacaacttctggtcagccagcaacgaagatctagatctgggcagatatctaggagggtccttcatattttttagacaccctactgtagacttcttagtaagggtcagaaccagtcctccttttgaagacacagacatgacagccatgacactacatccaggcatgatgatgctaagcaaaaagacaattaaaatacctagtttaaaaactagaccctccagaaaacactatgtaagaattagatttggggcacccaagttatttgaagacaagtggtacccccagaacgagctctgtgatgtaactcttgtaactatacaggcaaccacagccgatttccaatttccgttcggctcaccactaacgaactccatctgttgcaacttccagatcctgaacagcaactatgacaatgcacattctataactaactacagtactgacgttacacacaaatggcactcctatagagaaaaatgctatgactttttattaaaccaatatagctactacaacacaaaacaggttgtggcccagcttaaatatggctgggaccccaaacaaaaccccataataccaactacaaataatgcctcaagttctagaaaccctaaaaacttaacaagagaaaatgttactacccaatacccacactgggacacaaagtacggtggtctagcatatggttatacaccaagtactaaccgcccacaagggtcttcagcacaggacctaaggcagtcaatgttaaagggcaacaagttttacacacaagcaggcaaaaatcttgtagagaccttcacaccaattaagtttcaaactgaagacaataccaacatctttgactactacacaggcatgtacagcagcatatttctgtcctcaggcagatcaaacccagaagtaaaaggcagctacacagacatatcatacaaccctctaacagacaagggggtaggcaacatgatatggatagactggctaacaaaaggagatacaatctatgaccccaaaaagagcaagtgcctactaaaagactttccactttggtgcatggtatacggatacgcagacttttgcagaaaacaaactggagactcaggcatactatatgacaccagagtagtcataagatgtccctatacttatcctcaacttataaaacacaacgatagcagcttcggcttcgtaccctacagcgaaaactttgggctagggcgactaccagggggcaacccaaatccccccacgagaatgagactgcactggtaccccatgctgctacaccaaatagaggtactagagtgccttgcacaaaccggaccgtttgcctaccacggagacgagagaaagactgtactgactgccaaatacaagttcagatggaagtggggaggaaaccctgtgtttcaacaggttctccgagacccctgcaccggaggtgccgtggcgccccacaccagtcgacaccctcgttcaatacaagtctatgacccgaaataccaggccccggagtacctgttccacaagtgggacttcaggaggggactctttagcactaaaggtattaaaagagtgtcagaacaaccaacaaatgatgagtttcttacaggccgcagcaagagacccaagaaagacacaaaccccgctcctcaagaagaggagcaaaaagaagactcgcgtttccgagtcccacagctcagaccctggctcccctccagccaggaaacgcagagccaaagcgagcaagaagaaacagtcccgaaaacggtccaagaacagctacaagaacaactccagcagcagcagctcatgggaatccagctccgaaacgtctgtctccagctcgcaagagtccaagcggggcacagtctccaccccgttttccaatcccatgcataaacaaggtttttattttccctgacagggaacccaaaccccctccttccagcagagactggcaggaggagtttgaggcctgtaaagcctgggacaggcctgccagaaataaccttagcagtccccccttctacccctggatgcccagggagccccccacctgtcgtgtaacctttaaacttggctggaaataaaattgcaaggccgtgggagtttcacttgtcggtgtctgcttattaaggtcactaagcactccgagcgccagcgaggagtgcgaccccctgccctggacccacttcttcggagccgcgcgctacgccttcggctgcgcgcggcacctc

SEQ ID NO: 1152 - protein, 769 aa, Alphatorquevirus sp.
MAWRRWRWRPWWRRRRRRRWRRRRRRPRRRRPYRRRRPRRVRRRRGRWRRAYRRWGRRRRRRKHKKRLVLTQWQPAVVKRCLIVGYDPIIICGINRTSFNYTTHSEDFTFNNESFGGGLCTAQYTLRILFQEKLAQHNFWSASNEDLDLGRYLGGSFIFFRHPTVDFLVRVRTSPPFEDTDMTAMTLHPGMMMLSKKTIKIPSLKTRPSRKHYVRIRFGAPKLFEDKWYPQNELCDVTLVTIQATTADFQFPFGSPLTNSICCNFQILNSNYDNAHSITNYSTDVTHKWHSYREKCYDFLLNQYSYYNTKQVVAQLKYGWDPKQNPIIPTTNNASSSRNPKNLTRENVTTQYPHWDTKYGGLAYGYTPSTNRPQGSSAQDLRQSMLKGNKFYTQAGKNLVETFTPIKFQTEDNTNIFDYYTGMYSSIFLSSGRSNPEVKGSYTDISYNPLTDKGVGNMIWIDWLTKGDTIYDPKKSKCLLKDFPLWCMVYGYADFCRKQTGDSGILYDTRVVIRCPYTYPQLIKHNDSSFGFVPYSENFGLGRLPGGNPNPPTRMRLHWYPMLLHQIEVLECLAQTGPFAYHGDERKTVLTAKYKFRWKWGGNPVFQQVLRDPCTGGAVAPHTSRHPRSIQVYDPKYQAPEYLFHKWDFRRGLFSTKGIKRVSEQPTNDEFLTGRSKRPKKDTNPAPQEEEQKEDSRFRVPQLRPWLPSSQETQSQSEQEETVPKTVQEQLQEQLQQQQLMGIQLRNVCLQLARVQAGHSLHPVFQSHA

SEQ ID NO: 1153 - protein, 147 aa, Alphatorquevirus sp.
MFLGRVWRKKRQVPLPTLPVVPLPQPTRMSSQCRPPVHNVQGLERNWYESFFRGHACFCGCGDAVTHINHLAARFGRPPATSTPRGPQTPSVTPFPALPAPEPTPEPWRGAGGDGGRGGDAGGAAAGEGDAGDPDDAALIDAVDLAE

SEQ ID NO: 1154 - protein, 128 aa, Alphatorquevirus sp.
LAPLQPGNAEPKRARRNSPENGPRTATRTTPAAAAHGNPAPKRLSPARKSPSGAQSPPRFPIPCINKVFIFPDREPKPPPSSRDWQEEFEACKAWDRPARNNLSSPPFYPWMPREPPTCRVTFKLGWK

SEQ ID NO: 1155 - DNA, 3186 bp, Gammatorquevirus sp.
cgggtgccgaaggtgagtgaaaccaccgtagtcaaggggcaattcgggcggctgcagtctagcggaacgggcaagaaacttaaaaattccgcgcgctgtgcgcgccctatgctttattacagatgtctcttcaaaaccttcctaaatgttacaaacctcctcttgtagatccatggggacaacaagaactctggattcaaaatgtcgaattttcacatgatacatggtgcagctgtgctcattggcttagtcatcttctttctattacttgtcctcttgattctaaaaatcgtgctcggaccgtccacgagattattgacataggtcaaaattgtgataaccttttgtctttgagagccttgcccagtgtccctgcagattcatggtctggccctggagaacccggcgccgctggcgccgcagacctcgcaggtggagacgctggaggtggcccagacgaaaccgaaagaaacgtacctataccagaagacgaactgttagagcttctagaaaacgccgaaaaagacgaaaacgtaccagggtaagaaaaaaaaagcctttattgaacttaaaacaatggcaaccagaaagtataaaactctgtaaaattattggacatacacctttaaatattggatgtaatggtagacaaataagaaactatacttactggcaagactattatattcaccctaaatgtccatcaggaggaggattttcagtttataaatggtctcttgcatacttatatgaagactattgtagaagaaaaaatatttggactaaatctaactgcccatatgacttatgcagataccttggaactagaatcaaaatgtactcacacccagaagtagactttatagttacttactctagaaactatcctatggtagtagatgaaactacatacatgcttacacatccatctattttacttttaagaaaacatagagtaatagtacctagcagaaaaataaaacccaatggaaaaggatacaaaaaaatatttattaaaccacctagacaactagttaacaaatggttttttcaaaaacaatttaatgaccaagggctgtttttattacaaatagcagcagctgacttacaatatccaacaataggaccaaacagtccaaacagactagtcacacttaacattttaaacaaccaatacttttatggacaacctaactggggagacgcctcacaaacttatacaataacacaaggaacatttcatttactagacaaaaacacaaaaaccctaatagatggaaaacttatagactacaaaattccacaggatataggcacagcccagaaaaaacatttatatgcatcaggactctttaacagacaaattctaaacatacaatactacacagacacagataaagtacgataccctacaccaactatgcaagtacaatacaacccaatgaaagacacaggtaaaggaaacaaaatatactttatctcaacattacaaacatcatggtcaccacctacaacagacagacttttatattggcaaggagaacctttatggctacaactatatggactagtagactacattttaaaagctaaaggctcttcctcagcattacaggatgccatttgtgtaatagagtcacccttcatagaaccacaaacccacaacaaaaaattcgttgtggtaggaaatccttttatgcaaggccaaactgactgcaaaaacccacctacaggaaaccaactaaacaaatggtttttaacactagaagaccaaatgcctgctttaaatgacatagtaagtgcaggcccttacatggtaaaacaaacaggatttagatgcacatgggaattacatgttgattataagtcttactttaaatggggaggtgcacaaccaccactacaaaatatttgtgacccccatttacaggaaaccttccctgtgcccgatactgtcagacaaacattacaaatcatcgatccgaaaaaacaagtcccagaatccttactccactcttgggactatagaagagggcttgttactcaaacagcttttaaaagaatgtacaaaggtctctcagatgcagagtcttcttcaccagattcctcagacgagtcagactcaccccaaagaaaaagaaagagaggagacccaccgtgcccggaagaaaaagacaactacaatatccagaccctcaaagaaatctgccaaacgccgcaaaaagaagcaggaaacatcgagcagcagctccacaacttccagcagcagcaatacaacaagaacatcaacatcttaaaattacttgcaatgttaaaacaaaaacagctgcaaatgcaactagcaatgggtatgatggagtaaaattatttccaaaaaaagaaaaaaacccaaaatttaaaggatggggtaaaataatagaagaggaatgcgctaaagcattccacagaccacccagaaaatttgtaaacgaccctccattttatccttggctacctccagtacccaaagtttcatttgcactgaagtttaagggctaggcccacaatgttcacttagtggagtatgtttaataaagtcacaccccctttctgtaaccacgcctcttttgtatacgtcatgaatatattaaaaaccggaaataaattttcgcagagcggagggttcgcgcgctacgcgcgcgaacccatacgcctagggggcgcacattaattgctcctagattgggcagcgcgcgcttgcgcgcgctgccaaatgcgcccctccctcgtgctgacacgcttgcgcgtgtcagaccactacgggctcgggggggcgcgcctgcggcgctaacttatataataaactccacagggggagctgcgctccccctgttacgtcaccccctacgtcacttcctggcgggaaatttaaaaaacgtcacaaagccacgccttaaagggggggccccccctacgtcactaaccacgtgaccgcagccatattgggtgcggtcaaggcgtggccaaaaagcgcgggaaccaatcaaattaaacaactaacaaccaataaaaaaaacccacgtcacaaaaatgggtggttcctttcactctataaaactaactgcacttccgaatggctgagtttttccccgctagacggtgcggagcacaacgagcgcagcgaggagagactcagcagcagcaggg

SEQ ID NO: 1156 - protein, 659 aa, Gammatorquevirus sp.
MVWPWRTRRRWRRRPRRWRRWRWPRRNRKKRTYTRRRTVRASRKRRKRRKRTRVRKKKPLLNLKQWQPESIKLCKIIGHTPLNIGCNGRQIRNYTYWQDYYIHPKCPSGGGFSVYKWSLAYLYEDYCRRKNIWTKSNCPYDLCRYLGTRIKMYSHPEVDFIVTYSRNYPMVVDETTYMLTHPSILLLRKHRVIVPSRKIKPNGKGYKKIFIKPPRQLVNKWFFQKQFNDQGLFLLQIAAADLQYPTIGPNSPNRLVTLNILNNQYFYGQPNWGDASQTYTITQGTFHLLDKNTKTLIDGKLIDYKIPQDIGTAQKKHLYASGLFNRQILNIQYYTDTDKVRYPTPTMQVQYNPMKDTGKGNKIYFISTLQTSWSPPTTDRLLYWQGEPLWLQLYGLVDYILKAKGSSSALQDAICVIESPFIEPQTHNKKFVVVGNPFMQGQTDCKNPPTGNQLNKWFLTLEDQMPALNDIVSAGPYMVKQTGFRCTWELHVDYKSYFKWGGAQPPLQNICDPHLQETFPVPDTVRQTLQIIDPKKQVPESLLHSWDYRRGLVTQTAFKRMYKGLSDAESSSPDSSDESDSPQRKRKRGDPPCPEEKDNYNIQTLKEICQTPQKEAGNIEQQLHNFQQQQYNKNINILKLLAMLKQKQLQMQLAMGMME

SEQ ID NO: 1157 - protein, 149 aa, Gammatorquevirus sp.; identical to SEQ ID NO: 826

SEQ ID NO: 1158 - protein, 110 aa, Gammatorquevirus sp.; identical to SEQ ID NO: 827

SEQ ID NO: 1159 - DNA, 3186 bp, Alphatorquevirus sp.
cgggtgccggaggtgagtttacacaccgcagtcaaggggcaattcgggctcgggactggccgggctatgggcaaggctcttagggttatcgctcttaaaatgccgtttcttggcaggctttggagaaagaaaaggaaagtgcttctgcaaactctgccagctgcaccgagccaaccacctatgagctctgtgtggaggccacccgtgcacaatgtccccggcattgaaaaaaactggtatgaatcctgctggcgtagccatgcatctatgtgcggttgtggcgattttattaatcatcttaatactctggcaaatagtcttggtcgtcctcccgttggcggatttccaccgggacaggggccgtctagagtgagagccctaccggctcctccggcccctgacagcccggagcccacccggaggcgccacactcgtaccgagaacccaacatggcgtggtggggattctggagaagacgccgtcgctggcccaagcgccgctggaggtggcgccgacgacgaagaagacctagaccaaggagacgtcgccgagctgctcgagctgctagacgacccagagtaaggagaaggcggtggaggggcgggtggagacgaaggacatacataagacggacgagacgcaggaaacgccgaaaaaaatttaaactcactcagtggcacccagccacagtaaagagatgtacaataaggggctacattccccttataatatgtggaactggcagcactggaacctcctacctaaactatgccagccacatgtatgacaataaaagactagacccctacggaggaggggtcagcactatgatgtttacactgcaaggactctttgaggagtaccagagacacagaaacaagtggtctacctcaaatgtagacctagaactggtcaggtaccacggctgcagcatgaaactgtaccgctcacccacagcagactttatctttcagtacaacagaaaggccccatttaatgacactcagctaacatgcccagccatgcagccctgcgtacagctaaacacaaaaggcaaaaaaataattttaaaaagctttgccactaaacccaagggaaggggctcagtgactgttaaaatacccccccctacactgtttcaggaccgttggtactttcaaaaggacttgagaaatgtaccgttggtaaccacaaaggccatagccgcaaacctgcggtttccgttctgcccaccacaaactgacaactgttgcatattcttccaggtgctacatccgttttttaataatatacttagcataaccccacaatatcttccaactaactatgaggctctaaagaagcacttatcagaacactttactattagagagcaaccacaaaagggaggcaccacaggagtatactttaacacctttaaaacagaggaacacatatttgaaccaaactggacacaatacaaagaaaactccgcaaattttaacacagcacaaaacaaaaagtactcaaacatttccagcttatggggagacaatgtgtacacagagaaaatagtacaggcatttgaagacaatgccacaaacatgtacgacgcacgcaaacgcaccacattccaagagagcaaatatctgtcccacaaaacaggcatattcagtcctatactactgtcacagcagagacttagcccagactaccccggcatgtactggactgttacttacaatccatttaatgacaaaggcataggaaacaaagtatggatagactggtgcaccaaaaatgactctcagtacagagaaacagcaggcagaattcccatactagacattcccctgtacgcggccttactaggttatagagactattgttccaaatactaccacgacagaggcctacacaaagaagtaagagtaacaattcaatgcccctacactgaccctccgctgtataacaaggacaacacggacatggggtacgtcccctacgactttaactttggagacggaaaaatgcccgacggtgcaggatacatacccgaggaatacagattcaaatggtacatctgcatgtttcaccagcaaggctggatgaatgacatagtgcagtgcggcccctttgcatacaacttaaaagaaaaaaacgtggcattagtatgcaaatacaaatttaatttttcttttgggggcaatcctatcgttacacagacgcttaaagaccccagcacacaaccagactaccccatacctggctccggtcagttccctactagactacaagttacggacccgaaactcctcaatgaaggctatatcttccgacggtgggatatcagacgtggcttctatggcgaaaaaagtcttaaaagaatgcaacaaaaaccaacaaatgctgacttacttacaggaccttcaaaaaaaccaaggttcgaggtccccgccgcggcgcaagaagaagactcaacttcaggggaaacaaaattggtaccctggtacgagtccagtgtcacggaaacagagacagaagcagaagcccaagaagaaacgcaagagacacacctccacgagcagctcaagcagcaactcctccaacaaagaaaactccagcgacacctcagattcttcttcgagcaactagtaaaaacccaacatcacctgcacgtacctttatacccacagtaggccccaaagcactgctattcccagagaggcttccacaaccacacagcaaaggtgactggcagacagaatacgaggcctgtgctgcctttgacagaccaccccgtacagaccttacacgcccccccttttatccctggatgcccagacaattcactgttaacttttccatgggctttcaataaacaaggccgtgggagtttcacttgtcggtgtctgcttattaaggtcaccaagcactccgagcgtaagcgaggagtgcgaccctagtagggtactcaacttcttcggagccgcgcgctacgccttcggctgcgcgcggcacctcagaccccccccccgaagatcgtcactaaccacgtgactcccgcaggccaaccacagtgtacgtcgtgcacttcctgggcatggtctacatcataatataagtaagtgtacttccgaatggctgagttttccacgcccgtccgcagcgaggaggccacggagaggaccccgcgcgtcccgaggg

SEQ ID NO: 1160 - protein, 742 aa, Alphatorquevirus sp.
MAWWGFWRRRRRWPKRRWRWRRRRRRPRPRRRRRAARAARRPRVRRRRWRGGWRRRTYIRRTRRRKRRKKFKLTQWHPATVKRCTIRGYIPLIICGTGSTGTSYLNYASHMYDNKRLDPYGGGVSTMMFTLQGLFEEYQRHRNKWSTSNVDLELVRYHGCSMKLYRSPTADFIFQYNRKAPFNDTQLTCPAMQPCVQLNTKGKKIILKSFATKPKGRGSVTVKIPPPTLFQDRWYFQKDLRNVPLVTTKAIAANLRFPFCPPQTDNCCIFFQVLHPFFNNILSITPQYLPTNYEALKKHLSEHFTIREQPQKGGTTGVYFNTFKTEEHIFEPNWTQYKENSANFNTAQNKKYSNISSLWGDNVYTEKIVQAFEDNATNMYDARKRTTFQESKYLSHKTGIFSPILLSQQRLSPDYPGMYWTVTYNPFNDKGIGNKVWIDWCTKNDSQYRETAGRIPILDIPLYAALLGYRDYCSKYYHDRGLHKEVRVTIQCPYTDPPLYNKDNTDMGYVPYDFNFGDGKMPDGAGYIPEEYRFKWYICMFHQQGWMNDIVQCGPFAYNLKEKNVALVCKYKFNFSFGGNPIVTQTLKDPSTQPDYPIPGSGQFPTRLQVTDPKLLNEGYIFRRWDIRRGFYGEKSLKRMQQKPTNADLLTGPSKKPRFEVPAAAQEEDSTSGETKLVPWYESSVTETETEAEAQEETQETHLHEQLKQQLLQQRKLQRHLRFFFEQLVKTQHHLHVPLYPQ

SEQ ID NO: 1161 - protein, 171 aa, Alphatorquevirus sp.
MGKALRVIALKMPFLGRLWRKKRKVLLQTLPAAPSQPPMSSVWRPPVHNVPGIEKNWYESCWRSHASMCGCGDFINHLNTLANSLGRPPVGGFPPGQGPSRVRALPAPPAPDSPEPTRRRHTRTENPTWRGGDSGEDAVAGPSAAGGGADDEEDLDQGDVAELLELLDDPE

SEQ ID NO: 1162 - DNA, 3185 bp, Alphatorquevirus sp.
cgggtgccggaggtgagtttacacaccgcagtcaaggggcaattcgggctcgggactggccgggctatgggcaaggctcttaaaaaagccatgtttctcggtaaactttacagaaagaagaggcgcctgccactgtccccactgcacactccacagaaaactcgcaggcttttgactgctatgtggaggccccccgtgcacaatgtccgcgggcaggagagacagtggtacgagtcctgctttcggtctcacgcttgcttttgtggctgtggtgattttattcggcatctttgtgatctggcgaatgattttggacgtcctcctaccgtccctcgacccccggcaccaccacctccagtaaggcctctgccagctctcccggcacccccaaacccccccggtagcagagcggcatggcctactggtggtggagacggagaagacgagccccgaggtggaggagacggcgctggaggactcgcagaactcgcagacgacgagctgctttccgccgtcgtggacgccgccgaagagtaagaaagaggagggggaggtggaggaggacttatagaaaatggcggaggggcagaaagagacgcaggcacaaaagacgcttaatactgactcagtggcaaccagcctttataagacgctgctatatagtgggctacctgcccctcttaatatgcggagaaaacacctccggcagaaactttgctacccactcagacgacctaatatccaacggaccttacgggggaggcatgaccactaccaaattcaccctcagaatactgtatgacgaacacctgagacaccttaactactggactgtcagtaacgaggacttagacctgtgcagataccttgggggaaccttctacgcgtacagacaccccactgtagactttatcatacaaatccacaccagtccccctttcctagacactcccctaacgggtcccagcatacacccaggcatgctaatgctgacaaaaaacaaaatactaatacccagcttaaaaaccagacctaacaaaaagcacaaagtaaaaattagattcaggccccctaaactattccaagacaagtggtacccccagtcagagctctgtgacacaacactactaaccatctttgcaaccgcatgtgacctgcaatttccgttcggctcaccactaacgaacaacccttgcgtcaacttccaggtgctaggttccgtttacaaacggcacctcagtatacttcctgataaactaaattcatatgaacaacactatgaaactaacctatataaagtagtacaatattatgatacattccaaactatagcacaaataaaacctagcgccacacaagcaaacttctcacccccatggaatgatatacaaaataaaataacattaagtgaaacaggctcaaaccaatccacaagcaatgacacctggtacctaggccatgcatatgacaaagataaaatacaacaagcagcctataaaattagagacaaatacttaaccgcaacaagattagcactaccagcactagcaacactaggaaacaaaatgctagaataccacacaggcatctacagctctatattcttatctgcaggcagatcttactttgaaaccctaggggcctacacagacataatttacaacccactagtagacaaaggcataggtaacaaattgtggctagaccccctatcaaaagaagacgcagtgctaaacagaaaacaagcaaaagtactaatagaagacatacctctatgggcagccctatttggctacacagaatttgcagccaagtacacaggagactctgccataacagccaactacagactgacaatacggtgcccctacacagaccccatgctgacagacacaagcaacgaagaccagggctttgtaccctactctaaaaactttggcaacggaaaaatgcccggaggcagtgccaatgttccactgactatgagaataaggtggtaccccatactattccatcagctagaatggctagaagaaatgattcagtctggaccgtttgcataccggggcgacgaaaaaagctgtgtgttagccataaagtacattttcagatggaaatggggaggtaaccctgtgtctcaccagattgtgcgaaatccctgcaaaggagggtccggttcccgtcgagagcctcgctcaatacaagcagctgacccgaaatacatcacaccgagactatccttccactcgtgggacttcagacgagggctttttggctcggcaagtattaaaagaatgtcagaagaatcaacagctcctgtctatcctacaggcccaccaagaaaaagaccaagaaaagacacggacccgtacgagtcggggcaagaagaaaactcactttcaagacacctccagctccagccctgggtccactccagccaagaagcccaaagcgaagaagaaacgcaagtcccgacggacctacaggaacaactcctccagcagctccgagaccaacagcagctccgacagcacctgcagtccctcgcctcacaagtcctcaaaatcagggcgggatacggcatacaccccctattatcttcccaagcctaaacaaggtctttatgtttgagcccaaaggccccaaacccatacagggctatgaggcctggttagatgagtaccagacagcaggcgtctgggataggccggtaagaacataccacacagacacccccttctatccctgggcacccaaaccccccaaccaattccgtgtcagcttcaaactcggctttcaataaaatttcaaggcctttgactgttcacttgtcggtgtctacctctataagtcactaagcactccgagcgtcagcgaggagtgcgaccctagggggggactcaacgccttcggagccgcgcgctacgacacaggagactctgccataacagccaactacagactgacaatacggtgcccctccgccattttctataagtcctcctccccccccccgaagatcgtcaataaccacgtgactccaacaggccaaccagagtctatgtcgtgcacttcctgggcatggtctacatcataatataagtaactgcacttccgaatggctgagttttccacgcccgtccgcagcggcaacaccacggagggtgatccccgcgtcccgaggg

SEQ ID NO: 1163 - protein, 732 aa, Alphatorquevirus sp.
MAYWWWRRRRRAPRWRRRRWRTRRTRRRRAAFRRRGRRRRVRKRRGRWRRTYRKWRRGRKRRRHKRRLILTQWQPAFIRRCYIVGYLPLLICGENTSGRNFATHSDDLISNGPYGGGMTTTKFTLRILYDEHLRHLNYWTVSNEDLDLCRYLGGTFYAYRHPTVDFIIQIHTSPPFLDTPLTGPSIHPGMLMLTKNKILIPSLKTRPNKKHKVKIRFRPPKLFQDKWYPQSELCDTTLLTIFATACDLQFPFGSPLTNNPCVNFQVLGSVYKRHLSILPDKLNSYEQHYETNLYKVVQYYDTFQTIAQIKPSATQANFSPPWNDIQNKITLSETGSNQSTSNDTWYLGHAYDKDKIQQAAYKIRDKYLTATRLALPALATLGNKMLEYHTGIYSSIFLSAGRSYFETLGAYTDIIYNPLVDKGIGNKLWLDPLSKEDAVLNRKQAKVLIEDIPLWAALFGYTEFAAKYTGDSAITANYRLTIRCPYTDPMLTDTSNEDQGFVPYSKNFGNGKMPGGSANVPLTMRIRWYPILFHQLEWLEEMIQSGPFAYRGDEKSCVLAIKYIFRWKWGGNPVSHQIVRNPCKGGSGSRREPRSIQAADPKYITPRLSFHSWDFRRGLFGSASIKRMSEESTAPVYPTGPPRKRPRKDTDPYESGQEENSLSRHLQLQPWVHSSQEAQSEEETQVPTDLQEQLLQQLRDQQQLRQHLQSLASQVLKIRAGYGIHPLLSSQA

SEQ ID NO: 1164 - protein, 156 aa, Alphatorquevirus sp.
MGKALKKAMFLGKLYRKKRRLPLSPLHTPQKTRRLLTAMWRPPVHNVRGQERQWYESCFRSHACFCGCGDFIRHLCDLANDFGRPPTVPRPPAPPPPVRPLPALPAPPNPPGSRAAWPTGGGDGEDEPRGGGDGAGGLAELADDELLSAVVDAAEE

SEQ ID NO: 1165 - protein, 126 aa, Alphatorquevirus sp.
LGPLQPRSPKRRRNASPDGPTGTTPPAAPRPTAAPTAPAVPRLTSPQNQGGIRHTPPIIFPSLNKVFMFEPKGPKPIQGYEAWLDEYQTAGVWDRPVRTYHTDTPFYPWAPKPPNQFRVSFKLGFQ

SEQ ID NO: 1166 - DNA, 3184 bp, Gammatorquevirus sp.
cgggagcccgaggtgagtgaaaccaccgaggtctaggggcaattcgggctagggcagtctagcggaacgggcaagaaacttaaaatactttatttttcagatgtcagaaatatgtttcaaagacttctactgtccaacaccttacaataaggaaactaaaaatcaaatttggatgtcccaaattgctgattctcatgacaatatctgcgactgcaagtatcctttttgccatttgcttgcttctatttttcctcctggccatcaagaccgcaatctctcaattaaccagatactgcttagagattacacagaaaaatgcctttctggtggagacgcagacaaaagagatggtatggcaggtttagatggaaaagaagaccttataaaacaagaagaagaagatatcgaagaaagaaaactagatggcctgctcgccgccgccgcagacgccgcagaaggcacaaggtaagaaaaaagaaacaaaaaattactctaaaacaatggcaaccagactctattaaaaaatgtaagattaaagccatatctactctagttatgggagcagatggatcccaatataaatgctacacaaacgaagcagcatcctaccctccacctaaagagccttctggaggaggttttggagtagaaatttttactctacaacacatgtacaatttatataaagctcacaaatgcatatggactacttccaatgaatatatggacttagccagatacactggctccaaatttattttctacagacatagaactacagactttattatttcctatgacctgcagcctccatttactatagacaaatatacatatccacaagcacacccacttaatcaatttttacaaaggaaaaaaagaatactatatagtcttaaaactaaaccctggggcccatctaaagttattctaaaaattaaacctactaaaatgttatcaacaaaatggttttttcaaagagaacttgctaaaataccacttctaaaaattcaagcagctgcttgtgatctaagctatgcaaacatgggaaaaacatggcaaagtaacatgttatcaatctattttttaaacacagcattttatcaggaaagcaattggggtaactcaggcattagccattacctaccatataaaacaattaatactaatttatattactggtataaagacagcagaggaaataaaagtaatataaaagtagatacaagtacttactataccacagttaactacaatacaggatattttaataccaaagttttaaatgcttatgctataacaacttcacacacccaagactccccagtagctatggctctaacccctgtttctgtaggcagatacaatccactaacagacacaggagaaggcaatgagctatgggctgtttccagcctcactgaacactatgaccatccagctacagacaaagttttaatttttaaaaactatccactatggttaatgttctatggctttaaaaactacatagaacaagaaaaaggagataaaagatttctagactcctacttttttgtttttagatgtccaagcatgcaaatactacaatctgtagtaaaacaagactactttccatttatagaccaatcttttctaaatggcaatatgccatatggtgaatacttagatgaaaacaaaaaaaaattttggtatccaacaataaaaaaacaactagaaacaattaacacaattgttaccttaggaccatttataccaaagtttaaagatgatagagacagtacatgggaattaaactataaatgttcattttattttaagtggggaggacaacagattacagaaaaacttgcaatggatcccagcaaacaagaccaatttgataacccctataacatgcagcagggaatacagatatccaacccacaaacacaaacatgggaaacaacactgcaccactgggactacaggagagacatacttacaaagacagctattaaaagaatgcgagaaaacctcgacactgatacagatgtcacaacaattattacaggcaaaccaccaaaacagagaaagatcacaggagaaatacaagcactccaacaagaaaacaaagagatccaagcatgtctccactcactcttcgaagaagataccttccaagaagaggagagtctccgagagctcatcaagcagcaacacaacaagcaacaccagctcaagcaaaacctcctacacctcatctcagacctaaagaaacaacaacaacaccttcaaatgcaaacaggaatcctacattaaccagatttaaaccaggttttgaagaaacaacagaaagagaacttgcaattgcttttaaaagacctataagaacttttaaagaagaccctccattttacccatggctaccccctgctccccttgttgtaaactttaacctcaactttaaatactaggccaacactgtacacttagtagtgtttgtttaataaagtttgctccccaaaaaaatgtaaaaaaaaaaaaaaaaaaaaaaataaaaaattgcaaaaattcggcgctcgcgcgcgctacgcgcgcgcgagcgccgtcacgcgccggcgctcgcgcgccgcgcgtatgtgctaacacaccacgcacctagattggggtgcgcgcgctagcgcgcgcaccccaatgcgccccgccctcgttccgacccgcttgcgcgggtcggaccacttcgggctcgggggggcgcgcctgcggcgcttatttactaaacagactccgagttgccatttggccccccctaagctccgcccccctcatgaatattcataaaggaaaccacaaaattagaattgccgaccacaaactgccatatgctaattagttccccttttacacagtaaaaaggggaagtgggggggcagagccccccccacaccccccgcgcgcaccccccctacgtcacaaaccacgcccctgccgccatcttgggtgcggcagggcgggggctaaaatggcgggacccaatcagtttatagttttaatacccaattaaaacatgccacgtcacaagcaaggggtggagactttcactctatataactaagtgcggtgacgaatggctgagtttaccccgctagacggtgcagggaccggatcgagcgcagcgaggaggtccccggctgcccatggg

SEQ ID NO: 1167 - protein, 661 aa, Gammatorquevirus sp.; identical to SEQ ID NO: 963

SEQ ID NO: 1168 - protein, 122 aa, Gammatorquevirus sp.; identical to SEQ ID NO: 964

SEQ ID NO: 1169 - protein, 109 aa, Gammatorquevirus sp.; identical to SEQ ID NO: 965

SEQ ID NO: 1170 - DNA, 3183 bp, Alphatorquevirus sp.
cgggtgccggaggtgagtttacacaccgcagtcaaggggcaattcgggctcgggactggccgggctatgggcaaggctcttaaaaaagacatgtttctcggtaaactttacagaaagaaaagggcactgctactgcctagcctgccagctgcaaagaaaaaaccacctgctatgagccagtgggtccctccggtgcacaacataaatggccgctgccaccagtggtatgaggggtgctaccgtactcatgctgctttttgtggttgtggcaattttattaatcaccttattgctctgggcgatcagtatggcttcaggccgggttcgagggctcccggcgctccgggagtaggcggacctccggtcccgctccgtcgagccctgccggctccggagccttcccagcaggctaacaacaacaacaaccagagatggtctggggatggtggcgccgacgcaggcgagggtggctccggagcttctggaggaggagagcagctgccagaagacgatctcgatggattgctcgccgcgctagacgacgaagagtaaggagaaaaaggaggtggaggaggaggagagggcgacgcagacggtttatctatagaaaaaagagacgttacagacgcaggagaaagagacaaaaaataataataaaacaatggcaaccggccgttgtcagacgctgcaggatagtggggtacatggctgctctaataagtggaaacgggacctttgctacaaattacagcagccacttagaggacagaatacagaagggaccctttggagggggccacagcaccatgagattctctctgtacgtgctgtaccaagaacacctcagacacatgaactactggacttacacaaacaaggacttagaactgactagatacctgggggcgactataaccttctacagacatcccaccagagactttatagtgacttatagcagacgcacccctctgggaggaaacatactgacagccccctcgctacatccaggcaatgcaatgctaagtaagagaaaaatactcatacccagcttagaaaccagacccaagggtaaaaagacaaaaaaactaagaatagggcccccaacactactaatagacaagtggtactttcagaaagacttttcagacgttacactgtttaacctcaatgttacggaagctgacttgcggtttccgttctgctcaccacaaactgacaacatttgcgtaaacttccaggttctgaaatcctgttacaacgaatacctaggtatacatacatttgacaatgacaataccgataataaattaaaagatttttttaataaagctctactcacaacaggcagacaaaacacagagataaatatactaaacacatttagaacacagggatgccttagccatcctcaagtaaatgtacccaatgctaccagtaacccaaacaaccaagtaccatcggacgaatatttccaaaaactagatggactctggggaaacccaatatatgcaaactccagaaacaatggaggcaaatccactgaaaactttaataaaaacacttttatagagaaatacctaataggtaacatgagcagctaccacaaaaaatttacaacagacaacctgccagaaagctggaaaggcaacaaagcacactgccacctcacaggaatatacagtccaccatacctgaactcaggcagaatatctccagagatatttggcctgtacacagaaataatatacaacccatacacagacaaaggcaaaggaaacaaaatatgggtagacgcactcacaaagggagacaacatatacagcagcacccagagcaggtgtctcttacaagacctacctctctggtgcgcctgtttcgggtacacagactggattaaaaaagaattaaaccactgggacgcaccgtggaactacagactcctaatggtgtgtccctacacatacccaaaactgtacaacgatgcaaacccaaactatggatacgtatgcttctcatatcaatttggagcaggacagatgccggacggcagctcctacgtccctataaaatggaggggaaaatggtaccctaacatgatccaccaacaaaaagttatggaggacctagccagatcaggcccctttgccccaaaacaacaggtacctagcgtgcagctcagcatgaagtacaaatttgcatttaactggggcggtaatcctattttggaacagattgttagagaccccagcactcagcccacctacgaaattcccggtgccggtaacctccctactagagtacaagtcatcgacccgagggttattggaccacaatactcatttagatcctgggactggagacgcggacagtttaatgaaaaaagtattaaaagaatcgcagaacaacaagagacttctgagtatctattttcaggcccaaaaaggccaaggatcgaccagcgcccttacaacccacaagaagaaagctggtcttcaacagtccaacaaagagaaccgaaaccgtgggcctcagaagaagagacggagagccagagccaaagcgaagaagaggcggagacatcaatcagagagcagctgcagcaccagctccaagagcaacacagaatcagacatggaatcaagtgcctcttcgagcagctagtcagaacccagcagggagtacacctacatccatcccttgtgtaggcccaaagaagtacatgtttccagacagggcccctaaaccagctccgagcagcggagactgggagatggaatacctaatgtgtaagctgtttaacaggccccccagaagcaacctaaaagatgtgcctttctacccgtgggttaaaaaccagtacaatgtaagctttcaactcaactacaaataaacctcagcttcaacttgctaggccgtgggagtttcacttgtcggtgtctacctcttaaggtcactaagcactccgagcgggggcccccccccgcggggggctccgccccccggccccccccagctaacgtcactaaccacgtgtccacaggccaccaaccacagtgtacatcgtgcacttcctgggcacggtctacataatcatataaagcgctgcacttccgaatggctgagtttttgctgcccgtccgcggagaggagccacggcaggggatccgaacgtcccgaggg

SEQ ID NO: 1171 - protein, 758 aa, Alphatorquevirus sp.
MVWGWWRRRRRGWLRSFWRRRAAARRRSRWIARRARRRRVRRKRRWRRRRGRRRRFIYRKKRRYRRRRKRQKIIIKQWQPAVVRRCRIVGYMAALISGNGTFATNYSSHLEDRIQKGPFGGGHSTMRFSLYVLYQEHLRHMNYWTYTNKDLELTRYLGATITFYRHPTRDFIVTYSRRTPLGGNILTAPSLHPGNAMLSKRKILIPSLETRPKGKKTKKLRIGPPTLLIDKWYFQKDFSDVTLFNLNVTEADLRFPFCSPQTDNICVNFQVLKSCYNEYLGIHTFDNDNTDNKLKDFFNKALLTTGRQNTEINILNTFRTQGCLSHPQVNVPNATSNPNNQVPSDEYFQKLDGLWGNPIYANSRNNGGKSTENFNKNTFIEKYLIGNMSSYHKKFTTDNLPESWKGNKAHCHLTGIYSPPYLNSGRISPEIFGLYTEIIYNPYTDKGKGNKIWVDALTKGDNIYSSTQSRCLLQDLPLWCACFGYTDWIKKELNHWDAPWNYRLLMVCPYTYPKLYNDANPNYGYVCFSYQFGAGQMPDGSSYVPIKWRGKWYPNMIHQQKVMEDLARSGPFAPKQQVPSVQLSMKYKFAFNWGGNPILEQIVRDPSTQPTYEIPGAGNLPTRVQVIDPRVIGPQYSFRSWDWRRGQFNEKSIKRIAEQQETSEYLFSGPKRPRIDQRPYNPQEESWSSTVQQREPKPWASEEETESQSQSEEEAETSIREQLQHQLQEQHRIRHGIKCLFEQLVRTQQGVHLHPSLV

SEQ ID NO: 1172 - protein, 161 aa, Alphatorquevirus sp.; identical to SEQ ID NO: 519

SEQ ID NO: 1173 - protein, 134 aa, Alphatorquevirus sp.; identical to SEQ ID NO: 613

SEQ ID NO: 1174 - DNA, 3181 bp, Betatorquevirus sp.
cgggagccgaaggtgagtgaaaccaccgaagtctaggggcaattcgggctagatcagtctggcagaacgggcaagaaacttaaaataatatacttttttacagaaatgagcaccttcttaacaccatcaatatacagcaaaaatggcttagaaaaccaatggctaaactcaatttggaatatccatgacctgatgtgcggatgcaacgactgcttcaaacatttatttgaaattctcaaaagaaaaggaaacctaccatgcctcccttcaattaccaccggagacgatactacaaaagaccccaatggagatggcgccgcagacgctggactagaagatggagaactagaccgtttattcgcagaggatacacaagaagacgaagggtaagaagacgaaaatttttaaaatacaaacataaaaaactaaaaactataactgtaaaacaatggcaaccagataatataagaaaatgtaaaattaaaggacaactatgcttattaacatgtggacaaaacagaattaacaataactttatattaactgctgaaagtataatacctgttggggaaccgggagggggaggcttttcaataatgcaattgacattaagagccttatatgacgaatatacacattttagaaactggtggacaacaagcaactgtggactaccattagcaagatactcaggttgcagtattaaattttattgtagcaatgacactgactatatagtgacagcacaacacacaggaccgtttgaagtgactgtagactcatatttaaacacacaacctagtagacacattatgaacaaaaaatcatttgttgtaccaaaactaaacccaaacaaaaaaaaaagaccatatataaaaaagaaatttccacctccagcactattttataacaaatggtacttccaacaagacatactaaacactccactaattctactatacatatcggctacaagctttgaccaaatgtatgctccaaacgaccaaattagcacaaacataacattcttttcactaaacacagacttatttcaaaatccatactgggaaaaagacaataacgaaccatactatccaaaagtagtaggttcacaaaatacaggactatacagttcagacgaacagtttacacagaaaaacgaaatatcatttagtaaattatatccactattaaacacaacacaatacaaactgataccccatacacacgcaaaatttgaaaacatagaagattataacaagccacaaaactggtacaatccatttacaattacagcacatgatgaacatttagaaacaccaatttactatggaattcaccctacaaatgacgaacaactaaaaggacaagcaccaaaaccatcaattttaccaataacaggtttataccaagaatgtagatacaacccctttaaagacaaaggaataggaaacattttttatataaaatgcactaaaaaacaagaaggctcatttacaacacttccaacagataatagattagtactaagagactttccaatatggctagcaacatggggatggactagctggttagaaaaatctaaacctgtatatcacctacaagaagactatcaattagtaatacaatcaaactacatagaaccaaaaatgagatgctatgtaccattagacatgtactttacacacaacgacggaaaaaacctaacacaaacagataaagcacactggcaccctaagtttgcttttcaaacagaaaccctaagcaaactagcagaaacaggaccagcaacacctaaaataaacaaacaaaaacaaatacaaatacatgcactatacaacttttactttaaatggggaggatgcccagcaccaatggaaactatatgtgatccatccacacaggaaaaattccccacgccctataacatcatacaagaacttaatgtcgaggatccagaaacaccaaaagaaacatacatatacaaatttgacgaacgagacggataccttacaaagacagctacaaaaagacttaaacaagacattcaaactacaaaatattttacagaacatggaagcaaagacccacaactacaagtctacccaccaacggaccaaacgcagaaagaaacagaagaaacaacaccgaaaaagaaagaactactccaacagctcgacctcctcagagaccaccagcaacagctccagcgaagaatcaacagattaacaaaaagacaaaaattattccctatagtatagacatgtttggacaaagaaaggttaaaaatcgtagatttacacctagagaatttaaagaggaattagaagaagcaggaatatggcgcagacgccctagatcatacatttttgatccccctgattataaacttgatgttattgaacctattgtaaactttggtgtaaattttgaattaaactttaaattctaggccagcaaatattcacttgtcggtgtccatttatataagtttaactttaataaacatccaccacactccctaatacgcaggcgcacaagggggctccgcccccttaaacccccagggggctccgccccctaaaacccccaagggggctccgcccccttacaccccctaattaatattcaacaggaaaaccacataattagaattgccgaccacaaacggtcaaccgttacacttacttctgcttttttccacgtacttccctttttttagagtcacgcctactaataaattattaatcagacgatattcctgggaggagcaacatacctatataaccaagtgcactgacgaatggctgagtttaccctgccagacggagacggcatcacatcagtgactgcagtctgatcttgggcgggagccgaaggtgagtgaaaccaccgaagtctaggggcaattccgcccccttacaccccctaattaatattcaacaggaaaaccacataattagaattgccgaccacaaacggtcaaccgttacacttacttctgcttttttccacgtacttccctttttttagagtcacgcctactaataaattattaatcagacgatattcctgggaggagcaacatacctatataaccaagtgcactgacgaatggctgagtttaccctgccagacggagacggcatcacatcagtgactgcagtctgatcttggg

SEQ ID NO: 1175 - protein, 668 aa, Betatorquevirus sp.
MPPFNYHRRRYYKRPQWRWRRRRWTRRWRTRPFIRRGYTRRRRVRRRKFLKYKHKKLKTITVKQWQPDNIRKCKIKGQLCLLTCGQNRINNNFILTAESIIPVGEPGGGGFSIMQLTLRALYDEYTHFRNWWTTSNCGLPLARYSGCSIKFYCSNDTDYIVTAQHTGPFEVTVDSYLNTQPSRHIMNKKSFVVPKLNPNKKKRPYIKKKFPPPALFYNKWYFQQDILNTPLILLYISATSFDQMYAPNDQISTNITFFSLNTDLFQNPYWEKDNNEPYYPKVVGSQNTGLYSSDEQFTQKNEISFSKLYPLLNTTQYKLIPHTHAKFENIEDYNKPQNWYNPFTITAHDEHLETPIYYGIHPTNDEQLKGQAPKPSILPITGLYQECRYNPFKDKGIGNIFYIKCTKKQEGSFTTLPTDNRLVLRDFPIWLATWGWTSWLEKSKPVYHLQEDYQLVIQSNYIEPKMRCYVPLDMYFTHNDGKNLTQTDKAHWHPKFAFQTETLSKLAETGPATPKINKQKQIQIHALYNFYFKWGGCPAPMETICDPSTQEKFPTPYNIIQELNVEDPETPKETYIYKFDERDGYLTKTATKRLKQDIQTTKYFTEHGSKDPQLQVYPPTDQTQKETEETTPKKKELLQQLDLLRDHQQQLQRRINRLTKRQKLFPIV

SEQ ID NO: 1176 - protein, 94 aa, Betatorquevirus sp.
MSTFLTPSIYSKNGLENQWLNSIWNIHDLMCGCNDCFKHLFEILKRKGNLPCLPSITTGDDTTKDPNGDGAADAGLEDGELDRLFAEDTQEDEG

SEQ ID NO: 1177 - protein, 62 aa, Betatorquevirus sp.
MFGQRKVKNRRFTPREFKEELEEAGIWRRRPRSYIFDPPDYKLDVIEPIVNFGVNFELNFKF

SEQ ID NO: 1178 - DNA, 3179 bp, Alphatorquevirus sp.
cgggtgccgaaggtgagtttacacaccggagtcaaggggcaattcgggctcgggactggccgggctatgggcaaggctcttaaagcgatcattcttaaaaatgtttttcggcaggtactacagaaagaaaaggaaagtgcttctgtcctcactgccaactccacagaaaaaacggcctgctatgagctggcagccccctatgcacaatgccagaggcagggagcaccacttctggcaagcttgctacaattctcatgctagtttttgtggctgtggtagttttctttctcacctcgttcgtctggaaggtcgttatgcatctggcaacaacaactcctcgccccagactggggcaccaccaatgatccgtagagccctgcctcccccagcggctccggatcagccccagaccccacaatggtctggaactggtggtggagacggcgccggagaaggtggccagcaaggaggaggaggtggagacgactacgcacccgaagacctagacgcactgttcgacgccgtcgcaggagaccaacagtaaggagaaggaggtgggggcgcagacgggggcgacgcacatacaggagacgcagacgaacccgtagaaagagaaagagactcgtactgactcaatggaaccccagcacagtaagaaagtgctggatccgaggcatgtttcccatgctgatctgtggaaacacacaacagggcagaaactatgcagaccatatggacgatgtaattcctcaaggaaaaccctatggggggtctctaagtaccaccacttggactctacaggcgctgtatgaccagcaccagagattcatgaacaagtggtcttatcccaacacagaactagacctagccaggtacctaggatctgaatttacattttatagagacaaactcacagactatatagtaaccttcaacatagtacctccttttaagctaaacaaatacagctgtgcatcataccacccaggtatgatgatgcagagacgcaagaaaatacttgtaaaaagctttcaaactaaaccaaaaggcagaaaagctgtgaaagtaaaaataggacccccacaactatttgagcagaagtggtacactcagcaagacctttgttccgttggtcttgtgtcatttgcggtttctgcggcgagcctaacacatccgttctgctcaccacaaactgaaaatgttgcagtaaccttccaggttttgaaatccttctactatgaaggaataggcattaacgaacaaactaaacacacaactatagcagacaccctatacacacaaggtaattactatcaaacatttcatacaacatcatacattaattcaggcctaaaaccaggtaaagcaggacaaaatgaactagaccaaacagttaaaacatggattcagtcaaactttcccacaggaaacaacagcacctttggctttaattcatataaaccagataaacaaaaattaaataaactattagactggtactggcaacaactgcaaacaccaaatgacattacctccagctatggaagagctactaacaaatacctagaataccacatgggaatatacagtgctatattcctaagcccactcagaagcaacctgcaattccctacagcataccaagatgtaacatacaacccactcatagacaaaggagtaggaaatgaaatttggtttcaatacaacacaaaacccaatacaagctttgatgaaaaacaatgcaagtgccacataaaagacatacccctttgggcagccttttatggctactcagactatgtacaaacagaaataggagcacaacaagaaatatttaacataggaatagtttgtgtaaaatgcccatacacaataccaaaactaatccatgttgaatcaacaaaaaaagactggggctttgtattttatgatggactatttggaaatggcaaactaccagatgggtcaggacacgttccaacatacctacaagaaagatggtatcctagaatgagatttcaacaaaatgttatgcatgacatatgtcaaacaggcccatttagctacaaagatgaactaaaaagcacagtacttacatgcaaatacaagttcaaattcttatggggtggcaacttaatacctcaacaggtcgttaggaatccctgcaagtcagacggacggttcgacattgacccccatagattccctcgtgagctacaaattgcggaccctcgcaccatggggccccaatgggttttccacacctgggatttcagacgtggactgtacggcaaagatgctatcaaaagagtgtcagaaaaaccagatgatgatgaactctatactttctttccaaaaaaacctcgcctttctacaccagcagacgccccaggcctccaagaaggaggcttctttttccagaaccaccaagaaacaacatcagaagaagaagcagaagcccaagaagaaacgcaggcgcaaccggagcagcagcagcgagtcctcagactgcagctcagacagcagcagcacctcggggaccagctgcgactcctatatcagcaggtcctcaaaacccaagcaggtctccacctaaacccacttatattgggccttgcataaataaagtatacatgtttccagaaagcaagcccagaactcctaccagccaagactgggctcaggagtacgagatggcccgcatatttgacaggcctgccagatccaacctttcagacactcccttttatccctgggtcccaaaacctttcaatgttacttttgctcttaaattcaaataaacaaggccgtgggagtttcacttgtcggtgtctacctctataagtcactaagcactccgagcgtcagcgaggagtgcgacccttccccctgactcaacttcttcggagccgcgcgctacgtgctggtcatacagcgcctgtagagtccaagtggtggtacttagagaccccccccagcggggggctccgccccccggccccccccccgaagtccgtcactacccacgtgactcccacaggccaaccagaaccttctacgtgcacttcctgggctgggtttatgagagcatataactaagtgcacttccgaatggctgagttttccacgcccgtccgcagcggtggagcacctcaggagcgacccccgcgtcccgaggg

SEQ ID NO: 1179 - protein, 734 aa, Alphatorquevirus sp.; identical to SEQ ID NO: 538

SEQ ID NO: 1180 - protein, 162 aa, Alphatorquevirus sp.; identical to SEQ ID NO: 539

SEQ ID NO: 1181 - protein, 55 aa, Alphatorquevirus sp.; identical to SEQ ID NO: 540

SEQ ID NO: 1182 - DNA, 3176 bp, Alphatorquevirus sp.
cgggtgccgtaggtgagtttacacaccggagtcaaggggcaattcgggctcgggactggccggaccccgggcaaggctcttaaaaaagctatgtttctcggtaggccttggagaaagaaaagggcactgctactgtcttgcttgcgagctccaaagaaaaaaccacctgcaatgagccactggtgcccgcctgtacacagcgttcagggtcgcaaccaccagtggtatgaagcctgctatcgtggtcatgctgcttactgtggctgtggcgattttattaggcatcttgttgctctgggtgatcagtttggttttaggcctggtccccgtgctcccggcgcgcctggagtagggggacccccgcttccgctccgtagagcgctgcccgcacccccggcggccgctccggagccccagcagggcaacaacaacaacaaccagcagctggagagatggcctggggatggtggagacgacgccggcgagggtggctccggagcctatggaggagacgcaggactgccagaagacgacttagacggcctgctcgccgctatagacgacgaagagtaaggagaaagagacgatggaggagggggcgacccagacgcagactgtacagacgcaggagacgctttaagagacgcagacgcaggagacctaagataaaactgacacagtggcaacccagcacagttaaacgctgctttataatagggtacattcccgcagttatatgcggggctggtaaatggtcagaaaactttactagtcacatagaggacaagatagccgtgggcagctatggcggggggcacagtaccagtaggtggtccctaaaagtactgtacgaggagtttcagaagcaccacaacttctggaccaaaagcaataaggagctagacctggccaggttctttggcagcacctggacattttacagacacgaagatgtagactacatagtaacatataacagaaaggcccctctaggaggtaacatactaacagcacccagcatgcatccaggagtagctatgcttagcaaacacaagatagtagtacccagttttaagaccagaccagggggcaaacccacagttaaatttagaataaagccccccaccacctttatagacaagtggtactttcagaaggacatatgtgacctaacactactaaacatgaacgttgtagcttgcaacttgcggtttccgttctgctcaccacaaacgaacaacgttaacgtaaccttccagatattgcatgaggtttaccacaacttcctctctataactgatgaacaattaacattaaatgcagaaagctggaaaaaccactatgaaaacttcttaaagcaagtatttaaaacagacagagacgcaaacaaattaaacacatttgccactgagggagcctttcatgaacctaaagtagaaaagtacaaaaagccttttgctgacaacgagtactttaaaagtaaagacgcacagtggggagatgccatacacatactagcagcagcagacacaataagtaatcaaaaaacacaaaccaaagatgagcttatagacagaattgttaagaatgctgaaaactacttaaaaaaggtaacacaagaattaggaggagcaaacatacaaagatttatacacggaatgttcacacagtggacaggaatattcagtcctgcatttttagactacagcagaataagtccagaaataccaggtgtttataaagacattatatacaacccacttacagacagaggcataggcaacggagtgtggatagactactgcagcaaaaaagacaccaaatacgacccctcaaaaagtaaatgtggcatatttgacctaccgctatggatggccacctttggcctagtagactggtgcaaaaaagaaacaggacagtggggcataccttcctgggccagagtaataattaaatgcccttacacctttccaaaaatgatagactcaacagatgagtcagtgggctttgtcccaatagggtacaactttgccaaaggcctaatgccagacggcacaaagtacattcctatactaatgagacacaaatggtaccccaaccttctacaccagcagtctgtgctagaagacctaagcagaagcggcccctttagctatcaagagaaaaacatgagtgcaaacataacagcaaaatacaaatttagatggcattttgggggcaaccctgtatttgaacaggttgtcgcagacccctgccaacaaacaacctatgaaatgcccggagccggtacgatgcctcgcagagtacaagtcactgacccgaaactcatcgggccccactacaccttccacagctgggacctcagacgtgactattttagcagaaaaagtattaagagaatgtcagaacaacaagaaacttctgagtttcttttctcaggcccaaaaaaaccccgaatcgatttggacgcagtgcaaattgtcgaaaaagactctttgcaccaagaaagaaaacaaaaaccctgggagagcagccagtcggaaacagagacagaagccccctcggaagaagaagaaacgagctcggtacaccagcagctccagcagcaactccgagagcaaaagcagctccggaggggaatcgagtgcctcttccagcagctgataaaaacccagcagggagtccacatagatccctcccttgtgtaggcccacagcagtggctctttcccgagagaaagcccaaaccccctcccagcaaaggagactgggagacagagtatgcagcttgcaaagcctttaatagaccccctagatccttcttaacagaccgaccttactacccttactgcaaaaaccaatacaatgtaacctttaagatcggtttcaaataaacaaggccgtgggagtttcacttgtcggtgtctacctcttaaggtcactaagcactccgggggcccccccccccagcggggggctccgcccccccggcccccccccgtgctacgtcactaacctacgtgtccgtcttccataggccggacacagtctacgtcatccacttcctgggcatggtctacgtgattatataaggcgcggcacttccgaatggctgagttttttctgtccgtccgcagcgaggaacgaccacggagggcgatccgcgcgtcccgaggg

SEQ ID NO: 1183 - protein, 751 aa, Alphatorquevirus sp.
MAWGWWRRRRRGWLRSLWRRRRTARRRLRRPARRYRRRRVRRKRRWRRGRPRRRLYRRRRRFKRRRRRRPKIKLTQWQPSTVKRCFIIGYIPAVICGAGKWSENFTSHIEDKIAVGSYGGGHSTSRWSLKVLYEEFQKHHNFWTKSNKELDLARFFGSTWTFYRHEDVDYIVTYNRKAPLGGNILTAPSMHPGVAMLSKHKIVVPSFKTRPGGKPTVKFRIKPPTTFIDKWYFQKDICDLTLLNMNVVACNLRFPFCSPQTNNVNVTFQILHEVYHNFLSITDEQLTLNAESWKNHYENFLKQVFKTDRDANKLNTFATEGAFHEPKVEKYKKPFADNEYFKSKDAQWGDAIHILAAADTISNQKTQTKDELIDRIVKNAENYLKKVTQELGGANIQRFIHGMFTQWTGIFSPAFLDYSRISPEIPGVYKDIIYNPLTDRGIGNGVWIDYCSKKDTKYDPSKSKCGIFDLPLWMATFGLVDWCKKETGQWGIPSWARVIIKCPYTFPKMIDSTDESVGFVPIGYNFAKGLMPDGTKYIPILMRHKWYPNLLHQQSVLEDLSRSGPFSYQEKNMSANITAKYKFRWHFGGNPVFEQVVADPCQQTTYEMPGAGTMPRRVQVTDPKLIGPHYTFHSWDLRRDYFSRKSIKRMSEQQETSEFLFSGPKKPRIDLDAVQIVEKDSLHQERKQKPWESSQSETETEAPSEEEETSSVHQQLQQQLREQKQLRRGIECLFQQLIKTQQGVHIDPSLV

SEQ ID NO: 1184 - protein, 160 aa, Alphatorquevirus sp.; identical to SEQ ID NO: 166

SEQ ID NO: 1185 - DNA, 3175 bp, Alphatorquevirus sp.
cgggtgccggaggtgagtttacacaccgcagtcaaggggcaattcgggctcgggactggccgggccctgggcaaggctcttaaaaaatgcgctttcgcagggttgctgagaaaaggaaagtgcttctgcaaactgtgcgagctccaaagaaggctaggcggcttctaggtatgtggcagccccccgtgatcaatgtccccggcattgaaagaaactggtacgagagctgttatcgatcccatgctgctgtttgcggctgtggcgactttgttggccatcttaatcatctggcaactactctgggtcgccctccgcgtcctcagcccccaggcggaccccgcacgccgcagataagaaacctgccagcgctcccggcgccccagggcgagcccggtgacagagcgccatggcgtggggtttctggggccgacgccgccggtggagacggtggagagcgcggcgcagacggtggagaccccgcagacgtaggagacgacgccctactcgccgctttcgagctcgtcgaagagtaaggaggcgcggggggcggtggcgcagacgctacagaaaatggcgacggggcagacgcagacggactcacagaaaaaagatagtgataaaacagtggcaaccaaactttattagacgctgctacattatagggtacctacctttaatattctgtggcgaaaacacaagcgcccagaactatgccactcactcagacgacatgataagcaaaggaccgtacggggggggcatgactaccacaaaattcactctgagaatactgtacgacgagtttaccaggtttatgaacttttggactgtcagtaacgaagacctagacctgtgtagatacgtgggctgcaaactcatattttttaaacaccccacggtggactttatagtacagataaacactcagcctcctttcttagacacgcacctcaccgcggccagcattcacccaggaatcatgatgctcagcaagagacacatactaataccctcactaaagacccggccaagcagaaaacacagggtggtcgtcagggtgggcgccccaagactttttcaagacaagtggtacccccagtcagacctgtgtgacacagttctgctttctatattcgcaaccgcctgtgacttgcaatatccgttcggctcaccactaactgacaacccttgcgtaaacttccagattttggggccccagtacaaaaaacaccttagtattagctccactatggatgccagtaacaaacagcactatgatgaaaacttgtttaatcaaactgcgctatacaatacttttcaaaccatagctcaacttaaagaaacgggacaaattttaaacataactccaaattggaatcaggtgcaaaactcaactccactcaatgaattaggtacaaatgcaactgaaagcagagacacttggtacaaaggcaatacatacaacaacaagatttcagaattagcaaaaaaaaccagagaaagatttaaaggtgcaacactatcagcactaccaaactaccccacaataatgtccacagacttatatgaataccactcaggcatatactccagcatatttctatcagctggcaggagctactttgaaaccaccggggcctactctgacattatatacaaccctttcacagacaaaggcacagggaacataatctggatagactacctcacaaaagcagacaccatctttgtaaaaaacaaaagcaaatgcgaaatacaagacatgcccctgtgggcggcctgcacgggatacacagagttttgtgcaaagtatacaggcgactctgccattatctacaatgccagagtcctcataagatgcccgtacactgagcccatgctaatagaccactcagacccaaacaaaggcttcgtaccctactcctttaactttggcaacggaaagatgccaggaggcagctctaacgtgcccataagaatgagagccaagtggtacgtaaacatataccaccaaaaagaagttcttgaagctatagtgcaaagcggaccgtttgggtacaagggcgacataaaatcagctgtactgtctatgaaatacagatttcactggaagtggggtggaaaccctatatccaaacaggtcgtcaggaatccctgctccaactccagctcctccgcgtcccatagaggacctcgcagcgtacaagcagttgacccgaaatacaatacgccagaggtcacgtggcactcgtgggacatcagacgaggcatctttggcaaagcaggtattaaaagaatgcaacaagaatcagatgctctttacattcctccaggaccactcaagagacctcgcagggacaccaacgcccaagacccagaagagcaaaacgaaagctcaggtttcagagtccagcagcgactcccgtgggtccactccagccaagagacgcaaagctcccaagaagagacgcaggcgcaggggtcggtacaagaccaactactcctccagctccgagagcagcgagtcctccgactccagctccagcaactcgcaacccaagtcctcaaagtccaagcagggcacggcatacaccccctattatcttcccaagcgtaaacaaagcctttatgtttgagcccaagggtcctaaacccatacaaggctacaacgattggctagaggagtacacctgctgcaaacactgggacagacctcccagaaagctacacacagacatacccttctacccctgggcaccaaaaccccaagaccaagtcagggtaacctttaaactcaactttcaataaaaattctaggccgtgggagtttcacttgtcggtgtctgcttcttaaggtcgccaagcactccgagcgccagcgaggagtgcgaccccccctccggtagcaacgccttcggagccgcgcgctacgccttcggctgcgcgcggcacctcagaccctaataaagtttggttgccactgttttatcactatcttttttctgtgagtccgtcactaaccacgtgactcccgcaggccaaccacagtctacgtcgtgcacttcctgggcatggtctacatcataatataagaaggcgcacttccgaatggctgagttttccacgcccgtccgcagcgagaacgccacggagggagatcctcgcgtcccgaggg

SEQ ID NO: 1186 - protein, 736 aa, Alphatorquevirus sp.
MAWGFWGRRRRWRRWRARRRRWRPRRRRRRRPTRRFRARRRVRRRGGRWRRRYRKWRRGRRRRTHRKKIVIKQWQPNFIRRCYIIGYLPLIFCGENTSAQNYATHSDDMISKGPYGGGMTTTKFTLRILYDEFTRFMNFWTVSNEDLDLCRYVGCKLIFFKHPTVDFIVQINTQPPFLDTHLTAASIHPGIMMLSKRHILIPSLKTRPSRKHRVVVRVGAPRLFQDKWYPQSDLCDTVLLSIFATACDLQYPFGSPLTDNPCVNFQILGPQYKKHLSISSTMDASNKQHYDENLFNQTALYNTFQTIAQLKETGQILNITPNWNQVQNSTPLNELGTNATESRDTWYKGNTYNNKISELAKKTRERFKGATLSALPNYPTIMSTDLYEYHSGIYSSIFLSAGRSYFETTGAYSDIIYNPFTDKGTGNIIWIDYLTKADTIFVKNKSKCEIQDMPLWAACTGYTEFCAKYTGDSAIIYNARVLIRCPYTEPMLIDHSDPNKGFVPYSFNFGNGKMPGGSSNVPIRMRAKWYVNIYHQKEVLEAIVQSGPFGYKGDIKSAVLSMKYRFHWKWGGNPISKQVVRNPCSNSSSSASHRGPRSVQAVDPKYNTPEVTWHSWDIRRGIFGKAGIKRMQQESDALYIPPGPLKRPRRDTNAQDPEEQNESSGFRVQQRLPWVHSSQETQSSQEETQAQGSVQDQLLLQLREQRVLRLQLQQLATQVLKVQAGHGIHPLLSSQA

SEQ ID NO: 1187 - protein, 148 aa, Alphatorquevirus sp.
MRFRRVAEKRKVLLQTVRAPKKARRLLGMWQPPVINVPGIERNWYESCYRSHAAVCGCGDFVGHLNHLATTLGRPPRPQPPGGPRTPQIRNLPALPAPQGEPGDRAPWRGVSGADAAGGDGGERGADGGDPADVGDDALLAAFELVEE

SEQ ID NO: 1188 - protein, 59 aa, Alphatorquevirus sp.
MFEPKGPKPIQGYNDWLEEYTCCKHWDRPPRKLHTDIPFYPWAPKPQDQVRVTFKLNFQ

SEQ ID NO: 1189 - DNA, 3170 bp, Alphatorquevirus sp.
cgggtgccggaggtgagtttacacaccgcagtcaaggggcaattcgggctcgggactggccgggccccgggcaaggctcttaaaaaatgcactttcgcagagtgcgagcgaaaaggaaactgctactgcaaactgtgcgagctccaccgaaggcacctgccatgagcttcaccacacctactattaatgccggcattcgagagcagcaatggttcgagtccatccttagatcccaccagtcgttctgtggctgtggtgatcccgtgcttcattttactaaccttgttactcgctttaactatctgtctgctacctcttcgcctctggaccctcccggcccagcgccgcgaggccgcccggcgctccgccgcctcccggcgctcccttcagcccccgcgaccccttctagagaaccagcatggcctactggttcagaaggtggggctggaggccgaggcgccggtggagaaggtggcgccgccgtcgaaggagactaccgagaagaagaactagacgagctgttcgcggccttggaagaagacgcaaaccaagggtaaggaggcgccgcagaactcgcaaacgtacctacagacgggggtggagacgcaggaggtacataagacgagggcgacgcaaaaagaaacttgtactgactcagtggaacccggcagtagttaagaggtgcaacattaagggcggacttccaataattatatgcggagagcccagggcagcctttaactatggctaccacatggaggactacactcctcaacctttccccttcggagggggaatgagcacagtgactttctctctgaaagccttgtatgaccagtacgtcaaacaccaaaacaggtggactttttcaaacgaccagctagacctggccagatacaggggctgtaaactaaggttctacagaagccccgtctgtgattttatagtacactacaacctaatacctccactaaaaatgaaccagtttacaagtcccaacacgcacccgggactactcatgctcagcaaacacaagataataattcccagctttcaaacaagacctgggggcagacgctttgttaaaataagacttaatccccccaaactatttgaagacaagtggtacactcagcaagacctgtgcaaggttccgctcgttagtattacagcaactgcggctaacttgcggtatccgttctgctcaccacaaacgaacaacccttgcaccaccttccaggtactgcgcaagaactacaacacagttataggaacttcctttaaggaccaagagtccacacaagtatttgaagactggctatataaaactgcatctcactatcaaacatttgccacagaagacagactaggtagaatacctccatttaatccagatggctccttaaacacaaataaagacacatggcaaaataagtggtctaaaccaaactcaccatacaacggtgaagcctaccctcaaacagttacaacagaaggagacaatggacaaatgtacaaagtaccttatgacagtaactttggcttccctacatacataccaaacacatcctacatattttccagaagacaaacaaacttccactatgaaataaataacccaattagcaaaaagatatggccacagcctagcacaacacaacctacagtagactactatgaatacagactaggctggttcagtaacatatttataggtccaaacagatacaacttacagtttcagtcagcatatgtagacactacatataatcccctcatggacaaaggcaaaggaaacaaaatatggtttcaatacctgtctaaaaaaggcacagactacaatgaaaaacaatgctactgcaccctcgaggacatgcccctgtgggcaatgtgctttggctacacagactatatagaaactcaactaggaccaaatgtagaccaccaaacagcaggacttattattataatctgcccctacactcaaccaccaatgtatgacaaacaaaggcctacctggggatacgtagtctatgacacaaactttggcaatggaaaaatgccctccggaacaggccaagttccagtatactggcaatgcagatggagacccatgctgtggttccaagagcaagtactgaatgacatctcaaagactggaccgtacgcctacagagacgaatataaaaatgtacagctaactctgtactacaacttcatttttaactgggggggcgacatgtattacccacaggtcgttaaaaacccctgtggagactccggaattgttcccggttccggtagattcactcgagaagtacaagtcgttagcccgctttccatgggaccggcctacatcttccactacttcgacagcagaaggggcttctttagtgaaaaagctcttaaaagaatgcaacaacaacaagaatttgatgaatcttttacattcaaacctaagagacccaaactttctacagcagccacagaaatcctccagctcgaagaagactcgtcttcaggggaaggaaaatcgccactacagcaagaagagaaagaagcagaagtcctccaaacgccacaagtacagctccagctccagcggaacatccaggagcagctcgcaatcaagcagcagctccaattcctcctgctccaactcctcaagacccaatccaatttgcatttaaacccacaatttttaagcccttcataaaatatgacatgtttggggacccccttcctcaccccccaacagcccaagactgggccacagaatatgagtgctgtaaagcctttaacagaccacctagaaccaacctaaaagacacccccttctacccatgggtccctaaacctaaacctcaattccgtgtatcttttaaacttggttttcaataaacaaggccgtgggagtttcacttgtcggtgtcaacctcttaaggtcactaagcactccgagcgtaagcgaggagtgcgaccctcccccctggggcaactccctcgaagtccggcgctacgcgcttcgcgctgcgccggacatctcggaccccccctccacccgaaacgcttgcgcgtttcggaccttcggcgtcgggggggaatggctgagttttccacgcccgtccgcagcgagaacaccacggaggggagtccgcgcgtcccgaggg

SEQ ID NO: 1190 - protein, 765 aa, Alphatorquevirus sp.
MAYWFRRWGWRPRRRWRRWRRRRRRLPRRRTRRAVRGLGRRRKPRVRRRRRTRKRTYRRGWRRRRYIRRGRRKKKLVLTQWNPAVVKRCNIKGGLPIIICGEPRAAFNYGYHMEDYTPQPFPFGGGMSTVTFSLKALYDQYVKHQNRWTFSNDQLDLARYRGCKLRFYRSPVCDFIVHYNLIPPLKMNQFTSPNTHPGLLMLSKHKIIIPSFQTRPGGRRFVKIRLNPPKLFEDKWYTQQDLCKVPLVSITATAANLRYPFCSPQTNNPCTTFQVLRKNYNTVIGTSFKDQESTQVFEDWLYKTASHYQTFATEDRLGRIPPFNPDGSLNTNKDTWQNKWSKPNSPYNGEAYPQTVTTEGDNGQMYKVPYDSNFGFPTYIPNTSYIFSRRQTNFHYEINNPISKKIWPQPSTTQPTVDYYEYRLGWFSNIFIGPNRYNLQFQSAYVDTTYNPLMDKGKGNKIWFQYLSKKGTDYNEKQCYCTLEDMPLWAMCFGYTDYIETQLGPNVDHQTAGLIIIICPYTQPPMYDKQRPTWGYVVYDTNFGNGKMPSGTGQVPVYWQCRWRPMLWFQEQVLNDISKTGPYAYRDEYKNVQLTLYYNFIFNWGGDMYYPQVVKNPCGDSGIVPGSGRFTREVQVVSPLSMGPAYIFHYFDSRRGFFSEKALKRMQQQQEFDESFTFKPKRPKLSTAATEILQLEEDSSSGEGKSPLQQEEKEAEVLQTPQVQLQLQRNIQEQLAIKQQLQFLLLQLLKTQSNLHLNPQFLSPS

SEQ ID NO: 1191 - protein, 156 aa, Alphatorquevirus sp.
MHFRRVRAKRKLLLQTVRAPPKAPAMSFTTPTINAGIREQQWFESILRSHQSFCGCGDPVLHFTNLVTRFNYLSATSSPLDPPGPAPRGRPALRRLPALPSAPATPSREPAWPTGSEGGAGGRGAGGEGGAAVEGDYREEELDELFAALEEDANQG

SEQ ID NO: 1192 - protein, 58 aa, Alphatorquevirus sp.; identical to SEQ ID NO: 197

SEQ ID NO: 1193 - DNA, 3170 bp, Alphatorquevirus sp.
cgggagccggaggtgagtttacacaccgcagtctaggggcaattcgggcacgggtctggccgggctatgggcaagattcttaaaaagtttccccgctgtgtcctacgccaggacacaaaaacatgccgtggagaccgccggcgcacgacgtccagggcagagagaaccagttctttgcgggatgttttcacatgcatgctgctttctgcgggtgcggtgaccttgtcggccatcttgctagcattgctgctcgctttcctgctgccggaccccctgcttcgccgggcctcagacctccgagaccccctgccccggccggtccgggcggtccccccggctaccttcccgctctcccggctccggcaccggagccgcctaacccagcaccacgccgtggggggggggaagatggcgccgcagcgggtggcgccgccgatggggcacaagaagaggccgccgcctacggcgaagaagagctagaagagcttttccgcgccgccgccgaggacgatatgtaagtaggagatggcgccggccttacaggcgcagacgaaaaaaggggcgacggagacgcagacgcagacggactcacaaacccaccctactcctcagacagtggcagccggacgttgttaggacctgctacataacaggctggatgcccctactaatctgtggctctggaaacacccagtttaactttataatgcacatggacgatatcacccccaggggagcctcctacgggggcaacctaactaacatgacttttaccctggagggtctctttgaacagtttgaataccacagaaacaggtggtccagaagcaaccacgacctagacatggccagatacttgttcaccacaataaaactctacagacatgaaactgtagactacatagtagcctacagcagaacaggccctttccagataagccacctcactcacctcagcacccacccactactcatgcttctgtcaaaacaccacatagtagtacccagtctgagaaccaagcctaggggcagaaaatacaaaaaagtaagaataaaacctccaaaacttatgttaaacaagtggtacttcaccaaagacatatgtgacctaggcctctttcaaatatgggccacgggagcagaactcagaaacccctggctcagatcaggcaccaaatccccctgcgtgggcttcgctgtactaaacaactccatttacacagacctcagcaacctaccagatcacaacacacaaagaacaaatatacaacataaactacacccatcttcactaactcctgcagaaaacaaaagcctatggcagtacacatacaccaaactaatggctcccatttactacaaagctgttactaacagcacatacaattggcaaaattacagcgacgcagataactatcacaaaacatattgcaaatgggcagatatgaaaacgtcaagactagaacaaattcaaaaagaattttcagctgtatacccacaactaccaacacaaaggcccacagacagcacacttttacaagactttggcatatacagcccatactacctaacacccaccagaatcagcctagactggcacacagcctacacctatgtcaggtacaacccactcacagacaaaggtataggcaacagagtctacctgcagtggtgctcagagagcagctgcaagtggtccagcacaaaaagcaaggccacaatagtagatatgccactgttcatcgccttgtatggctacatagactgggccataaaggccacgggagtctccagcctagtaaaagacgccagactgatgatcagatgcccctacacagagcctcaacttgtgggggcaacagaagacgtgggcttttgcttactcagccaaaccttcatgaacggagacatgcccgttcttgcaccatatatcccaatttcctggttcgttaagtggtatcccatgttagcacatcaaaaggaagccatagaggacattgtgggcagcggaccgtttatggttagagatcaggaagccagcagttgggacataaccatggggtacagagcctgttttaaatggggcgggtcgcctctgcccacacaggcaatcgacgacccctgccagaagcccacctatccactacccgaccccgatagacaccctcgcctactacaagtctcagacccgagcaagctcggcccaaagacagtcttccacagctgggacatgcgacggggacagtttagcaaaagaagtattgaaagaatgtcagaatacacagagaatgatgaactttttgaaacaggtctgccacgaaaaaagaaaaagttcgacacgccaatcggaggactccaaggcgaggaaagaagaggctacactttactccaagccctccaagacagccaggaagaaacggagtcagaagaccaaaaacaagcaccccaaacaaaagagacggagacgcaacaactcctccaccagctccagctccagaaacaccaccagcgagtcctcagaaagggactccgagagctgttcggggacgttctccgactccggagaggagtccacttcgaccccctccttacataggccctccaccatacatcgcagatctactttttccttctactaataaaaaaaaaaaattctccaccttcgactgggaaacggaggctcagctaggagccatattcaagcgacccatgcgcttctatccctcagacccccctttctacccgtggctaccccccaagcaagatatccccaaggtatgtaaagtaaacttccaaataaagcttgcagagtgagtaattcgaggccctcctgtattcacttagcggtgtctacctcttaaggtcaccaagcactccgagcgccagcgagctggcgtaggacacagcggggaaactttttaagaatcttgcccatagcccggcccccccccgtgctaaatccaccgcgcatgcgcggccacgcccccgccgccattttgtgcagcccgccaatttctctttcaaacagaccaatccagtactacttcgtgcacttcctggggcgtgtcctgcccctctatataagcagaagcggtgacgaatggtagagtttttcctggcccgtccgcggcgagagcgcgagcgaagcgagcgatcgagcgacccgtggg

SEQ ID NO: 1194 - protein, 645 aa, Alphatorquevirus sp.; identical to SEQ ID NO: 333

SEQ ID NO: 1195 - DNA, 3169 bp, Alphatorquevirus sp.
tcgccatagggcctttatcttcttgccattttcaaggggcaattcgggctcgggactggccgggctatgggcaaggctcttaaaaatgcacttttctaggtgcagtagaaagaaaaggaaactgtcactgctactactgcacccttcaaaaaaagctaggccatctgtgagaggtatgtggagacccccgactcgaaatgcattcaccattcaacgtgactggttctacagttgctttcactcccacgcttctatgtgtggctgtgctgattttattggtcatttcaatcatatcgctgctatgctcggccgtccggaagaccagaaccctcctccgccacccggggctctgagacccctacccgctctcccggcctcctccgaggcacccggtgatcgagcaccatggcctatgggtggtggtggaggcgacggaggcgcccgtggaggaggaggagatggcgccgctggagacgtcgccggagaccccgcagacgccgacctcgtcgccgctatcgacgccgcagaacagtaaggagacgcggcagggggaggtggactaagagatatagacgatggcgccgcaagggcaaacgcagaggcaaaaaaaaaattattataaaacagtggcagcccaactacactcgcagatgcaacatagtgggctacctgcctctcctaatctgtggggaaaatactgttgctacaaactatgccacccactccgacgatagctactaccccggaccctttggggggggaatgactacagacaaatttactctaagaatactctatgacgagtacaagaggtttatgaactactggaccgcctcaaacgaggacctagacctctgtagatacctaggagttactctatatgtgtttagacacccagaagtagactttatactaattataaatacctcccctccatttctagacacagaaataacagggcccagcatacaccccggtatgatggccctcaacaagagagccaggtggatacctagcttaaaaaacagaccaggcagaaagcactatgtaaagattaaagtaggagccccccgaatgttcacagataagtggtacccccagacagacctctgtgacatgacactcctaacgatctttgccagtgcggcggatatgcaatatccgttcggctcaccactaactgacactatagttgtgtcattccaagttctgcaatccatgtacaacgactgcctgagtatacttcctgataattttacagagacatcaggcaaaggcacccagctacataacaaaataattaaccatctgccctactacaacaccacacaaacacaagcacaatttaaaagatttgtagaaaacatgacagcaaccaatggagacaatgtatgggcaaactacataaacacaacaaagttctcacaagtacaaaacccaaaaaatgacacaggcattggaggcccttacacctcatattcagactcatggtacaaaggcatagtatataatgagaaaattacaaagatacctgaaaaagcaagtaaactatactacgaggaaaccaaacaactaattggcattacattcacaggatccacacacagactccattactgtggaggcctatactcctccgtatggctatcagcaggtagatcctactttgaaaccaaaggcccatacacagacataacctacaaccccttttcagacagaggagaaggtaatatgctatggatagactggctaactaaagatgactcagcctactcaaaaacaagtagcaagtgcctcatagagaacttacccctgtgggcctcagtatacggatacaaagagtactgcagcaaagtaacaggagatacaaacatagaacacaactgtagatgtgttatcagaagcccctacacagttccacaactgttagaccacaacaatcccctcagaggctacgtgccttacagctttaactttggaaatggtaaaatgccaggcggtagcagcctagtgcccattagaatgagagccaagtggtaccccactctgttccaccaaaaagaagtactagaggccatagcacaggcaggcccctttgcatatcactcagatatgaaaaaagtgtcccttggcataaagtacagatttaagtgggtgtggggtggcaaccccgtgtcccaacaggttgttagaaacccctgcaagaccacccaaggttcctcgggcaatagagtgcctcgatcaatacaagtcgttgacccgcggtacaacacaccagaactcacgatacacgcgtgggacttcagacatgggttctttggcagaaaagctgttaagagaatgcaagaacaaccaatccctcatgaaactttttcagcagggttcaagcgcagtcgccgagatacagaagcactccaatccagccaagaagaacaacaaaaagaaaacttacttttcccagtccagcagctcaagcgagtccccccgtgggagacctcgcaagagagccaaagcgaggaagaaaactcgcaaaaacaggagaccctctcccagcaactcagagagcagctgcacaagcagcgactcatgggagaccaactccgatcgctcctctaccaaatgcaaagggtccagcaaaatcaacacataaaccctatgttattgccaaagggtctggcattaacctctatttctcacaatgtaatatagatatgtttggtgaccccaaaccctacaacccctcctccaatgactggaaggaggagtacgaagccgcaaaacagtgggacagaccccccagacacgacctgaggagcacccccttctacccctgggcccccacccccaaaccatacaatgttagctttgccctcaactacaaataaacggtggccgtgggagtttcacttgtcggtgtctacctcttaaggtcactaagcactccgagcgtcagcgaggagtgcgacccttcaccaaggggcaactccctcgaagtccggcgctacgcgcttcgcgctgcgccggacatctcggaccccccctcgacccgaatcgcttgcgcgattcggacctgcggcctcgggggggtcgggggctttattaaacggactccgaggtgccattggacactgagggggtgaacagcaacgaaagtgagtggggccagact

SEQ ID NO: 1196 - protein, 767 aa, Alphatorquevirus sp.
MAYGWWWRRRRRPWRRRRWRRWRRRRRPRRRRPRRRYRRRRTVRRRGRGRWTKRYRRWRRKGKRRGKKKIIIKQWQPNYTRRCNIVGYLPLLICGENTVATNYATHSDDSYYPGPFGGGMTTDKFTLRILYDEYKRFMNYWTASNEDLDLCRYLGVTLYVFRHPEVDFILIINTSPPFLDTEITGPSIHPGMMALNKRARWIPSLKNRPGRKHYVKIKVGAPRMFTDKWYPQTDLCDMTLLTIFASAADMQYPFGSPLTDTIVVSFQVLQSMYNDCLSILPDNFTETSGKGTQLHNKIINHLPYYNTTQTQAQFKRFVENMTATNGDNVWANYINTTKFSQVQNPKNDTGIGGPYTSYSDSWYKGIVYNEKITKIPEKASKLYYEETKQLIGITFTGSTHRLHYCGGLYSSVWLSAGRSYFETKGPYTDITYNPFSDRGEGNMLWIDWLTKDDSAYSKTSSKCLIENLPLWASVYGYKEYCSKVTGDTNIEHNCRCVIRSPYTVPQLLDHNNPLRGYVPYSFNFGNGKMPGGSSLVPIRMRAKWYPTLFHQKEVLEAIAQAGPFAYHSDMKKVSLGIKYRFKWVWGGNPVSQQVVRNPCKTTQGSSGNRVPRSIQVVDPRYNTPELTIHAWDFRHGFFGRKAVKRMQEQPIPHETFSAGFKRSRRDTEALQSSQEEQQKENLLFPVQQLKRVPPWETSQESQSEEENSQKQETLSQQLREQLHKQRLMGDQLRSLLYQMQRVQQNQHINPMLLPKGLALTSISHNVI

SEQ ID NO: 1197 - protein, 170 aa, Alphatorquevirus sp.
LPFSRGNSGSGLAGLWARLLKMHFSRCSRKKRKLSLLLLHPSKKARPSVRGMWRPPTRNAFTIQRDWFYSCFHSHASMCGCADFIGHFNHIAAMLGRPEDQNPPPPPGALRPLPALPASSEAPGDRAPWPMGGGGGDGGARGGGGDGAAGDVAGDPADADLVAAIDAAEQ

SEQ ID NO: 1198 - protein, 57 aa, Alphatorquevirus sp.; identical to SEQ ID NO: 108

SEQ ID NO: 1199 - DNA, 3167 bp, Betatorquevirus sp.
cgggagccgaaggtgagtgaaaccaccgaagtctaggggcaattcgggctagatcagtctggcagaacgggcaagaaacttaaaataatatacttttttacagaaatgagcaccttcttaacaccatcaatatacagcaaaaatggcttagaaaaccaatggctaaactcaatttggaatatccatgacctgatgtgcggatgcaacgactgcttcaaacatttatttgaaattctcaaaagaaaaggaaacctaccatgcctcccttcaattaccaccggagacgatactacaaaagaccccaatggagatggcgccgcagacgctggactagaagatggagaactagaccgtttattcgcagaggatacacaagaagacgaagggtaagaagacgaaaatttttaaaatacaaacataaaaaactaaaaactataactgtaaaacaatggcaaccagataatataagaaaatgtaaaattaaaggacaactatgcttattaacatgtggacaaaacagaattaacaataactttatattaactgctgaaagtataatacctgttggggaaccgggagggggaggcttttcaataatgcaattgacattaagagccttatatgacgaatatacacattttagaaactggtggacaacaagcaactgtggactaccattagcaagatactcaggttgcagtattaaattttattgtagcaatgacactgactatatagtgacagcacaacacacaggaccgtttgaagtgactgtagactcatatttaaacacacaacctagtagacacattatgaacaaaaaatcatttgttgtaccaaaactaaacccaaacaaaaaaaaaagaccatatataaaaaagaaatttccacctccagcactattttataacaaatggtacttccaacaagacatactaaacactccactaattctactatacatatcggctacaagctttgaccaaatgtatgctccaaacgaccaaattagcacaaacataacattcttttcactaaacacagacttatttcaaaatccatactgggaaaaagacaataacgaaccatactatccaaaagtagtaggtatacaaaatacaggactatacagttcagacgaagagtttacagacagcaaccaaataacatttagtaaattatatccactattaaacacaacacaacacaaaccgataccccatacacacgcacaattcaaaaacctggaagaatataacaatccaaaaaactggtacaatccatttacaattacagcacatgatcaacatttagaaacaccaatttactatggaattcaccctacaactgaacagcaactaaaaggacaaccaacaaaaccatcaattttaccaataacaggtttataccaagaatgtagatacaacccctttaaagacaaaggaataggaaacattttttatataaaatgcactaaaaaacaagaaggctcatttacaacacttcccacagataatagattagtactaagagactttccaatatggctagcaacatggggatggactagctggttagaaaaatctaaacctgtatatcacctacaagaagactatcaattagtaatacaatcaaactacatagaaccaaaaatgagatgctatgtaccattagacatgtactttacacacaacgacggaaaaaacctaacacaaacagataaagcacactggcaccctaagtttgcttttcaaacagaaaccctaagcaaactagcagaaacaggaccagcaacacctaaaataaacaaacaaaaacaaatacaaatacatgcactatacaacttttactttaaatggggaggatgcccagcaccaatggaaactatatgtgatccatccacacaggaaaaattccccacgccctataacatcatacaagaacttaatgtcgaggatccagaaacaccaaaagaaacatacatatacaaatttgacgaacgagacggataccttacaaagacagctacaaaaagacttaaacaagacattgaaactacaaaatattttacagaacatggaagcaaagacccacaactacaagtctacccaccaacggaccaaacgcagaaagaaacagaagaaacaacaccgaaaaagaaagaactactccaacagctcgacctcctcagagaccaccagcaacagctccagcgaagaatcaacagattaacaaaaagacaaaaattattccctatagtatagacatgtttggacaaagaaaggttaaaaatcgtagatttacacctagagaatttaaagaggaattagaagaagcaggaatatggcgcagacgccctagatcatacatttttgatccccctgattataaacttgatgttattgaacctattgtaaactttggtgtaaattttgaattaaactttaaattctaggccagcaaatattcacttgtcggtgtccatttatataagtttaactttaataaacatccaccacactccctaatacgcaggcgcacaagggggctccgcccccttaaacccccagggggctccgccccctaaaacccccaagggggctccgcccccttacaccccctaattaatattcaacaggaaaaccacctaattagaattgccgaccacaaacggtcaaccgttacacttacttctgcttttttccacgtacttccctttttttagagtcacgcctactaataaattattaatcagacgatattcctgggaggagcaacatacctatataaccaagtgcactgacgaatggctgagtttaccctgccagacggagacggcatcacatcagtgactgcagtctgatcttgggcgggagccgaaggtgagtgaaaccaccgaagtctaggggcaattcccctaattaatattcaacaggaaaaccacctaattagaattgccgaccacaaacggtcaaccgttacacttacttctgcttttttccacgtacttccctttttttagagtcacgcctactaataaattattaatcagacgatattcctgggaggagcaacatacctatataaccaagtgcactgacgaatggctgagtttaccctgccagacggagacggcatcacatcagtgactgcagtctgatcttggg

SEQ ID NO: 1200 - protein, 668 aa, Betatorquevirus sp.
MPPFNYHRRRYYKRPQWRWRRRRWTRRWRTRPFIRRGYTRRRRVRRRKFLKYKHKKLKTITVKQWQPDNIRKCKIKGQLCLLTCGQNRINNNFILTAESIIPVGEPGGGGFSIMQLTLRALYDEYTHFRNWWTTSNCGLPLARYSGCSIKFYCSNDTDYIVTAQHTGPFEVTVDSYLNTQPSRHIMNKKSFVVPKLNPNKKKRPYIKKKFPPPALFYNKWYFQQDILNTPLILLYISATSFDQMYAPNDQISTNITFFSLNTDLFQNPYWEKDNNEPYYPKVVGIQNTGLYSSDEEFTDSNQITFSKLYPLLNTTQHKPIPHTHAQFKNLEEYNNPKNWYNPFTITAHDQHLETPIYYGIHPTTEQQLKGQPTKPSILPITGLYQECRYNPFKDKGIGNIFYIKCTKKQEGSFTTLPTDNRLVLRDFPIWLATWGWTSWLEKSKPVYHLQEDYQLVIQSNYIEPKMRCYVPLDMYFTHNDGKNLTQTDKAHWHPKFAFQTETLSKLAETGPATPKINKQKQIQIHALYNFYFKWGGCPAPMETICDPSTQEKFPTPYNIIQELNVEDPETPKETYIYKFDERDGYLTKTATKRLKQDIETTKYFTEHGSKDPQLQVYPPTDQTQKETEETTPKKKELLQQLDLLRDHQQQLQRRINRLTKRQKLFPIV

SEQ ID NO: 1201 - protein, 94 aa, Betatorquevirus sp.; identical to SEQ ID NO: 1176

SEQ ID NO: 1202 - protein, 62 aa, Betatorquevirus sp.; identical to SEQ ID NO: 1177

SEQ ID NO: 1203 - DNA, 3166 bp, Alphatorquevirus sp.
ccatagggcctttatcttcttgccatttgtcccaaggggcaattcgggctcgggactggccgggctatgggcaaggctcttaaaaatgcacttttctaggtgcagtagaaagaaaaggacactgtcactgctaccactgcaccattcacagaaagctaggccatctgtgaaaggtatgtggagacccccgactcgaaatgcattcaccattcaacgtaactggttctacagttgctttcactcccactcttctatgtgtggctgtgctgattttattggtcatttcaatcacatcgctgctatgctcggccgtccggaagaccagaaccctcctccgccacccggggctctgagacccctacccgctctcccggccgccaccgaggcgcccggtgatcgagcaccatggcctatgggtggtgctggaggcgacggaggcgcccgtggaggaggagaagatggcgccgctggagacgtcgccggagaccccgcagacgccgacctcgtcgccgctatcgacgccgcagaacagtaaggaggcgcggcagggggaggtggactaggagatatagacgatggcgccgcaagggcaaacgcaaaggcaaaaagaaaattattataaagcagtggcagcccaactacacccgcagatgcaacatagtgggctacctacccctactaatttgtggggacaatactgttgccagaaactatgctacccactcagacgacagctactaccccggaccctttggggggggaatgactacagacaaatttactttaagaatactgtatgatgagtacaaaaggtttatgaactactggaccgcctcaaacgaggacctagacctgtgtagatacctgggagttactatatatgtgtttagacacccagaggtagactttatactacttataaacacctcccctccattcctagacacagaaataacagggcctagcatacacccaggtatgatggccctcaacaaaagagccaggtggatacctagcctaaaaaacagaccaggcagaaagcactatgtaaaaattaaagtaggagccccccgaatgttcacagataagtggtacccccaaacagacctctgtgacatgacactcctaacgatctttgccactgcggcggatatgcaatatccgttcggctcaccactaactgacactatagttgtgtcattccaagttctgcaatccatgttcaacgactgcctcagtgtacttccttctaactttgcaacatcaggcaaaggatacttattatatgagaaaattagaacacacttaccatactataacacaacacaaacacaagcacaactaaaaagatacatagacaatacaggaaactcaacaaacacatggagttcatacctaaataatcaaaaattttcacaaacacaatcaccaaatacaaactcaaactccataggaggaccatacactaactacaatgacacatggtataaaggcactgcctatacgcaaaaaattactgaggtgccaccaaaggcagcaaaactatactatgatgagaccaaattacttattggcataacattcacaggatctacagaatacctacactataccggaggcttatacacctccatatggctatcagcaggtagatcctactttgaaaccaaaggcccatacacagacatcacttacaaccccttttcagacagaggagaaggtaacatgctttggatagactggctaactaaagatgactcacaatactcaaaaacacagagcaagtgtctcatagagaacttacccctgtgggcctcagtatacggatacacagagtactgcagcaaagtaacaggagactcaaacatagaacacaactgtagatgtgttatcagaagcccctacacagtaccacagctgttagaccacaacaaccccctcagaggctacgtaccttacagctttaactttggaaatggtaaaatgccaggcggtagcagcctagtacctattagaatgagagccaagtggtaccccactctttttcaccaaagagaagtactagaggccatagcacaggcgggcccctttgcataccactcagacattaagaaagtatccctaggcataaagtacagatttaagtgggtgtggggtggcaaccccgtgtcccaacaggttgttagaaacccctgcaagaccacccaaggttcctcgggcaatagagtgcctcgatcaatacaagtcgttgacccgcggtacaacacgccagagctcaccatacacgcgtgggacttcagacatgggttctttggcagaaaagctattaagagaatgcaagaacaaccaatacctcatgacactttttcagcagggttcaagcgcagtcgccgagatacagaagcactccaatccagccaagaagagcaacaaaaagaaaacttacttttcccagtccagcagctcaagcgagtccccccatgggagacctcgcaagagagccaaagcgaggaagaaaactcgcaaaaacaggagaccctctcccagcaactcagagaccagctgcacaagcagcggctcatgggagagcaactccgatcgctcctctaccaaatgcagagggtccaacaaaatcaacacataaaccctatgttattgccaaagggtctggcattaacttctatttctcacaatgtaatatagatatgtttggtgaccccaaaccctacaacccctcctccaatgactggaaggaggagtacgaggccgcaaagtactgggacagaccccccagacgcgacctaaggagcacccccttctacccctgggcccccacccctaaaccatacaatgtcaactttgccctcaactacaaataaacggtggccgtgggagtttcacttgtcggtgtctacctcttaaggtcactaagcactccgagcgtaagcgaggagtgcgaccctctaccaaggggcaactccctcgaagtccggcgctacgcgcttcgcgctgcgccggacatctcggaccccccctcgacccgaatcgcttgcgcgattcggacctgcggcctcgggggggtcgggggctttattaaacggactccgagatgccattggacactgagggggtgaacagcaacgaaagtgagtggggccagacttcg

SEQ ID NO: 1204 - protein, 765 aa, Alphatorquevirus sp.
MAYGWCWRRRRRPWRRRRWRRWRRRRRPRRRRPRRRYRRRRTVRRRGRGRWTRRYRRWRRKGKRKGKKKIIIKQWQPNYTRRCNIVGYLPLLICGDNTVARNYATHSDDSYYPGPFGGGMTTDKFTLRILYDEYKRFMNYWTASNEDLDLCRYLGVTIYVFRHPEVDFILLINTSPPFLDTEITGPSIHPGMMALNKRARWIPSLKNRPGRKHYVKIKVGAPRMFTDKWYPQTDLCDMTLLTIFATAADMQYPFGSPLTDTIVVSFQVLQSMFNDCLSVLPSNFATSGKGYLLYEKIRTHLPYYNTTQTQAQLKRYIDNTGNSTNTWSSYLNNQKFSQTQSPNTNSNSIGGPYTNYNDTWYKGTAYTQKITEVPPKAAKLYYDETKLLIGITFTGSTEYLHYTGGLYTSIWLSAGRSYFETKGPYTDITYNPFSDRGEGNMLWIDWLTKDDSQYSKTQSKCLIENLPLWASVYGYTEYCSKVTGDSNIEHNCRCVIRSPYTVPQLLDHNNPLRGYVPYSFNFGNGKMPGGSSLVPIRMRAKWYPTLFHQREVLEAIAQAGPFAYHSDIKKVSLGIKYRFKWVWGGNPVSQQVVRNPCKTTQGSSGNRVPRSIQVVDPRYNTPELTIHAWDFRHGFFGRKAIKRMQEQPIPHDTFSAGFKRSRRDTEALQSSQEEQQKENLLFPVQQLKRVPPWETSQESQSEEENSQKQETLSQQLRDQLHKQRLMGEQLRSLLYQMQRVQQNQHINPMLLPKGLALTSISHNVI

SEQ ID NO: 1205 - protein, 171 aa, Alphatorquevirus sp.
LPFVPRGNSGSGLAGLWARLLKMHFSRCSRKKRTLSLLPLHHSQKARPSVKGMWRPPTRNAFTIQRNWFYSCFHSHSSMCGCADFIGHFNHIAAMLGRPEDQNPPPPPGALRPLPALPAATEAPGDRAPWPMGGAGGDGGARGGGEDGAAGDVAGDPADADLVAAIDAAEQ

SEQ ID NO: 1206 - protein, 132 aa, Alphatorquevirus sp.; identical to SEQ ID NO: 476

SEQ ID NO: 1207 - DNA, 3165 bp, Gammatorquevirus sp.
cgggagcccgaggtgagtgaaaccaccgaggtctaggggcaattcgggccagggcagtctagcggaacgggcaagaaacttaaatatatttgttttacagatgtcaagcttctacaagccaacacattacaatggagacacaaaacaacaaatgtggatgtccatgatagcagatggccatgatatgcactgtaactgcaatggtccatttgcacatttactagattgcatttttccagaaggtcacaaagatagaaaacttactattgaagcaataattaacagagacaaacaacaatgcctttctggtggaatagaagacgaaagccatggtttggtcgttggagataccgccgctacaatcgctacaaaagaaaaaggtatccaagaagaagaagacgacctagatatgctactcgccgccgccgccgtcgcagaagaagatacaaggtaagaagaaaaaaacaaaaaattactcttaaacaatggcaaccagacagtattgttaaatgtaaaataataggacttggaactctagtagctggagcagaaggaaaccaatacagatgctatacaaaccaaagagacacttacacacaaccaaaggcaccaggagggggaggatttggagtagaaaaattttctttacaatacctttacaatgaatggctagcacataaaaatgtatggacaaaaacaaatgactataaacaactgtgcagatttacaggagcaaaaataacattttttagacaccctacaacagactttgttatatcatatgacagaacaccaccttttaactttgacaaatttacatacccacaaatacacccacaaaacatgctactatctaaaagacataaagtactgttaagtgcaacatccaatcctagaggcaaacatagcaaaacatttaaaataaagccacctagacaaatgtccacaaaatggttttttcaagaagattttacaatgtatgacttacttaaaattcaagcctctgctttaaatgttaattacagcctatatggtcccaacacacagtcacctaatataacattatactgcctaaatacccaattttaccaaatacaaaactggcaacaagaccatggaaacaacccatatttaccatacacaggctacccaacaagtggtatagtaaaatatttatactataaaaataaaatatccacagaagccacagtacagatttccaattataaagccagtgtaaatatgaatacaggcttttttcaacctggagttttacaagcctataaagttgtaaaatcagatggctcagaatacttttataaacctataactgtttgtagatacaatccagaggaagacacaggtgttggtaacaaagtctggctaacatccacactatcagatcacaaatggcaaccccccagtgacaatgacttaataatggcacaagaacccctatacatatctttttttggcttttgggactacattgtaaaagctaaaaaaacaaaagaatacatgcaaactcacatgtttgttgtacaatgctcagccattaaactacttacccctacatcaacacaaactattttcccatttgtagactattcctttatacaaggcaaaatgccctttgatgaaacacttacacttcaacaacaaaacaactggtaccccacagcagaaaaacaagtacaaacaataaatgctatagtagaatgtggcccctttgtgccaaaatatgccaacttgccaattagtacatggcaactaacctacagatatgttttttattttaagtggggcggatcacaaattaccaacgaccttgtacacaaccccaaagaccaaggcaaataccccgtacccgatacagtccttgaaacagctcaaattgctgacccgctcaaacaatcatacaaagcaatgcttagtgcctgggactacagaaggggctttattacaaactcagctcttaaaagagtttcagaaaacatcccaattgatgaaaatttctcatatgatgaaggagaaacgccaaaaaagaaaaagagagtcacagcagaactccagatacaaagagaagagagcgaagatctccagagctgtctccaggaactctgcaaagaaaataccttccaagaaacagaggacctccaacagctcatctaccagcagcagcagcagcagcttcacctcaaaagaaacctcttcaagctcctcatagatctaaagaagaaacaaaaatactatctactacagacaggccaactctaacaaaatttaaaccaggatttgaattggaaactgagtatcaactagctgaagcctttaaaaggccagtaagactttttaaagaagataaacctttttacccctggttacccaaatacacacccctagttaactttcaccttaactttaaaggctaggccgacactgttcacttagcggtgtttgtttattaaagtttgcaccccaaaaaaattgtaaaataaaaaaaaaaaaaaaaaataaaaaattgcaaaaattcggcgctcgcgcgcgctgcgcgcgcgcgagcgccgtcacgcgccggcgctcgcgcgccgcgcgtatgtgctaacacaccacgcacctagattggggtgcgcgcgctagcgcgcgcaccccaatgcgccccgccctcgttccgacccgcttgcgcgggtcggaccacttcgggctcggggggggcgcgcctgcggcgcttatttactaaacagactccgagtcgccatttggcccccccccctaagctccgcccccctaatgaatattcataaaggaaaccacaaaattgccatatgctaattagttccccttttgcacagtgaaaaggggaagtggggggggcagagcccccccacaccccccgcggggggggcacagcccccccccgcaccccccctacgtcacaaaccacgcccccgccgccatcttgggtgcggcagggcgggggctaaaatggcgggacccaatcaatttatactttcactttccaattaaaacctgccacatcactacaaaggggtggagactttaaaactatataactaagtgtggtggcgaatggctgagtttaccccgctagacggtgcagggaccggatcgagcgcagcgaggaggtccccggctgcccttggg

SEQ ID NO: 1208 - protein, 659 aa, Gammatorquevirus sp.
MPFWWNRRRKPWFGRWRYRRYNRYKRKRYPRRRRRPRYATRRRRRRRRRYKVRRKKQKITLKQWQPDSIVKCKIIGLGTLVAGAEGNQYRCYTNQRDTYTQPKAPGGGGFGVEKFSLQYLYNEWLAHKNVWTKTNDYKQLCRFTGAKITFFRHPTTDFVISYDRTPPFNFDKFTYPQIHPQNMLLSKRHKVLLSATSNPRGKHSKTFKIKPPRQMSTKWFFQEDFTMYDLLKIQASALNVNYSLYGPNTQSPNITLYCLNTQFYQIQNWQQDHGNNPYLPYTGYPTSGIVKYLYYKNKISTEATVQISNYKASVNMNTGFFQPGVLQAYKVVKSDGSEYFYKPITVCRYNPEEDTGVGNKVWLTSTLSDHKWQPPSDNDLIMAQEPLYISFFGFWDYIVKAKKTKEYMQTHMFVVQCSAIKLLTPTSTQTIFPFVDYSFIQGKMPFDETLTLQQQNNWYPTAEKQVQTINAIVECGPFVPKYANLPISTWQLTYRYVFYFKWGGSQITNDLVHNPKDQGKYPVPDTVLETAQIADPLKQSYKAMLSAWDYRRGFITNSALKRVSENIPIDENFSYDEGETPKKKKRVTAELQIQREESEDLQSCLQELCKENTFQETEDLQQLIYQQQQQQLHLKRNLFKLLIDLKKKQKYYLLQTGQL

SEQ ID NO: 1209 - protein, 117 aa, Gammatorquevirus sp.
MSSFYKPTHYNGDTKQQMWMSMIADGHDMHCNCNGPFAHLLDCIFPEGHKDRKLTIEAIINRDKQQCLSGGIEDESHGLVVGDTAATIATKEKGIQEEEDDLDMLLAAAAVAEEDTR

SEQ ID NO: 1210 - protein, 108 aa, Gammatorquevirus sp.
LSPGTLQRKYLPRNRGPPTAHLPAAAAAASPQKKPLQAPHRSKEETKILSTTDRPTLTKFKPGFELETEYQLAEAFKRPVRLFKEDKPFYPWLPKYTPLVNFHLNFKG

SEQ ID NO: 1211 - DNA, 3164 bp, Gammatorquevirus sp.
cgggagcccgaggtgagtgaaaccaccgaggtctaggggcaattcgggccagggcagtctagcggaacgggcaagaaacttaaatatatttgttttacagatgtcaagcttctacaagccaacacattacaatggagacacaaaacaacaaatgtggatgtccatgatagcagatggccatgatatgcactgtaactgcaatggtccatttgcacatttactagattgcatttttccagaaggtcacaaagatagaaaacttactattgaagcaataattaacagagacaaacaacaatgcctttctggtggaatagaagacgaaagccatggtttggtcgttggagataccgccgctacaatcgctacaaaagaaaaaggtatccaagaagaagaagacgacctagatatgctactcgccgccgccgccgtcgcagaagaagatacaaggtaagaagaaaaaaacaaaaaattactcttaaacaatggcaaccagacagtattgttaaatgtaaaataataggacttggaactctagtagctggagcagaaggaaaccaatacagatgctatacaaaccaaagagacacttacacacaaccaaaggcaccaggagggggaggatttggagtagaaaaattttctttacaatacctttacaatgaatggctagcacataaaaatgtatggacaaaaacaaatgactataaacaactgtgcagatttacaggagcaaaaataacattttttagacaccctacaacagactttgttatatcatatgacagaacaccaccttttaactttgacaaatttacatacccacaaatacacccacaaaacatgctactatctaaaagacataaagtactgttaagtgcaacatccaatcctagaggcaaacatagcaaaacatttaaaataaagccacctagacaaatgtccacaaaatggttttttcaagaagattttacaatgtatgacttacttaaaattcaagcctctgctttaaatgttaattacagcctatatggtcccaacacacagtcacctaatataacattatactgcctaaatacccaattttaccaaatacaaaactggcaacaagaccatggaaacaacccatatttaccatacacaggctacccaacaagtggtatagtaaaatatttatactataaaaataaaatatccacagaagccacagtacagatttccaattataaagccagtgtaaatatgaatacaggcttttttcaacctggagttttacaagcctataaagttgtaaaatcagatggctcagaatacttttataaacctataactgtttgtagatacaatccagaggaagacacaggtgttggtaacaaagtctggctaacatccacactatcagatcacaaatggcaaccccccagtgacaatgacttaataatggcacaagaacccctatacatatctttttttggcttttgggactacattgtaaaagctaaaaaaacaaaagaatacatgcaaactcacatgtttgttgtacaatgctcagccattaaactacttacccctacatcaacacaaactattttcccatttgtagactattcctttatacaaggcaaaatgccctttgatgaaacacttacacttcaacaacaaaacaactggtaccccacagcagaaaaacaagtacaaacaataaatgctatagtagaatgtggcccctttgtgccaaaatatgccaacttgccaattagtacatggcaactaacctacagatatgttttttattttaagtggggcggatcacaaattaccaacgaccttgtacacaaccccaaagaccaaggcaaataccccgtacccgatacagtccttgaaacagctcaaattgctgacccgctcaaacaatcatacaaagcaatgcttagtgcctgggactacagaaggggctttattacaaactcagctcttaaaagagtttcagaaaacatcccaattgatgaaaatttctcatatgatgaaggagaaacgccaaaaaagaaaaagagagtcacagcagaactccagatacaaagagaagagagcgaagatctccagagctgtctccaggaactctgcaaagaaaataccttccaagaaacagaggacctccaacagctcatctaccagcagcagcagcagcagcttcacctcaaaagaaacctcttcaagctcctcatagatctaaagaagaaacaaaaatactatctactacagacaggccaactctaacaaaatttaaaccaggatttgaattggaaactgagtatcaactagctgaagcctttaaaaggccagtaagactttttaaagaagataaacctttttacccctggttacccaaatacacacccctagttaactttcaccttaactttaaaggctaggccgacactgttcacttagcggtgtttgtttattaaagtttgcaccccaaaaaaattgtaaaataaaaaaaaaaaaaaaaaataaaaaattgcaaaaattcggcgctcgcgcgcgctgcgcgcgcgcgagcgccgtcacgcgccggcgctcgcgcgccgcgcgtatgtgctaacacaccacgcacctagattggggtgcgcgcgctagcgcgcgcaccccaatgcgccccgccctcgttccgacccgcttgcgcgggtcggaccacttcgggctcggggggggcgcgcctgcggcgcttatttactaaacagactccgagtcgccatttggcccccccctaagctccgcccccctaatgaatattcataaaggaaaccacaaaattagccatatgctaattagttccccttttgcacagtgaaaaggggaagtggggggggcagagcccccccacaccccccgcggggggggcacagcccccccccgcaccccccctacgtcacaaaccacgcccccgccgccatcttgggtgcggcagggcgggggctaaaatggcgggacccaatcaatttatactttcactttccaattaaaacctgccacatcactacaaaggggtggagactttaaaactatataactaagtgtggtggcgaatggctgagtttaccccgctagacggtgcagggaccggatcgagcgcagcgaggaggtccccggctgcccttggg

SEQ ID NO: 1212 - protein, 659 aa, Gammatorquevirus sp.; identical to SEQ ID NO: 1208

SEQ ID NO: 1213 - protein, 117 aa, Gammatorquevirus sp.; identical to SEQ ID NO: 1209

SEQ ID NO: 1214 - protein, 108 aa, Gammatorquevirus sp.; identical to SEQ ID NO: 1210

SEQ ID NO: 1215 - DNA, 3164 bp, Gammatorquevirus sp.
cgggagcccgaggtgagtgaaaccaccgaggtctaggggcaattcgggccagggcagtctagcggaacgggcaagaaacttaaatatatttgttttacagatgtcaagcttctacaagccaacacattacaatggagacacaaaacaacaaatgtggatgtccatgatagcagatggccatgatatgcactgtaactgcaatggtccatttgcacatttactagattgcatttttccagaaggtcacaaagatagaaaacttactattgaagcaataattaacagagacaaacaacaatgcctttctggtggaatagaagacgaaagccatggtttggtcgttggagataccgccgctacaatcgctacaaaagaaaaaggtatccaagaagaagaagacgacctagatatgctactcgccgccgccgccgtcgcagaagaagatacaaggtaagaagaaaaaaacaaaaaattactcttaaacaatggcaaccagacagtattgttaaatgtaaaataataggacttggaactctagtagctggagcagaaggaaaccaatacagatgctatacaaaccaaagagacacttacacacaaccaaaggcaccaggagggggaggatttggagtagaaaaattttctttacaatacctttacaatgaatggctagcacataaaaatgtatggacaaaaacaaatgactataaacaactgtgcagatttacaggagcaaaaataacattttttagacaccctacaacagactttgttatatcatatgacagaacaccaccttttaactttgacaaatttacatacccacaaatacacccacaaaacatgctactatctaaaagacataaagtactgttaagtgcaacatccaatcctagaggcaaacatagcaaaacatttaaaataaagccacctagacaaatgtccacaaaatggttttttcaagaagattttacaatgtatgacttacttaaaattcaagcctctgctttaaatgttaattacagcctatatggtcccaacacacagtcacctaatataacattatactgcctaaatacccaattttaccaaatacaaaactggcaacaagaccatggaaacaacccatatttaccatacacaggctacccaacaagtggtatagtaaaatatttatactataaaaataaaatatccacagaagccacagtacagatttccaattataaagccagtgtaaatatgaatacaggcttttttcaacctggagttttacaagcctataaagttgtaaaatcagatggctcagaatacttttataaacctataactgtttgtagatacaatccagaggaagacacaggtgttggtaacaaagtctggctaacatccacactatcagatcacaaatggcaaccccccagtgacaatgacttaataatggcacaagaacccctatacatatctttttttggcttttgggactacattgtaaaagctaaaaaaacaaaagaatacatgcaaactcacatgtttgttgtacaatgctcagccattaaactacttacccctacatcaacacaaactattttcccatttgtagactattcctttatacaaggcaaaatgccctttgatgaaacacttacacttcaacaacaaaacaactggtaccccacagcagaaaaacaagtacaaacaataaatgctatagtagaatgtggcccctttgtgccaaaatatgccaacttgccaattagtacatggcaactaacctacagatatgttttttattttaagtggggcggatcacaaattaccaacgaccttgtacacaaccccaaagaccaaggcaaataccccgtacccgatacagtccttgaaacagctcaaattgctgacccgctcaaacaatcatacaaagcaatgcttagtgcctgggactacagaaggggctttattacaaactcagctcttaaaagagtttcagaaaacatcccaattgatgaaaatttctcatatgatgaaggagaaacgccaaaaaagaaaaagagagtcacagcagaactccagatacaaagagaagagagcgaagatctccagagctgtctccaggaactctgcaaagaaaataccttccaagaaacagaggacctccaacagctcatctaccagcagcagcagcagcagcttcacctcaaaagaaacctcttcaagctcctcatagatctaaagaagaaacaaaaatactatctactacagacaggccaactctaacaaaatttaaaccaggatttgaattggaaactgagtatcaactagctgaagcctttaaaaggccagtaagactttttaaagaagataaacctttttacccctggttacccaaatacacacccctagttaactttcaccttaactttaaaggctaggccgacactgttcacttagcggtgtttgtttattaaagtttgcaccccaaaaaaattgtaaaataaaaaaaaaaaaaaaaaataaaaaattgcaaaaattcggcgctcgcgcgcgctgcgcgcgcgcgagcgccgtcacgcgccggcgctcgcgcgccgcgcgtatgtgctaacacaccacgcacctagattggggtgcgcgcgctagcgcgcgcaccccaatgcgccccgccctcgttccgacccgcttgcgcgggtcggaccacttcgggctcggggggggcgcgcctgcggcgcttatttactaaacagactccgagtcgccatttggccccccccctaagctccgcccccctaatgaatattcataaaggaaaccacaaaattgccatatgctaattagttccccttttgcacagtgaaaaggggaagtggggggggcagagcccccccacaccccccgcggggggggcacagcccccccccgcaccccccctacgtcacaaaccacgcccccgccgccatcttgggtgcggcagggcgggggctaaaatggcgggacccaatcaatttatactttcactttccaattaaaacctgccacatcactacaaaggggtggagactttaaaactatataactaagtgtggtggcgaatggctgagtttaccccgctagacggtgcagggaccggatcgagcgcagcgaggaggtccccggctgcccttggg

SEQ ID NO: 1216 - protein, 659 aa, Gammatorquevirus sp.; identical to SEQ ID NO: 1208

SEQ ID NO: 1217 - protein, 117 aa, Gammatorquevirus sp.; identical to SEQ ID NO: 1209

SEQ ID NO: 1218 - protein, 108 aa, Gammatorquevirus sp.; identical to SEQ ID NO: 1210

SEQ ID NO: 1219 - DNA, 3164 bp, Gammatorquevirus sp.
cgggagcccgaggtgagtgaaaccaccgaggtctaggggcaattcgggccagggcagtctagcggaacgggcaagaaacttaaatatatttgttttacagatgtcaagcttctacaagccaacacattacaatggagacacaaaacaacaaatgtggatgtccatgatagcagatggccatgatatgcactgtaactgcaatggtccatttgcacatttactagattgcatttttccagaaggtcacaaagatagaaaacttactattgaagcaataattaacagagacaaacaacaatgcctttctggtggaatagaagacgaaagccatggtttggtcgttggagataccgccgctacaatcgctacaaaagaaaaaggtatccaagaagaagaagacgacctagatatgctactcgccgccgccgccgtcgcagaagaagatacaaggtaagaagaaaaaaacaaaaaattactcttaaacaatggcaaccagacagtattgttaaatgtaaaataataggacttggaactctagtagctggagcagaaggaaaccaatacagatgctatacaaaccaaagagacacttacacacaaccaaaggcaccaggagggggaggatttggagtagaaaaattttctttacaatacctttacaatgaatggctagcacataaaaatgtatggacaaaaacaaatgactataaacaactgtgcagatttacaggagcaaaaataacattttttagacaccctacaacagactttgttatatcatatgacagaacaccaccttttaactttgacaaatttacatacccacaaatacacccacaaaacatgctactatctaaaagacataaagtactgttaagtgcaacatccaatcctagaggcaaacatagcaaaacatttaaaataaagccacctagacaaatgtccacaaaatggttttttcaagaagattttacaatgtatgacttacttaaaattcaagcctctgctttaaatgttaattacagcctatatggtcccaacacacagtcacctaatataacattatactgcctaaatacccaattttaccaaatacaaaactggcaacaagaccatggaaacaacccatatttaccatacacaggctacccaacaagtggtatagtaaaatatttatactataaaaataaaatatccacagaagccacagtacagatttccaattataaagccagtgtaaatatgaatacaggcttttttcaacctggagttttacaagcctataaagttgtaaaatcagatggctcagaatacttttataaacctataactgtttgtagatacaatccagaggaagacacaggtgttggtaacaaagtctggctaacatccacactatcagatcacaaatggcaaccccccagtgacaatgacttaataatggcacaagaacccctatacatatctttttttggcttttgggactacattgtaaaagctaaaaaaacaaaagaatacatgcaaactcacatgtttgttgtacaatgctcagccattaaactacttacccctacatcaacacaaactattttcccatttgtagactattcctttatacaaggcaaaatgccctttgatgaaacacttacacttcaacaacaaaacaactggtaccccacagcagaaaaacaagtacaaacaataaatgctatagtagaatgtggcccctttgtgccaaaatatgccaacttgccaattagtacatggcaactaacctacagatatgttttttattttaagtggggcggatcacaaattaccaacgaccttgtacacaaccccaaagaccaaggcaaataccccgtacccgatacagtccttgaaacagctcaaattgctgacccgctcaaacaatcatacaaagcaatgcttagtgcctgggactacagaaggggctttattacaaactcagctcttaaaagagtttcagaaaacatcccaattgatgaaaatttctcatatgatgaaggagaaacgccaaaaaagaaaaagagagtcacagcagaactccagatacaaagagaagagagcgaagatctccagagctgtctccaggaactctgcaaagaaaataccttccaagaaacagaggacctccaacagctcatctaccagcagcagcagcagcagcttcacctcaaaagaaacctcttcaagctcctcatagatctaaagaagaaacaaaaatactatctactacagacaggccaactctaacaaaatttaaaccaggatttgaattggaaactgagtatcaactagctgaagcctttaaaaggccagtaagactttttaaagaagataaacctttttacccctggttacccaaatacacacccctagttaactttcaccttaactttaaaggctaggccgacactgttcacttagcggtgtttgtttattaaagtttgcaccccaaaaaaattgtaaaataaaaaaaaaaaaaaaaaataaaaaattgcaaaaattcggcgctcgcgcgcgctgcgcgcgcgcgagcgccgtcacgcgccggcgctcgcgcgccgcgcgtatgtgctaacacaccacgcacctagattggggtgcgcgcgctagcgcgcgcaccccaatgcgccccgccctcgttccgacccgcttgcgcgggtcggaccacttcgggctcggggggggcgcgcctgcggcgcttatttactaaacagactccgagtcgccatttggccccccccctaagctccgcccccctcatgcatattcataaaggaaaccacaaaattgccatatgctaattagttccccttttgcacagtgaaaaggggaagtggggggggcagagcccccccacaccccccgcggggggggcacagcccccccccgcaccccccctacgtcacaaaccacgcccccgccgccatcttgggtgcggcagggcgggggctaaaatggcgggacccaatcaatttatactttcactttccaattaaaacctgccacatcactacaaaggggtggagactttaaaactatataactaagtgtggtggcgaatggctgagtttaccccgctagacggtgcagggaccggatcgagcgcagcgaggaggtccccggctgcccttggg

SEQ ID NO: 1220 - protein, 659 aa, Gammatorquevirus sp.; identical to SEQ ID NO: 1208

SEQ ID NO: 1221 - protein, 117 aa, Gammatorquevirus sp.; identical to SEQ ID NO: 1209

SEQ ID NO: 1222 - protein, 108 aa, Gammatorquevirus sp.; identical to SEQ ID NO: 1210

SEQ ID NO: 1223 - DNA, 3158 bp, Alphatorquevirus sp.
cgggtgccggaggtgagtttacacaccgcagtcaaggggcaattcgggcacgggactggccgggctatgggcaaggctcttaaaaaattcccccgttgtgttctccggcaggacaccaagtcatgccgtggagaccgccggtgcataacgtcccgggcagggagaatcagtggttcgcagcgttttttcactcacatgctgctttctgcgggtgtggtgaccctgttgggcatcttgttagcattgctcctcgctttcctaacgccggtccaccgagaccacctccagggctagaacagcaaaaccccgagggcccggcgggtcccggaggtccccccgccatcttgccagctctgccggccccggcagaccctgagccgccgccacggcgtggtggtggggcagatggaggcgccgctggaggcctcgctatcgcagacgcacctggagggtacgcagaagacgacctagacgaacttttcgccgccgccgccgaggacgatatgtgagtaggcggaggcgccgccgctactacaggcgcagactgagacggggcagacgcagagggcgacgaaagagacacagacagactctagtcctcaggcagtggcaaccagacgttgtaagacactgtaaaattacaggatggatgcccctcatcatctgtggctccgggagcacacagaacaattttataactcacatggacgactttcctcccatgggctcctcctacgggggcaactttacaaacctcaccttctccttagagggcatatatgaacagtttttataccacagaaacaggtggtcccggtccaaccatgacctagacctagccagatacaaaggcacaactctaaaactgtacagacaccacagcttagactacatagtaagctacaacagaacaggcccttttcagatcagtgacatgacctacctcagcacacaccctgcatttatgctgctacaaaaacacagaatagttgtacccagcttactcacaaagcctaaaggcaagagatctattaaagtgagaataaagcccccaaaactcatgctaaacaagtggtactttacaaaagatatatgtagcatgggtctctttcagctgcaggccacagcatgcaccctatacaatccctggctgagagacaccaccaaaagcccagtaataggctttagagtacttaaaaacagcatttacacaaacctcagtaacctaccagagcatgacggagccagagaagctattagaaaaaaactacacccagaatccctaacaggacattctcccaatcaaaaaggctgggaatatagctacaccaaactaatggctccaatatactactctgctaacagaaacagcacatacaactggctaaattaccaagataattatctagccacctattctaaatttaaagcaaaaatgatagaaaacctaaacctaatacaaaaagaatacctatatcattaccctaacaatgtcaacacagaccttataaaaagaaacacactaacacatgactggggcatatacagtccctactggcttacacccacaagaataagcctagactgggaaacaccctggacatatgttagatacaacccactagcagacaaaggcataggcaatgctgtatatgcacagtggtgctctgaggctacctgcaaactagaccccaaaaagtccaagtgcataatgagagacctaccactatgggctatatgctatggttatgtagactgggtagtaaaatccacaggagtaagcagtgcagtaacagacatgagaatagccatcagaagcccctacactgaaccagcacttatagggtcaagtgaagacataggctacattccagtaagtgacaccttttgcaacggagacatgccgtttcttgctccatacatccctgtgggctggtggatcaagtggtaccccatgattgcacaccaaaaggaagtccttgaggcaatagttaactgtggaccgtttgtgcccagagaccagaccactcccagttgggaaattaccctaggttacaaaatggactggttatggggtggctctcccctgccttcacaggcaatcgacgacccctgccagaagcccacccacgaacttcccgaccccgatagacaccctcgcatgttacaagtctctgacccgacaaagctcggaccgaagacagtgttccacaaatgggactggagacgtgggatgcttagcaaaagaagtattaagagagtccaagaagactcaacagatgatgaatatgttgcagggcctgtaccaagaaaaagaaacaaattcgatactcgagcccaagggctccaaagccccgaaaaagaaagctacactttactccaagccctccaagagtcggggcaagagagcagctccgaggaccaagaacaagcaccccaacaaaaagaggcagaagagaaagcgctcctggagcagctccagctccagaaacagcaccagcgagtcctcaagcgaggcctcaaactcctcctgggagacgtcctccgactccgccgaggagtccactgggaccccctcctgtcataattcagggtccctttatcccagacctgcttttccctgacacacaaaaaaaaaaaaaattttccaacttcgactgggctacagaataccagctagctgccgctttcgaccgcccagtccgccactaccctaccgacccccctcactacccgtggctaccaaaaaagcccactatccagcctacatgtagggtaagtttcaaattaaagctcgatgcctaactttcaaggccgtgggtgtttcacttcatcggtgtctacctctataagtcactaagcactccgagcgtaagcgaggagtgcgacccccctgcccggtagcaacttcctcggggtccggcgctacgccttcggctgcgccggacgtccaccgcgcatgcgcggccacgcccccgccgccattttgtgcagcccgccaatttctgttcaaacaggccaatgaggaccttctacgtacacttcctggggcgtgtctatgaagtctatataagcaatgacggtgacgaatggtagagtttattttgcccgtccgcggcgagagcgcgagcgaagcgagcgatcgagcgtcctgtggg

SEQ ID NO: 1224 - protein, 680 aa, Alphatorquevirus sp.; identical to SEQ ID NO: 961

SEQ ID NO: 1225 - DNA, 3157 bp, Alphatorquevirus sp.
cgggtgccgaaggtgagtttacacaccggagtcaaggggcaattcgggctcgggactggccgggctatgggcaaggctcttaaagcgatcattcttaaaaatgtttttcggcaggtactacagaaagaaaaggaaagtgcttctgtcctcactgccaactccacagaaaaaacggcctgctatgagctggcagccccctatgcacaatgccagaggcagggagcaccacttctggcaagcttgctacaattctcatgctagtttttgtggctgtggtagttttctttctcacctcgttcgtctggaaggtcgttatgcatctggcaacaacaactcctcgccccagactggggcaccaccaatgatccgtagagccctgcctcccccagcggctccggatcagccccagaccccacaatggtctggaactggtggtggagacggcgccggagaaggtggccagcaaggaggaggaggtggagacgactacgcacccgaagacctagacgcactgttcgacgccgtcgcaggagaccaacagtaaggagaaggaggtgggggcgcagacgggggcgacgcacatacaggagacgcagacgaacccgtagaaagagaaagagactcgtactgactcaatggaaccccagcacagtaagaaagtgctggatccgaggcatgtttcccatgctgatctgtggaaacacacaacagggcagaaactatgcagaccatatggacgatgtaattcctcaaggaaaaccctatggggggtctctaagtaccaccacttggactctacaggcgctgtatgaccagcaccagagattcatgaacaagtggtcttatcccaacacagaactagacctagccaggtacctaggatctgaatttacattttatagagacaaactcacagactatatagtaaccttcaacatagtacctccttttaagctaaacaaatacagctgtgcatcataccacccaggtatgatgatgcagagacgcaagaaaatacttgtaaaaagctttcaaactaaaccaaaaggcagaaaagctgtgaaagtaaaaataggacccccacaactatttgagcagaagtggtacactcagcaagacctttgttccgttggtcttgtgtcatttgcggtttctgcggcgagcctaacacatccgttctgctcaccacaaactgaaaatgttgcagtaaccttccaggttttgaaatccttctactatgaaggaataggcattaacgaacaaactaaacacacaactatagcagacaccctatacacacaaggtaattactatcaaacatttcatacaacatcatacattaattcaggcctaaaaccaggtaaagcaggacaaaatgaactagaccaaacagttaaaacatggattcagtcaaactttcccacaggaaacaacagcacctttggctttaattcatataaaccagataaacaaaaattaaataaactattagactggtactggcaacaactgcaaacaccaaatgacattacctccagctatggaagagctactaacaaatacctagaataccacatgggaatatacagtgctatattcctaagcccactcagaagcaacctgcaattccctacagcataccaagatgtaacatacaacccactcatagacaaaggagtaggaaatgaaatttggtttcaatacaacacaaaacccaatacaagctttgatgaaaaacaatgcaagtgccacataaaagacatacccctttgggcagccttttatggctactcagactatgtacaaacagaaataggagcacaacaagaaatatttaacataggaatagtttgtgtaaaatgcccatacacaataccaaaactaatccatgttgaatcaacaaaaaaagactggggctttgtattttatgatggactatttggaaatggcaaactaccagatgggtcaggacacgttccaacatacctacaagaaagatggtatcctagaatgagatttcaacaaaatgttatgcatgacatatgtcaaacaggcccatttagctacaaagatgaactaaaaagcacagtacttacatgcaaatacaagttcaaattcttatggggtggcaacttaatacctcaacaggtcgttaggaatccctgcaagtcagacggacggttcgacattgacccccatagattccctcgtgagctacaaattgcggaccctcgcaccatggggccccaatgggttttccacacctgggatttcagacgtggactgtacggcaaagatgctatcaaaagagtgtcagaaaaaccagatgatgatgaactctatactttctttccaaaaaaacctcgcctttctacaccagcagacgccccaggcctccaagaaggaggcttctttttccagaaccaccaagaaacaacatcagaagaagaagcagaagcccaagaagaaacgcaggcgcaaccggagcagcagcagcgagtcctcagactgcagctcagacagcagcagcacctcggggaccagctgcgactcctatatcagcaggtcctcaaaacccaagcaggtctccacctaaacccacttatattgggccttgcataaataaagtatacatgtttccagaaagcaagcccagaactcctaccagccaagactgggctcaggagtacgagatggcccgcatatttgacaggcctgccagatccaacctttcagacactcccttttatccctgggtcccaaaacctttcaatgttacttttgctcttaaattcaaataaacaaggccgtgggagtttcacttgtcggtgtctacctctataagtcactaagcactccgagcgtcagcgaggagtgcgacccttccccctgactcaacggggggcggaaaccgccccccccccatgcgcatgcgcatggggcccctcccccccagcggggggctccgccccccggccccccccccgaagtccgtcactacccacgtgactcccacaggccaaccagaaccttctacgtgcacttcctgggctgggtttatgagagcatataactaagtgcacttccgaatggctgagttttccacgcccgtccgcagcggtggagcacctcaggagcgacccccgcgtcccgaggg

SEQ ID NO: 1226 - protein, 734 aa, Alphatorquevirus sp.; identical to SEQ ID NO: 538

SEQ ID NO: 1227 - protein, 162 aa, Alphatorquevirus sp.; identical to SEQ ID NO: 539

SEQ ID NO: 1228 - protein, 55 aa, Alphatorquevirus sp.; identical to SEQ ID NO: 540

SEQ ID NO: 1229 - DNA, 3156 bp, Gammatorquevirus sp.
cgggagcccgaggtgagtgaaaccaccgaggtctaggggcaactcgggctagggcagtctagcggaacgggcaagaaacttaaaatatatttgttttctagatgctgtcacacaaagactttgccagaaaaactaaatacaatattgatacccaaaatcaaatatggatgtctggcattgctgactctcatgacacttggtgtgattgtgatactccattcgcgcatcttctagcaagtatttttccacctggccacaaagatagaaattctaccataaaccaaatactatacagagactataaacaaaaatgcctttctggtggaggcgcagacaaagatactggagacccagaagattctggaaaaataaaacaagaaaatacaacagaagaagatggcctcgcaggcgcagaagaagaactcgcagaactactcgccgccgcagaagaaggagaaaatacaaggtaaaaagaaaaagacaaactttaccagtaagacaatggcaacctgataaaattgttaaatgtaaaattaaaggagtagatgtactagttttaggtggggagggtaaacagcttgtatgttatactaatgtaaaagatgcatggacaccacctaaagcaccagggggtggagggtttggctgtcagcaatatagcttaagctggttatatgaacaatatgtttttagaaacaatatatggacaaagagtaacataggattagacctttgtagatacttgcattgtagacttacattttatagacacccagacacagactttattatatcctatgaaagacaaccaccatttgacatagacaaatggacttatcctagctgtcacccaaaaaacttgctactaggaaaacacaaaatattgttattaagcaaagcaactaaaccaaatggaaaactaaccaaaagaattttaattaaaccacccaagcaaatgctaaccaaatggttctttcaagaacactttgcacatgcaggattatttttagttaaagctgcagcatgcaacttcagatacagccacttaggctgctgtaacaccaacagaattactactctattttatttaaacccaggcttttaccaacaaggtaactggtctgcacacacctctacaggttatcagccatatttaacagtaccaacagcactatatttttggagcaaagacaacaaattgactaaatatacaaagccacaaacttatgataaatcaattgactataccacaggctggtttaaaaaagaaatattatctgctgttaaagtaaccacagacgagaccggagaaaaaccaactgccagtactccagtaaacatatgcaggtacaatcctgcagtagacagtggcaaaggcaacaccatatggttagtctccactttaacaaataactaccataaaccaacaagtgacaaatatattattatttcaggcctgcctttatatgaaatgctatatggctttttaagctttgtgcaaatgattaaaaagacacctcagtttttacaaacacacatactagccatagaatcaccagcactcaaaccttatgcacaaataggagcagaaggcccaataatacctctagacaacacctttgtaaatggacaagcaccatacaatgaagtactaactaccagtatgaaagctaactggtggccaaatgtatataatcaactacaaatattaaattttatagtagagagtggaggctatgtaccaaagtatagccaaacaaaagaaagtacatgggaattacaatatatgtacaattttctttttaagtggggaggtccagaaatttcagaacagcctgttgcagatccaacattacaggggacatatgaagtacccgatactttcacaggaacaatacaaattagggacccagctaaacaaagtgcaatgtcaatcctccatccctgggacatcagacatggaatgtttacaaaaacagctcttaaaagaatgcaatcaaacatctcaactgattcaactttccaagcagatacagaagaagttcccaggaaaaaaaagaaagttacaggtccccagatgtcagtcccacaagaagagcaagaagagatccagagatgtctccactcactcttcgaaagcgatacctaccaagaaacggaggacccacaaaaaatcaaagacctcatcaagcagcagcacctcaagcagagagagctcaagtacaacatcctcagactcatctcagacctcaaagagcagcaaaacatcctgaaacttcaaacaggctatgtcacttaaccagatttaaaaaaggttttgaatgggacactgaaagacaactagcacatgcatttaacagaccccccagactttttaaagaagacccacctttctatccatggctaccccgctttgaacccattgtaaactttcaccttaattataaattctaggcctacaactttcacttagtggtgtatgtttatataagtctcacccccaaaaaaataataaaattgtaaaaaaaaaaaaaaaaataaaaaattgcaaaaattcggcgctcgcgcgcgctgcgcgcgcgcgagcgccgtcacgcgccggcgctcgcgcgccgcgcgtatctgctaacacaccacgctcctagattggggtgcgcgcgctagcgcgcgcaccccaatgcgccccgccctcgttccgacccgcttgcgcgggtcggaccacttcgggctcgggggggcgcgcctgcggcgcttatttactaaacagactcccagtcgccatttggccccccctaagctccgcccccctcatgaatattcataaaggaaaccacaaaattagaattgccgaccacaaactgccatatgctaataacttccccttttacactgtaaaaaggggaagtgggggggccccccctacgtcacaggccacgcccccgccgccatcttgggtgcggcagggcgggggctaaaatggcgggacccaatcattttatactttcagtttccaatcacaacctgccacatcacacctaatgggcggagactttaaaactatataaccaagtggggtgacgaatggctgagtttaccccgctagacggtgcagggaccggatcgagcgcagcgaggaggtccccggctgcccaaggg

SEQ ID NO: 1230 - protein, 662 aa, Gammatorquevirus sp.; identical to SEQ ID NO: 967

SEQ ID NO: 1231 - protein, 122 aa, Gammatorquevirus sp.; identical to SEQ ID NO: 968

SEQ ID NO: 1232 - protein, 112 aa, Gammatorquevirus sp.; identical to SEQ ID NO: 969

SEQ ID NO: 1233 - DNA, 3155 bp, Alphatorquevirus sp.
tccgagttgccattggacactgtagccgtgaatcagtaacgattcgggctcgggactggccgggctatgggcaaggctcttagggtcatcgctcttaaaaatgttttttggcagaccttacagaaaaaagaaaagggcgctgctactgtctcagctgccagatccaaagaagaaactacctggtgatatgagctggcgccccccggtacacaatgccgccggcatcgataggcagttctttgaagcctgctttcgatgccacagtagttgctgcggctgcggcagctttattaatcatcttaatgtactggctgctcgctatggctttactggggggccggcgccgccaggtggtcctcggccggcgccccaagtgaggcccgcgcttccggcgccgcagcccgacccggaggccgaaaaccgtgagccatggcgtggagctggtggtggcaacgatggaggcgccgcggctggaaacccaggcgccgccgctggagacgcctacgatggagaagacctcgacgccctgttcgccgccgtcgccgaagacgcagagtaaggagacggaggtgggggaaaagacgggggcgacgcaaacggtacacccgtagacgaaagagacgcattaagcccagaaactttaaaaagaaactagtacttactcagtggcacccctccgtagtaagacgctgctttatcaggggcatagttcccatcctcatatgcgggcacacaaaatggaacagtaactacgccctgcatagcgaggactacacagaagagggccgctaccctcacggagggtccctctcgaccactacgtggtcactaaaggtgctgtacgacgagtacctcaagcaccacaacttctggggctacccaaacacccagctagacctggccagatacaggggctgcactttcaccttctacagacacaaaaagactgactttatagtatggtggaacagaaagcctccctttaaactaaacaagctgagctgcccgtccttccacccgggcatgctcatgcaacagaaacacaagctgctaatcccaagctttgacactaaacccgggggcagagctaaaattagagtcagaataaagccccccactctgttagaggacaagtggtacactcagcaagacttgtgtccagtaaacctggcgcaacttgtggttactgcggctgactttcaacatccgttctgctcaccacaaacgaacactccaaccacaaccttccaggtgttaaaagaaatgtattataacaccataggcatagttgacacacaagaaaattaccagtcagttaataataaaactacatctcaaacatacaagaagtttcttgaagatttacaaagcaccttatattccacaggttcctactggaactcctttcacacagcagaatacttaaaccccaatgtaacagacactcacaaccacaaaatatttaatgaatcatccacacaattaacaagttggctcacagggaaaggcagcaacaactttcaaactggtaagagcacccagtttggctacaactcatacaaccctgacaaagataagatacagttagcaaatcaagcatactggacagcacttacaaaagcaaacgaccaagcaacacaaatagggcaggcccgtgccatgcaatttgaataccacactggcatctacagccccatatttctcagcagacacagaagcacactaaactttgccagggcctaccaggacgtcacatacaacccaaactgtgacagaggagttaaaaacagggtgtgggttcaggccctaactaaggccaccacagaatttgacgagaaacgcagcaagtgcgttatcactgacctgcctctgtgggccgctttgtactgctaccacaactttgtagaagaggagctaggcatctcctcagaaatctacaacgcctgtatagtctgtgtacagtgcccttacacctttccccccatgtatgacaagaaaaacccaaacaaggggtacgtattctatgacgccctgtttggaaacggaaaaaccccagacggacgcggacaggtggacgtgttctggcagcagcggtggtacccccgcatggcctgccaggtgcaagtcatgcacgacatcaccatgacgggaccgttctcctaccacgacgaactagtgagtacacaactaactgctaaatacaaatttgacttcatgtggggtggaaacatgatctcctcacagatcatcaagaacccctgcaaagacacagacatggacaccacctatcccagtagacagcgtcgcgacttacaaattgttgacccacactccatggggccctccttcgcgttccacacgtgggactacagacgaggactgtttggtaaagatgctatcgacagagtgtcaaaacaacaagactatgctccagagtatcctaacccatacaaaaagcctagatattttcccccaacagacaaagcagagctccaagggcaagaagaagactggagtttccaggtggaaagcgaggggtcgtcgtcagaagagagcgatcaagaagcccaagaggaggaggtactccagttccagccaggacagcacgtccagcaactccacctgcagctcgcgcagcagcagcagatcgggcagcagctccgattcctgttccaacaaatgctcaaaacccaagccaatctgcacctaaacccatatacatacacccagctataaacagggtgttcatgttcgaaccccagggccccaggcctataactaccagagaggggtgggaggacgagtacaacactgccagtgtatggggccggcccgtccgctccttctacacagacacccccttctaccccgaggttcctaaaatgcctcctcagtttcatgtatctttcaaacttggctggaaataaaaactcaaggcctttcactgttcacttgtcggtgtctacctcttaaggtcactaagcactccgagcgtcagcgaggagtgcgacccctccccctggtgcaacgccctcggcggccgcgcgctacgccttcggctgcgcgcggcacctcggacccccgctcgtgctgacacgcttgcgcgtgtcagaccacttcgggctcgcgggggtcgggaactttgctaaacagac

SEQ ID NO: 1234 - protein, 768 aa, Alphatorquevirus sp.
MAWSWWWQRWRRRGWKPRRRRWRRLRWRRPRRPVRRRRRRRRVRRRRWGKRRGRRKRYTRRRKRRIKPRNFKKKLVLTQWHPSVVRRCFIRGIVPILICGHTKWNSNYALHSEDYTEEGRYPHGGSLSTTTWSLKVLYDEYLKHHNFWGYPNTQLDLARYRGCTFTFYRHKKTDFIVWWNRKPPFKLNKLSCPSFHPGMLMQQKHKLLIPSFDTKPGGRAKIRVRIKPPTLLEDKWYTQQDLCPVNLAQLVVTAADFQHPFCSPQTNTPTTTFQVLKEMYYNTIGIVDTQENYQSVNNKTTSQTYKKFLEDLQSTLYSTGSYWNSFHTAEYLNPNVTDTHNHKIFNESSTQLTSWLTGKGSNNFQTGKSTQFGYNSYNPDKDKIQLANQAYWTALTKANDQATQIGQARAMQFEYHTGIYSPIFLSRHRSTLNFARAYQDVTYNPNCDRGVKNRVWVQALTKATTEFDEKRSKCVITDLPLWAALYCYHNFVEEELGISSEIYNACIVCVQCPYTFPPMYDKKNPNKGYVFYDALFGNGKTPDGRGQVDVFWQQRWYPRMACQVQVMHDITMTGPFSYHDELVSTQLTAKYKFDFMWGGNMISSQIIKNPCKDTDMDTTYPSRQRRDLQIVDPHSMGPSFAFHTWDYRRGLFGKDAIDRVSKQQDYAPEYPNPYKKPRYFPPTDKAELQGQEEDWSFQVESEGSSSEESDQEAQEEEVLQFQPGQHVQQLHLQLAQQQQIGQQLRFLFQQMLKTQANLHLNPYTYTQL

SEQ ID NO: 1235 - protein, 167 aa, Alphatorquevirus sp.
LAGLWARLLGSSLLKMFFGRPYRKKKRALLLSQLPDPKKKLPGDMSWRPPVHNAAGIDRQFFEACFRCHSSCCGCGSFINHLNVLAARYGFTGGPAPPGGPRPAPQVRPALPAPQPDPEAENREPWRGAGGGNDGGAAAGNPGAAAGDAYDGEDLDALFAAVAEDAE

SEQ ID NO: 1236 - protein, 138 aa, Alphatorquevirus sp.
LEFPGGKRGVVVRRERSRSPRGGGTPVPARTARPATPPAARAAAADRAAAPIPVPTNAQNPSQSAPKPIYIHPAINRVFMFEPQGPRPITTREGWEDEYNTASVWGRPVRSFYTDTPFYPEVPKMPPQFHVSFKLGWK

SEQ ID NO: 1237 - DNA, 3155 bp, Alphatorquevirus sp.
cgggtgccggaggtgagtttacacaccgcagtcaaggggcaattcgggctcgggactggtcgggctatgggcaaggctcttaaaaagatgcgtttctctaatatcgcccgcagaaagaaaaggaaactgtcactgctacctgtgcaccctccacaggagacacctaccatgagctttgtagaacccttactgagcagcaaccacagagagatagcatactaccatggctgtgttcagatgcacaaagccttctgtggctgtgacaactttctcacccacctgcaacgcatagcaacatacatctctgttaaccagcacactccacccagcacaccctcaaacaccctccgtagagcccgggccctacccgcggctccggagccggctccatggcgtggtcctggtggtggcagaggaggcgccgaaggtggccgtggagacgcagaaggtggaggagactacgcacaagaagacctagacgccctgttcgacgccgtcgcaagagatacagagtaaggagacggaggcggtggggaaggaaacgtgggcgacgcacataccttagacgcagacttaaaaagagaaagagacgaaaaaagctcagactgactcagtggaaccctagcacaataaggggatgtacaattaaaggtatggcccccctaataatatgcggccacaccatggccggcaataactttgccatccgaatggaggactatgtatctcaggttagaccattcggagggtccttcagtaccaccacctggagcctaaaagtactgtgggacgagcacacgagattccacaacacctggagctaccccaacactcagctagatctagcaagatttaaaggagtaaccttctacttctacagggacaaagacacagactttatagtaacatacagctcagttccaccatttaaaatagacaaatactcctcagccatgctacacccaggcatgctcatgcaaagaaaaaaaaagatattaatacccagctatacaaccagaccaagaggccgaaagaaaattaaagtacacataaaacctcctgtattatttgaagacaaatggtacacccagcaggacctgtgcgacgttaatcttttgtcacttgcggtttctgcggcttcctttagacatccgttctgcccaccacaaactgacaacatttgcataaccttccaagtgttgaaagacttttactatgaacaaatgtcagttacaccagacgaggagaacaaacaaaaagatgacagtatacttagaaaattatacacaaatccagaatattatcaaactgttcacacaacaggcattattaacaaaacacaaagactagctaagtttgaaacctctaaaaatacacttggagatgcaagcggaatacaaaactatttaaatccaccatccgctactacacaaacccaaacattagcaactggtaacaactcaatctatggctttccatcatacaatccacagtatgacaaattgaagatcatagcagagtggttctggcaacaagaaactaacaaagaaaatgttgttacaggctcatattcaatgcctactaactcagcagtaagctatcacctaggaaaatacagtccaatatacttaagttcatacagaactaacctacaatttaaaacagcatacacagatgtcacatacaatccactaaatgacaaaggtaaaggaaaccaaatatgggtacaatatgtaacaaaaccagatacaaaattcaatgccacacaatgcaaatgtcacatagtagacatacccctctgggcagcattccatgggtacatagactttatacaaagtgaattaggcatacaagaagaaatactaaacattgccattatagtagttatatgcccatacacaaaacctaaactaattcacaatcctccaaatgaaaaccaagggtttgtattctatgacacacaatttggagatggtaaaatgccagaaggcacaggcctagtccccatctactaccaaaacaggtggtatcccagaataaagttccagagccaagtagtgcatgactttgtactaacaggcccctttagctacaaagatgaccttaaaagcacagtactaacagtagaatacaagttcaaattcttatggggcggcaatatgattcccgaacaggttatcagaaacccttgtaaaacagaaggacacgatctccctcacaccagtagattccatcgcgacttacaagttgttgacccacagaccgtgggcccccaatgggcgctccacacctgggactggcgacgtggactctttggttcagaggctatcaaaagagtgtctgaacaacaaatacatgatgagctgtattaccaaccttcaaagaaacctcgattcctccctccagtatcaggcctccaagagcaagaaagagactacagttcgcaggaggagaaaatccagtcctcctcagaagaagaggaggaccagaagaaaaaagaacaaaaacagcagcagcgactccacctccagttccaagagcagcagcgactcggaaaccaactccgactcatcttccgagagctacagaaaacccaagcgggtctccacataaatcctatgttatcaaaccggctgtaaataaagtttacctttttcctcccgaggggcctaaacccatctctggctacagagcatgggaagacgagttcacctgctgtaagtactgggacaggcctagtagaattaaccacacagacccccctttctacccctggatgcctaagtacaatgtaacctttaaacttggctggaaataaaatttcaaggccgtacactgttcacctgtcggtgtctacctctataagtcactaagcactccgagcgacaacgtagactgtggttggcctgcgggagtcacatggttagtgacgtacttcgcgggtccccccccccgcggggggctccgccccccggccccccccccgaagtacgtcactaaccatgtgactcccgcaggccaaccagagtctacgttgtgcacttcctgggcatggtctacatcataatataagaaggtgcacttccgaatggctgagttttccacgcccgtccgcagcgagaacgccacggagggagatcctcgcgtcccgaggg

SEQ ID NO: 1238 - protein, 749 aa, Alphatorquevirus sp.
MAWSWWWQRRRRRWPWRRRRWRRLRTRRPRRPVRRRRKRYRVRRRRRWGRKRGRRTYLRRRLKKRKRRKKLRLTQWNPSTIRGCTIKGMAPLIICGHTMAGNNFAIRMEDYVSQVRPFGGSFSTTTWSLKVLWDEHTRFHNTWSYPNTQLDLARFKGVTFYFYRDKDTDFIVTYSSVPPFKIDKYSSAMLHPGMLMQRKKKILIPSYTTRPRGRKKIKVHIKPPVLFEDKWYTQQDLCDVNLLSLAVSAASFRHPFCPPQTDNICITFQVLKDFYYEQMSVTPDEENKQKDDSILRKLYTNPEYYQTVHTTGIINKTQRLAKFETSKNTLGDASGIQNYLNPPSATTQTQTLATGNNSIYGFPSYNPQYDKLKIIAEWFWQQETNKENVVTGSYSMPTNSAVSYHLGKYSPIYLSSYRTNLQFKTAYTDVTYNPLNDKGKGNQIWVQYVTKPDTKFNATQCKCHIVDIPLWAAFHGYIDFIQSELGIQEEILNIAIIVVICPYTKPKLIHNPPNENQGFVFYDTQFGDGKMPEGTGLVPIYYQNRWYPRIKFQSQVVHDFVLTGPFSYKDDLKSTVLTVEYKFKFLWGGNMIPEQVIRNPCKTEGHDLPHTSRFHRDLQVVDPQTVGPQWALHTWDWRRGLFGSEAIKRVSEQQIHDELYYQPSKKPRFLPPVSGLQEQERDYSSQEEKIQSSSEEEEDQKKKEQKQQQRLHLQFQEQQRLGNQLRLIFRELQKTQAGLHINPMLSNRL

SEQ ID NO: 1239 - protein, 149 aa, Alphatorquevirus sp.
MGKALKKMRFSNIARRKKRKLSLLPVHPPQETPTMSFVEPLLSSNHREIAYYHGCVQMHKAFCGCDNFLTHLQRIATYISVNQHTPPSTPSNTLRRARALPAAPEPAPWRGPGGGRGGAEGGRGDAEGGGDYAQEDLDALFDAVARDTE

SEQ ID NO: 1240 - DNA, 3154 bp, Alphatorquevirus sp.
cgggtgccgtaggtgagtttacacaccggagtcaaggggcaattcgggctcgggactggccggaccccgggcaaggctcttaaaaaagctatgtttctcggtaggccttggagaaagaaaagggcactgctactgtcttgcttgcgagctccaaagaaaaaaccacctgcaatgagccactggtgcccgcctgtacacagcgttcagggtcgcaaccaccagtggtatgaagcctgctatcgtggtcatgctgcttactgtggctgtggcgattttattaggcatcttgttgctctgggtgatcagtttggttttaggcctggtccccgtgctcccggcgcgcctggagtagggggacccccgcttccgctccgtagagcgctgcccgcacccccggcggccgctccggagccccagcagggcaacaacaacaacaaccagcagctggagagatggcctggggatggtggagacgacgccggcgagggtggctccggagcctatggaggagacgcaggactgccagaagacgacttagacggcctgctcgccgctatagacgacgaagagtaaggagaaagagacgatggaggagggggcgacccagacgcagactgtacagacgcaggagacgctttaagagacgcagacgcaggagacctaagataaaactgacacagtggcaacccagcacagttaaacgctgctttataatagggtacattcccgcagttatatgcggggctggtaaatggtcagaaaactttactagtcacatagaggacaagatagccgtgggcagctatggcggggggcacagtaccagtaggtggtccctaaaagtactgtacgaggagtttcagaagcaccacaacttctggaccaaaagcaataaggagctagacctggccaggttctttggcagcacctggacattttacagacacgaagatgtagactacatagtaacatataacagaaaggcccctctaggaggtaacatactaacagcacccagcatgcatccaggagtagctatgcttagcaaacacaagatagtagtacccagttttaagaccagaccagggggcaaacccacagttaaatttagaataaagccccccaccacctttatagacaagtggtactttcagaaggacatatgtgacctaacactactaaacatgaacgttgtagcttgcaacttgcggtttccgttctgctcaccacaaacgaacaacgttaacgtaaccttccagatattgcatgaggtttaccacaacttcctctctataactgatgaacaattaacattaaatgcagaaagctggaaaaaccactatgaaaacttcttaaagcaagtatttaaaacagacagagacgcaaacaaattaaacacatttgccactgagggagcctttcatgaacctaaagtagaaaagtacaaaaagccttttgctgacaacgagtactttaaaagtaaagacgcacagtggggagatgccatacacatactagcagcagcagacacaataagtaatcaaaaaacacaaaccaaagatgagcttatagacagaattgttaagaatgctgaaaactacttaaaaaaggtaacacaagaattaggaggagcaaacatacaaagatttatacacggaatgttcacacagtggacaggaatattcagtcctgcatttttagactacagcagaataagtccagaaataccaggtgtttataaagacattatatacaacccacttacagacagaggcataggcaacggagtgtggatagactactgcagcaaaaaagacaccaaatacgacccctcaaaaagtaaatgtggcatatttgacctaccgctatggatggccacctttggcctagtagactggtgcaaaaaagaaacaggacagtggggcataccttcctgggccagagtaataattaaatgcccttacacctttccaaaaatgatagactcaacagatgagtcagtgggctttgtcccaatagggtacaactttgccaaaggcctaatgccagacggcacaaagtacattcctatactaatgagacacaaatggtaccccaaccttctacaccagcagtctgtgctagaagacctaagcagaagcggcccctttagctatcaagagaaaaacatgagtgcaaacataacagcaaaatacaaatttagatggcattttgggggcaaccctgtatttgaacaggttgtcgcagacccctgccaacaaacaacctatgaaatgcccggagccggtacgatgcctcgcagagtacaagtcactgacccgaaactcatcgggccccactacaccttccacagctgggacctcagacgtgactattttagcagaaaaagtattaagagaatgtcagaacaacaagaaacttctgagtttcttttctcaggcccaaaaaaaccccgaatcgatttggacgcagtgcaaattgtcgaaaaagactctttgcaccaagaaagaaaacaaaaaccctgggagagcagccagtcggaaacagagacagaagccccctcggaagaagaagaaacgagctcggtacaccagcagctccagcagcaactccgagagcaaaagcagctccggaggggaatcgagtgcctcttccagcagctgataaaaacccagcagggagtccacatagatccctcccttgtgtaggcccacagcagtggctctttcccgagagaaagcccaaaccccctcccagcaaaggagactgggagacagagtatgcagcttgcaaagcctttaatagaccccctagatccttcttaacagaccgaccttactacccttactgcaaaaaccaatacaatgtaacctttaagatcggtttcaaataaacaaggccgtgggagtttcacttgtcggtgtctacctcttaaggtcactaagcactccggggctccgccccccggcccccccccgtgctacgtcactaacctacgtgtccgtcttccataggccggacacagtctacgtcatccacttcctgggcatggtctacgtgattatataaggcgcggcacttccgaatggctgagttttttctgtccgtccgcagcgaggaacgaccacggagggcgatccgcgcgtcccgaggg

SEQ ID NO: 1241 - protein, 751 aa, Alphatorquevirus sp.; identical to SEQ ID NO: 1183

SEQ ID NO: 1242 - protein, 160 aa, Alphatorquevirus sp.; identical to SEQ ID NO: 166

SEQ ID NO: 1243 - DNA, 3154 bp, Gammatorquevirus sp.
cgggagcccgaggtgagtgaaaccaccgaggtctaggggcaattcgggccagggcagtctagcggaacgggcaagaaacttaaatatatttgttttacagatgtcaagcttctacaagccaacacattacaatggagacacaaaacaacaaatgtggatgtccatgatagcagatggccatgatatgcactgtaactgcaatggtccatttgcacatttactagattgcatttttccagaaggtcacaaagatagaaaacttactattgaagcaataattaacagagacaaacaacaatgcctttctggtggaatagaagacgaaagccatggtttggtcgttggagataccgccgctacaatcgctacaaaagaaaaaggtatccaagaagaagaagacgacctagatatgctactcgccgccgccgccgtcgcagaagaagatacaaggtaagaagaaaaaaacaaaaaattactcttaaacaatggcaaccagacagtattgttaaatgtaaaataataggacttggaactctagtagctggagcagaaggaaaccaatacagatgctatacaaaccaaagagacacttacacacaaccaaaggcaccaggagggggaggatttggagtagaaaaattttctttacaatacctttacaatgaatggctagcacataaaaatgtatggacaaaaacaaatgactataaacaactgtgcagatttacaggagcaaaaataacattttttagacaccctacaacagactttgttatatcatatgacagaacaccaccttttaactttgacaaatttacatacccacaaatacacccacaaaacatgctactatctaaaagacataaagtactgttaagtgcaacatccaatcctagaggcaaacatagcaaaacatttaaaataaagccacctagacaaatgtccacaaaatggttttttcaagaagattttacaatgtatgacttacttaaaattcaagcctctgctttaaatgttaattacagcctatatggtcccaacacacagtcacctaatataacattatactgcctaaatacccaattttaccaaatacaaaactggcaacaagaccatggaaacaacccatatttaccatacacaggctacccaacaagtggtatagtaaaatatttatactataaaaataaaatatccacagaagccacagtacagatttccaattataaagccagtgtaaatatgaatacaggcttttttcaacctggagttttacaagcctataaagttgtaaaatcagatggctcagaatacttttataaacctataactgtttgtagatacaatccagaggaagacacaggtgttggtaacaaagtctggctaacatccacactatcagatcacaaatggcaaccccccagtgacaatgacttaataatggcacaagaacccctatacatatctttttttggcttttgggactacattgtaaaagctaaaaaaacaaaagaatacatgcaaactcacatgtttgttgtacaatgctcagccattaaactacttacccctacatcaacacaaactattttcccatttgtagactattcctttatacaaggcaaaatgccctttgatgaaacacttacacttcaacaacaaaacaactggtaccccacagcagaaaaacaagtacaaacaataaatgctatagtagaatgtggcccctttgtgccaaaatatgccaacttgccaattagtacatggcaactaacctacagatatgttttttattttaagtggggcggatcacaaattaccaacgaccttgtacacaaccccaaagaccaaggcaaataccccgtacccgatacagtccttgaaacagctcaaattgctgacccgctcaaacaatcatacaaagcaatgcttagtgcctgggactacagaaggggctttattacaaactcagctcttaaaagagtttcagaaaacatcccaattgatgaaaatttctcatatgatgaaggagaaacgccaaaaaagaaaaagagagtcacagcagaactccagatacaaagagaagagagcgaagatctccagagctgtctccaggaactctgcaaagaaaataccttccaagaaacagaggacctccaacagctcatctaccagcagcagcagcagcagcttcacctcaaaagaaacctcttcaagctcctcatagatctaaagaagaaacaaaaatactatctactacagacaggccaactctaacaaaatttaaaccaggatttgaattggaaactgagtatcaactagctgaagcctttaaaaggccagtaagactttttaaagaagataaacctttttacccctggttacccaaatacacacccctagttaactttcaccttaactttaaaggctaggccgacactgttcacttagcggtgtttgtttattaaagtttgcaccccaaaaaaattgtaaaataaaaaaaaaaaaaaaaaataaaaaattgcaaaaattcggcgctcgcgcgcgctgcgcgcgcgcgagcgccgtcacgcgccggcgctcgcgcgccgcgcgtatgtgctaacacaccacgcacctagattggggtgcgcgcgctagcgcgcgcaccccaatgcgccccgccctcgttccgacccgcttgcgcgggtcggaccacttcgggctcggggggggcgcgcctgcggcgcttatttactaaacagactccgagtcgccatttggccccccccctaagctccgcccccctcatgaatattcataaaggaaagccatatgctaattagttccccttttgcacagtgaaaaggggaagtggggggggcagagcccccccacaccccccgcggggggggcacagcccccccccgcaccccccctacgtcacaaaccacgcccccgccgccatcttgggtgcggcagggcgggggctaaaatggcgggacccaatcaatttatactttcactttccaattaaaacctgccacatcactacaaaggggtggagactttaaaactatataactaagtgtggtggcgaatggctgagtttaccccgctagacggtgcagggaccggatcgagcgcagcgaggaggtccccggctgcccttggg

SEQ ID NO: 1244 - protein, 659 aa, Gammatorquevirus sp.; identical to SEQ ID NO: 1208

SEQ ID NO: 1245 - protein, 117 aa, Gammatorquevirus sp.; identical to SEQ ID NO: 1209

SEQ ID NO: 1246 - protein, 108 aa, Gammatorquevirus sp.; identical to SEQ ID NO: 1210

SEQ ID NO: 1247 - DNA, 3154 bp, Betatorquevirus sp.
cgggagccgaaggtgagtgaaaccaccgtagtctaggggcaattcgggctagatcagtctggcggaacgggcaagaaacttaaaataatatttattttacagatgagcaagttcttaaaaccaccatactaccaaggaagaggtttagaaaactcttggataaatatagtttttcaatcccacgatcaaatttgctcctgcaacactgttattgaccaccttaactacattataaaccaacaaaaatgcctccgtactaccgaaaaagatactacaaaagaaactactggaactggagacaaagaagaaatgcctttcgacgcagaagatttagaaaaacttttttcagaaagccaagacaccgaagggtaagaaaatttcgtttttacaaaagaaaacaaaaaaaacttaaaaaacttagactgcaacaatttcaaccttcttacattagaaaatgctctataaaaggattcctcttactatttgaagcaggacatggtttttttggcaacaatttctgttgttacaaagaaagttatactccacataaccagccctccggaggaggttggagtatacaacaacttggacttggaaatttatttacacaaaaccaatactttatgaactattggagccatactaacaatgggttaaatcttgtacgatataatggtgtaaaaattactctgtatcgtcaacctcatatagattatgtatttacctattttaatgaacaaccacaaaattctggaaaatactggtaccctacatttcatcctatgaaaatgctaacctataaaaacagaattattgtacccagcttagacactcaaccaaacaaaagaaaaatatttaaaaaaatatttttaagaccacctaaactacttaaaaaccaatggtacttcgcacaacacctcagctcttatccactaatttcctttgcagccacagctgttagtttatcacacatgtttttaagctctaaatcaaataataacaactgctctgtaataactttaaacacagacttctttaaaagaagcgcttttcaatacgcttcacaaaccacaggctatcaaccacaagaaacaatatacatatatggccttaacaatggtgcaatagatcttaaaaatgaaaaactaattaacataacatacctaggaggtatacaaagagaaaaaggagtaccaataggaacacaaccactaagtgactacaaagcttcacaatggggaaatgtattctactatgaatactttaaccacataagaacaagctttatttcaacttcaccaccacaagaattattaaaacaaactagaagcgcaacacaaactataggagacactgaattcgccaaaataaaattccatccataccattacacagaaagatacaatccctacaaagacaaaggagacggtaacatagcatactggctatcagtttctgatgccactaaaaacaattgggacccaccaaaagatgaagacttaataataagaggatacccattctggctaatgttatggggttgggaagactacacaaaaaaatgtggaaaaattagagatttcgataacaatgctattttagtactacaatctagatacatatcgggaacacacaaatattacgtaccactaagtgactcatttgtacaaggtagagccccctatgacaatgaccccgaagacataacaccaaatgacaacgcacactggtttccaaaatggaaatttcaaaaagaggccatagacaacattttaatgacaggaccaggggtagtaaaagcagaaaatcaacaatcaatacaagcctttattaaatacaattttttctttaagtggggcggcaactcttcaaccctggaaaccatctccgatccaaactctcaacccatcacacctagtccccctggactctacctacaaaatgaaattactgacccaaaaacacccattgaaaacatgctctacaaatgggacattagaagacacctccttacacaagcagctacagcacgaattaaagaaatccaaactcatgatgaatgtttgttcacagatggagcagaaacttcaacagacttcccgatcaaaacaacatcacaagaggaaacgaccccgcaaacagaaaaagagacattactcctccagctccagcagctcgagcaattcaacaaccaactacaacagcgactcctcaaactccagcaactaacggaactataagctttactttaatcaaaaaagcatacttgtttgaaccccctaaaacaaaactaacacctattagagggagggattgggaagatgaattatttttgagtaaatggatgaaacgccccatgcgccactacttagaagaccgacctatatacccatggttaccccctgaaccaattgtaaatcaaccacttgtaaattttgaccttatctctgcttttaataaaggccagcattaattcacactcggtgtctacctctttaagttaaactttaataaaccaacaccgcctccctaatacgcaggcgcaaaagggggctccgcccccttaaacccccgggggggaaaccccccctaagcccccccataatttaaatattcataaaggaaaccacaaaattagaattgccgaccacaaaccgtcacttacttcttctttttacaaaacttccccttttaatcattattattcattaaattaattaataaacaccgtaattccggggaggagctacattactatataactaactacacttccgaatggctgagtttatgccgccagacggagacaggatcacttcagtgactccaggctgatcttgggcgggagccgaaggtgagtgaaactccgcccccttaaacccccggggggggaaaccccccctaagcccccccaaaaaattaatattcataaaggaaaccacaaaattagaattgccgaccacaaaccgtcacttacttcttctttttacaaaacttccccttttaatcattattattcattaaattaattaataaacaccgtaattccggggaggagctacattactatataactaactacacttccgaatggctgagtttatgccgccagacggagacaggatcacttcagtgactccaggctgatcttggg

SEQ ID NO: 1248 - protein, 664 aa, Betatorquevirus sp.
MPPYYRKRYYKRNYWNWRQRRNAFRRRRFRKTFFRKPRHRRVRKFRFYKRKQKKLKKLRLQQFQPSYIRKCSIKGFLLLFEAGHGFFGNNFCCYKESYTPHNQPSGGGWSIQQLGLGNLFTQNQYFMNYWSHTNNGLNLVRYNGVKITLYRQPHIDYVFTYFNEQPQNSGKYWYPTFHPMKMLTYKNRIIVPSLDTQPNKRKIFKKIFLRPPKLLKNQWYFAQHLSSYPLISFAATAVSLSHMFLSSKSNNNNCSVITLNTDFFKRSAFQYASQTTGYQPQETIYIYGLNNGAIDLKNEKLINITYLGGIQREKGVPIGTQPLSDYKASQWGNVFYYEYFNHIRTSFISTSPPQELLKQTRSATQTIGDTEFAKIKFHPYHYTERYNPYKDKGDGNIAYWLSVSDATKNNWDPPKDEDLIIRGYPFWLMLWGWEDYTKKCGKIRDFDNNAILVLQSRYISGTHKYYVPLSDSFVQGRAPYDNDPEDITPNDNAHWFPKWKFQKEAIDNILMTGPGVVKAENQQSIQAFIKYNFFFKWGGNSSTLETISDPNSQPITPSPPGLYLQNEITDPKTPIENMLYKWDIRRHLLTQAATARIKEIQTHDECLFTDGAETSTDFPIKTTSQEETTPQTEKETLLLQLQQLEQFNNQLQQRLLKLQQLTEL

SEQ ID NO: 1249 - protein, 89 aa, Betatorquevirus sp.
MSKFLKPPYYQGRGLENSWINIVFQSHDQICSCNTVIDHLNYIINQQKCLRTTEKDTTKETTGTGDKEEMPFDAEDLEKLFSESQDTEG

SEQ ID NO: 1250 - protein, 137 aa, Betatorquevirus sp.
MFVHRWSRNFNRLPDQNNITRGNDPANRKRDITPPAPAARAIQQPTTTATPQTPATNGTISFTLIKKAYLFEPPKTKLTPIRGRDWEDELFLSKWMKRPMRHYLEDRPIYPWLPPEPIVNQPLVNFDLISAFNKGQH

SEQ ID NO: 1251 - DNA, 3153 bp, Alphatorquevirus sp.
tggggccagaaggtgagtttacacaccgcagtcaaggggcaattcgggctcgggactggccgggccccgggcaaggctcttaaaaaatgcgcttttccaggatcgctcgctcgaaaaggaaagtgccactgccaacgctgccagtactaccgccgcctgggactatgagctggcgccctccggtccacaatgccgctggaatcgaccgtaactggttcgaatcctgtttcagatctcacgctagcagttgcggctgtggaaattttattggccatcttaatactctggctactcgctacggctttactcctgggcccgcgccgccgcctggtggtccaggcccgcggccgccagtaccagtgaggccccggcacgctgccggagacggtaaccagcccagagccctgccatggcgtggggatggtggagacggagacgctggcccacctaccgaaggtggcgccgctggagacgccgcagaagagtaccgcgaagaagacctcgacgagctgttcgccgctatggaaagagacgagtaaggaggcgccggtgggggaggcggcggtaccgaaggggctacagacgcaggggcgcggtcagactaagacgcagacgcagacggggacgtaagagacttatactgactcagtggcatccccaaacccgtagaaagtgcaccatcaccgggtacctaccggtggtgtggtgcggctacctccgagccgccagaaactatgcctaccactctgacgactccacaaaacagccagacccctttggaggcgcgctgagcactacctcatttaacctaaaggtgctgtacgaccagcaccagagaggactgaacaggtggtcgttccctaacgaccaactggacctggctcgctacaaggggtgcgaactgacattttacagacagaaagccgcagactttatagcagtgtatgacatctctgccccctacaaactagacaagtacagctctccaagctaccaccctggcaacatgataatgcagaaaaagaaaatcctaattcccagctatgacactaaccccaggggtcgccaaaaagttaaagttaaaattcccccccccaaactgttcgttgataagtggtatgcacaggaggacctctgcgacgttaatcttgtgacacttgcggttagcgcagcttcctttacacatccgttcggctcaccactaacgaacaatccttgtgtaaccttccaggtgcttgacacaatatactatgccgtaataggttacagttcctcaactgagaaaaaaaaacatgtacttaaaacactatacaaacaaaatgcatactgggcctcacacttaactccttactttaccactggccttaaaattccgtttccaaacaatactaatcctacaaatcctggaaatggtactgtaactacacttagtacaacaggtagctcctcaacaaacattaaaatagcaggtgacagcaactacaactggtacccctataaccttaaaaacaaaactgataccttacatacaataagaaagcagtacttcaaatgggaaacagatgaaggcccacaggccacatctgattatggcaaacaccacacttggactaagcccaccgatgactactacgagtaccaccttggcctattcagccccatattcatagggcccaccagaagcaacaaactgtttgccacagcgtaccaggacgtgacctataaccccctaaacgacaaggcggtgggcaacaagttttggttccaatataacacaaaggcagacacccaggtggccaaacagggctgctactgcatgctagaggacattcccttttgggccgccatgtatggcttctctgactttatagagagcgagctaggcccctttcaggacgcagagaccgtgggctatatatgtgcaatatgcccctacacggagccccccatgttcaacaaacagaatcccacgcagggctatgtgttttatgactcattttttggcaatggcaagtggatagacggacggggacacatagagccttactggctgtgccgctggaggccagaaatgcttttccagcagcaagtcatgagagacattgtacagaccgggccctggagctataaagacgaaagcaaaaactgtgttctgcccatgaagtataagttcagattcacatggggcggcaatatggtctcccaacagacaatcagaaacccctgcaagactgacggacaacttgccccctccggtagacagcctagagaagtacaaattgttgacccaagcaccatgggtccccgctgggtgttccactcctgggactggcgacgtggctaccttagtgagacagctctcagacgcctgcgagagaaaccgctggactatgaggcgtatatgcaaaaatcaaaaaaacctagactgttccctgttacagagggcgacgaccagtccccccagcaaggcgacgactcgtattccgaggaagaaaagtcgccgcggttcaccgaagagacgacgcagacgctacagctccagctccagcgccagctccggcaacagcagcgcctcggagagcagctccagttcctccaacaccacctgctcaaaacgcaagcgggtctccaaataaacccattattgttggtccgccagtaaacagggtataccttttcccccctgagggtccccgtcccataaccacctctcagggctgggcagatgagttctgtactgcaaagcactgggacaggcccactcgcaccaactacacagacacccctacctatccctggatgccaactcagttcaaagtgtcttttaaacttggctttcaataaaatttgctcagcttcaactttctaggccgtgggagtttcactggtcggtgtctacctcttaaggtcaccaagcactccgagcgcagcgaggagtgcgacccttttctctgttcaccccccctgcccggtagcaacgccctcggagtccggcgctacgcgctgcgcgctgcgccggacacctcggaccccccctccacccgaaacgcttgcgcgtttcggaccttcggcgtcgggggggtcgggagctttattaaacagactccgagttgccattggacactggagctgtgaatcagtaacgaaagtgag

SEQ ID NO: 1252 - protein, 750 aa, Alphatorquevirus sp.
MAWGWWRRRRWPTYRRWRRWRRRRRVPRRRPRRAVRRYGKRRVRRRRWGRRRYRRGYRRRGAVRLRRRRRRGRKRLILTQWHPQTRRKCTITGYLPVVWCGYLRAARNYAYHSDDSTKQPDPFGGALSTTSFNLKVLYDQHQRGLNRWSFPNDQLDLARYKGCELTFYRQKAADFIAVYDISAPYKLDKYSSPSYHPGNMIMQKKKILIPSYDTNPRGRQKVKVKIPPPKLFVDKWYAQEDLCDVNLVTLAVSAASFTHPFGSPLTNNPCVTFQVLDTIYYAVIGYSSSTEKKKHVLKTLYKQNAYWASHLTPYFTTGLKIPFPNNTNPTNPGNGTVTTLSTTGSSSTNIKIAGDSNYNWYPYNLKNKTDTLHTIRKQYFKWETDEGPQATSDYGKHHTWTKPTDDYYEYHLGLFSPIFIGPTRSNKLFATAYQDVTYNPLNDKAVGNKFWFQYNTKADTQVAKQGCYCMLEDIPFWAAMYGFSDFIESELGPFQDAETVGYICAICPYTEPPMFNKQNPTQGYVFYDSFFGNGKWIDGRGHIEPYWLCRWRPEMLFQQQVMRDIVQTGPWSYKDESKNCVLPMKYKFRFTWGGNMVSQQTIRNPCKTDGQLAPSGRQPREVQIVDPSTMGPRWVFHSWDWRRGYLSETALRRLREKPLDYEAYMQKSKKPRLFPVTEGDDQSPQQGDDSYSEEEKSPRFTEETTQTLQLQLQRQLRQQQRLGEQLQFLQHHLLKTQAGLQINPLLLVRQ

SEQ ID NO: 1253 - protein, 150 aa, Alphatorquevirus sp.
MRFSRIARSKRKVPLPTLPVLPPPGTMSWRPPVHNAAGIDRNWFESCFRSHASSCGCGNFIGHLNTLATRYGFTPGPAPPPGGPGPRPPVPVRPRHAAGDGNQPRALPWRGDGGDGDAGPPTEGGAAGDAAEEYREEDLDELFAAMERDE

SEQ ID NO: 1254 - DNA, 3153 bp, Betatorquevirus sp.
caggagccgaaggtgagtgaaaccaccgtagtctaggggcaatatgggctagatcagtctggcggaacgggcaagaaactaaaatactattatgtttttacagatatgagttctttatggaagaaacctacattttcaccgagatccaacgaaaaccactgggtaaacaccatctttgaaagccacgacctgttttgttcctgtgaggatccctggcttcaccttttggatgttttaaaccgtcaaggaaacgcaagaaaaccactaaaagatattaataacataaaatgcctccttaccggtacacctggtacagaaaaagaagatatccccgacgcaatagatggattaaacccaggagatttagaaaagcttttcgaaaaagatacagaaccagaagataccgccgaagatacaaggtaaagaaaaaaagatactataaaaagaaactgaaaattgctatacaacaatttaatcctaaatctatgcgtaaatgtaaaataatcggatataaatgtttaatacaaggtagccctttaagactaagttttaactatgctcaatatgctaattctcatgtaccaccatttcaacccggagggggaggatggagcttaatggtattttcactagacagtttatttgatgattatgaaaaactacagaacgtatggacatattcaaactgtaacttaccgttagtacgataccatggtgtaacatttaagttttatcaagctgaagaaatggattatgttgtattctttgatagatgctggcctatggtagatactaaacatacacatgctaactgtagtccaactgcacagtttctaaaacaaaagaaaattactattcctagcagaaaaactcaaaaaaataaaaaaccatataaaaaagtacgcatacgtcctccaaatcaaatgcaaacaaaatggtactttcaatctgacatttgtaaaacacctttagtattactagctactactgctgtatcactcacaaacccattttgtgcaccagaagcaactagcaacaacataaccattccaatgttaaacacaatgcttattcaaagaccaaactttaaaaactatccacaaactagtggatattttataaaaactggacaatttgaacatgaagactccacatttgcagcatatttatatgctattcatagatcacaagagacagaagcacaagctatagaactaaaaaagagcaacttagcacgctataacccaataccactttgcaacaccaaagacatgcaagaagggaaaccagttacagaacatagttatcaaaataacgaaaaatattggggcaatccttttttccacatataccttgatggtgaaagttacagtttatacttttccaatatgtccccaatagacttatatgaattaaaaaccaacgagaataaaacatatcacttaacccttacagatccaataattaaatactacagatataacccagacacagacaaaggagcaacaaacaaagtatatacagtaagcaattcagcagcaacatcatgggcagaaccacaaaatgaaaaccttatttttgaaggttttccactatatgttttactatggggatggccagactggcttaaaaaatcaaaattaactgtagatccagacgaaaaccaaacactagttataaaaacagaccaactatttggtccaaagcaaacatactatgttcctattgacaaagattttatagaaggatttgcaccttattctccagacccacctaatcaactacttccaaacaactggtctaaaacacactggcatccaaaattagaattccaacttcaacaaatagaaaaaatatgcgcctccggtccaggatgcgctagaatgccctacaaacattatatgcaatcattttgtaaatacaaatttcacttcacatggggaggatgtccaaaaacacttgaaaatgcatgtaatccttgttttcagccaaaatgggccacaaccgatacaatccctggaggacttgaaatttcgaatccaaactgcaatccctacacccaactatatgacttcgactggaaaggagacttcgttaaaacgaaaagtattgacagaattaaacaacacacgtcagttaatccagaacttttctcaattacagaagggaaaaacattccagaaaccctcaaaaaaccgaaaacaccgacaacgaaagaagaggaagaggaattactcctccagctccagcagctccgacagtgccagctcaacctctacagcatcctcaaccaataagtaaatatgttataaaaggctgcacaattaaaaagttattgtttgaaaaagaaccaaaaaaccgaagactaactccacgagaattagaagacgaaaaaattgtagcagcaatttttaaaagacctttaagaacatttattcgcgatccccctacttatccttggcttccccctgaaccaatagtaaactttaaattaaactatgttgaataaagcaaggccaacaatattcacttgtcggtgtccatttatataagtttaactttaataaacagactccgcctcccaatcaataaggcctagaaaagtaaagggggctccgcccccttacacccccaagggggctccgcccccttacaccccccagggggctccgccccctaacacccccaagggggctacgcccccttacacccccttataaatattcaacaggaaaaccacctaatttaaattgccgaccacaaaccgtctttaacttctcctttttactgaaacttctgctttttcttattattattcatgacattaattagtaatcaccgtaattcctgggcggtacttcttatctatataactaactacacttccgaatggctgagtttatgccgccagacggtataaatattcaacaggaaaaccacctaatttaaattgccgaccacaaaccgtctttaacttctcctttttactgaaacttctgctttttcttattattattcatgacattaattagtaatcaccgtaattcctgggcggtacttcttatctatataactaactacacttccgaatggctgagtttatgccgccagacggagactgaatcactacagtgacttcaggctgatcttggg

SEQ ID NO: 1255 - protein, 669 aa, Betatorquevirus sp.
MPPYRYTWYRKRRYPRRNRWIKPRRFRKAFRKRYRTRRYRRRYKVKKKRYYKKKLKIAIQQFNPKSMRKCKIIGYKCLIQGSPLRLSFNYAQYANSHVPPFQPGGGGWSLMVFSLDSLFDDYEKLQNVWTYSNCNLPLVRYHGVTFKFYQAEEMDYVVFFDRCWPMVDTKHTHANCSPTAQFLKQKKITIPSRKTQKNKKPYKKVRIRPPNQMQTKWYFQSDICKTPLVLLATTAVSLTNPFCAPEATSNNITIPMLNTMLIQRPNFKNYPQTSGYFIKTGQFEHEDSTFAAYLYAIHRSQETEAQAIELKKSNLARYNPIPLCNTKDMQEGKPVTEHSYQNNEKYWGNPFFHIYLDGESYSLYFSNMSPIDLYELKTNENKTYHLTLTDPIIKYYRYNPDTDKGATNKVYTVSNSAATSWAEPQNENLIFEGFPLYVLLWGWPDWLKKSKLTVDPDENQTLVIKTDQLFGPKQTYYVPIDKDFIEGFAPYSPDPPNQLLPNNWSKTHWHPKLEFQLQQIEKICASGPGCARMPYKHYMQSFCKYKFHFTWGGCPKTLENACNPCFQPKWATTDTIPGGLEISNPNCNPYTQLYDFDWKGDFVKTKSIDRIKQHTSVNPELFSITEGKNIPETLKKPKTPTTKEEEEELLLQLQQLRQCQLNLYSILNQ

SEQ ID NO: 1256 - protein, 105 aa, Betatorquevirus sp.
MSSLWKKPTFSPRSNENHWVNTIFESHDLFCSCEDPWLHLLDVLNRQGNARKPLKDINNIKCLLTGTPGTEKEDIPDAIDGLNPGDLEKLFEKDTEPEDTAEDTR

SEQ ID NO: 1257 - protein, 57 aa, Betatorquevirus sp.
LFEKEPKNRRLTPRELEDEKIVAAIFKRPLRTFIRDPPTYPWLPPEPIVNFKLNYVE

SEQ ID NO: 1258 - DNA, 3152 bp, Alphatorquevirus sp.
cgggagccggaggtgagtttacacaccgcagtctaggggcaactcgggcacgggtctggccgggctatgggcaagattcttaaaaaattcccccgttctatatgccgccaggacaccaagtcatgccgtggtctccgccaacagctaacctccaaggcagagaaaataactggctcaagtcagtttttctctcgcatgctactttctgcggctgtcctgaccctgttgggcatcttcatcgcgtttatactcgccagcagagcggcggaccgagtccccctggtacttccaccggggcaccggctctaccggcgcccccatcaccgaacccgccaccacggcctggtggagaactagaaggagaccgtggagacggtggaggagaaggcgctggggcctaccgagaagaagatttagaagaacttttcgcggcctcaagagacgacgatatgtgagtagaggccggcgccgccgatacaggcgcagacgaactcgggggcgacggagaaggggacgcagacgcaggcgcagaaagactcttatactcagacagtggaacccagatgttataaaaagatgctttatcacaggatggatgccactcattatctgtggcaccggacacacacaatacaactttataacacacatggacgatatcccccctaagaactactcctacgggggcaatttcaccaatgtgactttctcactagccagcctatatgaggagtacatgcaccacagaaacaagtggtcccgctcaaactatgacctagaactagtgagatacattagcaccaccataaaattctacagacactccaaagtagactacatagtaagctacaccaccacaggaccctttgaaacaaatgaactctcctacatgatgacacacccactaatgatgctcaccagcaaaaagcacataatagtgcccagcctagagaccaaacccagaggcagacgctccataaaaattaaaataaagcctccaaaacttatgctaaacaagtggtactttgcacatgacttttgtaaaataggcctctttcagatgtgggccacagccttaaacctacaaaacccctggctcagatcaggcactaacagcccagtcataggattctatgtacttaaaaaccaggtataccaaaacgccttctcaaacctagcagactcagacccactacaacaaagagaaacagcatacaaagagttaactaaaaaagcaacacaaccatccaacacatggtataactggcaatacacatacctgaaaccaatgaaacaaatatactaccaagcagcagctgatgccacaaacaaaaatgaaatgcaaggaagaccatacaattgggaaaactacaaaaagttctttgataaggtacaaacaaagtggcaagcaatccaacaaagtacatatgaactagttaaaaaagaatatcaaaacatatacaccaccagtgtaacatacccacctgaatgggcaaacagacaattcctagaacatgactgtggcatattcagtccatactttttatcaccagataactacacaccagagtggcacacagcatacacctatatcagatacaacccactactagacagaggaataggtaacagaatctgcgtgcagtggtgtagtgaaaagagcagtgactatgacccagtaaagagcaagtgcatgctacaagacatgccactttacatactctgctatggctacctagactttgtagtaaaacagctaggagtaaagtcagcatggacagacatgagagtggccattagaagcccctacacagagccaaaactaataggcagctcagacaaaactatgtatatccctatagggttaaattttatgaaaggagacatgccctgggacatgaactatatcccaatcaagtggtggtttaagtggtaccccatgtgcacacaccaggcttccgttttagaagcaatagtttcctgtagtccgtttatggttagagatcaggaagccaacagttgggacataaccataggctacaaagcaacattcttatggggcggttccccattacctccacagcccatcgacgacccctgccaaaaaaccacacacgaactacccgaccccgataaacaccctccaagaatacaaatatcagacccgcaagttctcggaccggcgacgctcttccactcgtgggacctcagacgtggcttcattaacacacgctctattaaacgagtgtcagaatacgcagacactaatgagtatttttcaacaggcgtcgagttcaaaagaccccgtctggacactccccaccacgggcagctatcaaaccaagaagaagacgccttatctatcctccgacaactccaggaggagcaggaagagagcagcacatcagaagaagaacaagcaccccaaaaagaagcgcagcaaaaagaaaagctactacaacagctcagagtccagcggcagcaccagcgagtcctcagacagggaatcaaacagctcatgggagacgtgctcagactccggaaaggagtccactggaaccccagcctataattctgcctccagaaccaataccagatcttttattccccaatactaaaaaaaaaaagaagttttccgtcttcgaatggcagacagaagctcaattagcagcctggttaaacaggcctatgagactgtatcctggggacaccccgttctacccgtggctaccccccaagcaaagtatcccccctacatgtagagtatgcttcaaaataaagcttgatgattaattttcaaggccgtgggagtttcacttgtcggtgtctacctctaaaagtcactaagcactccgagcgaagcgaggagtgcgacccccctgcccggtagcaacttcctcggggtccggcgctacgccttcggctgcgccccccttgctaagtccaccgcgcatgcgcggccacgcccccgccgccattttgtacagcccgccaattttatttcaaacagaccaatcaactactactacgtacacttcctggggtgtgtcctcccactctatataagcagaagcagtgacgaatggtagagtttttcacgcccgtccgcagcgaggacgcgagcgtcagcgagcggccgagcgacccgtggg

SEQ ID NO: 1259 - protein, 658 aa, Alphatorquevirus sp.; identical to SEQ ID NO: 792

SEQ ID NO: 1260 - DNA, 3150 bp, Alphatorquevirus sp.
cgggtgccggaggtgagtttacacaccgcagtcaaggggcaattcgggctcgggactggccgggctatgggcaaggctcttaaaaaagacatgtttctcggtaaactctacagaaagaagagggcactgccactgtgccgcctgcgagcttcaaagaagaaaccacctcctgacatgacctggagacccccggtgcataacgcccatgggatcgagagaaatctctaccagtgcattttctgcgcacatgctgctagctgtggctgcggtgatcttgttagccatatttctctactggctcagcggtatggtgctcctccaagaccgccggcgcccggggctcccagaccacagatgagacgccagctggcccttccagcgccccccgccgatccgcagcaggctaacccagaatggcttggtggggacggtggagaccgtggcgatggaggcgccgctggaggaggggtcgccgccgacggagactacgaacccgaggaactcgacgccctcttcgacgccgtagaacaagaagagtaaggagaaggagatgggggaggcggaggtggagacgggggtacagacgcagactgagactgagacgcaaacgcagacgcagaaaaaagatagtactgactcagtggaaccccgccaaagtgcggaggtgcaggatatcgggggtcctgcctatggtactgtgcggcgcggggaggtcagggtttaactatggactgcacagcgacgacctgactgtacagaaaccccttaaccagaacccccacgggggaggcatgagcacagtgactttctctctcaaagtgctctatgaccagtaccagaggttcttaaacaagtggtcttaccccaacgaccagctagacctggccagatacaagggctgcaaattcaccttctacagacacccagagacagactttgtagttcagtatgacaacgttccccctatgaaaatggatgagtttacagcccctaacactcatccaagcttgctgctacaggccaaacacaggcgcaaaatccccagttttaaaaccaggccttttggtaaaaagacaataactattaaagtggggcctcctaaactatttgaagacaagtggtacccccagtcagatctgtgcaaggtgccccttgtcagttggcgggtgaccgcagctgacttgcggtttccgttctgctcaccacaaactgacaacccttgcttcaccttccaagtattgcacgagaactattacacatgctttggaacttcctgtttagaccaacggacacagtacgactcagaaattaacactttagaaaactggctatatggctcctgcagtcactatcaaacatttgctacagacactagattagccccagagaaaacaacacaaccatcaggattaagtaacaatcctgaatggacacaatcagagtttcaacggtttaaaaaaagtatagacagcaactatggctactgtacatactgccccacaagtgaattaataagcaaaataaaaaactacagaaacaaaagatttaaatggctaacaagccctgacactaccaacatatgtcacataaacatgacatacagcaagggcaagtacgaagagtacgagtaccaccttggctggtactctaacatatttataggcaacctaagacacaacctagcattcaggccagcatacatagatgtaacctataaccccatagtagacaaaggcctgggaaaccacatatggtttcagtacctgacaaagcccaccactgaactaatagaagcacaggcaaaatgtcacatccaggacctgcccctgtacgccatgacctttggctacgaggactacctccagagaacactaggccctttccaggacgtagagaccgtgggcataatctgctttatatgcccttacacagaaccgccctgcgttaacaaaaacgagggcaaaaagaactggggctacgtgttctatgacacacactttggcaacggcaagactccagagggactgggccaagtgcacccttactggatgcagagatggagaccagtgtcccaggtgcaaaaagagactctaaacaagattagcagaaccggaccgttcagctacagagacgagcaccctagcgtgacgctgaccgcgaactacaagttctactttaactgggggggcgactctatatttccacagattattaaaaacccctgtccagacaacagcctgcgtcccggcggccatagagagcctcgctcagtacaagtcgttagcccgctcacaatgggaccgcaatacctctttcactcctgggactggcgacgggggttctttaatccaaaaactctcaaaagaatgcttgaaaaaccagatgatgatgcagagtatccaacaggtccaaaaatccctcgatgggtacccgctctcgagcaccaagggcaagaaagcaacttcgattcggagacagagatctccgagtcctcggaagaagaagccgctcaagaagtcctccaagaaatccaggaggcgccgctacagcagcacctcatccagcagtaccgagagcagcgacgcctcggaaagcaactcaaactcgtcatgctgcaactcaccaagacgcaaagcaatctgcacataaatccccgcgtccttggccatgcataaataaagtgtacatgtttccccccgaaaaaccccttggcatacacgggtaccacgggtgggagacggagtatcaggcctgcaaggccttcgacaggccccctagaaactacctgtcagataaacccatctacccctggcttccccgctcccagccagaaattaaagtgagttttaaactcggttttcaataaacaaggccgtgggaatttcacttgtcggtgtctacctcttaaggtcactaagcactccgagcgtcagcgaggagtgcgacccttccccctggtgcaacccccggccccccccccgaagttcgtcactaaccacgtgactcccgcaggccaacccactgctacatcgtgcacttcctgggcggagtctacctcataatataagtagctgcacttccgaatggctgagttttccacgcccgtccgcagcgagaacaccacggaggggagtccgagcgtcccgaggg

SEQ ID NO: 1261 - protein, 753 aa, Alphatorquevirus sp.
MAWWGRWRPWRWRRRWRRGRRRRRLRTRGTRRPLRRRRTRRVRRRRWGRRRWRRGYRRRLRLRRKRRRRKKIVLTQWNPAKVRRCRISGVLPMVLCGAGRSGFNYGLHSDDLTVQKPLNQNPHGGGMSTVTFSLKVLYDQYQRFLNKWSYPNDQLDLARYKGCKFTFYRHPETDFVVQYDNVPPMKMDEFTAPNTHPSLLLQAKHRRKIPSFKTRPFGKKTITIKVGPPKLFEDKWYPQSDLCKVPLVSWRVTAADLRFPFCSPQTDNPCFTFQVLHENYYTCFGTSCLDQRTQYDSEINTLENWLYGSCSHYQTFATDTRLAPEKTTQPSGLSNNPEWTQSEFQRFKKSIDSNYGYCTYCPTSELISKIKNYRNKRFKWLTSPDTTNICHINMTYSKGKYEEYEYHLGWYSNIFIGNLRHNLAFRPAYIDVTYNPIVDKGLGNHIWFQYLTKPTTELIEAQAKCHIQDLPLYAMTFGYEDYLQRTLGPFQDVETVGIICFICPYTEPPCVNKNEGKKNWGYVFYDTHFGNGKTPEGLGQVHPYWMQRWRPVSQVQKETLNKISRTGPFSYRDEHPSVTLTANYKFYFNWGGDSIFPQIIKNPCPDNSLRPGGHREPRSVQVVSPLTMGPQYLFHSWDWRRGFFNPKTLKRMLEKPDDDAEYPTGPKIPRWVPALEHQGQESNFDSETEISESSEEEAAQEVLQEIQEAPLQQHLIQQYREQRRLGKQLKLVMLQLTKTQSNLHINPRVLGHA

SEQ ID NO: 1262 - protein, 157 aa, Alphatorquevirus sp.
MGKALKKDMFLGKLYRKKRALPLCRLRASKKKPPPDMTWRPPVHNAHGIERNLYQCIFCAHAASCGCGDLVSHISLLAQRYGAPPRPPAPGAPRPQMRRQLALPAPPADPQQANPEWLGGDGGDRGDGGAAGGGVAADGDYEPEELDALFDAVEQEE

SEQ ID NO: 1263 - protein, 147 aa, Alphatorquevirus sp.
MGTRSRAPRARKQLRFGDRDLRVLGRRSRSRSPPRNPGGAATAAPHPAVPRAATPRKATQTRHAATHQDAKQSAHKSPRPWPCINKVYMFPPEKPLGIHGYHGWETEYQACKAFDRPPRNYLSDKPIYPWLPRSQPEIKVSFKLGFQ

SEQ ID NO: 1264 - DNA, 3150 bp, Alphatorquevirus sp.
tccgagttgccattggacactgtagccgtgaatcagtaacgattcgggctcgggactggccgggctatgggcaaggctcttagggtcatcgctctttaaaacatgtttctcggcagggtctggagaaagaaaaggcaagtgccactgccaacactgcgagtggtgccgctaccacaaccttcacctatgagcagccagtggagacccccggttcacaatgtccaagggctggagcgcaattggtgggagtgcttcttccgtggtcatgcttgcttttgtggctgtggtgacgctattactcatattaatcatctggcgtctcgttttggacgtcctcctgctacctcaactccccgaggaccgcaggcacctccagtaaccccgtacccagccctgccggccccggagcctagcccagagccatggcgtggcgccggtggcgatggcggccgtggtggagacgccggaggcgccgccggtggagaaggagacgccggaggcccagacgacgccgcccttatcgacgccgtcaacctcgcagagtaaggaggcgcagggggcggtggaggcgcgcttacagacgttgggggcgacgcagacgcagacgcagacacaaaaagagacttgtactgactcagtggcagccccctatagttaaaaagtgcctaataatagggtacgacccccttataatctgtggcataaacagaacagcttttaactacactacacactcagaagatttcactttcaacaacgacagctttggagggggactatgcacagcacagtacacactaagaatactattccaagagaagctggcccaacacaacttctggacgaccagcaacgaggacctggacttagccaggtacctgggtggcgcactaatatttttcagacacccaacagtagattttttagtaagagtgcgcaccagtcctccattcaatgacacagacatgactgctctcactctgcacccgggcataatgatgctcagtaaaaaggtcattaaggtacccagccttaaaacgaggcccagcagaaaacactatgtaaaaataagatttggagcccctaaactgtttgaagacaagtggtacccccagaacgagctatgtgatgtaactctggtcagcatacacgcaaccgcagctgatttccaatatccgttcggctcaccactaacgaactcagtctgttgcaacttccaggttcttaacagcaactatgacaatgcacttagtatacttaacactactcaagtaacagaagaactacatactaaaagacaaagctgttatagttttcttttacagcaatacagctactacaacacaaaacaaacactagctcaacttaaatttgacttttttccaaagcagaaccccaaaatgccaaaagtaagcaatgcacagacatccaaatccccagagactctcactaaagatgaagttacatctgaatacccacactgggactctctatatggtggcctagcatatggctttacaccttccaataattctgaaaacacaaaccaagcaaaagacttagaaactcaaatgatacaagccaacaaattttatacagctgcaggcaaaaaactaataaaaggctttacacctatacaacataagaacgaaaccgacacaaacatctttgactactacacaggcatgtactgtagcatatttctatcctccggaaggtccaacccagaagttaaaggcagctacacagacatatcttacaacccactcacagataaaggtgtaggcaacatgatatggatagactggctaagcaaaccagacagcatatacaacccctctaagagcaaatgcctactaaaagactttcccttgtggtgcatggtatacgggtacgcagactactgcagaaaagtcacaggagactcagccatactgctagactgcagagtagtaataagatgcccgtacacataccctcagcttataaaacacaacaatgacaactggggattcgtcccctatagcgaaaactttggactgggtagaatgcccgggggcaatccaaacccctcgaccagaatgagactgagctggtacccaatgctgctacaccagatggaagtattagagtgcttggcacagaccggaccgtttgcctaccacggagacgagagaaagactgtactgactgccaaatacaagttcagatggaagtggggaggaaaccctgtctttcaacaggttcttagagacccctgcaccggaggtgccgtggcgccccacaccagtcgacaccctcgcgcagtacaagtctttgacccgaagcaccaagccccggagtatctgttccacaagtgggacttcaggaggggactctttagcactaaaggtattaaaagagtgtcagaacaaccaacatatgatgagtttcttacaggccgcagcaagagacccaagaaagatacaggggccccgctccaagaagaggagcaaaaagaagactcgcgtttcagagtcccacagctcagaccttggctcccctccagccaggaaacgcagagccaaagcgaagaagagcagcagacacgcagtacaacggtacaagaacaattacagcaacagctccagcaacagcgactcatgggactccaactccgaaacgtctgtctccagctcgcaagagtccaagcggggcacagtctccaccccgttttccaatgccatgtataaacaaggtgtttatatttcctgagagagagcccaagcagccccctaacagcaaagactggcaggaggaattcgaggcctgtaagcactgggacaggcctgcgagatctaacttagatagaccccctttctacccctggatgcccagggaacccccaacttgtcgtgtaaccttcaagcttggctggcaataaaattacaaggccgtgggagtttcacttgtcggtgtctgcttattaaggtcactaagcactccgagcgccagcgaggagtgcgaccccctgccctgggcccacttcttcggagccgcgcgctacgccttcggctgcgcgcggcacctcagacccccgctcgtgctgacacgctcgcgcgtgtcagaccacttcgggctcgcgggggtcgggaattttgctaaacagac

SEQ ID NO: 1265 - protein, 769 aa, Alphatorquevirus sp.
MAWRRWRWRPWWRRRRRRRWRRRRRRPRRRRPYRRRQPRRVRRRRGRWRRAYRRWGRRRRRRRHKKRLVLTQWQPPIVKKCLIIGYDPLIICGINRTAFNYTTHSEDFTFNNDSFGGGLCTAQYTLRILFQEKLAQHNFWTTSNEDLDLARYLGGALIFFRHPTVDFLVRVRTSPPFNDTDMTALTLHPGIMMLSKKVIKVPSLKTRPSRKHYVKIRFGAPKLFEDKWYPQNELCDVTLVSIHATAADFQYPFGSPLTNSVCCNFQVLNSNYDNALSILNTTQVTEELHTKRQSCYSFLLQQYSYYNTKQTLAQLKFDFFPKQNPKMPKVSNAQTSKSPETLTKDEVTSEYPHWDSLYGGLAYGFTPSNNSENTNQAKDLETQMIQANKFYTAAGKKLIKGFTPIQHKNETDTNIFDYYTGMYCSIFLSSGRSNPEVKGSYTDISYNPLTDKGVGNMIWIDWLSKPDSIYNPSKSKCLLKDFPLWCMVYGYADYCRKVTGDSAILLDCRVVIRCPYTYPQLIKHNNDNWGFVPYSENFGLGRMPGGNPNPSTRMRLSWYPMLLHQMEVLECLAQTGPFAYHGDERKTVLTAKYKFRWKWGGNPVFQQVLRDPCTGGAVAPHTSRHPRAVQVFDPKHQAPEYLFHKWDFRRGLFSTKGIKRVSEQPTYDEFLTGRSKRPKKDTGAPLQEEEQKEDSRFRVPQLRPWLPSSQETQSQSEEEQQTRSTTVQEQLQQQLQQQRLMGLQLRNVCLQLARVQAGHSLHPVFQCHV

SEQ ID NO: 1266 - protein, 147 aa, Alphatorquevirus sp.
MFLGRVWRKKRQVPLPTLRVVPLPQPSPMSSQWRPPVHNVQGLERNWWECFFRGHACFCGCGDAITHINHLASRFGRPPATSTPRGPQAPPVTPYPALPAPEPSPEPWRGAGGDGGRGGDAGGAAGGEGDAGGPDDAALIDAVNLAE

SEQ ID NO: 1267 - protein, 129 aa, Alphatorquevirus sp.; identical to SEQ ID NO: 536

SEQ ID NO: 1268 - DNA, 3150 bp, Alphatorquevirus sp.
cgggtgccggaggtgagtttacacaccgcagtcaaggggcaattcgggctcgggactggccgggctatgggcaaggctcttaaagcgtacgtccctcgctatgtttctcggcagggtgtggaggaaacagaaaaggaaagtgcttctgctggctgtgcgagctacacaaaaaacatcttccatgagtatctggcgtccccccctcgggaatgtctcctacagggagagaaattggcttcaggccgtcgaaggatcccacagttccttttgtggctgtggtgattttattcttcatcttactaatttggctgcacgctttgctattcaggggcccccgccggagggtggtccgcctcggccgaggccgccgctcctgagagcgctgccggcccccgaggtccgcagggagacgcgcacagagaacccgggcgcctccggtgagccatggcctggcgatggtggtggcagagacgatggcgccgccgcccgtggccccgcagacggtggagacgcctacgacgccggagacctcgacgacctgttcgccgccgtcgaagaagagcaacagtaaggaggcggaggtggaggggcagacgtgggcgacgcacatacacccgacgcgcagtcagacgcagacgcagacccagaaaaagacttgtactcactcagtggagcccccagacagtgagaaactgctccatcaggggtatagtgcccatggtaatatgcggacacacaaaagggggtagaaactatgctatccacagcgaagacttcactacacagatacaacccttcgggggcagcttcagcacgaccacctggtcgctaaaagtactctgggacgaacaccaaaaatttcataacaggtggtcctatccaaacacacagctagaccttgccaggtacaggggagtcaccttctggttctacagagaccagaaaacagactacatagtacaatggagcagaaatcctccctttaagctaaacaaatacagcagctccatgtaccatcctggaatgatgatgcaggcaaaaaaaaaactagtagtgcctagttttcaaactagacctaaaggcaaaaagagatacagagtaagaataagaccccccaacatgtttgctgacaagtggtacactcaagaggacctgtgtccggtacctcttgtgcaaattgtggtttctgcggccagcctgctacatccgttctgcccaccacaaacgaacaacccttgcatcaccttccaggttttgaaagacatctatgacaattgcataggagttaactctacccaaacaacaacatattcaacacttcaagaaaaattatacactaactgcacatactttgaaacaacacaagtactagcccaactatctccacactttcaacctgcgttaaaacccacccatgcaacaactacgtcacatgctaccacaacaacactaggaaactatgaaccacaactaaaaaccacaggtcagttttacacaggtaacaatccagtttttggcatgtgtaaatacaaaccaactaaggatatactagaaaaggccaaccagtggttctgggacaatctaatgcacaaaaatgacttacattccagctatggtaaagccaacctacagtgtatggagtaccacacaggcatatacagctccatatttctaagtccccaaaggtcactagaattcccagcagcataccaagacgtcacctacaaccccaactgtgacagagcagcaggtaacagagtctggtttcagtacagtacaaaaatgaacacagactacgatgcaactcaatgcaaatgcgtgttagaaaacattcccctgtgggcggccttccatggctacgcagactttatagagcaagaactgtccataagctcagaaatacgcaactttggcatagtttgctttcagtgcccctacactttccccccttgctttaacaaacaaaaaccaaacaaaggctacgtgttctatgacaccacctttggtaatggaaagatgccagatggatcagggcacatacccatctactggcaacagaggtggtggatcagactagccttccaggtacaagtcatgcacgactttgcgctctgcggtccctttagctacaaagatgatctagccaacaccacacttacagccaggtacaagttcagattcaaatggggcggtaatatcatccccgaacagattatcaagaacccgtgtcagagagaccagtccctcgcttcctaccccgatagacaacgtcgcgacctacaagttgttgacccatcaaccatgggcccaatctacaccttccacacatgggactggcgacgggggctttttggtacagatgctatccagagaatgtcacaaaaaccgggagatgctctccgctttacaaaccctttcaagagacccagatatcttcccccgacagacggagaagactaccgacaagaagaagacttcgctttacaggaaaaaagacggcgcacatccacagaagaagtccaggacccggagagccccccgcaaagcgcgccgctcctacagcagcagcagcagcagcggcagctctcagtccagctcgcagagcagcagcgactcggagtccaactccgatacatcctccaagaagtcctcaaaacgcaagcgggtctccacctaaaccccctattattaggcccgccacaaacaaggtctatctctttgagccccccagaggcctactcccaataatgggcaaagaggcatgggaggacgaatacacctcctgcaagtactgggatcgccctcccagaaccaaccacctagacatgcccacctatccctggatgcccacaaacttcaaagtcagcttcaaacttggatttaaaccctaaataaaaatttcaaggccgtacactgttcacttgtcggtgtctacctctataagtcactaagcactccgaggtaccaaaaagcccccgtcgccagtcccatgtgtggaaggtgtagattgggcccactcagagtctatgtcgtccatttcctgggcatggtctacatcctgatataatacgctgcacttccgaatggctgagttttccacgcccgtccgcggcgagatcgcgacggaggagcgatcgagcgtcccgaggg

SEQ ID NO: 1269 - protein, 767 aa, Alphatorquevirus sp.
MAWRWWWQRRWRRRPWPRRRWRRLRRRRPRRPVRRRRRRATVRRRRWRGRRGRRTYTRRAVRRRRRPRKRLVLTQWSPQTVRNCSIRGIVPMVICGHTKGGRNYAIHSEDFTTQIQPFGGSFSTTTWSLKVLWDEHQKFHNRWSYPNTQLDLARYRGVTFWFYRDQKTDYIVQWSRNPPFKLNKYSSSMYHPGMMMQAKKKLVVPSFQTRPKGKKRYRVRIRPPNMFADKWYTQEDLCPVPLVQIVVSAASLLHPFCPPQTNNPCITFQVLKDIYDNCIGVNSTQTTTYSTLQEKLYTNCTYFETTQVLAQLSPHFQPALKPTHATTTSHATTTTLGNYEPQLKTTGQFYTGNNPVFGMCKYKPTKDILEKANQWFWDNLMHKNDLHSSYGKANLQCMEYHTGIYSSIFLSPQRSLEFPAAYQDVTYNPNCDRAAGNRVWFQYSTKMNTDYDATQCKCVLENIPLWAAFHGYADFIEQELSISSEIRNFGIVCFQCPYTFPPCFNKQKPNKGYVFYDTTFGNGKMPDGSGHIPIYWQQRWWIRLAFQVQVMHDFALCGPFSYKDDLANTTLTARYKFRFKWGGNIIPEQIIKNPCQRDQSLASYPDRQRRDLQVVDPSTMGPIYTFHTWDWRRGLFGTDAIQRMSQKPGDALRFTNPFKRPRYLPPTDGEDYRQEEDFALQEKRRRTSTEEVQDPESPPQSAPLLQQQQQQRQLSVQLAEQQRLGVQLRYILQEVLKTQAGLHLNPLLLGPPQTRSISLSPPEAYSQ

SEQ ID NO: 1270 - protein, 171 aa, Alphatorquevirus sp.
LAGLWARLLKRTSLAMFLGRVWRKQKRKVLLLAVRATQKTSSMSIWRPPLGNVSYRERNWLQAVEGSHSSFCGCGDFILHLTNLAARFAIQGPPPEGGPPRPRPPLLRALPAPEVRRETRTENPGASGEPWPGDGGGRDDGAAARGPADGGDAYDAGDLDDLFAAVEEEQQ

SEQ ID NO: 1271 - protein, 187 aa, Alphatorquevirus sp.
MGLATGAFWYRCYPENVTKTGRCSPLYKPFQETQISSPDRRRRLPTRRRLRFTGKKTAHIHRRSPGPGEPPAKRAAPTAAAAAAAALSPARRAAATRSPTPIHPPRSPQNASGSPPKPPIIRPATNKVYLFEPPRGLLPIMGKEAWEDEYTSCKYWDRPPRTNHLDMPTYPWMPTNFKVSFKLGFKP

SEQ ID NO: 1272 - DNA, 3149 bp, Alphatorquevirus sp.
acgaaagtgagtggggccagacacaccggagtcaaggggcaattcgggctcgggactggccgggctatgggcaacgctcttaaaaatgcacttttctaggatatccagaaagaaaaggctactgctactgcaaacagtgccagctccacagaaaactctcaaacttttaaaaggtatgtggagtcctcccactgacgatgaacgtgtccgcgagcgaaaatggttcctcgcaactgtttactctcactctgctttctgtggctgcgatgatcctgtcggtcacctgtgtcgcttggctactctctctaaccgtccggagaacccgggaccctccgggggacgtcgtgctccttcgatcggggtcctacccgctctcccggctgctaccgagcagcccggtgatcgagcaccatggcctatgggtggtggaggagacgccgcaggaggtggaagagatggaggagaaggcccaggtggagacgcccatggaggacccgcagacgcagacctgctagacgccgtggacgccgcagaacagtaaggagacgcaggcgcgggaggtggaggaggcgttatagaaagtggaggagaaagggcagacgcaggagaaaaaagaaacttataataagacaatggcagccaaactacaccagaaaatgcaacatagtaggctacatgccagtaatcatgtgtggagagaacactttaataagaaactatgccacacacgcagacgactgctactatccaggaccctttgggggcggcatggccacccagaaattcacactcagaatcctgtacgatgactacaaaaggtttatgaactactggacgtcctcaaacgaggacctagacctgtgtagatacaggggagtcaccctatacttcttcagacacccagaagtagactttataataattataaacaccacacctccgttcacagacacagagatcacaggacctagcatacatccgggcatgatggccctaaacaaaagagccaggttcattcccagcctaaagactagacctggcagaaggcacatagttaaaattagagtgggggcccccaaattgtacgaagacaagtggtacccccagtcagaactctgtgacatgcccctcctaaccgtctacgcgaccgcagcagatatgcaatatccgttcggctcaccactaactgacactcctgttgtaagcttccaagtattgcgcagcatgtacaacgacgcccttagcatacttccctctaactttgaaaatcaagccagtgcaggccaaaaactttacaaacaaatatctgaatatttaccatactacaacacaacagaaacaatagcacagctaaagagatatatagaaaatactgaaaaaaatgcaacaacgcccaatccatggcaatcaaagtatgttaacactactgcctttaccactgcacttactgttactacaacagtaccatacaccacattttcagacacctggtacaggggcacagcatacacaaccgccatcactaaagtgccactgctggcagcaacactatatcaaaaccaaacaaaaaacctgctgtctacaacatttacaggagggtccccgtacctagaataccatggaggcctgtacagctccatatggctatcagcaggccgatcctactttgaaacaaagggagcatacacagacatctgctacaacccctacacagacagaggagaaggcaacatggtgtggatagactggctatcaaagacagactccatttatgacaagaaccgcagcaaatgccttatagaaaagctacccctatgggcagcagtatacgggtacgcagaatactgtgccaagagcaccggagactcaaacatagacatgaacgccagagtagtaataaggtgcccctacaccaccccccagatgatagacaccagcaacgaactgaggggcttcatagtatacagctttaactttggcaggggcaaaatgcccggaggcagcagcgaggtacccataagaatgagagccaagtggtacccctgtctctttcaccaaaaagaggttctagaagccatagggcagtcgggccccttcgcctaccactgtgaccaaaagaaagcagtgctaggcctaaaatacaggtttcactggatatggggcggaaaccccgtgtttccacaggttgttagaaacccctgcaaagacacacacggttcctcgggccctagaaagcctcgctcagtacaaatcattgacccgaagtacaacacaccagagctcacaatccacgcgtgggatttcagacgtggcttctttggcccaaaagctattaagagaatgcaacaacaaccaacagatgctgaacttcttccaccaggccgcaagaggagcaggcgagacaccgaagccctccaaagcagccaagaaaagcaaaaagaaagcttacttttcaaacagctccagctccagcgacgagtacccccgtgggaaagctcgcaggcctcgcagacagaggcagagagcgaaaaagagcaagagggaaccctctcccagcagctccgagagcagcttcaccagcaaaagctcctcggcaagcagctcagggaaatgttcctacaactccacaaaacccaacaaaatcaacacgtcaaccctatcttattgccaaggaatcaggctttaatctgctggtctcagattcagtaattaacatgtttggagaccctaaaccctacaaaccctccagcaacgactggaaagaagagttcgaggccgctaaatattgggacaggccccccagatctaaccttagagacaaccccttttatccctgggcccccccaaacaatccctacaaagtaaacttcaaactaggcttccaataaagctaggccgtgggagtttcacttgtcggtgtctgcttcttaaagtcgccaagcactccgagcgtaagcgaggagtgcgaccctcccccccggtagcaacttcttcggagtccggcgctacgccttcggctgcgccggacacctcagaccccccctccacccgaaacgcttgcgcgtttcggaccttcggcgtcgggggggtcgggagctttattaaacagactccgagttgccattggacactggagctgtgaatcagta

SEQ ID NO: 1273 - protein, 765 aa, Alphatorquevirus sp.
MAYGWWRRRRRRWKRWRRRPRWRRPWRTRRRRPARRRGRRRTVRRRRRGRWRRRYRKWRRKGRRRRKKKLIIRQWQPNYTRKCNIVGYMPVIMCGENTLIRNYATHADDCYYPGPFGGGMATQKFTLRILYDDYKRFMNYWTSSNEDLDLCRYRGVTLYFFRHPEVDFIIIINTTPPFTDTEITGPSIHPGMMALNKRARFIPSLKTRPGRRHIVKIRVGAPKLYEDKWYPQSELCDMPLLTVYATAADMQYPFGSPLTDTPVVSFQVLRSMYNDALSILPSNFENQASAGQKLYKQISEYLPYYNTTETIAQLKRYIENTEKNATTPNPWQSKYVNTTAFTTALTVTTTVPYTTFSDTWYRGTAYTTAITKVPLLAATLYQNQTKNLLSTTFTGGSPYLEYHGGLYSSIWLSAGRSYFETKGAYTDICYNPYTDRGEGNMVWIDWLSKTDSIYDKNRSKCLIEKLPLWAAVYGYAEYCAKSTGDSNIDMNARVVIRCPYTTPQMIDTSNELRGFIVYSFNFGRGKMPGGSSEVPIRMRAKWYPCLFHQKEVLEAIGQSGPFAYHCDQKKAVLGLKYRFHWIWGGNPVFPQVVRNPCKDTHGSSGPRKPRSVQIIDPKYNTPELTIHAWDFRRGFFGPKAIKRMQQQPTDAELLPPGRKRSRRDTEALQSSQEKQKESLLFKQLQLQRRVPPWESSQASQTEAESEKEQEGTLSQQLREQLHQQKLLGKQLREMFLQLHKTQQNQHVNPILLPRNQALICWSQIQ

SEQ ID NO: 1274 - protein, 161 aa, Alphatorquevirus sp.
LAGLWATLLKMHFSRISRKKRLLLLQTVPAPQKTLKLLKGMWSPPTDDERVRERKWFLATVYSHSAFCGCDDPVGHLCRLATLSNRPENPGPSGGRRAPSIGVLPALPAATEQPGDRAPWPMGGGGDAAGGGRDGGEGPGGDAHGGPADADLLDAVDAAEQ

SEQ ID NO: 1275 - protein, 66 aa, Alphatorquevirus sp.
LLVSDSVINMFGDPKPYKPSSNDWKEEFEAAKYWDRPPRSNLRDNPFYPWAPPNNPYKVNFKLGFQ

SEQ ID NO: 1276 - DNA, 3147 bp, Gammatorquevirus sp.
cgggagcccgaggtgagtgaaaccaccgaggtctaggggcaattcgggctagggcagtctagcggaacgggcaagaaacttaaaatatattttattttacagatgcaaaacctatgtggagaagatttctatgttaaaacaccttacaatgcagtaactaaaacacaaatttggctaagtcaagtaggagattctcatgacaatttctgtcactgccaaactccttatgctcatttgcttgcttctatatttcctcctggccatcaagataggaataaaactattgaagaaatactgcagagagactacaaagaaaaatgccattcttctggagacgcagaaacaagaactggtatggcagattcaggagacaaaggtttagaaaatataaaagaagaagatggcccagaagaagatatagaaggcctgctcgccgccgccgccgccgtagaagaagaagacacaaggtaagaagaaagaaacaaactataactcttaaacagtggcaaccagactctattagaaaatgtaaaattaaagggtttaactgcattgtagcaggagctgaaggcagacaattcttctgctacactaatgaaaagactaactatatacaacctaaagcaccaggagggggaggctttggtgtagaactttattctcttgactacctatactctcaatggttaaaaaaacaaaacatatggacacatactaatgaatacaaagacctagttagataccaaggctgcagaataacattttttagacatgaaaaagtagactttgtagttcaataccagaggcaacctccatttttaattcaaaaacatacatacatgcaatgccatccacaaaacttactgttaactaaacaccataaagttattctatccaaaaaacataaaccaactggtaaaaacactgtttccatatttattaaaccaccaaaacaaacagtatctaagtggttttttcaagatgaattcagtaaatatggattatttcaattacaagctgcagctgcaacatttggatacccaacatatgggccaaacacacaaagtacaaatttaacattctatgccttaaacaccagattttatcacaacacagactgggcacaagaaaaaactgggcaaccaggatacaaaccatatacaaactttactgatagtattaaattccattatccaacacaaggtggtggctctgccactacaacagcagacacatccacctataccaaatcaatagactacaacacaggagtattccaaagcaaaatacttttatctactaaaatagaaggtacaacaacatacacccatgaaagacccattacaatagctagatataatccagaagatgacaatggagtaggcaactctgtctaccttgtatctataatagctgacacagggtgggctgaaccaaaagacaaagacttagtgatacacaatgtaccattatatatagctttttatggcttctggaactatatactaaaagtgaaaggagacaagaatttccttaaataccatatgtttgttgttaaaagtgaagccataaaacttgttgtcaacacagaacaaaaagaattccctatacttgactggagctttataactggcaaaatgccttatggtgaactactaacagattcagacaaaaaattttggtaccccacttcttataaacaacaagaaataataaatgccatagtagagtgtgggccttatatacctaaactgtcaaatcaaccatcaagtacatggcagctttattacaaatactgtttttattttaaatggggcggtccacagattacagaccaacttgcagaaaacccaaaagaaaaaggcaaatatgatgttcccgatacagtctttgaaacagtacaaattactaacccaaacaaacaaagctgcaaatctatgcttagagcctgggactacagaagggggattattacacaaagagctcttaaaagaatgtcagaagacatccaaactgattcatctttcgaacctgatgatgcagaaacaccaaagaaaaagaaaaaggcaactggagaactccccgcagcccaagaagaaaaccagaaaatgcaggcctgtctcctctcgctcttcgaagaaagtacctgccaagaccaagaaaacctacagcagctcatccagcaccagcagcagcagcagcaaaagatcaagcacaacatcctcaacctcctcctagacttaaaaaagaaacagagaataatacaaatgcaatcaggcctggactaacaagattcaaaccaggatttgaatggaacactgaatgtgagttagcacaagcatttagaagaccccctagactttttaaagaagacaaacccttttatccatggctacccaaatttgaaccccttgttaactttcacctcaattttaagttctaggccgacactgttcacttagcggagtctgtttatataagtttacaccccaaaaaaattgtaaaaaaaaaaaaaaaaaaaaaaaaaataaaaaaattgcaaaaattcggcgctcgcgcgcgctgcgcgcgcacgagcgccgtcacgcgccggcgctcgcgcgccgcgcgtatgtgctaacacaccacgcacctagattggggtgcgcgcgctagcgcgcgcaccccaatgcgccccgccctcgttccgacccgcttgcgcgggtcggaccacttcgggctcgggggggcgcgcctgcggcgcttatttactaaacagactccgagttgccatttggccccccctaagctccgcccccctcatgaatattcataaaggaaaccacaaaattagaattgccgaccacaaactgccatatgctaattagttccccttttacacagtaaaaaggggaagtgggggggccccccctacgtcacaggacacgcccccgccgccatcttgggtgcggctgggcgggggctaaaatggcggcacccaatcattttatactttcactttccaatcacaaaatgccacctcacagtaaaggggtggagactttagaactatataactaagtggggtggcgaatggctgagtttaccccgctagacggtgcagggaccggatcgagcgcagcgaggaggtccccggctgcccgtggg

SEQ ID NO: 1277 - protein, 656 aa, Gammatorquevirus sp.
MPFFWRRRNKNWYGRFRRQRFRKYKRRRWPRRRYRRPARRRRRRRRRRHKVRRKKQTITLKQWQPDSIRKCKIKGFNCIVAGAEGRQFFCYTNEKTNYIQPKAPGGGGFGVELYSLDYLYSQWLKKQNIWTHTNEYKDLVRYQGCRITFFRHEKVDFVVQYQRQPPFLIQKHTYMQCHPQNLLLTKHHKVILSKKHKPTGKNTVSIFIKPPKQTVSKWFFQDEFSKYGLFQLQAAAATFGYPTYGPNTQSTNLTFYALNTRFYHNTDWAQEKTGQPGYKPYTNFTDSIKFHYPTQGGGSATTTADTSTYTKSIDYNTGVFQSKILLSTKIEGTTTYTHERPITIARYNPEDDNGVGNSVYLVSIIADTGWAEPKDKDLVIHNVPLYIAFYGFWNYILKVKGDKNFLKYHMFVVKSEAIKLVVNTEQKEFPILDWSFITGKMPYGELLTDSDKKFWYPTSYKQQEIINAIVECGPYIPKLSNQPSSTWQLYYKYCFYFKWGGPQITDQLAENPKEKGKYDVPDTVFETVQITNPNKQSCKSMLRAWDYRRGIITQRALKRMSEDIQTDSSFEPDDAETPKKKKKATGELPAAQEENQKMQACLLSLFEESTCQDQENLQQLIQHQQQQQQKIKHNILNLLLDLKKKQRIIQMQSGLD

SEQ ID NO: 1278 - protein, 122 aa, Gammatorquevirus sp.
MQNLCGEDFYVKTPYNAVTKTQIWLSQVGDSHDNFCHCQTPYAHLLASIFPPGHQDRNKTIEEILQRDYKEKCHSSGDAETRTGMADSGDKGLENIKEEDGPEEDIEGLLAAAAAVEEEDTR

SEQ ID NO: 1279 - protein, 108 aa, Gammatorquevirus sp.
LSPLALRRKYLPRPRKPTAAHPAPAAAAAKDQAQHPQPPPRLKKETENNTNAIRPGLTRFKPGFEWNTECELAQAFRRPPRLFKEDKPFYPWLPKFEPLVNFHLNFKF

SEQ ID NO: 1280 - DNA, 3146 bp, Alphatorquevirus sp.
cgggtgccgaaggtgagtttacacaccggagtcaaggggcaattcgggctcgggactggccgggctatgggcaaggctcttaaagcgatcattcttaaaaatgtttttcggcaggtactacagaaagaaaaggaaagtgcttctgtcctcactgccaactccacagaaaaaacggcctgctatgagctggcagccccctatgcacaatgccagaggcagggagcaccacttctggcaagcttgctacaattctcatgctagtttttttgtggctgtggtagttttctttctcacctcgttcgtctggaaggtcgttatgcatctggcaacaacaactcctcgccccagactggggcaccaccaatgatccgtagagccctgcctcccccagcggctccggatcagccccagaccccacaatggtctggaactggtggtggagacggcgccggagaaggtggccagcaaggaggaggaggtggagacgactacgcacccgaagacctagacgcactgttcgacgccgtcgcaggagaccaacagtaaggagaaggaggtgggggcgcagacgggggcgacgcacatacaggagacgcagacgaacccgtagaaagagaaagagactcgtactgactcaatggaaccccagcacagtaagaaagtgctggatccgaggcatgtttcccatgctgatctgtggaaacacacaacagggcagaaactatgcagaccatatggacgatgtaattcctcaaggaaaaccctatggggggtctctaagtaccaccacttggactctacaggcgctgtatgaccagcaccagagattcatgaacaagtggtcttatcccaacacagaactagacctagccaggtacctaggatctgaatttacattttatagagacaaactcacagactatatagtaaccttcaacatagtacctccttttaagctaaacaaatacagctgtgcatcataccacccaggtatgatgatgcagagacgcaagaaaatacttgtaaaaagctttcaaactaaaccaaaaggcagaaaagctgtgaaagtaaaaataggacccccacaactatttgagcagaagtggtacactcagcaagacctttgttccgttggtcttgtgtcatttgcggtttctgcggcgagcctaacacatccgttctgctcaccacaaactgaaaatgttgcagtaaccttccaggttttgaaatccttctactatgaaggaataggcattaacgaacaaactaaacacacaactatagcagacaccctatacacacaaggtaattactatcaaacatttcatacaacatcatacattaattcaggcctaaaaccaggtaaagcaggacaaaatgaactagaccaaacagttaaaacatggattcagtcaaactttcccacaggaaacaacagcacctttggctttaattcatataaaccagataaacaaaaattaaataaactattagactggtactggcaacaactgcaaacaccaaatgacattacctccagctatggaagagctactaacaaatacctagaataccacatgggaatatacagtgctatattcctaagcccactcagaagcaacctgcaattccctacagcataccaagatgtaacatacaacccactcatagacaaaggagtaggaaatgaaatttggtttcaatacaacacaaaacccaatacaagctttgatgaaaaacaatgcaagtgccacataaaagacatacccctttgggcagccttttatggctactcagactatgtacaaacagaaataggagcacaacaagaaatatttaacataggaatagtttgtgtaaaatgcccatacacaataccaaaactaatccatgttgaatcaacaaaaaaaaaagactggggctttgtattttatgatggactatttggaaatggcaaactaccagatgggtcaggacacgttccaacatacctacaagaaagatggtatcctagaatgagatttcaacaaaatgttatgcatgacatatgtcaaacaggcccatttagctacaaagatgaactaaaaagcacagtacttacatgcaaatacaagttcaaattcttatggggtggcaacttaatacctcaacaggtcgttaggaatccctgcaagtcagacggacggttcgacattgacccccatagattccctcgtgagctacaaattgcggaccctcgcaccatggggccccaatgggttttccacacctgggatttcagacgtggactgtacggcaaagatgctatcaaaagagtgtcagaaaaaccagatgatgatgaactctatactttctttccaaaaaaacctcgcctttctacaccagcagacgccccaggcctccaagaaggaggcttctttttccagaaccaccaagaaacaacatcagaagaagaagcagaagcccaagaagaaacgcaggcgcaaccggagcagcagcagcgagtcctcagactgcagctcagacagcagcagcacctcggggaccagctgcgactcctatatcagcaggtcctcaaaacccaagcaggtctccacctaaacccacttatattgggccttgcataaataaagtatacatgtttccagaaagcaagcccagaactcctaccagccaagactgggctcaggagtacgagatggcccgcatatttgacaggcctgccagatccaacctttcagacactcccttttatccctgggtcccaaaacctttcaatgttacttttgctcttaaattcaaataaacaaggccgtgggagtttcacttgtcggtgtctacctctataagtcactaagcactccgagcgtcagcgaggagtgcgacccttccccctgactcaaccccccccccccatgcgcatgcgcatggggcctcccccccagcggggggctccgccccccggccccccccccgaagtccgtcactacccacgtgactcccacaggccaaccagaaccttctacgtgcacttcctgggctgggtttatgagagcatataactaagtgcacttccgaatggctgagttttccacgcccgtccgcagcggtggagcacctcaggagcgacccccgcgtcccgaggg

SEQ ID NO: 1281 - protein, 735 aa, Alphatorquevirus sp.
MVWNWWWRRRRRRWPARRRRWRRLRTRRPRRTVRRRRRRPTVRRRRWGRRRGRRTYRRRRRTRRKRKRLVLTQWNPSTVRKCWIRGMFPMLICGNTQQGRNYADHMDDVIPQGKPYGGSLSTTTWTLQALYDQHQRFMNKWSYPNTELDLARYLGSEFTFYRDKLTDYIVTFNIVPPFKLNKYSCASYHPGMMMQRRKKILVKSFQTKPKGRKAVKVKIGPPQLFEQKWYTQQDLCSVGLVSFAVSAASLTHPFCSPQTENVAVTFQVLKSFYYEGIGINEQTKHTTIADTLYTQGNYYQTFHTTSYINSGLKPGKAGQNELDQTVKTWIQSNFPTGNNSTFGFNSYKPDKQKLNKLLDWYWQQLQTPNDITSSYGRATNKYLEYHMGIYSAIFLSPLRSNLQFPTAYQDVTYNPLIDKGVGNEIWFQYNTKPNTSFDEKQCKCHIKDIPLWAAFYGYSDYVQTEIGAQQEIFNIGIVCVKCPYTIPKLIHVESTKKKDWGFVFYDGLFGNGKLPDGSGHVPTYLQERWYPRMRFQQNVMHDICQTGPFSYKDELKSTVLTCKYKFKFLWGGNLIPQQVVRNPCKSDGRFDIDPHRFPRELQIADPRTMGPQWVFHTWDFRRGLYGKDAIKRVSEKPDDDELYTFFPKKPRLSTPADAPGLQEGGFFFQNHQETTSEEEAEAQEETQAQPEQQQRVLRLQLRQQQHLGDQLRLLYQQVLKTQAGLHLNPLILGLA

SEQ ID NO: 1282 - DNA, 3145 bp, Alphatorquevirus sp.
cgggtgccgaaggtgagtttacacaccgaagtcaaggggcaattcgggctcgggactggccgggctatgggcaaggctcttagggtattcattcttaaaatgcacttttctagaatctctcgctcgaaaaggaaagtgcttctgccggcactgccagctccaccgccgcctaggcaacttctaatgtggcagccaccgatccagaatggaactcaactcgaccgccattggttcgagtcagtctggcgttcgcatgctgccttttgtggctgtggcgactgtattggccatcttcaccatctggctgctaacctgggtagaccacctgctccacaacccccgcgagaacagcacccaccgcagataagagggctcccggcactcccggcacctcccagtaacagaaactcatggcctggtactggtggaggcgccgccggaggagaggctggtggaagcctaggcggaggagatggaggacacggagaacccgcagacgacgacctgctagacgctatcgcactcgccgaagagtaaggaggagaagggggaggtggaggagacgatatagacgctggcgcagacgcggggggcgacgcagacacagaaaaaaacttataattaaacagtggcaacctaactttataagacactgttatataataggatacctgccacttataatatgtggagaaaacactttctctcacaactatgccacccactcggacgacatggtctctacgggggcctacggagggggcatgactaccacaaaatttactctaagaatactatttgacgagtaccaaagacacttaaacttctggactgttagcaaccaagacctagacctagcaaggtacctgggagtaaaactcacaatatttagacaccccactgtagactttatagtgcagatacacacacaacccccttttcaagacacagaaataacaggccccagcatacacccagggatgctcatactctctaaaaaacacatacttatacccagcttaaaaaccagaccctctagaaaacactatataaagctcagagtaggggccccaagactttttcaagacaagtggtacccccagagcgaactctgtgacgtcacattgctcgttatatatgcaaccgcatgtgacttgcaatatccgttcggctcaccacaaactgacaacgtatgtgtcaacttccagatattggggcaaccctataaccaacacctcaaggtgacgttagcctcaactgaagaaaacacatataaaaatcactatgaaaacaacttatatagccatactgaattttataacactacagaaacagtagcacaactaaaaccaatagttgatgccaccactaatggaaactggtctcaatacataaacactgacaaactagaccaaacacctccaacaacattaaaccataacaacacatggtacaaaggcactgtatataaaccctcaattaaagaagtttcaacaaaagttagagccacctaccagaaagccacagagcttgctctaccaggagcagtaaaacccaccacagacttatttgagtatcacgcaggaatatacagctcaatattcctatctccaggaagagcatactttgagacccccggagcataccaagacataatttacaatcccctaacagacaaaggagtaggtaacatagtgtggatagactggctaagcaaatcagattcactatactctgaaaaacaaagcaaatgtgctatatttgacctaccactatgggcctccttctttggatacgcagaattctgctctaaaagcacaggagacacagccatagcatacaacgccagagtatgtgtcagatgtccctacacagagccacagctgctaaaccacaacaacccctctcaggggttcgtgttttactcctacaactttggcaaaggcaaaatgccgggaggcagctcccaggtacctataagaatgagatggaagtggtacgtgtgcatgttccaccagctagaggttatggaagctatatgtcagagcggaccgtttgcataccacagcgacgaaaaaaaagcagtactgggtataaaatataagttcgactggaaatggggaggaaatcctatctcccaacagattgtcagaaacccctgcagtggacaaaactcctcgggcaatagagtgcctcgctcagtacaagcagttgacccgaaatacgtctcgccccaactcgtctggcactcgtgggacttcagaagaggactctttggccaggcaggtattaaaagaatgcaaaacgaatcagatgctcttacactttctccagtccacagaccaaaacgccccaaaagggacacccaggtcaaagaaaaaacgccagaaaaagactcagattcagcactccaactccgaagactccagccctggatccactccagtcaagaaacaaaagacgaagaggaggagataccggaggggccggtacaagaacaactcctccaccagctccagcagcagcgattcctcagagtgcagctggagtccatcgcccaagaagtcctcaaaatcaggaggggccacagcctacaccccctactatcctcccatgcataaacaaggtctttatgtttaaccctccaggtccaaaacccatcgttgggtacgagtcctggagggatgagtttgaatcatgcaaggcctgggacaggccccctagatcctaccacacagatattcccacttacccctggatgcccaaacccccagaccaaatacgtgtaagcttcaaacttggctttcattaaaatttcaaggccgtgcaacattcacttgtcggtgtctacctctaaaggtcactaagcactccgagcgcaagcgaggagtgcgaccctccccccccctggggcaactccctcgaagtccggcgctacgcgcttcgcgctgcgccggacatctcgccccccccccgaagaacgtcactaaccacgtgactcccacaggccaaccacagtctatgtcatccacttcctgggcatggtctacgtgataatataaagcggtgcacttccgaatggctgagtttttcacgcccgtccgcagcggcagcaccacggagggtgatccccgcgtcccgaggg

SEQ ID NO: 1283 - protein, 736 aa, Alphatorquevirus sp.
MAWYWWRRRRRRGWWKPRRRRWRTRRTRRRRPARRYRTRRRVRRRRGRWRRRYRRWRRRGGRRRHRKKLIIKQWQPNFIRHCYIIGYLPLIICGENTFSHNYATHSDDMVSTGAYGGGMTTTKFTLRILFDEYQRHLNFWTVSNQDLDLARYLGVKLTIFRHPTVDFIVQIHTQPPFQDTEITGPSIHPGMLILSKKHILIPSLKTRPSRKHYIKLRVGAPRLFQDKWYPQSELCDVTLLVIYATACDLQYPFGSPQTDNVCVNFQILGQPYNQHLKVTLASTEENTYKNHYENNLYSHTEFYNTTETVAQLKPIVDATTNGNWSQYINTDKLDQTPPTTLNHNNTWYKGTVYKPSIKEVSTKVRATYQKATELALPGAVKPTTDLFEYHAGIYSSIFLSPGRAYFETPGAYQDIIYNPLTDKGVGNIVWIDWLSKSDSLYSEKQSKCAIFDLPLWASFFGYAEFCSKSTGDTAIAYNARVCVRCPYTEPQLLNHNNPSQGFVFYSYNFGKGKMPGGSSQVPIRMRWKWYVCMFHQLEVMEAICQSGPFAYHSDEKKAVLGIKYKFDWKWGGNPISQQIVRNPCSGQNSSGNRVPRSVQAVDPKYVSPQLVWHSWDFRRGLFGQAGIKRMQNESDALTLSPVHRPKRPKRDTQVKEKTPEKDSDSALQLRRLQPWIHSSQETKDEEEEIPEGPVQEQLLHQLQQQRFLRVQLESIAQEVLKIRRGHSLHPLLSSHA

SEQ ID NO: 1284 - protein, 156 aa, Alphatorquevirus sp.; identical to SEQ ID NO: 318

SEQ ID NO: 1285 - protein, 126 aa, Alphatorquevirus sp.
LDPLQSRNKRRRGGDTGGAGTRTTPPPAPAAAIPQSAAGVHRPRSPQNQEGPQPTPPTILPCINKVFMFNPPGPKPIVGYESWRDEFESCKAWDRPPRSYHTDIPTYPWMPKPPDQIRVSFKLGFH

SEQ ID NO: 1286 - DNA, 3144 bp, Alphatorquevirus sp.
cgggtgccggaggtgagtttacacaccgaagtcaaggggcaattcgggctcaggactggccgggctttgggcaaggctcttaaatatgcacttttctcgaataagcagaaagaaaaggaaagtgctactgctttgcgtgccagcaactaagaaaaaaccaactgctatgagcttctggagacctccggtgcacaatgtcacggggatccagcgcctgtggtacgagtcctttcaccgtggccatgctgctttttgtggttgtggggatcctatattacacattactgcacttgctgagacatatggccatccaacaggcccgagaccttctgggtcatcgggaatagaccccactccgcccatccgtagagccaggcctgccccggccgctccggaaccctcacaggttgactccagaccggccctgccatggcatggagatggtggaagcgacggaggcgctggtggctccgcaagcggtggacccgtggcagacttcgcagacgatggcctcgaccagctcgtcgccgccctagacgacgaagagtaaggaggcgcagacgatggaggagggggcgacctagacgcagactgtaccgacgctacagacgcaaaaaacgtaggagacgaaagcccaaaatagtgttaaaacaatggcagccagacattacaaaaaggtgctacataataggctacattcctgccataatatgtggggctggcacctggtcccacaactacaccagccacctgttagacattatccccaagggaccctttggaggagggcacagcactatgagattctccctaaaagtactctttgaagaacacctgagacacttaaacttctggacaaggagcaaccaagacctagaactcataagatactttagatgctcctttaaattttatagagactcagacacagactacatagtaaagtacagcagaaaaactcccctgggaggcaacagactgacagcacctagcctacaccccggggtacaaatgcttagcaaaaacaaaatattagtacctagctacgctacaaaacccaagggtggtagctatgtaaaagtaaccatagcaccccccacactactaactgacaagtggtactttagcaaagacatttgtgacacaacattggttaacatagacgttgtactctgcaacttgcggtttccgttctgctcaccacaaactgacaacccttgcatcacattccaagttctgcattccatctacaacgacttcctctctatagtagatactgacaactataaaaataactttgttacaaacctatctacaaaagtaggtgctgactggggcaaaagacttaacactttcagaacagaaggctgctactcacacccaaaactacccaaaaaggcagtaacacctgcaaatgataaaacatactttactgtaccagacggtttgtggggagatgcagtatttaatacagaacaacaaaacataataactcaaaatatggaatcttatagcacctcagcaaaaaatagaggagtgcaaggagaccctgcattctcacacctaacaggcatatactcacctccctggctaacaccaggaagaatatccccagaagtacctggactttacacagacgtgacttacaacccatacgctgacaaaggagtgggcaacagaatatgggttgactactgtagtaaaaaaggcaacaaatatgacaacacaagtaaatgccttttagaagacctgccactatggatggcctcctttggctacgtagactgggtaaaaaaagagactggcaactggggcattccactatgggccagagtacttataagaagcccatatactgttccaaaactatataacgaagcagaccccaactacggatgggttccaatctcctactactttggagaaggcaaaatgccaaacggagacatgtacgtaccatttaaagtaagaatgaaatggtacccttcaatgtggaaccaagaaccagttttaaatgacttagcaaagagcggaccgtttgcatacaaaaacaccaaaacaagtgtgactgtgactgccaaatataaatttacatttaacttcgggggcaaccccgtaccctcacagattgtacaagatccctgcacacagcccacctacgacatccccggcaccggtaacctgcctcgcagaatacaagtcattgacccgaaagtcctcggtccccactattccttccaccggtgggacttcaggcgtggcctctttggctcacaagctattaaaagagtgtcagaacaaccaacaacttctgagtttctattctcaggcccaaagagacccagaatcgatcaaggcccttacatgccgccagaaaaaggctcaggttcactccaaagagaaccgagaccgtggagcagctcggagaccgaggcagaaacagaagccccctcggaagaggagccggagaaccaagaagaacaagtactccagttgcagctcagacagcagctccgagaacagcgaaaactcagacagggaatccagtgcctattcgagcaactaataacaacccagcagggagtccacaaaaacccattgttagagtaggccccgagcagtggctgtttcctgagagaaagccaaagccaccgccctcagcccaagactgggccgaggaatacactgcctgtaaatactgggatagaccacctagaaaattccttacagatatgccattctatactcactgcaaaaccaattacaatgtaacctttatgcttaactatcaataaacatgccaccttcactgttctaggccgtgggagtttcacttgtcggtgtctacctctaaaagtcactaagcactccgagcgccagcgaggagtgcgagcccagtagggggcgccatgcgcccccccccgcgcatgcgcggggcccccccccacggggggctccgccccccggccccccccgtgctacgtcactaaccacgtgcactccacagaccagtccaagtctacgtcgtgcacttcctgggcatggtttacatcctgatataagtaactgcacttccgaatggctgagttttccacgcccgtccgcggagaggagccacggcaggggatccgaacgtcctgaggg

SEQ ID NO: 1287 - protein, 726 aa, Alphatorquevirus sp.
MAWRWWKRRRRWWLRKRWTRGRLRRRWPRPARRRPRRRRVRRRRRWRRGRPRRRLYRRYRRKKRRRRKPKIVLKQWQPDITKRCYIIGYIPAIICGAGTWSHNYTSHLLDIIPKGPFGGGHSTMRFSLKVLFEEHLRHLNFWTRSNQDLELIRYFRCSFKFYRDSDTDYIVKYSRKTPLGGNRLTAPSLHPGVQMLSKNKILVPSYATKPKGGSYVKVTIAPPTLLTDKWYFSKDICDTTLVNIDVVLCNLRFPFCSPQTDNPCITFQVLHSIYNDFLSIVDTDNYKNNFVTNLSTKVGADWGKRLNTFRTEGCYSHPKLPKKAVTPANDKTYFTVPDGLWGDAVFNTEQQNIITQNMESYSTSAKNRGVQGDPAFSHLTGIYSPPWLTPGRISPEVPGLYTDVTYNPYADKGVGNRIWVDYCSKKGNKYDNTSKCLLEDLPLWMASFGYVDWVKKETGNWGIPLWARVLIRSPYTVPKLYNEADPNYGWVPISYYFGEGKMPNGDMYVPFKVRMKWYPSMWNQEPVLNDLAKSGPFAYKNTKTSVTVTAKYKFTFNFGGNPVPSQIVQDPCTQPTYDIPGTGNLPRRIQVIDPKVLGPHYSFHRWDFRRGLFGSQAIKRVSEQPTTSEFLFSGPKRPRIDQGPYMPPEKGSGSLQREPRPWSSSETEAETEAPSEEEPENQEEQVLQLQLRQQLREQRKLRQGIQCLFEQLITTQQGVHKNPLLE

SEQ ID NO: 1288 - protein, 164 aa, Alphatorquevirus sp.; identical to SEQ ID NO: 1107

SEQ ID NO: 1289 - protein, 56 aa, Alphatorquevirus sp.; identical to SEQ ID NO: 1108

SEQ ID NO: 1290 - DNA, 3143 bp, Alphatorquevirus sp.
tcagtaacgaaagtgagtggggccagacttcgccataaggcctttaggctcgggactggccgggctatgggcaaggctcttaaaaatgcacttttctaggatatccagaaagaaaaggctactgctactgcaaacagtgccagctccacagaaaactctcaaacttttaaaaggtatgtggagtcctcccactgacgatgaacgtgtccgcgagcgaaaatggttcctcgcaactgtatattctcactctgctttctgtggctgcaatgatcctgtcggtcacctctgtcgcttggctactctatctaaccgtccggaaaacccgggaccctccgggggacgtcgtgcttcttcgatcggggtcctacccgctctcccggctgctaccgagcaacccggtgatcgagcaccatggcctatggctggtggaggagacgccgcaggaggtggaagagatggaggagaaggcccagatggagacgcccatggaggacccgcagacgtagacctgctagacgccgtggacgccgcagaacagtaaggagacgcaggcgcgggaggtggaggaggcgttatagaaaatggaggagaaagggcagacgcaggagaaaaaagaaacttgtaataagacaatggcagccaaactacaccagaaaatgcaacatagtaggctacatgccagtaattatgtgtggagagaacactctaataagaaactatgccacacacgcagacgactgctactatccgggaccctttgggggcggcatggccacccaaaaattcacactgagaatcctatacgatgactacaaaaggtttatgaactactggacctcctcaaacgaggacctagacctctgtagatacaagggagtcaccctgtacttctttagacacccagaggtagactttataataattataaacaccacacctccgttcgcagacacagagatcacaggacccagcatacatccgggcatgatggccctaaacaagagagccaggttcattcctagcctaaagactagacctggcagaaggcacatagttaaaattagagtgggggcccccaaactgtacgaggacaagtggtacccccagtcagaactctgtgacatgcccctcctaaccgtctacgcgaccgcagcggatatgcaatatccgttcggctcaccactaactgacactcctgttgtaaacttccaagtattgcgcagcatgtacaacgacacccttagcatacttccctctaactttgagaacggagaaagtgcaggccaaaaactatacaaacaaatatctgaatatctaccatactacaacacaacagaaacaatagcacagctaaagagatatgtagaaaatactgaaaaaaattcatcaacacccaatccatggcaatcaaagtatgttaacactacttcctttaccactgcagtaactattagtacaacaaaaccatacaccacattttcagacacctggtacaggggcacagcatacacagacgctatcactgaggtgccactcaaagcagcaaagctgtatgaaagtcaaacacaaaaactgctgtctacaacatttacaggagggtccccgtacctagaataccacggaggtctgtacagctccatatggctatcagcaggccgatcctactttgaaacaaagggagcatacacagacatctgctacaacccctacacagacagaggagagggcaacatggtgtggatagactggctatcaaaatcaaactccatatatgacaagaccagcagcaaatgccttatagaaaagctacctctatgggcagcagtatacgggtacacagaatactgtgccaagagcaccggagactcaaacatagacatgaacgccagagtagtcataagatgcccctacaccacaccccagatgatagacaccagcaacgaactgaggggcttcatagtatacagctttaactttggcaggggcaaaatgcccggaggcagcagcgaggtacccataagaatgagagccaagtggtacccctgtctgtttcaccagaaagaggttctagaagccatagggcagtcgggccccttcgcctaccactgtgaccaaaagaaagcagtgctaggtctaaaatacaggtttcactggatatggggcggaaaccccgtgtttccacaggttgttagaaacccctgcaaagacacacacggttcctcgggccctagaaagcctcgctcagtacaaatcattgacccgaagtacaacacaccagagctcacaatccacgcgtgggatttcagacgtggcttctttggcccaaaagctattaagagaatgcaacaacaaccaacagatgctgaacttcttccaccaggccgcaagaggagcaggcgagacaccgaagccctccaaagcagccaagaaaagcaaaaagaaagcttacttttcaaacacctccagctccagcgacgagtacccccgtgggaaagctcgcaggcctcgcagacagaggcagagagcgaaaaagagcaagagggaaccctctcccagcagctccgagagcagcttcaccagcaaaagctcctcggcaagcagctcagggaaatgttcctacaactccacaaaatccaacaaaatcaacacgtcaaccctaccttattgccaaaggatcaggcattaatctgctggtctcagattcagtaattaacatgtttggagaccctaaaccctacaaaccctccagcaacgactggaaagaggagtacgaggcctctaaatattgggacagaccccccagatctaaccttagagacaaacccttttatccctgggcccccccaaacaatccctacaaagtaaactttaaactaggcttccaataaagctaggccgtgggagtttcacttgtcggtgtctgcttcttaaagtcgccaagcactccgagcgtaagcgaggagtgcgaccctcccccccggtagcaacttcttcggagtccggcgctacgccttcggctgcgccggacacctcagaccccccctccacccgaaacgcttgcgcgtttcggaccttcggcgtcgggggggtcgaaagctttattaaacagactccgagttgccattggacactggagctgtgaa

SEQ ID NO: 1291 - protein, 765 aa, Alphatorquevirus sp.
MAYGWWRRRRRRWKRWRRRPRWRRPWRTRRRRPARRRGRRRTVRRRRRGRWRRRYRKWRRKGRRRRKKKLVIRQWQPNYTRKCNIVGYMPVIMCGENTLIRNYATHADDCYYPGPFGGGMATQKFTLRILYDDYKRFMNYWTSSNEDLDLCRYKGVTLYFFRHPEVDFIIIINTTPPFADTEITGPSIHPGMMALNKRARFIPSLKTRPGRRHIVKIRVGAPKLYEDKWYPQSELCDMPLLTVYATAADMQYPFGSPLTDTPVVNFQVLRSMYNDTLSILPSNFENGESAGQKLYKQISEYLPYYNTTETIAQLKRYVENTEKNSSTPNPWQSKYVNTTSFTTAVTISTTKPYTTFSDTWYRGTAYTDAITEVPLKAAKLYESQTQKLLSTTFTGGSPYLEYHGGLYSSIWLSAGRSYFETKGAYTDICYNPYTDRGEGNMVWIDWLSKSNSIYDKTSSKCLIEKLPLWAAVYGYTEYCAKSTGDSNIDMNARVVIRCPYTTPQMIDTSNELRGFIVYSFNFGRGKMPGGSSEVPIRMRAKWYPCLFHQKEVLEAIGQSGPFAYHCDQKKAVLGLKYRFHWIWGGNPVFPQVVRNPCKDTHGSSGPRKPRSVQIIDPKYNTPELTIHAWDFRRGFFGPKAIKRMQQQPTDAELLPPGRKRSRRDTEALQSSQEKQKESLLFKHLQLQRRVPPWESSQASQTEAESEKEQEGTLSQQLREQLHQQKLLGKQLREMFLQLHKIQQNQHVNPTLLPKDQALICWSQIQ

SEQ ID NO: 1292 - protein, 161 aa, Alphatorquevirus sp.; identical to SEQ ID NO: 531

SEQ ID NO: 1293 - protein, 66 aa, Alphatorquevirus sp.; identical to SEQ ID NO: 532

SEQ ID NO: 1294 - DNA, 3140 bp, Betatorquevirus sp.
cgggagccgaaggtgagtgaaaccaccgtagtctaggggcaattcgggctagatcagtctggtggaacgggcaagaaacttaaaataatatgttttttacagatgaacattgaacctacaaaatggaccccaagacaacaaaaaaaagaatggcttaacttcattgtccacgttcacgactaccactgcaactgcgacaaaccactggagcatacagtttttaatatttttgaacaagaaaaacaattaagatttaacgctgaatcaacagccttaattaaaaaatgcctttctacagatggagaaggccttggagacgcagaagatggcgccgacgctttagatggtggtaccctcgaagaacttttcgccgaagattttccagaagaaactgggtaagaaaaaaaagaaaactatctaaaattaaaataagcgaatggcaacccacaaaaattataaaaagtactgtaaaaggaatatatccagcctttctctgtaatcacaaaagactaagcaataactttgtacaagctatagatgctacaactacccacttaatgccaggcggaggaggctttggaataattcaattttctttaaatgctttatatgaactatttactaaaggacaaaactggtggacaaagtcaaactgtgggttacctcttgtaagatttaatggtacaaccttaaaattttacagagctgaaaaatatgactaccttgttaacatacaaagatgttatccaatgtgttgtactgatatcatgtatatgagttgccaaccttttgtaatgatgatgactaaaggaacaatatttataccttgtttacaaagaaaacccagaggtagaccttacaaaaaaatatttgtaaaaccaccatcacaaatgaaaacagaatggtattttcaatcacaattagcaaaaactggccttattatagtaagaactgccgcatgctctttagatagaatatacacaggctcacaatcatcatctacaacaataggccttactagcctacatacaacaacatttcaattccataactggaaaaactatccaccaaccacaggatataaaccacaaaattcactgtatttttatggcacacttaatggacaatcagacccaactgcagaaccagttaaaaacttaatatttcttggtagaacaggcccacttacacaaggaaaccccataaatactaaaagcaacttaacaacttacttttctaaaaacacagaatggggaaacatatttcaccctcattatctatctggacctagtcaaatttttgttacaaacaaagacaacaacacaataaaaactacattagaacaaaatgacaacttaaacaaaaccataaaagagttaagtatttttacaccacgtacacttccacttttagtgaactgcagatacaatcccttagcagacaaaggaaaaggaaacaaaatatacttaatatcaataacatcagatgtagagacatggcacgaaccaaaaaaccaaaaactaatgagaaaagacctaccactatggattttaacatggggatggtttgactggcaattgaaattagctgaagttcacagactagaaacagaataccttacagtaattgaatccccatatataacacctactctaaaatactatgtattcttagactccagctttacaaattggccaccaagcagtccttatggaactgacttaaatgaatcagacagtcaaaactttttccctaaaaactcataccaattagaatcaattaatgaaatagcttcatgtggcccaggggtaatgaaattaggtagagaccaatcaggtgaagcacattttaactatagacttcattttaagtttggaggttgtccagcacccatggaaacaatttgtaatcccatcgaagaagaggtataccccatacccaatagtaaatgccaaacaacttcgttgcagagtccaacaacaccactctcaacctacttgtacgactttgatgaaaggagacaacaaattactgaaagagctgcaaaacgaatcaaaaaagacacggaaactgaacctgatattttccaaattacaggaacagcaatggacctcccaacatcccaccaaaaaacacaggaggagacaacatcggacgaggaagaaagcgaaacagagatacagcagcagctcctccagctcaggagaaagcagctcaaactcaagcgacgaatattaaccctactacaaatgcaagatatagaataacaaaatgtactactactataaatttgtttaatgatcctataccacctaaaaaccgccgcttaaatccccaagagttagaaacagaaataatgttagctagctggatgaaaagacctgtaagatcttttacaaatgaccctcctttttacccttggctgcccattgcaccaaaagtaccttttgtaaattttgacttgggatttaaataaacaaggcctgcaaactttcactagaggtgtccatttatataagttaaacttaaaggaacatccaccgcctccctaatacgcaggcgcacaagggggctccgcccccttaaacccccaagggggctccgcccccttaaacccccaagggggctccgcccccttacacccccaagggggctctgcccccttacaccccctaataaatattcaacaggaaaaccacataattagaattgccgaccacaaactgtcacttacttctgcttttttacaatacttccctttttcctcattattattcattacattaattaataatcactgtaattccggggaggagacaaaccactatataactaactatagtgacgaatggctgagtttacgccgccagacggagacgggatcactacagtgactccccctaataaatattcaacaggaaaaccacataattagaattgccgaccacaaactgtcacttacttctgcttttttacaatacttccctttttcctcattattattcattacattaattaataatcactgtaattccggggaggagacaaaccactatataactaactatagtgacgaatggctgagtttacgccgccagacggagacgggatcactacagtgactccaggctgatcttggg

SEQ ID NO: 1295 - protein, 660 aa, Betatorquevirus sp.
MPFYRWRRPWRRRRWRRRFRWWYPRRTFRRRFSRRNWVRKKRKLSKIKISEWQPTKIIKSTVKGIYPAFLCNHKRLSNNFVQAIDATTTHLMPGGGGFGIIQFSLNALYELFTKGQNWWTKSNCGLPLVRFNGTTLKFYRAEKYDYLVNIQRCYPMCCTDIMYMSCQPFVMMMTKGTIFIPCLQRKPRGRPYKKIFVKPPSQMKTEWYFQSQLAKTGLIIVRTAACSLDRIYTGSQSSSTTIGLTSLHTTTFQFHNWKNYPPTTGYKPQNSLYFYGTLNGQSDPTAEPVKNLIFLGRTGPLTQGNPINTKSNLTTYFSKNTEWGNIFHPHYLSGPSQIFVTNKDNNTIKTTLEQNDNLNKTIKELSIFTPRTLPLLVNCRYNPLADKGKGNKIYLISITSDVETWHEPKNQKLMRKDLPLWILTWGWFDWQLKLAEVHRLETEYLTVIESPYITPTLKYYVFLDSSFTNWPPSSPYGTDLNESDSQNFFPKNSYQLESINEIASCGPGVMKLGRDQSGEAHFNYRLHFKFGGCPAPMETICNPIEEEVYPIPNSKCQTTSLQSPTTPLSTYLYDFDERRQQITERAAKRIKKDTETEPDIFQITGTAMDLPTSHQKTQEETTSDEEESETEIQQQLLQLRRKQLKLKRRILTLLQMQDIE

SEQ ID NO: 1296 - protein, 98 aa, Betatorquevirus sp.
MNIEPTKWTPRQQKKEWLNFIVHVHDYHCNCDKPLEHTVFNIFEQEKQLRFNAESTALIKKCLSTDGEGLGDAEDGADALDGGTLEELFAEDFPEETG

SEQ ID NO: 1297 - protein, 61 aa, Betatorquevirus sp.
LFNDPIPPKNRRLNPQELETEIMLASWMKRPVRSFTNDPPFYPWLPIAPKVPFVNFDLGFK

SEQ ID NO: 1298 - DNA, 3136 bp, Betatorquevirus sp.
caggtaccgaaggtgagtgaaaccaccggagttaaggggcttattgggctaaagcagtcttggcggaacgggcaagaaactaaaataaactattattttacagcaatgagctcctaccttacaccagttatctacagcaagaatgctttagaaaaccagtgggtaaatactattttcaacacacacgatctttgctgtggatgcaacgacgccattaaacacctagccgccattttacaaagaaaaggaacacaactatgcctcccttcaacttctaccggagacgctactacccaaaccgatggagacgccgtagatactttagacgccggagatttagaccttctattcgccgaagattttggagaagacgaacggtaagaagacgccgtttttttaaaaaatataaaagaaaacttactaaaattaaacttaaccaatggcaaccacaaactataaacaaatgccacataaaaggaaatctttgtgcttttacttgtggaagaggtagagaaaaccacaattttattttaacacaagaaagctatgtacctacatctcaacctggagggggatcttggtctatactacaatttaccttaagagtactatatgatgaacataaagcaggcagaaattggtggacaaaaggaaatacaggtttaccacttgtaagatatatactatgcaaacttaaattttacagaagtaaagacacagactacctagtaacaatacaaagaacaccacctttcgaagtaactagagactcatacttaagcacacaaccatctagacacttaatgcaccacaaatctattatagttcctaaactaggaagaggaccaaacaaaaaaacatatataaaaagaaaagttctccctccagcaatgtttcaaaacaaatggtactttcaacaagacatatataatataccattttttatgttaaccatttcagcactagaactagatcaaatgtacgccccagaagaccaaataagctcaaatataacacttatatcactaaatacaaatgcatttcaaatgagtaactgggaacgacaaccatacagcacaaaatcagcaggaacatataacatatacttatggagttaccaaaatggtgacgataaagataaaaaatggcaaaacatatattttttaggaaactgtaaagaatacacagaaggaactaagttaaatacattgcaagactgcaaagaggtagcagaaattaaaaataaacaaaaatggggaaatccatttacacactggtataaccataaagatgcaagaatattttatggtgctataccaacaacaacacaacaaaacgatgatgctaacatattagaattagaagatttgtttatagaatgcagatacaacccatttaaagacaaaggcacaggaaacaaagtatacttagtacccacagacacaggcctaggtagctttttaacattaccaacaaaaaatgaattattaatagaaaatttaccactatggcttatattttggggttgggcagactggataaaaaagtctaaaccaatagcacacttagaagaagaataccaaataataatacaaactccatatatatttccaaaattaccatgttatgtactaacagacaaatactttctacacccaccaaatgacggaacacacacaaccacactatcacaaacagaccaactacattggcacataaaatacaactttcaagaacaacaatttaacttactagcaaaaacaggaccagcagcaccaaaaataaatgaagttaaacaaatagaagcacactttaactataacttttattttaagtggggaggaagcccagctccaatggaacaaattagtgacccagcagaccaagaaaaattccccacgcccaatacgcaactccaaagacttgagattgagagtccaacaaaacccaaacaacacttcttgtacaccttcgacgaaaagcgacacacactcacactcaaagctgcaaaaagacttaaaaaagactattcaactccaacattttttacagactttggagcaaaagacatcccgctcaaagcacaaacggaaagcgacagctcatcggaggaggaagaaatccaaacatcactccagagagaagacaaactcaagcagtacctccagcgaaagcgactccagtacagacagcgaatccacaacctcctaaaaacaaaaaaattattccccctttaagagacatgtttggacaaccttactataaaaaccgtagatttaatgctaaagaatttgaacaagaattgcttgatgctaaatgctggaaaagacgccccagactgtatatctttgataaacctgattatgaattacctactattgaaccacttgtaaacattggtgtaaatttttcattaaactttaaagagtaggccagcaaatattcacttgtcggtgtcagtttatataagtaataaccttaataaacatccatcacctccctaatacgcaggcgcacaagggggctccgcccccttaaacccccaagggggctccgcccccttaaacccccaagggggctccgcccccttacaccccctaattaatattcaacaggaaaaccacctaattataattgccgaccacaaactgtcaaccgttgcatatacttccctaaattaaactgcacttctgctttttcagaaacactcccactaattcattaataatcagacgctattcctgggaggagcaacacatctatataaccaagataaacatccaccacactccctaatacgcaggcgcacaagggggctccgcccccttaaacccccaagggggctccgcccccttaaacccccaagggggctccgcccccttacaccccctaattaatattcaacaggaaaaccacctaattataattgccgaccacaaactgtcaaccgttgcatatacttccctaaattaaactgcacttctgctttttcagaaacactcccactaattcattaataatcagacgctattcctgggaggagcaacacatctatataaccaagtgcactgacgaatggctgagtttaccccgccagacggagaccagacaggacactgactgggctgcttttggg

SEQ ID NO: 1299 - protein, 659 aa, Betatorquevirus sp.
MPPFNFYRRRYYPNRWRRRRYFRRRRFRPSIRRRFWRRRTVRRRRFFKKYKRKLTKIKLNQWQPQTINKCHIKGNLCAFTCGRGRENHNFILTQESYVPTSQPGGGSWSILQFTLRVLYDEHKAGRNWWTKGNTGLPLVRYILCKLKFYRSKDTDYLVTIQRTPPFEVTRDSYLSTQPSRHLMHHKSIIVPKLGRGPNKKTYIKRKVLPPAMFQNKWYFQQDIYNIPFFMLTISALELDQMYAPEDQISSNITLISLNTNAFQMSNWERQPYSTKSAGTYNIYLWSYQNGDDKDKKWQNIYFLGNCKEYTEGTKLNTLQDCKEVAEIKNKQKWGNPFTHWYNHKDARIFYGAIPTTTQQNDDANILELEDLFIECRYNPFKDKGTGNKVYLVPTDTGLGSFLTLPTKNELLIENLPLWLIFWGWADWIKKSKPIAHLEEEYQIIIQTPYIFPKLPCYVLTDKYFLHPPNDGTHTTTLSQTDQLHWHIKYNFQEQQFNLLAKTGPAAPKINEVKQIEAHFNYNFYFKWGGSPAPMEQISDPADQEKFPTPNTQLQRLEIESPTKPKQHFLYTFDEKRHTLTLKAAKRLKKDYSTPTFFTDFGAKDIPLKAQTESDSSSEEEEIQTSLQREDKLKQYLQRKRLQYRQRIHNLLKTKKLFPL

SEQ ID NO: 1300 - protein, 91 aa, Betatorquevirus sp.
MSSYLTPVIYSKNALENQWVNTIFNTHDLCCGCNDAIKHLAAILQRKGTQLCLPSTSTGDATTQTDGDAVDTLDAGDLDLLFAEDFGEDER

SEQ ID NO: 1301 - protein, 62 aa, Betatorquevirus sp.
MFGQPYYKNRRFNAKEFEQELLDAKCWKRRPRLYIFDKPDYELPTIEPLVNIGVNFSLNFKE

SEQ ID NO: 1302 - DNA, 3136 bp, Alphatorquevirus sp.
cggctgcgcgcggtgagtttacacaccgcagtcaaggggcaattcgggctcgggactggccgggccatgggcaaggctcttaaaaaggcatgtttctcggtaaactttacagaaagaaaaggaaagtgccactgtccgcagtgccagtcgctccgaaaaaaccaactgttatgagcagtgtgtacagaccgccggcccacgatgttcgagggcaagagcagcagtggtttcgagcctgtatgcactctcacggcgcctggtgtggttgtggtaactttattctgcatatatcttctgttgctgcacgtcttaactttcagggaggtcccgctccccccggaggcccccagagagagagaggcccagtaagagccctccttcctctgccggctgtgccccaagagggggtcgagcgtaacccatggcctactggaactggtggcgccgccggtggttccggccgagacggaggagatggcgaacgtggaggacccgccgtcgcagacgagtaccgcgaagaagacctcgacgagctgttcgccgctatcgaaagagaagagtaaggaggcggcggtggcgggggaggcggtacaccagacgggggcgactcagactaagacgcagacgcagacgcaggggcaaaatatatctagcccagtggaacccccagacagtgcgacgctgcagaatcagaggcatgatgcccttcatatgggccggggcaggtacaggaggtagaaactatgcagtccgctcagacgacaccgttataaaagggggcttcggaggctccttcggaacagagacattttccctgagggtcctctttgaccaatacaccaggggcatgaacaggtggtcctacagcaaccaagacctagatctcgccctatatcacgggtgtactttcactttctatcgccacaaagttacagactttatagtatactttactaacaaccctccactaaagaccaaccagcacacggctccccttacccatccgggcatgctaatgagatcaaaatttaaagtattaattcctagctttgctactaggcccaagggcagaaagacagttaagataaagatccgcccaccgaaactatttcagcacaagtggtatgcgcaatctgacctgtgtgccgttccccttgtgcaacttaacctaaccgcagctgatttccaacatccgttcggctcaccactaactgacactccctgtgtgcaattccaagtactgggggacctctataacaaagtgcttaatattgatctgccccaattaagctctgatggatcgcgtgcagaatttgtagttgctacaggacaacagtccaacattgaagcccttaaaaacctctatacacagctattcctctctaacgactctggccactactggcagacatttctcactaatcccatggtaaagtcacacatagatgcaaagcacgccaaaccttctacatatacacaaacagacccaacacaacaacaaagtcaaaaaccctttcccacagtaccaacatcatctgaattccaaaattggcaacaaaaatttatagacagaagagactctctttttctctttgccacctatcaccccaaagagatagccactactataaagaaaatgagagacaacaactttgctctctgcacaggccccaacgacatatacggagactatacatcacagtactctagatccacacacctcctagactactacctgggaatatacagtccaatattcttaaacccaggtagatcaaacatagaatttttcacagcctttaaagacatagcatacaatccactactagacaaaggaaagggcaacctaatatggtttcagtaccacacaaaaacagacaacatattctcaaaacccagctgcaagtgggaaattgaagattatcctctgtgggcagcctgccacggatacatagactacctagagactcaaataaagtacggagacctaaaactagaaggcaaagtacttataagatgcccctacacaataccgcccctcatagacaagacagactccaacgccggtttcgttgtctacaacgccacttttggcatgggcaagtggacagatggcagtggctacatccccctcaaagagagggggagatggtacgtaatgctcaggtaccagactgacgtattgcatgacatagcgacgagcggaccgtgggcctacagagacgacgaaaaaaactcccagctggtgggtaaatacaaatttaacttcacctggggtggcaataccatacattcacagatcatcagaaatccctgcaaagacgaccaacttgcccaccccagtcgacagcctagggaagtacaagtcgttgacccgcaactggtcggacccccgtgggtcctccactccttcgaccagagacgaggcttctataatgacacagctatacgacgtctgttacagcaaccaatgcctagcccagatgttgctccccgcaacaaaagacccttactctttatacccccagtgttccaagaccccgcaggtgtcgaaaacgactccggttcaccggccaaaaagtcgagactctggcaagaagagagttcgatacagacggggtcgcagccctcggaagaccagaaggagacgacgagggagctcctcgagcgaaagctcacagagcagaagctcatccaccagcaactccgacacctcgcagtccagctcgccaaaacccaggcggggatccacataaacccccttttgttatcttccccgctacaaacaaggtagagatgtttcccagtattaaaaaaagaactcccactaagggagactgggaaacagagtatcaggcctgcgcggccttcgacaggcctccccgcagcgacctcagtcgcccaccacactatccatacctacccaccagctgcaaagttaccttccgtcttggcttcaaaccctaactcaaataaagctctctctcaactgtacgttggccgtgggagtctcacttagcggtgtctacctcttaaggtcaccaagcactccgagcgtcagcgaggagtgcgaccctagtcagtgcacatccccctgccctggtgcaacgccctcggcggccgcgcgctacgcctt

SEQ ID NO: 1303 - protein, 790 aa, Alphatorquevirus sp.
MAYWNWWRRRWFRPRRRRWRTWRTRRRRRVPRRRPRRAVRRYRKRRVRRRRWRGRRYTRRGRLRLRRRRRRRGKIYLAQWNPQTVRRCRIRGMMPFIWAGAGTGGRNYAVRSDDTVIKGGFGGSFGTETFSLRVLFDQYTRGMNRWSYSNQDLDLALYHGCTFTFYRHKVTDFIVYFTNNPPLKTNQHTAPLTHPGMLMRSKFKVLIPSFATRPKGRKTVKIKIRPPKLFQHKWYAQSDLCAVPLVQLNLTAADFQHPFGSPLTDTPCVQFQVLGDLYNKVLNIDLPQLSSDGSRAEFVVATGQQSNIEALKNLYTQLFLSNDSGHYWQTFLTNPMVKSHIDAKHAKPSTYTQTDPTQQQSQKPFPTVPTSSEFQNWQQKFIDRRDSLFLFATYHPKEIATTIKKMRDNNFALCTGPNDIYGDYTSQYSRSTHLLDYYLGIYSPIFLNPGRSNIEFFTAFKDIAYNPLLDKGKGNLIWFQYHTKTDNIFSKPSCKWEIEDYPLWAACHGYIDYLETQIKYGDLKLEGKVLIRCPYTIPPLIDKTDSNAGFVVYNATFGMGKWTDGSGYIPLKERGRWYVMLRYQTDVLHDIATSGPWAYRDDEKNSQLVGKYKFNFTWGGNTIHSQIIRNPCKDDQLAHPSRQPREVQVVDPQLVGPPWVLHSFDQRRGFYNDTAIRRLLQQPMPSPDVAPRNKRPLLFIPPVFQDPAGVENDSGSPAKKSRLWQEESSIQTGSQPSEDQKETTRELLERKLTEQKLIHQQLRHLAVQLAKTQAGIHINPLLLSSPLQTR

SEQ ID NO: 1304 - protein, 157 aa, Alphatorquevirus sp.
MFLGKLYRKKRKVPLSAVPVAPKKPTVMSSVYRPPAHDVRGQEQQWFRACMHSHGAWCGCGNFILHISSVAARLNFQGGPAPPGGPQRERGPVRALLPLPAVPQEGVERNPWPTGTGGAAGGSGRDGGDGERGGPAVADEYREEDLDELFAAIEREE

SEQ ID NO: 1305 - protein, 125 aa, Alphatorquevirus sp.
LARREFDTDGVAALGRPEGDDEGAPRAKAHRAEAHPPATPTPRSPARQNPGGDPHKPPFVIFPATNKVEMFPSIKKRTPTKGDWETEYQACAAFDRPPRSDLSRPPHYPYLPTSCKVTFRLGFKP

SEQ ID NO: 1306 - DNA, 3136 bp, Betatorquevirus sp.
cgggagctgaaggtgagtgaaaccaccgaaatctaggggcaattcgggctagatcagtctggcggaacgggcaagaaacttaaataatattatttttcagatgagcaaatttctacaagaacctatttactccaaaagaggactacaaaatcaatggattaacctaatttacacttcgcatgatatgatctgtggatgcaacaagccaattgatcacctacaagacatcttaaaacaacaaaaatgcctcccttcaaccgccgccgctacggctacagaagatggtggaactacagaaaacctagagcctactatcgacgaaggagatttggaaaagctgttttcagaagaaaacgacgtagacgaagggtaagaagaaaaaacttttttaaacataaaaaaactaaaactgttaaaataagacaatggcaacctactagcattaaaaaatgtaaaatacaaggctacctatgcatgtttcaagcaggcccaggtagatatggaaataactatgctctatggaaagaatcattctttccacaacattatcccggaggcggaggatggagtatacaacaattaagtttgggaactttatttaaacaacacacagaatatatgaactattggactaaaagtaatgatagaatgaacctatgtagatatatgggatgcagtatacaactgtttagagaaccatatactgactggatatttacatactttgataatattcctaaaactgtaaacaaatggttttatgcttcacaccaccctataaaacttttaacaacaaaaagaaaaagaacaatccctagctttcaaacccaaccacataaaagaaagccatataaaaccatgtttataccacctccaaaactaatgaaaaaccaatggttttttcaatctaacctagcagactatccccttataacatttgccgcctcagcatgcagtttaacaggaatgtttggcagcacaaaatcaattagtaacaacgcaacattttactgcctagacactaaacaatttacaacaccaacatttcaatggagatccacaaaaccagaaacagaatggggatacacatacggcacaaactacctatacggcctacaacatccatttgaaacatggacacaaaataaagacatagatggaacatatttaggaaacacaatgaaacaacaaagtggaataccaatgacacaccaatcagcagccacatatacagtagacaaatggggaaaccccttttactggcaatatgcatcaggagactatccactttttacctcaacaaacacaccaaaaaaaataatagaaagtggaggaacaaaactaacagaaggccaaaagaaggactcacactatatatttaaagctagatacaatccatttcatgacaaaggaaaaggcaatgtagtatactttttaccaacttatgacaaatccaaaacagactgggaaccactatcagaccctgacttaaaatttgaaaactttccactatggttaacatgctggggaattgaagacattttaaaaagaatgggaaaatgtcataatttagatatagactgggtaatggtaataaaatccagctatattttaccacctgaaaaagcatatgttatattaagctatgactttgtacacggaaggggaccatatgatacagaaaaagaatttatgactactgatgacttaacacactggtacccaagatttaaatatcaaagacaagctatagacaacttaataagaactggtccagctgtagctactggagataatgtacaaaatatacaagctaaaattaaatacaactttttctttaagtggggaggcaactcatcaccacaagaaactattcgagatcccaacagccagcccatcacccctagtcccgataacatctacagcaacaatgaaatcattgatccgtcaacagacattacaacagaaatatacccatgggactttagacgagatatgcttacagaaacagctacagaaagaattaaacaaagctcaactaatgaacaaattatgtttacagatggaagacaaactacaacggacgtccccctgcaaacaaaaacacaagagaaagagacccaggaaacacaagaaaagacattactccagcagctcaaccagctccaacaatacaacctgcaactccagcaccgactccgaaagctaaaacaattatctatggacctataaaccgtgtagaattgtttaaaactaaacgtaaaaataggagactaactccttatgaagcagaaacagatctgcaattagcaaaatggttacatagacctctaagacaatattttgatgatccccctttttacccatggttaccgccagcaccaaaagtttgctttgaccttgtaaaaggatttaataaaggccagcattaattcacttttcgagtctgtttatttaagtttaaacttatacaaacatccaccgcctccctaatacgcaggcgcacaagggggctccgcccccttaaacccccgggggggaaacccccccctaacccccccaaaaaaccacaaaattagcattgccgaccacaaacggtacaggaaaccacaaaatttgcattgccgaccacaaaccgtcatttacttctcctttttacaaaacttccttttttactaattattattcattaaattaattaataaacaccgtaattccggggaggagcaaacactgtatataactaactacacttccgaatggctgagtttatgccgccagacggagacagccaccgcctccctaatacgcaggcgcacaagggggctccgcccccttaaacccccgggggggaaacccccccctaacccccccaaaaaaccacaaaattagcattgccgaccacaaacggtacaggaaaccacaaaatttgcattgccgaccacaaaccgtcatttacttctcctttttacaaaacttccttttttactaattattattcattaaattaattaataaacaccgtaattccggggaggagcaaacactgtatataactaactacacttccgaatggctgagtttatgccgccagacggagacaggatcactttagtgactccgggctgatcttggg

SEQ ID NO: 1307 - protein, 662 aa, Betatorquevirus sp.
MPPFNRRRYGYRRWWNYRKPRAYYRRRRFGKAVFRRKRRRRRVRRKNFFKHKKTKTVKIRQWQPTSIKKCKIQGYLCMFQAGPGRYGNNYALWKESFFPQHYPGGGGWSIQQLSLGTLFKQHTEYMNYWTKSNDRMNLCRYMGCSIQLFREPYTDWIFTYFDNIPKTVNKWFYASHHPIKLLTTKRKRTIPSFQTQPHKRKPYKTMFIPPPKLMKNQWFFQSNLADYPLITFAASACSLTGMFGSTKSISNNATFYCLDTKQFTTPTFQWRSTKPETEWGYTYGTNYLYGLQHPFETWTQNKDIDGTYLGNTMKQQSGIPMTHQSAATYTVDKWGNPFYWQYASGDYPLFTSTNTPKKIIESGGTKLTEGQKKDSHYIFKARYNPFHDKGKGNVVYFLPTYDKSKTDWEPLSDPDLKFENFPLWLTCWGIEDILKRMGKCHNLDIDWVMVIKSSYILPPEKAYVILSYDFVHGRGPYDTEKEFMTTDDLTHWYPRFKYQRQAIDNLIRTGPAVATGDNVQNIQAKIKYNFFFKWGGNSSPQETIRDPNSQPITPSPDNIYSNNEIIDPSTDITTEIYPWDFRRDMLTETATERIKQSSTNEQIMFTDGRQTTTDVPLQTKTQEKETQETQEKTLLQQLNQLQQYNLQLQHRLRKLKQLSMDL

SEQ ID NO: 1308 - protein, 104 aa, Betatorquevirus sp.
LAERARNLNNIIFQMSKFLQEPIYSKRGLQNQWINLIYTSHDMICGCNKPIDHLQDILKQQKCLPSTAAATATEDGGTTENLEPTIDEGDLEKLFSEENDVDEG

SEQ ID NO: 1309 - protein, 62 aa, Betatorquevirus sp.
LFKTKRKNRRLTPYEAETDLQLAKWLHRPLRQYFDDPPFYPWLPPAPKVCFDLVKGFNKGQH

SEQ ID NO: 1310 - DNA, 3136 bp, Gammatorquevirus sp.
cgggagcccgaggtgagtgaaaccaccgaggtctaggggcaattcgggctagggcagtctagcggaacgggcaagaaacttaaaatgtatgttttttcagatggctcacttttttaaaccaacaaaatataatggtgatacaaaaggtcaaatgtggctttctattgtaggagatgcacatgacattcactgtggctgtgatcaaccatttgcacatcttctacagtctatttttccagaaggccataaagacaggcatttaactgtagaccaaataatcaccagagactataaatcatgccattttggtggagaagaagaagaagaccatggtatggccgctggtacaagcgccgctacactcgcaaatttaaaagaagaagaagaaaaagaagatttccaagaaggaaatatagaagaactactcgccgccgccgcagaggcagaggcaaggtaaggagaaaaagaaagaccttacctgttagacaatatcaacctgactgtataagaaaatgtaaaattaaaggagtagcagtacacatagctggagcagcaggaaaacaattctcctgctatacagataactcacagtcatggacacctgaactacaacctgggggagggggatttggagtagagaaatttacactgcaagacttatatgacagaaaccagtatggaacaaacatatggacacaaagtaataaaatgctagacctagcaagatacactggaggatatattaaattttggagacatccacacatagactttatagctaaatatgacagaacattacctatgaaactagagaacagcacatacccaggcacatacccactagccatgctactgggtaaacataaaaaaattatacctagcctagctaccagaccacatggaaaaagatatgttaaaattaaatttggacctcctaaactactaacaaacaaatgggtttttcaagaaacactggctaacactgggttattaagactacaaacaagtgtaatagatttaagatatccacacttaggttgctgtaacacaaacagactaatctcaatctatggaattaatttagaattttacagatactttgcatgggggaaccctactaacccatatgtagctacagctaacagatggtatgtaccatacaacaatgccaaagctacattaaccttagatccagacacctctaaacaaacatcagtaacaatagttgataacaactatttacaaagcatagcatacaacaatggttggtttcagccaagactactgcaagctaaaaaaattaaagaagaagagcaaataccattaactgcttgtagatacaatcctatgagagaccatggtataggaaataaaatatggcttgcaagtgttcttaacagctcttaccaaccacctagaacagacaaagacttaatactagaaggcctaccattatatcagctgtgcctaggctttttagactatgttcaaaagcttaaaaaagaccctaaatttttagatagctactgctttttcatgcagagccaagcactagaaccacaacacagccaataccacatgttttgtcctatagatcaaagctttataaatggcaaaggaccctatgactcctacctaggagtatgggacagagcacactggtttcctactattaaacaccaacaaaaaacaattaatgccatagtatcatgtggcccatttatgcctaaactagataatcaaaaaaacagcacctgggaactatggtcctcttattgttttaattttaagtttggtggagccacactgccagacccagaaacagcagatccagagctacaaggcacataccccgttcccaataaccagcaacaaacagtacaaattactaacccgcaaaaaaccacagcctttacaaccttacactcatgggactacagaagaggaattattacaagctcagcttataaaagaatgtgccaaaaccaagaaactgatacagatttccaaacagatggagagcccccacaaaaaaagaaaaaggcataccagggaaatgctctccccatcgaagaagaggagaaccaaaaaatcaagagctgtctccgctcgctctgcgaagaaagttcatgccaagacttccaagaaacatcagacctcagagagctcatcaaccagcaacacctcaagcagcagcaaatcaagcacaacctcctccagctcatagtagatttgaaaaacaaacagaaagctctacaactacagacgggaatattagactaacaaaatttaaaaaaggatttgaagaagacactgagagggaagtagcagctgcatttaaaagaccaccaagaacctacaaagaagaccctcccttttacccttggctaccctgtgtacccaaagtatgttttaaacttaatttcaaaggctaggcctccaattttcacttggtggaggcagtttatataagcagcacaccaaaaaaaatgtaaaataaaaaaaaaaaaaaaaaaaataaaaaattgcaaaaattcggcgctcgcgcgcgctgcgcgcgcgcgagcgccgtcacgcgccggcgctcgcgcgccgcgcgtatgtgctaacacaccacgcacctagattggggtgcgcgcgctagcgcgcgcaccccaatgcgccccgccctcgttccgacccgcttgcgcgggtcggaccacttcgggctcgggggggcgcgcctgcggcgcttatttactaaacagactccgagttgccattttgccccccctaagctccgcccccctcatgaatattcataaaggaaaccacaaaattagaattgccgaccacaaactgccatatgctaattacttccccttttactttgtaaaaaggggaagtgggggggccccccctacgtcacaggccacgcccccgccgccatcttgggtgcggctgggcggggattaaaatggcgggacccaataaattcatactttcactttccaattaaagcctgccacgtcacaggaaaggggtggagacttcaaaactatataactaagtgtagtgacgaatggctgagtttaccccgctagacggtgcagggaccggatcgagcgcagcgaggaggtccccggctgcccaaggg

SEQ ID NO: 1311 - protein, 661 aa, Gammatorquevirus sp.
MPFWWRRRRRPWYGRWYKRRYTRKFKRRRRKRRFPRRKYRRTTRRRRRGRGKVRRKRKTLPVRQYQPDCIRKCKIKGVAVHIAGAAGKQFSCYTDNSQSWTPELQPGGGGFGVEKFTLQDLYDRNQYGTNIWTQSNKMLDLARYTGGYIKFWRHPHIDFIAKYDRTLPMKLENSTYPGTYPLAMLLGKHKKIIPSLATRPHGKRYVKIKFGPPKLLTNKWVFQETLANTGLLRLQTSVIDLRYPHLGCCNTNRLISIYGINLEFYRYFAWGNPTNPYVATANRWYVPYNNAKATLTLDPDTSKQTSVTIVDNNYLQSIAYNNGWFQPRLLQAKKIKEEEQIPLTACRYNPMRDHGIGNKIWLASVLNSSYQPPRTDKDLILEGLPLYQLCLGFLDYVQKLKKDPKFLDSYCFFMQSQALEPQHSQYHMFCPIDQSFINGKGPYDSYLGVWDRAHWFPTIKHQQKTINAIVSCGPFMPKLDNQKNSTWELWSSYCFNFKFGGATLPDPETADPELQGTYPVPNNQQQTVQITNPQKTTAFTTLHSWDYRRGIITSSAYKRMCQNQETDTDFQTDGEPPQKKKKAYQGNALPIEEEENQKIKSCLRSLCEESSCQDFQETSDLRELINQQHLKQQQIKHNLLQLIVDLKNKQKALQLQTGILD

SEQ ID NO: 1312 - protein, 122 aa, Gammatorquevirus sp.
MFFQMAHFFKPTKYNGDTKGQMWLSIVGDAHDIHCGCDQPFAHLLQSIFPEGHKDRHLTVDQIITRDYKSCHFGGEEEEDHGMAAGTSAATLANLKEEEEKEDFQEGNIEELLAAAAEAEAR

SEQ ID NO: 1313 - protein, 111 aa, Gammatorquevirus sp.
LSPLALRRKFMPRLPRNIRPQRAHQPATPQAAANQAQPPPAHSRFEKQTESSTTTDGNIRLTKFKKGFEEDTEREVAAAFKRPPRTYKEDPPFYPWLPCVPKVCFKLNFKG

SEQ ID NO: 1314 - DNA, 3135 bp, Alphatorquevirus sp.
cgggagccgaaggtgagtttacacaccgcagtctaggggcaattcgggcacgggtctggccgggctatgggcaaggctcttaaaaaattaccccggtgtgttctccgccaggacaacaagtcatgccgtggcgaccgccggtgcataacatcccgggtagagaaaatcaatggtttgcaagcttctttcacgggcatgcttctttttgcggttgtggtgaccctgttgggcatcttaacggcattgctcatcgctttcctcacgccgctccaccgagaccacctccagggctagagcagccaaacctcggagggccggaaggtcccggaggtcccccggcacccctgccagctctgcctgccccggcagagcccgacccggcaccacgccgtggtggtggggccgatggaggcggcgccgctggggccgccgccgccgcagaccatggaggatacgacgaaggagatctagaagatcttttcgccgccgcggccgaagacgatatgtgagtaggcgggggcgccgccgcagattctggcgcagacgcagacggggcagacgcagggggcgacgaaagacacacaaacccactattgtactcagacagtggcaacctgacgtagtgagaccctgcaaaataacaggatggatgccccttattatctgtgggtcaggaagcacccagttcaacttcataacccacatggatgactttccccccatgggctacacctacgggggcaattttacaaatgtaaccttctcattagaggccatatatgaacaatttctttaccacagaaacagatggagctcctccaaccatgacctagaccttgccaggtaccagggaaccaccctaaaactatacagacacgaatacctagactacatagtcagctacaacagaacaggcccttttcagatcagcgacatgacctacctcagcactcaccctgctatgatgctacttcaaaaacatagaatagtagtacccagctttaaaacaaagccaagggggcgcaggtccataaaaattagaataaagcccccaaaactaatgctaaacaagtggtacttcacaaaagacatttgcagcatgggactcttccaactacaggccacagcatgcaccttaaacaacccctggctcagagacaccaccaagagccctgtcataggctttagagtccttaaaaactcctactactcagacctttctaacttagcagatgaagagtctgagaacagaaggcgaggaattattaaccacctccacccacaaacactaacaggctcaccaccaaatgccaaaggatgggaaatcacttacacaagactaatgggacccacatactacaaatcagtaccaagcagcacatacaattggctaaattatcaaacacactatgctacagtttataatgcgtttgcaaaagaaaaaagcgcaaaattagacacaataaacaaggaataccattaccactaccccacatatgcaataaaagactttaaaacaaattcaacacttacacatgactatggcatatacagtccctactacttaacaccaaccagaataagcttagactggcaaacaccatggacatatataagatacaacccactagcagacaaaggcctaggaaacatagtatacgctcagtggtgctcagaaaaaacacccaatgtcagcacaactaaaagcaaatgcataatgaaagacctaccactatggtgcatattctatggctacatagactgggtaattaaaagcaccggagtaagctccgctgctacagacatgagaataatgataataagtccttacactgacccagcacttatagggtcaactccagaccaaggctttctgccagtaagtgacaccttttgcaatggagacatgccgtttcttgcaccatatgtgccaatcaagtggtgggttaactggtacccttgcattgcacaccaaaaggaagtgtttgaggcaattgttaactgtggaccgttcgtcccacgagaccagacgaaaccctcttgggaaattaccttaggttacaaaatgaactggaaatggggtggctctcccctgccttcacaggcaatcgacgacccctgccagaagcccacccatgagcttcccgaccccgatagacaccctcgcatgctacaagtctcagacccgacaaagctcggaccgaagacagtgttccacaagtgggactggagacgtgggatgcttagcaaaagaagtattaaaagagtccaagaagactcaagcgatgatgaatatgttgcagggcctttaccacgaaaaagaaacaagctcgacaccaggaccgcaggtcttcaaacccccgaaaaagaaagttacactttactccaagccctccaagactcggcggaagagagcccctcgagccaagaacaagcaccccaagaagaaaaccaaaaagaggcgctcctacagcagctcgagctccaaaagcagcaccagcgagtcctcaaacgaggcctcaaactcctcctgggagacatcctccgactccgccgaggagtccactgggaccccctcctgtcctaattcagggtccttctatcccagacctgcttttccctaacacacaaaaaaaaaaactattttccaactacgactgggtgtgcgagtacgagctggccaaatggatggatcgccccttgcggcactacccatcagacccccctcactacccctggctaccaaaaaagcctgctacccctcctacatgtagagtaagtttcaaattaaagctcgatgcctaaaattcaaggccgtgggtgtttcacttcatcggtgtctacctctaaaagtcactaagcactccgagcgtaagcgaggagtgcgacccccctgcccggtagcaacttcctcggggtgcttaatccaccgcgcatgcgcaaccacgcccccgccgccattttgtgcagcccgccaattttattttaaacagaccaatcagctactactttgtgcacttcctggggcgtgtcctgccactgtatataaacagaagcggtgacgaatggtagagttttttctcgcccgtccgcggcgagagcgcgagcgaagcgagcgatcgagcgacccgtggg

SEQ ID NO: 1315 - protein, 645 aa, Alphatorquevirus sp.
MPLIICGSGSTQFNFITHMDDFPPMGYTYGGNFTNVTFSLEAIYEQFLYHRNRWSSSNHDLDLARYQGTTLKLYRHEYLDYIVSYNRTGPFQISDMTYLSTHPAMMLLQKHRIVVPSFKTKPRGRRSIKIRIKPPKLMLNKWYFTKDICSMGLFQLQATACTLNNPWLRDTTKSPVIGFRVLKNSYYSDLSNLADEESENRRRGIINHLHPQTLTGSPPNAKGWEITYTRLMGPTYYKSVPSSTYNWLNYQTHYATVYNAFAKEKSAKLDTINKEYHYHYPTYAIKDFKTNSTLTHDYGIYSPYYLTPTRISLDWQTPWTYIRYNPLADKGLGNIVYAQWCSEKTPNVSTTKSKCIMKDLPLWCIFYGYIDWVIKSTGVSSAATDMRIMIISPYTDPALIGSTPDQGFLPVSDTFCNGDMPFLAPYVPIKWWVNWYPCIAHQKEVFEAIVNCGPFVPRDQTKPSWEITLGYKMNWKWGGSPLPSQAIDDPCQKPTHELPDPDRHPRMLQVSDPTKLGPKTVFHKWDWRRGMLSKRSIKRVQEDSSDDEYVAGPLPRKRNKLDTRTAGLQTPEKESYTLLQALQDSAEESPSSQEQAPQEENQKEALLQQLELQKQHQRVLKRGLKLLLGDILRLRRGVHWDPLLS

SEQ ID NO: 1316 - DNA, 3133 bp, Alphatorquevirus sp.
cgggagccgaaggtgagtttacacaccgcagtctaggggcaattcgggcacgggtctggccgggctatgggcaagactcttaaaaaatttcctcgctctgtactccgccaggacaccaagtcatgccgtggtctccgccgaggcataatatcagaacaagagaagatctctgggtgcaatcagttgtttactcacatgacactttttgtggctgtgatagtgttcttcagcatcttactagcctcctgggtggcctacaaccagctccacctagagacccagcaccccctgccatacagagcctgccggcactgccgccagctccccaaccctctgaacaaccacggcgtggtggagatacagacgaagaccgtggagaagatggaggagacgccgctggggcctacgaaccaggagacctagaagaacttttcgccgccgccgaggaagacgatatgtgagtagagggcggcgccgccgatacaggcgcagacggagacgggggcgacgcacaaggggacgcagacgcaggcacagaaagacactcattgtcaggcagtggcaaccagacgttattaagagatgctttattactgggtggctacccctaattatctgtggaaacggacacacccaatttaactttataactcacatggacgacattccacccagaaatgcgtcctatgggggcaactttacaaatgtcacctttaaccttgcctgcttctatgaagaattcatgcaccacagaaacagatggtcagcttccaaccatgacctagaactggtcagatacctgagaaccagcctaaaactctacagacacgagtcagtagactatgtacttacctacaccaccacaggcccattcgagacaaatgaaatgtcctacatgctcactcaccctctagccatgcttctcagcaaaaaacatgtagttgtacccagcctaaagacaaaaccacacggcagaaagtacaaaaagataacaattaaaccaccaaaactaatgctaaacaaatggtactttgccaaagacttctgccacataggcctcttccagctctgggccacaggcctagaactaagaaacccatggctcagatcaggcacaaacagcccagttataggattttatgtccttaaaaaccaagtatatcaaaacagatacagcaacttatccacacaaacacaaaatagaaaagacgcatacgaagaactaacaaaaaaaacaagtgacgcaaaatggtataactggcagtatacatatactaaaataatgaagcctatttattatgcagctgccaatgaatctaactccacctttaaaaacaaaacttacaattggaaaaattacaaagacaattttcaacaggtacaacaaaaatgggaaagcataacaaaagacgcatacaacctagtagcagatgaatacagacaaatatacaccaccacactcacatatccaccaccatggagtcccactagcgatataaacactggcagacaatacctagagcatgactgtggaatatacagcccatattttctaacaccacaaatatacagcccagaatggcacacagcctggtcctacatcagatataatccgctcacagacaaaggcataggcaacagagtctgtgtacagtactgcagcgaggccagcagcgactacaacccagtaaaaagcaagtgcatgctacaagacatgcccttatggatgatgctatatggctatgcagactatgtagtaaagagtacaggcatacaatcagcctggacagacatgagagtagctatcagaagtccttacacagacccaaaactcataggcagctcagaaaacacaatgttcatacccataggcatagaattcatgaacggagacatgccagacaagaggccctacattccgttaaagtggtggtttaagtggtaccccatgattacacaccaaaaaaccgcacttgaggcaatagtttcctgtagcccgttcatgcccagagatcaggaacaagccagttgggacataactataggttacaaagcaaccttcttatggggcgggtcccccttacctccacagcccatcgacgacccctgccaaaaatccacacacgaacttcccgatcccgatagaaaccctccaagaatacaaatctcagacccgcagcacctcggaccggcgacgctattccactcgtgggacctcagacgtggattcattaatacaaaaagtattaaaagagtgtcagaacacctcgactctaatgaatatttttcaacaggcgtcgtgtccaaaaaaccccggttcgacactccccaccacgggcagctatcaaaccaagaagaagacgccttacatatcctcagacaactccagaaagagcaagaagagaccacgtccgaagaagaacaagcactccaaaaagaagaggagcaaaaagaaaagctcctacagcagctccgagtccagcgacagcaccagcgagtcctcagggagggaatcaaacacctcatgggagacgtcctccgactcagacagggagtccactggaacccaatcctgtaatacttccaccagaaccaataccagacctcctattccccaatactggtaaaaaaaaaaaattttctcccttcgactggcagtgcgagcaagaacttgcctgcctaatgcaccgtcctatgcgtttctatccctcagacaacccgttctacccgtggctaccccccaagcgagatatcccaaaaatatgtaaagtaaacttcaaaataaatttcactgaatgaatctcgaggccccgggagtttcacttagcggtgtctacctctaaaggtcactaagcactccgagcgcaagcgaggagtgcgaccccctgcccggtagcaacttcctcggggtcccccgtgctaagtccacagcgcatgcgcagccacgcccccgccgccattttgtgcagcccgccaatttctattcaaacagaccaatcagcgtctactacgtacacttcctggggtgtgtcctgccactctatataagcaacagcggtgacgaatggtagagttttttccgcccgtccgcagcgaggacgcgagcgtagcgagcggccgagcgacccgtggg

SEQ ID NO: 1317 - protein, 640 aa, Alphatorquevirus sp.
MDDIPPRNASYGGNFTNVTFNLACFYEEFMHHRNRWSASNHDLELVRYLRTSLKLYRHESVDYVLTYTTTGPFETNEMSYMLTHPLAMLLSKKHVVVPSLKTKPHGRKYKKITIKPPKLMLNKWYFAKDFCHIGLFQLWATGLELRNPWLRSGTNSPVIGFYVLKNQVYQNRYSNLSTQTQNRKDAYEELTKKTSDAKWYNWQYTYTKIMKPIYYAAANESNSTFKNKTYNWKNYKDNFQQVQQKWESITKDAYNLVADEYRQIYTTTLTYPPPWSPTSDINTGRQYLEHDCGIYSPYFLTPQIYSPEWHTAWSYIRYNPLTDKGIGNRVCVQYCSEASSDYNPVKSKCMLQDMPLWMMLYGYADYVVKSTGIQSAWTDMRVAIRSPYTDPKLIGSSENTMFIPIGIEFMNGDMPDKRPYIPLKWWFKWYPMITHQKTALEAIVSCSPFMPRDQEQASWDITIGYKATFLWGGSPLPPQPIDDPCQKSTHELPDPDRNPPRIQISDPQHLGPATLFHSWDLRRGFINTKSIKRVSEHLDSNEYFSTGVVSKKPRFDTPHHGQLSNQEEDALHILRQLQKEQEETTSEEEQALQKEEEQKEKLLQQLRVQRQHQRVLREGIKHLMGDVLRLRQGVHWNPIL

SEQ ID NO: 1318 - DNA, 3131 bp, Alphatorquevirus sp.
ggacccccgctcgtgctgacacgctcgcgcgtgtcagaccacttcgggctcgcgggggtcgggaattttgctaaacagactccgagttgccattggacactgtagctgtgaatcagtaacgaaagtgagtggggccagacttcgccataaggcctttatcttcttgccattggtccgtgtcgggggtcgccgtaggcttcgggctcggttttaggccttccggactacaaaaaccgccattttagtgacgtcacggcggccattttaagtaagcatggcgggcggtgacgtataagttcaaaggtcaccgcgcttccgtgtttacacaaaatggtggccaacttcttccgggtcaaaggttggcaactacgtgataagtcacgtgggatggctgcgtcacaaacacggaagtggctgttccacgtgacttgtcacgtgactgctacgtcacagccgccattttagttcacaaaatggcggacttccttcctcttttttaaaaataacggccctgcggcggcgcgcgcgctgcgcgcgcgatggcgctggaggccccgccgctggcggcgccgtcgcagacgccgagtaccaagaagacgagctcaacgccctgttcgacgccgtcgaacaagaagagtaaggaggaggcgatgggggaggcggaggtggagacgggggtacaggcgcagactgagactgagacgcagacgaaagcgaaagcgcagactgatactgactcagtggcaccccgctaaagtaaggaggtgcagaatatcgggggtcctgcccatgatactatgcggggcgggcaggagtagctttaactacggactgcacagcgatgactttactaaacagaaaccaaacaaccagaacccgcacggcgggggcatgagcactgtaacttttaacctaaaagtgctctttgaccagtacgaaaggttcatgaacaagtggtcgtaccccaacgaccagctagacctggccagatacaagggctgtaaattcaccttctacagacacccagaagtagactttttagctcagtatgacaacgttccccctatgaaaatggacgaactgaccgctcccaacactcaccccgcactgctgctacagagcaaacacagggtaaagatatacagctggaaaaccaggccatttggccctaaaaaagtaacagtaaaagtagggcccccaaaattgtttgaagacaagtggtacagccagtctgacttgtgcaaggtatcccttgtcagttggcggttaaccgcatgtgactttaggtttccgttctgctcaccacaaactgacaacccttgtgtaaccttccaggtgctaggagaacagtattacgaagtatttggaacttccatattagacgttcctacaaaccataagacagaaatagacacatttgaaaattggctatataaaaaatgcacccactatcaaacatttgccacagacagcagattagccccccaaaaaaaaacaaactcacaaacgaaccaaacatataaccccagtggcaatacagaaaatgcaacatggacacaaacaaactactcctcatttaaaccaggcaacagagacagcaactatggttactgcacttacacagtaaatgaggacacattccaagccattaaaaactacagaaatcaaagattcaaatggctaacaacatacactggacaaaatcacataaacagcacatttgccaaaggcaaatatgaacaatacgagtaccacctagggtggtactctaacatattcataggcaaccttagacacaacttagcattccgcccagcatacatagatgtcacatacaaccccacagtagacaaaggcaaaggcaacattgtgtggtttcaatacctaacaaaacccaccacacagctaataagatcacaggcaaaatgcctaatagaagacctgccactatactgtgccttctttggttacgaagactacatacagagaacactaggtccttaccaagacatagaaacagtaggtgttatatgctttataagtccttacacagaacctccctgtattagaaaagaagagggcaaaaaggactggggcttcgtattttatgacaccaactttggaaacggaaagactccagagggcataggccaagtacacccttactggatgcagaggtggagagtcatggcccagtttcaaaaagaaactcaaaacagaatcgccagaagcggaccgtttagctacagagacgagataccctcagccacactgactgccaactacaagttctactttaactgggggggcgactctatatttccacagattattaagaacccctgcccagacaccgggctgcgacccagtggcaatagagagcctcgctcagtacaagttgttagcccgctcatcatgggaccagaattcatattccaccgctgggactggcgacgggggttctataatccaaaagctctcaaaagaatgcttgaaaaatcagataatgatgcagagtcttcaacaggcccaaaagtgcctcggtggtttccagcactccacgaccaagagcaagaaagcgacttcgattcccaggaaacaaggtcgcagtcctcgcaagaagaagccgctcaagaagccctccaagacgtccaagagacgtcggtacagcagcacctcctcaagcagttccgagagcagcgggtactcggacagcaactccgcctcctcatgctccaactcaccaagacgcaaagcaatctccacataaatccccgcgtccttggccttgcataaataaagtgtacatgttttccccacaaaaacccaagcgcatacacgggtaccacgggtgggaaacagagtatcaggcctgcaaagcctttaacaggccccctagaaacttcctgtcagacaaacccatctatccctggctcccccgccctcaacctgaattcaaagtcagttttaagctcggttttcaataaacaaggccgtgggaatttcacttgtcggtgtctacctcttaaggtcactaagcactccgagcgtcagcgaggagtgcgacccttccccctggtgcaacgccctcggcggccgcgcgctacgccttcggctgcgcgcggcacctc

SEQ ID NO: 1319 - protein, 755 aa, Alphatorquevirus sp.
LRARWRWRPRRWRRRRRRRVPRRRAQRPVRRRRTRRVRRRRWGRRRWRRGYRRRLRLRRRRKRKRRLILTQWHPAKVRRCRISGVLPMILCGAGRSSFNYGLHSDDFTKQKPNNQNPHGGGMSTVTFNLKVLFDQYERFMNKWSYPNDQLDLARYKGCKFTFYRHPEVDFLAQYDNVPPMKMDELTAPNTHPALLLQSKHRVKIYSWKTRPFGPKKVTVKVGPPKLFEDKWYSQSDLCKVSLVSWRLTACDFRFPFCSPQTDNPCVTFQVLGEQYYEVFGTSILDVPTNHKTEIDTFENWLYKKCTHYQTFATDSRLAPQKKTNSQTNQTYNPSGNTENATWTQTNYSSFKPGNRDSNYGYCTYTVNEDTFQAIKNYRNQRFKWLTTYTGQNHINSTFAKGKYEQYEYHLGWYSNIFIGNLRHNLAFRPAYIDVTYNPTVDKGKGNIVWFQYLTKPTTQLIRSQAKCLIEDLPLYCAFFGYEDYIQRTLGPYQDIETVGVICFISPYTEPPCIRKEEGKKDWGFVFYDTNFGNGKTPEGIGQVHPYWMQRWRVMAQFQKETQNRIARSGPFSYRDEIPSATLTANYKFYFNWGGDSIFPQIIKNPCPDTGLRPSGNREPRSVQVVSPLIMGPEFIFHRWDWRRGFYNPKALKRMLEKSDNDAESSTGPKVPRWFPALHDQEQESDFDSQETRSQSSQEEAAQEALQDVQETSVQQHLLKQFREQRVLGQQLRLLMLQLTKTQSNLHINPRVLGLA

SEQ ID NO: 1320 - DNA, 3128 bp, Alphatorquevirus sp.
cgggtgccggaggtgagtttacacaccgaagtcaaggggcaattcgggctcaggactggccgggctttgggcaaggctcttaaaaatgcacttttctcgaataagcagaaagaaaaggaaagtgctactgctttgcgtgccagcagctaagaaaaaaccaactgctatgagcttctggaggcctccgatacacaatgtcacggggatccagcacctgtggtacgagtcctttcaccgtggccatgcttctttttgtggttgtggggatcctatacttcacattactgcacttgctgaaacatatggccatccaacaggcccgagaccttctgggccaccagcagtagaccccaaccccaacatccgtagagccaggcctgccccggccgctccggagcccccacaggttgatcccagaccggccctgacatggcatggggatggtggaagcgacggaggcgctggtggttccggaagcggtggacccgtggcagacttcgcagacgatggcctagaccagctcgtcgccgccctagacgacgaagagtaaggaggcgcagacggtggaggagggggagacgaaaagcaaggacttacagacgcagcagacgctttagacgtaggagacgaaaagcaaaacttataataaaactgtggcaacctgcagtcattaaaagatgcagaataaagggctacataccactgattataagtgggaacggcacctttgccacaaactttaccagtcacataaatgacagaataatgaaaggccccttcgggggaggacacagcactatgaggttcagcctctacattttgttcgaggagcacctcagacacatgaacttctggactagaagcaacgataacctagagctaaccagatacttgggggcttcagtaaaaatatacagacacccagaccaagactttatagtaatatacaacagaagaacccctctaggaggcaacatctacacagcaccctctctacacccaggcaatgccattctagcaaaacacaaaatattagtaccaagtctacagacaagaccaaagggtaaaaaagcagttagactaagaatagcaccccccacactctttacagacaagtggtactttcaaaaggacatagccgacctcacccttttcaacatcatggcagttgaggctgacttgcggtttccgttctgctcaccacaaactgacaacacttgcgtcagcttccaggtccttagttccgtttacaacaactacctcagtattaatgcctttaataatgacgattcagacaacaatttaatagcatttttaacgaaagcatttccaacaacaggcgcaaaagcaacaagtttaaatgcactaaatacatttagaacagaaggatgcataagtcacccacaactaaaaaaaccaaatacacaatcaaacaaaccatcagcttcacaatactttgcacctttagatgccctctggggagaccccatatactataatgaagataatgaaaataaaaacattactaatataattaaaaatatactaataaaaaacatgactacataccatcaaaaacttaaagaatttccactttcataccaaggaaacaaggccttttgccacttaacaggcatatatagcccaccatacctcaaccaaggcagaatatctccagaaatatttggactgtacacagaaataatttacaacccttacacagacaaaggaactggaaacaaagtatggatggacccactgactaaagacaacaacatatataaagaaggacagagcaaatgcctactgactgacatgcccctatggactttactttttggatatacagactggtgtaaaaaggacactaacaactgggacttaccactaaactacagactagtactaatatgcccttatacctttccaaagttgtacaatgaaaagcaaaaagactatgggtacattccgtactcctacaaattcggggcgggtcagatgccagacggcagtaactacataccctttcaatttagagcaaagtggtaccccacagtactacaccagcaacaggtaatggaggacataagcaggagcgggccctttgcacctaaagtagagaaaccaagcactcagctagtcatgaagtactcttttaactttaactggggcggtaaccctatcattgaacagattgttaaagaccccagcttccagcccacctatgaaatacccggtaccggtaacctccctagaagaatacaagtcatcgacccgcgggtcctgggaccgcactactcgttccgctcgtgggacatgcgcagacacacatttagcagagcaagtattaagagagtgtcagaacaacaagaaacttctgaccttgtattctcaggcccaaaaaagcctcgggtcgacatcccaaaacaagaaacccaagaagaaagctcacattcactccaaagagaatcgagaccgtgggagaccgaggaagaaagcgagacagaagccctctcgcaagagagccaagaggtccccgtccaacagcagttgcagcagcagtaccaagagcagctcaagctcagacagggaatcaaagtcctcttcgagcagctcataaggacccaacaaggggtccatgtaaacccatgcctacagtaggtcccaggcagtggctgtttccagagagaaagccagccccacctcctagcagtggagactgggccatggagtttctcgcagcaaaaatatttgacaggccagttagaggcaaccttaaagataccccttactacccatatgttaaaaaccaatacaatgtgtactttgaccttaaatttgaataaacagcagctttaaacttgcaaggccgtgggagtttcactggtcggtgtctacctctaaaggtcactaagcccccccccccccgcggggggctccgcccccccggccccccccgtgctacgtcactaacccacgtgtctttcacagaccaatcgcagtctatgtcgtgcacttcctgggcatggtctacataattatataaatgcttgcacttccgaatggctgagtttttgctgcccgtccgcggagaggagccacggcaggggatccgaacgtcctgaggg

SEQ ID NO: 1321 - protein, 743 aa, Alphatorquevirus sp.
MAWGWWKRRRRWWFRKRWTRGRLRRRWPRPARRRPRRRRVRRRRRWRRGRRKARTYRRSRRFRRRRRKAKLIIKLWQPAVIKRCRIKGYIPLIISGNGTFATNFTSHINDRIMKGPFGGGHSTMRFSLYILFEEHLRHMNFWTRSNDNLELTRYLGASVKIYRHPDQDFIVIYNRRTPLGGNIYTAPSLHPGNAILAKHKILVPSLQTRPKGKKAVRLRIAPPTLFTDKWYFQKDIADLTLFNIMAVEADLRFPFCSPQTDNTCVSFQVLSSVYNNYLSINAFNNDDSDNNLIAFLTKAFPTTGAKATSLNALNTFRTEGCISHPQLKKPNTQSNKPSASQYFAPLDALWGDPIYYNEDNENKNITNIIKNILIKNMTTYHQKLKEFPLSYQGNKAFCHLTGIYSPPYLNQGRISPEIFGLYTEIIYNPYTDKGTGNKVWMDPLTKDNNIYKEGQSKCLLTDMPLWTLLFGYTDWCKKDTNNWDLPLNYRLVLICPYTFPKLYNEKQKDYGYIPYSYKFGAGQMPDGSNYIPFQFRAKWYPTVLHQQQVMEDISRSGPFAPKVEKPSTQLVMKYSFNFNWGGNPIIEQIVKDPSFQPTYEIPGTGNLPRRIQVIDPRVLGPHYSFRSWDMRRHTFSRASIKRVSEQQETSDLVFSGPKKPRVDIPKQETQEESSHSLQRESRPWETEEESETEALSQESQEVPVQQQLQQQYQEQLKLRQGIKVLFEQLIRTQQGVHVNPCLQ

SEQ ID NO: 1322 - protein, 164 aa, Alphatorquevirus sp.
LAGLWARLLKMHFSRISRKKRKVLLLCVPAAKKKPTAMSFWRPPIHNVTGIQHLWYESFHRGHASFCGCGDPILHITALAETYGHPTGPRPSGPPAVDPNPNIRRARPAPAAPEPPQVDPRPALTWHGDGGSDGGAGGSGSGGPVADFADDGLDQLVAALDDEE

SEQ ID NO: 1323 - protein, 65 aa, Alphatorquevirus sp.
MPTVGPRQWLFPERKPAPPPSSGDWAMEFLAAKIFDRPVRGNLKDTPYYPYVKNQYNVYFDLKFE

SEQ ID NO: 1324 - DNA, 3122 bp, Alphatorquevirus sp.
cgggtgccggaggtgagtttacacaccgcagtcaaggggcaattcgggctcgggactggccgggccccgggcaaggctcttaaaaaatgcactttcgcagaatttcagagaaaaggaaactgctactgctacctgtgcactctgcatcgcagacacctgccatgagcttcagggcgcccactctaaatgccggtcaacgagagcagctatggttcgagtccatcgtccgatcccatgatagttactgcgggtgtggtaacactgtcgctcattttaataatattgctactcgctttaactacctgcctcttacctcttcgcctctggacccttcctcgggaccgccacaacgccgcccggcgctccgcgcactcccggctctgccagcggcaccctccacccccactactagccaaccatggcgtggtggggcagatggagaaggtggccgcggcgccggtggaggagatggcggcgccgccgtagaaggagactaccagcaagaagaactcgaagagctgttcgcggccttggaagacgaccaagaaagacggtaaggaaacgccggcgccgtcccagacgcacctaccgacgggggtggcgacgcagacggtacataagacgcaggaggggacgcaaaaagaaactgactctcactatgtggaaccctaacatagttaggagatgtaacataaagggagggctgcctctactgatgtgtggagagaacagagccgcatttaactatgcctaccactcagaagactacacagagcagccattcccctatggtggaggaatgagcaccaccacattctcactcagagccctgtacgaccagtacacaaagcacatgaacagatggacgttctcaaacgaccagctagacctggccagatacaggggctgcaaattcaggttctacagacaccccacctgtgactttatagtacactacaacctggttcctcctctaaagatgaaccagttcacaagtcccaacacgcacccaggactactgatgctcactaaacacaagataataatacccagcttcttaacaagaccagggggtcgcagattcataaagataagactgcccccccctaaactctttgaagacaagtggtacactcagcaggacttgtgcaaacaaccgttagtaactctaaccgcaaccgcagcttccttgcggtatccattctgctcaccacaaacgaacaaccccaactgtaccttccaggtactacgcaagaattaccacaaagtcataggcacttcctcaaaaaactctgaggatgttacaccctttgaagactggctctataatactgcctcacactatcaaacctttgccactgaggcacaagtgggcagaatacctttctttaatccagatggctccaaaaaccaacaagcagaagcatggcaaaacaaatggtctaaaaaatcagaaacatggacaggaacaagcacatatccccacacgtcaacacagcaaatgtacaaaatcccttatgacagtaactatggctttccaacttacaaaccaatgaaagactacatgttagaaagaagagcatggagcttcaaatatcaaacagacaatccagtcagtaaaaagatatggccacaacctaccacaacaaaaccaacagtagagtactatgaataccacgcaggctggttcagtaacatattcataggccccaacagatacaatttacaatttcagacagcatatgtagacaccacatacaatccactaaatgacaaaggaaaaggtaacaaaatatggttccagtaccacagcaaagtaaacacagacctcagagacagaggcatctactgcctactagaagacatgcccctatgggccatgacctttggatacagtgactatgtcagcacacagctaggcccaaacgtggaccacgagactcaaggcctggtgtgcataatatgcccatacactgagccccccatgtatgacaagactaacccaaacagtggctacataacatatgacacaaactttggaaatggaaaaatgccctcaggaaggggccaggttccagtatactggcaatgcagatggaggcccatgctgtggttccagcagcaagtacttaatgacatctcaaagagcggaccgtacgcatacagagacgaactgaaaaactgttgcctgacgacatactataacttcatttttaactgggggggcgacatgtattacccgcaggtcattaaaaacccctgcgcagacagcggactcgttcccggtaccagtagattctctcgagaagtacaagtcgttagcccgttgtccatggggcctcagtacatcctccacctcttcgaccaaagacgcgggttctttagttcgaacgctcttaaaagaatgcaacaacaacaagaatttgatgagtcttttacagtcaaacctaagcgacccaaactttctacagccgccctcgtcgagcaacaagaaggagactcgacttcagcagaaagaaaatcgccgaccccacaagaagaagcccaggaagaagtccaccagacgccggagatccagctccacctccagcgaaacatcagagaacagctgtacatcaagcagcagctccaactcctgctcctccaaatattcaaaacacaagcaaatattcacatgaacccacgttttataagcccataataacctacaacatgtttggggaacccaatcctcaccctccaactagccaagactggcaaatggagtacgaggcctgcaaaatttgggacaggcccgctagacaaaacctaaaagacacccctttctatccctggatgcctaagcctcccccccaatactctgtaacatttaagcttgggttcaaataaacaaggccgtgcactgttcacttgtcggtgtctacctcttaaggtcaccaagcactccgagcgtcagcgaggagtgcgacccttcctcaaggggcaactccctcgaagtccggcgctacgcgcttcgcgctgcgccggacattaatataaagcggtgcacttccgaatggctgagttttccacgcccgtccgcagcgagatcgcgacggagaagcgatcgagcgtcccgaggg

SEQ ID NO: 1325 - protein, 760 aa, Alphatorquevirus sp.
MAWWGRWRRWPRRRWRRWRRRRRRRLPARRTRRAVRGLGRRPRKTVRKRRRRPRRTYRRGWRRRRYIRRRRGRKKKLTLTMWNPNIVRRCNIKGGLPLLMCGENRAAFNYAYHSEDYTEQPFPYGGGMSTTTFSLRALYDQYTKHMNRWTFSNDQLDLARYRGCKFRFYRHPTCDFIVHYNLVPPLKMNQFTSPNTHPGLLMLTKHKIIIPSFLTRPGGRRFIKIRLPPPKLFEDKWYTQQDLCKQPLVTLTATAASLRYPFCSPQTNNPNCTFQVLRKNYHKVIGTSSKNSEDVTPFEDWLYNTASHYQTFATEAQVGRIPFFNPDGSKNQQAEAWQNKWSKKSETWTGTSTYPHTSTQQMYKIPYDSNYGFPTYKPMKDYMLERRAWSFKYQTDNPVSKKIWPQPTTTKPTVEYYEYHAGWFSNIFIGPNRYNLQFQTAYVDTTYNPLNDKGKGNKIWFQYHSKVNTDLRDRGIYCLLEDMPLWAMTFGYSDYVSTQLGPNVDHETQGLVCIICPYTEPPMYDKTNPNSGYITYDTNFGNGKMPSGRGQVPVYWQCRWRPMLWFQQQVLNDISKSGPYAYRDELKNCCLTTYYNFIFNWGGDMYYPQVIKNPCADSGLVPGTSRFSREVQVVSPLSMGPQYILHLFDQRRGFFSSNALKRMQQQQEFDESFTVKPKRPKLSTAALVEQQEGDSTSAERKSPTPQEEAQEEVHQTPEIQLHLQRNIREQLYIKQQLQLLLLQIFKTQANIHMNPRFISP

SEQ ID NO: 1326 - protein, 156 aa, Alphatorquevirus sp.
MHFRRISEKRKLLLLPVHSASQTPAMSFRAPTLNAGQREQLWFESIVRSHDSYCGCGNTVAHFNNIATRFNYLPLTSSPLDPSSGPPQRRPALRALPALPAAPSTPTTSQPWRGGADGEGGRGAGGGDGGAAVEGDYQQEELEELFAALEDDQERR

SEQ ID NO: 1327 - protein, 58 aa, Alphatorquevirus sp.; identical to SEQ ID NO: 524

SEQ ID NO: 1328 - DNA, 3122 bp, Alphatorquevirus sp.
gcgtgtcagaccacttcgggctcgcgggaagtcaaggggcaattcgggctcgggactggccgggctatgggcaaggctcttagagttatcgctctttaaaacatgtttctcggcagggtttggagaaagaaagggaaagtgtcactgccaacactgtcagtggtgccgcttccacaaccttcacatatgagcagccagtggagaccccccgttcacaatgtccaagggctggagcgcaattggtgggagtgcttcttccgtagtcatgcttgcttttgtggctgtggtgatgctattactcatattaataatttggcgtctcgttttggacgtcctcctgctgcctcaactccccgaggaccacagccaccgccagtgaccccgttcccggccctgccggctccggagcccagtcctgagccatggcgtggcgccggtggcgatggcggccgtggtggagacgccggaggcgccgccggtggagaaggagacgccggaggcccagacgacgccgcccttatcgacgccgtcgacctcgcagagtaaggaggcgcagggggcggtggaagcgcgcttacagacgttgggggcgacgcagacgcagacgaaaacacaaaaaaaaactcgtactgactcagtggcagcccccaattgttaaaaagtgcctaataatagggtacgaccccataattatctgtggcattaacagaaccacctttaactacactacacactcagaggactacacctttaacaacgacagctttgggggtgggctctgcaccacacaatacacactaagaatactgttccaagagaaactttgccaacacaacttctggacagccagcaacgaagacctagacctagccaggtacctagggggtacatttatattttttagacacccaacagtagactttctggttagaattcgcaccagtcctccctttgaggacacagacatgactgcactcactctacacccaggcatgatgatgctcagtaaaaaggttattaagatacccagtcttaaaactagacccagcagaaaacactttgtaaaaattagattcggggcccctaaactgtttgaagacaagtggtacccccagaacgagctctgtgatgtaactctttgcagcatacaagcaaccgcagctgatttccaatatccgttcggctcaccactaacgaactcaatctgttgtaacttccaggttcttaacagtaactatgacaatgcactttctgtgttacacttatctaacgaagtaacaaaccctatacacacagccagacaaaaatgctataactacttattaagacaatacagctattataacacaaaacaagtagtagctcaacttaaataccactgggaccccaaacaaaaccctaacatgccaagcacaaataacgcagatacttcactaccaccagaaaaactaacaaaagagaatacaactacctacccacactgggatacaatgtcaggaggtttggcttatggaaactaccctgaaacaacaaccacatcacacagtaaaactgacctatataagtcaatgattacaggcaatgaattttacaccaaagcagggaaaaaaataatacctacctttataccaatagaactatatgaaagtactacagactcatacactacaaagaaaaacaatacaaacatttttgactactacacaggcatgttcagtagtatatttctgtccagcggcaggagtaacccagaagtaaaaggcagctacacagacatatcatacaacccactaacagacaaaggagtgggaaatatgatatggcttgactggctatccaaaccagacagcagatacgaccccaaaaagagtaaatgccttataaaagactttccactatgggccgcatgctacgggtacgcagactactgtagaaaagccactggagactcaggcatactttttaactccagaatagtaataagaagtccttatacatacccacaactaataaaacacagcgacgaactgtggggattcgtaccctacagcgagaactttggactggggcgactgccaggaggcaactccaaacctcccaccagaatgagactacattggtacgtcatgctactacaccagactgaagtactagagtgtatatcacaaacgggcccatttgcctgcaaaggagacgagagaaagactgtactgactgccaaatacaagttcagatggaagtggggaggcaaccctgtgtttcaacaggttcttagagacccctgcacgggaggagccgtggcgccccacaccagtcgacaccctcgcgcaatacaagtctttgacccgaagcaccaagccccggagtatctcttccacaagtgggacttccgcaggggactttttagcactaaaggtattaaaagagtgtcagaacaaccaacaaatgatgagtttcttacaggccgcagcaagagacccaagaaagacacgggagccaaaacggaagaagaagaccaacaagaagaaaacttacatttcagacacccccagctccgaccctggctcacctccagccaggaaacgcaaagccaaagcgagcaagaagacaagaccccaaaaacgatacaagaacaattacaagagcagctccagcaacagcagctcatgggagtccaactccgaaacgtctgcctccagctcgccagagtccaagcagggcacagtctccaccccatattccaatgccatgtataaacaaggtgtttatatttcctgagagagagcccaagcagcctcctaccagcaaagactggcaggaggaattcgaggcctgtaagcactgggacaggcctgctagacctagcttagatagaccccctttctacccctggatgcccagggaacccccaacttgtcatgtaaccttcaagcttggctggaaataaaattacaaggccgtgggagtttcacttgtcggtgtctgcttattaaggtcactaagcactccgagcgtaagcgaggagtgcgaccccctgccctgggcccacttcttcggagccgcgcgctacgccttcggctgcgcgcggcacctcagacccccgctcgtgctgacacgctcgc

SEQ ID NO: 1329 - protein, 777 aa, Alphatorquevirus sp.
MAWRRWRWRPWWRRRRRRRWRRRRRRPRRRRPYRRRRPRRVRRRRGRWKRAYRRWGRRRRRRKHKKKLVLTQWQPPIVKKCLIIGYDPIIICGINRTTFNYTTHSEDYTFNNDSFGGGLCTTQYTLRILFQEKLCQHNFWTASNEDLDLARYLGGTFIFFRHPTVDFLVRIRTSPPFEDTDMTALTLHPGMMMLSKKVIKIPSLKTRPSRKHFVKIRFGAPKLFEDKWYPQNELCDVTLCSIQATAADFQYPFGSPLTNSICCNFQVLNSNYDNALSVLHLSNEVTNPIHTARQKCYNYLLRQYSYYNTKQVVAQLKYHWDPKQNPNMPSTNNADTSLPPEKLTKENTTTYPHWDTMSGGLAYGNYPETTTTSHSKTDLYKSMITGNEFYTKAGKKIIPTFIPIELYESTTDSYTTKKNNTNIFDYYTGMFSSIFLSSGRSNPEVKGSYTDISYNPLTDKGVGNMIWLDWLSKPDSRYDPKKSKCLIKDFPLWAACYGYADYCRKATGDSGILFNSRIVIRSPYTYPQLIKHSDELWGFVPYSENFGLGRLPGGNSKPPTRMRLHWYVMLLHQTEVLECISQTGPFACKGDERKTVLTAKYKFRWKWGGNPVFQQVLRDPCTGGAVAPHTSRHPRAIQVFDPKHQAPEYLFHKWDFRRGLFSTKGIKRVSEQPTNDEFLTGRSKRPKKDTGAKTEEEDQQEENLHFRHPQLRPWLTSSQETQSQSEQEDKTPKTIQEQLQEQLQQQQLMGVQLRNVCLQLARVQAGHSLHPIFQCHV

SEQ ID NO: 1330 - protein, 147 aa, Alphatorquevirus sp.; identical to SEQ ID NO: 61

SEQ ID NO: 1331 - protein, 128 aa, Alphatorquevirus sp.; identical to SEQ ID NO: 62

SEQ ID NO: 1332 - DNA, 3120 bp, Betatorquevirus sp.
cgggagccgaaggtgagtgaaaccaccgtagtctaggggcaattcgggctagatcagtctggcggaacgggcaagaaacttaaaataatttattttacagatgaactttgaaaacaccaactttactccaagacaacttcaattacaatgggtgaataacattgttcaaacccacgacttaatctgcaactgcaacaaaccactagaacacgccatttactgcatctttaaacaagaaccagaccttcgaattaacaaagaaacaaaagaattaattgaaaaatgccttactactcaagatggtggccgcgacgtagatatcgtagacgaatttggagaagaagagctaaacgccctcttcgcagaagatactggcgacgacactgggtaagaaattattctcgaaagagaaaacttaataaactatctttaaaacaatggcagccacaaacaattaaaaaagcaactgtaaaaggaatatatccactgtttttatgtgacagagacagaattaacaacaatttaatacaatatttggaatccattgctcccctacactttccaggaggcggaggattctccattatacaatttactttgaaaggactatatgatgaatttattgccggtagaaactggtggactaaatctaactgtactttacctttaattagatacctaggatgtaacttaaaattgtatagagctgaaaaatatgactatgttgttgtaattcatagatgttaccctttaaaagcctcagaccacctatacatgagtacacaacctagcatacaaatgatgcaaagaaaatccatacttgtaccatgcagacaaaattcaaacagcaaaaaaccatacaaaagagtacacataaaacccccaacacaatttgaaacaggatggcattttcaacaagacctctgtaactttccactagtagttataactgcctctgtagccagctttgacagatactacacatctagcgactcgaaatcaacaacagtaggattctattctctaaatacacaaacatttcaattacatgactggcaagaccccccaacaactggttataaaccacaagataaattatggctatggggaacactaaatggtgcagatccacctgacaacacacttgtaaaacatttaatatacttaggaggcacaggaccttacacaaaaggcgtaaatgtaggaaacaattctaattatgcatcccaacctcaaaactggggtaatatcttccacaatgattacttatttgacacatcagctatatttgccagtaacagaactgttcaagaatgtgtaagctacatactacaacatcaaggagacacagacagcgacaaagttaaagctgcaggctcatactggacagtacgaaccataccaaacatagtagaatgtagatataatccatttaatgacaaatcaacaggaaacaaaacatatatggtatcaaatcattcagatcatacagcttggcacccaatagacaatgacaaactacaaagaaacgatttaccactttggctagaaacatggggatggatggactggatgaaaaaagcacagttaatatctcaaccagaactaaactatgtaacagtaatacaaactaaatttatttccagttacccaaaacttacatactatgtacccatagacaacaacatggaactgggccaatcaccatatataggatcactcacagcctcagacagacaacactggtacccaaaaggcacatttcaaatacaaacattaaatttactgggtatgacaggaccaggaactgtaaaaatgcaaaagaatcaagcttgtgagggtcatatggaatatcgttttaaatttaagctcggaggatgtccagcacaaatggaaaaaatatgcgatccagctgaacagccaaaatatcccattcccaatattaagcaaacaacaccttcgttacaggatccaacaaccaattttagaaccttcctgtacgacttcgacgaaagggacggacatcttacgaaaagagctgtcaaaagaattaaaaaagactcagaatctgaacaaactattcttgacattacaggaccaatggacctcccggcaccccaccaaaaaacatcaacatgggacacggagacatcggaagaagaagaagaagagggtctccagttcgagctcctcaagctcagaagaaaacaacacctcctcagacagcgaataaagaacctcctacaacaacaaaatttagaataatacattctaaagttaaaattgacttatttaatgatcaaaaacctgtaaacagaagaatgactccctctgaattagaggacgaaaagttttgggcctctatgtttaaaaggccacttagagcttttatttatgataaacctacatatccttatgtaccaactcctcctccacctttcaaatatatggttaactttgacttaaaccctcccctataaataaaggccaacattatttcactctcggtgtccatttatttaagttctaaccttaataaacatccaccactctcccaatcaatagggcctctaagggggctccgcccccttaaacccccaagggggctccgcccccttcaacccccaagggggctccgcccccttaacaccccctaataaatattcaacaggaaaaccacctaatttaaattgccgaccacaaacgaacttttacttccccttttttacaaacttccttttttacttattattattcatgaaattaattaataaacaccgtaaatccggggaggagcctaaaaactatataaccaagtatacttccgaatggctgagtttatgccgccagacggagacgggatcacttcagtgaacaccccctaataaatattcaacaggaaaaccacctaatttaaattgccgaccacaaacgaacttttacttccccttttttacaaacttccttttttacttattattattcatgaaattaattaataaacaccgtaaatccggggaggagcctaaaaactatataaccaagtatacttccgaatggctgagtttatgccgccagacggagacgggatcacttcagtgactccaggctgatcttggg

SEQ ID NO: 1333 - protein, 660 aa, Betatorquevirus sp.
MPYYSRWWPRRRYRRRIWRRRAKRPLRRRYWRRHWVRNYSRKRKLNKLSLKQWQPQTIKKATVKGIYPLFLCDRDRINNNLIQYLESIAPLHFPGGGGFSIIQFTLKGLYDEFIAGRNWWTKSNCTLPLIRYLGCNLKLYRAEKYDYVVVIHRCYPLKASDHLYMSTQPSIQMMQRKSILVPCRQNSNSKKPYKRVHIKPPTQFETGWHFQQDLCNFPLVVITASVASFDRYYTSSDSKSTTVGFYSLNTQTFQLHDWQDPPTTGYKPQDKLWLWGTLNGADPPDNTLVKHLIYLGGTGPYTKGVNVGNNSNYASQPQNWGNIFHNDYLFDTSAIFASNRTVQECVSYILQHQGDTDSDKVKAAGSYWTVRTIPNIVECRYNPFNDKSTGNKTYMVSNHSDHTAWHPIDNDKLQRNDLPLWLETWGWMDWMKKAQLISQPELNYVTVIQTKFISSYPKLTYYVPIDNNMELGQSPYIGSLTASDRQHWYPKGTFQIQTLNLLGMTGPGTVKMQKNQACEGHMEYRFKFKLGGCPAQMEKICDPAEQPKYPIPNIKQTTPSLQDPTTNFRTFLYDFDERDGHLTKRAVKRIKKDSESEQTILDITGPMDLPAPHQKTSTWDTETSEEEEEEGLQFELLKLRRKQHLLRQRIKNLLQQQNLE

SEQ ID NO: 1334 - protein, 96 aa, Betatorquevirus sp.
MNFENTNFTPRQLQLQWVNNIVQTHDLICNCNKPLEHAIYCIFKQEPDLRINKETKELIEKCLTTQDGGRDVDIVDEFGEEELNALFAEDTGDDTG

SEQ ID NO: 1335 - protein, 114 aa, Betatorquevirus sp.
MGHGDIGRRRRRGSPVRAPQAQKKTTPPQTANKEPPTTTKFRIIHSKVKIDLFNDQKPVNRRMTPSELEDEKFWASMFKRPLRAFIYDKPTYPYVPTPPPPFKYMVNFDLNPPL

SEQ ID NO: 1336 - DNA, 3118 bp, Gammatorquevirus sp.
cgggagcccgaggtgagtgaaaccaccgaggtctaggggcaattcgggctagggcagtctagcggaacgggcaagaaacttaaaatatacattgttttacagatgagcagattctttagaccaacaccatacaacaatgaaactaaaaaccaaatgtggatgtccatgattggagatggccatgatatttgctgtggatgccctcaaccttttgcacacctgctagacagcatatttccagaaggtcaccaagacagaaacaaaactattaaagaaattattgacagagatttcaaatgcctttctggtggagaagaagaaacaaaccatggtataccacttggaggaaccgccgctacagaggcagaagaagaagaagatatcaaaccaggagacgaagacctagacgctttactcgccgccgccgccgccgccgtcgaaagttcaaggtaagaagaaagaaaaaaaagattactattcaacaatggcaaccagacagaattataaaatgcaaaataaagggattctcatacttagtatgtggtgctgaaggtaatcagtatagatgctatacagatgataaacataactatggacaacctaaagcaccagggggcggaggctttggtgtagaacaatatacattagaatacttatacaaagaatggcaagctcacagaaatgtatggacttcaagcaatgactatacagacttatgtagatatactggatgtaaaattatactttttagacatcctactacagactttatagtatggtttgacagacaaccaccttttgactttaaaataaacacatatgcagacacacatccactcagactcctattaaacaaacatcacaaagtaataagaagcctacaatacagtacaagacaaaagccttatgtaaaattaaacataaagccaccaaaacaaatgataactaaatggttttttcaacctgactttgctgaagcacctctatttagactagttggatctgcctgtaactttgggtactctttgtatgggccaaacacacaaagcccaaacttaactttatatgcattaaacacagatttttataaataccacaactggggaaacaacaccttacaaacattaggatacatgccatatgcagcaataccacatactacaagccatcatcttatatttaaaacaccaaaaaaaaatactccagttatatttgactctgttacatataaagacacaatttcttatgaaaaaggctggtttcaaccaggtgttttagcagcatatcaagtagttgaaaacacacaccaacaaacaccactgcaaaacagaccagtagcaataggaagatacaacccagaagatgatgatggtataggtaacagaatttggctaatatccattgttaacaatgactcctggcaacaaccatcagacagaaacttaataataggtgaattacccctatatatggccttttggggaatttgggacacagttgtaaaacttagaaaaactgaagaatggctaaaaacatcaatgtttgttgttaaatgtaaagccataaaaatagtactcggtggctttcaacaagatatatggccatttattgactggtcatttatacaaggtaaaatgccatgggatgaagaactaactttacaagaaaaagcaaactggtatcctacatgttataaacaacaaggaacaattaactcctttgttgaatgtggacctctttgtcctaaatattcttatttatcatcttctacatggcaactagcttacaaatacattttttattttaagtggggtggcccacaaacaggagaaaaaattatacaagatcccaaagaccaagaaaagtatcctgtccccgataaatactcagaaacaatacaaatatatgacccagtcaaacaacactgcaaaagcctccttaggccctgggacttcagacgaggttatgttacaacaacagctcttaaaagaatgcaagactacctcccatttgatgaatctgaacaatctgatgttacagaaccacccaaaaagaaaaagaaaatcacaacacaaataccagtcagcgacgaagagcaggaagaaatcaagagctgtctcctctcgctctgcgaaaaagattccttcccggaggaaacacaagacctccagcagctcatccagtaccagcacaaaaagcagcagcagctcaagcacaacatctacaaactcctcctaaacatcaaaaagtcacaagcacacctacaaatgcaaacagggttactttaacaagatttaaaccaggtatagaagaagaaacagaaaaagaactagccaaaatatttagaagaccacccagaacatacaaagaagatcccccattttacccatggctacctatagcccctaaagtatgctttgcacttaactttaaaagctaggccaacactgtacacttgttcaagcatgtttaataaagttacacccgcgcgcgcgcgagcgccgtcacgcgccggcgctcgtgcgccgcgcgtatgtgctaatacaccacgcacctagattggggtgcgcgcgcttgcgcgcgcaccccaatgcgccccgccctcgttccgacccgcttgcgcgggtcggaccacttcgggctcgggggggggcgcgcctgcggcgctaatttactaaacagactccgagtcgccattccgcccccctaagctccgcccccctcatgaatattcataaaggaaaccacaaaatttgaattgccgaccacaaactgccatatgctaattacttccccttttacacagtaaaaaggggaagtgggggggcagagccccccacaccccccgcggggggggcagagccccccccccgctccccccctacgtcacaaaccacgcccccgccgccatcttgggtgcggcagggcgggggctaaaatggcgggacccaatcattttatactttcactttccaattaaaaactgccacgtcacaaacaaggggtggagactttaaaactatataactaagtgaggtgacgaatggctgagtttaccccgctagacggtgcagggaccggatcgagcgcagcgaggaggtccacagctgcccaaggg

SEQ ID NO: 1337 - protein, 663 aa, Gammatorquevirus sp.
MPFWWRRRNKPWYTTWRNRRYRGRRRRRYQTRRRRPRRFTRRRRRRRRKFKVRRKKKKITIQQWQPDRIIKCKIKGFSYLVCGAEGNQYRCYTDDKHNYGQPKAPGGGGFGVEQYTLEYLYKEWQAHRNVWTSSNDYTDLCRYTGCKIILFRHPTTDFIVWFDRQPPFDFKINTYADTHPLRLLLNKHHKVIRSLQYSTRQKPYVKLNIKPPKQMITKWFFQPDFAEAPLFRLVGSACNFGYSLYGPNTQSPNLTLYALNTDFYKYHNWGNNTLQTLGYMPYAAIPHTTSHHLIFKTPKKNTPVIFDSVTYKDTISYEKGWFQPGVLAAYQVVENTHQQTPLQNRPVAIGRYNPEDDDGIGNRIWLISIVNNDSWQQPSDRNLIIGELPLYMAFWGIWDTVVKLRKTEEWLKTSMFVVKCKAIKIVLGGFQQDIWPFIDWSFIQGKMPWDEELTLQEKANWYPTCYKQQGTINSFVECGPLCPKYSYLSSSTWQLAYKYIFYFKWGGPQTGEKIIQDPKDQEKYPVPDKYSETIQIYDPVKQHCKSLLRPWDFRRGYVTTTALKRMQDYLPFDESEQSDVTEPPKKKKKITTQIPVSDEEQEEIKSCLLSLCEKDSFPEETQDLQQLIQYQHKKQQQLKHNIYKLLLNIKKSQAHLQMQTGLL

SEQ ID NO: 1338 - protein, 116 aa, Gammatorquevirus sp.
MSRFFRPTPYNNETKNQMWMSMIGDGHDICCGCPQPFAHLLDSIFPEGHQDRNKTIKEIIDRDFKCLSGGEEETNHGIPLGGTAATEAEEEEDIKPGDEDLDALLAAAAAAVESSR

SEQ ID NO: 1339 - protein, 108 aa, Gammatorquevirus sp.
LSPLALRKRFLPGGNTRPPAAHPVPAQKAAAAQAQHLQTPPKHQKVTSTPTNANRVTLTRFKPGIEEETEKELAKIFRRPPRTYKEDPPFYPWLPIAPKVCFALNFKS

SEQ ID NO: 1340 - DNA, 3117 bp, Betatorquevirus sp.
cgggagccgaaggtgagtgaaaccaccgtagtctaggggcaattcgggctagatcagtctggcggaacgggcaagaaacttaaatatatttttttacagatgagcaaattctacaaaccaacaaacaactcacccagaagaaatgaactacaaattatgaacctgattttctcctcacacgacagcctttgttcctgcagcaacgcatctgaacacctcctccatcttctaaccagagaaaaatgcctccatttcaaagacgccgctactaccacagaaactactggaactaccgaaaaccaagatcttactatagacgccggagatttagaaaatttattttcggaagaaaacgacgtcgacgaagggtaagaagaaaaagattttctaaacgtaatagaaaactaaaaacaattaaaattaatcaatggcagccatcctccattaaaaaatgcaaaatacaagggtacctatgcttatttcaagcaggacccggacgatatggaaataactatccattatggaaagaatcatactttcctgaacattatccaggaggaggaggatggagcattcaacaactttctttaggaatactgtttaaagaacataaagactatatgaattactggactcgtagtaacagtagattaaatatgtgtagatactatggttgtagaatacaattgtttagagaaccatatactgattatatatttagctggtttgatagtttaccaaaaactgttaacaatatgttttatgcttcatatcatccattaagattattaacacacaatagaaaaaagatactaccaagcaaccaaacacaaccacataaaagaaagccatacaaaactgtattcataccgccacccagattaatgaaaaaccaatggttttttcaacagcaattgtcagactttccactagtaacatttgtagcctcagcttgcagcctaacaggaatgtttggcagtacaaaatctattagtaataatgcaacactattctgtttagacacagacataatgtcatctcccacatttcaatacaaaaacacaactccaccaacatggggatacacattaggatcacaatacctatatggacttccacaaccacaacacccatttacatccaacacacgaggacaatgcatttacttaggaaacacaatgcaacaacaagaaggagacgaaattaaccacacaaaaaataccgaattccaaacaaaatacacaaaagacaaatggggtaacccattttactggatgtacacctcaggaaacgcagctctacttcaaacctcaaatgacccaactactatgtctacaaacagaaatcaacctgtagacgccacctgggaaaaacaaactcattacatatttaaagctagatacaacccatttcacgacaaaggttttggaaatgtagtttactttatacctacatatgacaaaggtacaaccacttgggaccccccaaaagaccctgaccttatatggagagacaaaccactatggctaatattttggggactagaagacatagtaaaaagaatgggaaaatgcacaaacctagatatggactggatattagtatttaaatcctcatatttagtaccaccacaaaaacactatgttattttaagttatgattttatacatggtagaggtccatatgacacagacaaagaatttatgactaaagatgatataacacactggtttcccagatataaatatcaaagacaagcagtagacaatataattagaacaggaccagcagtagcaacaggagataatgtacagaatatacaagctaaatgtaaatataccttttatttcaagtggggaggaaatacagaaccacaagaaacaatattcgacccaaacagccaacccatcactcccactcccaataacttcaacttcggggatgaaatcattgatccgtcaacagacattacatcagaaatatacccatgggactttagaagacacattcttacagcaacagctgcaaaaagaattaaagaaagcccactcactgaccaaactctattcacagatggaaggcagagctcaacggacatccccctgtggaaagaaacaacacaagaggaagagaccccgaaaacgcaaacagaagagatattccagcagctccagcagctccagcaatacaacagagaactcctccaccgactcagatcaataaaggaattatcttaaaaactgttaataacattcaattgttcccaaaacctagaaaaaaccgtagactaactccctatgaacaacaaactgaaaaagaaatttgtaaatggttacatagaccccccagacattactttgatgaccctccattttacccttggttaccccctactccaaaagttccatttgtaaactttgaccttgtatctgcatttaataaaggccaacattaattcacttaacaagtctgtttatttaagtaaaaacttatataaacatccaccacctcccaatcaataaggcctacagggggctctgccccctaaaacccccagggggggtaaaccccccctaaaccccccccaaattaacatattcaacaggaaaaccacaaaattagaattgccgaccacaaaccgtcactaacttctgcttttccaataacttcctctttaccttataaatattcattaaattaattaataatcaccgtaattccggggaggagttaccaaactatataaccaacataacagacgaatggctgagtttatgccgccagacggagactgaagagcaacagcaacttcaggctgatcaagggcgggagccgaaggtgagtgaaaccaccgtagtctaggggcaattcgggctagtaattaatattcaacaggaaaaccacctaattagaattgccgaccacaaaccgtctcctacttctcctttttcactatacttctgcttttactacttattattcattacattaattaataatcaccgtaattccggggaggtgctaaatacctatataactaacaacacttccgaatggctgagtttatgccgccagacgaaggcaggatcacttcagtgactccaggctgatcttggg

SEQ ID NO: 1341 - protein, 664 aa, Betatorquevirus sp.
MPPFQRRRYYHRNYWNYRKPRSYYRRRRFRKFIFGRKRRRRRVRRKRFSKRNRKLKTIKINQWQPSSIKKCKIQGYLCLFQAGPGRYGNNYPLWKESYFPEHYPGGGGWSIQQLSLGILFKEHKDYMNYWTRSNSRLNMCRYYGCRIQLFREPYTDYIFSWFDSLPKTVNNMFYASYHPLRLLTHNRKKILPSNQTQPHKRKPYKTVFIPPPRLMKNQWFFQQQLSDFPLVTFVASACSLTGMFGSTKSISNNATLFCLDTDIMSSPTFQYKNTTPPTWGYTLGSQYLYGLPQPQHPFTSNTRGQCIYLGNTMQQQEGDEINHTKNTEFQTKYTKDKWGNPFYWMYTSGNAALLQTSNDPTTMSTNRNQPVDATWEKQTHYIFKARYNPFHDKGFGNVVYFIPTYDKGTTTWDPPKDPDLIWRDKPLWLIFWGLEDIVKRMGKCTNLDMDWILVFKSSYLVPPQKHYVILSYDFIHGRGPYDTDKEFMTKDDITHWFPRYKYQRQAVDNIIRTGPAVATGDNVQNIQAKCKYTFYFKWGGNTEPQETIFDPNSQPITPTPNNFNFGDEIIDPSTDITSEIYPWDFRRHILTATAAKRIKESPLTDQTLFTDGRQSSTDIPLWKETTQEEETPKTQTEEIFQQLQQLQQYNRELLHRLRSIKELS

SEQ ID NO: 1342 - protein, 90 aa, Betatorquevirus sp.
MSKFYKPTNNSPRRNELQIMNLIFSSHDSLCSCSNASEHLLHLLTREKCLHFKDAATTTETTGTTENQDLTIDAGDLENLFSEENDVDEG

SEQ ID NO: 1343 - protein, 65 aa, Betatorquevirus sp.
LFPKPRKNRRLTPYEQQTEKEICKWLHRPPRHYFDDPPFYPWLPPTPKVPFVNFDLVSAFNKGQH

SEQ ID NO: 1344 - DNA, 3116 bp, Alphatorquevirus sp.
cgggtgccgaaggtgagtttacacaccgcagtcaaggggcaattcgggcacgggactggccgggctctgggcaagtgtcttaaaaatgtacttttccagaaaaagaagacccaagaaggagaagccgctgccactgcgatacgtgtgtggcctaccgcctagcaggcctgatccgatgagctggcgtccacctgcccacgatgtcccaggacaagagggcctgtggtaccgatccgtttttaattctcatggcgctttttgtggttgcggtgattttgtgggtcatcttcagagacttagcgaacgcctgggtagaccccaaacaccaagacccccgggcggaccgccgggccctgctgtgagagctctgcctgccctgccgcctccggagcctgaaccaagaagacacgtccagagagagaacccgggatgtggtggtggagacgccgcagatggagggccccatggagaaggaggcgatggaaacgacgcagacttaggaccagaagatttagacgagctcctcgacgtcctagacgccccagagtaaggagacctcggcgccgcagggggtgggctcgcagatatagacttagaaggaggcggaggaggaggagaaggagaaagctaatactaacacaatggcagccagcaaaaatgagaaaatgtctagtaataggatatcttgctctagtactatgtgggaacgggacatttagtaaaaactatgcctcccactcagatgactatgtacaaaaaggaccctttggagggggactaagcagcatgagatttaacatgagaatactatatgatcaatttaagagacaccttaacttctggacacacacaaaccaggacctagacctagttagatacagaggctgcaccatgacattctatagacacccagaggtggacttcatagtaaaatttaacagaaaacctccattcctagacacaatagtatcagctccagccatgcacccaggcatgctaatgacaacaaaacacaaaatactagtaaaaagctttaaaacaaaacccaaagggaaaggcacagtaaaggtgcgcattcgcccccccacactctttgacgaccgttggtactttcaacatgacatctgcaaaaccacactgttcaccattagcgcaacaccatgtgacctgcggtttccgttctgctcaccacaaactgacaacccttgcgtcaacttcctagttcttgcaggagtgtataacggcaaacttagcatagaagccacaaaggtagaatcagcatatacttcactaacttcagctataagtatgaccacccaaggtactctatttaatacatttaaaacccaagaaatgataaagtgccccccagcagtaaaatcctcagaacctacagacggaagcacaaactgctacaaaaaactagacagcgcctggggagacactatatggaattcagaaacaataaaaaacttcaaaactaacacagacaacctgtggactgcaagaggcaaccaaacaatgactggtagcaaatacctaaactacagaacaggaatatacagtgccatattcctttcagcaggcagactgtcaccagactttgggggactatacaatgacatagtatacaatcccaccacagacgaaggcataggaaacattgtgtggatagactggtgcacaaaagcagactgcaacttcaatgagacacagtccaaaggagtaataaaagacattccactgtgggcagcactgtttggctatgtagactttctaaaaaagacatttaaagacgaccagctagacaaaactgccagactaactctcatatgcccctacacaaagcctcaactaataggacctacacaacccaacaaagggtttgtcccgtacgactacaactttggcagagcacacatgccctccggagaatcctacatacctatatactacagatttagatggtacatctgcctatttcaccaacaaaagtttatagaggacattgtaagcagcgggcccttcgcataccacggctcacagccctcagcaactctcaccactaaatacaaattccactttctctttgggggcaaccccgttccccaacagactgtcagagacccttgtaaccaaccagtctttgacattcccggagccggtggactccctcgtccgatacaagtcgttgacccgaaatacgtcaacgaaggctacacgttccacgcctgggacttccgtagagggctctttggccaagcagctattaaaagagtgtcgggagaacaaacaaatgcttcactttattcatcaggtccaaaacggccaagaacagaaattcctccacaagatgcagaagaaggctcatattcccgggaaggaaaactccagccctggctcgactcgagcgaccaggaagagagcgagacagaagccccagaagaagaagcgacctcgccgccgtcgctacagctccagctcaagcagcagatcagggagcagcgacaactcagatgtggaatccaacacctcttccagcaactagtgaaaacccagcaaaacttgcatatcaacccatgcctacagtagggcctaaagcttatctgttcccagaacgcttaccacccgtgtggaccaagcaagattgggagacagaatatcaagtcgccgcggcctttaacaggcccgcgcgaacaaacctaaatgattctcctttttacccttacatacccagaaacccaggcttcagagtatcctttaagctaggatttaaaccctaataaaattaccaggccgtgggagtttcacttgtcggtgtctacctctataagtcactaagcactccgagcgcagcgaggagtgcgaccctcccccctggggcaactccctcgaagtccggcgctacgccccccgggggggctccgcccccgggcccccccccgctaagtccgtcactaaccacgtgactccaacaggccacccatatgctacgttgtgcacttcctgggcggagtctatgtgctcatataactagctgcacttccgaatggctgagttttccacgcccgtccgcagcgagtgagccacggagggactcccgcgcgtcccgtggg

SEQ ID NO: 1345 - protein, 720 aa, Alphatorquevirus sp.
MWWWRRRRWRAPWRRRRWKRRRLRTRRFRRAPRRPRRPRVRRPRRRRGWARRYRLRRRRRRRRRRKLILTQWQPAKMRKCLVIGYLALVLCGNGTFSKNYASHSDDYVQKGPFGGGLSSMRFNMRILYDQFKRHLNFWTHTNQDLDLVRYRGCTMTFYRHPEVDFIVKFNRKPPFLDTIVSAPAMHPGMLMTTKHKILVKSFKTKPKGKGTVKVRIRPPTLFDDRWYFQHDICKTTLFTISATPCDLRFPFCSPQTDNPCVNFLVLAGVYNGKLSIEATKVESAYTSLTSAISMTTQGTLFNTFKTQEMIKCPPAVKSSEPTDGSTNCYKKLDSAWGDTIWNSETIKNFKTNTDNLWTARGNQTMTGSKYLNYRTGIYSAIFLSAGRLSPDFGGLYNDIVYNPTTDEGIGNIVWIDWCTKADCNFNETQSKGVIKDIPLWAALFGYVDFLKKTFKDDQLDKTARLTLICPYTKPQLIGPTQPNKGFVPYDYNFGRAHMPSGESYIPIYYRFRWYICLFHQQKFIEDIVSSGPFAYHGSQPSATLTTKYKFHFLFGGNPVPQQTVRDPCNQPVFDIPGAGGLPRPIQVVDPKYVNEGYTFHAWDFRRGLFGQAAIKRVSGEQTNASLYSSGPKRPRTEIPPQDAEEGSYSREGKLQPWLDSSDQEESETEAPEEEATSPPSLQLQLKQQIREQRQLRCGIQHLFQQLVKTQQNLHINPCLQ

SEQ ID NO: 1346 - protein, 164 aa, Alphatorquevirus sp.
LAGLWASVLKMYFSRKRRPKKEKPLPLRYVCGLPPSRPDPMSWRPPAHDVPGQEGLWYRSVFNSHGAFCGCGDFVGHLQRLSERLGRPQTPRPPGGPPGPAVRALPALPPPEPEPRRHVQRENPGCGGGDAADGGPHGEGGDGNDADLGPEDLDELLDVLDAPE

SEQ ID NO: 1347 - protein, 128 aa, Alphatorquevirus sp.
LARLERPGRERDRSPRRRSDLAAVATAPAQAADQGAATTQMWNPTPLPATSENPAKLAYQPMPTVGPKAYLFPERLPPVWTKQDWETEYQVAAAFNRPARTNLNDSPFYPYIPRNPGFRVSFKLGFKP

SEQ ID NO: 1348 - DNA, 3116 bp, Gammatorquevirus sp.
cgggagcccgaggtgagtgaaaccaccgaggtctaggggcaattcgggctagggcagtctagcggaacgggcaagaaacttaatatattttttattttagatgtctgtattcttcaacaaaacttcatacaacaaagaaaccttaaaccagctatggatgagtatcattgctgattctcatgatatttgctgtaaatgtgaacaaccctttgctcacctacttgacagcatttttccagacggccacaaagacagacagctaactattgaacaaattattaaaagagattttgcagcatgccattctggtggtacagaagaagaaaaccttggtttggtagatggtctagaaagaagagaaatacctggcggcgcagaaaaccaagaagaagaatatataaaagacgcagaactagaacaactcgtcgccgccgcagaagacgccactacaaggtaagaagaaaacaaaaaaaaataactgttaaacaatggcaaccagaaagtattaaaaaatgcaaaattaaaggactaggacccttagtactaggagctgaaggatgccaatacagatgcttcactgtatacaaatatgaatggacaaatcctaaaactccagggggtggtgggtttggctgtgaactgtttactctacaatacttatataatgaatatttagcaaagcataatatatggactgcatctaatctctacaaagactttggtagatatacaggctgtcaatttacattctatagacatgaacacacagactttattataaaatatgacattcacccaccctttactgttaacaaatatacatacatgatgctacacccctttaacatgctacaaagcaggcataaaaaaatactactaagcaaagacacaaaacccaatgggagactaacaaaaaaactaaaaataaaaccacctaaacttatgtcaaccaaatggttttttcaagaagaactaagtaaatatggactagttacccttgcagcttctgcatgtaactttagatttccatggatgggatgctgcaatgaaaacctaattataaccctagactacctacagccaggattttataaacattctgaatgggctcaagctactactcatgcctataaccctggaggccatacacaccctgtatcaacaaccatgtattactattattatgatgacaggggtgtagaacaaacctggcaaatgaaagactttactggtacaaatccatacactcactccctcgcctatgacgatggatggttcaacaccaaagtactaagagcacacttagtttccacaaacccaagcaaaaaaagccctatatctttaacaccatgtggaacactaagatacaatcccatactagacactggtgaaaaaaacaaagtttgggtggtatctacattagtatatgactggcaagttccaaaagatgaagacctaataatacaaggctatcctctttggatggtattctatggctttacttcttatttaaaacaagtaaagtcaaaaaccactccatttaaaggtagcatgatatgtgttcaatctccagctctatacagagttagaggtgaagacccaacagctttctatccacttatagacagatcttttattaaaggcaaaggcactggtaacacagacccaattaaattttctggaaatgaatggtttccaagcatattcagccaaagagatagtatatcacaaatagtaaattgtggaccctatatacctaaatacaatgaaacaagagaaagtacatggcaactaaattatttttacaaattttattttaagtggggaggcagctttccaccagaccaagcagctgagaatccacaaacaaaaggtacctatgacatacccgataaaaacaaagaaacacttgaaattgctaacccaattagccaacaataccactcagtatttaagccctgggactacaggagaggagaaattacaaaaaaagcttttaaaagaatgctccaacacatcgaagttactgactctatatcaacagattcaagcgactgctcctctcccaagaaaaagagaaggccaccactcctccaagacccaaaaaaagaaaatcagaaaatccaagcatgtctcctctcactctgcgaagagcctacatgcccagaccaaaaagaagagaatctccacctcctcatccagcagcagcacgagcagcagcagcaaatcaagttcaacctcttgcacctcatctcagacctgaaatccaaacaaagaacactgctacacaacacagggctactaaactaacaagatttaaacaaggctttgaatgggaaacagaactacagctttcaagagcctttcaaagacccccaagattgtttaaagaagacacacccttttacccttggttaccaaaattcacaccccttgtaaactttcacttaaattttaaaggctaggcctacactgttcacttagtggtgtatgtttaataaagtttcacccccaaaaaaattataaaataaaaaaaaaaaaaaaaaaataaaaaattgcaaaaattcggcgctcgcgcgcgctgcgcgcgcgcgagcgccgtcacgcgccggcgctcgcgcgccgcgcgtatgtgctaacacaccacgcacctagatttgggtgcgcgcgctagcgcgcgcacccaaatgcgccccgccctcgttccgacccgcttgcgcgggtcggaccacttcgggctcgggggggcgcgcctgcggcgcttatttactaaacagactccgagtcgccatttggcccccctaagctccgcccccctcatgaatattcataaaggaaaccacaaaattagaattgccgaccacaaactgccatatgctaattagttccccttttacacagtaaaaaggggaagtggggggggggcgggggctaaaatggcgggacccaatcattttatactttcactttccaattaaaacccgccacgtcaaaacaaaggggtggagactctaaaactatataaccaagtaacgtgacgaatggctgagtttaccccgctagacggtgcagggaccggatcgagcgcagcgaggaggtccccggctgcccgtggg

SEQ ID NO: 1349 - protein, 670 aa, Gammatorquevirus sp.
MPFWWYRRRKPWFGRWSRKKRNTWRRRKPRRRIYKRRRTRTTRRRRRRRHYKVRRKQKKITVKQWQPESIKKCKIKGLGPLVLGAEGCQYRCFTVYKYEWTNPKTPGGGGFGCELFTLQYLYNEYLAKHNIWTASNLYKDFGRYTGCQFTFYRHEHTDFIIKYDIHPPFTVNKYTYMMLHPFNMLQSRHKKILLSKDTKPNGRLTKKLKIKPPKLMSTKWFFQEELSKYGLVTLAASACNFRFPWMGCCNENLIITLDYLQPGFYKHSEWAQATTHAYNPGGHTHPVSTTMYYYYYDDRGVEQTWQMKDFTGTNPYTHSLAYDDGWFNTKVLRAHLVSTNPSKKSPISLTPCGTLRYNPILDTGEKNKVWVVSTLVYDWQVPKDEDLIIQGYPLWMVFYGFTSYLKQVKSKTTPFKGSMICVQSPALYRVRGEDPTAFYPLIDRSFIKGKGTGNTDPIKFSGNEWFPSIFSQRDSISQIVNCGPYIPKYNETRESTWQLNYFYKFYFKWGGSFPPDQAAENPQTKGTYDIPDKNKETLEIANPISQQYHSVFKPWDYRRGEITKKAFKRMLQHIEVTDSISTDSSDCSSPKKKRRPPLLQDPKKENQKIQACLLSLCEEPTCPDQKEENLHLLIQQQHEQQQQIKFNLLHLISDLKSKQRTLLHNTGLLN

SEQ ID NO: 1350 - protein, 118 aa, Gammatorquevirus sp.
MSVFFNKTSYNKETLNQLWMSIIADSHDICCKCEQPFAHLLDSIFPDGHKDRQLTIEQIIKRDFAACHSGGTEEENLGLVDGLERREIPGGAENQEEEYIKDAELEQLVAAAEDATTR

SEQ ID NO: 1351 - protein, 136 aa, Gammatorquevirus sp.
LLLSQEKEKATTPPRPKKRKSENPSMSPLTLRRAYMPRPKRRESPPPHPAAARAAAANQVQPLAPHLRPEIQTKNTATQHRATKLTRFKQGFEWETELQLSRAFQRPPRLFKEDTPFYPWLPKFTPLVNFHLNFKG

SEQ ID NO: 1352 - DNA, 3114 bp, Alphatorquevirus sp.
cgggtgccgaaggtgagtttacacaccggagtcaaggggcaattcgggctcgggactggccgggctatgggcaaggctcttaaagcgatcattcttaaaaatgtttttcggcaggtactacagaaagaaaaggaaagtgcttctgtcctcactgccaactccacagaaaaaacggcctgctatgagctggcagccccctatgcacaatgccagaggcagggagcaccacttctggcaagcttgctacaattctcatgctagtttttgtggctgtggtagttttctttctcacctcgttcgtctggaaggtcgttatgcatctggcaacaacaactcctcgccccagactggggcaccaccaatgatccgtagagccctgcctcccccagcggctccggatcagccccagaccccacaatggtctggaactggtggtggagacggcgccggagaaggtggccagcaaggaggaggaggtggagacgactacgcacccgaagacctagacgcactgttcgacgccgtcgcaggagaccaacagtaaggagaaggaggtgggggcgcagacgggggcgacgcacatacaggagacgcagacgaacccgtagaaagagaaagagactcgtactgactcaatggaaccccagcacagtaagaaagtgctggatccgaggcatgtttcccatgctgatctgtggaaacacacaacagggcagaaactatgcagaccatatggacgatgtaattcctcaaggaaaaccctatggggggtctctaagtaccaccacttggactctacaggcgctgtatgaccagcaccagagattcatgaacaagtggtcttatcccaacacagaactagacctagccaggtacctaggatctgaatttacattttatagagacaaactcacagactatatagtaaccttcaacatagtacctccttttaagctaaacaaatacagctgtgcatcataccacccaggtatgatgatgcagagacgcaagaaaatacttgtaaaaagctttcaaactaaaccaaaaggcagaaaagctgtgaaagtaaaaataggacccccacaactatttgagcagaagtggtacactcagcaagacctttgttccgttggtcttgtgtcatttgcggtttctgcggcgagcctaacacatccgttctgctcaccacaaactgaaaatgttgcagtaaccttccaggttttgaaatccttctactatgaaggaataggcattaacgaacaaactaaacacacaactatagcagacaccctatacacacaaggtaattactatcaaacatttcatacaacatcatacattaattcaggcctaaaaccaggtaaagcaggacaaaatgaactagaccaaacagttaaaacatggattcagtcaaactttcccacaggaaacaacagcacctttggctttaattcatataaaccagataaacaaaaattaaataaactattagactggtactggcaacaactgcaaacaccaaatgacattacctccagctatggaagagctactaacaaatacctagaataccacatgggaatatacagtgctatattcctaagcccactcagaagcaacctgcaattccctacagcataccaagatgtaacatacaacccactcatagacaaaggagtaggaaatgaaatttggtttcaatacaacacaaaacccaatacaagctttgatgaaaaacaatgcaagtgccacataaaagacatacccctttgggcagccttttatggctactcagactatgtacaaacagaaataggagcacaacaagaaatatttaacataggaatagtttgtgtaaaatgcccatacacaataccaaaactaatccatgttgaatcaacaaaaaaagactggggctttgtattttatgatggactatttggaaatggcaaactaccagatgggtcaggacacgttccaacatacctacaagaaagatggtatcctagaatgagatttcaacaaaatgttatgcatgacatatgtcaaacaggcccatttagctacaaagatgaactaaaaagcacagtacttacatgcaaatacaagttcaaattcttatggggtggcaacttaatacctcaacaggtcgttaggaatccctgcaagtcagacggacggttcgacattgacccccatagattccctcgtgagctacaaattgcggaccctcgcaccatggggccccaatgggttttccacacctgggatttcagacgtggactgtacggcaaagatgctatcaaaagagtgtcagaaaaaccagatgatgatgaactctatactttctttccaaaaaaacctcgcctttctacaccagcagacgccccaggcctccaagaaggaggcttctttttccagaaccaccaagaaacaacatcagaagaagaagcagaagcccaagaagaaacgcaggcgcaaccggagcagcagcagcgagtcctcagactgcagctcagacagcagcagcacctcggggaccagctgcgactcctatatcagcaggtcctcaaaacccaagcaggtctccacctaaacccacttatattgggccttgcataaataaagtatacatgtttccagaaagcaagcccagaactcctaccagccaagactgggctcaggagtacgagatggcccgcatatttgacaggcctgccagatccaacctttcagacactcccttttatccctgggtcccaaaacctttcaatgttacttttgctcttaaattcaaataaacaaggccgtgggagtttcacttgtcggtgtctacctctataagtcactaagcactccgagcgtcagcgaggagtgcgacccttccccctgactcaaccccccccccagcgggggggctccgccccccggccccccccccccgaagtccgtcactacccacgtgactcccacaggccaaccagaaccttctacgtgcacttcctgggctgggtttatgagagcatataactaagtgcacttccgaatggctgagttttccacgcccgtccgcagcggtggagcacctcaggagcgacccccgcgtcccgaggg

SEQ ID NO: 1353 - protein, 734 aa, Alphatorquevirus sp.; identical to SEQ ID NO: 538

SEQ ID NO: 1354 - protein, 162 aa, Alphatorquevirus sp.; identical to SEQ ID NO: 539

SEQ ID NO: 1355 - protein, 55 aa, Alphatorquevirus sp.; identical to SEQ ID NO: 540

SEQ ID NO: 1356 - DNA, 3113 bp, Alphatorquevirus sp.
ttggacactgtagctgtgaatcagtaacgaaagtaggggcaattcgggctcgggactggccgggccctgggcaaggctcttaaaaaagctatgtttctacgcagagctcaccagaaaaggatactgctactgcaaattgtgccagctacaccgcaggcacctgccatgagctttcgcgcacccaccattcaaggtggagtccgagaccagcaatggttcgaggcctgtattcgatcacacgccgctttctgtggctgtggcgatcccgtgcttcattttaataacattgctgctcgctttcactatctgcctgctacctcctcgcctctggaccctaccggaggagcgccgccgcgccgcccgcagctacgccgccttgcagcgctcccggcggcgccccccagcacctctgagagccagccatggcgtggtggtggtggagacgatggcgccggtggcccagacgccgctggaggacccgtcgccgacgccgagtacgaaccagaagacctagacgacctgttcgccgctatcgaagcaaatacacagtaaggaggcgaaggcggagagggtggcgagggcgacgtaggcgcagactgtacagacgcagatacactataaggagaaaaagaaagaaactcatactgaaacagtggcagcccgccaatgttagaaaatgcaaaataaggggcctgtttccaatagttatctgtggacacggcaagagtgccaataactatgccctacactcggacgacgtactaccaatgagacaggcttttggaggggctctaagcactgtatcttttagcctaaaagtactgtatgatcagtatttaagacacctgaacagatggagcacctcaaacgatgtgctagaccttgccaggtacctaggatgcaccttttggttttacagagacaaaaaaactgactacttagtgcagtatgacatctctgctccctacaagctagacaaagacagcggaccgtcctaccatccaggagtactcatgcaagccaaacacaaagtactagtgcccagttttgacacgcaccccaaaggaaaagctaaagtaaaaattagaattaagccccccaaactttttatagataagtggtactctcaagaggatctgtgtaccgttaatcttgtaacatttgtggtcagcctagcttccttctcacatccgttctgcccaccactaacgaacaacccttgtgtaaccttccaagtgttgaacaacttctacaattccgttataggttcctcaattaatgttgcagacactacagtaaactcagtcttcaataactttttatataacaaaggagccttttaccaacaagtactagtagactcttacattaaagaaattaaaacaaatcctgatggctctcctgtagttgcaggccctaacgatagaccctcaacaagcgaaatgagtgcttataacgaatgggtaaaatctaaatttaaagtaccaggaacatctgttcactacaacttttgcacatacaaacctgacagtgccaaattaaatacacttagacaatactactttcattgggaaactgcacagtccacaaaccataaatttaatgtagaacacgtaccacacgcgggcacaaaacctacaaaagactggtgggagtatagaacaggcctattttcacctatatttcttagtccatacagaaccagtcccatagacagctggttgctggcatacagagacgtgtcctacaatccactaaatgacaagggagtaggcaaccgagtatggatgcagagtctagtaaaaccagacacccagttcacactgccctcatgtgtatttgtactagaagacaaacccctgtggtgctgtttctatggctatactgactttataaagagtgtcagagagggccaagacatagactttgaaaacattatttgcattcagtgtccttacacagagcctcctctatatgaaaagcacaaccccaacatgggcttcgtagtatatgacagcaactttggcaatggcaaatggctagacggaaccgggttcgtcccggtagaataccagtgccgctggcggccctgcatagctttccagcaacaggtactaacagacattaccatgagcgggcccttcagctacaaagacgatgttaaaaacacctgcatacaggccaaatacagatttgactttaaatggggcggcaatattctttatcagcagaccatcagaaacccatgtaaagacggacaagctaccgattcccatagacagcctagagacgtacaagtcactgacccgcttaccatgggaccccgatacgctttccaccaatgggactggcgacgtgggtggcttagtgacaaagctctcaaaagaatgctccagaaaccgctcgattttgaactgtatccaatcaatccaaagagacctagactattccctcccacagaagcaggagaaggagaggtcccaaaagaaagctcattttcagaggaagaaagcgagccgtcctcgcaagaagagacgaggccggagaggctccagctcaagctccgacagcagctccgagagcagcgagagctccgagtccacctcaagcacctcttccagcagctcctcaagacacaagcggggctccacctcaacccgctcttattcaaccagcaataaacaaagttcttctgtttccagaaatgggtccaaagcccgctcctactagtggagactgggaaacagaataccaggcctgtaaattctgggacagacctcccagaaaatttctcaccgatacacccttttatccctggatgcctccggcacccccaaaattctctgttagtttcaaactaggcttcaaaccctaaataaacaaggccatacactgttcacttgtcggtgtctacctctataagtcactaagcactccgagcgaagcgaggagtgcgacccccctacccggtagcaacttcttcggagtccggcgctacgccttcggctgcgccggacacctcagaccccccctccacccgaaacgcttgcgcgtttcggaccttcggcgtcggggggggtcgggggctttattaaacagactccgagttgcca

SEQ ID NO: 1357 - protein, 752 aa, Alphatorquevirus sp.; identical to SEQ ID NO: 847

SEQ ID NO: 1358 - protein, 161 aa, Alphatorquevirus sp.; identical to SEQ ID NO: 848

SEQ ID NO: 1359 - protein, 60 aa, Alphatorquevirus sp.; identical to SEQ ID NO: 504

SEQ ID NO: 1360 - DNA, 3111 bp, Alphatorquevirus sp.
cgggtgccggaggtgagtttacacaccggagtcaaggggcaattcgggctcgggactggccgggctatgggcaaggctcttaaaaaagcatgtttctcggcaggcattggagaaagaaaagggcactgctactgctaccagtgccagctaaaccgaaagcactttctcgacagatgagctggagcagacccgtgcacgatgagcgcggaatacagcgcaactggttcgagggggtcattcgcacccacgctgcttgctgtggctgtggtaacgctagtactcatctggctactctggcccagaggtacgggtaccctcccctaccttcgcaaaccccgcgacccggcacctctacacctgtgagcaccccagaacagatccgtagagcccgggccctgcccgcggctccggaccacccccctgccctgccatggcatggggatggtggaagagacggcggcgcggctggttccgacggcggtggacccgtggcagaattcgcagaagatggcctagacggacttatcgccgccctcgacgacgaacagtaaggaggcgcagacggaggaggagggggagacgaaaattcagacgctacagatttaagagacgctaccgtagacgtaaaaagacccaaaaaattaaactgacacaatggcaaccagctaagataaaacgctgctttatgatagggtactttcctacaattattcaaggacaaggacggtggtcagacaactttactagtcacatagaagacaaagttagcagaggaccctttgggggcgggcacagcaccagcaggtggtctctaaaagtactctacgaagaaaaccagagacaccacaacttctggacagccagtaacagcgacctagagcttgccagattctttggcagctcctggaggttttacagacatgacacacaagactacatagtgacctggaacaggaaggctcccttgggaggcaacatactgacagcccctaacatgcacccgggaattgccatgctcagcaaacacaaggtggtggttccaagtaaactgaccagacccaagggcaaaaaatacataaaggtgaacataaaaccccccactacatttatagataagtggtactttcagaaagacatatgtgacctcacattgctaaacttgaacgttgtatcatgtgacctgcggtttccgttctgctcaccacaaactgacaacgtttgtgtcaccttccaggtgcttgcaccagtgtataacgacttcctctctataacctcaaaagaactaacaaacgagaactggaaaaattactataaaaagtttttagaaaaagctatgccatccacaaaacaaagaaaagcaaacattttaaacactttcttaacagagggatcatttagaaaaccacaagtagacaagtatagaaaacccctaacagacgagcaatactactcacctaaagatgcacagtggggagatcccattcatataatattatcagatgaaactgttgcaaaccaaaaaccacaaagtttggaacaaataattgaaaaaattcaacaaaatgcagacaacgttcttaaaaaagttaatcaagaactagctgaatatgaaacaacacttgcaaatcatggtttatttacacactggacaggcatatatggacctccctttttagactacaacagaataagtccagaaattaaaggcctgtataaagatataatatacaatcctctaatagacaaaggagtaggaaaccacgtatgggtagactactgcagtaaagcagacaacatatactcagaaactcaaagcaaatgtcacatagcagacttacctctgtggtgtgccctgtttggatacgcagactgggtaaaaaaagacacaggaaactggggtatagtagactgggctagagtacttataatatgtccttacacctatcccaaactatatgacagcagcaacccaaacgcaggctttatagttttcagttctaactttgccatgggacgaatgcctgacggtagcaaatacgtacctatagcaatgagacacaagtggtaccccacaatgcttaaccaacagccagtgctagaagacattagtgagtctggaccgtttgcaaacagagacaaaacacccagcgtccaactgactgccaagtacaagttccgatggcattttggtggcaatcctgtttccgaacaggttattaaagacccgtgccaacagcccaccttccaaatgcccggaaccggtacactccctcgcagaatacaagtggcggacccgaaatacctcgggccccagtacaccttccactcgtgggactacagacgtgacttctttaacagaaagactattaagagaatgtcagaacaaccagaaacttttgagtctatattctcaggcccaaaaaaaccaagggtggacctcgacaaaatccaactgcaagaagacaactattcccaagaccaaagaaaacagaaaccatgggaagacagcgagacccagacagagagcgaagtcccatcagaagaagagacgcagaacctacagcagcagctccaacagcagctccgagaacaaaagcagctcagacagggaatcaactgcctcttcgagcagctgataaaaacccagcagggagtccatatagatccctcccttgtataggcccaaaagccttacttttcccagagagagcacccagaatccactctaagggagactgggaaacagagtatcaggcctgcagagcgtttgacagaccccctagaagcaacctgtcagactcaccctactatccttaccttccaccaccccccgaaaaattctatgtaacctttaagcttggcttcaaataaacaaggccgtgggagtttcacttgtcggtgtctacttataaaagtcactaagcactccgagcgaagcgaggagtgcgaccccctgccctgggcccacttcttcggagccgcgcgctacgccttcggctgcgcgcggcacctcagacccccaatataaagcgctgcacttccgaatggctgagttttccacgcccgtccgcagcggtgaagccacggaggcagatcagcgcgtcccgaggg

SEQ ID NO: 1361 - protein, 749 aa, Alphatorquevirus sp.
MAWGWWKRRRRGWFRRRWTRGRIRRRWPRRTYRRPRRRTVRRRRRRRRGRRKFRRYRFKRRYRRRKKTQKIKLTQWQPAKIKRCFMIGYFPTIIQGQGRWSDNFTSHIEDKVSRGPFGGGHSTSRWSLKVLYEENQRHHNFWTASNSDLELARFFGSSWRFYRHDTQDYIVTWNRKAPLGGNILTAPNMHPGIAMLSKHKVVVPSKLTRPKGKKYIKVNIKPPTTFIDKWYFQKDICDLTLLNLNVVSCDLRFPFCSPQTDNVCVTFQVLAPVYNDFLSITSKELTNENWKNYYKKFLEKAMPSTKQRKANILNTFLTEGSFRKPQVDKYRKPLTDEQYYSPKDAQWGDPIHIILSDETVANQKPQSLEQIIEKIQQNADNVLKKVNQELAEYETTLANHGLFTHWTGIYGPPFLDYNRISPEIKGLYKDIIYNPLIDKGVGNHVWVDYCSKADNIYSETQSKCHIADLPLWCALFGYADWVKKDTGNWGIVDWARVLIICPYTYPKLYDSSNPNAGFIVFSSNFAMGRMPDGSKYVPIAMRHKWYPTMLNQQPVLEDISESGPFANRDKTPSVQLTAKYKFRWHFGGNPVSEQVIKDPCQQPTFQMPGTGTLPRRIQVADPKYLGPQYTFHSWDYRRDFFNRKTIKRMSEQPETFESIFSGPKKPRVDLDKIQLQEDNYSQDQRKQKPWEDSETQTESEVPSEEETQNLQQQLQQQLREQKQLRQGINCLFEQLIKTQQGVHIDPSLV

SEQ ID NO: 1362 - protein, 153 aa, Alphatorquevirus sp.
MFLGRHWRKKRALLLLPVPAKPKALSRQMSWSRPVHDERGIQRNWFEGVIRTHAACCGCGNASTHLATLAQRYGYPPLPSQTPRPGTSTPVSTPEQIRRARALPAAPDHPPALPWHGDGGRDGGAAGSDGGGPVAEFAEDGLDGLIAALDDEQ

SEQ ID NO: 1363 - protein, 124 aa, Alphatorquevirus sp.
MGRQRDPDRERSPIRRRDAEPTAAAPTAAPRTKAAQTGNQLPLRAADKNPAGSPYRSLPCIGPKALLFPERAPRIHSKGDWETEYQACRAFDRPPRSNLSDSPYYPYLPPPPEKFYVTFKLGFK

SEQ ID NO: 1364 - DNA, 3111 bp, Alphatorquevirus sp.; identical to SEQ ID NO: 1360

SEQ ID NO: 1365 - protein, 749 aa, Alphatorquevirus sp.; identical to SEQ ID NO: 1361

SEQ ID NO: 1366 - protein, 153 aa, Alphatorquevirus sp.; identical to SEQ ID NO: 1362

SEQ ID NO: 1367 - protein, 124 aa, Alphatorquevirus sp.; identical to SEQ ID NO: 1363

SEQ ID NO: 1368 - DNA, 3110 bp, Alphatorquevirus sp.
cgggtgccggaggtgagtttacacaccgaagtcaaggggcaattcgggctcaggactggccgggctttgggcaaggctcttaaaaatgcacttttctcgaataagcagaaagaaaaggaaagtgctactgctttgcgtgccagcagctaagaaaaaaccaactgctatgagcttctggaggcctccgatacacaatgtcacggggatccagcacctgtggtacgagtcctttcaccgtggccatgcttctttttgtggttgtggggatcctatacttcacattactgcacttgctgaaacatatggccatccaacaggcccgagaccttctgggccaccagcagtagaccccaaccccaacatccgtagagccaggcctgccccggccgctccggagcccccacaggttgatcccagaccggccctgacatggcatggggatggtggaagcgacggaggcgctggtggttccggaagcggtggacccgtggcagacttcgcagacgatggcctagaccagctcgtcgccgccctagacgacgaagagtaaggaggcgcagacggtggaggagggggagacgaaaagcaaggacttacagacgcagcagacgctttagacgtaggagacgaaaagcaaaacttataataaaactgtggcaacctgcagtcattaaaagatgcagaataaagggctacataccactgattataagtgggaacggcacctttgccacaaactttaccagtcacataaatgacagaataatgaaaggccccttcgggggaggacacagcactatgaggttcagcctctacattttgttcgaggagcacctcagacacatgaacttctggactagaagcaacgataacctagagctaaccagatacttgggggcttcagtaaaaatatacagacacccagaccaagactttatagtaatatacaacagaagaacccctctaggaggcaacatctacacagcaccctctctacacccaggcaatgccattctagcaaaacacaaaatattagtaccaagtctacagacaagaccaaagggtaaaaaagcagttagactaagaatagcaccccccacactctttacagacaagtggtactttcaaaaggacatagccgacctcacccttttcaacatcatggcagttgaggctgacttgcggtttccgttctgctcaccacaaactgacaacacttgcgtcagcttccaggtccttagttccgtttacaacaactacctcagtattaatgcctttaataatgacgattcagacaacaatttaatagcatttttaacgaaagcatttccaacaacaggcgcaaaagcaacaagtttaaatgcactaaatacatttagaacagaaggatgcataagtcacccacaactaaaaaaaccaaatacacaatcaaacaaaccatcagcttcacaatactttgcacctttagatgccctctggggagaccccatatactataatgaagataatgaaaataaaaacattactaatataattaaaaatatactaataaaaaacatgactacataccatcaaaaacttaaagaatttccactttcataccaaggaaacaaggccttttgccacttaacaggcatatatagcccaccatacctcaaccaaggcagaatatctccagaaatatttggactgtacacagaaataatttacaacccttacacagacaaaggaactggaaacaaagtatggatggacccactgactaaagacaacaacatatataaagaaggacagagcaaatgcctactgactgacatgcccctatggactttactttttggatatacagactggtgtaaaaaggacactaacaactgggacttaccactaaactacagactagtactaatatgcccttatacctttccaaagttgtacaatgaaaagcaaaaagactatgggtacattccgtactcctacaaattcggggcgggtcagatgccagacggcagtaactacataccctttcaatttagagcaaagtggtaccccacagtactacaccagcaacaggtaatggaggacataagcaggagcgggccctttgcacctaaagtagagaaaccaagcactcagctagtcatgaagtactcttttaactttaactggggcggtaaccctatcattgaacagattgttaaagaccccagcttccagcccacctatgaaatacccggtaccggtaacctccctagaagaatacaagtcatcgacccgcgggtcctgggaccgcactactcgttccgctcgtgggacatgcgcagacacacatttagcagagcaagtattaagagagtgtcagaacaacaagaaacttctgaccttgtattctcaggcccaaaaaagcctcgggtcgacatcccaaaacaagaaacccaagaagaaagctcacattcactccaaagagaatcgagaccgtgggagaccgaggaagaaagcgagacagaagccctctcgcaagagagccaagaggtccccgtccaacagcagttgcagcagcagtaccaagagcagctcaagctcagacagggaatcaaagtcctcttcgagcagctcataaggacccaacaaggggtccatgtaaacccatgcctacagtaggtcccaggcagtggctgtttccagagagaaagccagccccacctcctagcagtggagactgggccatggagtttctcgcagcaaaaatatttgacaggccagttagaggcaaccttaaagataccccttactacccatatgttaaaaaccaatacaatgtgtactttgaccttaaatttgaataaacagcagctttaaacttgcaaggccgtgggagtttcactggtcggtgtctacctctaaaggtcactaagggggctccgccccccggccccccccgtgctacgtcactaacccacgtgtctttcacagaccaatcgcagtctatgtcgtgcacttcctgggcatggtctacataattatataaatgcttgcacttccgaatggctgagtttttgctgcccgtccgcggagaggagccacggcaggggatccgaacgtcctgaggg

SEQ ID NO: 1369 - protein, 743 aa, Alphatorquevirus sp.; identical to SEQ ID NO: 1321

SEQ ID NO: 1370 - protein, 164 aa, Alphatorquevirus sp.; identical to SEQ ID NO: 1322

SEQ ID NO: 1371 - protein, 65 aa, Alphatorquevirus sp.; identical to SEQ ID NO: 1323

SEQ ID NO: 1372 - DNA, 3106 bp, Alphatorquevirus sp.
tgtcagaccacttcgggctcgcggggggcagtcaaggggcaattcgggctcgggactggccgggctatgggcaaggctcttagggttatcgctcttaaatatgttttttggcaggccttacagaaaaaagaaaagggcgctgctactgtctgagctgccagatccaaagaacaaaccacctagtgatatgagctggcgccccccggtacacaatgctgccggcatcgataggcaattctttgaagcctgctatcgatgtcacagtagttgctgcggctgcggcagctttattaatcatcttaatgtactggctgctcgctatggctttactggggggccggcgccgccaggtagtcctcggccggcgccccaagtaaggcccgcgcttcccgcgccggagcccgaccctgaggccgacaaccgtcagccatggcgtggagctggtggtggcaacgatggagacgccgcggctggaaacccaggcgccgccgttggagacgcctacgatggagaagacctcgacgccctgttcgccgccgtcgccgaagacgcagagtaaggagacggaggtgggggaagagacgggggcgacgcagacggtacacccgtagacgaaagagacgcattaagcccagaaactttaaaaagaaactagtactgactcagtggcacccctctgtagtaagacgctgctttatcaggggcatagtccccatccttatatgcgggcacacaaaatggaacagtaactacgccctgcatagcgaggactacacggaagagggccgctaccctcacggagggtccctctcgaccactacgtggtcactaaaggtgctgtacgacgagtacctgaagcaccgcaacttctggggctatccaaacacccagctagacctagccagatacaggggctgcaccttcaccttttacagacacaaaaagactgactttatagtgtggtggaacagaaggcctccctttaaactaaacaagctcagctgcccgttctttcacccgggcatgctcatgcagcaaagacacaagatactaatccctagctttgacactaaaccccatggcaaaaataaaattagagtcagaataaagccccctactctcttagaggacaagtggtacactcagcaagacttgtgttcggtaaacctggcgcaacttgtggttactgcggccgactttcaacatccgttctgctcaccacaaacgaacactccaaccacaaccttccaggtgttgaaagaaatgtattatgacactataggcatagttgacacacaagaaacttacaattcagttaatgataaaaatatatctaacacatacaatcaatttatggacaaattagtaacaaaactatacacaacaggatcatactggaactcttttcacacagcagaatatttcaaccccaacgtaacagacacatacaataacaaaatattcaatgagagaagctcaacattaccaaactggctaacaggaaaaggcaaccaaaaatttaacacaggcaacagcacccaatttggctacaatacttatgcgcctaacaaagttagtataacgacagcaaacgattgctactggacagcactcagcaaacaaaatgaccaagctacacaaatagggcaagcacgcgacaaacactttgagtatcacacgggcatttacagtcccatattcctcagcagacacagaagcacactaaactttgccagggcctaccaggacgttacatacaacccaaactgtgacagaggaattaaaaacagggtgtgggtacaggccctaactaaggccaccacagaatttgatgaaaaacgcagcaagtgcgttatcactgacctgcctctgtgggccgctttacactgctactccagctttgtagaagaggagctaggcatttcctctgaaatttacaacgcctgtatagtctgtgtacagtgcccttacacctttccccccatgtatgacaagaaaaacccaaacaagggatacgtgttctatgacaccctgttcggaaacggaaagaccccagacggacgcggacagatagacgtgttctggcagcagcggtggtacccccgcatggcctgccaggtgcaagttatgcacgacatcaccataactggacccttctcctaccacgacgaactagtgagtatacaactgactgctaagtacaaatttgacttcatgtggggtggaaacatgatctcctcacagatcatcaagaacccctgcaaagacacagacatggaaacctcctatcccagtagacagcgtcgcgacttacaaattgttgacccacactccatggggccctccttcgcgttccacacgtgggactacagacgaggactatttggtaaagatgctatcgacagagtgtcaaaagaacaagaccatgctccagagtatcctaacccatacaaaaagcctagatattttcccccaacagagagaacagagctccaagggcaagaagaagactggagtttccaggtcgaaagcgaggggtcgtcgtcagaagagagcgatcaagaagcccaagaagaggaggtactccagttccagccaggacagcagctccagcaactccacctgcagctcgcgcagcagcagcacatcgggcagcagctccgattcctgttccaacaaatgctcaaaacccaagccaacctgcacctaaacccatatacatacacccagctataaacaaggtgttcatgtttgaaccccagggccccaggcctataaccaccagacaggggtgggaagacgagtacacaactgccagcatatggggcaggcccgtgcgctccttctacacagacacccccttctaccccgaggttcccaagatgccccctcaattctctgtaagtttcaaactcggctggaaataaaaatacaaggcctttcactgttcacttgtcggtgtctacctcttaaggttactaagcactccgagcgtcagcgaggagtgcgacccttccccctggtgcaacgccctcggcggccgcgcgctacgccttcggctgcgcgcggcacctcggacccccgctcgtgctgacacgcttgcgcg

SEQ ID NO: 1373 - protein, 768 aa, Alphatorquevirus sp.
MAWSWWWQRWRRRGWKPRRRRWRRLRWRRPRRPVRRRRRRRRVRRRRWGKRRGRRRRYTRRRKRRIKPRNFKKKLVLTQWHPSVVRRCFIRGIVPILICGHTKWNSNYALHSEDYTEEGRYPHGGSLSTTTWSLKVLYDEYLKHRNFWGYPNTQLDLARYRGCTFTFYRHKKTDFIVWWNRRPPFKLNKLSCPFFHPGMLMQQRHKILIPSFDTKPHGKNKIRVRIKPPTLLEDKWYTQQDLCSVNLAQLVVTAADFQHPFCSPQTNTPTTTFQVLKEMYYDTIGIVDTQETYNSVNDKNISNTYNQFMDKLVTKLYTTGSYWNSFHTAEYFNPNVTDTYNNKIFNERSSTLPNWLTGKGNQKFNTGNSTQFGYNTYAPNKVSITTANDCYWTALSKQNDQATQIGQARDKHFEYHTGIYSPIFLSRHRSTLNFARAYQDVTYNPNCDRGIKNRVWVQALTKATTEFDEKRSKCVITDLPLWAALHCYSSFVEEELGISSEIYNACIVCVQCPYTFPPMYDKKNPNKGYVFYDTLFGNGKTPDGRGQIDVFWQQRWYPRMACQVQVMHDITITGPFSYHDELVSIQLTAKYKFDFMWGGNMISSQIIKNPCKDTDMETSYPSRQRRDLQIVDPHSMGPSFAFHTWDYRRGLFGKDAIDRVSKEQDHAPEYPNPYKKPRYFPPTERTELQGQEEDWSFQVESEGSSSEESDQEAQEEEVLQFQPGQQLQQLHLQLAQQQHIGQQLRFLFQQMLKTQANLHLNPYTYTQL

SEQ ID NO: 1374 - protein, 167 aa, Alphatorquevirus sp.
LAGLWARLLGLSLLNMFFGRPYRKKKRALLLSELPDPKNKPPSDMSWRPPVHNAAGIDRQFFEACYRCHSSCCGCGSFINHLNVLAARYGFTGGPAPPGSPRPAPQVRPALPAPEPDPEADNRQPWRGAGGGNDGDAAAGNPGAAVGDAYDGEDLDALFAAVAEDAE

SEQ ID NO: 1375 - protein, 138 aa, Alphatorquevirus sp.
LEFPGRKRGVVVRRERSRSPRRGGTPVPARTAAPATPPAARAAAAHRAAAPIPVPTNAQNPSQPAPKPIYIHPAINKVFMFEPQGPRPITTRQGWEDEYTTASIWGRPVRSFYTDTPFYPEVPKMPPQFSVSFKLGWK

SEQ ID NO: 1376 - DNA, 3104 bp, Alphatorquevirus sp.
ccagacttcgccataaggcctttatcttctttcaaggggcaattcgggctcgggactggccgggctatgggcaaggctcttaaaaaagcatgtttttcggcagggtctggagaaagaaaagggcgctgccactgtccgagctgcgaactcctgcgaaaaaaccacctgtaatgagctggtcccaacctatgcacaatgtcaccacccgcgaaggcttcttttacgccgggtgtaagcagcttcataattgtttttgcggctgtgatgattttattaatcatcttcttcgcatccagacccagcagggtccctctccctcgcggcccttcactcctccgtcaacaccacgccctgtgatccgtagagccctgccggcaccggcggctccggacgcaccggcgccatggcgtggagctggtggtgggcccgccgccgacgcagaccgtggacccggaggagatggaggagactacgcacccgcagacctagacgacctgtacgccgccgtcgacgccgaaaacgcagagtaaggaggagacggtggggaaggagacgagggcgacggacactttacagacgcaaatttagaaagagacgcaggcgacgaaaaaagctagttttaacacaatggaaccctcagactattagagcatgttctataaggggctcagtgtgtctagttatgtgtggtcacacaaaagcaggcagaaactatgccctacactctgaagactatgtcccccaagtgcatgccatgggagggtcctttagcactaccacctggagcctaaaagcactatatgacgagcaccagaaattccataacaaatggagctaccctaacacccagctagacctagccagatacagaggatgccgctggtggttttacagagaccccaaagtagactacattgttacctactacactacacctccatttaaacttaacaaatacagttctcccatgctacaccctggcatgatgatacagtacaaaaaaaaaatactagtaccaagctatcaaacaaaaccaaaaggaaaaggcagaataagtgtttttattaagcccccaactctttttgaggacaaatggtacacccagcaagacctctgtcccgttaatcttttgtcacttgcggttagcgcatgttccttcctgcatccgttctgcccaccagaaagtgacaacatgtgtattacattccaagttttgaaagacttctattaccaacagatgggtgttacacaaattaatggcacaacactaactgaacctgataaaaacatttttaaaaaactttatgaaactccatccttctggcagtcccaccacacatcagcacagttaaacacatctcaaaagccaggcaagcaaacctcagaagcaatacctgaaagagagtggcttcaaggagacggtacaaataaatttaaaacaggaaacaatagtatatacggccaaccaaattataatcctaactataccaaattagaatcaattagacaatggtactggaagcaagaaacagagactaatgatgtacattcctcttatggccgtcctatatacaatgcagtagactaccacctaggaaagtacagcatgatatttttaagcccatacagaaccaacacacaatttgaaacagcatactcagacattacatacaacccaaacacagacaaaggactaggtaacaaaatgtggattcaatctgttactaaaacccacaccaaactagactcctcatgtagatgcttattagaagacattccactgtgggctatggccacaggatacggagagttttgtgagtcagaaattaactcagaggtgtggaacctatatattgtatgcattgtatgcccttacactaaaccaccactatggaaaaaaacagaaacgcctgaaggctgggtattttatgacacactgtttggagatggcaaaatgcccaccgggtcaggcctagtacccgtgtggctacagagcaggtggtaccccagactagtgttccaacaacaagtgctacacgatatataccttacagggccctttagttacaaagatgacctaaagagctttactataaatgccaggtacaaatttaaattcttatggggcggcactataatccccgaacaggtcattaaaaacccgtgcaaagagcaagacacgccattcacctttaccggtagacagcctcgcgacctacaaattactgacccgcagaccatgggcccagaatgggttttccacacctgggactggcgacgaggactatttggtgaaaatgctatcaaaagagtgtcagaacaaccaagcaatgatgcagactattatgctccaccaaaaaaacctagactattccctccaacagacctccaagagcaagaaagaggctcagatttcacactccaggagctcaggatcctctcggagagggcgccgtcgcaaacaagcgaagaagaggacccgcaggaggagcaccagctccagcagcaagagctccagctcagactccagcagcagttcagaatcaggcagcaactgcagcacctattcgtacaagtcctcaaaacccaagccggtctccatataaacccattatttttaaaccctgcataaaccaggtgttcatgtttcctcctgacacccctaaacccattaccactgcagaagattggaaacatgagtatgaatcctgtaagtactggcatagaccccccagaaagtaccttacagaccgtcccttctacccctggatgcccaaggagccccctcagtgtcgtgtcagctttaaacttggcttccaataaaacagcaaggccattcaaatttcacttgtcggtgtctacctctataagtcactaagcactccgagcgccagcgaggagtgcgacccttcccccttactcaacttcttcggagccgcgcgctacgccttcggctgcgcgcggcacctcagacccccgctcgtgctgacacgctcgcgcgtgtcagaccacttcgggctcgcgggggtcggaaaatttgctaaacagactccaagttgccattggacactggagctgtaaatcagtaacgaaagtgagtgggg

SEQ ID NO: 1377 - protein, 742 aa, Alphatorquevirus sp.; identical to SEQ ID NO: 510

SEQ ID NO: 1378 - protein, 146 aa, Alphatorquevirus sp.; identical to SEQ ID NO: 511

SEQ ID NO: 1379 - protein, 59 aa, Alphatorquevirus sp.; identical to SEQ ID NO: 512

SEQ ID NO: 1380 - DNA, 3103 bp, Alphatorquevirus sp.
cgggtgccggaggtgagtttacacaccgcagtcaaggggcaattcgggctcgggactggccgggctatgggcaaggctcttagggtcatcgctcttaaaaatgttttttggcagaccttacagaaaaaagaaaagggcgctgctactgcctgagctgccaaatccaaagaagaaaccacctggtgatatgagctggcgccccccggtacacaatgccgccggcatcgataggcaattctttgaagcctgctttcgatgccacagtagttgctgcggctgcggcagctttattaatcatcttaatgtactggctgctcgctatggctttactggggggccggcgccgccaggtggtcctcggccggcgccccaagtgaggcccgcgcttcccgcgccggagcccgacccggaggccgacaaccgtgagccatggcgtggacctggtggtggcaacgatggaaacgccgcggctggaaacccaggcgccgccgctggagacgcctacgatggagaagacctcgacgccctgttcgccgccgtcgccgaagacgcagagtaaggagacggaggtgggggaagagacgggggcgacgcagacggtacacccgtagacgaaagagacgcattaagcccagaaactttaaaaagaaactagtactgactcagtggcacccctctgtagttagacgctgctttatcaggggcatagtccccatcctcatatgcgggcacacaaaatggaacagtaactacgccctgcatagcgaggactacacagaagagggccgctactctcacggtgggtccctctccaccactacgtggtctctaaaggtgctgtacgacgagtacctaaagcaccacaacttctggggctacccaaacacccagctagacctggccagatacaggggctgcacttttactttttacagacacaaaaagactgactttatagtatggtggaacagaaaacctccctttaaactaaacaagctgagctgcccgtcctttcacccgggcatgctcatgcagcagaaacacaaggtgctaattcctagctttgacactaaacccgggggcagagctaaaattagagtcagaataaagccccccactctgttagaggacaagtggtacactcagcaagacttgtgtccggtaaacctggcgcaacttgtggttactgcggctgactttcaacatccgttctgctcaccacaaacaaacactccaaccacaacgttccaggtgttgaaagacatgtattatgacaccataggcatagttgacacagaagaaccatacacttcagttaataataaaagtatatctaacaaatacaatatgtttcttcaaaatctacaaaacaagctgtactccacaggttcctactggaactcgtttcacacagcagaatacttcaaccccaatatcacagacacttacaacaacaaaatatttagtaactcaaacacatcattagcgacctggctaacaacaaaaggcaacaacaactttcaaactggtaacagcacccagtttggctacaactcatacaaacctaccacagccaacataaagtcagcaaataatgcatactggactgcactaacaaaaacaaacgaccaggcaacacaaataggacaagctcgcgcccaacaatttgaataccacactggcatctacagccccatatttctcagcagacacagaagcacactaaactttgccagggcctaccaagacgttacatacaacccaaactgtgacagaggagttaaaaacagagtgtgggtacaggccctaaccaaggccaccacagaatttgacgaaaaacgcagcaagtgcgttatcactaacctgcctctgtgggccgctctgtactgctaccacaactttgtagaagaggagttaggcatctcctccgagatctacaacgcctgtatagtctgtgtacagtgtccttacacctttccccccatgtatgacaagaaaaacccaaacaagggatacgtgttttatgacgccctgtttggaaacggaaagaccccagacggacggggacaggtggacgtgttctggcagcagcggtggtacccccgcatggcctgccaggtgcaagtcatgcacgacatcaccatgaccggacccttctcctaccacgacgaactagttagtacacaactgactgctaagtacaaatttgacttcatgtggggtggaaacatgatctcctcacagatcatcaagaacccctgcaaagacacagacatggacaccacctatcccggtagacagcgtcgcgacttacaaattgttgacccacactccatggggccctccttcgcgttccacacgtgggactacagacgcggactgtttggtaaagatgctatcgacagagtgtcaaaacaacaagactatgctccagagtatcctaacccatacaaaaagcctagatattttcccccaacagacagggcagagctccaagggcaagaagaagactggagtttccaggtcgaaagcgaggggtcgtcgtcagaagagagcgatcaagaagcccaagaagaggaggtactccagttccagccaggacagcagctccagcaactccacctgcagctcgcgcagcagcagcagatcgggcagcagctccgattcctgttccaacaaatgctcaaaacccaggccaatctgcacctaaacccatatacatacacccagctataaacagggtctttatgttccagcctgagggtcccaggcctataaccaccagagaggggtgggaggacgagtacacaactgccggcatatggggcaggcccgtccgctccttctacacagacacccccttctaccccgaggttcccaagataccccctcaattctctgtaagtttcaaactcggctggaaataaaaatgcaaggcctttcactgttcacttgtcggtgtctacctcttaaggtcactaagcactccgagcgccagcgaggagtgcgacccttctccctggtgcaacgccctcggcggccgcgcgctacgccttcggctgcgcgcggcacctcgcggagggtgatccccgcgtcccgaggg

SEQ ID NO: 1381 - protein, 768 aa, Alphatorquevirus sp.
MAWTWWWQRWKRRGWKPRRRRWRRLRWRRPRRPVRRRRRRRRVRRRRWGKRRGRRRRYTRRRKRRIKPRNFKKKLVLTQWHPSVVRRCFIRGIVPILICGHTKWNSNYALHSEDYTEEGRYSHGGSLSTTTWSLKVLYDEYLKHHNFWGYPNTQLDLARYRGCTFTFYRHKKTDFIVWWNRKPPFKLNKLSCPSFHPGMLMQQKHKVLIPSFDTKPGGRAKIRVRIKPPTLLEDKWYTQQDLCPVNLAQLVVTAADFQHPFCSPQTNTPTTTFQVLKDMYYDTIGIVDTEEPYTSVNNKSISNKYNMFLQNLQNKLYSTGSYWNSFHTAEYFNPNITDTYNNKIFSNSNTSLATWLTTKGNNNFQTGNSTQFGYNSYKPTTANIKSANNAYWTALTKTNDQATQIGQARAQQFEYHTGIYSPIFLSRHRSTLNFARAYQDVTYNPNCDRGVKNRVWVQALTKATTEFDEKRSKCVITNLPLWAALYCYHNFVEEELGISSEIYNACIVCVQCPYTFPPMYDKKNPNKGYVFYDALFGNGKTPDGRGQVDVFWQQRWYPRMACQVQVMHDITMTGPFSYHDELVSTQLTAKYKFDFMWGGNMISSQIIKNPCKDTDMDTTYPGRQRRDLQIVDPHSMGPSFAFHTWDYRRGLFGKDAIDRVSKQQDYAPEYPNPYKKPRYFPPTDRAELQGQEEDWSFQVESEGSSSEESDQEAQEEEVLQFQPGQQLQQLHLQLAQQQQIGQQLRFLFQQMLKTQANLHLNPYTYTQL

SEQ ID NO: 1382 - protein, 167 aa, Alphatorquevirus sp.
LAGLWARLLGSSLLKMFFGRPYRKKKRALLLPELPNPKKKPPGDMSWRPPVHNAAGIDRQFFEACFRCHSSCCGCGSFINHLNVLAARYGFTGGPAPPGGPRPAPQVRPALPAPEPDPEADNREPWRGPGGGNDGNAAAGNPGAAAGDAYDGEDLDALFAAVAEDAE

SEQ ID NO: 1383 - protein, 138 aa, Alphatorquevirus sp.
LEFPGRKRGVVVRRERSRSPRRGGTPVPARTAAPATPPAARAAAADRAAAPIPVPTNAQNPGQSAPKPIYIHPAINRVFMFQPEGPRPITTREGWEDEYTTAGIWGRPVRSFYTDTPFYPEVPKIPPQFSVSFKLGWK

SEQ ID NO: 1384 - DNA, 3100 bp, Alphatorquevirus sp.
aacagactccgagttgccattggacactggatcaaggggcaattcgggctcgggactggccgggccccgggcaaggctcttaaaaaatgcgcttttccaggatcgctcgctcgaaaaggaaagtgccactgccaacgctgccagtactaccgccgcctgggactatgagctggcgccctccggtccacaatgccgctggaatcgaccgtaactggttcgaatcctgtttcagatctcacgctagcagttgcggctgtggaaattttattggccatcttaatactctggctactcgctacggctttactcctgggcccgcgccgccgcctggtggtccaggcccgcggccgccagtaccagtgaggccccggcacgctgccggagacggtaaccagcccagagccctgccatggcgtggggatggtggagacggagacgctggcccacctaccgaaggtggcgccgctggagacgccgcagaagagtaccgcgaagaagacctcgacgagctgttcgccgctatggaaagagacgagtaaggaggcgccggtgggggaggcggcggtaccgaaggggctacagacgcaggggcgcggtcagactaagacgcagacgcagacggggacgtaagagacttatactgactcagtggcatccccaaacccgtagaaagtgcaccatcaccgggtacctaccggtggtgtggtgcggctacctccgagccgccagaaactatgcctaccactctgacgactccacaaaacagccagacccctttggaggcgcgctgagcactacctcatttaacctaaaggtgctgtacgaccagcaccagagaggactgaacaggtggtcgttccctaacgaccaactggacctggctcgctacaaggggtgcgaactgacattttacagacagaaagccgcagactttatagcagtgtatgacatctctgccccctacaaactagacaagtacagctctccaagctaccaccctggcaacatgataatgcagaaaaagaaaatcctaattcccagctatgacactaaccccaggggtcgccaaaaagttaaagttaaaattccccccccccccaaactgttcgttgataagtggtatgcacaggaggacctctgcgacgttaatcttgtgacacttgcggttagcgcagcttcctttacacatccgttcggctcaccactaacgaacaatccttgtgtaaccttccaggtgcttgacgcaatatactattccgtaataggttacagttcctcaaatgagaaaaaaaaaagtgtacttgaaacactatacaaacaaaatgcatactgggcctcacacttaactccttactttaccactggccttaaaattccgtttccaaacaatactactcctacaaatgctggaaatggtaatgcaactacacttactacaacaggtagccccggaaacaacattaaaatagcaggtgacagcaactacaactggtacccctataaccttaaaaacaaaactggtaccttacatacaataagagagcagtacttcaaatgggaaacagatgaaggcccacaggccacatctgattatggcaaacaccacacttggactaagcccaccgatgactactacgagtaccaccttggcctattcagccccatattcatagggcccaccagaagcaacaaactgtttgccacagcgtaccaggacgtgacctataaccccctaaacgacaaggcggtgggcaacaagttttggttccaatataacacaaaggcagacacccaggtggccaaacagggctgctactgcatgctagaggacattcccttttgggccgccatgtatggcttctctgactttatagagagcgagctaggcccctttcaggacgcagagaccgtgggctatatatgtgcaatatgcccctacacggagccccccatgttcaacaaacagaatcccacgcagggctatgtgttttatgactcattttttggcaatggcaagtggatagacggacggggacacatagagccttactggctgtgccgctggaggccagaaatgcttttccagcagcaagtcatgagagacattgtacagaccgggccctggagctataaagacgaaagcaaaaactgtgttctgcccatgaagtataagttcagattcacatggggcggcaatatggtctcccaacagacaatcagaaacccctgcaagactgacggacaacttgccccctccggtagacagcctagagaagtacaaattgttgacccacgcaccatgggtccccgctgggttttccactcctgggactggcgacgtggctaccttagtgagacagctctcagacgcctgcgagaaaaaccgctggactatgaggcgtatatgcaaaaatcaaaaagacctagactgttccctgttacagagggcgacgaccagtccccccagcaaggcgacgactcgtattccgaggaagaaaagtcgccgcggttcaccgaagagacgacgcagacgctacagctccagctccagcgccagctccggcaacagcagcgcctcggagagcagctccagttcctccaacaccacctgctcaaaacgcaagcgggtctccaaataaacccattattgttggtccgccagtaaacagggtataccttttcccccctgagggtccccgtcccataaccacctctcagggctgggcagatgagttctgtactgcaaagcactgggacaggcccactcgcaccaactacacagacacccctacctatccctggatgccaactcagttcaaagtgtcttttaaacttggctttcaataaaatttgctcagcttcaactttctaggccgtgggagtttcactggtcggtgtctacctcttaaggtcaccaagcactccgagcgcagcgaggagtgcgacccttttctctgttcaccccccctgcccggtagcaacgccctcggagtccggcgctacgcgctgcgcgctgcgccggacacctcggaccccccctccacccgaaacgcttgcgcgtttcggaccttcggcggcgggggggtcgggagctttatta

SEQ ID NO: 1385 - protein, 751 aa, Alphatorquevirus sp.
MAWGWWRRRRWPTYRRWRRWRRRRRVPRRRPRRAVRRYGKRRVRRRRWGRRRYRRGYRRRGAVRLRRRRRRGRKRLILTQWHPQTRRKCTITGYLPVVWCGYLRAARNYAYHSDDSTKQPDPFGGALSTTSFNLKVLYDQHQRGLNRWSFPNDQLDLARYKGCELTFYRQKAADFIAVYDISAPYKLDKYSSPSYHPGNMIMQKKKILIPSYDTNPRGRQKVKVKIPPPPKLFVDKWYAQEDLCDVNLVTLAVSAASFTHPFGSPLTNNPCVTFQVLDAIYYSVIGYSSSNEKKKSVLETLYKQNAYWASHLTPYFTTGLKIPFPNNTTPTNAGNGNATTLTTTGSPGNNIKIAGDSNYNWYPYNLKNKTGTLHTIREQYFKWETDEGPQATSDYGKHHTWTKPTDDYYEYHLGLFSPIFIGPTRSNKLFATAYQDVTYNPLNDKAVGNKFWFQYNTKADTQVAKQGCYCMLEDIPFWAAMYGFSDFIESELGPFQDAETVGYICAICPYTEPPMFNKQNPTQGYVFYDSFFGNGKWIDGRGHIEPYWLCRWRPEMLFQQQVMRDIVQTGPWSYKDESKNCVLPMKYKFRFTWGGNMVSQQTIRNPCKTDGQLAPSGRQPREVQIVDPRTMGPRWVFHSWDWRRGYLSETALRRLREKPLDYEAYMQKSKRPRLFPVTEGDDQSPQQGDDSYSEEEKSPRFTEETTQTLQLQLQRQLRQQQRLGEQLQFLQHHLLKTQAGLQINPLLLVRQ

SEQ ID NO: 1386 - protein, 150 aa, Alphatorquevirus sp.; identical to SEQ ID NO: 1253

SEQ ID NO: 1387 - DNA, 3100 bp, Alphatorquevirus sp.
cgggagccgaaggtgagtttacacaccgcagtctaggggcaattcgggcacgggtctggccgggctatgggcaagactcttaaaaaatttccccgctgtgttcttcggcaggacatcaagtcatgccgtggcgaccgccggtgcataacgtcccgggcagggaaagccagtggtttgcaagcgtttttcactcgcatgcagctttttgcggctgcggtgacgttgtcgggcatcttactagcattgttcctcgctttcctaacgccggtcctccgagaccacctccaggactagaccagcccaacctgggagggccggaaggtcccggaggtccccccagagccctgccagctctgccggccccggcagagcctgagccggcaccacgccgtggtggtggggaagatggaggcggcgccgctggggccgccgccgtcggagaccatggaggatacgaagaaggagatctagaagatcttttcgccgcggccgccgaagacgatatgtgagtaggcggtggcgccgccgcaatttcaggcgcagacgcagacggggcagacgcagggggcgacgaaagagacataaacccacccttgtactcagacagtggcaacctgacgtagtcagaccctgcaaaataacaggatggatgcccctaattatctgtgggtcaggaagcacccagttcaactttataacccacatggatgactttcctcctatggggtccacctacgggggcaacttcaccaaccttaccttctcgttagaagcagtatatgaacagtttttgtaccacagaaacaggtggagctcctctaaccatgacctagacctggcaagataccagggaaccaccctaaaactgtacaggcacgaatacctagactacataattagctacaacagaacaggcccttttcagatcagtgacatgacctacctcagcactcaccctgccttcatgctactacaaaaacacagaatagtagtgcccagctttaagaccaagccacacgggcgcaggtccataaaagttagaataaagcccccaaaactcatgctaaacaagtggtacttcacaaaagacatatgcagcatgggcctcttccagctacaggccacagcatgcaccttaaacaacccctggctcagagacaccacaaaaagcccagtcataggcttcagagtacttaaaaacagcatatacacaaacctcagcaacctacctgaccatgaaggtgccagacaatccattagaaatagactacacccagatagtctcacaggctcatctccaaaccaaaaaggttgggagataagctacacaaaactaatggctccaatatattaccaagccaacagaaacagcacatacaactggctaaactaccaagacaactacaaaactacccacgaagcatttaaaaaaaaaaggaatgaaaatttaactctaatacaaaaagaatacacataccactatcccaacaatgttaccatagacataataggtaaaagcacacttacacatgactggggcatatacagtccctactggctaactccaacaagaatcagcctagactgggaaacaccctggacatatgttagatacaacccactagcagacaagggcataggcaatgttgtatacgcacaatggtgctcagaacagagctccaaagtagaccaaaaaaagagcaagtgcataatgagagacctgccactgtgggtaatattttatggctacgtagactggttagtgaaatccacaggcgtcagcagcgcagtcactgacatgagaatagccattataagtccctacaccgagccggcacttatagggtcaacaccagacgtaggcttcattccagtaagtgacaccttttgcaacggagacatgccgtttcttgctccatacatccctgtgggctggtggatcaagtggtaccccatgattgcacaccaaaaggaagtgtttgaagcaatagttaactgtggaccgtttgtcccacgagaccagacgaaaccctcttgggaaattaccatgggttacaaaatgaactggaaatggggcggctctcccctgccttcacaggcaatcgacgacccctgtcagaagcccacccatgagctacccgatcccgatagacaccctcgcatgctacaagtctcagacccgacaaagctcggaccgaagacagttttccacaagtgggactggagacgtgggatgcttagcaaaagaagtattaaaagagtccaagaagactcaagcgatgatgaatatgttgcaggacctttgcaaagaaaaagacacaagatggataccagagccgcaggcctccaaacccccgaaaaagaaagctacactttactccaagccctccaagactcggcagaagagaccctctcgagccaagaacaagcaccccaagaaaaagaggtccaagaagaagcgctcctggagcagctccagctccagaaacagcaccagcgagtcctcaaacgaggcctcaaactcctcctgggagacgtcctccgactccgccgaggagtccactgggaccccctcctgtcataattcagggtccctctatcccagacctgcttttccctaacacacaaaaaaaaaacaaattttccaactacgactggtcagtagagtacgagctggccaaatggatggatcgtcctttgcggcactacccatccgacctccctcactacccctggctaccaaaaaagccacctacccctcctacatgtagagtaagtttcaaattaaagctcgatgcctaactttcaaggccgtgggtgtttcacttcatcggtgtctacctctataagtcactaagcactccgagcgaagcgaggagtgcgagcttaatccaccgcgcatgcgcggccacgcccccgccgccattttgtacagcccgccaatttctcttcaaacagaccaatcacaatctactacgtgcacttcctggggcgtgtcttcccagtctatataagcagaggcggtgacgaatggtagagttttttctcgcccgtccgcggcgagagcgcgagcgaagcgagcgatcgagcgacccgtggg

SEQ ID NO: 1388 - protein, 644 aa, Alphatorquevirus sp.
MPLIICGSGSTQFNFITHMDDFPPMGSTYGGNFTNLTFSLEAVYEQFLYHRNRWSSSNHDLDLARYQGTTLKLYRHEYLDYIISYNRTGPFQISDMTYLSTHPAFMLLQKHRIVVPSFKTKPHGRRSIKVRIKPPKLMLNKWYFTKDICSMGLFQLQATACTLNNPWLRDTTKSPVIGFRVLKNSIYTNLSNLPDHEGARQSIRNRLHPDSLTGSSPNQKGWEISYTKLMAPIYYQANRNSTYNWLNYQDNYKTTHEAFKKKRNENLTLIQKEYTYHYPNNVTIDIIGKSTLTHDWGIYSPYWLTPTRISLDWETPWTYVRYNPLADKGIGNVVYAQWCSEQSSKVDQKKSKCIMRDLPLWVIFYGYVDWLVKSTGVSSAVTDMRIAIISPYTEPALIGSTPDVGFIPVSDTFCNGDMPFLAPYIPVGWWIKWYPMIAHQKEVFEAIVNCGPFVPRDQTKPSWEITMGYKMNWKWGGSPLPSQAIDDPCQKPTHELPDPDRHPRMLQVSDPTKLGPKTVFHKWDWRRGMLSKRSIKRVQEDSSDDEYVAGPLQRKRHKMDTRAAGLQTPEKESYTLLQALQDSAEETLSSQEQAPQEKEVQEEALLEQLQLQKQHQRVLKRGLKLLLGDVLRLRRGVHWDPLLS

SEQ ID NO: 1389 - DNA, 3099 bp, Alphatorquevirus sp.
ggacccccgctcgtgctgacacgctcgcgcgtgtcagaccacttcgggctcgcgggggtcgggaattttgctaaacagactccgagttgccattggacactgtagctgtgaatcagtaacgaaagtgagtggggccagacttcgccataaggcctttatcttcttgccattggtccgtgtcgggggtcgccgtaggcttcgggctcggttttaggccttccggactacaaaaaccgccatttcagtgacgtcacggcagccattttaagtaagcatggcgggcggtgacgtataagttcaaaggtcaccgcgcttccgtgtttacacaaaatggtggccaacttcttccgggtcaaaggttggcaactacgtgataagtcacgtgggatggctgcgtcacaaacacggaagtggctgttccacgtgacttgtcacgtgactgctacgtcacagccgccattttagttcacaaaatggcggacttccttcctcttttttaaaaataacggccctgcggcggcgccgccgctggcggcgccgtcgcagacgccgagtaccaagaagacgagctcaacgccctgttcgacgccgtcgaacaagaagagtaaggaggaggcgatgggggaggcggaggtggagacgggggtacaggcgcagactgagactgagacgcagacgaaagcgaaagcgcagactgatactgactcagtggcaccccgctaaagtaaggaggtgcagaatatcgggggtcctgcccatgatactatgcggggcgggcaggagtagctttaactacggactgcacagcgatgactttactaaacagaaaccaaacaaccagaacccgcacggcgggggcatgagcactgtaacttttaacctaaaagtgctctttgaccagtacgaaaggttcatgaacaagtggtcgtaccccaacgaccagctagacctggccagatacaagggctgtaaattcaccttctacagacacccagaagtagactttttagctcagtatgacaacgttccccctatgaaaatggacgaactgaccgctcccaacactcaccccgcactgctgctacagagcaaacacagggtaaagatatacagctggaaaaccaggccatttggccctaaaaaagtaacagtaaaagtagggcccccaaaattgtttgaagacaagtggtacagccagtctgacttgtgcaaggtatcccttgtcagttggcggttaaccgcatgtgactttaggtttccgttctgctcaccacaaactgacaacccttgtgtaaccttccaggtgctaggagaacagtattacgaagtatttggaacttccatattagacgttcctacaaaccataagacagaaatagacacatttgaaaattggctatataaaaaatgcacccactatcaaacatttgccacagacagcagattagccccccaaaaaaaaacaaactcacaaacgaaccaaacatataaccccagtggcaatacagaaaatgcaacatggacacaaacaaactactcctcatttaaaccaggcaacagagacagcaactatggttactgcacttacacagtaaatgaggacacattccaagccattaaaaactacagaaatcaaagattcaaatggctaacaacatacactggacaaaatcacataaacagcacatttgccaaaggcaaatatgaacaatacgagtaccacctagggtggtactctaacatattcataggcaaccttagacacaacttagcattccgcccagcatacatagatgtcacatacaaccccacagtagacaaaggcaaaggcaacattgtgtggtttcaatacctaacaaaacccaccacacagctaataagatcacaggcaaaatgcctaatagaagacctgccactatactgtgccttctttggttacgaagactacatacagagaacactaggtccttaccaagacatagaaacagtaggtgttatatgctttataagtccttacacagaacctccctgtattagaaaagaagagggcaaaaaggactggggcttcgtattttatgacaccaactttggaaacggaaagactccagagggcataggccaagtacacccttactggatgcagaggtggagagtcatggcccagtttcaaaaagaaactcaaaacagaatcgccagaagcggaccgtttagctacagagacgagataccctcagccacactgactgccaactacaagttctactttaactgggggggcgactctatatttccacagattattaagaacccctgcccagacaccgggctgcgacccagtggcaatagagagcctcgctcagtacaagttgttagcccgctcatcatgggaccagaattcatattccaccgctgggactggcgacgggggttctataatccaaaagctctcaaaagaatgcttgaaaaatcagataatgatgcagagtcttcaacaggcccaaaagtgcctcggtggtttccagcactccacgaccaagagcaagaaagcgacttcgattcccaggaaacaaggtcgcagtcctcgcaagaagaagccgctcaagaagccctccaagacgtccaagagacgtcggtacagcagcacctcctcaagcagttccgagagcagcgggtactcggacagcaactccgcctcctcatgctccaactcaccaagacgcaaagcaatctccacataaatccccgcgtccttggccttgcataaataaagtgtacatgttttccccacaaaaacccaagcgcatacacgggtaccacgggtgggaaacagagtatcaggcctgcaaagcctttaacaggccccctagaaacttcctgtcagacaaacccatctatccctggctcccccgccctcaacctgaattcaaagtcagttttaagctcggttttcaataaacaaggccgtgggaatttcacttgtcggtgtctacctcttaaggtcactaagcactccgagcgtcagcgaggagtgcgacccttccccctggtgcaacgccctcggcggccgcgcgctacgccttcggctgcgcgcggcacctc

SEQ ID NO: 1390 - protein, 774 aa, Alphatorquevirus sp.
LLRHSRHFSSQNGGLPSSFLKITALRRRRRWRRRRRRRVPRRRAQRPVRRRRTRRVRRRRWGRRRWRRGYRRRLRLRRRRKRKRRLILTQWHPAKVRRCRISGVLPMILCGAGRSSFNYGLHSDDFTKQKPNNQNPHGGGMSTVTFNLKVLFDQYERFMNKWSYPNDQLDLARYKGCKFTFYRHPEVDFLAQYDNVPPMKMDELTAPNTHPALLLQSKHRVKIYSWKTRPFGPKKVTVKVGPPKLFEDKWYSQSDLCKVSLVSWRLTACDFRFPFCSPQTDNPCVTFQVLGEQYYEVFGTSILDVPTNHKTEIDTFENWLYKKCTHYQTFATDSRLAPQKKTNSQTNQTYNPSGNTENATWTQTNYSSFKPGNRDSNYGYCTYTVNEDTFQAIKNYRNQRFKWLTTYTGQNHINSTFAKGKYEQYEYHLGWYSNIFIGNLRHNLAFRPAYIDVTYNPTVDKGKGNIVWFQYLTKPTTQLIRSQAKCLIEDLPLYCAFFGYEDYIQRTLGPYQDIETVGVICFISPYTEPPCIRKEEGKKDWGFVFYDTNFGNGKTPEGIGQVHPYWMQRWRVMAQFQKETQNRIARSGPFSYRDEIPSATLTANYKFYFNWGGDSIFPQIIKNPCPDTGLRPSGNREPRSVQVVSPLIMGPEFIFHRWDWRRGFYNPKALKRMLEKSDNDAESSTGPKVPRWFPALHDQEQESDFDSQETRSQSSQEEAAQEALQDVQETSVQQHLLKQFREQRVLGQQLRLLMLQLTKTQSNLHINPRVLGLA

SEQ ID NO: 1391 - DNA, 3097 bp, Alphatorquevirus sp.
gctacgccttcggctgcgcgcggcacctcagtcaaggggcaattcgggctcgggactggccgggctatgggcaaggctcttaaaaagctatgtttctcggtaaactccacagaaagaaaaggaaagtgcttctgcaagatctgcgaactccaccgaaaaaacctgctcgcatgagtctctggagaccgccggcccacaatgtacccggccaggaggaccagtatttcagatcctgcctccacgcgcacggagctttttgtggttgcggcaattttatgcttcatctttctagtctggctgcacgtcttaattttcaaggcggtccgcccccgccgggtggttctcggcaggaaagaccgcctctgagaaggctgctgccgctgcctgcgccccccgctgagggccgcgaaaaccgaccatggcctggtggggatggcgccggcgaaggtggttctggccgaggcgcaggcgatggaggacccgccgccgcagacgagtaccgacccgaagacctagacgacctgttcgccgccatcgaaggagacgagtaaggagaaggaggtggcgggggcggaggcggtacactcgacgggggcgactcagactgagacgcagacgtaggtggcgacgcaagagaatagtactgactcagtggaacccccagactgttagaaaatgcatgataaggggtatgatgcccatgctctgggccggtatgggcaccgggggacacaactatgccgtccgctcggacgattataccatgagcggattcgggggttccttcggcacagagaccttcagtctcaaggtactctatgaccagtacgagaggggcttcaacaggtggtcttttagcaacgaggacctagacctcgctctgtacttcgggtgcactttcactttctacagacacaaaacaacagactttatagtgagctggacaaaaaatccccccatgaaaactaatcaatacacagctccactgacacacccaggcatgctaatgcgctccaaatataaggtattgatccccagctggcagactaaacccaagggtcgcaagacagttaaagttaagataggccccccccacttgtttcaacacaagtggtacacccagcaagacctgtgtgccgttagccttgtgcaatttaacctaaccgcagctgatttccaacatccgttcggctcaccactaactgaaactccttgtgtaactttccaggtcctgggggacctctataacgagtgccttaatatagatctccctcctttacacaccgatgccaaaacattagactcaaccaaaggcaatcaaactaacatacaagctgtacaaaagttatataacactctcttcacacaaaacacctcaggacactactggcagacattcatcaccaattccatggtcaaagcacatgtagacagtaaacaagctaatgacacaaactactcagacaataatcatacaaaaaaaaaaaaaccaaaagaaggtgaagtccttgttaacaacaactggcaacaaaaattctttgataacagagactcactattcttatttgccacctatcaccctgcaaacatacttttagagctcaaaacaatgagagacaacaactttgcactacacacaggcaaaaatgacctgtatggagacaacaaagcccagtatgctggacaaacacacctactagactactacctgggtttgtacagtcccatattcctgcacccaggcaggtccaacgtagagttctttacagcttacaaagacataatatacaatcccctcatggacagaggcacaggcaacaaggtgtggttccagtaccacacaaaaactgacaataaatacataccgggaaagtgcaaatacctagtagaagacatgcccctgtggagtctcctacacggctatgcagagtacctagagactcagataaaatatggcaatatggacctagagggcaaggtactcatcaggtgtccgtggactaaacctcccatgactgacccaaaagaccccgacagaggctatgtagtctacaacagaaactttggaatgggcaagtggatagacggagggggctacgtgcccctgttagagagaggacgatggtatgtcatgctgagataccagaaagacgtgttccatgacatagtgacttgcgggccctgggcctacagagacgatgagaaaaactcccagcttatagccaaatacaaatttggctttaagtggggcggcaatactgtccattcccagatcatcagaaacccctgtaaggaagaccgacttgcctacccccatcgacagcctagagcagtacaaattgtcgacccgcagaccgttggacccccgtgggtcctccactccttcgaccagagacgagaaatgtttactgagacagctatcagacgtctactcctccaaccaggccctggcgaacttgctgttcccaggccaaagagacccttactatttgtacccccagagtaccaagaccccgcaggtgccggaagcgactcaggttcaccggcgaaaaagtctcgcatctggcaagaagagacccagacggagacggggtcgctctcctcggagaacccggcggagacgacgagggagctcctcctccgaaaactccgagagcagcagtctctccagctccacctcagacacctcgcagtccaactcgccaaaacccaagcgggcctccacgtaaacccgctcctattatctaccctgccacaaacagggtagagatgtttcccaccttcaaaaagctcactccaacaaagggagactgggaaacagagtaccaggcctgcgctgcctttaacaggcctccccgctctgacctcagcagaccccctcactacccctactttcccacctcctacagggtctccttccgcctgggattcaagccttaaataaaatgtttcctacttcactgtgcgttggccgtgggagtttcacttagcggtgtctacctcttaaggtcactaagcactccgagcgtcagcgaggagtgcgaccctctctctgtgggcccccctaggcagatactcaacttcttcggagccgcgc

SEQ ID NO: 1392 - protein, 782 aa, Alphatorquevirus sp.
MAWWGWRRRRWFWPRRRRWRTRRRRRVPTRRPRRPVRRHRRRRVRRRRWRGRRRYTRRGRLRLRRRRRWRRKRIVLTQWNPQTVRKCMIRGMMPMLWAGMGTGGHNYAVRSDDYTMSGFGGSFGTETFSLKVLYDQYERGFNRWSFSNEDLDLALYFGCTFTFYRHKTTDFIVSWTKNPPMKTNQYTAPLTHPGMLMRSKYKVLIPSWQTKPKGRKTVKVKIGPPHLFQHKWYTQQDLCAVSLVQFNLTAADFQHPFGSPLTETPCVTFQVLGDLYNECLNIDLPPLHTDAKTLDSTKGNQTNIQAVQKLYNTLFTQNTSGHYWQTFITNSMVKAHVDSKQANDTNYSDNNHTKKKKPKEGEVLVNNNWQQKFFDNRDSLFLFATYHPANILLELKTMRDNNFALHTGKNDLYGDNKAQYAGQTHLLDYYLGLYSPIFLHPGRSNVEFFTAYKDIIYNPLMDRGTGNKVWFQYHTKTDNKYIPGKCKYLVEDMPLWSLLHGYAEYLETQIKYGNMDLEGKVLIRCPWTKPPMTDPKDPDRGYVVYNRNFGMGKWIDGGGYVPLLERGRWYVMLRYQKDVFHDIVTCGPWAYRDDEKNSQLIAKYKFGFKWGGNTVHSQIIRNPCKEDRLAYPHRQPRAVQIVDPQTVGPPWVLHSFDQRREMFTETAIRRLLLQPGPGELAVPRPKRPLLFVPPEYQDPAGAGSDSGSPAKKSRIWQEETQTETGSLSSENPAETTRELLLRKLREQQSLQLHLRHLAVQLAKTQAGLHVNPLLLSTLPQTG

SEQ ID NO: 1393 - protein, 153 aa, Alphatorquevirus sp.
MFLGKLHRKKRKVLLQDLRTPPKKPARMSLWRPPAHNVPGQEDQYFRSCLHAHGAFCGCGNFMLHLSSLAARLNFQGGPPPPGGSRQERPPLRRLLPLPAPPAEGRENRPWPGGDGAGEGGSGRGAGDGGPAAADEYRPEDLDDLFAAIEGDE

SEQ ID NO: 1394 - protein, 125 aa, Alphatorquevirus sp.
LARRDPDGDGVALLGEPGGDDEGAPPPKTPRAAVSPAPPQTPRSPTRQNPSGPPRKPAPIIYPATNRVEMFPTFKKLTPTKGDWETEYQACAAFNRPPRSDLSRPPHYPYFPTSYRVSFRLGFKP

SEQ ID NO: 1395 - DNA, 3096 bp, Alphatorquevirus sp.
cgggagccggaggtgagtttacacaccgcagtctaggggcaattcgggcacgggtctggccgggctatgggcaagattcttaaaaagtttccccgctgtgtcctacgccaggacacaaaaacatgccgtggagaccgccggcgcacgacgtccagggcagagagaaccagttctttgcaggatgttttcacatacatgctgctttctgcgggtgcggtgaccttgtcggccatcttgctagcattgctgctcgctttcctgctgccggaccccccgctccgccaggcctcagacctccgagaccccctgccccggccggtccgggcggtccccccggctaccttcccgctctcccggctccggcaccggagccgcctaacccagcaccacgccgtggtggtggggaagatggcgccgccgcgggtggcgccgccgatggggcagaagaagaggccgccgcgtacggcgaggaagaactagaagagcttttccgcgccgccgccgaggacgatatgtaagtaggagatggcgccggccttacaggcgcagacggaggaaggggcgacggagacgcagacgcagacggactcacaaacccaccctagtaatgagacagtggcaaccggacgttgttagaacctgcttcatcacagggtggatgcccctcatcatctgtggccaaggacagacacagtttaactttatcatgcacatggacgacatcaccccccggggagcctcctacgggggcaacctcactaacataacatggaccctagagggcctgtgggaacagttccagtaccacagaaacaggtggtcgcgcagcaaccacgacctagacctagccaggtacctatttaccacccttaagttttacagacacgacagtgtagactacatagtgagctacaccagaacaggacctttccaaatggggcacctcactcacctcagcactcaccctcttctcatgctactttcaaaacaccacgtagtagtgcccagcctaaagacaaaatctgggggcaaaaagtacaaaaaaatcagaatcaagcccccaaaactaatgttaaacaagtggtacttcaccaaagacatctgtgacctgggcctctttcaactgtgggccacgggagcagagctcagaaacccctggttaagatcaggcacacaaagcccctgcataggcttctctgtactcaacaactcctactacaccaacctcagcaaccttccagaccacaaaaacactagagaagcaattcaagcatcattccatccagcaaaactagatcaagacacaaacaaaaacctgtggcaatacacatacacaggcctcatgtcaaagtactactacaaaggcaaccaaaacagcacatatgacttccaaaattacagcacaaatgaaaattatacaaagacatataataaatggttagaggataaaaactcaagacttaaaaagctacaagaccagtggaaaaaagtgtacccacaactaaccgcacaaatgcccacagacacaacactcctacaagactttggcatatacagccccttctacctcacacccgtcagaatcagcctagactggcgtaccacctacacacacgtgagatacaacccactcacagacaagggcataggcaacagagtgtacctacagtggtgctcagagagtagctgcaaatacagccccacaaagagcaagtgcgccatagtagacatgccactattcatagccttctatggctacatagactggtgcatcaaatgcacaggcaactctggcctagtaaaagacgccagaatcatggtcaggtgtccctacaccgagccccaactagtgggggccacagaagacgtgggcttctgcctcctcagtaataccttcatgaacggagacatgcccgtgctggccccctatatcccaatttcctggttcgttaagtggtaccccatgattgcacaccaaaaggaaaccgttgaggccatagtttcctgtggaccgttcatgcccagagatcaggaagccaagagttgggacataaccatgggttacagatcctgtttcaaatggggcgggtcgcctctgcccacacaggccatggacgacccctgccagaagcccacgcaccctattcccgatcccgatagacaccctcgcctcctacaagtctcagacccgacaaagctcggccccaagaccatattccacagatgggacatgcgacgaggacagtttagcaaaagaagtattgagagaatgtcagaatacacagaatatgatgaatattttgaaacaggtctgccatcaaaaagaaaaaagttcgacacgccggcagaaggactccaaggagagcaaagaaaagcctacgatttactccaagccctcgaggcgagccaagaagagtcggggtcagaagaccaagaacaagtacccccacaagagacgcagacgcagcaactcctccagcagctccagctccagaaacaccaccagcgagtcctcagacagggcctcaaacacctcctcggggacgtcctccgactccgacgaggagtccactgggaccccctccttacatagaaccgccaccgttcatccccgatcttctttttccttctactaacaaaaaaaaaaaattctccaaattcgactgggaaacggaggctcagctagggcagatattcaggcgtcctatgcgcttctatccctcagacaacccttactacccgtggttgccccccaagcgagatatccccaaaatatgtaaggtaaacttccaaataaagcttgcagagtaacacattcgaggccctcctctgttcacttagcggtgtctacctcttaaggtcaccaagcactccgagcgttagcgaggagtgcgaccctttaccctggggcaacttcctcggggtccggcgctacgcgcttcgcgctgcgccggacgcctcggaccccccctcgacccgaatcgctcgcgcgattcggacctgcggcctcgggggggcggtgacgaatggtagagttttttctggcccgtccgcggcgagagcgcgagcgaagcgagcgatcgagcgacccgtggg

SEQ ID NO: 1396 - protein, 661 aa, Alphatorquevirus sp.
MRQWQPDVVRTCFITGWMPLIICGQGQTQFNFIMHMDDITPRGASYGGNLTNITWTLEGLWEQFQYHRNRWSRSNHDLDLARYLFTTLKFYRHDSVDYIVSYTRTGPFQMGHLTHLSTHPLLMLLSKHHVVVPSLKTKSGGKKYKKIRIKPPKLMLNKWYFTKDICDLGLFQLWATGAELRNPWLRSGTQSPCIGFSVLNNSYYTNLSNLPDHKNTREAIQASFHPAKLDQDTNKNLWQYTYTGLMSKYYYKGNQNSTYDFQNYSTNENYTKTYNKWLEDKNSRLKKLQDQWKKVYPQLTAQMPTDTTLLQDFGIYSPFYLTPVRISLDWRTTYTHVRYNPLTDKGIGNRVYLQWCSESSCKYSPTKSKCAIVDMPLFIAFYGYIDWCIKCTGNSGLVKDARIMVRCPYTEPQLVGATEDVGFCLLSNTFMNGDMPVLAPYIPISWFVKWYPMIAHQKETVEAIVSCGPFMPRDQEAKSWDITMGYRSCFKWGGSPLPTQAMDDPCQKPTHPIPDPDRHPRLLQVSDPTKLGPKTIFHRWDMRRGQFSKRSIERMSEYTEYDEYFETGLPSKRKKFDTPAEGLQGEQRKAYDLLQALEASQEESGSEDQEQVPPQETQTQQLLQQLQLQKHHQRVLRQGLKHLLGDVLRLRRGVHWDPLLT

SEQ ID NO: 1397 - DNA, 3089 bp, Betatorquevirus sp.
cgggagccgaaggtgagtgaaaccaccgaagtctaggggcaattcgggctagatcagtctggcggaacgggcaagaaacttaaaataatatttattttacagatatgagctctgtttggaagaaacccacatcatcaccgagacaacaagaactagcttggagaaacttaatctatcaaagccacgaccaattctgccactgtgaagatgtggatttacacttcatacttttaatgaataaattcggaaactcaccaaaaccagaatctgaaattaaaaacataaaatggcttataacaggaaaaccacataccgaagaagaagatggcgaaccaaaagacgaccctggttttctagatggagaactagaaatccttttcaaagaaaacaatggagaagaaaaaaatatagaagacgcaactacaaggtaaaaaaatataaactacctaaaaaaaagaaagcaataattgttaaacaatttcaaccatatactgtaaagagatgtaaaattaaaggatataaatgtttatttcaaggaggaccagacagaactaataataactatattcaatatgtatatagctttatacctgaaaaacaacctggagggggaggatggagtttacttgtattctcattagactctttatttgaagactataaacatttagaaaatgtatggacagttagtaatgcaggcttaccactaataagatacagaggatgtcaatttaaattttaccaaagcaaagaaacagactacgttgttacttatgataactgctggcctatggttgacacaccacataaacacgcagacagcgcaccatttagaatgttaatgaaacatcacaaaataataataccaagtagagatacacaaaggagaaaaaaaccatacaagaaagtttttattaaaccaccagcacaaatgatgacaaaatggtactttcaaaaagacatatgcagaacaccactagtaatgcttacaactacatcttgttcccttacatacccttttacagctccagaagcagaaagcaacaatattagtttctacattttaaatccatacctattcaaaaatagtaatttccaacacctagatacatcaggatacttttgcaaatatgctaatgcaaacaacacagaaccactatacctatatgcttcaacttcttataatgttacatatgacaaaattaaacagggtgacccaagcataacacaattaatagcactagccaacacaaaagaccatacagcaggacataccttaattaaacaagaacaaaaaaatctacaatcactactaggaaatccttttcatgaagactacacaaatggagacatgtatatttacatctcaaaaatgacacccttagaaatgctaaacttagcatcagacaagcaccaagaaccaacaacagaaaaacaaagcattaccaacacaggcagcatactatactccgtaagatataacccacaaaaagatgacggatccacaaacaaagcttatatagtaaacaacgagcttggaggactaatacaacccccatcaaacacaaactttattatagaaggatttccactacacacaatgttatggggatggacagactttattagaaaactaggagaagcaatacaatttgacacaaactactttgtatgtcttgaaacaaaagtaactaacaatgataaactaccatacttaataccagtagacgacacatttgtacatggattaaacccatatagtcctatatacgttgaccacgaacaccaaatagcaatagatgactataataaaaaaaactggtaccctagacatgaataccaaaaagttacaattaataaaatttgtatgactggacccgcgtgtccaagacaaccttggaaacattatatgcaagcacactgtagctataaattctactttactcttggaggatgtccaaaaactctggaaaaaatttataatccttgttcacagcctaaatggcccactcccgataacctccttggaagatttgaagtgcaggatcctaacaaacaccccgcaacagaactctacaactgggactggcaaaaagactatgttacagaatcagctctacaacgaattagaaaatacacagaaattgatccaaaaattttctcaatttcagaaagcaaaaaccaaccgatcatcctccaaaaaccacaagaaaaagacccatcgaaggaagaggagaaggagctccagctccagctccagcacatcagataccaacgactcctcctgcaactccaactccgacaattaaaataactaaatcaaaatttaaagttcttctttttgataaaccaccaaaaaatagaagaatgacaccttgggaaaaagaacaagaaaaaatagatgcagctatttggaaaagacctcaaagagactttatttttgatgtacctttttaccctggtatacctcctacaccattagttaactttgacttaaaatacaaatatgaataaacaaggccaacagtaattcacttagtggtgtccatttatttaagtaaaaacttatataaacatccaccgcctccctaaaattcgggcgcaaaaattcaaagggggctccgcccccttcaacccccaagggggctccgcccccttacacccccaagggggctctgcccccttacacccccaagggggctccgcccccttacaccccctaattaatattcaacaggaaaaccacctaattagaattgccgaccacaaaccgtcgcatacttccctttttctaacaacttcccttttaccttataaatatttattacattaattaataaacaccgtaattcctgggaggagcttaacaactatataactaactacacttccgaatggctgagtttatgccgccagacggagacgggatcacttcagtgactccaggctgatcttgggcgggagccgaaggtgagtgaaaccaccgaagtctaggggcaaactatataactaactacacttccgaatggctgagtttatgccgccagacggagacgggatcacttcagtgactccaggctgatcttggg

SEQ ID NO: 1398 - protein, 675 aa, Betatorquevirus sp.
MAYNRKTTYRRRRWRTKRRPWFSRWRTRNPFQRKQWRRKKYRRRNYKVKKYKLPKKKKAIIVKQFQPYTVKRCKIKGYKCLFQGGPDRTNNNYIQYVYSFIPEKQPGGGGWSLLVFSLDSLFEDYKHLENVWTVSNAGLPLIRYRGCQFKFYQSKETDYVVTYDNCWPMVDTPHKHADSAPFRMLMKHHKIIIPSRDTQRRKKPYKKVFIKPPAQMMTKWYFQKDICRTPLVMLTTTSCSLTYPFTAPEAESNNISFYILNPYLFKNSNFQHLDTSGYFCKYANANNTEPLYLYASTSYNVTYDKIKQGDPSITQLIALANTKDHTAGHTLIKQEQKNLQSLLGNPFHEDYTNGDMYIYISKMTPLEMLNLASDKHQEPTTEKQSITNTGSILYSVRYNPQKDDGSTNKAYIVNNELGGLIQPPSNTNFIIEGFPLHTMLWGWTDFIRKLGEAIQFDTNYFVCLETKVTNNDKLPYLIPVDDTFVHGLNPYSPIYVDHEHQIAIDDYNKKNWYPRHEYQKVTINKICMTGPACPRQPWKHYMQAHCSYKFYFTLGGCPKTLEKIYNPCSQPKWPTPDNLLGRFEVQDPNKHPATELYNWDWQKDYVTESALQRIRKYTEIDPKIFSISESKNQPIILQKPQEKDPSKEEEKELQLQLQHIRYQRLLLQLQLRQLK

SEQ ID NO: 1399 - DNA, 3088 bp, Alphatorquevirus sp.
cgggagccgaaggtgagtttacacaccgcagtctaggggcaattcgggcacgggtctggccgggcaatgggcaagattcttaaaaaatttccccgttctgtgctccggcaggacaccaagtcatgccgtggtctccgccgagacataacatcagaacgagagaggatctgtggattcaatcagttatttattcacatgacactttttgtggctgtaataatattcttgagcatattactggcctcctgggtggcctacaaccagctccacctagagacccagcaccccctaccatccggagcctgccggcactgccgccagctccgcaaccccctgaacaactacggcgtggtggagatacagacggaggccttggagaagatggaggagacgcaggtggcgcctaccaagatcaagatctagaagaacttttcgccgccgcaagagaagacgatatgtgagtagatggcggcgccgccgatacaggcgcagactcagacgggggcgacgaaaaaggggacgcagacgcagacgcagaaagactttaatattaagacaatggaacccagacgttatcaggagatgctttataacagggtggatgccactcataatatgtggcaccggacacatacaatataactttatcacccaccaagacgatctgcctcccgccaagagcggatacggaggcaacttcacaaacatcacattctcactagccagcctctatgaggagctcatgcaccacagaaaccactggtctaaatccaactatgacctagaactagtcagatacctcagcactactataaagctatacagacacgaatcagtagactacatagtcagctacaccaccacaggccccttcgagacaaatgaactctcctacatgtccacacatccactgttcatgctactcagtaaaaaacatgtagtagtacccagcttaaaaactaaacccaaaggcagacggtggataaagctaaagatatcaccaccaaaactaatgctaaacaagtggtactttgcccatgacttttgtaaaataggcctcttccagctgtgggccacagcctgtaacctttcaaacccctggctcagatcaggcacagacagcccctgcataaccttctatgttctaaaaaaccaagtgtacggaaacagaatgtccaacctagcacaagactctagtaaagacgaaagaaaaaacgcatataaagagctgtggccaacaactacatcaactgataacaattggtaccaatggcaatatacatacctaaaacctatgaaaaatatttactatcaagccgccaacgaacaaactaataaaagtgagatgcaaggcaaaacatataactggcaaaactataaaaactactttacaaaagtaaaaactaaatgggatagtatacaagaaagtaactatgaattagtaagaaaagaatacaataacatatacacaaccagcgccacatggcctcccagttgggacaacagacaatacttagaacatgactgtggcatattcagcccctactttctatcccctgacaactacacaccagaatggcacacagcatactcatctgtcagatacaatcctctaacagacagaggcataggcaacagaatctgtctgcagtggtgcagcgaggccagcacagactaccagcccaccaaaagcaaatgcatgatacaagacctgcctttatacataatgtgctatggttacctagactactgcatcaaagagctaggcataaagtcagcctggacagacctcagagtagccattagaagcccctacactgatccaaaactaataggatcttcagacaaaaccatgtttattccaatatcagaaacattcatgagaggagacatgccccacaaactaccctacataccagtaaagtggtggtttaagtggtatcctatgtgcacacaccaggcttccgttcttgaagcaatagtttcctgtagtccgttcatggtcagagatcaagatgccaacagttgggacataaccatgggctacagctcaaaattcttatggggcggctcccccttaccttcacagcctatcgacgacccctgccaaaaaaccacccacgaccttcccgaccccgatagaaaccctccacgaatacaaatcgcagacccgcaagtgctcggaccggcgacgctcttccactcgtgggacatcagacgtggactcattaacactagagctattaaaagagtgtcagaatacgcggatactaacgaacatttttcaacaggcgtcgagttcaaaagaccccgactggacactccccaccaaggacagcagctatcaaaccaagaagaagacgccttgtctatccttcgccaactccaagcagaacaagaagagaacacgtcgtcggaagaagaacaagcaccccaaagccaagaggtacaaaaagagaaaatactcaagcagctcagagtccagcgacagcagcaacacctcctcagacagggaatcaaacagctcctgggagacgtgctcagactccggaaaggagtccactggaaccccagcctataataattccagcagatcctataccagatctcttgttccccagtactaaaaaaaaacgcaaattttctcccttagactgggagaacgaggctcaaatagcagggtggttagacagacctatgaggctgtatcctggggacacccccttctacccgtggctaccccgcaagcccgttacccaacctacatgtaaagtaaccttcaaaataaagctagatgattaacttgcaaggccgtgggagtttcactggtcggtgtctacctcttaaggtcactaagcactccccccccccgtgctaactccgccgcgcatgcgcgaccacgcccccgccgccattttctacagcccgccaattttatttcaaacagaccaatcacaatctactacgtacacttcctggggtgtgtcctcccactcaatataagcaacagcactgacgaatggtagagttttttctgcccgtccgcggcgaggacgcgagcgtagcgagcggccgagcgacccgtggg

SEQ ID NO: 1400 - protein, 659 aa, Alphatorquevirus sp.; identical to SEQ ID NO: 1046

SEQ ID NO: 1401 - DNA, 3085 bp, Alphatorquevirus sp.
cgggtgccggaggtgagtttacacaccgcagtcaaggggcaattcgggctcgggactggccgggctatgggcaaggctctcaaaaaagcatgtttatcggtaaaatttacagaaagaaaaggaaagtgccactgtacagcctgccagatccaaagaagaaactacctactagtatgagccactggagcagacccgtccaccatgcaacggggatcgaacacctctggtaccagtctgttattaacagccattctgctagctgcggttgtggcgatcctgtacgccactttacttatcttgctgagaggtatggttttgccccaactccccgcgccccgccagtagccccgacgcccaccatccgtagagccaggcctgcgcctgccgctccggagccccgtgccctaccatggcatggggatggtggagaagaaggcgcaagtggtggtggagacgccggttcgcccgaggcagagttcgcagacgacggattagacgccctcgtcgccgcactcgacgaagaacagtaaggagacgcagacaatggaggagggggcgacccagacgcagactatttaagcgaaagagacgctttaagagacgcagacgaaaacctaagataaaaataacccagtggcagcctagtaaagtaaagagatgctttatgataggctactttccagcactaatatgtgggcagggaaggtggtcagaaaactttaccagccacatagaagacaagacccctaagggacccttcggaggagggcacagcacagccaggctatctttaaaagtactgtacgaggaaaaccagaagcatcacaacttctggactgccagcaacaaagaactagagctagccaggttctttggcagtacctggacactgtacagacacgaagaggtagactacatatgcacctttaacagaaaaagccccctgggaggcaacctgctaacagcacccagtctgcacccgggggccgccatgctatccaaacataaaatactagtacccagttttaaaaccagaccgggcggaaaacccactgtaaaatttagaataagaccaccaacaacactaatagacaaatggtactttcaaaaagatatttgtgacactacactgctgaacattaactttgttgcatgtgacttgcggtttccgttctgctcaccacaaactgacaatgtttgtgtaacatttcaagtcctttccgcggtttataacgacttcctctctataaccaacagcaacttacaagcaacaaattgggaaagtgaatacacaaagtttttaaagaaagcatttccaacagacagaagcattaataaattaaacacatttacaacagaaggggcctttagtcacccaaaagtagaaaagtttaaaccagtaattccactacaccaagataaatactttcaagacaaagacggtcaatggggagacccaatacacattacagacagtcaaagtagagaaaatattatacagaaaattgttaagaatgcaagaaactacctaaaaaaatacacagatgagtttaaacaatttccaaacattgcccagttccaccacggattttttacacagtggacaggcatatacagtgctgcttttttaaactaccatagaatatctccagaagtaccaggcctatacacagatatcatctacaacccacttgtagacaaaggcataggaaatcacatatggatagactacctcagcaaaccagaccctaacttagatccagtaaaaagtaaatgccacatagcagacctgcctatgtggatggcaacctttggcctagtagactggtgcaaaaaagacacaggcaactggggcatacccgcgtgggccagagtactaatgatatgtccctatacgtttccacctatgtatgaccaaagcaacccaaccagaggatttatacccataggttacaacttctcacaaggactaatgccagacggcagtaaatacattccaatgcaactgagagctaagtggtaccccaacctgttaaaccaacaagcagtacttgaagacataagtgagtcaggaccctttgcatttagagaaaaaaaacctagcgccagcataacagtaaaatacaaatttagatggcactttgggggcaaccctgtgtccgaacaggttattgcagacccatgccaacaaccaacctttgaaatgcccggaaccggttcgctgcctcgcagactacaagtcacggacccgaaactcctcgggccacactacacattccacagctgggactggagacgtgactactttaacagaaagactcttaagagaatgtcagaacaacaagaaacttctgagtttttattcccaggcccaaaaaaacccagagtggatctcggggtcgtccaagctgtcgaaaaagtctcttccccgaggaaaagagaacagaaaccgtgggaagacagcgagcagcaatcagagacagaagccctctcggaggaagaagaagagggctcgatacaccagcagctccagcagcagctgcagcagcaaaaacagctcaggagaggaatcaactgcctcttcgagcagctagtaaaaacacagcagggagtacacctagatccttccctcttgtaggccccagacagtggctgtttccagaaagaaagccagcccctgcccctagctcgggagactgggccacagagtatctagcagctagagtatttgacagacccccaagaagcaaccttaaagatacaccctactacccctacattaaaaaccagtacaacgtgtactttgatctaacctttgaataaagtgcagtttcaaatttgcaaggccgtgggagtttcactggtcggtgtctacctctaaaggtcactaagcactccgagcgttagcgaggagtgcgacccttccccctgactcaacttcttcggagccgcgcgctacgccttcggctgcgcgcggcacctcagacccccgctcgtgctgacacgctcgcgcgtgtcagaccacttcgggctcgcggggtccgcagcggcagcaccacggagggtgatccccgcgtcccgaggg

SEQ ID NO: 1402 - protein, 742 aa, Alphatorquevirus sp.; identical to SEQ ID NO: 490

SEQ ID NO: 1403 - protein, 146 aa, Alphatorquevirus sp.; identical to SEQ ID NO: 491

SEQ ID NO: 1404 - protein, 82 aa, Alphatorquevirus sp.; identical to SEQ ID NO: 400

SEQ ID NO: 1405 - DNA, 3083 bp, Alphatorquevirus sp.
ggggccagacaggtgagtttacacaccgcagtcaaggggcaattcgggctcgggactggccgggccccgggcaaggctcttaaaaaatgcgctttcgcagggttgcacagaaaaggaaagtgcttctgcaaactgtgcgagcttcaaagaagactaggcggcttctaggtatgtggcagccccccgtgcacaatgtccccggcatcgagagaaactggtacgagagctgtttcagatcccatgctgctgtttgtggctgtggcgactttgttggccatcttaatcatctggcaactactctgggtcgtcctccacgtcctgggcccccaggcggaccccgcacgccgcagataagaaacctgccagcgctcccggcgccccagggcgagcccggtgacagagcgccatggcgtggggcttctggggccgacgccgccggtggagacggtggagagcgcggcgcagacggtggagaccccgcagacgtaggagacgacgccctgctcgccgctttcgagctcgtcgaagagtaaggaggcgcggggggcggtggcgcagacgctacagaaaatggcgacgggggcgacgcagacggactcacagaaaaaagatagtcataaaacagtggcaaccaaactttattagacgctgctacataatagggtatctacccttaatattctgtggcgaaaatacaacctcccagaactatgccactcactctgacgatatgataagcaagggaccgtacgggggaggcatgactaccactaaattcactctaagaatactgtacgacgagtttaccaggtttatgaacttttggactgttagcaacgaagacctagacctgtgtagatacgtgggctgcaaactgatattttttaaacaccccacggtagactttatagtacagataaacactcagcctccttttctagacacgcacctcaccgcggccagcatacacccgggcatcatgatgctaagcaagagacacatactaataccctctctaaagacccggccaagcagaaaacacagggtggtcatcagggtgggcgccccaagactttttcaggacaagtggtacccccagtcagacctgtgtgacacagttctgctttccatatttgcaaccgcctgtgacttgcaatatccgttcggctcaccactaactgacaacccttgcgtcaacttccagattctggggccccagtacaaaaaacaccttagtattagctctacaatggataatactaaccaacaacattataaaagccagttgtttaatcaaactgcactgtataacacctttcaaaccattgctcagcttaaagagacaggacaaactgaagggataactgcaagttggaatagcgtacaaaatactactgcacttgataagtcaggtagtaatgcaactataagccgagacacttggtacaaaggaaacacatacaatactagtattagtaatttagcggaagaaaccagaaaaagatttaaagctgcaacactagcagcactaccaaactaccccacaataatgaccacagacttatatgaataccactcaggcatatactccagcatattcctatcagctggcagaagctactttgaaacaataggggcctactctgacattatatacaacccttttacagacaaaggcacaggcaacataatctggatagactacctaacaaaagaagacacaatttttgtaaaaaacaaaagcaaatgcgagatagcggacatgcccctatgggcggcctgcacaggatatacagagttttgtgcaaagtacacaggagactctgccatcatttacaatgccagagtactaataagatgcccatacactgagcccatgctagtagaccactcagaccctaacaaaggcttcgtaccctactcattcaactttggcaacggaaagatgcccggaggcagctctaacgtgcccataagaatgagagccaagtggtacgtgaacatattccaccaaaaagaagtcttggagagcatagtgcaaagcggaccgtttgggtacaagggcgacataaaatcagcagtactggccatgaaatacagatttcactggaaatggggcggaaaccctatatccaaacaggtcgtcaggaatccctgctccaactccagctcctccgcggcccatagaggacctcgcagcgtacaagcagttgacccgaaatacaataccccagaggtcacgtggcactcgtgggacatcagacgaggactctttggcaaagcaggtattaaaagaatgcaacaagaatcagatgctctttacattcctccaggaccactcaagaggcctcgcagagacaccaatgcccaagacccagaagagcaaaacgaaagctcaggtttcagagtccagcagcgactcccgtgggtccactccagccaagaaacgcaaagctcccaagaagagacggaggcgcaggggtcggtacaagaccaactactcctccagctccgagagcagcgagtactccgactccagctccagcaactcgcaacccaagtcctcaaagtgcaagcagggcacagcctacaccccctattatcttcccaagcgtaaacaaagcctttatgtttgagcccgagggtcctaaacccatacagggctacaacgattggctagaggagtatactgtttgcaaatactgggacagacccccaagaaagctacacacagacatacccttttacccctgggcacctaaacccaaagaccaagtcagggtaacctttaaactcaactttcaataaaaattctaggccgtgggagtttcacttgtcggtgtctgcttcttaaggtcgccaagcactccgagcgccagcgaggagtgcgaccccccctccggtagcaacgccttcggagccgcgcgctacgccttcggctgcgcgcggcacctcagaccccccctccacccgaaacgcttgcgcgtttcggaccttcggcgtcgggggggtcgggagctttattaaacagactccgagttgccattggacactggagctgtgaatcagtaacgaaagtgagt

SEQ ID NO: 1406 - protein, 736 aa, Alphatorquevirus sp.
MAWGFWGRRRRWRRWRARRRRWRPRRRRRRRPARRFRARRRVRRRGGRWRRRYRKWRRGRRRRTHRKKIVIKQWQPNFIRRCYIIGYLPLIFCGENTTSQNYATHSDDMISKGPYGGGMTTTKFTLRILYDEFTRFMNFWTVSNEDLDLCRYVGCKLIFFKHPTVDFIVQINTQPPFLDTHLTAASIHPGIMMLSKRHILIPSLKTRPSRKHRVVIRVGAPRLFQDKWYPQSDLCDTVLLSIFATACDLQYPFGSPLTDNPCVNFQILGPQYKKHLSISSTMDNTNQQHYKSQLFNQTALYNTFQTIAQLKETGQTEGITASWNSVQNTTALDKSGSNATISRDTWYKGNTYNTSISNLAEETRKRFKAATLAALPNYPTIMTTDLYEYHSGIYSSIFLSAGRSYFETIGAYSDIIYNPFTDKGTGNIIWIDYLTKEDTIFVKNKSKCEIADMPLWAACTGYTEFCAKYTGDSAIIYNARVLIRCPYTEPMLVDHSDPNKGFVPYSFNFGNGKMPGGSSNVPIRMRAKWYVNIFHQKEVLESIVQSGPFGYKGDIKSAVLAMKYRFHWKWGGNPISKQVVRNPCSNSSSSAAHRGPRSVQAVDPKYNTPEVTWHSWDIRRGLFGKAGIKRMQQESDALYIPPGPLKRPRRDTNAQDPEEQNESSGFRVQQRLPWVHSSQETQSSQEETEAQGSVQDQLLLQLREQRVLRLQLQQLATQVLKVQAGHSLHPLLSSQA

SEQ ID NO: 1407 - protein, 148 aa, Alphatorquevirus sp.; identical to SEQ ID NO: 715

SEQ ID NO: 1408 - protein, 59 aa, Alphatorquevirus sp.; identical to SEQ ID NO: 716

SEQ ID NO: 1409 - DNA, 3083 bp, Alphatorquevirus sp.
acgccttcggctgcgcgcggcacctcggcagtcaaggggcaattcgggctcgggactggccgggctatgggcaaggctcttagggtcttcattcttaaaatgtttctcggcagagtgtaccgccagaagaaaaggaaactgctactgctggctgtgcagactgcaccgaagacatcttccatgagtctgtggcggcccccgacgagacatgtccccgccagagagagagattgggttgaagtcacgctcagagcccacgctgctttttgtggctgtcctactcctattgttcattttactagtttacttgcacgttttaatcttcaaggaggcccgcagacaccaccggacgagccgggtgagggtgcgtcggtgctgagggccctaccggccccgagcccgcgcagacgccacaccgccaccgaaaacccggggcctgagccatggcctactggtggcgccgccgcaagtggccgtggagacgcagatggaggcgctggagacgccgccgacgagtaccgagacgaagatatagacgacctgttcgccgctatcgaaagagatacacagtaaggagacggaggaggaggagagggtggcgggggcgacgcagacgtagactgtatagacgcagagccaccattaggcgaaagagacggactctagtaatcagacaatggcagccaaacaacataagaaaatgtaaaataaggggcctactgcctatgctaatatgcgggcacggtaacagcgccaacaactatgccataaggtcagacgatacagtgcccaccagaactccttttggaggaggactcagcacagtacatttctctctaaaggtgctctatgaccagcacctaaggggtctcaacaggtggagcacctctaatgacatactagacctggccagatacaatggctgcactttctggttctacagagacctcaaaacagactacatagttcagtacaacataaccactcccttcacaatagacaaagacagtagtgccagctatcacccaggtatgctcatgcaaacaaagcacaagatattagtacccagctatgacacacatcccaggggcaagcctaaaattaagatccgcataccaccccccaaaatgttcatagataaatggtatgctcagaacgacctctgtgaggttcctcttgtgacatttgtggtcagcctagcttcctttacacatccgttctgcccaccactaactgaaaatccttgcatcactttccaagttctgcaaaatttctataacagttacataggttacaacattaacaatgctagcacatatgaaaatatatttaaagactatctatataaggaggcagccttttatcaacaagtactaacaccctcctacattaagaagatagactataatccagatggaagccccacatcacaaaattcaaacatagcacatcccactaatcaatttccaagcctaggcacatttaatgcatgggttaccacaggagtaacaggtaataatactaattataacggagaaaaaggaaacagcaagaaatttataacaggacacacaaatgtacactttaacttttgtacatacaacccaaacgtgcaagaactcacaacacttagaaaatactactttcactgcgaaacagcacaaagtgtaacatcaaaaccatttgatactccacacgtccctcaacactacactaggcctacacatgactattttgaatacagaataggggccttctctccaatattcctcagtccttttagaacaagccctatagaaaactggcctatggcatacagagacatctcatacaatcccctaaatgacaaaggagtaggaaataaaatgtggtaccagagcatcacaaaacaagacacccaattcacactaccaagctccacatttgtgcttgaagacaaaccactgtgggccatgtgttatggatacagagactttataaagagcaccagagagagacaagacatagactttgatggcctagtctgcataatatctccctacaccgtaccgccactgtatgacaaggaccacacacacactggattcgtagtgtatgacagcctatttggaaatggaaaatggttggacggcagcgggttcatacccgtggagtaccagtgcagatggagagtctgcctggcatttcaacaacaagtactgactgacatagccatgactggaccgttcagttacaaagacgactataaaaacacttgcatacaagcaaagtacaaatttaacttcagatggggtggtaatatgctctatcagcagaccatcaaaaatccctgcacggacggacaccctaccgactcccatagagagcctagaagcatacaagtgtctgacccgcttaccgtgggacccagatactgcttccaccagtgggactggagacgtgggttccttggtgacaaagctctcaaaagaatgttacaaaaaccgctcgattttgaactatatgcagtcactccaaagagacccagaatattccctcccacagaaggagagcaagaaagccaaaggcaagaaagaagctccagttcagaggaagaaagcatccttatctcgcaagaagagaaagtaccgacggaggcactccaagtccacctccgaaagcagctcagacagcagcgagagctacgattccagctcaagcacctcttccaccagctctgcaaaacccaagcgggtctccacctcaaccccctattatttacccagcagtaaacacggtgtatatgttcccagagatggctccaaagcccgctcctactagtggagactgggccacggagctggaggcctgcaaggcatgggatagacccatgaggcagaacctccaagatacccccttctacccctggatgcctaccaacttcagggtcagcttcaaactcggttttaaaccctaaataaaaatttcaacgccgtgcactgttcacttgtcggtgtctacctcttaaagtcactaagcactccgagcgtcagcgaggagtgcgacccttccccctggtgcaacgccctcggcggccgcgcgct

SEQ ID NO: 1410 - protein, 775 aa, Alphatorquevirus sp.; identical to SEQ ID NO: 406

SEQ ID NO: 1411 - protein, 168 aa, Alphatorquevirus sp.; identical to SEQ ID NO: 407

SEQ ID NO: 1412 - protein, 79 aa, Alphatorquevirus sp.; identical to SEQ ID NO: 408

SEQ ID NO: 1413 - DNA, 3082 bp, Betatorquevirus sp.
cgggagccgaaggtgagtgaaaccaccgtagtctaggggcaattcgggctagttcagtctggcggaacgggcaagaaacttaaaatatattattttacagatgcaaattcaaccacctattagaaccttcaaacaaacaatttcagattggaaaaacctacttgttcacgttcacgataatatttgcaactgcaataaaccactggaacatacaatcgacacttgtattaccaatcctgatgaattaagattaaataaatcaactaaactacaactacaaaaatgcctttctacgccagaagaagatggccaagaagacgttatagatggtttcgaagatggagagctagacgcccttttcgcccaagataccggagaagatactgggtaagaaaatattctcgaaagagaaaactttataaaattacagaaaaacaatggcaaccaaaagtaataagaaagactcatgtaaggggtacataccccttatttctctgtacaaagcacagaattgcaaacaatatgatacaatacttagactctgttgctcctgaacactattacggtggaggaggattctccataatgcaattttctttacaagctttgtacgaagaatttgtaaaagcaaaaaactggtggactcatactaactgctatctacctattataagatatatgggatgttcttttaaattttataaaacagaattttatgattatgttgtacttatagaaagatgttatccacttgcttgtactgatgaaatgtacttatctactcaacctagtattatgatgcttacaaaaaaatgtatatttgtaccatgcaaacaaaatagcaaaggaaaaaagccctacaaaaaagttagagtgaaaccaccttcacaaatgactacaggatggcacttttcacaagacctagcaaacatgccattagtagtacttaaaacttcagtatgcagttttgacagatattacacagacaacaatgcaaaatccacaacaatagactttaaaacattaaataccacaacatttaaactacatgactggcaagaacccccaacaacaggctacaaaccacaagaaaaactatggttttatggtgcaaataatggcagtccttcccaattagacctaactcctgttaaaacactaatatatttaggaggcacaggaccctacaacaaaggaacacccatagcagactcaaaaggagacatggttaccaactatttttccacacctaaactgtggggaaacatttttcatgatgactatttaacaggcacttctccagtatttgtaacaaacctttcaccttcagagataacaaacaaatggaatgacattaaagcaaaaactgttaaagactcctctgtttttacagttagaacaattccactatggcaaccatgcagatacaacccttttgcagacaaagcaacaaacaaccaaatatggctagtttccatccattcagaccacacacaatggaaacccatagacaaccctttactaaaaagaacagatttgccactatggcttctagtctggggatggcaggactggcaaaagaaaaaccaacaaacatcacagccagacataaactatttaacagtaatatcttcaccttacataaacacatacccaaaactagaatattatgtactaattgatgaatcaatgtttgcaggccactcaacatatatagacacaattactgacagcgacaataaacattggtatcctaaaaacaaatttcaaatagaaactttaaacttaatagctagtacagggccaggaactgtaaaacttagagacaatcaagcagctgaggctcacatgatttatcgctttaactttaagcttggaggatgtccagcaccaatggaaaaaatatgtgaccctagcaaacaatccaaatatcctattcccaataaccagcaacaaacaacttcgttgcagagtccagaaaacccaattcaaacctatctctacgacttcgacgaaaggcggggcctacttacagaaagagctgcaaaaagaatcaaacaagattactcatctgaaaaaactgttttgccatttacaggagcaacaacagacctccccatactcaaaacaacatcacaggaggaaagctcctcggaagaagaagaagaacaacaagcggagaagagactactccagctccgaagaaagcagcagcgcctccgactccgaatcctccagctattagacatacaaaactcagaataataaaatgtaacttttacaatcaaatgtttggagatgatactccaaacagacgtttaactcctaaagaattagaatgggaactacaagactcaaaaatttggggccacagacctagaacatttctaaaagataagcctttctatgactttttgcctattacacctgtaataccccgcataaactttgaccttggttttaatcaataaaggcctgcatacttccacttgaggtgtccatttatttaagttaaaactaatataaacatccaccgcctccctaatacgcaggcgcaaaagggggctccgcccccttacacccccaagggggctccgcccccttaaacccccaagggggctccgcccccttacaccccctaataaatattcaacaggaaaaccacctaattagaattgccgaccacaaaccgtcttacagttcctctttttacacatacttccctttttgctaattattattcataacattaattagtaaccactgtaattccggggaggagcaacacaactataaaactaactacacttccgaatggctgagtttatgccgccagacggagataataaatattcaacaggaaaaccacctaattagaattgccgaccacaaaccgtcttacagttcctctttttacacatacttccctttttgctaattattattcataacattaattagtaaccactgtaattccggggaggagcaacacaactataaaactaactacacttccgaatggctgagtttatgccgccagacggagacgggatcactacagtgactccaggctgaacttggg

SEQ ID NO: 1414 - protein, 660 aa, Betatorquevirus sp.
MPFYARRRWPRRRYRWFRRWRARRPFRPRYRRRYWVRKYSRKRKLYKITEKQWQPKVIRKTHVRGTYPLFLCTKHRIANNMIQYLDSVAPEHYYGGGGFSIMQFSLQALYEEFVKAKNWWTHTNCYLPIIRYMGCSFKFYKTEFYDYVVLIERCYPLACTDEMYLSTQPSIMMLTKKCIFVPCKQNSKGKKPYKKVRVKPPSQMTTGWHFSQDLANMPLVVLKTSVCSFDRYYTDNNAKSTTIDFKTLNTTTFKLHDWQEPPTTGYKPQEKLWFYGANNGSPSQLDLTPVKTLIYLGGTGPYNKGTPIADSKGDMVTNYFSTPKLWGNIFHDDYLTGTSPVFVTNLSPSEITNKWNDIKAKTVKDSSVFTVRTIPLWQPCRYNPFADKATNNQIWLVSIHSDHTQWKPIDNPLLKRTDLPLWLLVWGWQDWQKKNQQTSQPDINYLTVISSPYINTYPKLEYYVLIDESMFAGHSTYIDTITDSDNKHWYPKNKFQIETLNLIASTGPGTVKLRDNQAAEAHMIYRFNFKLGGCPAPMEKICDPSKQSKYPIPNNQQQTTSLQSPENPIQTYLYDFDERRGLLTERAAKRIKQDYSSEKTVLPFTGATTDLPILKTTSQEESSSEEEEEQQAEKRLLQLRRKQQRLRLRILQLLDIQNSE

SEQ ID NO: 1415 - protein, 110 aa, Betatorquevirus sp.
LAERARNLKYIILQMQIQPPIRTFKQTISDWKNLLVHVHDNICNCNKPLEHTIDTCITNPDELRLNKSTKLQLQKCLSTPEEDGQEDVIDGFEDGELDALFAQDTGEDTG

SEQ ID NO: 1416 - DNA, 3078 bp, Alphatorquevirus sp.
cctcagacccccgtgagtttacacaccgcagtcaaggggcaattcgggctcgggactggccgggctacgggcaaggctcttagggttatcgctctttaaaacatgtttctcggcagggtgtggagaaagaaaaggaaagtgccactgccaacactgccagtggtgccgattccacaacctacacgtatgagcagccagtggagaccccctgttcacaatgtccaggggcaggagcgaaattggtatgagtccttcttccgcggccatgcttgcttttgtggttgtggtgatgctgttactcatattaatcatctggcggctcgttttggacgtcctcctcctacctcaactccccgaggaccacagacaccttcagtgaccccgttcccggccctgccggcccctgagcccacgcccgagccatggcgtggcgccagtggcgatggcggccgtggtggagacgccggaggcgccgcaggtggagaaggagacgccggagacccagacgacgccgcccttatcgacgccgtcgacctcgcagagtaaggaggcgcagggggcggtggaggcgcgcttacagacgttgggggcgacgcagacgcagacgaaagcacaaaaagagacttatactaactcagtggcagccccctattgtaaaaaggtgctttataattgggtacgaccctgtaattatctgtggtattaacaggaccacctttaactacactacacactcagaagactacacatacaacaatgaaagctttgggggcggactctgcacaacacagtacaccctaagaattctatttcaagagaaactagctcagcacaacttttggacagccagcaacgaggacctagacctagctagatatacaggaggctcatttacattctttaaacacccaacagtagactttctagttagagttcgcaccagtcctcccttcgaggacacagacatgactgcactgtcactacacccaggcatgatgatgctcagcaaaaaagtaattaaaatacctagcctaaaaaccagaccctccagaaaacactatgtaaaaatcaggtttgggccccccaaactctttgaagacaagtggtaccctcagaacgagctgtgtgatgtaactttggtgagcatacaggcaaccgcagctgatttccaatatccgttcggctcaccactaacgaactctatctgttgcaacttccaggttcttaacagtaactatgacggtgcacttagcatactgcacctatctaatgaattaacatctcctatacacactgccagacaaaagtgctataactttttattaaaccagtacagttactacaacacaaaacaagttgtagcccagctaaaatatggctggaaccccaatcaaaatccaaccatgcctaataccaataacgcctcgtcatctcaaccaccagaaaacttaacaaaagataaacttagaaataagtacccacactgggacacaaaatacgggggcttagcatatggaaacagcacaacaaaccctggcactactgcatcaccaactgacttatatacttcaatgttacaaggcaacaccttttataccacggcaggcaaacaattaatcaaaacatttatacctatagaacactatgagggcaacaccaaaactaataacacaaacatatttgactactacacaggcatgtttagcagcatatttttatctagtggcagaagcaacccagaagtaaaaggcagctacacagacatctcatacaatccacttatagacaaaggggtgggaaacaaactgtggatagactggctctcaaaagcagacactatatacgacccccaaaaaagcaaatgcctacttaaagactttcccatgtgggcactatgctacggatacgcagactactgcaaaaaagtcaccggagactcggcggtgttgtacaacgccagaatagtcatgagatgtccctacacctacccacaacttacaaaacacgacaatgaagactggggctttgtaccttatagcgagaactttggactcggacggctaccggggggcgaccctaatcctcccaccagaatgagacttcactggtaccccatgatgcttcaccagacagaagtattagaatgcatagcacaatcgggaccctttgcataccacggggacgaaagaaagactgtactgagtgccaaatacaaattcaggtggaagtggggaggtaatcctgtgtttcaacaggttcttagagacccctgcagcggcggtgccgtggcgccccacaccagtcgacaccctcgcgcagtacaaatctatgacccgaagcaccaagccccggaatacttgttccacaagtgggacttcagaaggggactctttagcaataaaggtattaaaagagtgtcagaacaaccaacacatgatgagtttcttacaggccacagcaaaagacccaagaaagatacaggggcgagggtggaagacgaagaacagcaaaaagaaagcttacatttcagactcccagagctcaggccatggctcccctccagccaggaaacggagagccaaagcgagcaagaagaaacagtcccgaagacggtacaagaacaactacaagagcagctccagcaacagcgaatcatgggagtccaactccgaaacatctgtctccagctcacaagagtccaagcggggcacagtctccaccccgttttccaatgccatgtataaacaaggtgcttatgttccctgacagggagcccaagaagcctcctaccagcaaagactggaaggaggagtttgaggcctgtaagtactgggacaggccagctagaaataacctcaatagccctcctttttacccctggatgcccaaacagccccctacttgtagtgtaaccttcaagcttggctggaaataaaattacaacgccgtgggagtttcacttgtcggtgtctgcttattaaagtcactaagcactccgagcgtaagcgaggagtgcgaccccctgccctgggcccacttcttcggagccgcgcgctacgccttcggctgcgcgcggca

SEQ ID NO: 1417 - protein, 773 aa, Alphatorquevirus sp.
MAWRQWRWRPWWRRRRRRRWRRRRRRPRRRRPYRRRRPRRVRRRRGRWRRAYRRWGRRRRRRKHKKRLILTQWQPPIVKRCFIIGYDPVIICGINRTTFNYTTHSEDYTYNNESFGGGLCTTQYTLRILFQEKLAQHNFWTASNEDLDLARYTGGSFTFFKHPTVDFLVRVRTSPPFEDTDMTALSLHPGMMMLSKKVIKIPSLKTRPSRKHYVKIRFGPPKLFEDKWYPQNELCDVTLVSIQATAADFQYPFGSPLTNSICCNFQVLNSNYDGALSILHLSNELTSPIHTARQKCYNFLLNQYSYYNTKQVVAQLKYGWNPNQNPTMPNTNNASSSQPPENLTKDKLRNKYPHWDTKYGGLAYGNSTTNPGTTASPTDLYTSMLQGNTFYTTAGKQLIKTFIPIEHYEGNTKTNNTNIFDYYTGMFSSIFLSSGRSNPEVKGSYTDISYNPLIDKGVGNKLWIDWLSKADTIYDPQKSKCLLKDFPMWALCYGYADYCKKVTGDSAVLYNARIVMRCPYTYPQLTKHDNEDWGFVPYSENFGLGRLPGGDPNPPTRMRLHWYPMMLHQTEVLECIAQSGPFAYHGDERKTVLSAKYKFRWKWGGNPVFQQVLRDPCSGGAVAPHTSRHPRAVQIYDPKHQAPEYLFHKWDFRRGLFSNKGIKRVSEQPTHDEFLTGHSKRPKKDTGARVEDEEQQKESLHFRLPELRPWLPSSQETESQSEQEETVPKTVQEQLQEQLQQQRIMGVQLRNICLQLTRVQAGHSLHPVFQCHV

SEQ ID NO: 1418 - protein, 147 aa, Alphatorquevirus sp.
MFLGRVWRKKRKVPLPTLPVVPIPQPTRMSSQWRPPVHNVQGQERNWYESFFRGHACFCGCGDAVTHINHLAARFGRPPPTSTPRGPQTPSVTPFPALPAPEPTPEPWRGASGDGGRGGDAGGAAGGEGDAGDPDDAALIDAVDLAE

SEQ ID NO: 1419 - protein, 128 aa, Alphatorquevirus sp.
MAPLQPGNGEPKRARRNSPEDGTRTTTRAAPATANHGSPTPKHLSPAHKSPSGAQSPPRFPMPCINKVLMFPDREPKKPPTSKDWKEEFEACKYWDRPARNNLNSPPFYPWMPKQPPTCSVTFKLGWK

SEQ ID NO: 1420 - DNA, 3078 bp, Alphatorquevirus sp.
cgcgcggcacaggtgagtttacacaccgcagtcaaggggcaattcgggctcgggactggccgggccatgggcaagactcttaaaaagctatgtttctcggtaaaatctacagaaagaaaaggaaactgcttctgcaggctgtgcgtgctccacagacgccatcttccatgagccgctgttggtgtccccctcggggtgatgtctcctcccgcgagtctcgatggtaccaggcggttcgacaaagccacgatgctttttgtggctgtggtgattctattcttcatctttctcgtctggctgcacgttttaaccatcaaggacctccgacgccccccacggacgaccgtgcgccgcacaataccccagtgagacgcctgctgcctctccccagctaccccggcgagggcccccaggctagatggcctggtggggatggaggcgccgctggtggcgaccgaagagaaggtggagatggcggcgcgcgcgccgccgaagacgaataccagcccgaagacctagacgagcttttcggcgctatcgaacaagaacagtaaggaggaggcgaagggggaggcggaggggctaccggcgccgttacagactgagacgctatgccagacgcaggttccgacgcaaaaagatagtactgactcagtggaacccccagactaccagaaaatgtataataaggggcatgatgccagtactgtgggccggcatgggtacggggggcagaaactatgcagtgaggtcagatgactatgtggtaaacaaagggttcgggggctccttcgccacggagaccttctccctgaaggtcctctatgaccagttcctcaggggcttcaacagatggtcccacactaacgaggacctagacctggcccgctacaggggctgcaggtggactttttacagacataaacacacagactttatagtgtactttacaaacaatccccccatgaagaccaaccagttctccgcgcccctaacgacccccggcatgctcatgcgcagtaaatacaaggttctgatccccagcttccagaccagacccaagggtcgcaaaacagtgtccgttagaataaggccccccaaactatttcaagacaagtggtacacccagcaagacctgtgttcagttcctcttgtccaactgaacgtaaccgcagctgatttcacacatccgttcggctcaccactaactgaaactccttgcgtagagttccaggtgctgggtgacttgtacaatacatgtctcaatatcgaccttccgcaattttcagaatcaggagaaataactagcaactactcaaaacctaacagaactaacttaacagaattatataaagaattattcacaaaacccacatcaggccactactggcagacattcataaccaacagtatggtcagggcacacatagatgcagaccaagctaaacaggcacaaagaacaaccaccacacacacatacaaccaagaccccttccccacagtacctcctaaagcaaactttgctaactggaaaaaaaagttcacagacacaagagacagctcctttctattcgccacttaccatccccaagctataacagaaacaattaaacgaatgagagacaacaactttaaactacaaacaggccccaatgacaagtatggagactacacagcacagtaccaagaaaacacacacatgctagactactaccttggcttttacagccccatattcctctcagacggcaggtctaatgtagaattcttcactgcctacagagacatagtatacaatcccttcttagacaaggcccagggcaacatggtgtggtttcagtaccacacaaagacagacaacaagtttaaaaaaccagagtgccactgggagatcaaagacatgcccttgtgggccctcctaaacggatatgcagactacttagagactcaagtacaatatggggacctcagtaaagaaggcaaagtcctcatcaggtgtccctacaccaagccggcactagtagaccccaaagacgacactgcaggatatgtagtctacaacagaaactttggcagaggcaagtggatagacggaggtggctacatccccctgcacgacaggacaaagtggtacgtgatgctcagataccagacggacgtcttccatgacatagtgacctgtgggccctggcagtacagagacgacaacaaaaacagccagctagtggccaaataccgcttcagctttatatggggaggtaacactgtccactctcaggtcatcagaaacccgtgcaaagacaaccaagtatccggtccccgtcgacagcctagggatgtacaagtcgttgacccgcaactcatcacgccgccgtgggtcctccacagcttcgaccagcgaagaggcctctttactgaaacagctctcagacgtctgctcaagcaaccactacctggcgagtatgctgttagcaccctcaggacacccctcctctttctaccctcagaataccaaccagaagacggcgctgcagaaagcgcctcaggttcaccggccaaaagaccccgtatctggtcagaagagagccagacggagacgatctcctcggaggagaacccggcggagacgacgagggagctcctccagcgaaagctccgagagcagcgagcactccagttccagctccagcacttcgcggtccaactcgccaagacccaggcgaatctccacgtaaatcccctgttatccttcccccaataaacaaggtctttctgtttcccccagacggtcccaagcccatcgtgggcaaagaggcctggcaggacgagtaccaaacctgcaaggtctggaacagacctcccagaacccaccacacagacacccccttctatccctgggccccccacaacttccgtgtaagcttcaaacttggcttccaataaaattactaggccgtggaactctcactggtcggtgtctacctcttaaggtcactaagcactccgagcgtcagcgaggagtgcgaccctttaccctggtgcaacgccctcggcggccgcgcgctacgccttcggctg

SEQ ID NO: 1421 - protein, 780 aa, Alphatorquevirus sp.
MAWWGWRRRWWRPKRRWRWRRARRRRRIPARRPRRAFRRYRTRTVRRRRRGRRRGYRRRYRLRRYARRRFRRKKIVLTQWNPQTTRKCIIRGMMPVLWAGMGTGGRNYAVRSDDYVVNKGFGGSFATETFSLKVLYDQFLRGFNRWSHTNEDLDLARYRGCRWTFYRHKHTDFIVYFTNNPPMKTNQFSAPLTTPGMLMRSKYKVLIPSFQTRPKGRKTVSVRIRPPKLFQDKWYTQQDLCSVPLVQLNVTAADFTHPFGSPLTETPCVEFQVLGDLYNTCLNIDLPQFSESGEITSNYSKPNRTNLTELYKELFTKPTSGHYWQTFITNSMVRAHIDADQAKQAQRTTTTHTYNQDPFPTVPPKANFANWKKKFTDTRDSSFLFATYHPQAITETIKRMRDNNFKLQTGPNDKYGDYTAQYQENTHMLDYYLGFYSPIFLSDGRSNVEFFTAYRDIVYNPFLDKAQGNMVWFQYHTKTDNKFKKPECHWEIKDMPLWALLNGYADYLETQVQYGDLSKEGKVLIRCPYTKPALVDPKDDTAGYVVYNRNFGRGKWIDGGGYIPLHDRTKWYVMLRYQTDVFHDIVTCGPWQYRDDNKNSQLVAKYRFSFIWGGNTVHSQVIRNPCKDNQVSGPRRQPRDVQVVDPQLITPPWVLHSFDQRRGLFTETALRRLLKQPLPGEYAVSTLRTPLLFLPSEYQPEDGAAESASGSPAKRPRIWSEESQTETISSEENPAETTRELLQRKLREQRALQFQLQHFAVQLAKTQANLHVNPLLSFPQ

SEQ ID NO: 1422 - protein, 154 aa, Alphatorquevirus sp.
MFLGKIYRKKRKLLLQAVRAPQTPSSMSRCWCPPRGDVSSRESRWYQAVRQSHDAFCGCGDSILHLSRLAARFNHQGPPTPPTDDRAPHNTPVRRLLPLPSYPGEGPQARWPGGDGGAAGGDRREGGDGGARAAEDEYQPEDLDELFGAIEQEQ

SEQ ID NO: 1423 - protein, 123 aa, Alphatorquevirus sp.
LVRREPDGDDLLGGEPGGDDEGAPPAKAPRAASTPVPAPALRGPTRQDPGESPRKSPVILPPINKVFLFPPDGPKPIVGKEAWQDEYQTCKVWNRPPRTHHTDTPFYPWAPHNFRVSFKLGFQ

SEQ ID NO: 1424 - DNA, 3074 bp, Alphatorquevirus sp.
ccgcgcgctacgccttcggctgcgcgcggcaccaaggggcaattcgggctcgggactggccgggctatgggcaaggctcttagggtcttcattcttaaaatgtttctcggcagagtgtaccgccagaagaaaaggaaactgctactgctggctgtgcagactgcaccggagacatcttccatgagtctgtggcggcccccgatgagacatgtccccgcaagggagagagattgggttgaagccacgttcagagcccacgctgctttttgtggctgtcctaatcctgttattcatttcactagtgtacttgcacgttttaatcttcaaggaggcccgcagacaccaccggacgagccgggtgagggtgcgccggtgctgagggccctaccggccccgagcccgcgcagacgccacaccgccaccgaaaacccggggcctgagccatggcctactggtggcgccgccgcaagtggccgtggagacgcagatggaggcgctggagacgccgccgacgagtaccgagacgaagatatagacgacctgttcgccgctatcgaaagagatacacagtaaggagacggaggaggaggagagggtggcgggggcgacgcagacgcagactgtatagacgcagagccaccattaggcgaaagagacggactctagtaatcagacaatggcagccaaacaacataagaaaatgtagaataaggggcctactacctatgctaatatgcgggcacggtaacagcgccaacaactatgccataaggtcagacgatacagtgcccaccagaactccttttggaggaggactcagcacagtacatttctctctaaaggtgctctatgaccagcacctaaggggtctcaacaggtggagcacctctaatgacatactagacctggccagataccatggctgcactttctggttctacagagacctcaaaacagactacatagttcagtacaacataaccactcccttcacaatagacaaagacagtagtcccagctatcacccaggtatgctcatgcaaacaaagcacaagatattagtacccagctatgacacacatcccaggggcaagcctaaaattagggtccgcataccaccccccaaaatgttcatagataaatggtatgctcagaacgacctctgtgaggttcctcttgtgacatttgtggtcagcctagcttcctttacacatccgttctgcccaccactaactgaaaacccttgcatcactttccaagttctgcaaaatttctataacagttacataggttacaacattaacaatgctaacacatatcaaaatatatttaaagactatctatataaggaggcagccttttatcaacaagtactagtatcctcctacattaaaaagatagactataatccagatggaagccccacatcacaaaatggaaacacaacacaacccactaatccatttccaagcctaggcacatttaatacatgggttaccacaggagtacaaattgatactagtcatcataacggagataaaggaaacagtaagaaatttataacaggacacacaaatgtacactttaacttttgtacatacaacccaaacatacacgaactcacaacacttagaagatactacttttactgcgaaacagcacaaagtgtaacatcaaaaccatttgatactccacacgtccctcaacactacactaggcctacacatgacaattttgaatacagaataggggccttctctccaatattcctcagtccttttagaacaagccctatagaaaactggcctatggcatacagagacatctcatacaatcccctaaatgacaaaggagtaggaaataaaatctggtaccagagcatcacaaaacaagacacccaattcacactaccaagctgcacatttgtgcttgaagacaaaccgctgtgggccatgtgttatggatacagagactttataaagagcaccagagagagacaagacatagactttgatggcctagtctgcataatatctccctacaccgtaccgccactgtatgacaacgaccacacacagactggatttgtagtgtatgacagcctgtttggaaatggaaaatggttggacggcagcgggttcatacccgtggagtaccagtgcagatggagagtctgcctggcatttcaacaacaagtactgactgacatagccatgactggaccgttcagttacaaagacgactataaaaacacttgcatacaagcaaagtacaaatttaacttcagatggggtggtaatatgctctatcagcagaccatcaaaaatccctgcacggacggacaccctaccgactcccatagagagcctagaagcatacaagtgtctgacccgcttaccgtgggacccagatactgcttccaccagtgggactggagacgtgggttccttggtgacaaagctctcaaaagaatgttacaaaaaccgctcgattttgaactatatccagtcactccaaagagacccagaatattcccccccacagaaggagagcaagaaagccaaaggcaagaaagaagctccagttcagaggaagaaagcatccttatctcgcaagaagagaaagtaccgacggaggcactccaagtccacctccgaaagcagctcagacagcagcgagagctacgattccagctcaagcacctcttccaccagctctgcaaaacccaagcgggtctccacctcaaccccctactatttacccagcagtaaacagggtgtatatgttcccagaggtggctccaaggcccgctcctactagtggagactgggccacggagctggaggcctgcaaggcatgggatagacccatgaggcagaacctccaagatacccccttctacccctggatgcctaacaacttcagggtcagcttcagactcggttttaaaccctaaataaaaatttcaaggccgtgcactgttcacttgtcggtgtctacctcttaaagtcactaagcactccgagcgtcagcgaggagtgcgacccttccccctggtgcaacgccctcggcgg

SEQ ID NO: 1425 - protein, 775 aa, Alphatorquevirus sp.
MAYWWRRRKWPWRRRWRRWRRRRRVPRRRYRRPVRRYRKRYTVRRRRRRRGWRGRRRRRLYRRRATIRRKRRTLVIRQWQPNNIRKCRIRGLLPMLICGHGNSANNYAIRSDDTVPTRTPFGGGLSTVHFSLKVLYDQHLRGLNRWSTSNDILDLARYHGCTFWFYRDLKTDYIVQYNITTPFTIDKDSSPSYHPGMLMQTKHKILVPSYDTHPRGKPKIRVRIPPPKMFIDKWYAQNDLCEVPLVTFVVSLASFTHPFCPPLTENPCITFQVLQNFYNSYIGYNINNANTYQNIFKDYLYKEAAFYQQVLVSSYIKKIDYNPDGSPTSQNGNTTQPTNPFPSLGTFNTWVTTGVQIDTSHHNGDKGNSKKFITGHTNVHFNFCTYNPNIHELTTLRRYYFYCETAQSVTSKPFDTPHVPQHYTRPTHDNFEYRIGAFSPIFLSPFRTSPIENWPMAYRDISYNPLNDKGVGNKIWYQSITKQDTQFTLPSCTFVLEDKPLWAMCYGYRDFIKSTRERQDIDFDGLVCIISPYTVPPLYDNDHTQTGFVVYDSLFGNGKWLDGSGFIPVEYQCRWRVCLAFQQQVLTDIAMTGPFSYKDDYKNTCIQAKYKFNFRWGGNMLYQQTIKNPCTDGHPTDSHREPRSIQVSDPLTVGPRYCFHQWDWRRGFLGDKALKRMLQKPLDFELYPVTPKRPRIFPPTEGEQESQRQERSSSSEEESILISQEEKVPTEALQVHLRKQLRQQRELRFQLKHLFHQLCKTQAGLHLNPLLFTQQ

SEQ ID NO: 1426 - protein, 168 aa, Alphatorquevirus sp.; identical to SEQ ID NO: 1061

SEQ ID NO: 1427 - protein, 79 aa, Alphatorquevirus sp.; identical to SEQ ID NO: 1062

SEQ ID NO: 1428 - DNA, 3073 bp, Alphatorquevirus sp.
cgggtgccggaggtgagtttacacaccgcagtcaaggggcaattcgggcacgggactggccgggctatgggcaaggctcttagggtcttcattcttaaaatgtttctcggcagagtgtaccgccagaagaaaaggaaactgctactgctggctgtgcagactgcaccggagacatcttccatgagtctgtggcggcccccgatgagacatgtccccgcaagggagagagattgggttgaagccacgttcagagcccacgctgctttttgtggctgtcctaatcctgttattcatttcactagtgtacttgcacgttttaatcttcaaggaggcccgcagacaccaccggacgagccgggtgacggtgcgccggtgctgagggccctaccggccccgagcccgcgcagacgccacaccgccaccgaaaacccggggcctgagccatggcctactggtggcgccgccgcaagtggccgtggagacgcagatggaggcgctggagacgccgccgacgagtaccgagacgaagatatagacgacctgttcgccgctatcgaaagagatacacagtaaggagacggaggaggaggagagggtggcgggggcgacgcagacgcagactgtatagacgcagagccaccattaggcgaaagagacggactctagtaatcagacaatggcagccaaacaacataagaaaatgtagaataaggggcctactgcctatgctaatatgcgggcacggtaacagcgccaacaactatgccataaggtcagacgatacagtgcccaccagaactccttttggaggaggactcagcacagtacatttctctctaaaggtgctctatgaccagcacctaaggggtctcaacaggtggagcacctctaatgacatactagacctggccagataccatggctgcactttctggttctacagagacctcaaagcagactacatagttcagtacaacataaccactcccttcacaatagacaaagacagtagtcccagctatcacccaggtatgctcatgcaaacaaagcacaagatattagtacccagctatgacacacatcccaggggcaagcctaaaattagggtccgcataccaccccccaaaatgttcatagataaatggtatgctcagaacgacctctgtgaggttcctcttgtgacatttgtggtcagcctagcttcctttacacatccgttctgcccaccactaactgaaaacccttgcatcactttccaagttctgcaaaatttctataacagttacataggttacaacattaacaatgctagcacatatgaaaatatatttaaagactatctatataaggaggcagccttttatcaacaagtactagtatcctcctacattaaaaagatagactataatccagatggaagccccacatcacaaaatggaagcgcagcacaacccactaatcaatttccaagcctaggcacatttaatacatgggttaccacaggaataacaactaataatgataatcataacggacaaaaaggaaaaagcaagaaatttataacaggacacacaaatgtacactttaacttttgtacatacaacccaaacatacacgaactcacaacacttagaaaatactactttcactgcgaaacagcacaaagtgtaataccaaaaccatttgatactccacacgtccctcaacactacactaggcctacacatgacaattttgaatacagaataggggccttctctccaatattcctcagtccttttagaacaagccctatagaaaactggcctatggcatacagagacatctcatacaatcccctaaatgacaaaggagtaggaaataaaatctggtaccagagcatcacaaaacaagacacccaattcacactaccaagctgcacatttgtgcttgaagacaaaccgctgtgggccatgtgttatggatacagagactttataaagagcaccagagagagacaagacatagactttgatggcctagtctgcataatatctccctacaccgtaccgccactgtatgacaaggaccacacacagactggatttgtagtgtataacagcctgtttggaaatggaaaatggttggacggcagcgggttcatacccgtggagtaccagtgcagatggagagtctgcctggcatttcaacaacaagtactgactgacatagccatgagtggaccgttcagttacaaagacgactataaaaacacttgcatacaagcaaagtacaaatttaacttcagatggggtggtaatatgctctatcagcagaccatcaaaaatccctgcacggacggacaccctaccgactcccatagagagcctagaagcatacaagtgtctgacccgcttaccgtgggacccagatactgcttccaccagtgggactggagacgtgggttccttggtgacaaagctctcaaaagaatgttacaaaaaccgctcgattttgaactatatccagtcactccaaagagacccagaatattcccccccacagaaggagagcaagaaagccaaaggcaagaaagaagctccagttcagaggaagaaagcatccttatctcgcaagaagagaaagtaccgacggaggcactccaagtccacctccgaaagcagctcagacagcagcgagagctacgattccagctcaagcacctcttccaccagctctgcaaaacccaagcgggtctccacctcaaccccctactatttacccagcagtaaacagggtgtatatgttcccagaggtggctccaaggcccgctcctactagtggagactgggccacggagctggaggcctgcaaggcatgggatagacccatgaggcagaacctccaagatacccccttctacccctggatgcctaacaacttcagggtcagcttcagactcggttttaaaccctaaataaaaatttcaaggccgtgcactgttcacttgtcggtgtctacctcttaaagtcactaagcactccgagcgtcagcgaggagtgcgacccttccccctggtgcaacgccctgaggg

SEQ ID NO: 1429 - protein, 775 aa, Alphatorquevirus sp.
MAYWWRRRKWPWRRRWRRWRRRRRVPRRRYRRPVRRYRKRYTVRRRRRRRGWRGRRRRRLYRRRATIRRKRRTLVIRQWQPNNIRKCRIRGLLPMLICGHGNSANNYAIRSDDTVPTRTPFGGGLSTVHFSLKVLYDQHLRGLNRWSTSNDILDLARYHGCTFWFYRDLKADYIVQYNITTPFTIDKDSSPSYHPGMLMQTKHKILVPSYDTHPRGKPKIRVRIPPPKMFIDKWYAQNDLCEVPLVTFVVSLASFTHPFCPPLTENPCITFQVLQNFYNSYIGYNINNASTYENIFKDYLYKEAAFYQQVLVSSYIKKIDYNPDGSPTSQNGSAAQPTNQFPSLGTFNTWVTTGITTNNDNHNGQKGKSKKFITGHTNVHFNFCTYNPNIHELTTLRKYYFHCETAQSVIPKPFDTPHVPQHYTRPTHDNFEYRIGAFSPIFLSPFRTSPIENWPMAYRDISYNPLNDKGVGNKIWYQSITKQDTQFTLPSCTFVLEDKPLWAMCYGYRDFIKSTRERQDIDFDGLVCIISPYTVPPLYDKDHTQTGFVVYNSLFGNGKWLDGSGFIPVEYQCRWRVCLAFQQQVLTDIAMSGPFSYKDDYKNTCIQAKYKFNFRWGGNMLYQQTIKNPCTDGHPTDSHREPRSIQVSDPLTVGPRYCFHQWDWRRGFLGDKALKRMLQKPLDFELYPVTPKRPRIFPPTEGEQESQRQERSSSSEEESILISQEEKVPTEALQVHLRKQLRQQRELRFQLKHLFHQLCKTQAGLHLNPLLFTQQ

SEQ ID NO: 1430 - protein, 168 aa, Alphatorquevirus sp.
MGKALRVFILKMFLGRVYRQKKRKLLLLAVQTAPETSSMSLWRPPMRHVPARERDWVEATFRAHAAFCGCPNPVIHFTSVLARFNLQGGPQTPPDEPGDGAPVLRALPAPSPRRRHTATENPGPEPWPTGGAAASGRGDADGGAGDAADEYRDEDIDDLFAAIERDTQ

SEQ ID NO: 1431 - protein, 79 aa, Alphatorquevirus sp.; identical to SEQ ID NO: 1062

SEQ ID NO: 1432 - DNA, 3069 bp, Alphatorquevirus sp.
agacccccgctcgtgctgacacgctcgcgcgtgtcagaccacttcgggctcgcgggggtcgggagctttattaaacagactccaggttgccattgaacactggagctgtgaatcagtaacgaaagtgagtggggccagacttcgccataaggcctttatcttcttgccatttgtccgtctagggggtcgccataggcttcgggctcggttttaggccttccggactacaaaaaccgccatattagtgacgtcacggccgccattttaagtaaggcggaagcagctcggtgttaacaaaatggccgcggagcacttccggcttgcccaaaatggtgggcaatatcttccgggtcaaaggtcatcggcgccatattaagtcacgtgactatctacgtcacggccgccattttagttcacaaaatggccgacttccttcctctttttcaaaaaaaaagcggaagtgccgcagcggcggcggggggcggcgcgctgcgcgcgccggtggtggagaaagcggtggacccgtggccgacttcgcagacgatggcctagacgatctcgtcgccgccctcgacgaagaagagtaaggaggcggaggaggtggaggagagggcgacccagacggagactgtacagacgcggcagacggtacagacgaaagcgaaagcgggctaagataactataagacaatggcagcccgccatgacgagacgctgttttataaggggttacatgcccgctctcatatgtggctggggggcttatgccagcaactacaccagccacttagaggacaaaataattaaaggaccgtacggtgggggacacgccacttttaggttctccctacaagtactgtacgaggagcacctaaaacatcacaactactggactagaagcaaccaggacctagagctggccctgtactatggctgcacaattaaattttacaggagcccagacacagactttatagtaacataccagagaaagtcccccctggggggcaacatactgacaggcccatcactacacccagcagaagccatgctgagcaaaaacaaaatactaatacccagcctgctaacaaaacccaagggaaaaaagactgtaaagattaacatagcacccccaactctctttgtacataaatggtactttcagaaagacatatgtgacctaacactgttcaacttgaacgttgttgcggctgacttgcggtttccgttctgctcaccacaaactgacaacgtttgcatcaccttccaggtgctagccgcagagtacaaccagttcctctctataactgaacctgcagctagtaaagaagcggaagagtcatttattaacagattcttacaaaaagccattccagacaaccctgttagacatgcaaatatactaaacacatttagaacagaaggatgtatgtcacatccccaactaaaaaaatataatgcaaactcaaaaccactagacaactcaacatactttcacactccagacggcctatggggagatccaatatacatttacgaacagcatacacagggaacaacaacaatattacaacaaactcctagtgaaataagaaagaaaatagcacaaaacatgtccagctactttaaaaaaataacagaagaaagtacaataataactaaaggctgcaaagcgcactgccacctaacaggcatattttcaccaccattcctaaacataggcagagtagcaagagagtttccaggcctatacaatgacattatatataacccatggacagacaaaggcaaaggcaacaaaatatggatggattcactaagtaaaggagacaacatatataaagaaggacaaagcatactattaatgcaagacatgccactatacatactactaaatggctatgtagactgggcaaaaaaagaaagaaacaactggggcctagccacacaatacagagtaatgctagtatgcccatacacataccctagactatatgtagaaacaaacccatggcacggatatgttatttattcagaatcatttggagcaggccaaatgccagacaaaaacccatacgtaccagtaacatggagaggaaagtggtacccccacatacttcaccaagagtcagtaataaatgacatagtaatgtcagggccttttgcaccaaaagacacaaagccagtaatgcagttaaacatgaaatactccttcagattcacatggggcggcaatcctatctccacacagattgttaaagacccctgcacccagcccacctttgaaatacccggtggcggtaacatccctcgcagagtacaagtcatcaatccgaaagtcctcggacccagctacagtttcagatcctttgacctcagacgtgacatgtttagcggcccgagtcttaaaagagtctcagaacaacaagagacttctgagtttttattctcaggtggcaaacgccccaggatcgacctacccaagtacgtcccgccagaagaagacttcagtatccaagagagacaacaaagagaacagaaaccgtggacgagcgaaagcgaaagcgaagcagaagcccaagaagagacgcaggcgggctcggtccgagagcagctccagcagcagctccaagagcagcttcaactccgaaggggactcaagtgcctcttcgagcagctagtgagaacccagcagggagtccacgtagacccctgcctcgtgtaggccccgagcagtggctctttccagagagaaagcccagaccccctcctacttccggggactgggccatggagtaccttatgtgtaagataatgaacaggcctccccgcactcacctcacagacccgccattctacccttactgcaaaaacaattacaatgtaacctttcagcttaactacaaataaaagcctgcttctctgctcaaggccgtgggagtttcacttgtcggtgtctacctctaaaggtcactaagcactccgagcgccagcgaggagtgcgacccttccccctgactcaacttcttcggagccgcgcgctacgccttcggctgcgcgcggcacctc

SEQ ID NO: 1433 - protein, 698 aa, Alphatorquevirus sp.
LYRRGRRYRRKRKRAKITIRQWQPAMTRRCFIRGYMPALICGWGAYASNYTSHLEDKIIKGPYGGGHATFRFSLQVLYEEHLKHHNYWTRSNQDLELALYYGCTIKFYRSPDTDFIVTYQRKSPLGGNILTGPSLHPAEAMLSKNKILIPSLLTKPKGKKTVKINIAPPTLFVHKWYFQKDICDLTLFNLNVVAADLRFPFCSPQTDNVCITFQVLAAEYNQFLSITEPAASKEAEESFINRFLQKAIPDNPVRHANILNTFRTEGCMSHPQLKKYNANSKPLDNSTYFHTPDGLWGDPIYIYEQHTQGTTTILQQTPSEIRKKIAQNMSSYFKKITEESTIITKGCKAHCHLTGIFSPPFLNIGRVAREFPGLYNDIIYNPWTDKGKGNKIWMDSLSKGDNIYKEGQSILLMQDMPLYILLNGYVDWAKKERNNWGLATQYRVMLVCPYTYPRLYVETNPWHGYVIYSESFGAGQMPDKNPYVPVTWRGKWYPHILHQESVINDIVMSGPFAPKDTKPVMQLNMKYSFRFTWGGNPISTQIVKDPCTQPTFEIPGGGNIPRRVQVINPKVLGPSYSFRSFDLRRDMFSGPSLKRVSEQQETSEFLFSGGKRPRIDLPKYVPPEEDFSIQERQQREQKPWTSESESEAEAQEETQAGSVREQLQQQLQEQLQLRRGLKCLFEQLVRTQQGVHVDPCLV

SEQ ID NO: 1434 - DNA, 3069 bp, Alphatorquevirus sp.
cgggtgccggaggtgagtttacacaccgcagtcaaggggcaattcgggctcgggactggccgggctatgggcaaggctcttaaaaaagctatgtttcttggtaaactttacagaaagaaaagggcactgctactgcctagcctgccaactccaaagaaaaaaccacttactgctatgagctactggtgtccccctgttcacgatgtacgcgggcgcgaacatcagtggtatgaggcttgctaccgctctcatggtgctatgtgtggctgtggcagtttcattaatcatcttgcttatttgggtgagcgttatggcttccgaccgggcaatagaggccctggctcgtctggcgtaggaggcccgccacccccgctccgtagagccctgccggcacccccggctccggagccttcccaccaggctaacaacaacaacaaccagagatggcctggggatggtggaagcgaaggaggcgccgctggtggagaggagtcttcaggaaacgccgctttgccagaagacgacctcgatggactgctcgccgccctagacgacgaagagtaaggaggcgcagacggtggaggagggggagacgcagacgcagacagtacagacgcaagagacggtacagacgcagacgaaaaaagcctaaaattgtaattaaacaatggcagccagacatggtcagacggtgctatataatagggtacatggccgccctcataagtggcaacggtacatttgccataaactatagtagccacttagaggacagaataatgaaaggaccgtttggaggaggccacagtaccctaagatactctctgtacgtactgtaccaagaacacctcagacacggtaacttctggacttacagcaacaaggacttagaactcaccagatacctgggggcgactctgactttctataggagcccagacactgactttatagtgacttacagtagaaagagtcccctgggaggcaacatatacacagccccctcactacatccaggcaatgccatgctagctaaacacaaaatactaatacctagtctagaaaccaggccaaaaggcaaaaaaacagttaaaataagactagcccccccaactctctttgtagataagtggtactttcaaaaggacatctgtgacctgagtctgtttaacctcaatgtcacaatggccgacttgcggtttccgttctgctcaccacaaactgacaacacttgcgtcagtttccaggtgctgaaatcctgttacaacaactacctcagcattaacaaatttaacacagacacagacaatcaactaactaactttttaaaagaagcttttccaactagtggagcaacagcgagatctataaaccaactaaacacatttaaaactgaaggcaacatatcacaccctaaattacaaaaaccttcaggggccaacaaccaagttcctgcagacagctattttgctccactagatgcactctggggagaccccatatatttaaactctgctacaacaagccaaaagacaagagacgacataataagtaactttttaattaaaaacatgactacgtaccacaagaaaataacagacgaacaattcccacagtcatggcaaggaaacaaagcattcacccacttaacaggcatatacagcagcccataccttaactcaggcagaattagcccagaagtatttggcctttacacagaaataatttacaatccatacacagacaaaggcaaaggcaacagagtatggatagaccctttaacaaaagaaaacaacttatactctgccacacagagcaagtgtcttttagaagacgctccactgtggtgtctcctgtttggatacacagactggattaaaaaagacctaaaccactgggacgcccctttaaactacagactactcctagtaagtccatacacatacccaaaaatgtaccatgataacaatcccaactatggctacgtaccctatagctataagtttggagcaggccaaatgccagacggcagtgcatacattccctttttatatagagcaaagtggtaccccaacatactacaccaacaacaagtaatggaggatgtagccagagcaggcccctttgcacctaaaacccaaaaacctagcagccagttagtaatgaaatacaagtttagatttaactggggtggtaatcctatatccgaacagattgttagagacccctgcacgcagcccacctttgaaatccccggtggcggtaacctccctcgcagaatacaagttgtcgacccgaaaatcctcggaccgagctactcgttccgtagctgggacatcagacgtggaatgtttagcacagcgagtcttaaaagagtgtcagcagaatcagaaacttctgagtttttattctcaggcccaaaaaggccccgaatcgacctaccgaaataccagccgccagaagacgcctcgtgtacactccaaagagaatcgagaccctggtcgacggaggaagaagaaacagagagcgaagccccctcagaagaggaagaaacgacctccgtccgagagcagttgcagcagcagtaccgagagcaactcaaactcagacagggaatcaagcacctcttccagcaactagtcagaacacagcagggagtccacgtaaatccttccctcttgtaggcccccagcagtggctcttcccagagagaaaaccaaaacctcctcctacctcggaggactgggccttagagtacctagcatgcaaaatatttaacagaccacctagaagcaggcttacagacaacccattttacccctactgcaaaaataattacaatgtaacctttcagctcaactacaaatcccgcggggggctccgccccccggcccccccccgtgctacgtcactaaccacgtgacattcgcaggccaaccctggtgtacgttgtgcacttcctgggcgtggtgtatgtaatcatataaagcgctgcacttccgaatggctgagtttttgctgcccgtccgcggagaggaaccacggcaggggatccgaacgtcccgaggg

SEQ ID NO: 1435 - protein, 746 aa, Alphatorquevirus sp.
MAWGWWKRRRRRWWRGVFRKRRFARRRPRWTARRPRRRRVRRRRRWRRGRRRRRQYRRKRRYRRRRKKPKIVIKQWQPDMVRRCYIIGYMAALISGNGTFAINYSSHLEDRIMKGPFGGGHSTLRYSLYVLYQEHLRHGNFWTYSNKDLELTRYLGATLTFYRSPDTDFIVTYSRKSPLGGNIYTAPSLHPGNAMLAKHKILIPSLETRPKGKKTVKIRLAPPTLFVDKWYFQKDICDLSLFNLNVTMADLRFPFCSPQTDNTCVSFQVLKSCYNNYLSINKFNTDTDNQLTNFLKEAFPTSGATARSINQLNTFKTEGNISHPKLQKPSGANNQVPADSYFAPLDALWGDPIYLNSATTSQKTRDDIISNFLIKNMTTYHKKITDEQFPQSWQGNKAFTHLTGIYSSPYLNSGRISPEVFGLYTEIIYNPYTDKGKGNRVWIDPLTKENNLYSATQSKCLLEDAPLWCLLFGYTDWIKKDLNHWDAPLNYRLLLVSPYTYPKMYHDNNPNYGYVPYSYKFGAGQMPDGSAYIPFLYRAKWYPNILHQQQVMEDVARAGPFAPKTQKPSSQLVMKYKFRFNWGGNPISEQIVRDPCTQPTFEIPGGGNLPRRIQVVDPKILGPSYSFRSWDIRRGMFSTASLKRVSAESETSEFLFSGPKRPRIDLPKYQPPEDASCTLQRESRPWSTEEEETESEAPSEEEETTSVREQLQQQYREQLKLRQGIKHLFQQLVRTQQGVHVNPSLL

SEQ ID NO: 1436 - protein, 165 aa, Alphatorquevirus sp.
MGKALKKAMFLGKLYRKKRALLLPSLPTPKKKPLTAMSYWCPPVHDVRGREHQWYEACYRSHGAMCGCGSFINHLAYLGERYGFRPGNRGPGSSGVGGPPPPLRRALPAPPAPEPSHQANNNNNQRWPGDGGSEGGAAGGEESSGNAALPEDDLDGLLAALDDEE

SEQ ID NO: 1437 - protein, 141 aa, Alphatorquevirus sp.
LVDGGRRNRERSPLRRGRNDLRPRAVAAAVPRATQTQTGNQAPLPATSQNTAGSPRKSFPLVGPQQWLFPERKPKPPPTSEDWALEYLACKIFNRPPRSRLTDNPFYPYCKNNYNVTFQLNYKSRGGLRPPAPPRATSLTT

SEQ ID NO: 1438 - DNA, 3068 bp, Alphatorquevirus sp.
cgcgtgtcagaccacttcgggctcgcgggagtcaaggggcaattcgggctcgggactggccgggctatgggcaaggctcttaaagcgaacgtcccccgctatgtttctcggcagggtgtggaggaaacagaaaaggaaagtgcttctgctggctgtgcgagctccaaagaagacatcttccatgagtatctggcgtccccccctcgggaatgtctcctacagggagagaaattggcttcaggccgtcgaaggatcccacagttctttttgtggctgtggtgattttattcttcatattactaatttagctgcacgctttgctattcaggggcccccgccggagggtggtccgcctcggccgaggccgccgctcttgagagcgctgccggcccccgaggtccgcagacagacgcgcacagagaacccgggcgcctccggtgagccatggcctggcgatggtggtggcagagacgatggcgccgccgcccgtggccccgcagacgatggagacgcctacgacgccggagacctagacgacctgttcgccgccgtcgaagaagagcaacagtaaggaggcggaggtggagggtcagacgtgggcgacgcacatacacccgacgcggggtcagacgcagacgcagactcacaaagagacttgtactgactcagtggagcccccagacagtcagaaactgttcaataaggggtatagtacccatggtaatatgcggacacaccacagcaggtagaaactatgccatacacagcgaagacttcactacacaaataaaacccttcgggggcagtttcagcacgaccacctggtcgctgaaagtactctgggacgaacaccaaaaatttcagaacaggtggtcctatccaaacacacagctagacctcgccaggtaccggggagtcaccttctggttctacagagaccagaagacagactatatagtacaatggagcagaaatcctccctttaaactaaacaaatacagcagctccatgtaccaccctggaatgatgatgcaggcaaaaaagaaactaatagtccccagtttccagaccagacctaaaggcaaaaagagatacagagtaagaataagaccccccaacatgttcgctgacaagtggtacactcaagaagacctgtgtccggtacctcttgtgcaaattgtggtttctgcggccagcctgctacatccgttctgcccaccacaaacgaacaacccttgcatcactttccaggttttgaaagacatatatgatgaatgcataggaattaacgaaagtatgaaaactcagtatgaaactttacaaaacaaactatacacccaatgcacatactatcaaacaacacaagtactggcacaactatctcctacctttcaacctgccatgaaacctaccacttcaaacacagaccctacaaacacgacactaggaaactatgtaccagacttaaagtacaactctggcaactttcacacaggacaaaacccagtattcggcatgtgttcatacaagccaacaaaagaaataatggagaaagctaatagctggttttggcacaatctaatggtagacaaccagttacatagtagttatggcaaggcctcattaaagtgcatggagtaccacacaggcatatacagctccatattcctaagcccacaaagatctttagaattcccagcagcataccaagacgttacatacaaccctaactgtgatagagcagttggaaacgtagtttggttccagtacagcactaaaatggatacaaactttgatgaaataaaatgtaaatgtgtccttaaagatattccactgtgggcggccttcaatggctacgcagactttataatgcaagaactgagcataagtacagaaatccacaactttggcatagtgtgctttcagtgcccctacacttttcccccctgtttcaagaaagataatcccaaaaaggggtacgtgttctatgacaccacctttggtaatggaaagatgccagacggttcagggcacatacccatctactggcaacagaggtggtgggtcagactagccttccaggtccaggtcatgcacgactttgtactctgcggcccctttagctacaaagatgacctagcgaacaccacactcacagccaggtacaaatttagattcaaatggggcggtaatatcatccccgaacagattatcaagaacccgtgtcacagagagcagtccctcgcttcctaccccgatagacaacgtcgcgacctacaagttgttgacccatcaaccatgggcccgatctacaccttccacacatgggactggcgacgggggctttttggtgcagatgctatccagagaatgtcacaaaaaccgggagatgctctccgctttacaaaccctttcaaaagacccagatatcttcccccgacagctggagaagactaccgacaagaagaagacttcgttttacaagaaaaaagaaggcgcacactcacagaagaagtccaggacccggagagccccccgcaaagcgcgccgctcctacagcagcagcagcagcagcgggagctctcagtccagctcgcggagcagcagcgactcggagtccaactccgatacatcctccaagaagtcctcaaaacgcaagcgggtctccacctaaaccccctattattaggcccgccacaaacaaggtgtatctctttgagccccccaaaggcctcctcccaatagtgggcagagaggcctgggaggacgagtacgtcacctgcaagcactgggatcgccctcccagaaccaaccatctagacacccccacctatccctggatgcccaccaacttcaaagtcagcttcaaacttggatttaaaccctaaataaaaatatcaaggccgtacactgttcacttgtcggtgtctacctctataggtcactaagcactccgagcgcagcgaggagtgcgacccttctgggtgggtgcaacgccctcggcggccgcgcgctacgccttcggctgcgcgcggcacctcggacccccgctcgtgctgacacgctcg

SEQ ID NO: 1439 - protein, 766 aa, Alphatorquevirus sp.
MAWRWWWQRRWRRRPWPRRRWRRLRRRRPRRPVRRRRRRATVRRRRWRVRRGRRTYTRRGVRRRRRLTKRLVLTQWSPQTVRNCSIRGIVPMVICGHTTAGRNYAIHSEDFTTQIKPFGGSFSTTTWSLKVLWDEHQKFQNRWSYPNTQLDLARYRGVTFWFYRDQKTDYIVQWSRNPPFKLNKYSSSMYHPGMMMQAKKKLIVPSFQTRPKGKKRYRVRIRPPNMFADKWYTQEDLCPVPLVQIVVSAASLLHPFCPPQTNNPCITFQVLKDIYDECIGINESMKTQYETLQNKLYTQCTYYQTTQVLAQLSPTFQPAMKPTTSNTDPTNTTLGNYVPDLKYNSGNFHTGQNPVFGMCSYKPTKEIMEKANSWFWHNLMVDNQLHSSYGKASLKCMEYHTGIYSSIFLSPQRSLEFPAAYQDVTYNPNCDRAVGNVVWFQYSTKMDTNFDEIKCKCVLKDIPLWAAFNGYADFIMQELSISTEIHNFGIVCFQCPYTFPPCFKKDNPKKGYVFYDTTFGNGKMPDGSGHIPIYWQQRWWVRLAFQVQVMHDFVLCGPFSYKDDLANTTLTARYKFRFKWGGNIIPEQIIKNPCHREQSLASYPDRQRRDLQVVDPSTMGPIYTFHTWDWRRGLFGADAIQRMSQKPGDALRFTNPFKRPRYLPPTAGEDYRQEEDFVLQEKRRRTLTEEVQDPESPPQSAPLLQQQQQQRELSVQLAEQQRLGVQLRYILQEVLKTQAGLHLNPLLLGPPQTRCISLSPPKASSQ

SEQ ID NO: 1440 - protein, 171 aa, Alphatorquevirus sp.
LAGLWARLLKRTSPAMFLGRVWRKQKRKVLLLAVRAPKKTSSMSIWRPPLGNVSYRERNWLQAVEGSHSSFCGCGDFILHITNLAARFAIQGPPPEGGPPRPRPPLLRALPAPEVRRQTRTENPGASGEPWPGDGGGRDDGAAARGPADDGDAYDAGDLDDLFAAVEEEQQ

SEQ ID NO: 1441 - protein, 187 aa, Alphatorquevirus sp.
MGLATGAFWCRCYPENVTKTGRCSPLYKPFQKTQISSPDSWRRLPTRRRLRFTRKKKAHTHRRSPGPGEPPAKRAAPTAAAAAAGALSPARGAAATRSPTPIHPPRSPQNASGSPPKPPIIRPATNKVYLFEPPKGLLPIVGREAWEDEYVTCKHWDRPPRTNHLDTPTYPWMPTNFKVSFKLGFKP

SEQ ID NO: 1442 - DNA, 3064 bp, Betatorquevirus sp.
cgggagccgaaggtgagtgaaaccaccgaagtctaggggcaattcgggctagatcagtctggcggaacgggcaagaaacttaaaataaatttattttacagatatgttctcttcatggaagaatcctacatcctcacagagacagaaagaactccaatggattggcatcattaactctacacacgaccaaatttgccactgcgacgacccaacattacacctactttactgcctcaacaaattctctggatttaacaaaccagaattggatataaataatataaaatgcctccttaccggccctactaccaaaactacagaagaaaatacttccgaaaaagaagaaacaggttttatagaaggggagttagagcgacttttcgacgaagacaatggagaagaaaaagaaaatacaagcccaaatacaaggtaaagaaatttaaattttataaaaaaaagaagaaatcaattatactaagacagtttcaaccaactgctattaacaaatgtaaatgcatagggtttaaatgcttactacaaggatctatattaagagctatgaataactttgtacaatatatttactcatttgtacctgaaaagcaaccagggggtggcggatggagtattcaaatactaagtttagactctgtatacgaagactaccaacacttacaatgcatttggactaaaggaaatgcaggcctaccattagtaagatatctaggaacaaaatttacactataccaatcacaagaaacagactacgtattcaaatacgacaactgctggcccatggtagacaccatacacacacacgcagactctgctccatttagaatgctacaaacaaaaaataaagtagtagtacccagcataaacaccaaaaaaaggagaaaaccatataaaaaagtatttgtacgcccaccagcacaaatgacaaacaaatggtactttcaaaaagaaatatgcaaaacaccactcgtaatgtttacaacaactgccgtctcactaacatttccatttgctgatccaaaagctaaaagcaataatgtaacagtactctgtataaacccatacatttttaaaaaccctgactttcaacactacggaactacagggtattcacctaaatccactaatgacggaacgccattatacttatacggcagcaatcaagccaatgttacttatgaaaaattaaaatcaggcaaccaaaaaccgatgataacagcattagtagacacaaaaaaccacacaccaggaacaccactaaataactcacagaaccaaagtatagataaacttgccggaaacccattccatgaggaatggaccagcggagatcaatacatatacttttcactaatgacacccacagaaatgcaagctcttttaacaaaaagtgaagagccatctgatagtaaaaaaaaatccatcacaaacacgggtgaaattatttacacattcagatataacccagacaaagatgatggatccaccaacaaacaatacattgttagcacatcttcaggacgaataatacaaccaccagacaatgaaaaccacatactatcaggctttccatttccatacatgctatggggatggacagactggataaaaaaactaggagaaacaccatcattcgacacaaacaaactagtagtacttgaatcaaaagcctttaacgataccactattccattatttattccaatagacccacaatttgcacacggctttgacccatactcagacatgaatgaaccaaaccacactatctcaccttacaatgccaaaaactggtttcctagatatgaatatcagaaatatacaataaatgaaatatgtttatctggacctgcgtgtcctagaccaccttggaatcactatttacaagccttatgtaaatatactatgtattttaaatggggaggatgtcctaaaaacctacaaaaagcttataatccttgttcacagtcaatatggcccacgcccgataacaagtatggacgatctgaggtgcagaatcctaacatcttcccacaaacagaactatactcatgggactggcaaaaagactatgttacagaagaagctattaaaagaatcaaaagatatacagacattgatccaacaatattctcagttacaggaccaaagtcaaacccgccaccactcaaaaagatcaagaaacaagacgaagaagaagaggaggagaagaaactccagttccagctccacaagctgcgattccagaaagtcatcctccaactccagctccagcagcaattaaaatctataaatcaaaaataaaagtaaacttatttgaacccacaaaaccaaaaaataggagaatgacaccaagagaaaaagaagaagaaaaactagacgcagcaatatggaaaagaccacaaagagactttatactcgatatacctttctaccctggtataccccctaccccactagtaaactttgacttaaaatacaaatatgaataaacaaggccaacattaattcacttagtggtgtccatttatttaagttcaacttatataaacatccaccgcctccctgaaattcgggcgccaaaatttaaaagggggctccgcccccttcaacccccaagggggctccgcccccttacacccccaagggggctccgcccccttacaccccctaataaatattcaacaggaaaaccacacccccaagggggctctgcccccttacacccccaagggggctccgcccccttacacccccaagggggccacgcccccttcaacccccaagggggctccgccccctaacacccccttataaatattcaacaggaaaaccacctaatttaaattgccgaccacaaaccgtcgtttacttccccttttaacactacttcctcaaattctcattattattcattacattcattagtaaacaccgtaattccggggaggagactattcactatataactaactacacttccgaatggctgagtttatgccgccagacggaggctgtatcacttcagtgactacagactgatcttggg

SEQ ID NO: 1443 - protein, 677 aa, Betatorquevirus sp.
MPPYRPYYQNYRRKYFRKRRNRFYRRGVRATFRRRQWRRKRKYKPKYKVKKFKFYKKKKKSIILRQFQPTAINKCKCIGFKCLLQGSILRAMNNFVQYIYSFVPEKQPGGGGWSIQILSLDSVYEDYQHLQCIWTKGNAGLPLVRYLGTKFTLYQSQETDYVFKYDNCWPMVDTIHTHADSAPFRMLQTKNKVVVPSINTKKRRKPYKKVFVRPPAQMTNKWYFQKEICKTPLVMFTTTAVSLTFPFADPKAKSNNVTVLCINPYIFKNPDFQHYGTTGYSPKSTNDGTPLYLYGSNQANVTYEKLKSGNQKPMITALVDTKNHTPGTPLNNSQNQSIDKLAGNPFHEEWTSGDQYIYFSLMTPTEMQALLTKSEEPSDSKKKSITNTGEIIYTFRYNPDKDDGSTNKQYIVSTSSGRIIQPPDNENHILSGFPFPYMLWGWTDWIKKLGETPSFDTNKLVVLESKAFNDTTIPLFIPIDPQFAHGFDPYSDMNEPNHTISPYNAKNWFPRYEYQKYTINEICLSGPACPRPPWNHYLQALCKYTMYFKWGGCPKNLQKAYNPCSQSIWPTPDNKYGRSEVQNPNIFPQTELYSWDWQKDYVTEEAIKRIKRYTDIDPTIFSVTGPKSNPPPLKKIKKQDEEEEEEKKLQFQLHKLRFQKVILQLQLQQQLKSINQK

SEQ ID NO: 1444 - protein, 109 aa, Betatorquevirus sp.; identical to SEQ ID NO: 27

SEQ ID NO: 1445 - DNA, 3063 bp, Alphatorquevirus sp.
aggagtgcgacggtgagtttacacaccgcagtcaaggggcaattcgggctcgggactggccgggccatgggcaaggctcttaaaaaggcatgtttctcggtaaactttacagaaagaaaaggaaagtgccactgtccgcagtgccagtcgctccgaaaaaaccaactgttatgagcagtgtgtacagaccgccggcccacgatgttcgagggcaagagcagcagtggtttcgagcctgtatgcactctcacggcgcctggtgtggttgtggtaactttattctgcatatatcttctgttgctgcacgtcttaactttcagggaggtcccgctccccccggaggcccccagagagagagaggcccagtaagagccctccttcctctgccggctgtgccccaagagggggtcgagcgtaacccatggcctactggaactggtggcgccgccggtggttccggccgagacggaggagatggcgaacgtggaggacccgccgtcgcagacgagtaccgcgaagaagacctcgacgagctgttcgccgctatcgaaagagaagagtaaggaggcggcggtggcgggggaggcggtacaccagacgggggcgactcagactaagacgcagacgcagacgcaggggcaaaatatatctagcccagtggaacccccagacagtgcgacgctgcagaatcagaggcatgatgcccttcatatgggccggggcaggtacaggaggtagaaactatgcagtccgctcagacgacaccgttataaaagggggcttcggaggctccttcggaacagagacattttccctgagggtcctctttgaccaatacaccaggggcatgaacaggtggtcctacagcaaccaagacctagatctcgccctatatcacgggtgtactttcactttctatcgccacaaagttacagactttatagtatactttactaacaaccctccactaaagaccaaccagcacacggctccccttacccatccgggcatgctaatgagatcaaaatttaaagtattaattcctagctttgctactaggcccaagggcagaaagacagttaagataaagatccgcccaccgaaactatttcagcacaagtggtatgcgcaatctgacctgtgtgccgttccccttgtgcaacttaacctaaccgcagctgatttccaacatccgttcggctcaccactaactgacactccctgtgtgcaattccaagtactgggggacctctataacaaagtgcttaatattgatctgccccaattaagctctgatggatcgcgtgcagaatttgtagttgctacaggacaacagtccaacattgaagcccttaaaaacctctatacacagctattcctctctaacgactctggccactactggcagacatttctcactaatcccatggtaaagtcacacatagatgcaaagcacgccaaaccttctacatatacacaaacagacccaacacaacaacaaagtcaaaaaccctttcccacagtaccaacatcatctgaattccaaaattggcaacaaaaatttatagacagaagagactctctttttctctttgccacctatcaccccaaagagatagccactactataaagaaaatgagagacaacaactttgctctctgcacaggccccaacgacatatacggagactatacatcacagtactctagatccacacacctcctagactactacctgggaatatacagtccaatattcttaaacccaggtagatcaaacatagaatttttcacagcctttaaagacatagcatacaatccactactagacaaaggaaagggcaacctaatatggtttcagtaccacacaaaaacagacaacatattctcaaaacccagctgcaagtgggaaattgaagattatcctctgtgggcagcctgccacggatacatagactacctagagactcaaataaagtacggagacctaaaactagaaggcaaagtacttataagatgcccctacacaataccgcccctcatagacaagacagactccaacgccggtttcgttgtctacaacgccacttttggcatgggcaagtggacagatggcagtggctacatccccctcaaagagagggggagatggtacgtaatgctcaggtaccagactgacgtattgcatgacatagcgacgagcggaccgtgggcctacagagacgacgaaaaaaactcccagctggtgggtaaatacaaatttaacttcacctggggtggcaataccatacattcacagatcatcagaaatccctgcaaagacgaccaacttgcccaccccagtcgacagcctagggaagtacaagtcgttgacccgcaactggtcggacccccgtgggtcctccactccttcgaccagagacgaggcttctataatgacacagctatacgacgtctgttacagcaaccaatgcctagcccagatgttgctccccgcaacaaaagacccttactctttatacccccagtgttccaagaccccgcaggtgtcgaaaacgactccggttcaccggccaaaaagtcgagactctggcaagaagagagttcgatacagacggggtcgcagccctcggaagaccagaaggagacgacgagggagctcctcgagcgaaagctcacagagcagaagctcatccaccagcaactccgacacctcgcagtccagctcgccaaaacccaggcggggatccacataaacccccttttgttatcttccccgctacaaacaaggtagagatgtttcccagtattaaaaaaagaactcccactaagggagactgggaaacagagtatcaggcctgcgcggccttcgacaggcctccccgcagcgacctcagtcgcccaccacactatccatacctacccaccagctgcaaagttaccttccgtcttggcttcaaaccctaactcaaataaagctctctctcaactgtacgttggccgtgggagtctcacttagcggtgtctacctcttaaggtcaccaagcactccgagcgtcagcg

SEQ ID NO: 1446 - protein, 790 aa, Alphatorquevirus sp.; identical to SEQ ID NO: 1303

SEQ ID NO: 1447 - protein, 157 aa, Alphatorquevirus sp.; identical to SEQ ID NO: 1304

SEQ ID NO: 1448 - protein, 125 aa, Alphatorquevirus sp.; identical to SEQ ID NO: 1305

SEQ ID NO: 1449 - DNA, 3062 bp, Alphatorquevirus sp.
cggcggcccccggtgagtttacacaccgcagtcaaggggcaattcgggctcgggactggccgggctctgggcaaggctcttaaaaagccatgtttctcggtaaactttacagaaagaaaaggaaactgctactgcaagctgtgcgtgctccacaggcgccatctcccatgagccgctgctggtgtcccccccggggtaatgtcgcctctcgcgaagcccggtggtacgacgcggttcgaggaagccacgatgctttttgcggctgtggtgatcctgttcttcatttttctcgtctggttgcacgttctaaccatcagggacctccgacgcccccctcggacgaccgtgcgccgtcgcgtaccccagtgagacgcctgctgcctctccccagctaccccggcgagggtccggctcctagatggtctggtggggatggaggcgccggtggtggcgaccaaagagaaggtggcgatggcggcgcgcgcgccgccgacgaagagtaccggcccgaagacctagacgagcttttcgacgctatcgaacaagaacagtaaggaggagacgcagggggaggcggaggggctaccggcgccgtcacagactgagacgctatgccagacgtagattcaaacgcagaaagatagtactgactcagtggaacccccagactgtcagaaaatgtactataaggggtctcatgcccgtcctgtgggcgggcatgggcaaggggggccacaactacgccgtccgctcagatgactttactataaaagggggcttcggcggctcttttgcgacagagaccttcagtctcagagtactgttcgaccagtaccagaggggctttaacaagtggtccttcagtaaccaggacctagacctggccctctaccatgggtgcaaatggacattctacagacaccaagacacagactttataatatacttcaccaacaatccccccatgaaaaccaaccagttctctgctcccttgaccactccgggcatgctaatgaaaaacaaatataagatactactgcccagctttaaaaccagacccagggggcgaaagtccgtctctgtcagaataagaccccctaaactatttcagcataagtggtacacccagcaggacctgtgcacagttcctcttgtccaactgaacgtgaccgcagctgatttcacacatccgttcggctcaccactaactgacactccttgcataagcttccaggtgctgggtgacttgtataacgaatgtcttaatatagaccttcctcaatttacagaaaacggtgagatagagcccagttcaaattatgagagacctaataaagaacaacttaaaaaactttatcaaaccctctttaccaaaccagactcctcacactactggcaaacattcatagtaaactccatggtcagagcccatattaatgcgaaacaagcccaaaaagcctatgaaaatgtaaggtcctcacctacctacaacactcaaccattccccacagaacccttaaaaagtgagtttgacacatggaaaaacgaattcacagaccaaagagacagcaactttctttttgctacataccatccagacaaaattaaaggtacattaaagaaaatgagagacaataactttctattagagactggcccaaatgacagatatgggtccttccaggcccagtacaccagaaacacacacatgctagactactacctcggcttctacagccccatattcctatctgatggcagatccaatgtagaattctttacagcatacagagacatagtgtacaaccccctcctagacaaagccgagggcaacatgatctggttccagtaccacacaaagacagacaacaaatacagaaaaccagaatgccactgggagataacagacatgcccctgtgggccctctgcaacgggtacgaggagtacctagagagccagataaaatatggagacgccaaagtagagggcaaggtcctcatcaggtgtccctacaccaaacctcctctcacagaccccaaagatcctactgcaggatttgtagtttacaaccagaactttggacgaggaaagtggatagacggaggaggctacatccccttacacgagaggagcaagtggtacgtcatgctacagtaccagactgacgtcctacacgacatagtgacttgtggaccgtggcagtacagggacgacaacagaaacagtcagcttatagccaagtactccttcagattcaagtggggcggtaaccttgttcactcccaggtcatcagaaacccatgtaaggacaaccaagtatccggtccacgtagacagcctagagacgtacaagttgttgacccgcaactcgtctcgccgccctgggtcctccacaacttcgaccagagacgaggacagtttactgaaacagctatcagacgtctgctacagcaaccaatgcctggcgagtatgttgctccagcccaacacgtacccctcctcttcctaccctcagagtaccaacgcgaagacggaagtgtcgaagacaactccggttcaccggtcaaaagaccccgcacctcgtacgaagagaacgaaacacagacggagtcctcgtcggagggggacccggcggagacgacgagggagctcgtcatccgaaagctccgagagcagcgagcactccagttccagctccaacacttcgctctccaactcgccaagacccaggcgaacctgcacataaaccccctattatctttcccgcagtaaacaaggtcctgctattccccccagagggtcctaaacccatagtaggtaaggaggcctggcaagatgagtacgtagcctgcaaatactgggacaggccacctagaacccaccacacagacacccctttctatccctgggccccccaacaattccgtgtgagcttcaaacttggctttcaataaaattgctacgccgtggaactctcactggtcggtgtctacctcttaaggtcactaagcactccgagcgtcagcgaggagtgcgaccctctaccctggtgcaacgccct

SEQ ID NO: 1450 - protein, 784 aa, Alphatorquevirus sp.; identical to SEQ ID NO: 388

SEQ ID NO: 1451 - protein, 154 aa, Alphatorquevirus sp.; identical to SEQ ID NO: 389

SEQ ID NO: 1452 - protein, 57 aa, Alphatorquevirus sp.; identical to SEQ ID NO: 390

SEQ ID NO: 1453 - DNA, 3061 bp, Alphatorquevirus sp.
ctcgcgggggtcgggaattttgctaaacagactaaggggcaattcgggctcgggactggccgggctatgggcaaggctcttaaaaaagcatgtttttcggcaggcattggagaaagaaaaggacactgctactgctaccggtgccaactaaaccgaaagcactttctcgacagatgagctggagcagacccgttcacgatgagcgcggaattcagcgcaactggttcgagggggtcattcgcacccacgctgcttgctgtggttgtggtaatgcttgtgctcatctggctactctggcccagaggtacgggtacccttctctaccttcgcataccccgcgacccggcacctcgacacctgtgagcaccccggagcagatccgtagagcccgggctctgcccgcggctccggaccaccctccagccctgccatggcatggggatggtggaagagacggcggcgcggctggttccgaaggcggtggacccgtggcagaattcgcagaagatgggctcgacggccttatcgccgccctcgacgacgaacagtaaggaggcgcagacggaggaggagggggagacgaaaattcagacggtacagagtaaagagacgctaccgcagacgtaaaaagacccaaaagattaaactgacacagtggcaaccagccaaaacaaaacgctgctttatgataggatattttcctactgttattcagggacaaggacggtggtcagaaaactttactagtcacatagaagataaggtagccaagggaccctttgggggcgggcacagcaccagtaggtggtctctaaaagtactgtacgacgaaaaccagagacaccacaacttctggacagctagtaacagtgatctagaactagccaggttctttggcagctcctggaggttttacagacatgacacacaagactacatagtcacctggaacaggagggctcccctgggaggcaacatactgacagctcctaacatgcacccgggaattgccatgctaagcaaacacaaggtagtggtccccagtaaactgactagacccaggggcaaaaaatacattaaaattaatataaaaccccccactacattcatagacaagtggtacttccagaaagacatatgtgacctcacattgctaaacttaaacgttgtaacatgtgacctgcggtttccgttctgctcaccacaaactgacaacgtttgtgtaaccttccaggtgcttgcaccaatctataacgaatacatgtccattacttcctcaaaactaacttcaacacaatggcaacaatactataaagactttttaaataaagctataccagcaaacaaagacagaaaagcaaacattttaaacaccttcttaacagaaggatcatacagaaaaccacaagtagataagtacagaaaaccattaggcgaaaatgaatactattcacctaaagatgcacagtggggagacgccattcacataatctcagagacagaaacaacaggcaaccaaaacaaacaagacagaaatcagttaattcagaaaattgttagtaatgccgaaaacgttttaacaaaagtaaaccaagaactacaagcatatgaaagcagacaagcagaacacgcattatttacacactggacaggaatatttggacctccatttctagactacaacagaataagtccagaaatcaaaggcctgtacaaagacgtcatatacaaccccctaatagacaaaggaataggcaaccacatatgggtagactactgcagcaaagaaaacaacgaatactcagagacccaaagcaaatgtcacttaacagaccttcccctgtggtgcataacatttggatatgcagactgggttaaaaaagacacaggtaactggggcatagtggactgggccagagtacttattatatgcccttacacatatccaaagctgtacaaccctgacaaacccaacacaggctttgtagtatacagctccaactttgccatgggacgaatgcccgacggaagcaaatacgtccccataggcataagacacaagtggtacccgacaatgctaaaccagcagccagtactagaggacattagtctaagcggaccgtttgctcccagagaaaaagtacctagcgtccaactgactgccaagtacaagttccgatggcatttcggtggcaatcctgtttccgaacaggttattaaagacccgtgccaacagcccaccttccaaatgcccggaaccggtacactccctcgcagaatacaagtggcggacccgaaatacctcgggccccagtacaccttccactcgtgggactacagacgtgacttctttaacagaaagactattaagagaatgtcagaacaaccagaaacttttgagtctatattctcaggcccaaaaaaaccaagggtggacctcgacaaaatccaactgcaagaaggcaactattcccaagaccaaagaaaacagaaaccgtgggaagacagcgagacccagacagagagcgaagtcccatcagaagaagagacgcagaacctacagcagcagctccaacagcagctccgagaacaaaagcagctcagacagggaatcaactgcctcttcgagcagctgataaaaacccagcagggagtccatatagatccttcccttgtataggcccaaaagccttacttttcccagaaagaggacccaaaacctactctaaaggagactgggaaacagagtatcaggcctgcagagcctttgacagaccccctagaagcaacctgtcagactcaccctactatccttaccttccaccaccccccgaaaaattctatgtaacctttaagctcggcttcaaataaacaaggccgtgggagtttcacttgtcggtgtctacttataaaggtcactaagcactccgagcgaagcgaggagtgcgaccccctgccctgggcccacttcttcggagccgcgcgctacgccttcggctgcgcgcggcacctcagacccccgctcgtgctgacacgctcgcgcgtgtcagaccacttcggg

SEQ ID NO: 1454 - protein, 749 aa, Alphatorquevirus sp.
MAWGWWKRRRRGWFRRRWTRGRIRRRWARRPYRRPRRRTVRRRRRRRRGRRKFRRYRVKRRYRRRKKTQKIKLTQWQPAKTKRCFMIGYFPTVIQGQGRWSENFTSHIEDKVAKGPFGGGHSTSRWSLKVLYDENQRHHNFWTASNSDLELARFFGSSWRFYRHDTQDYIVTWNRRAPLGGNILTAPNMHPGIAMLSKHKVVVPSKLTRPRGKKYIKINIKPPTTFIDKWYFQKDICDLTLLNLNVVTCDLRFPFCSPQTDNVCVTFQVLAPIYNEYMSITSSKLTSTQWQQYYKDFLNKAIPANKDRKANILNTFLTEGSYRKPQVDKYRKPLGENEYYSPKDAQWGDAIHIISETETTGNQNKQDRNQLIQKIVSNAENVLTKVNQELQAYESRQAEHALFTHWTGIFGPPFLDYNRISPEIKGLYKDVIYNPLIDKGIGNHIWVDYCSKENNEYSETQSKCHLTDLPLWCITFGYADWVKKDTGNWGIVDWARVLIICPYTYPKLYNPDKPNTGFVVYSSNFAMGRMPDGSKYVPIGIRHKWYPTMLNQQPVLEDISLSGPFAPREKVPSVQLTAKYKFRWHFGGNPVSEQVIKDPCQQPTFQMPGTGTLPRRIQVADPKYLGPQYTFHSWDYRRDFFNRKTIKRMSEQPETFESIFSGPKKPRVDLDKIQLQEGNYSQDQRKQKPWEDSETQTESEVPSEEETQNLQQQLQQQLREQKQLRQGINCLFEQLIKTQQGVHIDPSLV

SEQ ID NO: 1455 - protein, 153 aa, Alphatorquevirus sp.
MFFGRHWRKKRTLLLLPVPTKPKALSRQMSWSRPVHDERGIQRNWFEGVIRTHAACCGCGNACAHLATLAQRYGYPSLPSHTPRPGTSTPVSTPEQIRRARALPAAPDHPPALPWHGDGGRDGGAAGSEGGGPVAEFAEDGLDGLIAALDDEQ

SEQ ID NO: 1456 - protein, 84 aa, Alphatorquevirus sp.
LPLRAADKNPAGSPYRSFPCIGPKALLFPERGPKTYSKGDWETEYQACRAFDRPPRSNLSDSPYYPYLPPPPEKFYVTFKLGFK

SEQ ID NO: 1457 - DNA, 3061 bp, Alphatorquevirus sp.; identical to SEQ ID NO: 1453

SEQ ID NO: 1458 - protein, 749 aa, Alphatorquevirus sp.; identical to SEQ ID NO: 1454

SEQ ID NO: 1459 - protein, 153 aa, Alphatorquevirus sp.; identical to SEQ ID NO: 1455

SEQ ID NO: 1460 - protein, 84 aa, Alphatorquevirus sp.; identical to SEQ ID NO: 1456

SEQ ID NO: 1461 - DNA, 3061 bp, Alphatorquevirus sp.
ccgcgcgctacggtgagtttacacaccgcagtcaaggggcaattcgggctcgggactggccgggccatgggcaaggctcttaaaaagctatgtttgtcggtaaaatctacaggaagaaaaggaaactgcttctgcaggctgtgcgtgctccacaggcgccatcttccatgagccgctgctggtgtcctcctcggggtgatgtctccacccgcgagtcccggtggtacgaggcggttcgaggaagccacgatgctttttgtggctgtggtgatcctattcttcatttttctcgtctggttgcacgttctaaccatcagggacctccgacgccccccacggacgaccgtgcgccgcagaataccccagtgagacgcctgctgcctctccccagctaccccggcgagggtccccaggctagatggcctggtggggatggaggcgccgctggtggcgaccgaagagaaggtggagatggcggcgcgcgcgccgccgaagacgagtaccagcccgaagacctcgacgagcttttcggcgctatcgaacaagaacagtaaggaggaggcgaagggggaggcggaggggctaccggcgccgttacagactgagacgctatgccagacgcaggttccgacgcaaaaagatagtactgactcagtggaacccccagactaccagaaaatgtataataaggggcatgatgccagtactgtgggccggcatgggcacggggggcagaaactacgccgtcaggtcagacgactatgtagtgaacagagggttcgggggttccttcgccacagagaccttctctcttaaggtcctgtatgaccagttcctcaggggcttcaacaggtggtcccacactaacgaggacctagacctggcccgctacaggggctgcaggtggaccttctacagacataaagacacagactttatagtgtactttacaaacaatcctcccatgaagaccaaccagttctcggcccccctgacgacccccggcatgctcatgcgcagcaaatacaagatcctgatccccagcttccagaccagacccaagggtcgcaaaacagtaacagttaggattaggccccccaaactatttcaagacaagtggtacacccagcaggacctctgttcagttcctcttgtccaactgaacgtgaccgcagctgatttcacacatccgttcggctcaccactaactgaaactccttgcgtagagttccaggtgctgggtgacttgtacaatacatgtctcaatatcgaccttccgcaatttactgactcaggagaaataagtagcaattactccaaacctaataggaacaatttaacagaattatacaaagaattattcacaaaacccacatcaggacactactggcagacattcataaccaacagcatggtcagagcacacatagatgcagacaaagccaagtcagcacaaacatcagccagctcacccacatacaacgaagaccccttccccacaatacctactaaggcagactttcctaactggaaaaagaagttcacagacactagagacagctcctttctctttgccacttaccatccccaagctataaaagaggtaattaaaaaaatgagagataataactttaacctagaaacagggcccaatgacaagtatggaacctacacagcacagtaccaaggaaacacacacatgctagactactacctgggcttttacagccccatattcctctcagacggcagatccaacgtagaattcttcaccgcctacagagacatagtatacaatccgttcttagataaggcccagggcaacatggtatggtttcagtaccacacaaagacagacaacaaatttaaaaaaccagagtgccactgggaaataagagacatgcccctgtgggccctcctaaacggatatgtagactacttagagactcaaatacagtatggtgacctcagtaaagaaggcaaagtcctcataaggtgtccctacaccaggccggcactagtagaccccaaagacgagactgcaggatatgtagtctacaacagaaactttggcagaggcaagtggatagatggagggggctatatccccctgcacgagagaacaaagtggtatgtcatgctgcgataccagacggacgtcttccatgacatagtgacctgtgggccctggcagtacagagacgacaacaaaaacagtcagctagtagccaagtaccgcttcagcttcatatggggaggtaacactgtgcactctcaggtcatcagaaacccgtgcaaagacaaccaagtatccggtccccgtcgacagcctagggatgtacaagtcgttgacccgcaactcatcacgccgccgtgggtcctccacagcttcgaccagcgaagaggcctctttactgagacagctctcagacgtctgctccagcaaccattacctggcgagtatgctgttagcaccctcaggacacccctcctctttctaccctcagaataccaacgagaagacggcgctgcagaaagcgcctcaggttccccggccaaaagaccccgtatctggccagaagagagccagacggagacgatctcctcggaggaggacccggcggagacgacgagggagctcctccagcgaaagctccgagagcagcgagcactccagttccagctccagcacttcgcggtccaactcgccaagacccaggcgaatctccacgtaaaccccctgttatccttcccgcagtaaacaaagtgtacctgtttccaccagaaaagcccattcccatacaggggtaccacggatggaacacagagttcgaggcctgcgatgcctttgacagaccccccagaaagttcctcacagacacacctacctacccctggctccccgtccccaatcctgaaataaaagtgagctttaagctcggtttcaaataaacaaggccgtgggagtttcacttgtcggtgtctacctcttaaggtcactaagcactccgagcgtcagcgaggagtgcgaccctctgccctggtgcaacgccctcggcgg

SEQ ID NO: 1462 - protein, 780 aa, Alphatorquevirus sp.
MAWWGWRRRWWRPKRRWRWRRARRRRRVPARRPRRAFRRYRTRTVRRRRRGRRRGYRRRYRLRRYARRRFRRKKIVLTQWNPQTTRKCIIRGMMPVLWAGMGTGGRNYAVRSDDYVVNRGFGGSFATETFSLKVLYDQFLRGFNRWSHTNEDLDLARYRGCRWTFYRHKDTDFIVYFTNNPPMKTNQFSAPLTTPGMLMRSKYKILIPSFQTRPKGRKTVTVRIRPPKLFQDKWYTQQDLCSVPLVQLNVTAADFTHPFGSPLTETPCVEFQVLGDLYNTCLNIDLPQFTDSGEISSNYSKPNRNNLTELYKELFTKPTSGHYWQTFITNSMVRAHIDADKAKSAQTSASSPTYNEDPFPTIPTKADFPNWKKKFTDTRDSSFLFATYHPQAIKEVIKKMRDNNFNLETGPNDKYGTYTAQYQGNTHMLDYYLGFYSPIFLSDGRSNVEFFTAYRDIVYNPFLDKAQGNMVWFQYHTKTDNKFKKPECHWEIRDMPLWALLNGYVDYLETQIQYGDLSKEGKVLIRCPYTRPALVDPKDETAGYVVYNRNFGRGKWIDGGGYIPLHERTKWYVMLRYQTDVFHDIVTCGPWQYRDDNKNSQLVAKYRFSFIWGGNTVHSQVIRNPCKDNQVSGPRRQPRDVQVVDPQLITPPWVLHSFDQRRGLFTETALRRLLQQPLPGEYAVSTLRTPLLFLPSEYQREDGAAESASGSPAKRPRIWPEESQTETISSEEDPAETTRELLQRKLREQRALQFQLQHFAVQLAKTQANLHVNPLLSFPQ

SEQ ID NO: 1463 - protein, 154 aa, Alphatorquevirus sp.; identical to SEQ ID NO: 85

SEQ ID NO: 1464 - protein, 126 aa, Alphatorquevirus sp.; identical to SEQ ID NO: 86

SEQ ID NO: 1465 - DNA, 3060 bp, Betatorquevirus sp.
cgggtgctaaaggtgagtgaaaccaccgaaatcaaggggcaatatgggctcagtcagtctagcggaataggcaactaactaaattatattttacaaaatgtcagactactacaaaccaataacatggagcaaaaaacactgcaaccttaattaaattaacagcattgttactgtacataaccttcaatgcgcctgcaacaatccactaaaacacacaataattggaataattaaccaagaaccatctatcaaatttaacaaagaagaatctacaaaaatacaaaaatgccttactactggagaccaagaagaaggcgatattttagaaaatattggagaaggagacctagaggcctttttcgccgcagactttggaaaagaagacgcagaaacacggtaaaaaaaagaaaactaaaaaaagtaatagtaagacaatggcaaccaagtactatacgaaaactaaaaataagaggaatgtacccattatatgaagaaaacagagagagaatttctaataactttaaccaatgggccgcatcaatagccccccatggatttcctggaggcggactatggtcaattataagattttctctatactctctgtatgaactacaccttaaaggcagaaactggtggacaatgtcaaactgctctttaccactaataaaataccaaggatgcagcattaaattttacaaatctactaatacagactatataacagtattcacaacttgtggagatatgacagcaaacttagaaacctatcactcctcacaaccatcaattttaaacttaaacaaaagaaaaataataataacatgtaaagaaaataatcaatataaaaaaccctacaaaaaaaaatttataaaaccacctccactatttgaaaacaaatggtactttcaaagagatatagccaaaataccattattaatgctaataacatcatcatgcagtttagacagatggtacataagctcaaaatcagaatccaacacattaggatttatatcattaaacactgacttctttgtttaccataactttaaaaagccaccaataacaacaggctatataccaaacgcaacattctcattatacacatcaggaacaaatgttaaattaaatgaattaaaatggtcaaacttaatttacttaggaaacacaaaagatatgcaaccaggaaaaacaataggtagtatgcaaagaaacacagatatagaaaaattaaacaactatttttctaatataaaaaactgggaaaatcccttttttccagcctactttcacaaagaataccctaactattttacaacaatgaacaaaattgataaaattaaagacctagcaaaaagtgaccttaataacaaagtaagtgaatttacaaacctatcacaagacttattttgggaatgcagatacaatcccgaaaatgactctagcagaaatgcttactttattacagatatagaaacattaagaccatgggaaaacccatcaaaagataatttaacagaacaaggtttaccactatggctattactacatggcactatagattatcaccaaaaactaggagacatacaacacctaataacagatcacatactatgcataacatcagactacatttcaccaacaaaagactactacgtaccactagacagagactttttagctggacatagtccctacacagacatagtaagagacaatgacaaactatactggttccctaaacttaattttcaacaaagaacaattaatgacatagtttcagtaggacctggaacaccaaaacttccaccagacataagctcagaggctcacattgaatataaatttcattttaagcttggaggatgtccaccacaaatggacgacgtttgcgaccctaactcaagatcaaaatggcccactcccagtaacctcatatcatcaactttattgcagagtccagaaacaccaatcgaatactaccttagcagctttgaccaaagacgagaactactcacaaacaaagctgcaaaaagaattaaaaaagactttgggcctaaagaaactttgcttcaatttacaggacaaactacaacagaagtaccgatacaaagcccagagacatcatcatcagaggaaacaaccgaggaaaaagagaaagaagagatacagctccagttcagacaccacagaagaaagcaaaggaaactccagcagcgaatcctccagctcctagacctactccaggaataataataaaaaagagtaacataagggtacaactgtttgaaactcctaaacctaacagaccacttacaccccaaaaaaaacaaactgatctagaaatagctaaatggctaaagcgcccagtacgctacttttttaatgatcctccattttatccctggttggtacctgaacctaaagttaactttaaacttaactatgtagaataaaggcctgcattaattcacttgaggtgtccatttgtattatttaaaacttaaataaacagtcaccgcctcccaaaaaccgccggcgcacagggggctacgccccctgtaacccccaggggggggacaccccccctaaaccccccccgaaaaaccacaaaatttaaattgccgaccacaaacgaacaggaaaccacaaaatttgcattgccgaccacaaacgaacagtcccaaaaaccgccggcgcacagggggctacgccccctgtaacccccagggggggacaccccccctaaaccccccccgaaaaaccacaaaatttaaattgccaaccacaaacgaacaggaaaccacaaaatttgcattgccgaccacaaacaaacaggaaaaccacataatttgcattgccaaccacaaacggtaactaacttcctcaaacagcacttacttcctcatttacttatgaatattcattacattaattattaaacacacgtcaaataggaggagttaacaacactataaaactaactacaataacgaatggctgagtttatgccgctagacggagacgaagacaacactaacttcggctaactgaggg

SEQ ID NO: 1466 - protein, 656 aa, Betatorquevirus sp.
MPYYWRPRRRRYFRKYWRRRPRGLFRRRLWKRRRRNTVKKRKLKKVIVRQWQPSTIRKLKIRGMYPLYEENRERISNNFNQWAASIAPHGFPGGGLWSIIRFSLYSLYELHLKGRNWWTMSNCSLPLIKYQGCSIKFYKSTNTDYITVFTTCGDMTANLETYHSSQPSILNLNKRKIIITCKENNQYKKPYKKKFIKPPPLFENKWYFQRDIAKIPLLMLITSSCSLDRWYISSKSESNTLGFISLNTDFFVYHNFKKPPITTGYIPNATFSLYTSGTNVKLNELKWSNLIYLGNTKDMQPGKTIGSMQRNTDIEKLNNYFSNIKNWENPFFPAYFHKEYPNYFTTMNKIDKIKDLAKSDLNNKVSEFTNLSQDLFWECRYNPENDSSRNAYFITDIETLRPWENPSKDNLTEQGLPLWLLLHGTIDYHQKLGDIQHLITDHILCITSDYISPTKDYYVPLDRDFLAGHSPYTDIVRDNDKLYWFPKLNFQQRTINDIVSVGPGTPKLPPDISSEAHIEYKFHFKLGGCPPQMDDVCDPNSRSKWPTPSNLISSTLLQSPETPIEYYLSSFDQRRELLTNKAAKRIKKDFGPKETLLQFTGQTTTEVPIQSPETSSSEETTEEKEKEEIQLQFRHHRRKQRKLQQRILQLLDLLQE

SEQ ID NO: 1467 - DNA, 3057 bp, Alphatorquevirus sp.
cagatgccggaggtgagtttacacaccgcagtcaaggggcaattcgggctcgggactggccgggctatgggcaaggctcttagggtcttcattcttaatatgtttctcggcagggtgtaccgccgcaagaaagggaaagtgccactgctggctctgcagactctacagaagacacctcccatgagtcactggcgaccccctctgagaaatgtcccctacagggagagatgttggcttgaggcctgtctcagagcccacgattgtttttgcggctgtcctagtcctgttattcatttctctagtctggttgcacgttttaatctacaaggaggcccgccgccagaggatgactccccgcagggcgcgccggtcctgagggccctgccggccccgagcccccgcaggcagacccgcaccgagaacccctccggtgagccatggcctactcctactggtggcgccgccggaggtggccgtggagaggcagatggaggcgctggaggcgccgcagacgagtaccgcgccgaagacctcgacgacctcttcgccgctatcgaaggagaccagtaaggagaaagcgtcggtgggggaggcgagggcgacggcgccggtaccttagacgatacagacgcagactgactgtcagacgaaagagaaacaaactcagactgagcgtatggcagccccagaatatcagatactgtgccataaaaggcctctttcccatcctcatctgcgggcacggaaagagcgccggcaactatgccatccactcggatgactatgtgacgagcagattctctttcgggggtggtctcagcaccacctcatactctctaaagctgctattcgaccagaacctcaggggactgaacaggtggaccgctagcaacgaccagctagacctagccaggtacatgggggccgtgttctggttctacagagaccagaaaacagactacatagtccagtatgacatctcagagcccttcaagatagacaaagacagctcaccttcctaccacccgggcatactcatgagatccaaacacaaggtactggtgcctagctaccagacctggccaaagggacgctctaaagtaaaactcaagataaagccccccaagatgttcgttgacaagtggtatacacaagaggatctctgtaacgttactcttgtgtcacttgtggtcagcctagcttcctttcaacatccgttctgccgaccactaactgacaacccttgcgtcagtttccaagttctgcaaaatttctacaacaatgtaataggctactcctcaccagacacattaattgacaatgtctttacctctattttatacagtaaggcctcttactggcaaagccacctcactccctcctttgtcaaaaaaattaacaacaaccccgatggctcacccataaatcagtcaatagctaacatgccaaacatgtcaaactacaaccagtgggtctccaatacaacccgaggaagcggcttttacaactcaaatgtaaacgtccactacaattactgccagtacaaccctgatgctacgcacctcaaaaccctcagacaatactactttttctgggagacatacccagcagctgctaacaccactactacatcacacgtccccataaccaccactaaacccacaaaagactgctgggagtacagattaggcctgtacagtcccatctttctcagtccactcagaagcagcaacatagagtggcccttcgcatacagggacatagtgtacaatccactcatggacaagggggtaggtaacatgatgtggttccagtacaacacaaaaccagacactcagttctcccccacttcatgcagagcagtgttagaggacaaacccctgtggtccatggcctacgggtatgcagactttctgctctccatcctaggggagcacgacgacgtagacttccacggcctagtatgtataatatgcccgtacaccaaaccgcccctctatgacaaatcaaatccaaaaatgggctatgtattctatgatgccaagtttggcaacggaaaatggatagacgggaccgggttcatcccggtagagttccagagcaggtggaagccagaactggccttccagaaagacgtactgactgacctagccatgtcaggccccttctcctacagcgacgaccttaaaaacaccaccattcaggccaaatacaaattcaaattcaaatggggcggcaatctctcttaccaccagacaatcagaaacccgtgcacctcggacggacagacgcccagtaccagtagacagtctagagagatacaaatcgttgacccgctcaccatgggaccccgatacgtattccactcgtgggactggcgacgtgggtggcttaatgacagaactatcaaacgcttgtttgaaaaaccagtcgattttgaggaatatccaaaatctccaaagagacctagaattttcccacctacagagcagctccaagaagacccgcaagagcaagaaagagactcctcttccacggaagaaagtctccctacatcgtcacaagagacgcccccagcccacctactcagagtacacctcagaaagcagctccgacaacagcgagacctccgagtccaactcagagccctgttcgcccaagtcctcaaaacgcaagcgggcctacacataaaccccctcttattggccccgcagtaaacaaagtatacctgttcccagagagggcccctaaaccccagcctaccatggaagactgggccacagagtaccaggccgccggggccttcgatagaccccctagaagtaacctgtcagactcccccttctatccctggatgccaaaaaacaccaaattctctgtaacctttaaactcgggtggaaaccctgaataaaatgcaaggccgtgtactgttcacttatcggtgtctacctcttaaggtcactaagcactccgagcgtcagcgaggagtgcgacccttccccctgactcaacttcttcggagccgcgcgctacgccttcggctgcgcgcggcacct

SEQ ID NO: 1468 - protein, 759 aa, Alphatorquevirus sp.
MAYSYWWRRRRWPWRGRWRRWRRRRRVPRRRPRRPLRRYRRRPVRRKRRWGRRGRRRRYLRRYRRRLTVRRKRNKLRLSVWQPQNIRYCAIKGLFPILICGHGKSAGNYAIHSDDYVTSRFSFGGGLSTTSYSLKLLFDQNLRGLNRWTASNDQLDLARYMGAVFWFYRDQKTDYIVQYDISEPFKIDKDSSPSYHPGILMRSKHKVLVPSYQTWPKGRSKVKLKIKPPKMFVDKWYTQEDLCNVTLVSLVVSLASFQHPFCRPLTDNPCVSFQVLQNFYNNVIGYSSPDTLIDNVFTSILYSKASYWQSHLTPSFVKKINNNPDGSPINQSIANMPNMSNYNQWVSNTTRGSGFYNSNVNVHYNYCQYNPDATHLKTLRQYYFFWETYPAAANTTTTSHVPITTTKPTKDCWEYRLGLYSPIFLSPLRSSNIEWPFAYRDIVYNPLMDKGVGNMMWFQYNTKPDTQFSPTSCRAVLEDKPLWSMAYGYADFLLSILGEHDDVDFHGLVCIICPYTKPPLYDKSNPKMGYVFYDAKFGNGKWIDGTGFIPVEFQSRWKPELAFQKDVLTDLAMSGPFSYSDDLKNTTIQAKYKFKFKWGGNLSYHQTIRNPCTSDGQTPSTSRQSREIQIVDPLTMGPRYVFHSWDWRRGWLNDRTIKRLFEKPVDFEEYPKSPKRPRIFPPTEQLQEDPQEQERDSSSTEESLPTSSQETPPAHLLRVHLRKQLRQQRDLRVQLRALFAQVLKTQAGLHINPLLLAPQ

SEQ ID NO: 1469 - protein, 188 aa, Alphatorquevirus sp.
MPEVSLHTAVKGQFGLGTGRAMGKALRVFILNMFLGRVYRRKKGKVPLLALQTLQKTPPMSHWRPPLRNVPYRERCWLEACLRAHDCFCGCPSPVIHFSSLVARFNLQGGPPPEDDSPQGAPVLRALPAPSPRRQTRTENPSGEPWPTPTGGAAGGGRGEADGGAGGAADEYRAEDLDDLFAAIEGDQ

SEQ ID NO: 1470 - protein, 59 aa, Alphatorquevirus sp.
LFPERAPKPQPTMEDWATEYQAAGAFDRPPRSNLSDSPFYPWMPKNTKFSVTFKLGWKP

SEQ ID NO: 1471 - DNA, 3057 bp, Alphatorquevirus sp.
tggtgcaacgccctcggcggccgcgcgctactcaaggggcaattcgggctcgggactggccgggctatgggcaaggctcttaaaaagccatgtttctcggtaaactttacagaaagaaaaggaaactgctactgcaagctgtgcgtgctccacaggcgccatcttccatgagctctacctggcgagtgccccgcggcgatgtctccgcccgcgaactatgctggtaccgctcagttcgagacagccacgatgctttttgtggctgtcgtgatcctgtttttcatctttctcgtctggctgcacgttctaaccatcagggacctccgacgccccccacggacgagcgcccgccggcgtctaccccagtgaggcacctgctgccgctgccctcctaccccggcgagggtccccaggctagatggcctggtggggatggagaaggcgctggtggcgcccgcggaggcggtggagatggcggcgcccgcgcaggcgaagaagagtaccggccagaagacctcgacgagctgttcggcgctatcgaacaagaacagtaaggagacggaggcgagggtggcggaggggctacaggcgccggtacagactgagacgcttacgtagacgtggcaggcgacgcaaaaagataatactgactcagtggaacccccagactgtcagaaagtgctttatcagaggacttatgccagtactgtgggcgggcatgggcacggggggccacaactacgccgtccgctcagatgacttcgtggtagacagaggctttgggggctccttcgccacagagacattttcactgagggtcctctatgaccagtatcaaagaggctttaacaggtggtcccacaccaacgaagaccttgacctagccagatacaatagctgcaaatggaccttctatagacaccaagacacagactttatagtatactttactaacaatccccccatgaaaaccaaccagtacacagcgcctctcaccactccaggcatgctcatgagaagcaagtacaaaatcctaataccaagctttaaaactagacccagaggcaaaaagtcaatatcagtcagaataagaccccctaagctatttcaggacaagtggtacacccaacaagacctgtgcccagttcctcttgtccaactgaacgtaaccgcagctgatttcacacatccgttcggctcaccactaactgacagtccttgcataagattccaggtactaggagacttgtacaataaatgtctcaatatagaccttcctcaatttgatgacctaggaaagattaaagatgacccaccatacactagagaaaataaaactcatttacaaactttatacactaccttgtttaacagccgccagtcaggggtctactggcaaacattcataacaaacaccatggtaaaatcacacatagacgctaaaaaagctcaagtagctatcaacaacgcagttccagcaacacaaccatcctacaatacagagccattccccacaaacccagaaaagaaagaatttgataattggaaaaaaaaatttacagacacaagagacagtaactttctattcgccacatatcacccagacatgatacactcaaccatagtagaaatgagaaacaataactttaatctagaaacaggacccaatgacaaatatggtaatttctctagtcaatacaccagaagcacacacatgctagactactacctaggcttctacagtcccatatttctgtctgatggaagatccaacacagaattcttcacagcctacagagacatagtatataaccctctcttagacaagggcacaggtaacatgatatggttccagtaccacacaaagacagacaatatatacaacaaacaaacctgccactgggaaatattagatatgcccctgtgggccctctgcaacggctatgtagagtacctagagagccaaataaagtacggggacgtacttactgaaggcaaagtcctaataagatgtccctacacgaagccttctctaacagaccccaaagactcacaggcaggatacgtggtgtacaacaccaactttggaagaggcaagtggacagatggaaaaggctacatccccctacacgagaggagcaagtggtatgtgatgctcagataccagactgacgtactccatgacatagtgacttgtggaccctggcagtacagagacgataacaaaaactctcagctcatagccaagtacagattcaagttctactggggaggtaacatggtgcattctcaggtcatcaggaacccgtgcaaagacacccaagtatccggaccccgtcgacagcctcgagaagtacaagtcgttgacccgcaactcatcaccccgccgtgggtcctccactcgttcgaccagagacgaggaatgtttactgagggagctatcagacgtctgctcaagcaaccaatacctggcgagtatgctcctacaccactcagggtcccgctcctctttccctcctcagagttccaacgagagggagaaggtgcagaaagcgactcatcttccccggcaaaaagaccgcgactctggcaagaagaggccagccagacggagacggagtcctcggaggggccggcggagacgacgagggagctcctcgagcgaaagctcagagagcagcgagtcctcaacctccaactccagcacttcgcagtacaactcgccaagacacaagcgaacctccacataaaccccctattatactcccagccttaaacaaagtgtatctattcccccctgacaaacccactcccatacagggataccacgggtggaacacagagttcgaggcctgccaggcctttcacagaccacccagaaagtatctctcagacacacctacctacccttggctccccgtccccaatcctgaaataaaagtgagctttaagctcggtttcaaatcttacaaggccgtgggagtttcactggtcggtgtctacctcttaaggtcaccaagcactccgagcgtcagcgaggagtgcgacccttccccc

SEQ ID NO: 1472 - protein, 785 aa, Alphatorquevirus sp.
MAWWGWRRRWWRPRRRWRWRRPRRRRRVPARRPRRAVRRYRTRTVRRRRRGWRRGYRRRYRLRRLRRRGRRRKKIILTQWNPQTVRKCFIRGLMPVLWAGMGTGGHNYAVRSDDFVVDRGFGGSFATETFSLRVLYDQYQRGFNRWSHTNEDLDLARYNSCKWTFYRHQDTDFIVYFTNNPPMKTNQYTAPLTTPGMLMRSKYKILIPSFKTRPRGKKSISVRIRPPKLFQDKWYTQQDLCPVPLVQLNVTAADFTHPFGSPLTDSPCIRFQVLGDLYNKCLNIDLPQFDDLGKIKDDPPYTRENKTHLQTLYTTLFNSRQSGVYWQTFITNTMVKSHIDAKKAQVAINNAVPATQPSYNTEPFPTNPEKKEFDNWKKKFTDTRDSNFLFATYHPDMIHSTIVEMRNNNFNLETGPNDKYGNFSSQYTRSTHMLDYYLGFYSPIFLSDGRSNTEFFTAYRDIVYNPLLDKGTGNMIWFQYHTKTDNIYNKQTCHWEILDMPLWALCNGYVEYLESQIKYGDVLTEGKVLIRCPYTKPSLTDPKDSQAGYVVYNTNFGRGKWTDGKGYIPLHERSKWYVMLRYQTDVLHDIVTCGPWQYRDDNKNSQLIAKYRFKFYWGGNMVHSQVIRNPCKDTQVSGPRRQPREVQVVDPQLITPPWVLHSFDQRRGMFTEGAIRRLLKQPIPGEYAPTPLRVPLLFPSSEFQREGEGAESDSSSPAKRPRLWQEEASQTETESSEGPAETTRELLERKLREQRVLNLQLQHFAVQLAKTQANLHINPLLYSQP

SEQ ID NO: 1473 - protein, 154 aa, Alphatorquevirus sp.; identical to SEQ ID NO: 415

SEQ ID NO: 1474 - protein, 157 aa, Alphatorquevirus sp.
LARRGQPDGDGVLGGAGGDDEGAPRAKAQRAASPQPPTPALRSTTRQDTSEPPHKPPIILPALNKVYLFPPDKPTPIQGYHGWNTEFEACQAFHRPPRKYLSDTPTYPWLPVPNPEIKVSFKLGFKSYKAVGVSLVGVYLLRSPSTPSVSEECDPSP

SEQ ID NO: 1475 - DNA, 3054 bp, Alphatorquevirus sp.
ctggtgcaacgccctcggcggccgcgcgctatcaaggggcaattcgggctcgggactggccgggctatgggcaaggctcttagggtaatcgctcttaaaaatgcccttcttcggcagggcctggagaaagagaaaggaaaggcaactgctactgctttctgtgtcgcctgcaccgccgccatcttccatgagcctgtggcgtccccccgctcacaatgtcgccggccaggagcgccagtggttcgagtgctgcttccgagcccacggtgctttttgtggctgcggtaattttattcttcatctttctggtctggctgcacgttttaattttcaaggaggtccgccgggcccgggtgcgccccgccccgagaacccgcctgcactgaggcgcctggtgcccctgcccgcgctgcccccggccgataaccagccatggcctggtggggatggcgccgccggtggggctggcgaccgcgctggagacggaggcgccggtggacccgccgcagacgccgagtaccggcccgaagacctcgacgacctcttcgccgccatcgaaagagataccgagtaaggaggcgtcggtgggggaggcgctatactcgcagggggcgactcagactgcgtaggagacgtaggcgccgcaaaaagatagtcctgactcagtggaacccccagaccgtacgcaggtgctacataagaggcctcatgcccgtcatctgggcgggcatgggctccgggggcaaaaactacgccgtccgctcggacgactacacccagtcctcattcgggggctcctttggcacagagaccttcagtctaagggtactgtatgaccagttccagaggggctttaacaggtggagccacactaacaaggacctagacctggccctgtactatggctgccgcttcaggttttacagacacgaccgcacagacttcatagtctcctttaccaacaatccccccatgaagaccaaccagtacaccgctcccatgacccatccgggcatgctcatgagagccaaacacaaaatactgatccccagcagactgaccagaccccggggcaaaaaatacatctctgtcagaataagaccccccaaactattccagcacaagtggtacactcagtcagacctatgttccgttagtctggtgcaacttaacctgaccgcagcagacttgaaacatccgttcggctcaccactaactgacactccttgcgtaagcttccaggtcctaggagacctctacaacgagtgtctcaatatagatcttcctgaaactgaagacaaaaaattaactaaacttaaaaacagtacagaagatcagtattcaaaaaacttagaaaaattactcacacaactatacaccaatggccagtactggcaaacattcatcacaggcccatttatcaaagacaccatgaaatcaggccaatatcaaaaaaaaaaaacaatgtatcagaaaacaaacttttatagcacacaaaaagctacaggtgacaacgcctttgtcagcaacgctgacagcaattacctgtacgccacataccacccagaaaacatagaagaagagttatatcaaataagagacaactactttaagttaagcataggcaaaaacgatgtgttcggagaccacacgagccaatacagaggagccacacaactactagaataccacctgggcatctacagccccatattcctacacccaggcaggtccaacgtacagatgtggaccgcctacagagacatagtatacaacccactgttagacaaaggagaaggcaacagaatatggttccagtaccacactaaaaaagacaacagatactcagtgcctaactgtcactggatgctagaaaaccttcccctgtggtcactcctacacggttactcagagtacctagagagccaggtaaaatacggagacctcagaaaagaaggcaaggtcctcatcacctgtccttatacaaaacctcccctctttgacccaaaagacccctccaaaggctgggtgccctacaatgacaccttcggtagaggcaaatggatagacggaggaggctacatacccctacccgagagggccttctggtatgtcatgctaaggtaccaagagcaggtgtttaaagacatagtaacctgcggccccttcgcctaccgagacgatgagaaaaactcccaactggtggcgggatacacattcagattcaagtggggtggcaccaccgtccattcgcagatcatcaggaacccctgcacggacaaccagctatctcccgacccccgtagacgacctagagacgtacaagtatctgacccgagcaccattgggccgccgtgggtgttccacgagtgggaccaacgacgtggacagtttactgactcagctctcagacgtatgttactccaaccgatccctcgcccaccgtttgctgagccaccaaagagacctttactcttcctatcctcagagtacgcagggcccccagggcaagaaagcgtctcaggttcaccggccaaaaggttccgcatctggccaggagacgagaccccgacgcagacggggtcgcagccctcggaggaggaagcggagacgacgagggagctcctccagcgaaagctcagagagcagcagctcctccaagtccagctccagcgtctcacagtctccctcgccaaaacccaggcgggtctccacataaacccccttttgttatcttccccgccactaataaggtaaccatgtttccaaacaccagcactcctaaaaaacccagcaagggcgactgggagaccgagtaccaggcctgcgccgccttcgaccggcctcccaggagcgatctcaccagaccccctcactacccctggctgcctcagtcttacagggtctcattcaaactcggatggcattagaccccgccaataaaaataaagctgcttttcactgtacgttggccgtgggactttcacttagcggtgtctacctcttaaggtcaccaagcactccgagcgccagcgaggagtgcgacccttcccc

SEQ ID NO: 1476 - protein, 774 aa, Alphatorquevirus sp.
MAWWGWRRRWGWRPRWRRRRRWTRRRRRVPARRPRRPLRRHRKRYRVRRRRWGRRYTRRGRLRLRRRRRRRKKIVLTQWNPQTVRRCYIRGLMPVIWAGMGSGGKNYAVRSDDYTQSSFGGSFGTETFSLRVLYDQFQRGFNRWSHTNKDLDLALYYGCRFRFYRHDRTDFIVSFTNNPPMKTNQYTAPMTHPGMLMRAKHKILIPSRLTRPRGKKYISVRIRPPKLFQHKWYTQSDLCSVSLVQLNLTAADLKHPFGSPLTDTPCVSFQVLGDLYNECLNIDLPETEDKKLTKLKNSTEDQYSKNLEKLLTQLYTNGQYWQTFITGPFIKDTMKSGQYQKKKTMYQKTNFYSTQKATGDNAFVSNADSNYLYATYHPENIEEELYQIRDNYFKLSIGKNDVFGDHTSQYRGATQLLEYHLGIYSPIFLHPGRSNVQMWTAYRDIVYNPLLDKGEGNRIWFQYHTKKDNRYSVPNCHWMLENLPLWSLLHGYSEYLESQVKYGDLRKEGKVLITCPYTKPPLFDPKDPSKGWVPYNDTFGRGKWIDGGGYIPLPERAFWYVMLRYQEQVFKDIVTCGPFAYRDDEKNSQLVAGYTFRFKWGGTTVHSQIIRNPCTDNQLSPDPRRRPRDVQVSDPSTIGPPWVFHEWDQRRGQFTDSALRRMLLQPIPRPPFAEPPKRPLLFLSSEYAGPPGQESVSGSPAKRFRIWPGDETPTQTGSQPSEEEAETTRELLQRKLREQQLLQVQLQRLTVSLAKTQAGLHINPLLLSSPPLIR

SEQ ID NO: 1477 - protein, 157 aa, Alphatorquevirus sp.
MPFFGRAWRKRKERQLLLLSVSPAPPPSSMSLWRPPAHNVAGQERQWFECCFRAHGAFCGCGNFILHLSGLAARFNFQGGPPGPGAPRPENPPALRRLVPLPALPPADNQPWPGGDGAAGGAGDRAGDGGAGGPAADAEYRPEDLDDLFAAIERDTE

SEQ ID NO: 1478 - protein, 126 aa, Alphatorquevirus sp.
LARRRDPDADGVAALGGGSGDDEGAPPAKAQRAAAPPSPAPASHSLPRQNPGGSPHKPPFVIFPATNKVTMFPNTSTPKKPSKGDWETEYQACAAFDRPPRSDLTRPPHYPWLPQSYRVSFKLGWH

SEQ ID NO: 1479 - DNA, 3054 bp, Alphatorquevirus sp.
gcaattcgggcacgggtctggccgggctatgggcaagattcttaaaaaatttccccgctccattgtccgccaggacaccaaaacatgccgtggagaccgccggcgcatgatatcccgggccgagaaagccagttctttgcagcaacttttcacatgcatgcttctttttgcggctgtggcgactttcttgggcatcttactagcatctctgtccgctttcctgctgccggaccccccccctccgccaggccttagaccacccagacccccggcacctgccggtcccgggggtcccccgggccacttcccagctctcccggctccgccagcggagcctgacaacccggcaccacgccgtggtggtggggaagatggcgccgccgctggcgcccaggacgcaggcgatggagaacaagacgcctacgccgtcgaggacctagaagaacttttccgcgccgccgaagaagacgatatgtaagtaggcgatggcgccgacggtacaggcgcagacggacgagggggcgacgcagacgcaggcacagacgaaaacataagcccactctgatactcagacagtggcaaccagacgttgttaagacctgcttcatcacagggtggatgccactcattatctgtggctccggacagacgcagtttaactttatcactcacatggacgacataaccccccgaggagcaagctacgggggcaattttaccaatgtcacatggagcctagaaggtctctgggaacagttccagtaccatagaaacaggtggtccgccagcaaccacgacctagacctagccagatacctattcaccaccttaaaactttacagacacgagaatgtagactacatattcagctacaccagaacaggccccttcgagatcagccacctcagccacctcagcacacaccctctactcatgctacttagcaaacaccacatagtagttcccagcttaaaaacaaagcccagaggcaggaggtacaaaaaagtcagaattaaacccccaaaactaatgctcaacaaatggtactttacaaaagacatctgtgacatgggcctctttcagttctgggccacagcctgtaacctagaaaatccctggctcagatcaggcgccgtaagcccctgcataggcattaatgtactgtcaaactctatatacacagatcttagcaatctacctagtcacagcagtaacagaactaccatacaaaacaacatgcacccaagcacactaacagacaacaaagggcaatggcagtacacatacacaaaactaatgtcaaagtactactacaaaggcaatacaaacagcacatatgactggcaaaattacagtacctcacagaactatgacaacacatataaacaatggttacaagacaaaacgaaaagactagagacaattaaacaagagtaccaagctgtgtacccacagctacccacacaagcaccatcagactccacactatttcaagactttggcatatacagccccttctaccttactcccaccagaataagcctagactggaaaacaccatacatacacgccagatacaaccccctcacagacaaaggcataggcaacagaatctacctacagtggtgttcagaggccagctgtgagtacaaccccacaaagagcaagtgcacactagtagacatgcccctgtttattatgttctatggctacatagactggtgcataaagtgcacgggggtctccagcctagtaaaagacgccagggtaatgatcaggtgcccctacacagagccgcagctaataggggccaacgaaaacgtaggctactgcctcctcagcaacaccttcatgaatggagacatgcccgttcttgccccatacatccccatttcctggttcgttaagtggtaccccatgcttgcacaccaaaaggaagccatagaggatattgtgggctgcggaccgtttatggtcagagaccaggaagccaagagttgggacataaccatgggttacagatcctgctttaaatggggcgggtcgcctctgcctctacaggccatcgacgacccctgccagaagcccacccacgcagttcccgatcccgatagacaccctcgcttactacaagtctcagacccgacaaaactcggaccgaaaacactgttccacaagtgggacatgcgacgaggacagtttagcaaaagaagtattgaaagaatgtcagaatactcagaacatgatgaattttttgaaacaggcattgtatcaaaaaagaaaaagttcgacactcccgcgggaggactccaaggcgaggaaagaagaggctacactttactccaagccctccaggacagccaagaagaaatgtcagaagaagaacaagcaccccaaagcaaagaggagacgcaggagaaactcctccagcagctccagctccagaaacaccaccagcgactcctctcaaagggagtcagactcctcctcggagacgtcctcagactccggaggggagtccacttcgaccccctccttacatagagccgcctccaataataccagatctgctttttcccaattctggtaaaaaaaaaaaattctccaagttcgactgggaaacggaggcggagctagggcagatattcaggcggcccatgcgcttctatccctcagacctccctttctacccgtggctaccccccaagcgagatatccccaaagtatgtaaagtgaactttcaaataaagctcgcagagtaactaactcgaggccctcctctgttcacttagcggtgtctacctcttaaggtcaccaagcactccgagcgccagcgaggagtgcgaccctctaccctggggcaacttcctcggggtccggcgctacgcgcttcgcgctgcgccggacgcctcggaccccccctcgacccgaatcgctcgcgcgattcggacctgcggcctcggggggggtcgggggctttactaaacagactccgagacgccattggactcaggagctgtgaatcagtaacgaaagtgagtggggccagacttc

SEQ ID NO: 1480 - protein, 660 aa, Alphatorquevirus sp.
LILRQWQPDVVKTCFITGWMPLIICGSGQTQFNFITHMDDITPRGASYGGNFTNVTWSLEGLWEQFQYHRNRWSASNHDLDLARYLFTTLKLYRHENVDYIFSYTRTGPFEISHLSHLSTHPLLMLLSKHHIVVPSLKTKPRGRRYKKVRIKPPKLMLNKWYFTKDICDMGLFQFWATACNLENPWLRSGAVSPCIGINVLSNSIYTDLSNLPSHSSNRTTIQNNMHPSTLTDNKGQWQYTYTKLMSKYYYKGNTNSTYDWQNYSTSQNYDNTYKQWLQDKTKRLETIKQEYQAVYPQLPTQAPSDSTLFQDFGIYSPFYLTPTRISLDWKTPYIHARYNPLTDKGIGNRIYLQWCSEASCEYNPTKSKCTLVDMPLFIMFYGYIDWCIKCTGVSSLVKDARVMIRCPYTEPQLIGANENVGYCLLSNTFMNGDMPVLAPYIPISWFVKWYPMLAHQKEAIEDIVGCGPFMVRDQEAKSWDITMGYRSCFKWGGSPLPLQAIDDPCQKPTHAVPDPDRHPRLLQVSDPTKLGPKTLFHKWDMRRGQFSKRSIERMSEYSEHDEFFETGIVSKKKKFDTPAGGLQGEERRGYTLLQALQDSQEEMSEEEQAPQSKEETQEKLLQQLQLQKHHQRLLSKGVRLLLGDVLRLRRGVHFDPLLT

SEQ ID NO: 1481 - DNA, 3053 bp, Alphatorquevirus sp.
gcttgcgcgtgtcagaccacttcgggctcgcgggaggggcaattcgggctcgggactggccgggctatgggcaaggctcttaaaaaagccatgtttctcggtcggccttacagaaagaaaagggcactgtcactgctacgcgtgcgagctccaaaggcgaaaccacctgctatgagctggagacccccggtgcacaaccccaatgggatcgagagaaacctgtgggaggcattctttcgcatgcatgcttcagcttgtggttgtggcgatcttgttggccatcttactgtactggctggtcggtatggtgctcctcctcgtcccccggcccccggggctcccagaccaccgctgaaccggcagctggcccttccggcgccccccgctgatccccagcaggccaacccgagatggcctggtggggacggtggagaagatggcgctggaggccccgccgctggcggcgccgtcgcagacgccgagtaccaagaagacgagctcaacgccctgttcgacgccgtcgagcaagaagagtaaggaggaggcgatgggggaggcggaggtggagacgggggtacagacgcagacttagactgagacgcagacgcagacgaaagaaaataagactgactcagtggaacccagctaaagtcaggagatgtactattaagggtgtcctgcccatgatactgtgcggagcaggacgctcagggtttaactatggactgcacagcgacgactgcaccatacagaaaccccttggccagaacccccacgggggcggcatgagcacagtaacttttagcctacaggtgctatatgaccagtaccagaggtttatgaacaagtggtcgtactccaacgaccagctagacctagccagatactttggctgcaccttctggttttacagacacccagaagtagactttgtcgctcagtttgacaacgttcccccaatgaaaatggacgagaacacagcccctaacactcacccgtcattcctactgcaaaacaaacacagggttaaaattcccagctttaaaaccaagccttttggcagaaaaaaagttagagttacagtggggccccccaaactgtttgaagacaagtggtacagccagcatgacttgtgtaaggtgcccctagtcagttggcggttaaccgcagctgacttcagatttccgttctgctcaccacaaactgacaacccttgctacaccttccaggtattgcatgaagagtattacccagtaataggcacttctgctatagaaccaggaacaaatcacaatccaacaggcatagacactttagaaaactttttatatggcaaatgtactcactatcaaacatttgccacagacacaagactaaaccctcaaagacccatagctccaaataaaaacacaacatataaccctagtggacttactgaaaacattatttggggacaagaacaatttaactcatttaaaaagcaaacagacagcaactatggctactgcacctactgccctactgcagagttaattaacagaattaaacagtacagagacaaaagattcgaatggctaactcaaatgccagaaaaaaacacctgccatataaatgccacctacgctcgaggaaaaattaagcagtgggaatatcacctaggctggtactcaaacatatttataggcaacctcagacacaacctggcattccggacagcatacatagacattacctacaatcctataacagacaaaggagaaggcaacatagtgtggttccaatatgccacgaaacccaacacagagtacatagagtcacaggcaaaatgcaccattacaaacatacccctatatgctgctttttatggctacgaagactatatccaaagaacactaggcccctatcaagatgtagagaccctaggcataatatgtgttaaatgtccctacacagatcccccactagttcacaaagacaagaataaggcagactggggctatgtattctacgacgttcactttggcaacggaaagaccccggagggcctgggccaagtgcacccttactggatgcagagatggagaccttatgtacagttccagaaagacactatgaacaagatagccagaaccggaccgttcagctacagagacgagacgccttccatcaccttgactgccgggtacaagtttcgttttaactgggggggcgactctatatttccacagattattaaaaacccctgcccagacagcggggtacgaccttcaaccagtagagagcgtcgctcagtacaagtcgttagcccgctcacaatggggccagagtacatattccaccggtgggactggcgacgggggttctttaatacaaaaactctcaaaagaatgcttgaaaaatcaattaatgatgaagaatattcaacaggcccaaaggtccctcgatggtttcccccactcgacaaccaagagcaagaaggcgtctcagatacagagacgacaacctcgcagtcctcgcaagaagaagccgctcaagaagccctccaagaagtccaagaggcgtcgctacagcagcacctcctccagcagtaccgagagcagcgaagaatcggaaagcaactccaactcgtcatgctccaactcaccaagacgcagagcaacttgcacataaatccccgtgtccttggccatgcataaataaagtgtacatgtttcccccggaaaaacccatgcccatacacgggtaccacgggtggcagacagagtatgaggcctgcaaagcctttgacaggccccctagaaactacctgtcagacaaacccatctatccctggcttccccgctcccaaccagaatttaaagtcagttttaaacttggttttcaataaacaaggccgtgggaatttcacttgtcggtgtctacctcttaaggtcactaagcactccgagcgtcagcgaggagtgcgacccttccccctggtgcaacgccctcggcggccgcgcgctacgccttcggctgcgcgcggcacctcggacccccgctcgtgctgacac

SEQ ID NO: 1482 - protein, 761 aa, Alphatorquevirus sp.; identical to SEQ ID NO: 623

SEQ ID NO: 1483 - protein, 156 aa, Alphatorquevirus sp.; identical to SEQ ID NO: 624

SEQ ID NO: 1484 - protein, 147 aa, Alphatorquevirus sp.; identical to SEQ ID NO: 597

SEQ ID NO: 1485 - DNA, 3052 bp, Alphatorquevirus sp.
cgggtgccgaaggtgagtttacacaccgcagtcaaggggcaattcgggctcgggactggccgggctatgggcaaggctcttagggtcatcgctcttaaaaatgttttttggcaggccttacagaaaaaagaaaagggcgctgctactgtctgagctgccagatcgaaagaaaaaaccacctggtgatatgagctggcgccccccggtacacaatgccgccggcattgataggcagttctttgaagcttgctttcgatgccacagtagttgctgcggctgcggcagttttattaatcatcttaatgtactggctgctcgctatggctttactggggggccggcgccgccaggtggtcctcggccggcgccccaggtgaggcccgcgcttcccgcgccggagcccgacccggaggccaacaaccgtgagccatggcatggaactggtggtggcaacgatggagacgccgcggctggaaacccaggcgccgccgctggagacgcctacgatggagaaaacctcgacgccctgttcgccgccgtcgccgaagacgcagagtaaggagacggaggtgggggaagagacgggggcgacgcagacggtacacccgtagacgaaagagacgcattaagaccagaaactttaaaaagaaactagtactaactcagtggcacccctctgtagtaagacgctgctttatcaggggcatagtccctatccttatatgcgggcacacaaaatggaacagtaactacgccctgcatagcgaggactacacagaagagggccgctaccctcacggagggtccctctcgaccactacgtggtcactaaaggtgctgtacgacgagtacctaaaacaccacaacttctggggctacccaaacacccagctagacctggccagatacaggggctgctccttcactttctacagacacaaaaaaactgactttatagtatggtggaacagaaagcctccctttaaactaaacaagctgagctgcgcgtccttccacccgggcatgctcatgcaacagaaacacaaggtgctaatcccaagctttgacactaaacccgggggcagagctaaaattaaagtaagaataaagccccccactctgttagaggacaagtggtacactcagcaagacttgtgtccggtaaacctggcgcaacttgtggttactgcggctgactttcaacatccgttctgctcaccacaaacgaacagtccaaccacaaccttccaggtgttgaaagaaatgtattatgacaccataggcatagttgacacacaagaaagttacaattcagttaataataaaagtacatctaacacatacagtgcattcatggacacattagtaacaaagctatacacaacaggatcatactggaactcctttcacacagcagaatatctaaaccccaacgtaacagacacacacaataacaaaatatttaatgaatcatccaacacattagtagaatggctatcaggaaaaggcgacagcaaatttaacacaggcaacagcacccaatttggccacaatacttatttgcctgacaaaactaaactaacaaaagcaaaccagtgctactggacagcactcaccaaacaaaataaccaagctacacaaatagggcaagcacgcaacaaatactttgagtatcacacgggcatttacagtcccatattccttagcagacacagaagcacactaaactttgccagggcctaccaagacgttacatataacccaaactgtgacagaggagttaaaaacagggtgtggacgcaggccctaactaaggccaccacagaatttgacgaaaaacgctgcaagtgcgttctcactgacatgcctctgtgggccgctctctactgctatcataactttgtagaagaagagttaggcatctcctctgaaatctataacgcctgtatagtgtgtgtgcagtgcccttacacctttccccccatgtatgacaagaaaaacccaaacaaggggtacgtattctatgacgccctgttcggaaacggaaagaccccagacggacgcggacaaatagacgttttctggcagcagcggtggtacccccgcatggcctgccaggtacaagttatgcacgacatcaccatgaccggaccgttctcgtaccacgacgaactagtgagtacacaactgactgctaagtacaaatttgacttcatgtggggtggaaacatgatctcctcacagatcatcaagaacccctgcaaagacacagacatggacaccacctatcccagtagacagcgtcgcgacttacaaattgttgacccacactccatggggccctccttcgcgttccacacgtgggactacagacgcggactgtttggtaaagatgctatcgacagagtgtcaaaagaacaagactatgctccagagtatcctaacccatacaaaaagcctagatattttcccccaacagacaggacagagctccaagggcaagaagaagactggagtttccaggtcgaaagcgaggggtcgtcgtcagaagagagcgatcaagaagcccaagaagaggaggtactccagttccagccaggacagcaactccagcaactccacctgcagctcgcgcagcagcagcatatcgggcagcagctccgattcctgttccaacagatgctcaaaacccaggccaatttgcacctaaacccatatacatacacccagctataaacagggtattcatgtttgaaccccagggtcccaggcccataactaccagacaggggtgggaggacgaattcaccactgccagcatatggggcaggcccgtccgctccttctacacagacacccccttctaccccgaggttcccaagataccccctcaattttctgtaagtttcaaactcggctggaaataaaaatacaaggcctttcactgttcacttgtcggtgtctacctcttaaggtcactaagcactccgagcgccagcgaggagtgcgacccttccccctggtgcaacgccctcggcggccgcgcgctagg

SEQ ID NO: 1486 - protein, 768 aa, Alphatorquevirus sp.
MAWNWWWQRWRRRGWKPRRRRWRRLRWRKPRRPVRRRRRRRRVRRRRWGKRRGRRRRYTRRRKRRIKTRNFKKKLVLTQWHPSVVRRCFIRGIVPILICGHTKWNSNYALHSEDYTEEGRYPHGGSLSTTTWSLKVLYDEYLKHHNFWGYPNTQLDLARYRGCSFTFYRHKKTDFIVWWNRKPPFKLNKLSCASFHPGMLMQQKHKVLIPSFDTKPGGRAKIKVRIKPPTLLEDKWYTQQDLCPVNLAQLVVTAADFQHPFCSPQTNSPTTTFQVLKEMYYDTIGIVDTQESYNSVNNKSTSNTYSAFMDTLVTKLYTTGSYWNSFHTAEYLNPNVTDTHNNKIFNESSNTLVEWLSGKGDSKFNTGNSTQFGHNTYLPDKTKLTKANQCYWTALTKQNNQATQIGQARNKYFEYHTGIYSPIFLSRHRSTLNFARAYQDVTYNPNCDRGVKNRVWTQALTKATTEFDEKRCKCVLTDMPLWAALYCYHNFVEEELGISSEIYNACIVCVQCPYTFPPMYDKKNPNKGYVFYDALFGNGKTPDGRGQIDVFWQQRWYPRMACQVQVMHDITMTGPFSYHDELVSTQLTAKYKFDFMWGGNMISSQIIKNPCKDTDMDTTYPSRQRRDLQIVDPHSMGPSFAFHTWDYRRGLFGKDAIDRVSKEQDYAPEYPNPYKKPRYFPPTDRTELQGQEEDWSFQVESEGSSSEESDQEAQEEEVLQFQPGQQLQQLHLQLAQQQHIGQQLRFLFQQMLKTQANLHLNPYTYTQL

SEQ ID NO: 1487 - protein, 167 aa, Alphatorquevirus sp.
LAGLWARLLGSSLLKMFFGRPYRKKKRALLLSELPDRKKKPPGDMSWRPPVHNAAGIDRQFFEACFRCHSSCCGCGSFINHLNVLAARYGFTGGPAPPGGPRPAPQVRPALPAPEPDPEANNREPWHGTGGGNDGDAAAGNPGAAAGDAYDGENLDALFAAVAEDAE

SEQ ID NO: 1488 - protein, 138 aa, Alphatorquevirus sp.
LEFPGRKRGVVVRRERSRSPRRGGTPVPARTATPATPPAARAAAAYRAAAPIPVPTDAQNPGQFAPKPIYIHPAINRVFMFEPQGPRPITTRQGWEDEFTTASIWGRPVRSFYTDTPFYPEVPKIPPQFSVSFKLGWK

SEQ ID NO: 1489 - DNA, 3051 bp, Alphatorquevirus sp.
cagaccacttcgggctcgcgggggtcgggagtcaaggggcaattcgggctcgggactggccgggccccgggcaaggctcttaaaaagcatgtttctcggtaaactgtacagaaagaaaaggaaagtgccactgcaagctctgccagtaccaccgcctaaacggactagcatgagctgggtacaaccggtatctaacgcccatgttcgagaacaacaatggttcgagtccaccgttagaagccacgacgctttctgtggctgtggtgattccgtgcttcattttactaaccttgctactcgctttaaccgtctgcatgctgccccctcgcctctggatccgccctacccccctcccccgaggcgggcgcgtgtgagaggcctgccggccctccccgctcctgaaaacccaccggcgccatggcctggcgctggtggagacgccgctggaaacccagaaggcggcccgcgtggacaaagtaccggagacgccgctggagacgatttcgaccccgcagacctagaagatctactcgccgccgtggaagaagacgaacagtaaggaggcgccgcgttaggcgactgaggcggaggagggggtggactaggagacggtacttgagacgcagaaagagacgaaagctagtactgactcaatggaaccccagcactgtcagacgctgcaatatcaggggcataataccccttatcatgtgcggggcaaacactgccagttttaactatggcatgcacagcgacgacagcactcctcagccagagaaatttgggggcggcatgagcacagtgacttttagcctatatgtactgtatgaccagttcaccagacacatgaacaggtggtcgtaccccaacgaccagctagacctcgccagatacaaaggctgctcttttaaaatgtacagacaccccacaactgactttatactgacttatgacaacaatccccccatgaaaaacactatatacagctctcctaacacacacccaggcatcctcatgcaacagaaacacagagtactaatacccagctggctcacctttcctaaaggcagaaaatatgtaaaggttaaaatacctccacctaagttatttgaagaccactggtacactcagcctgacttatgcaaagtaccgctcgttactctgcggtcaaccgcagctgacttcagacatccgttctgctcaccacaaacgaacaacccttgcaccaccttccaggtgttgcgagacaagtacaacgaagttattggacttccttttgcaaacactggctctaatacaactgttactcaacaaattacctcctttgagacttggctatatgaatccagcacacactatcaaacatttcaaacagagcaaatgtttagaccaaaacaatacaatgcagatggctcacagtggaaccaataccaaaaaatgctttctcagtggactacaaaaatttaccacagaaaaacagacagtaactatggatattgctcctataactttagtaagaatgcagaaggctaccagtatgctacacaaatgagacaacactactggacacaactaacaacactcacaagcacagtaccacacataaactctacctttgctaatgctaccactccagaatatgaataccacacaggctggttttcaccagtatttataggcccaaacagacacaacatacaatttagaacagcatacatggatgttacatacaaccctctaaatgacaaaggtcaatttaacagagtatggttccaatacagcactaaacctacaacagagtttaaccctatgcaatgcaaatgtgtagtagaaaacatcccactgtggtcagctttatttggctacagtgaatatgtagaaagccaactaggcccctttcaagaccatgaaacagtaggcctagtagtagtacaatgcccctacacagtgccatcactatatgacaaagacagaaaagacatgggctacatattttatgacacaaactttggcaatggaaaactaggcaatggcagcggccaggtgcccagatactggcaacagagatggtaccccatactcaaaagacaaaaacaagtaatgaatgacatctgcaagactggacctttcagctacagagacgaactgcttcaggtggacttggcagcctcttacaccttcaaatttaactgggggggcgacttactctaccaccaggtcatcaaaaacccgtgcgactcctcaggactggcacccaccgactccggtagattcaagcgggacgtacaagttgttagcccgctcaccatgggtcccagactcctcttccactcgtttgaccaaagacgggggttctttactgaaagagctatcaaacgaatgcatgatgaacaaattaatgttccagactttacacagcagcctaaaatcccccgcattttcccaccagtcgagctccaagaccaaagagaacaagcagaagaagactcgcgttcggaggcgctctcgctcacctcctcccaagaaaaagaagcagaagcccaagaaagtctaccgatacagcagcagctcagaaaacaactcagacagcaacagcagttgcgagtccacttgcagcacctcttcctccaactccaaaaaacaaaagcccatttacatttaaacccactatttttcccccaagagaacatgtagacatgttcggtaactactatgatagaaagccaacagcctcagactggaaaactgaatatgagtgctgtagggcctttgatagaccccctagaagcaaccttaaagacagccccttctacccctggatgccaaaacagcctcagtttcgtgtaaccttcaaacttggcttctaataaaatttgctaggccgtgcaactttcacttgtcggtgtctacctctaaaggtcactaagctctccgagcgcagcgaggagagcgacccttccccctgactcaacttcttcggagccgcgcgctacgccttcggctgcgcgcggcacctcagacccccgctcgtgctgacacgcttgcgcgtgt

SEQ ID NO: 1490 - protein, 758 aa, Alphatorquevirus sp.
MAWRWWRRRWKPRRRPAWTKYRRRRWRRFRPRRPRRSTRRRGRRRTVRRRRVRRLRRRRGWTRRRYLRRRKRRKLVLTQWNPSTVRRCNIRGIIPLIMCGANTASFNYGMHSDDSTPQPEKFGGGMSTVTFSLYVLYDQFTRHMNRWSYPNDQLDLARYKGCSFKMYRHPTTDFILTYDNNPPMKNTIYSSPNTHPGILMQQKHRVLIPSWLTFPKGRKYVKVKIPPPKLFEDHWYTQPDLCKVPLVTLRSTAADFRHPFCSPQTNNPCTTFQVLRDKYNEVIGLPFANTGSNTTVTQQITSFETWLYESSTHYQTFQTEQMFRPKQYNADGSQWNQYQKMLSQWTTKIYHRKTDSNYGYCSYNFSKNAEGYQYATQMRQHYWTQLTTLTSTVPHINSTFANATTPEYEYHTGWFSPVFIGPNRHNIQFRTAYMDVTYNPLNDKGQFNRVWFQYSTKPTTEFNPMQCKCVVENIPLWSALFGYSEYVESQLGPFQDHETVGLVVVQCPYTVPSLYDKDRKDMGYIFYDTNFGNGKLGNGSGQVPRYWQQRWYPILKRQKQVMNDICKTGPFSYRDELLQVDLAASYTFKFNWGGDLLYHQVIKNPCDSSGLAPTDSGRFKRDVQVVSPLTMGPRLLFHSFDQRRGFFTERAIKRMHDEQINVPDFTQQPKIPRIFPPVELQDQREQAEEDSRSEALSLTSSQEKEAEAQESLPIQQQLRKQLRQQQQLRVHLQHLFLQLQKTKAHLHLNPLFFPQENM

SEQ ID NO: 1491 - protein, 167 aa, Alphatorquevirus sp.
LAGPRARLLKSMFLGKLYRKKRKVPLQALPVPPPKRTSMSWVQPVSNAHVREQQWFESTVRSHDAFCGCGDSVLHFTNLATRFNRLHAAPSPLDPPYPPPPRRARVRGLPALPAPENPPAPWPGAGGDAAGNPEGGPRGQSTGDAAGDDFDPADLEDLLAAVEEDEQ

SEQ ID NO: 1492 - protein, 56 aa, Alphatorquevirus sp.
MFGNYYDRKPTASDWKTEYECCRAFDRPPRSNLKDSPFYPWMPKQPQFRVTFKLGF

SEQ ID NO: 1493 - DNA, 3050 bp, Alphatorquevirus sp.
cgcttgcgcgtttcggaccttcggcgtcgggggggggggcaattcgggctcgggactggccgggccccgggcaaggctcttaaaaaatgcgcttttccaggatcgctcgctcgaaaaggaaagtgccactgccaacgctgccagtactaccgccgcctgggactatgagctggcgccctccggtccacaatgccgctggaatcgaccgtaactggttcgaatcctgtttcagatctcacgctagcagttgcggctgtggaaattttattggccatcttaatactctggctactcgctacggctttactcctgggcccgcgccgccgcctggtggtccaggcccgcggccgccagtaccagtgaggccccggcacgctgccggagacggtaaccagcccagagccctgccatggcgtggggatggtggagacggagacgctggcccacctaccgaaggtggcgccgctggagacgccgcagaagagtaccgcgaagaagacctcgacgagctgttcgccgctatggaaagagacgagtaaggaggcgccggtgggggaggcggcggtaccgaaggggctacagacgcaggggcgcggtcagactaagacgcagacgcagacggggacgtaagagacttatactgactcagtggcatccccaaacccgtagaaagtgcaccatcaccgggtacctaccggtggtgtggtgcggctacctccgagccgccagaaactatgcctaccactctgacgactccacaaaacagccagacccctttggaggcgcgctgagcactacctcatttaacctaaaggtgctgtacgaccagcaccagagaggactgaacaggtggtcgttccctaacgaccaactggacctggctcgctacaaggggtgcgaactgacattttacagacagagagccgcagactttatagcagtgtatgacatctctgccccctacaaactagacaagtacagctctccaagctaccaccctggcaacatgataatgcagaaaaagaaaatcctaattcccagctatgacactaaccccaggggtcgccaaaaagttaaagttaaaattccccccccccccaaactgttcgttgataagtggtatgcacaagaggacctctgcgacgttaatcttgtgacacttgcggttagcgcagcttcctttacacatccgttcggctcaccactaacgaacaatccttgtgtaaccttccaggtgcttgacacaatatactatgccgtaataggttacagttcctcaaatgaaaaaaaaaaaagtgtacttgaaacactatacaaacaaaatgcatactgggcctcacacttaactccttactttaccactggccttaaaattccgtttccaaacaatactaatcctacaaatcctggaaatggtactgtaactacacttagtacaacaggtagctcctcaacaaacattaaaatagcaggtgacagcaactacaactggtacccctataaccttaaaaacaaaactaataccttacatacaataagagagcagtacttcaaatgggaaacagatgaaggcccacaggccacatctgattatggcaaacaccacacttggactaagcccaccgatgactactacgagtaccaccttggcctattcagccccatattcatagggcccaccagaagcaacaaactgtttgccacagcgtaccaggacgtgacctataaccccctaaacgacaaggcggtgggcaacaagttttggttccaatataacacaaaggcagacacccaggtggccaaacagggctgctactgcatgctagaggacattcccttttgggccgccatgtatggcttctctgactttatagagagcgagctaggcccctttcaggacgcagagaccgtgggctatatatgtgcaatatgcccctacacggagccccccatgttcaacaaacacaatcccacgcagggctatgtgttttatgactcattttttggcaatggcaagtggatagacggacggggacacatagagccttactggctgtgccgctggaggccagaaatgcttttccagcagcaagtcatgagagacattgtacagaccgggccctggagctataaagacgaaagcaaaaactgtgttctgcccatgaagtataagttcagattcacatggggcggcaatatggtctcccaacagacaatcagaaacccctgcaagactgacggacaacttgccccctccggtagacagcctagagaagtacaaattgttgacccacgcaccatgggtccccgctgggttttccactcctgggactggcgacgtggctaccttagtgagacagctctcagacgcctgcgagaaaaaccgctggactatgaggcgtatatgcaaaaatcaaaaagacctagactgttccctgttacagagggcgacgaccagtccccccagcaaggcgacgactcgtattccgaggaagaaaagtcgccgcggttcaccgaagagacgacgcagacgctacagctccagctccagcgccagctccggcaacagcagcgcctcggagagcagctccagttcctccaacaccacctgctcaaaacgcaagcgggtctccaaataaacccattattgttggtccgccagtaaacagggtataccttttcccccctgagggtccccgtcccataaccacctctcagggctgggcagatgagttctgtactgcaaagcactgggacaggcccactcgcaccaactacacagacacccctacctatccctggatgccaactcagttcaaagtgtcttttaaacttggctttcaataaaatttgctcagcttcaactttctaggccgtgggagtttcactggtcggtgtctacctcttaaggtcaccaagcactccgagcgcagcgaggagtgcgacccttttctctgttcaccccccctgcccggtagcaacgccctcggagtccggcgctacgcgctgcgcgctgcgccggacacctcggaccccccctccacccgaaa

SEQ ID NO: 1494 - protein, 751 aa, Alphatorquevirus sp.
MAWGWWRRRRWPTYRRWRRWRRRRRVPRRRPRRAVRRYGKRRVRRRRWGRRRYRRGYRRRGAVRLRRRRRRGRKRLILTQWHPQTRRKCTITGYLPVVWCGYLRAARNYAYHSDDSTKQPDPFGGALSTTSFNLKVLYDQHQRGLNRWSFPNDQLDLARYKGCELTFYRQRAADFIAVYDISAPYKLDKYSSPSYHPGNMIMQKKKILIPSYDTNPRGRQKVKVKIPPPPKLFVDKWYAQEDLCDVNLVTLAVSAASFTHPFGSPLTNNPCVTFQVLDTIYYAVIGYSSSNEKKKSVLETLYKQNAYWASHLTPYFTTGLKIPFPNNTNPTNPGNGTVTTLSTTGSSSTNIKIAGDSNYNWYPYNLKNKTNTLHTIREQYFKWETDEGPQATSDYGKHHTWTKPTDDYYEYHLGLFSPIFIGPTRSNKLFATAYQDVTYNPLNDKAVGNKFWFQYNTKADTQVAKQGCYCMLEDIPFWAAMYGFSDFIESELGPFQDAETVGYICAICPYTEPPMFNKHNPTQGYVFYDSFFGNGKWIDGRGHIEPYWLCRWRPEMLFQQQVMRDIVQTGPWSYKDESKNCVLPMKYKFRFTWGGNMVSQQTIRNPCKTDGQLAPSGRQPREVQIVDPRTMGPRWVFHSWDWRRGYLSETALRRLREKPLDYEAYMQKSKRPRLFPVTEGDDQSPQQGDDSYSEEEKSPRFTEETTQTLQLQLQRQLRQQQRLGEQLQFLQHHLLKTQAGLQINPLLLVRQ

SEQ ID NO: 1495 - protein, 150 aa, Alphatorquevirus sp.; identical to SEQ ID NO: 1253

SEQ ID NO: 1496 - DNA, 3046 bp, Gammatorquevirus sp.
cgggagcccgaggtgagtgaaaccaccgaggtctaggggcaactcgggctagggcagtctagcggaatgggcaagaaacttaaaaaagtttattattttaaatacagatgcagaatatcagctcacaagacttttaccaagaaactcattttaatcccgagactaagaatcaactatggatgtctcaaattgctgactctcatgataatatttgcaattgcaatcatccatttgctcaccttcttgcttccatatttcctcctggtcatcgagatcgcgatcttaccattaatcagatacttttcagagactaccaagaaaaatgccattctggtggggtagaagaaagaaaccttggtttggcaggtggagataccgccgccggcgctggaacatcaggagaaaaaagaaaagaagaagaagactacccagaagacgaactagacgctatgctcgccgccgctatgcaagaaaacgcaaggtaagaagaaaacttaaaaaaattaaaattcaacagtggcagccagactctgtaaaaaaatgtaagataaaaggctactctataatgatattaggaggacaaggaactcaaatgttttgctatactaatacagcaaaagactacccacagccaaaagcccctggaggaggaggctttgcttatgaagttataactttaaaatggctctatcaagagtttctgagacataacaacatatggactagatctaatgaatatacagaccttgttagatacacagggggcaaaataaccttttttgctcatccatatatggactttattatagcctatgacttacaacctccatttgatcttaacaaattttcatacccagaaattcaaccacaaaatctactgctcagaaaacacaaaagagttttgctaagcagacaatcaaacccaaaaggcaaacacaaagtaacaattaaatttcatccaccaaaacagatgacaactaaatggttttttcaaaaagacttctgtccatatggcttaataaaaataactgcagcagcagctgatttctcctacccaatcatagggcctaaatcacaaagcactattttaactatatatgcactaaatactaacttctaccaagtcagtgattgggcacacacaaaaactaaccagccatacatgaatataccaacacaaactttgccactgtatttttggtacaaagaaaaaggagcagaaaaatgttatacctataaccctgacacacaaaaaccagaaaataaatactattactcaattgcatgggacacaggtctattttgcagcaaagtactcctagcttttaaaatatccacagatccccaaggaaaaagcttaatagcaggaacacccattataccactaagatataacccacaagaagatgatggtattggcaatgaaatttatcttaccagcatactaactggtagatataacaaaccatcatatacaacagactatcaatttaacaatgtacctttatatatagccttctatggctattacaactacttaaaaatatacagcaaagacaaaaacataatgaaatcctatatgtttgttgtaaaatgtaaagctataaagccactaactcagacaacaggacaaaattattaccctatattagatgcagactttgtttttggaaaacttccatgggatgaatacctgtccacagaaataaaaaaattttggtatcccacagcagaaagacaagaaggaattataaattccatagtagaatcaggtccatttgtaccaaaacttagcaacatgacatatagtacatggtcactaatgtacaactataaatttttttttaagtggggtggaccacatgttacagatccaaaagttgaagacccctgcactcgaaacaaataccctgtacccgatacaatgcaacaaacagtacaaattgtcaacccagaaaaaaataaagttgaatccatcttacatgactgggactttagaagggggtttgttacaaacacagctcttaaacgaatgtcagaaaacctcccatctgaaacatctttctcatctgatgattcagaatcacctgcaaaaaagaggaaaattacaaaagaagtcccatgccatcaagaaagcaaagagaaaatccaaacctgtctcctctcactctgcgaagaaaatacctgccaagaaacaccagacaacctccagcagctcatcaagcagcagcagcaagagcagcacaagctcaagagaaacatactcaagctcctcacacacctgaaaaaagggcaaagatgtgtggaactacaaacaggccttttagagtagaaccatttaaacctggatttgaagaagaaacagaaagagaacttgccatagcttttaaaagaccccctagaaaatacaaaaatgaccctccattttacccatggcttccttgtactcccaaagtaatttttaaccttaactttaaagactaggccaacactgtacacttagtaaagcatgtttaataaagtttaacccccccaaaaaaaaaaaaaaaaaaaaataaaaaattgcaaaaattcggcgctcgcgcgcgctgcgcgcgcgcgagcgccgtcacgcgccggcgctcgcgcgccgcgcgtatgtgctaacacaccacgcacctagattggggtgcgcgcgctagcgcgcgcaccccaatgcgccccgccctcgttccgacccgcttgcgcgggtcggaccacttcgggctcgggggggcccccccccccacaccccccgcggggggggcagagcccccccccgcacccccccctacgtcacagaccacgcccccgccgccatcttgggtgcggcagggcgggggctaaaatggcgggacccaatcattttatactttcactttccaattaaaacatgccacataacagcaaaggggtggagactttaaatgtatataaccaagtactgtgacgaatggctgagtttaccccgctagacggtgcagggaccggatcgagcgcagcgaggaggtccccggctgcccttggg

SEQ ID NO: 1497 - protein, 669 aa, Gammatorquevirus sp.
MPFWWGRRKKPWFGRWRYRRRRWNIRRKKKRRRRLPRRRTRRYARRRYARKRKVRRKLKKIKIQQWQPDSVKKCKIKGYSIMILGGQGTQMFCYTNTAKDYPQPKAPGGGGFAYEVITLKWLYQEFLRHNNIWTRSNEYTDLVRYTGGKITFFAHPYMDFIIAYDLQPPFDLNKFSYPEIQPQNLLLRKHKRVLLSRQSNPKGKHKVTIKFHPPKQMTTKWFFQKDFCPYGLIKITAAAADFSYPIIGPKSQSTILTIYALNTNFYQVSDWAHTKTNQPYMNIPTQTLPLYFWYKEKGAEKCYTYNPDTQKPENKYYYSIAWDTGLFCSKVLLAFKISTDPQGKSLIAGTPIIPLRYNPQEDDGIGNEIYLTSILTGRYNKPSYTTDYQFNNVPLYIAFYGYYNYLKIYSKDKNIMKSYMFVVKCKAIKPLTQTTGQNYYPILDADFVFGKLPWDEYLSTEIKKFWYPTAERQEGIINSIVESGPFVPKLSNMTYSTWSLMYNYKFFFKWGGPHVTDPKVEDPCTRNKYPVPDTMQQTVQIVNPEKNKVESILHDWDFRRGFVTNTALKRMSENLPSETSFSSDDSESPAKKRKITKEVPCHQESKEKIQTCLLSLCEENTCQETPDNLQQLIKQQQQEQHKLKRNILKLLTHLKKGQRCVELQTGLLE

SEQ ID NO: 1498 - protein, 125 aa, Gammatorquevirus sp.
MQNISSQDFYQETHFNPETKNQLWMSQIADSHDNICNCNHPFAHLLASIFPPGHRDRDLTINQILFRDYQEKCHSGGVEERNLGLAGGDTAAGAGTSGEKRKEEEDYPEDELDAMLAAAMQENAR

SEQ ID NO: 1499 - protein, 120 aa, Gammatorquevirus sp.
MPSRKQRENPNLSPLTLRRKYLPRNTRQPPAAHQAAAARAAQAQEKHTQAPHTPEKRAKMCGTTNRPFRVEPFKPGFEEETERELAIAFKRPPRKYKNDPPFYPWLPCTPKVIFNLNFKD

SEQ ID NO: 1500 - DNA, 3045 bp, Alphatorquevirus sp.
tgcgcgtgtcagaccacttcgggctcgcgggtcaaggggcaattcgggctcgggactggccgggccccgggcaaggctcttaaaaagcatgtttctcggtaaactgtacagaaagaaaaggaaagtgccactgcaagctctgccagtaccaccgcctaaacggactagcatgagctgggtacaaccggtatctaacgcccatgttcgagaacaacaatggttcgagtccaccgttagaagccacgacgctttctgtggctgtggtgattccgtgcttcattttactaaccttgctactcgctttaaccgtctgcatgctgcccattcgcctctggatccgccctacccccctcccccgaggcgggcgcgtgtgagaggcctgccggccctccccgctcctgaaaacccaccggcgccatggcctggcgctggtggagacgccgctggaaacccagaaggcggcccgcgtggacaaagtaccggagacgccgctggagacgatttcgaccccgcagacctagaagatctactcgccgccgtggaagaagacgaacagtaaggaggcgccgcgttaggcgactgaggcggaggagggggtggactaggagacggtacttgagacgcagaaagagacgaaagctagtactgactcaatggaaccccagcactgtcagacgctgcaatatcaggggcataataccccttatcatgtgcggggcaaacactgccagttttaactatggcatgcacagcgacgacagcactcctcagccagagaaatttgggggcggcatgagcacagtgacttttagcctatatgtactgtatgaccagttcaccagacacatgaacaggtggtcgtaccccaacgaccagctagacctcgccagatacaaaggctgctcttttaaaatgtacagacaccccacaactgactttatactgacttatgacaacaatccccccatgaaaaacactatatacagctctcctaacacacacccaggcatcctcatgcaacagaaacacagagtactaatacccagctggctcacctttcctaaaggcagaaaatatgtaaaggttaaaatacctccacctaagttatttgaagaccactggtacactcagcctgacttatgcaaagtaccgctcgttactctgcggtcaaccgcagctgacttcagacatccgttctgctcaccacaaacgaacaacccttgcaccaccttccaggtgttgcgagacaagtacaacgaagttattggacttccttttgcaaacactggctctaatacaactgttactcaacaaattacctcctttgagacttggctatatgaatccagcacacactatcaaacatttcaaacagagcaaatgtttagaccaaaacaatacaatgcagatggctcacagtggaaccaataccaaaaaatgctttctcagtggactacaaaaatttaccacagaaaaacagacagtaactatggatattgctcctataactttagtaagaatgcagaaggctaccagtatgctacacaaatgagacaacactactggacacaactaacaacactcacaagcacagtaccacacataaactctacctttgctaatgctaccactccagaatatgaataccacacaggctggttttcaccagtatttataggcccaaacagacacaacatacaatttagaacagcatacatggatgttacatacaaccctctaaatgacaaaggtctatttaacagagtatggttccaatacagcactaaacctacaacagagtttaaccctatgcaatgcaaatgtgtagtagaaaacatcccactgtggtcagctttatttggctacagtgaatatgtagaaagccaactaggcccctttcaagaccatgaaacagtaggcctagtagtagtacaatgcccctacacagtgccatcactatatgacaaagacagaaaagacatgggctacatattttatgacacaaactttggcaatggaaaactagtcaatggcagcggccaggtgcccagatactggcaacagagatggtaccccatactcaaaagacaaaaacaagtaatgaatgacatctgcaagactggacctttcagctacagagacgaactgcttcaggtggacttggcagcctcttacaccttcaaatttaactggggggggggcgacttactctaccaccaggtcatcaaaaacccgtgcgactcctcaggactggcacccaccgactccggtagattcaagcgggacgtacaagttgttagcccgctcaccatgggtcccagactcctcttccactcgtttgaccaaagacgggggttctttactgaaagagctatcaaacgaatgcatgatgaacaaattaatgttccagactttacacagcagcctaaaatcccccgcattttcccaccagtcgagctccaagaccaaagagaacaagcagaagaagactcgcgttcggaggcgctctcgctcacctcctcccaagaaaaagaagcagaagcccaagaaagtctaccgatacagcagcagctcagaaaacaactcagacagcaacagcagttgcgagtccacttgcagcacctcttcctccaactccaaaaaacaaaagcccatttacatttaaacccactatttttcccccaagagaacatgtagacatgttcggtaactactatgatagaaagccaacagcctcagactggaaaactgaatatgagtgctgtagggcctttgatagaccccctagaagcaaccttaaagacagccccttctacccctggatgccaaaacagcctcagtttcgtgtaaccttcaaacttggcttctaataaaatttgctaggccgtgcaactttcacttgtcggtgtctacctctaaaggtcactaagctctccgagcgcagcgaggagagcgacccttccccctgactcaacttcttcggagccgcgcgctacgccttcggctgcgcgcggcacctcagacccccgctcgtgctgacacgct

SEQ ID NO: 1501 - protein, 759 aa, Alphatorquevirus sp.
MAWRWWRRRWKPRRRPAWTKYRRRRWRRFRPRRPRRSTRRRGRRRTVRRRRVRRLRRRRGWTRRRYLRRRKRRKLVLTQWNPSTVRRCNIRGIIPLIMCGANTASFNYGMHSDDSTPQPEKFGGGMSTVTFSLYVLYDQFTRHMNRWSYPNDQLDLARYKGCSFKMYRHPTTDFILTYDNNPPMKNTIYSSPNTHPGILMQQKHRVLIPSWLTFPKGRKYVKVKIPPPKLFEDHWYTQPDLCKVPLVTLRSTAADFRHPFCSPQTNNPCTTFQVLRDKYNEVIGLPFANTGSNTTVTQQITSFETWLYESSTHYQTFQTEQMFRPKQYNADGSQWNQYQKMLSQWTTKIYHRKTDSNYGYCSYNFSKNAEGYQYATQMRQHYWTQLTTLTSTVPHINSTFANATTPEYEYHTGWFSPVFIGPNRHNIQFRTAYMDVTYNPLNDKGLFNRVWFQYSTKPTTEFNPMQCKCVVENIPLWSALFGYSEYVESQLGPFQDHETVGLVVVQCPYTVPSLYDKDRKDMGYIFYDTNFGNGKLVNGSGQVPRYWQQRWYPILKRQKQVMNDICKTGPFSYRDELLQVDLAASYTFKFNWGGGDLLYHQVIKNPCDSSGLAPTDSGRFKRDVQVVSPLTMGPRLLFHSFDQRRGFFTERAIKRMHDEQINVPDFTQQPKIPRIFPPVELQDQREQAEEDSRSEALSLTSSQEKEAEAQESLPIQQQLRKQLRQQQQLRVHLQHLFLQLQKTKAHLHLNPLFFPQENM

SEQ ID NO: 1502 - protein, 167 aa, Alphatorquevirus sp.; identical to SEQ ID NO: 1043

SEQ ID NO: 1503 - protein, 56 aa, Alphatorquevirus sp.; identical to SEQ ID NO: 1492

SEQ ID NO: 1504 - DNA, 3045 bp, Alphatorquevirus sp.
aacgcttgcgcgtttcggaccttcggcgtcggcaaggggcaattcgggctcgggactggccgggccctgggcaaggctcttaaaaaatgcgcttttccaggattgctcgctcgaaaaggaaagtgccactgccaacggtgccagtactaccgctgcctgggactatgagctggcgtcctccggtgcacaatgccgctggaatcgaccgtaactggtacgaatcctgctacagatctcacgctagcagttgcggctgcggaaattttattgaccatcttaatactctggctactcgttacggctttactcctgggcccgcgccgccgcctggtggtccaggcccgcggccgccagtaccagtaaggccccggcacccggccggagacggtaaccagcccagggccctgccatggcgtggggatggtggagacggagacgctggcccacctaccgaaggtggcgccgctggagacgccgcagaagagtaccgcgaagaagacctcgacgagctgttcgccgctatggaaagagacgagtaaggaggcgccggtgggggaggcggcggtaccgaaggggctacagacgcaggggcgcggtcagactcagacgcagacgcagacggggacgtaagaaacttatactaactcagtggcagccccagacccgtagaaagtgcaccatcaccgggtacctcccggtagtctggtgcgggtacctgcgggccgccagaaactatgcctaccactctgacgactccacaaagcagccggacccctttgggggcgcgctcagcactacctcatttaacctaaaggtgctgtacgaccagcaccagaggggactcaacaggtggtcgttccctaacgaccagcttgacctcgctcgctacaaggggtgttcactaacattttacagacagaaatccacagactttatagctgtgtatgacatctctgccccctacaaactagacaagtacagctctcccagctaccaccctggcaacatgataatgcaaaaaaagaaaatcctaattcccagctatgacactaaccccaggggtcgccaaaaagtaaaagttaacattcccccccctaaactgttcgttgataagtggtatgcacaggaggacctgtgcgacgttaatcttgtgacacttgcggttagcgcagcttccttcacacatccgttcggctcaccactaacgaacaacccttgtgtaaccttccaggtgcttgacacaatatactattccgtaataggttacagttccccagatgagaaaaaaaaaagggtactagaaagtttatataaccaaaatgcatactggtcctcacacttaaccccttactttacaactggccttaaaaatccatatccagaccccagtaaccctacaactactgcaactgaacaggtaaatacactttatacaacaggtgagaaaaccaaaaacattaaaatagcaggagacagcaactacaactggtacccctataaccttaaagacaaagttgaaatactcaataaaataagagagcagtactttaagtgggaaacagataagggcccacaggccacatgtgactatggcaaacatcacacgtggactaaacccaccaatgactactacgagtaccacctgggcctattcagtcccatattcataggacccaccagaagcaacaaagtgtttgccaccgcctaccaagacgtcacttacaaccccctaaacgacaaggcggtgggaaacaagttctggtttcagtacaacacaaaagcagacacccaagtggccaaacaaggctgctactgcatgttagaggacattcccttttgggccgccatgtatggctactctgactttatagagagcgagctaggccccttccaagacgcagaaaccgtgggcttcgtctgtgtaatatgcccctacaccgagccacccatgtacaacaaacaaaaccccatgcagggctacgtgttttatgactcattttttggcaatggcaagtggatagacggacggggacacatagagccttactggctgtgccgctggaggccagagatgcttttccagcagcaagtcatgagagacattgtgcagaccgggccctggagctataaagacgaaagtaaaaactgtgttctgcccatgaagtataaattcagatttacatggggcggcaatatggtctcccaacagacgatcagaaacccctgcaagactgacggacaacttgccccatccggtagacagcctagagaagtacaaattgttgacccgctcaccatgggtccccgatgggttttccactcctgggattggcgacgtggctaccttagtgagacagctatcagacgcctgcgagaaaaaccactcgactatgaggcgtatatgcaaaaatcaaaaagacctagactgttccctgttacagagggcgacgaccagtccccccagcaaggcgacgactcgtattcagaggaagaaaagtcgccgcaattcaccgaagagacgacggagacgctacagctccagctccagcggcagctcaggcgacagcagcgcctcggagagcagctccagttcctccaacaccacctcctcaaaacgcaagcgggtctccaaataaacccattattgttggtccgccagtaaacagggtgtaccttttcccccccgagggtccccgtcccataaccacctctcagggctgggcagatgaatactgcaccgccaaatactgggataggcccactcgcaccaactacacagacacccctacctatccctggatgcccactgcgttcagagtgtcttttaaacttggctttcaataaaatgtgctcaacttcaacttgctaggccgtgggagtttcactggtcggtgtctacctcttaaagtcaccaagcactccgagcgcagcgaggagtgcgacccttctctttgtgcgccccccctgcccggtagcaacgccctcggagtccggcgctacgcgctgcgcgctgcgccggacacctcggaccccccctccacccga

SEQ ID NO: 1505 - protein, 750 aa, Alphatorquevirus sp.
MAWGWWRRRRWPTYRRWRRWRRRRRVPRRRPRRAVRRYGKRRVRRRRWGRRRYRRGYRRRGAVRLRRRRRRGRKKLILTQWQPQTRRKCTITGYLPVVWCGYLRAARNYAYHSDDSTKQPDPFGGALSTTSFNLKVLYDQHQRGLNRWSFPNDQLDLARYKGCSLTFYRQKSTDFIAVYDISAPYKLDKYSSPSYHPGNMIMQKKKILIPSYDTNPRGRQKVKVNIPPPKLFVDKWYAQEDLCDVNLVTLAVSAASFTHPFGSPLTNNPCVTFQVLDTIYYSVIGYSSPDEKKKRVLESLYNQNAYWSSHLTPYFTTGLKNPYPDPSNPTTTATEQVNTLYTTGEKTKNIKIAGDSNYNWYPYNLKDKVEILNKIREQYFKWETDKGPQATCDYGKHHTWTKPTNDYYEYHLGLFSPIFIGPTRSNKVFATAYQDVTYNPLNDKAVGNKFWFQYNTKADTQVAKQGCYCMLEDIPFWAAMYGYSDFIESELGPFQDAETVGFVCVICPYTEPPMYNKQNPMQGYVFYDSFFGNGKWIDGRGHIEPYWLCRWRPEMLFQQQVMRDIVQTGPWSYKDESKNCVLPMKYKFRFTWGGNMVSQQTIRNPCKTDGQLAPSGRQPREVQIVDPLTMGPRWVFHSWDWRRGYLSETAIRRLREKPLDYEAYMQKSKRPRLFPVTEGDDQSPQQGDDSYSEEEKSPQFTEETTETLQLQLQRQLRRQQRLGEQLQFLQHHLLKTQAGLQINPLLLVRQ

SEQ ID NO: 1506 - protein, 150 aa, Alphatorquevirus sp.; identical to SEQ ID NO: 238

SEQ ID NO: 1507 - DNA, 3044 bp, Alphatorquevirus sp.
cgggtgccggaggtgagtttacacaccgcagtcaaggggcaattcgggcttgggactggccgggctatgggcaaggctcttaaaaaagacatgtttctcggtaaactttacagaaagaaaagggcactgctactgcctagcctgccagctgcaaagaaaaaaccacctgctatgagccagtgggtccctccggtgcacaacataaatggccgctgccaccagtggtatgaggggtgctaccgtactcatgctgctttttgtggttgtggcaattttattaatcaccttattgctctgggcgatcagtatggcttcaggccgggttcgagggctcccggcgctccgggagtaggcggacctccggtcccgctccgtcgagccctgccggctccggagccttcccagcaggctaacaacaacaacaaccagagatggtctggggatggtggcgccgacgcaggcgagggtggctccggagcttctggaggaggagagcagctgccagaagacgatctcgatggattgctcgccgcgctagacgacgaagagtaaggagaaaaaggaggtggaggaggaggagagggcgacgcagacggtttatctatagaaaaaagagacgttacagacgcaggagaaagagacaaaaaataataataaaacaatggcaaccggccgttgtcagacgctgcaggatagtggggtacatggctgctctaataagtggaaacgggacctttgctacaaattacagcagccacttagaggacagaatacagaagggaccctttggagggggccacagcaccatgagattctctctgtacgtgctgtaccaagaacacctcagacacatgaactactggacttacacaaacaaggacttagaactgactagatacctgggggcgactataaccttctacagacatcccaccagagactttatagtgacttatagcagacgcacccctctgggaggaaacatactgacagccccctcgctacatccaggcaatgcaatgctaagtaagagaaaaatactcatacccagcttagaaaccagacccaagggtaaaaagacaaaaaaactaagaatagggcccccaacactactaatagacaagtggtactttcagaaagacttttcagacgttacactgtttaacctcaatgttacggaagctgacttgcggtttccgttctgctcaccacaaactgacaacatttgcgtaaacttccaggttctgaaatcctgttacaacgaatacctaggtatacatacatttgacaatgacaataccgataataaattaaaagatttttttaataaagctctactcacaacaggcagacaaaacacagagataaatatactaaacacatttagaacacagggatgccttagccatcctcaagtaaatgtacccaatgctaccagtaacccaaacaaccaagtaacagtcgacgaatatttccaaaaactagatggactctggggaaacccaatatatgcaaactccagaaacaatggaggcaaatccactgaaaactttaataaaaacacttttatagagaaatacctaataggtaacatgagcagctaccacaaaaaatttacaacagacaacctgccacaaagctggaaaggcaacaaagcacactgccacctcacaggaatatacagtccaccatacctgaactcaggcagaatatctccagagatatttggcctgtacacagaaataatatacaacccatacacagacaaaggcaaaggaaacaaaatatgggtagacgcactcacaaagggagacaacatatacagcagcacccagagcaggtgtctcttacaagacctacctctctggtgcgcctgtttcgggtacacagactggattaaaaaagaattaaaccactgggacgcaccgtggaactacagactcctaatggtgtgtccctacacatacccaaaactgtacaacgatgcaaacccaaactatggatacgtatgcttctcatatcaatttggagcaggacagatgccggacggcagctcctacgtccctataaaatggaggggaaaatggtaccctaacatgatccaccaacaaaaagttatggaggacctagccagatcaggcccctttgccccaaaacaacaggtacctagcgtgcagctcagcatgaagtacaaatttgcatttaactggggcggtaatcctattttggaacagattgttagagaccccagcactcagcccacctacgaaattcccggtgccggtaacctccctactagagtacaagtcatcgacccgagggttattggaccacaatactcatttagatcctgggactggagacgcggacagtttaatgaaaaaagtattaaaagaatcgcagaacaacaagagacttctgagtatctattttcaggcccaaaaaggccaaggatcgaccagcgcccttacaacccacaagaagaaagctggtcttcaacagtccaacaaagagaaccgaaaccgtgggcctcagaagaagagacggagagccagagccaaagcgaagaagaggcggagacatcaatcagagagcagctgcagcaccagctccaagagcaacacagaatcagacatggaatcaagtgcctcttcgagcagctagtcagaacccagcagggagtacacctacatccatcccttgtgtaggcccaaagaagtacatgtttccagacagggcccctaaaccagctccgagcagcggagactgggagatggaatacctaatgtgtaagctgtttaacaggccccccagaagcaacctaaaagatgtgcctttctacccgtgggttaaaaaccagtacaatgtaagctttcaactcaactacaaataaacctcagcttcaacttgctaggccgtgggagtttcacttgtcggtgtctacctcttaaggtcactaagcactccgagcgccagcgaggagtgcgacccttccccctgactcaacttcttcggagccgcgcgctacgccttcggctggaggg

SEQ ID NO: 1508 - protein, 758 aa, Alphatorquevirus sp.
MVWGWWRRRRRGWLRSFWRRRAAARRRSRWIARRARRRRVRRKRRWRRRRGRRRRFIYRKKRRYRRRRKRQKIIIKQWQPAVVRRCRIVGYMAALISGNGTFATNYSSHLEDRIQKGPFGGGHSTMRFSLYVLYQEHLRHMNYWTYTNKDLELTRYLGATITFYRHPTRDFIVTYSRRTPLGGNILTAPSLHPGNAMLSKRKILIPSLETRPKGKKTKKLRIGPPTLLIDKWYFQKDFSDVTLFNLNVTEADLRFPFCSPQTDNICVNFQVLKSCYNEYLGIHTFDNDNTDNKLKDFFNKALLTTGRQNTEINILNTFRTQGCLSHPQVNVPNATSNPNNQVTVDEYFQKLDGLWGNPIYANSRNNGGKSTENFNKNTFIEKYLIGNMSSYHKKFTTDNLPQSWKGNKAHCHLTGIYSPPYLNSGRISPEIFGLYTEIIYNPYTDKGKGNKIWVDALTKGDNIYSSTQSRCLLQDLPLWCACFGYTDWIKKELNHWDAPWNYRLLMVCPYTYPKLYNDANPNYGYVCFSYQFGAGQMPDGSSYVPIKWRGKWYPNMIHQQKVMEDLARSGPFAPKQQVPSVQLSMKYKFAFNWGGNPILEQIVRDPSTQPTYEIPGAGNLPTRVQVIDPRVIGPQYSFRSWDWRRGQFNEKSIKRIAEQQETSEYLFSGPKRPRIDQRPYNPQEESWSSTVQQREPKPWASEEETESQSQSEEEAETSIREQLQHQLQEQHRIRHGIKCLFEQLVRTQQGVHLHPSLV

SEQ ID NO: 1509 - protein, 161 aa, Alphatorquevirus sp.; identical to SEQ ID NO: 519

SEQ ID NO: 1510 - protein, 134 aa, Alphatorquevirus sp.; identical to SEQ ID NO: 613

SEQ ID NO: 1511 - DNA, 3041 bp, Alphatorquevirus sp.
cgcgcgctacgccttcggctgcgcgcggcactcaaggggcaattcgggctcgggactggccgggctatgggcaaggctcttagggtcatcgctctgaaaaatgttttttggcaggccttacaggaaaaagaaaagggcgctgctactgtctcagctgccagatccaaagaagaaaccacctggtgatatgagctggcgccccccggtacacaatgccgccggcattgatagacagttctttgaagcctgctttcgatgccacagtagttgctgcggctgcggcagctttattaatcatattaatgtactggctgctcgctatggctttactggggggccggcgccgccaggtggtcctcggccggcgccccaagtgaggcccgcgcttcccgcgcctgagcccgacccggaggcccacaaccgtgagccatggcgtggagctggtggtggcaacgatggagacgccgcggctggaaacccaggcgccgccgctggagacgcctacgatggagaagacctcgacgccctgttcgccgccgtcgccgaagacgcagagtaaggagacggaggtgggggaaaagacgggggcgacgcagacggtacacccatagacgaaagaaacgcattaagcccagaaactttaaaaagaaactaatactgactcagtggcacccctctatagtaagacgctgctttatcaggggcatagtccccatcctaatatgcgggcacacaaaatggaacagtaactacgccctgcatagcgaggactacactgaagagggccgctaccctcacggagggtccctctccaccactacgtggtctctaaaggtgctgtacgacgagtacctaaagcaccacaacttctggggctacccaaacacccagctagacctggccagatacaggggctgcacttttaccttctacagacacaaaaagactgactttatagtatggtggaacagaaagcctccctttaaactcaacaagctgagctgcccttcgtttcacccaggcatgctcatgcagcaaaaacacaaggtgctaattcctagctttgacactaaacccgggggcagatctaaaattagagtcaaaataaaaccccccactctgttagaggacaagtggtacactcagcaagacctgtgtccggtaaacctggcgcaacttgtggttactgcggctgactttcaacatccgttctgctcaccacaaacgaacactccaaccacaaccttccaggtgttgaaagaaatgtattatgacaccataggcatagttgacacacaagaaacttacaattcagttaataataaaagtgactctaacacatacactacatttatgaccaagttagtaacaaagctatacacaacaggatcatactggaactcctttcacacagcagaatatttaaaccccaacataacagacacacacaacaacaaaatatttaatgacagaagcacaacattaacagagtggctatcaggaaaaggcacagataaatttaacacaggcaacagcacccaatttggccacaatacctataatcctgacctaactaagctaacagcagcaaacgattcctactggacagcactcaccaaacaaaataaccaagctacacaaatagggcaagcacgcgacaaacactttgagtatcacacgggcatttacagtcccatattcctcagcagacacagaagcacactaaactttgccagggcctaccaggacgtcacatacaatccaaactgtgacagaggagttaaaaacagggtgtgggtgcaggccctaactaaagccaccacagagttcgatgaaaaacgcagcaagtgcgttatcactgacctgcctctctgggccgctctccactgctaccacaactttgtagaagaggagctaggcatctcctcagaaatctacaacgcctgtatagtgtgtgtacagtgcccttacacctttccccctatgtatgacaagaaaaacccaaacaaggggtacgtgttctatgacaccctattcggaaacggaaagaccccagacggacgcggacaggtagacgtgttctggcagcagcggtggtacccccgcatggcctgccaggtgcaagttatgcacgacatcaccatgaccggaccgttctcttaccacgacgaactagtgagtacacaacttactgctaaatacaaatttgacttcatgtggggtggaaacatgatctcctcacagatcatcaagaacccctgcaaagacacagacatggacaccacctatcccagtagacagcgtcgcgacttacaaattgttgacccacactccatggggccctccttcgcgttccacacgtgggactacagacacggactgtttggtaaagatgctatcgacagagtgtcaaaacaacaagactatgctccagagtatcctaacccatacaaaaagcctagatattttcccccaacagacagggcagagctccaagggcaagaagaagactggagtttccaggtcgaaagcgaggggtcgtcgtcagaagagagcgatcaagaagcccaagaagaggaggtactccagttccagccaggacagcagctccagcaactccacctgcagctcgcgcagcagcagcagatcgggcagcagctccgattcctgttccaacaaatgctcaaaacccaggccaatctgcacctaaacccatatacatacacccagccataaacagggtgttcatgtttgaaccccagggcccgaggcctataactaccagagaggggtgggaggacgaatacaccactgccggcatatggggccggcccgtccgctccttctacacagacacccccttctaccccgaggtccctaaaatgcctcctcagtttcatgtatctttcaaactcggctggaaataaaaatgcaaggcctttcactgttcacttgtcggtgtctacctcttaaggtcactaagcactccgagcgttagcgaggagtgcgacccttccccctggtgcaacgccctcggcggc

SEQ ID NO: 1512 - protein, 768 aa, Alphatorquevirus sp.
MAWSWWWQRWRRRGWKPRRRRWRRLRWRRPRRPVRRRRRRRRVRRRRWGKRRGRRRRYTHRRKKRIKPRNFKKKLILTQWHPSIVRRCFIRGIVPILICGHTKWNSNYALHSEDYTEEGRYPHGGSLSTTTWSLKVLYDEYLKHHNFWGYPNTQLDLARYRGCTFTFYRHKKTDFIVWWNRKPPFKLNKLSCPSFHPGMLMQQKHKVLIPSFDTKPGGRSKIRVKIKPPTLLEDKWYTQQDLCPVNLAQLVVTAADFQHPFCSPQTNTPTTTFQVLKEMYYDTIGIVDTQETYNSVNNKSDSNTYTTFMTKLVTKLYTTGSYWNSFHTAEYLNPNITDTHNNKIFNDRSTTLTEWLSGKGTDKFNTGNSTQFGHNTYNPDLTKLTAANDSYWTALTKQNNQATQIGQARDKHFEYHTGIYSPIFLSRHRSTLNFARAYQDVTYNPNCDRGVKNRVWVQALTKATTEFDEKRSKCVITDLPLWAALHCYHNFVEEELGISSEIYNACIVCVQCPYTFPPMYDKKNPNKGYVFYDTLFGNGKTPDGRGQVDVFWQQRWYPRMACQVQVMHDITMTGPFSYHDELVSTQLTAKYKFDFMWGGNMISSQIIKNPCKDTDMDTTYPSRQRRDLQIVDPHSMGPSFAFHTWDYRHGLFGKDAIDRVSKQQDYAPEYPNPYKKPRYFPPTDRAELQGQEEDWSFQVESEGSSSEESDQEAQEEEVLQFQPGQQLQQLHLQLAQQQQIGQQLRFLFQQMLKTQANLHLNPYTYTQP

SEQ ID NO: 1513 - protein, 152 aa, Alphatorquevirus sp.; identical to SEQ ID NO: 447

SEQ ID NO: 1514 - protein, 138 aa, Alphatorquevirus sp.
LEFPGRKRGVVVRRERSRSPRRGGTPVPARTAAPATPPAARAAAADRAAAPIPVPTNAQNPGQSAPKPIYIHPAINRVFMFEPQGPRPITTREGWEDEYTTAGIWGRPVRSFYTDTPFYPEVPKMPPQFHVSFKLGWK

SEQ ID NO: 1515 - DNA, 3040 bp, Betatorquevirus sp.
cgggagccgaaggtgagtgaaaccaccgtagtctaggggcaattcgggctagatcagtctggcggaacgggcaagaaacttaaaatattatattttacagatatgtcatctgtatggaaaccaccgaaatcatctacaagacaactagagaatgcatggatgaattctactttccaaacccatgacctgttttgtcactgcaacgacccctggcttcactttatgattgttcttaacaaaaattccaacgcacccaaaccagaaccagaaattgaaaacataaaatggcttcttattggcaaaccaactattggagataccgcaaccgtagaagaccatggcttcgacgacggagacctagaaagactcttcgcagaagatggagaagaaaaagaaaatactaccgaagaaccaaaaaggtaaaaagaaaacgctttcgtaaaaagaaactgaaattaactttaaaagtatttcagccaaagcaaattagactttgtaaaattattggcactaaatgtctaatacaaggtagccctttaagaaaaaacaataactatattcaatactgttactctaaagtaccagataacaaaccaggaggagggggatggagcttaattgtattttcattagcaagtctatttcaagactatgaacacttgttaaatgtatggactacaagtaactctggtttacctcttgtaagatttctgggaacatctataaaattttatcaagatagtgaattagactatattgctatatatgataattgttggcctatggtagacacaccatatacacatgcagactcatgtccttcaagaatgtttttaagaaaaaacaaaataactattcctagcagaaaaacacaagccagaaaaaaaccatacaaaaaagtttttataaagccaccaacacaaatgacaaacaattggtattttcaaaaagacatatgtaacctaccgctacttatgctcaccaccacaggagtttcattaactaatccatactgcgatcctagagcaacaagtaacaatattactattacctgcttaagcccctttatttttcaaaacccagcatggagaaactttccaaaaacaacaggttactctccaaaaactgcagtagactcacatgaacacagagaatacaacatgtacttatgggcaacaacaatgaaattagacaataaccaagtaacaccagacaacattaccaacttacaacttataccacttacaaacccaacaaattatgacttaccacaacccattagagacagcacatgggaaaacaaaccagaaaactggggcaacccatttaaccatcacatactagacggagacacttactcagtatacattacaacaatgtcaccatttgatgctaaacaactattatcaaacacatctccaacacgtagttactatttaacaaatccttcaggaccactaatatacaaatgtagatacaatcctgactcagacacaggagacaataaccaatactacctaataaacacatctacaggaacaaacatgaatcccccaactaatactaatctagaaatacatggatttcctttatatgctatgtgttggggctggacagattttattaaaaaacttaacataacagtagacttagacgaaaactacatagtagcaataaaaactaagcaatttgatgtagaccttccaacatatattcctattgacttagacttcatagaaggatacgaaccatacactcccaaaactgaagaccacttaccaaatgtacctaatacacacaacaaaatacattggtacttgaaatatgaatttcaacaacaaacaattgaaaaaatatgtgacagtggtcctggttgtcctagaatgccatacaatcattatatgcaatgcttttgtaaatataaatttttgtttaaatggggaggttgtccaaaagtactacaaaaagctataaatccttgttcacagtccaaatggcccacggccgatcacctccatggacgacttgaaattaagaatcctaaccaaccaccacaaacagaactgtacgactgggactggattgacgactatgttaaaacagaaagtatacaacgaatacaaacatacacaggatctcatgaacaaactttctcaatttcagaatcactcagcaacccgaagccaacgaaaaaagtccaagaaaaagaaacattacaagaagaggagaagacactcctcctcaagctccaacaactccagcaacagcgacaacagctccagcaactcctcctcaacaaactaactttataataaaaaaaagcaatattaaagcttttctatttgaaccaaaaataaaaaaaaatagacgttttacaccaaaagaacaagaagaagaaaagatagtagctgctatctttggcagaccacaacgaacttggttttatgatacccctacctacccattttttccaccaactcctataatacccaaagtaaactttgacttaaactatggaaaataaaggccaacatactttcacttagtggtgtccatttatttaagctaaacttatataaacatccaccgcctccctaaaattcgggcgccaaaatttaaaaaaagggggctccgcccccttacacccccaagggggccccgcccccttacacccccaagggggctccgcccccttacacccccaagggggctccgcccccttacacccccccgcccccttacacccccaagggggctccgcccccttacacccccaagggggctccgcccccttacaccccctaataaatattcaacaggaaaaccacataattagaattgccgaccacaaaccgtcacttacttctccttttacttaaacttcctctttacctatttattattcatgaaattaattagtacactccgtaattccggggcggagactaataactatataactaactacacttccgaatggctgagtttatgccgccagacgaagacgggatcactacagtgactccaggctgatcttggg

SEQ ID NO: 1516 - protein, 675 aa, Betatorquevirus sp.
MASYWQTNYWRYRNRRRPWLRRRRPRKTLRRRWRRKRKYYRRTKKVKRKRFRKKKLKLTLKVFQPKQIRLCKIIGTKCLIQGSPLRKNNNYIQYCYSKVPDNKPGGGGWSLIVFSLASLFQDYEHLLNVWTTSNSGLPLVRFLGTSIKFYQDSELDYIAIYDNCWPMVDTPYTHADSCPSRMFLRKNKITIPSRKTQARKKPYKKVFIKPPTQMTNNWYFQKDICNLPLLMLTTTGVSLTNPYCDPRATSNNITITCLSPFIFQNPAWRNFPKTTGYSPKTAVDSHEHREYNMYLWATTMKLDNNQVTPDNITNLQLIPLTNPTNYDLPQPIRDSTWENKPENWGNPFNHHILDGDTYSVYITTMSPFDAKQLLSNTSPTRSYYLTNPSGPLIYKCRYNPDSDTGDNNQYYLINTSTGTNMNPPTNTNLEIHGFPLYAMCWGWTDFIKKLNITVDLDENYIVAIKTKQFDVDLPTYIPIDLDFIEGYEPYTPKTEDHLPNVPNTHNKIHWYLKYEFQQQTIEKICDSGPGCPRMPYNHYMQCFCKYKFLFKWGGCPKVLQKAINPCSQSKWPTADHLHGRLEIKNPNQPPQTELYDWDWIDDYVKTESIQRIQTYTGSHEQTFSISESLSNPKPTKKVQEKETLQEEEKTLLLKLQQLQQQRQQLQQLLLNKLTL

SEQ ID NO: 1517 - protein, 106 aa, Betatorquevirus sp.
MSSVWKPPKSSTRQLENAWMNSTFQTHDLFCHCNDPWLHFMIVLNKNSNAPKPEPEIENIKWLLIGKPTIGDTATVEDHGFDDGDLERLFAEDGEEKENTTEEPKR

SEQ ID NO: 1518 - DNA, 3039 bp, Alphatorquevirus sp.
gctacgcgcttcgcgctgcgccggacatctctcaaggggcaattcgggctcgggactggccgggccccgggcaaggctcttaaaaaatgcactttcgcagagtgcgagcgaaaaggaaactgctactgcaaactgtgcgagctccaccgaaggcacctgccatgagcttcaccacacctactattaatgccggcattcgagagcagcaatggttcgagtccatccttagatcccaccagtcgttctgtggctgtggtgatcccgtgcttcattttactaaccttgctactcgctttaactatctgtctgctacctcttcgcctctggaccctcccggcccagcgccgcgaggccgcccggcgctccgccgcctcccggcgctcccttcagcccccgcgaccccttctagagaaccagcatggcctactggttcagaaggtggggctggaggccgaggcgccggtggagaaggtggcgccgccgtcgaaggagactaccgagaagaagaactagacgagctgttcgcggccttggaagaagacgcaaaccaagggtaaggaggcgccgcagaactcgcaaacgtacctacagacgggggtggagacgcaggaggtacataagacgagggcgacgcaaaaagaaacttgtactgactcagtggaacccggcagtagttaagaggtgcaacattaagggcggacttccaataattatatgcggagagcccagggcagcctttaactatggctaccacatggaggactacactcctcaacctttccccttcggagggggaatgagcacagtgactttctctctgaaagccttgtatgaccagtacctgaaacaccaaaacaggtggactttttcaaacgaccagctagacctggccagatacaggggctgtaaactaaggttctacagaagccccgtctgtgactttatagtacactacaacctaatacctccactaaaaatgaaccagtttacaagtcccaacacacacccgggactactcatgctcagcaaacacaagataataattcccagctttcaaacaagacctgggggcagacgctttgttaaaataagacttaatccccccaaactatttgaagacaagtggtacactcagcaagacctgtgcaaggttccgctcgttagtattacagcaactgcggctgacttgcggtatccgttctgctcaccacaaacgaacaacccttgcaccaccttccaggtactgcgcaagaactacaacacagttataggaacttcctttaaggaccaagagtccacacaagagtttgaaaaatggttatatctaacaccatcgcactatcaaacatttgccacagaggagagactaggcagaatacctactacatatccagatggaagctctaactcacaaaaagacacatggcaacaagcatggtctaaacaaagagaagcctactcaccacaagcataccctcaaacctcaattacagggatgcagtcaaatggcactataacaggtacaaatggacaaatgtacaaagtgccatatgacagtaatttcggcttcccaacttacataccacaaacaaggtacatatatgctagaagagaaaaaaacttccactttgaagttaataatcccataagtaaaaaaatatggccacaacccagtacaacaacacccacagtagattactatgaatacagactgggatggttcagtaacatatttataggccccaacagatacaacttacagttccaaacagcatacgtagacaccacatataacccactcatggacaaaggcaagggcaacaaaatatggttccaatacctaagtaaaaaaggcacagattacaatgaaaaacaatgctactgcacccttgaagacatgcccctctgggcaatgtgctttggatacacagactatgtagagactcaactaggaccaaatgtagaccatgaaacagctggactcataattataatctgtccttacactcaaccaccaatgtatgacaaacaaaggcctaactggggatacgtagtatatgacacaaactttggcaatggaaaaatgccctccggaactggccaagtcccagtatactggcaatgcagatggagacccatgctgtggttccaagagcaagtactaaatgacatctcaaagactggaccgtacgcctacagagacgaatataaaaatgtacagctgactatgtactacaacttcatttttaactgggggggcgacatgtattacccacaggtcgttaaaaacccctgtggagactccggaatcgttcccggttccggtagattcactcgagaagtacaagtcgttagcccgctttccatgggaccggcctacatcttccactacttcgacagcagaaggggcttctttagtgaaaaagctcttaaaagaatgcaacaacaacaagaatttgatgaatcttttacattcaaacctaagagacccaaactttctacagcagccacagaaatcctccagctcgaagaagactcgtcttcaggggaaggaaaatcgccactacagcaagaagagaaagaagcagaagtcctcgaaacgccacaagtacagctccagctccagcggaacatccaggagcagctcgcaatcaagcagcagctccaattcctcctgctccaactcctcaagacccaatccaatttgcatttaaacccacaatttttaagcccttcataaaatatgacatgtttggggacccccttcctcaccccccaacagcccaagactgggccacagaatatgagtgctgtaaggcctttaacagaccacctagaaccaacctaaaagacacccccttctacccctgggtccctaaacctaaacctcaattccgtgtatcttttaaacttggttttcaataaacaaggccgtgggagtctcacttgtcggtgtcaacctcttaaggtcactaagcactccgagcgtaagcgaggagtgcgaccctcccccctggggcaactccctcgaagtccggc

SEQ ID NO: 1519 - protein, 773 aa, Alphatorquevirus sp.
MAYWFRRWGWRPRRRWRRWRRRRRRLPRRRTRRAVRGLGRRRKPRVRRRRRTRKRTYRRGWRRRRYIRRGRRKKKLVLTQWNPAVVKRCNIKGGLPIIICGEPRAAFNYGYHMEDYTPQPFPFGGGMSTVTFSLKALYDQYLKHQNRWTFSNDQLDLARYRGCKLRFYRSPVCDFIVHYNLIPPLKMNQFTSPNTHPGLLMLSKHKIIIPSFQTRPGGRRFVKIRLNPPKLFEDKWYTQQDLCKVPLVSITATAADLRYPFCSPQTNNPCTTFQVLRKNYNTVIGTSFKDQESTQEFEKWLYLTPSHYQTFATEERLGRIPTTYPDGSSNSQKDTWQQAWSKQREAYSPQAYPQTSITGMQSNGTITGTNGQMYKVPYDSNFGFPTYIPQTRYIYARREKNFHFEVNNPISKKIWPQPSTTTPTVDYYEYRLGWFSNIFIGPNRYNLQFQTAYVDTTYNPLMDKGKGNKIWFQYLSKKGTDYNEKQCYCTLEDMPLWAMCFGYTDYVETQLGPNVDHETAGLIIIICPYTQPPMYDKQRPNWGYVVYDTNFGNGKMPSGTGQVPVYWQCRWRPMLWFQEQVLNDISKTGPYAYRDEYKNVQLTMYYNFIFNWGGDMYYPQVVKNPCGDSGIVPGSGRFTREVQVVSPLSMGPAYIFHYFDSRRGFFSEKALKRMQQQQEFDESFTFKPKRPKLSTAATEILQLEEDSSSGEGKSPLQQEEKEAEVLETPQVQLQLQRNIQEQLAIKQQLQFLLLQLLKTQSNLHLNPQFLSPS

SEQ ID NO: 1520 - protein, 156 aa, Alphatorquevirus sp.
MHFRRVRAKRKLLLQTVRAPPKAPAMSFTTPTINAGIREQQWFESILRSHQSFCGCGDPVLHFTNLATRFNYLSATSSPLDPPGPAPRGRPALRRLPALPSAPATPSREPAWPTGSEGGAGGRGAGGEGGAAVEGDYREEELDELFAALEEDANQG

SEQ ID NO: 1521 - protein, 58 aa, Alphatorquevirus sp.; identical to SEQ ID NO: 197

SEQ ID NO: 1522 - DNA, 3039 bp, Betatorquevirus sp.
cgggtgccgaaggtgagtgaaaccaccgaagtcaaggggcaattcgggctagatcagtctggcggaacgggcaagtaactaaaaaatatacttatttttacagatatgagctctatttggagaccaccgacatcatcactgagacaacaagaattaaaatggagaaatataatttttgaatcacacgacttctggtgccactgcgacgacgttgacctgcactttttaatggttatgaacaaattcaacggttgccccaaacctgaaagcgagattaaaaatataaaatgcctccttaccggtacaacttctacagacaacgccgctaccgcaccagaagaagaagaaactggtttactagatggagaactggaagagcttttcaaagaagaaaataccgaagacaaagatggaaacgacaccgaaaggtaaaaagacgttttaaaaaaaaaaaagctactaaaataactgtaaaacagtttaatcctagtcatattaacaaatgtaaaattgttggatacaaatgcttatttcaaggtagtacaaaaaatctttcaactaactatatacaatatgtaaatgctattgtaccaccattttggccgggaggaggaggatggagcttaatagtatttagcttaacatcactatttgaagactgggaacacttagaaaatatctggacacgatcaaacataggcttaccgctagtacaatataaaggctgtaaactaaaactttatcaaagctatgacacagactacgtagcaatttatgaccgatgttggcctatggtagatacagacttaacacacccagacgctgcaccctccagaatgttaatgagaaaaaacaaaattataatacccagtcgaaaaactaatccaagaaaaagaccatacaaaaaagtttttattaaacccccggcacaaatgatgacacaatggtactttcaaagagatatatgtaaactgccactatttatgcttacaacaacagccgttgacttattatatcctttttgcaaccctcaatgcatgtcaaataacattactatacctgttattagtacacacatatttaaaaaccttaactttgtagaatatggaacagcaggttacagtcctaaacaaacagacaacaacaaagatatgtggctttatgcatccctacaatccgatttatcaactataactaatgaaaaccaagctaaaactttaataccactaaaaaacacaaaaaattttcaagcaggaacacccataagcgatagctgggaagacaaacccgaaaattggggaaacccattttaccatcactacattacaggaatatcagaacatgacacatacacaatttatattagtacaaccaatgccgccagtattaaaactaatataaaaagaccaaattttacagtaacaaaactatcaggaccaacagtttacttttgcagatacaacccagctaaagacaaaggagacacaaacaaaatgtatctagtaagtacacacacaccacataaagaaattacaccaccaacagatacaaacttaataattgaaggatttccactatttatacaaacatggagctggacagactgggtaaagaaagctaaactagtaccagacccagataaatacagaatattagtaatagataccaaagtattagaccctgaacttccacattatataccaatagactataactttatagaaggatacgatccatacacaccaaacaaagaaaatccaaacgtacctcacacaccaaatatatacaacgctgcaaactggcatccaaaactactctttcagagacaaacaattgaaaaaattgccacttcaggaccagctgtacatagagaaacaaaccacaaatacattcaagcatattgtaaatatacattttattttaaatggggcggatgccctaaagccttacaaaaaccatatgaaccttgcttacagccaaaatggaccacagccaataacatctctacaagacttgaaatcacgaatcctatcacaccaccagaaacagaactatactcctgggactgggactcagactatgttaaagaaacagctatacaaagaattggcagatacacggaaattaataaaccaactttctcatcaacagcaaacaaaaacaacccacaagtcctcaaaaaagtccaagaaaaagaccaaacagcagagaaagaggaaaagacgatattcgacaagctccagctcctcagacaccagcgtctcctcctcgaactccagctacagcagtgcctcaaaaaatagtaattaaaaacagcaaagtaactgttagtctattcgaaaaaccaaaaaagaatagactaatgactccatgggaaaaacaagaagaaaaagaaatagcagctatatttttaagaccacaaagagactatatatttgactttcctacttatcctatatttcctccagctcctaaagtacctaaagttaactttgacttaatgtttaaagattaataaaacaaggccaacataaattcacttagtggagtccatttatttaagtttaaacttaaataaacatccaccgcctccctataattcgggcgccaaaattcaaagggggctccgcccccttacacccccaagggggctccgcccccttccacccccaagggggctccgcccccttacacccccaagggggctccgcccccttaccaagggggctccgcccccttacacccccaagggggctccgcccccttacaccccaagggggctccgcccccttacaccccctttttaatattcaacaggaaaaccacctaatttaaattgccgaccacaaaccgtcactaacttctgctttttacatgtacttcctttttacctaattattattcattacattaattattaaacaccgtaaatccggggaggagcttacaaactatataaccaactacacttccgaatggctgagtttatgccgccagacggagactgaatcactctagtgacttcaggctgatcttggg

SEQ ID NO: 1523 - protein, 671 aa, Betatorquevirus sp.
MPPYRYNFYRQRRYRTRRRRNWFTRWRTGRAFQRRKYRRQRWKRHRKVKRRFKKKKATKITVKQFNPSHINKCKIVGYKCLFQGSTKNLSTNYIQYVNAIVPPFWPGGGGWSLIVFSLTSLFEDWEHLENIWTRSNIGLPLVQYKGCKLKLYQSYDTDYVAIYDRCWPMVDTDLTHPDAAPSRMLMRKNKIIIPSRKTNPRKRPYKKVFIKPPAQMMTQWYFQRDICKLPLFMLTTTAVDLLYPFCNPQCMSNNITIPVISTHIFKNLNFVEYGTAGYSPKQTDNNKDMWLYASLQSDLSTITNENQAKTLIPLKNTKNFQAGTPISDSWEDKPENWGNPFYHHYITGISEHDTYTIYISTTNAASIKTNIKRPNFTVTKLSGPTVYFCRYNPAKDKGDTNKMYLVSTHTPHKEITPPTDTNLIIEGFPLFIQTWSWTDWVKKAKLVPDPDKYRILVIDTKVLDPELPHYIPIDYNFIEGYDPYTPNKENPNVPHTPNIYNAANWHPKLLFQRQTIEKIATSGPAVHRETNHKYIQAYCKYTFYFKWGGCPKALQKPYEPCLQPKWTTANNISTRLEITNPITPPETELYSWDWDSDYVKETAIQRIGRYTEINKPTFSSTANKNNPQVLKKVQEKDQTAEKEEKTIFDKLQLLRHQRLLLELQLQQCLKK

SEQ ID NO: 1524 - DNA, 3039 bp, Betatorquevirus sp.
cgggtgccgaaggtgagtgaaaccaccgaagtcaaggggcaattcgggctagatcagtctggcggaacgggcaagtaactaaaaaatatacttatttttacagatatgagctctatttggagaccaccgacatcatcactgagacaacaagaattaaaatggagaaatataatttttgaatcacacgacttctggtgccactgcgacgacgttgacctgcactttttaatggttatgaacaaattcaacggttgccccaaacctgaaagcgagattaaaaatataaaatgcctccttaccggtacaacttctacagacaacgccgctaccgcaccagaagaagaagaaactggtttactagatggagaactggaagagcttttcaaagaagaaaataccgaagacaaagatggaaacgacaccgaaaggtaaaaagacgttttaaaaaaaaaaaagctactaaaataactgtaaaacagtttaatcctagtcatattaacaaatgtaaaattgttggatacaaatgcttatttcaaggtagtacaaaaaatctttcaactaactatatacaatatgtaaatgctattgtaccaccattttggccgggaggaggaggatggagcttaatagtatttagcttaacatcactatttgaagactgggaacacttagaaaatatctggacacgatcaaacataggcttaccgctagtacaatataaaggctgtaaactaaaactttatcaaagctatgacacagactacgtagcaatttatgaccgatgttggcctatggtagatacagacttaacacacccagacgctgcaccctccagaatgttaatgagaaaaaacaaaattataatacccagtcgaaaaactaatccaagaaaaagaccatacaaaaaagtttttattaaacccccggcacaaatgatgacacaatggtactttcaaagagatatatgtaaactgccactatttatgcttacaacaacagccgttgacttattatatcctttttgcaaccctcaatgcatgtcaaataacattactatacctgttattagtacacacatatttaaaaaccttaactttgtagaatatggaacagcaggttacagtcctaaacaaacagacaacaacaaagatatgtggctttatgcatccctacaatccgatttatcaactataactaatgaaaaccaagctaaaactttaataccactaaaaaacacaaaaaattttcaagcaggaacacccataagcgatagctgggaagacaaacccgaaaattggggaaacccattttaccatcactacattacaggaatatcagaacatgacacatacacaatttatattagtacaaccaatgccgccagtattaaaactaatataaaaagaccaaattttacagtaacaaaactatcaggaccaacagtttacttttgcagatacaacccagctaaagacaaaggagacacaaacaaaatgtatctagtaagtacacacacaccacataaagaaattacaccaccaacagatacaaacttaataattgaaggatttccactatttatacaaacatggagctggacagactgggtaaagaaagctaaactagtaccagacccagataaatacagaatattagtaatagataccaaagtattagaccctgaacttccacattatataccaatagactataactttatagaaggatacgatccatacacaccaaacaaagaaaatccaaacgtacctcacataccaaatatatacaacgctgcaaactggcatccaaaactactctttcagagacaaacaattgaaaaaattgccacttcaggaccagctgtacatagagaaacaaaccacaaatacattcaagcatattgtaaatatacattttattttaaatggggcggatgccctaaagccttacaaaaaccatatgaaccttgcttacagccaaaatggaccacagccaataacatctctacaagacttgaaatcacgaatcctatcacaccaccagaaacagaactatactcctgggactgggactcagactatgttaaagaaacagctatacaaagaattggcagatacacggaaattaataaaccaactttctcatcaacagcaaacaaaaacaacccacaagtcctcaaaaaagtccaagaaaaagaccaaacagcagagaaagaggaaaagacgatattcgacaagctccagctcctcagacaccagcgtctcctcctcgaactccagctacagcagtgcctcaaaaaatagtaattaaaaacagcaaagtaactgttagtctattcgaaaaaccaaaaaagaatagactaatgactccatgggaaaaacaagaagaaaaagaaatagcagctatatttttaagaccacaaagagactatatatttgactttcctacttatcctatatttcctccagctcctaaagtacctaaagttaactttgacttaatgtttaaagattaataaaacaaggccaacataaattcacttagtggagtccatttatttaagtttaaacttaaataaacatccaccgcctccctataattcgggcgccaaaattcaaagggggctccgcccccttacacccccaagggggctccgcccccttccacccccaagggggctccgcccccttacacccccaagggggctccgcccccttaccaagggggctccgcccccttacacccccaagggggctccgcccccttacaccccaagggggctccgcccccttacaccccctttttaatattcaacaggaaaaccacctaatttaaattgccgaccacaaaccgtcactaacttctgctttttacatgtacttcctttttacctaattattattcattacattaattattaaacaccgtaaatccggggaggagcttacaaactatataaccaactacacttccgaatggctgagtttatgccgccagacggagactgaatcactctagtgacttcaggctgatcttggg

SEQ ID NO: 1525 - protein, 671 aa, Betatorquevirus sp.
MPPYRYNFYRQRRYRTRRRRNWFTRWRTGRAFQRRKYRRQRWKRHRKVKRRFKKKKATKITVKQFNPSHINKCKIVGYKCLFQGSTKNLSTNYIQYVNAIVPPFWPGGGGWSLIVFSLTSLFEDWEHLENIWTRSNIGLPLVQYKGCKLKLYQSYDTDYVAIYDRCWPMVDTDLTHPDAAPSRMLMRKNKIIIPSRKTNPRKRPYKKVFIKPPAQMMTQWYFQRDICKLPLFMLTTTAVDLLYPFCNPQCMSNNITIPVISTHIFKNLNFVEYGTAGYSPKQTDNNKDMWLYASLQSDLSTITNENQAKTLIPLKNTKNFQAGTPISDSWEDKPENWGNPFYHHYITGISEHDTYTIYISTTNAASIKTNIKRPNFTVTKLSGPTVYFCRYNPAKDKGDTNKMYLVSTHTPHKEITPPTDTNLIIEGFPLFIQTWSWTDWVKKAKLVPDPDKYRILVIDTKVLDPELPHYIPIDYNFIEGYDPYTPNKENPNVPHIPNIYNAANWHPKLLFQRQTIEKIATSGPAVHRETNHKYIQAYCKYTFYFKWGGCPKALQKPYEPCLQPKWTTANNISTRLEITNPITPPETELYSWDWDSDYVKETAIQRIGRYTEINKPTFSSTANKNNPQVLKKVQEKDQTAEKEEKTIFDKLQLLRHQRLLLELQLQQCLKK

SEQ ID NO: 1526 - DNA, 3038 bp, Betatorquevirus sp.
cgggtgccgaaggtgagtgaaaccaccgtagtcaaggggcaatatgggcagaattagtctggcggactgggcaacaaacttaaaatataaatttttttacagatgtccgactatgtaaaaccttcagaatatactaactatcaaaaagaaacagcatggattaacgatatacaccacgtacacgacattttctgcttttgtgacaacactgtcaaccatcttcttcaatgtcttcttatgagaggagcccaatttaacctcaccaaacaacaaagaagactactgcaaaaatgccttattactaccgaagaccaagatggcgatggagacggcgcttcttcagaaaaccagtccgcttccaaagaagaagatttcgacctaaacataggagacctagaacaactcttcgccgaaaacgacaaagatgggtaagaaaaaacttattttttaaaagaaagaaaaagaaaactcttaccctaaaacaatggcaaccagaattaattagaaaaagtcatattaaaggactatttactttatttgcttgcaatgaaggacgcttaagtaataactggccacaatacagagactcttttactcctgaatttcaacctgcgggaggtggttggggactatttgtatttaatttaggagcattatttcaagaatttcaaagagtaagaaattactggactgttagcaatattaatttacctcttgtaagatatctttactgtaccttaaagttttatagagctgataatgttgattatgttgttacatatactactagctatcctatgacagacaacgaattaagacacgcagacgctcaaccaagcagaatgttaatgaggagacacaaaataatagttcagagtagaaaacacacacatagaaaaccatacgttagaaaaagaatctatccaccaaaacaaataattaacagatggttttttcaaagacagtttgttaacaccaatctactaatgcttacagttacagcttgtgacttaacacactatgatataggatactatgatatttccaacaatattagtttaaaaacattaaactactacaaattcccaacattaaactaccaaagacaaaacacaactacaccttttcaacccaaaactggtacatacctctatggagtagacccaactaaaataaactttaataatacaacaaatcctttacaaaacataaaatatggagaccttatatttttgggacaagctacacgcagaacagcaggcataacatttcaaaacagcactaaaacaacttggacagagtatgtaaacaccaacaacagcggagaatggggaaatccatttcatgaagaatacatacatgaccaattagcaatactacaatctaatgttcaaccaacaaattttacttcaccagaaaaaaataaaggcatagaaataacaaaatttacaataatgacagaacctatgtttgaaaccattagatacaatccagacaaagacacaggaaaagacaccatgatatacttagtacctaattttcaaagctatacagaatggaaaaaaccagaaaatgagcaattaatatttcatggctttccgctatggatgctattatggggatgggtagactggcaaaaaaaattagcactagtaaatcaaatagaccaacactatatagtaattatagaaacaaaagcatttgaaccagaaagaccaaaatacatgctactagaccaagaatttttagacaacactttagaatttgcacaactagcaccagatagcccagaagaaaaaccatttttacatgatgaacaaaactggtatccaaaattctggtatcaacaaaaatccatagaaaaaatttgttctataggcccaggaacacacaaatttaaacaaagagaaagcatacaagcacatttaaaatatgacttttgttttaagtggggaggaactccatcaacactcgaaacaattgcagacccctccaagcaaatacaatatcccactccctgtgacatcacttcgagaattcaaatccaggatccaacaacagaccccagggacctcatctacaactttgatgttaggagatacgaactcacacaaaaagcaacaaaaagactcacaagaccaacagactctgaccaaccttgttcaatttttacagactacttcaacccagcaccaccacaacaagaaaaagacctactacaagcactcatcgaagcacaaacaaagaaaaaagaaaaagaggagacactcaagctcttccaacacctcagagagcgacaacagtatatccagcagcgactccacagactaataatacaaagtataaaataataaactcacactgcaaagtgtctatgtttactagtgacaataaaataaaacctagaaggtttactccacaagagtatcaatgggaactatggcaagcaaaagccttttgtagaccacctagacaatttttcggagacgccccaacatatccatggttacccccaacacctcttgtaaactttgacttaaaatacaaagaataaaatttcaacgccagcaaaaattcactctcggtgtccatttattaaagttaaaacttatataaacatccaccactctcccaaatacgcaggcgcacagggggctccgccccctgaaacccccaggggggggggccaaatacgcaggcgcacagggggctccgccccctgaaacccccaggggggggggcaaagcccccccctaacccccccaaaacattaaccaacacaggaaaaccaccaaatttgcatggctaaccacaaacgttcagcggaaaccacaaaatttgcattgccgaccacaaacgattatgctaattaacttcccaaaaacactcttcaacttccctaaaaattaattaataatcaccatcactattacgtattataggaggagctacaaatatataaaagcaagtataccttcgaatggctgagtttatgctgccagacggagacgcgataacaactcgcggctaattctggg

SEQ ID NO: 1527 - protein, 686 aa, Betatorquevirus sp.
MPYYYRRPRWRWRRRFFRKPVRFQRRRFRPKHRRPRTTLRRKRQRWVRKNLFFKRKKKKTLTLKQWQPELIRKSHIKGLFTLFACNEGRLSNNWPQYRDSFTPEFQPAGGGWGLFVFNLGALFQEFQRVRNYWTVSNINLPLVRYLYCTLKFYRADNVDYVVTYTTSYPMTDNELRHADAQPSRMLMRRHKIIVQSRKHTHRKPYVRKRIYPPKQIINRWFFQRQFVNTNLLMLTVTACDLTHYDIGYYDISNNISLKTLNYYKFPTLNYQRQNTTTPFQPKTGTYLYGVDPTKINFNNTTNPLQNIKYGDLIFLGQATRRTAGITFQNSTKTTWTEYVNTNNSGEWGNPFHEEYIHDQLAILQSNVQPTNFTSPEKNKGIEITKFTIMTEPMFETIRYNPDKDTGKDTMIYLVPNFQSYTEWKKPENEQLIFHGFPLWMLLWGWVDWQKKLALVNQIDQHYIVIIETKAFEPERPKYMLLDQEFLDNTLEFAQLAPDSPEEKPFLHDEQNWYPKFWYQQKSIEKICSIGPGTHKFKQRESIQAHLKYDFCFKWGGTPSTLETIADPSKQIQYPTPCDITSRIQIQDPTTDPRDLIYNFDVRRYELTQKATKRLTRPTDSDQPCSIFTDYFNPAPPQQEKDLLQALIEAQTKKKEKEETLKLFQHLRERQQYIQQRLHRLIIQSIK

SEQ ID NO: 1528 - protein, 109 aa, Betatorquevirus sp.
MSDYVKPSEYTNYQKETAWINDIHHVHDIFCFCDNTVNHLLQCLLMRGAQFNLTKQQRRLLQKCLITTEDQDGDGDGASSENQSASKEEDFDLNIGDLEQLFAENDKDG

SEQ ID NO: 1529 - protein, 131 aa, Betatorquevirus sp.
LFNFYRLLQPSTTTTRKRPTTSTHRSTNKEKRKRGDTQALPTPQRATTVYPAATPQTNNTKYKIINSHCKVSMFTSDNKIKPRRFTPQEYQWELWQAKAFCRPPRQFFGDAPTYPWLPPTPLVNFDLKYKE

SEQ ID NO: 1530 - DNA, 3038 bp, Betatorquevirus sp.
cgggagccgaaggtgagtgaaaccaccgtagtctaggggcaatcgaaggtgagtgaaaccaccgtagtctaggggcaattcgggctagatcagtctggtggaacgggcaagaaacttaaaaatatttttactttacagatgtcaagcttctttaaagacagccaatacacaaagtttcaaaaagaaactcaatggcttaacaactgcatgggaagccacgacctcatctgtttctgtgaccatccctggcaacatcttcttcagtgcctgttaaacagaggatcctactttgagttaagcaaaaaagatattagaataatacaaaaatgcctccttactaccgccgaaggttctacaactacccaagaagaagaaaagccaactacttcagatacaaaagattcaggtttcgacctcgacgttggagacctagaaaccttattcgcagaagacgacgaaaaacaagggtaagaaaaagatataacttttacaaaagaaaacttaaagccttaccgctaaaacaatggcaacctgaactaattaacaaatgcagtattaaaggactatttactttatttgcttgcaatgaaggaagaggctcaaacaattatccacaatatagagactcctttgtacctatatttcaacctggagggggagggtggggaatatttgtatttaatcttggagcatttttcgatgaatttttaagagtaagaaattattggactgtaactaatgtagacaaacctttatgtagatacttgtattgtaaactaagattttatagagctgaaaattgtgactatgttgtatactatacaagaaactaccccatgacagacaatgaatttagacatgcagacgctagcccaagtagaatgctaatgagaaaacacaaaataatagtacagagcagacaacacacacacaaaaaaccatacattaccagaaaaatttatccaccaaaacaactcataaacaaatggttttttcaaagagattttgtaaatacaaacctattaatgctaacagctacagcatgttctcttaccaactatgacataggcccgaaagacatatcaaacaacataacattaagaacattaaactacataaaatttaaatcactaaactttcaaagacaacatacaacagaaccatatcaaccaacaaatggcacttacttttaccatgtagaaacaacaaaaatacaatggaacgaaccaacaaaaatgttagaaaacataacatacggagacttaacatttttaggtcaggcaacacgaagaatagaaggcattagctttagagacagcaaaaaagacaaatggattgactatgttaaatcagacaacagtgcagaatggggaaatatattttatgaaagtattttacatgacgaagtaacacttttacaaagcaacatacaaccaagtggcttaacccaagctacagaagcaaagtcaaatacaaaaattacagcaactcaatttacaattgttacagaaaacatatttattacagtaaggtacaacccagacaaagacacaggaaaaaacacaaaaatatatttagtccccaactttcaaaactacaatgattggacagaaccagaaaatgaccaactaaaatttcatggctttcctttatggatgttactatggggatggccagactggcaaaaaaaattaggcctagtaaaccaaatagaccaacactacataattataatagaatctgaagctttcgaaccaaaactaaacaaatacatgtttttagatgatgaatttatcacaaacacattagaatttccagaccctgacccacatgcaaccaatcaaaagccactattacacgatgaacaaaactggtacccaaaattctggtaccaacaaaaaagcataaacaaaatatgcatgtcaggaccagcaacacacaaatttaaaaacaatgaaagcatacaagctcacatggaatatatttttcgttttaagtggggcggaacatcttcaaccatggaaacaattgcagacccaagcaaacagccaaaatatcccacaagcgataacatcttatcaacaattcaaatccagaatccagcaacagacccaagagactttatctacccctttgactttagaagacactgcctcacacaaaaagcagctaccagacttacagaaccaagaaatgacgaacctgttccattatttacagacccatggaatccaatcccatactacccacaagaaaaagacatcattcaagcattcatcgaagcacagagcaagaaagaagagaaagcacagaacatccagcagttcatcgtcctccgaaaccagcaacaactactccagcagcgaatcaacagactaattatacaaagtacaaaataataaatacaaactgtacaattgaactttttccaaaaccaaaaaaaaacaggagatttactcctgaagagtttgaacaagaactagaaatatcaaaactgtttaaaagaccgcctagaactttcttttatgataccccattttatccttggttccccccaacaccacttgttaattttgacttaaaatacaaagaataaaattcaaggccagcattatttcactctcggtgtccatttattaaagtttcaacttaaataaacatccaccactctcccaaatacgcaggcgctgtaagggggctccgcccccttaaacccccagggggggtaaaccccccctaaaccccccctaatgtaaaagaaaaagggaacttacaccataaaccacataatttgaatggctgaccacaaactgacaggaaaaccacaaaatttacattgccgaccacaaactgccaattacttcctcatattactgtacttccccaaaattttataaatattcatacaattaattattaaacactgtaattccggggaggagtcaacaaactatataactaaatacacttccgaatggctgagtttatgccgccagacggagtaagcatcacttcagtgactgcgagctgatcttggg

SEQ ID NO: 1531 - protein, 690 aa, Betatorquevirus sp.
MPPYYRRRFYNYPRRRKANYFRYKRFRFRPRRWRPRNLIRRRRRKTRVRKRYNFYKRKLKALPLKQWQPELINKCSIKGLFTLFACNEGRGSNNYPQYRDSFVPIFQPGGGGWGIFVFNLGAFFDEFLRVRNYWTVTNVDKPLCRYLYCKLRFYRAENCDYVVYYTRNYPMTDNEFRHADASPSRMLMRKHKIIVQSRQHTHKKPYITRKIYPPKQLINKWFFQRDFVNTNLLMLTATACSLTNYDIGPKDISNNITLRTLNYIKFKSLNFQRQHTTEPYQPTNGTYFYHVETTKIQWNEPTKMLENITYGDLTFLGQATRRIEGISFRDSKKDKWIDYVKSDNSAEWGNIFYESILHDEVTLLQSNIQPSGLTQATEAKSNTKITATQFTIVTENIFITVRYNPDKDTGKNTKIYLVPNFQNYNDWTEPENDQLKFHGFPLWMLLWGWPDWQKKLGLVNQIDQHYIIIIESEAFEPKLNKYMFLDDEFITNTLEFPDPDPHATNQKPLLHDEQNWYPKFWYQQKSINKICMSGPATHKFKNNESIQAHMEYIFRFKWGGTSSTMETIADPSKQPKYPTSDNILSTIQIQNPATDPRDFIYPFDFRRHCLTQKAATRLTEPRNDEPVPLFTDPWNPIPYYPQEKDIIQAFIEAQSKKEEKAQNIQQFIVLRNQQQLLQQRINRLIIQSTK

SEQ ID NO: 1532 - protein, 110 aa, Betatorquevirus sp.
MSSFFKDSQYTKFQKETQWLNNCMGSHDLICFCDHPWQHLLQCLLNRGSYFELSKKDIRIIQKCLLTTAEGSTTTQEEEKPTTSDTKDSGFDLDVGDLETLFAEDDEKQG

SEQ ID NO: 1533 - protein, 123 aa, Betatorquevirus sp.
MESNPILPTRKRHHSSIHRSTEQERRESTEHPAVHRPPKPATTTPAANQQTNYTKYKIINTNCTIELFPKPKKNRRFTPEEFEQELEISKLFKRPPRTFFYDTPFYPWFPPTPLVNFDLKYKE

SEQ ID NO: 1534 - DNA, 3038 bp, Alphatorquevirus sp.
cgcgcgtgtcagaccacttcgggctcgcgggtcaaggggcaattcgggctcgggactggccgggctatgggcaaggctcttaaaaaagcatgtttctcggcaggcattggagaaagaaaagggcactgctactgctaccggtgccagctaaaccgaaagcactttctcgacagatgagctggagcagacccgttcacgatgagcgcggaattcagcgcaactggttcgagggggtcattcgcacacacgctgcttgctgtggttgtggtaatgcttgtactcatttggctgctctggcgcagaggtacggatacccttccctaccttcgcataccccgcgacccggcacctcgacacctgtgagcaccccggagcacatccgtagagcccgggccctgcccgcggctccggaccacccccctgccctgccatggcatggggatggtggaagagacggcggcgcggctggttccgacggcggtggacccgtggcagaattcgcagaagatggcttagacggacttatcgccgccctcgacgacgaacagtaaggaggcgcagacggaggaggagggggagacgaaaattcagacggtacagacaaaaaagacgctaccgcagacgtaaaaaaactcaaaaaattaaactgacacaatggcaaccagccaaagtaaaacgctgctttatgatagggtattttcctactgttatccagggacaaggacggtggtcagaaaactttaccagtcacatagaagataaggtggccaagggaccctttgggggcggacacagcactagcaggtggtctctaaaagtactgtacgaggagaaccagagacaccacaacttctggacatccagtaacaatgacctagaactagccaggttttttggcagctcctggaggttttacagacacgacacacaagactacatagtaacctggaacaggagggctcccctaggaggaaacatactgacagctcctaacatgcacccgggaatagccatgctaagcaaacacaaggtggtggtcccaagtaaactaactagacccaagggcaaaaatagcattaaggttaatataaaaccccccactacattcatagacaagtggtacttccagaaggacatatgtgacctcacattgctaaacttgaacgttgtaacatgtgacctgcggtttccgttctgctcaccacaaactgacaacatttgtgtaaccttccaggtgcttgcaccaatatacaacgagttcctctctataactgcaaaacaactaaccgcaacggggtggaaagactactataaaacttttttaaacaaagccatccctgcagacaaagagagaaaagcaaacatattaaacacttttttaacagagggatcatacagacgaccacaagtagacaaatataaaaagccaccagctgagaatgagtactatttacctaaagatgcacaatggggagatgcaattcacattattaatatgacggaaactgctccaaatcaaactgcacaaactagaacacagttaattgaaaaaatacaaaagaatgcagaaaatgtattaaacaaagtaaaccaagaattaaaagaacataacataacagaggcacaacacggtttatttacacattggacaggcatatacggacctccatttctagactacaacagaataagtccagaaattagaggactatacaaagacataatatacaaccccttaatagacaaaggagtaggcaaccatgtatgggtagactactgcagcaaagcaactgctgagtactcagaaactcaaagcaaatgccacatagcagacctaccgctatggtgtgcactatttggatacgcagactgggtaaaaaaagacacaggcaactggggcatagtagactgggccagagttcttattatatgtccttacacttttccaaaactatatgacagcacaaatcctaacacaggctttgtagtaatagggtataactttgccagaggagctatgcccgacggaagcaaatacgtcccaatagctataagacacaagtggtaccccactatgttaaaccaacaacaagtacttgaggacattgctttaagtggaccgtttgcaaacagagacaaagtacctagcgtacaactgactgccaagtacaagttccgatggcattttggtggcaatcctgtttccgaacaggttattaaggacccgtgccaacagcccaccttccaaatgcccggaaccggtacactccctcgcagaatacaagtggcggacccgaaatacctcgggccccaatacaccttccactcgtgggactacagacgtgacttctttaacagaaagactattaagagaatgtcagaacaaccagaaacttttgagtctatattctcaggcacaaaaaaaccaagggtggacctcgacaaaatccagctgcaagaagacaactattcccaaaaccaaagaaaacagaaaccgtgggaagacagcgagacccagacagagagcgaagtcccatcagaagaagagacgcagaacctacagcagcagctccaacagcagctcagagaacaaaagcagctcagacaaggaatcaactgcctcttcgagcagctgataaaaacccagcagggagttcatatagatccctcccttgtataggcccaaaagccttacttttcccagagagggcacccagaacctactctaagggagactgggaaacagagtatcaggcctgcagagcgtttgacagaccccctagaagcaatctgtcagactcaccctactatccttactttccaccaccccccgaaaaattctatgtaacctttaagcttggcttcaaataaacaaggccgtgggactttcacttgtcggtgtctccttataaaagtcactaagcactccgagcgaagcgaggagtgcgaccccctgccctgggcccacttcttcggagccgcgcgctacgccttcggctgcgcgcggcacctcagacccccgctcgtgctgacacgct

SEQ ID NO: 1535 - protein, 749 aa, Alphatorquevirus sp.
MAWGWWKRRRRGWFRRRWTRGRIRRRWLRRTYRRPRRRTVRRRRRRRRGRRKFRRYRQKRRYRRRKKTQKIKLTQWQPAKVKRCFMIGYFPTVIQGQGRWSENFTSHIEDKVAKGPFGGGHSTSRWSLKVLYEENQRHHNFWTSSNNDLELARFFGSSWRFYRHDTQDYIVTWNRRAPLGGNILTAPNMHPGIAMLSKHKVVVPSKLTRPKGKNSIKVNIKPPTTFIDKWYFQKDICDLTLLNLNVVTCDLRFPFCSPQTDNICVTFQVLAPIYNEFLSITAKQLTATGWKDYYKTFLNKAIPADKERKANILNTFLTEGSYRRPQVDKYKKPPAENEYYLPKDAQWGDAIHIINMTETAPNQTAQTRTQLIEKIQKNAENVLNKVNQELKEHNITEAQHGLFTHWTGIYGPPFLDYNRISPEIRGLYKDIIYNPLIDKGVGNHVWVDYCSKATAEYSETQSKCHIADLPLWCALFGYADWVKKDTGNWGIVDWARVLIICPYTFPKLYDSTNPNTGFVVIGYNFARGAMPDGSKYVPIAIRHKWYPTMLNQQQVLEDIALSGPFANRDKVPSVQLTAKYKFRWHFGGNPVSEQVIKDPCQQPTFQMPGTGTLPRRIQVADPKYLGPQYTFHSWDYRRDFFNRKTIKRMSEQPETFESIFSGTKKPRVDLDKIQLQEDNYSQNQRKQKPWEDSETQTESEVPSEEETQNLQQQLQQQLREQKQLRQGINCLFEQLIKTQQGVHIDPSLV

SEQ ID NO: 1536 - protein, 153 aa, Alphatorquevirus sp.
MFLGRHWRKKRALLLLPVPAKPKALSRQMSWSRPVHDERGIQRNWFEGVIRTHAACCGCGNACTHLAALAQRYGYPSLPSHTPRPGTSTPVSTPEHIRRARALPAAPDHPPALPWHGDGGRDGGAAGSDGGGPVAEFAEDGLDGLIAALDDEQ

SEQ ID NO: 1537 - protein, 84 aa, Alphatorquevirus sp.
LPLRAADKNPAGSSYRSLPCIGPKALLFPERAPRTYSKGDWETEYQACRAFDRPPRSNLSDSPYYPYFPPPPEKFYVTFKLGFK

SEQ ID NO: 1538 - DNA, 3038 bp, Alphatorquevirus sp.; identical to SEQ ID NO: 1534

SEQ ID NO: 1539 - protein, 749 aa, Alphatorquevirus sp.; identical to SEQ ID NO: 1535

SEQ ID NO: 1540 - protein, 153 aa, Alphatorquevirus sp.; identical to SEQ ID NO: 1536

SEQ ID NO: 1541 - protein, 84 aa, Alphatorquevirus sp.; identical to SEQ ID NO: 1537

SEQ ID NO: 1542 - DNA, 3036 bp, Betatorquevirus sp.
cgggagccgaaggtgagtgaaaccaccgtagtctaggggcaagaaggtgagtgaaaccaccgtagtctaggggcaattcgggctagatcagtctggtggaacgggcaagaaacttaaaaatatttttactttacagatgtcaagcttctttaaagacagccaatacacaaagtttcaaaaagaaactcaatggcttaacaactgcatgggaagccacgacctcatctgtttctgtgaccatccctggcaacatcttcttcagtgcctgttaaacagaggatcctactttgagttaagcaaaaaagatattagaataatacaaaaatgcctccttactaccgccgaaggttctacaactacccaagaagaagaaaagccaactacttcagatacaaaagattcaggtttcgacctcgacgttggagacctagaaaccttattcgcagaagacgacgaaaaacaagggtaagaaaaagatataacttttacaaaagaaaacttaaagccttaccgctaaaacaatggcaacctgaactaattaacaaatgcagtattaaaggactatttactttatttgcttgcaatgaaggaagaggctcaaacaattatccacaatatagagactcctttgtacctatatttcaacctggagggggagggtggggaatatttgtatttaatcttggagcatttttcgatgaatttttaagagtaagaaattattggactgtaactaatgtagacaaacctttatgtagatacttgtattgtaaactaagattttatagagctgaaaattgtgactatgttgtatactatacaagaaactaccccatgacagacaatgaatttagacatgcagacgctagcccaagtagaatgctaatgagaaaacacaaaataatagtacagagcagacaacacacacacaaaaaaccatacattaccagaaaaatttatccaccaaaacaactcataaacaaatggttttttcaaagagattttgtaaatacaaacctattaatgctaacagctacagcatgttctcttaccaactatgacataggcccgaaagacatatcaaacaacataacattaagaacattaaactacataaaatttaaatcactaaactttcaaagacaacatacaacagaaccatatcaaccaacaaatggcacttacttttaccatgtagaaacaacaaaaatacaatggaacgaaccaacaaaaatgttagaaaacataacatacggagacttaacatttttaggtcaggcaacacgaagaatagaaggcattagctttagagacagcaaaaaagacaaatggattgactatgttaaatcagacaacagtgcagaatggggaaatatattttatgaaagtattttacatgacgaagtaacacttttacaaagcaacatacaaccaagtggcttaacccaagctacagaagcaaagtcaaatacaaaaattacagcaactcaatttacaattgttacagaaaacatatttattacagtaaggtacaacccagacaaagacacaggaaaaaacacaaaaatatatttagtccccaactttcaaaactacaatgattggacagaaccagaaaatgaccaactaaaatttcatggctttcctttatggatgttactatggggatggccagactggcaaaaaaaattaggcctagtaaaccaaatagaccaacactacataattataatagaatctgaagctttcgaaccaaaactaaacaaatacatgtttttagatgatgaatttatcacaaacacattagaatttccagaccctgacccacatgcaaccaatcaaaagccactattacacgatgaacaaaactggtacccaaaattctggtaccaacaaaaaagcataaacaaaatatgcatgtcaggaccagcaacacacaaatttaaaaacaatgaaagcatacaagctcacatggaatatatttttcgttttaagtggggcggaacatcttcaaccatggaaacaattgcagacccaagcaaacagccaaaatatcccacaagcgataacatcttatcaacaattcaaatccagaatccagcaacagacccaagagactttatctacccctttgactttagaagacactgcctcacacaaaaagcagctaccagacttacagaaccaagaaatgacgaacctgttccattatttacagacccatggaatccaatcccatactacccacaagaaaaagacatcattcaagcattcatcgaagcacagagcaagaaagaagagaaagcacagaacatccagcagttcatcgtcctccgaaaccagcaacaactactccagcagcgaatcaacagactaattatacaaagtacaaaataataaatacaaactgtacaattgaactttttccaaaaccaaaaaaaaacaggagatttactcctgaagagtttgaacaagaactagaaatatcaaaactgtttaaaagaccgcctagaactttcttttatgataccccattttatccttggttccccccaacaccacttgttaattttgacttaaaatacaaagaataaaattcaaggccagcattatttcactctcggtgtccatttattaaagtttcaacttaaataaacatccaccactctcccaaatacgcaggcgctgtaagggggctccgcccccttaaacccccagggggggtaaaccccccctaaaccccccctaatgtaaaagaaaaagggaacttacaccataaaccacataatttgaatggctgaccacaaactgacaggaaaaccacaaaatttacattgccgaccacaaactgccaattacttcctcatattactgtacttccccaaaattttataaatattcatacaattaattattaaacactgtaattccggggaggagtcaacaaactatataactaaatacacttccgaatggctgagtttatgccgccagacggagtaagcatcacttcagtgactgcgagctgatcttggg

SEQ ID NO: 1543 - protein, 690 aa, Betatorquevirus sp.; identical to SEQ ID NO: 1531

SEQ ID NO: 1544 - protein, 110 aa, Betatorquevirus sp.; identical to SEQ ID NO: 1532

SEQ ID NO: 1545 - protein, 123 aa, Betatorquevirus sp.; identical to SEQ ID NO: 1533

SEQ ID NO: 1546 - DNA, 3036 bp, Betatorquevirus sp.
cgggtgccgaaggtgagtgaaaccaccgtagtcaaggggcaatatgggcagaattagtctggcggactgggcaacaaacttaaaatataaatttttttacagatgtccgactatgtaaaaccttcagaatatactaactatcaaaaagaaacagcatggattaacgatatacaccacgtacacgacattttctgcttttgtgacaacactgtcaaccatcttcttcaatgtcttcttatgagaggagcccaatttaacctcaccaaacaacaaagaagactactgcaaaaatgccttattactaccgaagaccaagatggcgatggagacggcgcttcttcagaaaaccagtccgcttccaaagaagaagatttcgacctaaacataggagacctagaacaactcttcgccgaaaacgacaaagatgggtaagaaaaaacttattttttaaaagaaagaaaaagaaaactcttaccctaaaacaatggcaaccagaattaattagaaaaagtcatattaaaggactatttactttatttgcttgcaatgaaggacgcttaagtaataactggccacaatacagagactcttttactcctgaatttcaacctgcgggaggtggttggggactatttgtatttaatttaggagcattatttcaagaatttcaaagagtaagaaattactggactgttagcaatattaatttacctcttgtaagatatctttactgtaccttaaagttttatagagctgataatgttgattatgttgttacatatactactagctatcctatgacagacaacgaattaagacacgcagacgctcaaccaagcagaatgttaatgaggagacacaaaataatagttcagagtagaaaacacacacatagaaaaccatacgttagaaaaagaatctatccaccaaaacaaataattaacagatggttttttcaaagacagtttgttaacaccaatctactaatgcttacagttacagcttgtgacttaacacactatgatataggatactatgatatttccaacaatattagtttaaaaacattaaactactacaaattcccaacattaaactaccaaagacaaaacacaactacaccttttcaacccaaaactggtacatacctctatggagtagacccaactaaaataaactttaataatacaacaaatcctttacaaaacataaaatatggagaccttatatttttgggacaagctacacgcagaacagcaggcataacatttcaaaacagcactaaaacaacttggacagagtatgtaaacaccaacaacagcggagaatggggaaatccatttcatgaagaatacatacatgaccaattagcaatactacaatctaatgttcaaccaacaaattttacttcaccagaaaaaaataaaggcatagaaataacaaaatttacaataatgacagaacctatgtttgaaaccattagatacaatccagacaaagacacaggaaaagacaccatgatatacttagtacctaattttcaaagctatacagaatggaaaaaaccagaaaatgagcaattaatatttcatggctttccgctatggatgctattatggggatgggtagactggcaaaaaaaattagcactagtaaatcaaatagaccaacactatatagtaattatagaaacaaaagcatttgaaccagaaagaccaaaatacatgctactagaccaagaatttttagacaacactttagaatttgcacaactagcaccagatagcccagaagaaaaaccatttttacatgatgaacaaaactggtatccaaaattctggtatcaacaaaaatccatagaaaaaatttgttctataggcccaggaacacacaaatttaaacaaagagaaagcatacaagcacatttaaaatatgacttttgttttaagtggggaggaactccatcaacactcgaaacaattgcagacccctccaagcaaatacaatatcccactccctgtgacatcacttcgagaattcaaatccaggatccaacaacagaccccagggacctcatctacaactttgatgttaggagatacgaactcacacaaaaagcaacaaaaagactcacaagaccaacagactctgaccaaccttgttcaatttttacagactacttcaacccagcaccaccacaacaagaaaaagacctactacaagcactcatcgaagcacaaacaaagaaaaaagaaaaagaggagacactcaagctcttccaacacctcagagagcgacaacagtatatccagcagcgactccacagactaataatacaaagtataaaataataaactcacactgcaaagtgtctatgtttactagtgacaataaaataaaacctagaaggtttactccacaagagtatcaatgggaactatggcaagcaaaagccttttgtagaccacctagacaatttttcggagacgccccaacatatccatggttacccccaacacctcttgtaaactttgacttaaaatacaaagaataaaatttcaacgccagcaaaaattcactctcggtgtccatttattaaagttaaaacttatataaacatccaccactctcccaaatacgcaggcgcacagggggctccgccccctgaaacccccaggggggggtcccaaatacgcaggcgcacagggggctccgccccctgaaacccccaggggggggcaaagcccccccctaacccccccaaaacattaaccaacacaggaaaaccaccaaatttgcatggctaaccacaaacgttcagcggaaaccacaaaatttgcattgccgaccacaaacgattatgctaattaacttcccaaaaacactcttcaacttccctaaaaattaattaataatcaccatcactattacgtattataggaggagctacaaatatataaaagcaagtataccttcgaatggctgagtttatgctgccagacggagacgcgataacaactcgcggctaattctggg

SEQ ID NO: 1547 - protein, 686 aa, Betatorquevirus sp.; identical to SEQ ID NO: 1527

SEQ ID NO: 1548 - protein, 109 aa, Betatorquevirus sp.; identical to SEQ ID NO: 1528

SEQ ID NO: 1549 - protein, 131 aa, Betatorquevirus sp.; identical to SEQ ID NO: 1529

SEQ ID NO: 1550 - DNA, 3036 bp, Betatorquevirus sp.
cgggagccgaaggtgagtgaaaccaccgaagtctaggggcaattcgggctagatcagtctggcggaacgggcaagaaacttaaatattttttatatttacagatatgtcatttatttggaagaaaccaacatcctctgtgagacaactagaactaggatggatgaatttgatgtttagctcccacgatcaaatttgtcactgcgacgacccttggctacactttttaattattttaaacaaaaccggcgctgcaccaaaacctgaagaagaaattttgaatataaaatgccttattactggagaaaaagaaacctccgcaacgcgtacaaaagataccgtagaagaaggtggtttcttcgaaggggagttagaaaaccttttcaaagaagattctggagaaggaacctccgtagaagaaaatacaaggtaaaaagacttaaatttaaaaaaagaaaactacttaaacttaaacaatggcaacctgcctctattaaaaaatgtaaaattgtaggaattaaatgtctattacaaggaaatgtattaagtgctcaacataattatgctcaatatatatactcatatgtaccacctgaaaacccaggtggcggagggtggtctttaatggtattttccctaggaagcctatttgaagactatgatcacttacaaaatgtttggacaactagtaatagcggcttacctttggttagatatactggctgtactataaaactttttcaatctgaaaacacagactatgtattcacatatgatacttgctggcctatggtagatactccatacacacatgcagacagctctcctatgagaatgatccaaaaaagacataaagtaattatgcctagtaaacaaacaaaacaaagaagaaaaccatacaaaagaattaaaattaaacctccacaccaaatgattaacaaatggtactttcaaaaagacatatgtaaccaaccattactcttaacaacaactactgcaatatcactgttaaaaccatttgctggcacaaatagcctatcaaataacattacatttaaatgtttaaacacctttctatttaacaacccacactttcaacactttccagaaacagtaggatactcacacaaaattgtaaactcacaatccatgtttctttatgcaaccacagaaccaaaaccaacagaggacaaaaacatgaaagactggttactaaaattaatattcttaggaaatacagtagaaaatcaaccaggaaaacctatacatcaatggtatagtactaattctaatacaaagaaaaactggggaaacccattttaccacagatacttagaagacacatcagaaacttcatatacaatatatactagcaaacaaacaattgtaaacatagttaatcaactaaggggttcaactataactattcccaacacagattttcaagaaatttctagaccaatattttacacagttacatacaatcctgctagagatacaggactgaacaaaatttacctgttagaaacaagtaaaaccttaacttttgacgaaccagaaaataaaaacttagtatttgaaggttttccactttataatttaatatggggatggactgactttattagaaaactaaaaataataacaaacttaccacaaaatgcattactagtaattgtaacaaaaaactttgacgaccaaacactaaaaacatatgtacctatagatcaagacttcatagatggattagacccataccaaactgatcactcacatgaacaaacaaactactacaatagtttaaactggtttccaaaagtacaatttcaagaacaaactataaacaatattgctctaacatgtccattttcacctagaccaaacacctatgaatttttacaatgtttctgtaaatatacattttactttaaatggggaggttgtcctaaagtactacaaaaagctattgatccctgttcacagtctaaatggaccactcccgataacctcgaacaccgaattcaaatctgcgatcctaacaccgcaccacaaacagaactttactcttgggactgggactcagactttgttaaacaaaaaagtatcgaaagaatacaagagtatacaacaattgatgaaaatgtattccaacctacagaatcaaaatggtcagcaaaagcactcaaactccaagagaaagagacatccgaagaaaaagaggaggagaaactattcctcaagctccaccaactcagaaagcaacgactccacctcgaactcaagtgccgactcaaactaatggaattaaaatcaaaaattcaaacataaaagtaaagctgtttccagaaaccaagccaaaaaacagaagaatgacaccatgggaaaaacaagaagaaaaagaaatagcagctatctttttaagacctcaaagagattatatatttgacatgcctacctatcctatatttcctccaacacctaaaattccaaaagttaactttgatctaatgtttaaagaataaaattttcaaggccaacaatatacacttagtggtgtccatttatttaagttaaacttatataaacatccaccgcctccctaaaattcgggcgccaaaattcaaagggggctccgcccccttacacccccaagggggctccgcccccttacacccccaagggggctccgcccccttacacccccttattaatattcaacaggaaaaccacctaatttaaattgccgaccacaaaccgtctttaacttccctttttacacttacttccttttttaccacttattattcattacattaattaataatcaccgtaattccggggaggagcttactacctatataactaactacacttccgaatggctgagtttatgccgccagacggagacgggatcactttagtgactccaggctgatcttgggcgggagccgaaggtgagtaactacacttccgaatggctgagtttatgccgccagacggagacgggatcactttagtgactccaggctgatcttggg

SEQ ID NO: 1551 - protein, 679 aa, Betatorquevirus sp.
MPYYWRKRNLRNAYKRYRRRRWFLRRGVRKPFQRRFWRRNLRRRKYKVKRLKFKKRKLLKLKQWQPASIKKCKIVGIKCLLQGNVLSAQHNYAQYIYSYVPPENPGGGGWSLMVFSLGSLFEDYDHLQNVWTTSNSGLPLVRYTGCTIKLFQSENTDYVFTYDTCWPMVDTPYTHADSSPMRMIQKRHKVIMPSKQTKQRRKPYKRIKIKPPHQMINKWYFQKDICNQPLLLTTTTAISLLKPFAGTNSLSNNITFKCLNTFLFNNPHFQHFPETVGYSHKIVNSQSMFLYATTEPKPTEDKNMKDWLLKLIFLGNTVENQPGKPIHQWYSTNSNTKKNWGNPFYHRYLEDTSETSYTIYTSKQTIVNIVNQLRGSTITIPNTDFQEISRPIFYTVTYNPARDTGLNKIYLLETSKTLTFDEPENKNLVFEGFPLYNLIWGWTDFIRKLKIITNLPQNALLVIVTKNFDDQTLKTYVPIDQDFIDGLDPYQTDHSHEQTNYYNSLNWFPKVQFQEQTINNIALTCPFSPRPNTYEFLQCFCKYTFYFKWGGCPKVLQKAIDPCSQSKWTTPDNLEHRIQICDPNTAPQTELYSWDWDSDFVKQKSIERIQEYTTIDENVFQPTESKWSAKALKLQEKETSEEKEEEKLFLKLHQLRKQRLHLELKCRLKLMELKSKIQT

SEQ ID NO: 1552 - protein, 108 aa, Betatorquevirus sp.
MSFIWKKPTSSVRQLELGWMNLMFSSHDQICHCDDPWLHFLIILNKTGAAPKPEEEILNIKCLITGEKETSATRTKDTVEEGGFFEGELENLFKEDSGEGTSVEENTR

SEQ ID NO: 1553 - protein, 118 aa, Betatorquevirus sp.
MVSKSTQTPRERDIRRKRGGETIPQAPPTQKATTPPRTQVPTQTNGIKIKNSNIKVKLFPETKPKNRRMTPWEKQEEKEIAAIFLRPQRDYIFDMPTYPIFPPTPKIPKVNFDLMFKE

SEQ ID NO: 1554 - DNA, 3035 bp, Alphatorquevirus sp.
ctggtgcaacaggtgagtttacacaccgcagtcaaggggcaattcgggctcgggactggccgggccatgggcaagactcttaaaaagctatgtttctcggtaaaatctacagaaagaaaaggaaactgcttctgcaggctgtgcgtgctccacagacgccatcttccatgagccgctgttggtgtccccctcggggtgatgtctcctcccgcgagtctcgatggtaccaggcggttcgacaaagccacgatgctttttgtggctgtggtgattctattcttcatctttctcgtctggctgcacgttttaaccatcaaggacctccgacgccccccacggacgaccgtgcgccgcacaataccccagtgagacgcctgctgcctctccccagctaccccggcgagggcccccaggctagatggcctggtggggatggaggcgccgctggtggcgaccgaagagaaggtggagatggcggcgcgcgcgccgccgaagacgaataccagcccgaagacctagacgagcttttcggcgctatcgaacaagaacagtaaggaggaggcgaagggggaggcggaggggctaccggcgccgttacagactgagacgctatgccagacgcaggttccgacgcaaaaagatagtactgactcagtggaacccccagactaccagaaaatgtataataaggggcatgatgccagtactgtgggccggcatgggtacggggggcagaaactatgcagtgaggtcagatgactatgtggtaaacaaagggttcgggggctccttcgccacggagaccttctccctgaaggtcctctatgaccagttcctcaggggcttcaacagatggtcccacactaacgaggacctagacctggcccgctacaggggctgcaggtggactttttacagacataaacacacagactttatagtgtactttacaaacaatccccccatgaagaccaaccagttctccgcgcccctaacgacccccggcatgctcatgcgcagtaaatacaaggttctgatccccagcttccagaccagacccaagggtcgcaaaacagtgtccgttagaataaggccccccaaactatttcaagacaagtggtacacccagcaagacctgtgttcagttcctcttgtccaactgaacgtaaccgcagctgatttcacacatccgttcggctcaccactaactgaaactccttgcgtagagttccaggtgctgggtgacttgtacaatacatgtctcaatatcgaccttccgcaattttcagaatcaggagaaataactagcaactactcaaaacctaacagaactaacttaacagaattatataaagaattattcacaaaacccacatcaggccactactggcagacattcataaccaacagtatggtcagggcacacatagatgcagaccaagctaaacaggcacaaagaacaaccaccacacacacatacaaccaagaccccttccccacagtacctcctaaagcaaactttgctaactggaaaaaaaagttcacagacacaagagacagctcctttctattcgccacttaccatccccaagctataacagaaacaattaaacgaatgagagacaacaactttaaactacaaacaggccccaatgacaagtatggagactacacagcacagtaccaagaaaacacacacatgctagactactaccttggcttttacagccccatattcctctcagacggcaggtctaatgtagaattcttcactgcctacagagacatagtatacaatcccttcttagacaaggcccagggcaacatggtgtggtttcagtaccacacaaagacagacaacaagtttaaaaaaccagagtgccactgggagatcaaagacatgcccttgtgggccctcctaaacggatatgcagactacttagagactcaagtacaatatggggacctcagtaaagaaggcaaagtcctcatcaggtgtccctacaccaagccggcactagtagaccccaaagacgacactgcaggatatgtagtctacaacagaaactttggcagaggcaagtggatagacggaggtggctacatccccctgcacgacaggacaaagtggtacgtgatgctcagataccagacggacgtcttccatgacatagtgacctgtgggccctggcagtacagagacgacaacaaaaacagccagctagtggccaaataccgcttcagctttatatggggaggtaacactgtccactctcaggtcatcagaaacccgtgcaaagacaaccaagtatccggtccccgtcgacagcctagggatgtacaagtcgttgacccgcaactcatcacgccgccgtgggtcctccacagcttcgaccagcgaagaggcctctttactgaaacagctctcagacgtctgctcaagcaaccactacctggcgagtatgctgttagcaccctcaggacacccctcctctttctaccctcagaataccaaccagaagacggcgctgcagaaagcgcctcaggttcaccggccaaaagaccccgtatctggtcagaagagagccagacggagacgatctcctcggaggagaacccggcggagacgacgagggagctcctccagcgaaagctccgagagcagcgagcactccagttccagctccagcacttcgcggtccaactcgccaagacccaggcgaatctccacgtaaatcccctgttatccttcccccaataaacaaggtctttctgtttcccccagacggtcccaagcccatcgtgggcaaagaggcctggcaggacgagtaccaaacctgcaaggtctggaacagacctcccagaacccaccacacagacacccccttctatccctgggccccccacaacttccgtgtaagcttcaaacttggcttccaataaaattactaggccgtggaactctcactggtcggtgtctacctcttaaggtcactaagcactccgagcgtcagcgaggagtgcgacccttcccc

SEQ ID NO: 1555 - protein, 780 aa, Alphatorquevirus sp.; identical to SEQ ID NO: 1421

SEQ ID NO: 1556 - protein, 154 aa, Alphatorquevirus sp.; identical to SEQ ID NO: 1422

SEQ ID NO: 1557 - protein, 123 aa, Alphatorquevirus sp.; identical to SEQ ID NO: 1423

SEQ ID NO: 1558 - DNA, 3035 bp, Alphatorquevirus sp.
agtcccccgctcgtgctgacacgcttgcgcgtgtcagaccacttcgggctcgcgggggacgggagctttattaaacagactccaggttgccattggacactggagctgtgaatcagtaacgaaagtgagtggggccagacttcgccataaggcctttatcttcttgccatttgtccgtgtcggggattgccataggcttcgggcttggttttaggccttccggactacaaaaaacgccatattggtgacgtcacggccgccattttaagtaagcatggcgggcggtggtgtcaaatgtcaaaggtcacaacctgtcatgcttgcacaaaatggcggacttccgcttccgggtcagccgccatatttggtcacgtgactacctacgtcacgaccgccattttagttcacaaaatggccgacttccttcctcttttttaaaaaaaagcggaagtgccgcagcggcggcggggggcggcgcgctgcgcgcgccggtggtggagaaagcggtggacccgtggccgacttcgcagacgatggcctagacgacctcgtcgccgccctcgacgaagaagagtaaggaggaggaggaggtggaggagagggcgacccagacgcagactgtacagacgctacagacggtacagacgaaaacgaaagagggctaaaataactataagacagtggcaaccagccaaaactagaaaatgctacataaggggctacatgcccgcccttatgtgcggctggggagcctacagcagaaactacagcagtcacttagaggacaaaataactgcgggaccctatggtgggggacacagcactatgagattctctctacaggtgctctacgaagagcacctgaaacaccacaactactggacgcgcagcaaccaggacctagaactggccctgtactatggctgcacaattaagttttacagggaccccgaaacagactttatagttacataccagagaaaatctcctctgggaggtaacataatgacagcaccatcactacacccagcagaagccatgcttacaagaaacaaaatactaatacccagtctacaaactaaaccaaagggcagaaaaactgtaaaagttaacatagcaccccccactctatttgtgcacaagtggtactttcaaaaggacatatgtgacttaacactgttcaacttgaacgttgttgcggctgacttgcggtttccgttcggctcaccacaaactgacaacatttgcataaccttccaagttctctcttccgtttacaacaactttctctccataacccatacttcctcaaccagtgacactataatagacgaatttttaaaactagcaattccagacacacctaaaaaaagacactggaatgttttaaatacatacaaaacagaaggttgcttttcacacccacaactgcaaaaatacaaaatacctcaagcaggcataggtgctgagaattactttagcacaccagacggactatggggagaccctatatacagcaaaaacaatacaggcgcagagcaatcagcagagaacattcgaactacaattaaaaacaacatgaaatcttactttaaaaaaatacaagaggagagtacaataataacaaagggagacaaattattctgtcacctcacaggcatattttcaccaccctggctaaatataggcagagttagtagagagtttccaggcctatataatgacgttatatacaacccatggacagacaaaggctcaggcaacaaagtatggctagacagcctaacaaaacaagacaacatttacaaaaaaggacaaagtgtccttcttatggaagacatgcccttatacataatgctaaacggatacatagactgggccaaaaaagaactaaacaactggcagatgcaaaccatgtacagagtaatgatagtatctccctatacttttcccagactatatttagaaaccaatccctacaacgggtatgtcatgtactcacaagcctttggagcaggccttatgccagacaaagtatcaattccacccatagcatggagaggcaagtggtacccacacgtactacaccaagaagcagtaataaatgacatagtgcagtgtggaccctttgcaccaaagatacaaaaaccaaacatgcagctcaacatgaaatactcatttagattcacatggggcggtaatcctatttccgcacagattgttaaagacccctgcacccagcccacctttgaaattcccggtggcggtaacatccctcgcagagtacaagtcatcaatccgaaattcctcgggcccaactacagtttcagatcatttgacatacgacgtgacctctttagcgacaagagtcttaaaagaatctcagaacaaccagagacttttgagtctttattctcaggtggcaaacgccccaggatcgatctacccaagtacgtcccgccagaagaaaactccgatacccagcagaggcaacaaagagaacagaggccgtggacgagcgaaagcgaaagcgaagcagaagcccaagaagagacgccgcagggctcggtccgagagcagctccagcagcagctccaagagcagcttcaactccgaaggggactcaagtgcctcttcgagcagctagtgagaacccagcagggagtccacgtagacccctgcctcgtgtaggccccgagcagtggctctttccagagagaaagcccagaccccctcctacttccggggactgggccatggagtaccttatgtgtaagataatgaacaggcctccccgcactcacctcacagacccgccattctacccttactgcaaaaacaattacaatgtaacctttcagcttaactacaaataaaagcctgcttctctgctcaaggccgtgggagtttcacttgtcggtgtctacctctaaaggtcactaagcactccgagcgccagcgaggagtgcgacccttccccctgactcaacttcttcggagccgcgcgctacgccttcggctgcgcgcggcacctc

SEQ ID NO: 1559 - protein, 690 aa, Alphatorquevirus sp.
LYRRYRRYRRKRKRAKITIRQWQPAKTRKCYIRGYMPALMCGWGAYSRNYSSHLEDKITAGPYGGGHSTMRFSLQVLYEEHLKHHNYWTRSNQDLELALYYGCTIKFYRDPETDFIVTYQRKSPLGGNIMTAPSLHPAEAMLTRNKILIPSLQTKPKGRKTVKVNIAPPTLFVHKWYFQKDICDLTLFNLNVVAADLRFPFGSPQTDNICITFQVLSSVYNNFLSITHTSSTSDTIIDEFLKLAIPDTPKKRHWNVLNTYKTEGCFSHPQLQKYKIPQAGIGAENYFSTPDGLWGDPIYSKNNTGAEQSAENIRTTIKNNMKSYFKKIQEESTIITKGDKLFCHLTGIFSPPWLNIGRVSREFPGLYNDVIYNPWTDKGSGNKVWLDSLTKQDNIYKKGQSVLLMEDMPLYIMLNGYIDWAKKELNNWQMQTMYRVMIVSPYTFPRLYLETNPYNGYVMYSQAFGAGLMPDKVSIPPIAWRGKWYPHVLHQEAVINDIVQCGPFAPKIQKPNMQLNMKYSFRFTWGGNPISAQIVKDPCTQPTFEIPGGGNIPRRVQVINPKFLGPNYSFRSFDIRRDLFSDKSLKRISEQPETFESLFSGGKRPRIDLPKYVPPEENSDTQQRQQREQRPWTSESESEAEAQEETPQGSVREQLQQQLQEQLQLRRGLKCLFEQLVRTQQGVHVDPCLV

SEQ ID NO: 1560 - DNA, 3035 bp, Betatorquevirus sp.
cgggtgccgaaggtgagtgaaaccaccgtagtcaaggggcaatatgggcagaatcagtcttggcagaacgggcaagaaactaaaatatatttattttttagatatgacccatcgttatataccaactaattctacatatagacaaaaccaattaaaatggctgaatattttacaccatgttcacggttccttctgcgactgtcccaatggaatggcacacactaccgccttaatctttgaaaataatccggatttacaattctcaccacctgaaaaagatataataaaatcatgcctttctggagaaaatactggagacaaagatggagaaaaccatggcgtcgacggttttacaggagaagaactagagctccttttcaaagaaccagatggagaagacgccgccgcagaccggtaagaagaaaactaaaaactattaaactaaaacaatatcaaccgccttatattaaagtactaaaaataaaaggactctacccaataattttgggtacaagagaaagagtggccaacaacttaaactgttactttgaaagtactgcgccacactgggtaccgggagggggatgcttttcaatatgtaactttagcttaatgactttgtataaagaacatctagatgtaagaaactggtggacaactggtaatgaaaattatccacttataagatacttaggatgtgatattagactgtacagagaagaaaacatagactatctattttactataatagacagccacctatgacagcctcattaaccacataccaaagcacacaacctatggcaatgatgctaaataaacacacagtaaaaatctcatgtaaaaaaaatactaaaaacaaaaaaccatacaaaagattaagaataccaccacctacacaattacaaaacaagtggtattttcagtttgatattgcaaccacaccattactacaaacaatggcaacagcatgctcgtttgaccgcatgtttctaaacagtggagcaatatcaaccacaataggctttacaacacttgacacaaacggcttcttaaaccacaattatgacagaaccacaaggggctactcaccaagaccaggaacacttttattcaaaactacaaatggtgagtacgacatacaaaaaatacaaataggagaattaatcttcttaggagaaacacaagacttaacagacggtacacaactaaaatcaatacctccagcacaaagtgtaccaaacataagtaatcccactgaatttcaaaaaaaactttacaatgcaagcataaaacatgaacactggggaaatgtatttaaatcatccactttttatggagaggagagaatgatagaaacaaacatgagttgggaagacataataaaaacgtatactgcctcaactaaaccactaaacacagggtggacacttaaaaccactaaatggggagaatgcagatacaatccctatgcagatcatggaaaaggaaacatagtgtatttacttaaaataaactcaggactacaccccacagaatggggaccaccaacagacaaagacgtagttgcacaagacttaccactacacacacttttatggggatatttagactaccaaagaaaatgtcaagaatacagagacatagacacaacaacaattatagttttcaaaagcccttttattttaccaaaaacatacacattttattgcccactagaccaagactttttagatggaaacagcccctatagaccatcacaacacataattccatcagattaccagcattggcatccaaaagtaagattccaagtacaaacaataaataatatatgcttatcgggaccaggtactgtaaaactaccacctcaagtttcctgtgaagctcacattgtatataattttcgctttaagattggagggcaaccagcaccaatgtcaaacctcaccaaaccagacgaacaaccaaaataccccatacccaataatctcctccaaacaccttcgttacagagtccaacaacgccatttacccagctcttgtggagctttgatgaacgcagaggggaactcactaaaaaagctacagacagaattacagactaccaaagatctgaaacatcttttttaccaattacagaaacaagcaactcatgccctacaaccctccaagtactcaaagaaacacaagagacgacatccgaggaagaagaagaaacatcgatccaggaacagctccacaaccagcgaagaaagcaaaaacagctcagacagcgaatcaacctcctcctccagcacctagcaaatttacaataaaagaaactgtaataaaagtaaaacttttccctgatccccctcaaaatcgcagaatgactgcaaaagaatatgaggacgaactatttgatgctaaatgctggttaagagtgcctagaactcatatatttgatagacctacttatccatgggtaccccaagattctaaatttactgtaaactttgaccttaacgcgccacaataaagctacgcctgcaaacttccacttgaggtgtccatttaatataaataaacttatataaacatccaccacactccctaatacgcaggcgcaaagggggctccgcccccttaaacccccagggggggcaaagccccccctacaacccccctaataaatattcaacaggaaaaccacctaatttaaattgccgaccacaaaataaacatccaccacactccctaatacgcaggcgcaaagggggctccgcccccttaaacccccagggggggcaaagccccccctacaacccccctaataaatattcaacaggaaaaccacctaatttaaattgccgaccacaaacagccatatgcaaatttacttccccaaaaaatacaacacgcccactatttaattaataaacaacatcatagtaggcgttcccttcaaaactatataacaaacaacacttccgaatggctgagtttatgctgccagacggagcggagagaaaacctctacgctgattctggg

SEQ ID NO: 1561 - protein, 675 aa, Betatorquevirus sp.
MPFWRKYWRQRWRKPWRRRFYRRRTRAPFQRTRWRRRRRRPVRRKLKTIKLKQYQPPYIKVLKIKGLYPIILGTRERVANNLNCYFESTAPHWVPGGGCFSICNFSLMTLYKEHLDVRNWWTTGNENYPLIRYLGCDIRLYREENIDYLFYYNRQPPMTASLTTYQSTQPMAMMLNKHTVKISCKKNTKNKKPYKRLRIPPPTQLQNKWYFQFDIATTPLLQTMATACSFDRMFLNSGAISTTIGFTTLDTNGFLNHNYDRTTRGYSPRPGTLLFKTTNGEYDIQKIQIGELIFLGETQDLTDGTQLKSIPPAQSVPNISNPTEFQKKLYNASIKHEHWGNVFKSSTFYGEERMIETNMSWEDIIKTYTASTKPLNTGWTLKTTKWGECRYNPYADHGKGNIVYLLKINSGLHPTEWGPPTDKDVVAQDLPLHTLLWGYLDYQRKCQEYRDIDTTTIIVFKSPFILPKTYTFYCPLDQDFLDGNSPYRPSQHIIPSDYQHWHPKVRFQVQTINNICLSGPGTVKLPPQVSCEAHIVYNFRFKIGGQPAPMSNLTKPDEQPKYPIPNNLLQTPSLQSPTTPFTQLLWSFDERRGELTKKATDRITDYQRSETSFLPITETSNSCPTTLQVLKETQETTSEEEEETSIQEQLHNQRRKQKQLRQRINLLLQHLANLQ

SEQ ID NO: 1562 - protein, 124 aa, Betatorquevirus sp.
MGRISLGRTGKKLKYIYFLDMTHRYIPTNSTYRQNQLKWLNILHHVHGSFCDCPNGMAHTTALIFENNPDLQFSPPEKDIIKSCLSGENTGDKDGENHGVDGFTGEELELLFKEPDGEDAAADR

SEQ ID NO: 1563 - protein, 121 aa, Betatorquevirus sp.
MPYNPPSTQRNTRDDIRGRRRNIDPGTAPQPAKKAKTAQTANQPPPPAPSKFTIKETVIKVKLFPDPPQNRRMTAKEYEDELFDAKCWLRVPRTHIFDRPTYPWVPQDSKFTVNFDLNAPQ

SEQ ID NO: 1564 - DNA, 3033 bp, Alphatorquevirus sp.
agaccacttcgggctcgcgggcacaccgcagtcaaggggcaattcgggctcgggactggccgggctatgggcaaggctcttagggttatctctcttaaaatgccctttctcggcagggtctggagaaagaaaaggaaagtgcttctgcaaactgtgccaactccacaggctgcacctgccatgagctggttcccccctgtgcataatgccgccggcagagaaagaaattactgggaatgctgttttagggcgcacgcatgtttttgtggttgtggcaatttcattggtcaccttaatcgtctggctgatcgttatcacttcaacccgccggcacctccacccggaggtcccccgccgggcccgcggccagcactaagagcgctccctccagttccgggcgaccccgccgatccccctaacccaggcccgcaatggcctggggctggtggcgacgccggcgctggggcgcccgccgctggaggcgaagaaggaggcgccgccgaccagtatggagacgccgagctcgacgccctgttcgccgccgtcgaagaagacaacgaacagtaaggaggcgcaggggtcgctaccctagacgcaggcgcgggtggggacgcagacgtactgtcagacgcagacgacgcaaaaaactgtacctgactcagtggaacccgcctatagtaaaacgctgctttatcaaaggggctctgccccttatactgtgcgggtctcccagagcaaacatgaactatgccatgcactgcgaagacagcacccctcagccggagtcctttgggggcggcatgtccacagtgacattcagcctgctggtactatatgaccagcacgagagacacttaaacaggtggacattccccaacgaccagctagatctagtgagatacaaacacaccaggtttaaattctacaggagcaaagacactgactttatagtaacctttaacataaagcctcccatgaaaatgaacgagactacctcgcccaacgcccaccccggcatgctcatgcagatgaaacacaagatactaattcccagctttcagacaaggccaggggggcgcagatacgtatcagttaaaatagggccccccaaactgtttgaagacaagtggtaccctcaggcagacttttgcaaggttccccttgtcagtttaaccgcaaccgcatgtgacttcagacatccgttctgctcaccacaaacgaacaacccttgcaccaccttccaggtgttgcgagaaccatacaataaagtaataggcttccccatgaaaggcacagaggcctacgatgattttgaaacgtggctatatgagtctgggggccactatcaaacctttcaaaccgaagcacagtttagagtacctacacattcaccagatggccaagtaaactcagacaaacaaaagtggaccgacctgtggtcaggtacacatggcatatatgtcacaaaaaccgacagtaactatgggtaccactcattccaagttaaaaacaaaaaaactaaaattatagagagaagaaacaaacaatttgaatgggaaactaaatttactaacaacgcaacacacattaaccccacagggcagccaggccattttaaacagtatgaataccacctcgggtggttcagtcccatatttataggccccaacagatacaacacccagtttcgcccggcatactatgatgttacctacaacccctttaatgacaaaggcaaaggtaacatggtgtggtttcagtaccttacaaaaccggacacagagttcgacccacttcagtgcaagtgtgtactgttagacatacccctgtgggccgccttctttggctacccagactacatagaaagccaactaggcccctttcaggaccacgaaaccgtaggcatagtgtgctttgtgtgcccctatactcagccgcccatgtacaaaccagggaaagtgcaatatggctatgttttttatgacactaactttggaaacggcaaaatgccctcaggactcggacaaatacccgtatactggcaaagcaggtggcgaccgtacctaaagtggcagcttcaagtaatgaatgacatttgcaagacgggaccgtttgcttacagagacgaacttaagcaggcacagctgtgcgccatgtacagttttaagtttctctttgggggcgacttactgtatccacagatcattaaaaacccctgtggagactccggagtgccttccagtcccagtagacagcctcgcagcgtacaagtcacgaacccgctctccatggccccccagttcatcttccacaaatttgacaccagacgtgggttctatagctcagcttctctcaaaagaatgctacaacaaccaaaagatgatgaactctatcttaaaaaatcaaaattccctcgcttgcttacagccctacaaggagaccaagggcaagaagacagcttcagttcacaggaagcaagcgagcagtcctcgcaagaagagaaagaagcagaagccccacaaacgcaggcggaaatacagcaccagctcagacagcagctcaagcagcaaatccaactcagaaaccaactccagctcgtcatgttccaactctcccgcacacaggccaacttacatttaaacccactatctttagcacacctcacataaagtatgacatgtttcagggcaaatttatccgtcctcccaccaaagaggactggcagtgcgagtacgaggcctgcagggtctgggatagaccccctagaacacacctcacagacaaaccctactacccctggatgccccctcccaaacccaagttctctgtaaccttcaagcttggcttccaataaacaaggccgtgggagtttcacttgtcggtgtctacctcttaatgtcactaagcactccgagcgtcagcgaggagtgcgacccttccccctggtgcaacgccctcggcggccgcgcgctacgcctgcggctgcgcgcggcacctcggacccccgctcgtgctgacacgcttgcgcgtgtc

SEQ ID NO: 1565 - protein, 745 aa, Alphatorquevirus sp.
MAWGWWRRRRWGARRWRRRRRRRRPVWRRRARRPVRRRRRRQRTVRRRRGRYPRRRRGWGRRRTVRRRRRKKLYLTQWNPPIVKRCFIKGALPLILCGSPRANMNYAMHCEDSTPQPESFGGGMSTVTFSLLVLYDQHERHLNRWTFPNDQLDLVRYKHTRFKFYRSKDTDFIVTFNIKPPMKMNETTSPNAHPGMLMQMKHKILIPSFQTRPGGRRYVSVKIGPPKLFEDKWYPQADFCKVPLVSLTATACDFRHPFCSPQTNNPCTTFQVLREPYNKVIGFPMKGTEAYDDFETWLYESGGHYQTFQTEAQFRVPTHSPDGQVNSDKQKWTDLWSGTHGIYVTKTDSNYGYHSFQVKNKKTKIIERRNKQFEWETKFTNNATHINPTGQPGHFKQYEYHLGWFSPIFIGPNRYNTQFRPAYYDVTYNPFNDKGKGNMVWFQYLTKPDTEFDPLQCKCVLLDIPLWAAFFGYPDYIESQLGPFQDHETVGIVCFVCPYTQPPMYKPGKVQYGYVFYDTNFGNGKMPSGLGQIPVYWQSRWRPYLKWQLQVMNDICKTGPFAYRDELKQAQLCAMYSFKFLFGGDLLYPQIIKNPCGDSGVPSSPSRQPRSVQVTNPLSMAPQFIFHKFDTRRGFYSSASLKRMLQQPKDDELYLKKSKFPRLLTALQGDQGQEDSFSSQEASEQSSQEEKEAEAPQTQAEIQHQLRQQLKQQIQLRNQLQLVMFQLSRTQANLHLNPLSLAHLT

SEQ ID NO: 1566 - protein, 166 aa, Alphatorquevirus sp.
MGKALRVISLKMPFLGRVWRKKRKVLLQTVPTPQAAPAMSWFPPVHNAAGRERNYWECCFRAHACFCGCGNFIGHLNRLADRYHFNPPAPPPGGPPPGPRPALRALPPVPGDPADPPNPGPQWPGAGGDAGAGAPAAGGEEGGAADQYGDAELDALFAAVEEDNEQ

SEQ ID NO: 1567 - protein, 58 aa, Alphatorquevirus sp.
MFQGKFIRPPTKEDWQCEYEACRVWDRPPRTHLTDKPYYPWMPPPKPKFSVTFKLGFQ

SEQ ID NO: 1568 - DNA, 3033 bp, Alphatorquevirus sp.
cgggtgccgaaggtgagtttacacaccgcagtcaaggggcaattcgggctcggaactggccgggccccgggcaaggctcttaaaaaatgcactttcgcagagtgcgagcgaaaaggaaactgctactgcaaactgtgcgagctccaccgaaggcacctgccatgagcttcaccacacctactattaatgccgggatccgagagcagcaatggttcgagtccatcgttagatcccaccactcgttctgtggctgtggtgatcccgtgcttcattttactaaccttgctactcgctttaactatctgcctactacctcttcgcctctggaccctcccggcccagcgccgcgaggccgcccggcgctccgccgtctcccggcactcccttcagcccccgcgaccccctctagagatccagtatggcctactggttccgagggtggggctggaggccgaggcgccggtggagaaggtggcgccgccgtcgaaggagactaccgagaagaagagttagacgagctgttcgcggccttggaagaagacgcaaaccaagggtaaggaggcgccgcagacgccgcagacgtgtctacaaacgggggtggagacgcaggaggtacataagacgtgggcgacgcaaaaagaaactcgtactgactcagtggaacccggcagtagttaagaggtgcaacattaagggcggacttccaataatcatatgcggagagcccagggcagcctttaactatggctaccacatggaggactacactccccaacctttccccttcggagggggaatgagcacagtgactttctctctgaaagccttatatgatcagtacctcaaacaccaaaacaggtggactttctcaaacgaccagctagacctggccagatacaggggctgtaaactaaggttttacagaagccccgtctgtgactttatagtacactacaacctaatacctccactaaaaatgaaccagtttacaagtcccaacacgcacccgggactactcatgctcagcaaacacaaaataataattcccagcttccaaacaagaccggggggcaaacgctttgttaaaataaaacttaatccccccaaactatttgaaaacaagtggtacactcaacaaaacctatgcaaagttccgctcgttagtattacagcaactgcggctgacttgcggtatccgttctgctcaccacaaacgaacaacccttgcaccaccttccaggtgctgcgcaagaactacaacacagttataggaacttccgtaaaagaccaagagtccacacaaaattttgaacaatggctatatggcacagactcacactatcaaacatttgccacagaagctcaactaggtagaatacctgcatttaaccctgatggcaccaaaaactcagataaagagttctggcaaaacagctggagcaaaaaaaatgaacaatggtcaggatcacaagcatacccacagactactacagaaatgtacaaaattccatatgacagcaactttggctaccctacatacagagcacaacctgaatatattaaaaaaagaagagcctcaaactttaaatatgaaatacaaaaccctgtcagtaaaaaagtatggccagaaccaagtacaacaactcccacagtagactactatgaataccactgtggatggttcagtaacatatttataggcccaaacagatacaatttacaatttcaaacagcatacgtagacaccacatataacccactcatggacaaaggaaaaggcaacaaaatatggttccagtacctttctaaaaaaggcacagactataatgaaaaacaatgctactgccttctaaaagacatgcccctgtgggcaatgtgctttggatacacagactatgtagaaactcaattaggcccaaatgtaaaccatgaaacagcaggccttataataataatatgtccttacactcaaccacctatgtatgacaaaactagacccaactggggatacgtagcctatgacacaaactttggcaatggaaaaatgccctccggaacaggccaagttccagtatactggcaatgcagatggagacccatgctgtggttccaagaacaagtactaaatgacatctcaaagactggaccgtacgcctacagagacgaatataaaaatgtacagctgactctctactacaactttatttttaactgggggggcgacatgtattacccacaggtcgttaaaaacccctgtggagactccggaatcgttcccggttccggtagattcactcgaaaagtacaagtcgttagcccgctttccatgggaccggcctacatcttccactacttcgacaacagaaggggcttctttagtgaaaaagctcttaaaagaatgcaacaacaacaagaatttgatgaatcttttacattcaaacctaagagacccaaactttctacagcagccacagaaatcctgcagctcgaagaagactcgtcttcaggggaaggaaaatcgccactacagcaaaaagagaaagaagcagaagtcctccaaacgtcacaagtacagctccagctccagcgaaacatccaggagcagctcgcaatcaagcagcagctccaattcctcctgctccaactcctcaaaacccaatccaatttgcatttaaacccacaatttttaagcccttcataaaatatgacatgtttggggacccccttcctcaccccccaacagcccaagactgggccacagaatatgagtgctgtaaggcctttaacaggccacctagaaccaacctaaaagacacccccttttacccctgggtccctaaacctaaacctcaattccgtgtatcttttaaacttggttttcaataaacaaggccgtgggagtttcacttgtcggtgtcaacctcttaaggtcactaagcactccaagcgtaagcgaggagtgcgaccctcccccctggggcaactccctcgaagtccggcgctacgcgcttcgcgctgcgccggacatctcgg

SEQ ID NO: 1569 - protein, 760 aa, Alphatorquevirus sp.
MAYWFRGWGWRPRRRWRRWRRRRRRLPRRRVRRAVRGLGRRRKPRVRRRRRRRRRVYKRGWRRRRYIRRGRRKKKLVLTQWNPAVVKRCNIKGGLPIIICGEPRAAFNYGYHMEDYTPQPFPFGGGMSTVTFSLKALYDQYLKHQNRWTFSNDQLDLARYRGCKLRFYRSPVCDFIVHYNLIPPLKMNQFTSPNTHPGLLMLSKHKIIIPSFQTRPGGKRFVKIKLNPPKLFENKWYTQQNLCKVPLVSITATAADLRYPFCSPQTNNPCTTFQVLRKNYNTVIGTSVKDQESTQNFEQWLYGTDSHYQTFATEAQLGRIPAFNPDGTKNSDKEFWQNSWSKKNEQWSGSQAYPQTTTEMYKIPYDSNFGYPTYRAQPEYIKKRRASNFKYEIQNPVSKKVWPEPSTTTPTVDYYEYHCGWFSNIFIGPNRYNLQFQTAYVDTTYNPLMDKGKGNKIWFQYLSKKGTDYNEKQCYCLLKDMPLWAMCFGYTDYVETQLGPNVNHETAGLIIIICPYTQPPMYDKTRPNWGYVAYDTNFGNGKMPSGTGQVPVYWQCRWRPMLWFQEQVLNDISKTGPYAYRDEYKNVQLTLYYNFIFNWGGDMYYPQVVKNPCGDSGIVPGSGRFTRKVQVVSPLSMGPAYIFHYFDNRRGFFSEKALKRMQQQQEFDESFTFKPKRPKLSTAATEILQLEEDSSSGEGKSPLQQKEKEAEVLQTSQVQLQLQRNIQEQLAIKQQLQFLLLQLLKTQSNLHLNPQFLSPS

SEQ ID NO: 1570 - protein, 156 aa, Alphatorquevirus sp.
MHFRRVRAKRKLLLQTVRAPPKAPAMSFTTPTINAGIREQQWFESIVRSHHSFCGCGDPVLHFTNLATRFNYLPTTSSPLDPPGPAPRGRPALRRLPALPSAPATPSRDPVWPTGSEGGAGGRGAGGEGGAAVEGDYREEELDELFAALEEDANQG

SEQ ID NO: 1571 - protein, 58 aa, Alphatorquevirus sp.; identical to SEQ ID NO: 197

SEQ ID NO: 1572 - DNA, 3033 bp, Gammatorquevirus sp.
cgggagcccgaggtgagtgaaaccaccgaggtctaggggcaattcgggctagggcagtctagcggaacgggcaagaaacttaaaaatatttctctttacagatgagccatctctgtcctgctgacttttatcacaaaaccacttttaatcttgatacacaaaaccaaatatggatgtctcagctagcagacgggcatgacaatttctgtgactgcaaaactccttttggtcatttgcttgcttctatttttcctcctggtcataaagaccgtgatctcacaattaatcaaattctgctgcgagactacagagaaacatgccattctggtggaacaggagaaaaaggttctggaggagaaactacaggagaaaacccaggtacaagaaatacaaacctagaagatacagaagaacttacagaacaaaatatagaagagctaatcgccgtggcagacgccgcagaagaagaagacacaaggtaagaagaaaaaaacaaacaataccagttagacaatggcaacctgactctattgttaaatgtaaaattaaaggcttgtctactctagtgctgggtgcagaaggcaaacaacttgtatgctacacaaatgtaaaaaatgcaaatactcctccaaaagcaccagctggaggaggatttggctgtgaacaattttccttagaatcattatatacagactttgtatttagaaaaaatatatggacaaaatcaaatactcttaaagacttatgtagatacctaggagttaaaatggtattttatagagctccagaaacagactttattgtatcttacagcagacaaccaccatttgaaatttctaaagaaatatatacatcatgtcacccactaaatatgatactagataaacacaaaattattattccaagcagatttaccaatcccagaggtaaactaaaagtaaaaaaatttattaaacctcctaaacaaatgttatctaaatggtttttccaagagcactttgcaaactatccattagtaatgataaaagcagcagcttgcaatcttaactacagtaatttagggtgctgtaacacaaatcaaatggttacctttttttacattaatattaactggtactccttagctgactggtcagcaagaaaatcaggcacagctatatacacaccatattctaactttccagcaaacatatacacctggaataaaaaacaatgggacacacaaacattagcaacagactcccaaaaatttacaaaacctactacttactttgcttctgtaaatattaaaactggctttttttcaccacaaatattacaagcagtacaaataactgccaatacaaccaaagaatcaattaccagaaacaatcccttaaacatatgcagatacaacccaaacttagacagtggaaaaaaaaataaaatatggctagtatcaactctcacagccacatgggaccctccacattcagacaaaatactaatatatgagggctatcctctatacatgatgctatggggatttcttagctatgtacaagccattaaaaaatctcctgacttttttttaggatatgtacttgcaatgcaatcacctgctttattaccctactcacaaccaggagcacaaacagctattatagttccactagactataaaatgccacaaggcaaagctccatatgatgaagaactaacagactccatgaaaacactatggtttccaaccatatacaaccaattagaaatattaaatgccatagtagaatctggtccattagtaccaaaatactctcaaactaaaaacagtacatgggaacttgatatgttttatacctttatttttaagtggggcggcccagaaattacagaacaacaaattgcagatccacacctacaaggaacttatgaagtaccagataccctccaaaaagctatacaaatccatgacccggcaaaacaaaaaattgggagcctcctccatccctgggatattagaaggggatactttacaaaaacagctcttaaaagaatgcatgataacctctcaactgagtcatctttcatcccagatggagaagaaatacctgcaaaaaagaaaagacaacagacaggtccagagctgtcccacccctaccaagaagaagaagaagtccagagctctctccgctcgctcttcgaagaaaatatctacccagaaacacaaacacaaacaccagacatcctccagctcatcaagcagcagcagcagcagcagcaagagctcaagtacaatatcctcagaataatctcagacatcaaagccaaacagaatctactcagacttcaaacaggagcaatgttttaacaagatttaaaccaggatttgaatgggaaacagagctacaactagcttcagcttttaaaagaccccctagactttttaaagaagacacacctttctatccctggcttccaaaacttgtaccaattgtaaactttcacctcaactttaaatgctaggcctacactgttcacttagtggtgtatgtttaataaagtttgcaccccaaaaaaattgtaaaaaaaaaaaaataaaaaattgcaaaaattcggcgctcgcgcgcgcgcccccccccctaagctccgcccccctcatgaatattcataaaggaaaccacaaaattagaattgccgaccacaaactgccatatgctaattagttccccttttacacagtaaaaaggggaagtggggggggcatagcccccccacaccccccgcgggggggggcaaacccccccccgcaccccccctacgtcacaaaccacgcccccgccgccatcttgggtgcggcagggcggagactaaaatggcggcaaccaatcactttatactttcactttccaattaaaacatgccacgtcacactaacagggcgaagactaaaaactatatattaaactactgtgacgaatggctgagtttaccccgctagacggtgcagggaccggatcgagcgcagcgaggaggtccccggctgcccttggg

SEQ ID NO: 1573 - protein, 677 aa, Gammatorquevirus sp.
MPFWWNRRKRFWRRNYRRKPRYKKYKPRRYRRTYRTKYRRANRRGRRRRRRRHKVRRKKQTIPVRQWQPDSIVKCKIKGLSTLVLGAEGKQLVCYTNVKNANTPPKAPAGGGFGCEQFSLESLYTDFVFRKNIWTKSNTLKDLCRYLGVKMVFYRAPETDFIVSYSRQPPFEISKEIYTSCHPLNMILDKHKIIIPSRFTNPRGKLKVKKFIKPPKQMLSKWFFQEHFANYPLVMIKAAACNLNYSNLGCCNTNQMVTFFYININWYSLADWSARKSGTAIYTPYSNFPANIYTWNKKQWDTQTLATDSQKFTKPTTYFASVNIKTGFFSPQILQAVQITANTTKESITRNNPLNICRYNPNLDSGKKNKIWLVSTLTATWDPPHSDKILIYEGYPLYMMLWGFLSYVQAIKKSPDFFLGYVLAMQSPALLPYSQPGAQTAIIVPLDYKMPQGKAPYDEELTDSMKTLWFPTIYNQLEILNAIVESGPLVPKYSQTKNSTWELDMFYTFIFKWGGPEITEQQIADPHLQGTYEVPDTLQKAIQIHDPAKQKIGSLLHPWDIRRGYFTKTALKRMHDNLSTESSFIPDGEEIPAKKKRQQTGPELSHPYQEEEEVQSSLRSLFEENIYPETQTQTPDILQLIKQQQQQQQELKYNILRIISDIKAKQNLLRLQTGAMF

SEQ ID NO: 1574 - protein, 126 aa, Gammatorquevirus sp.
MSHLCPADFYHKTTFNLDTQNQIWMSQLADGHDNFCDCKTPFGHLLASIFPPGHKDRDLTINQILLRDYRETCHSGGTGEKGSGGETTGENPGTRNTNLEDTEELTEQNIEELIAVADAAEEEDTR

SEQ ID NO: 1575 - DNA, 3033 bp, Alphatorquevirus sp.
ctcgcgcgtgtcagaccacttcgggctcgcggcaaggggcaattcgggctcgggactggccgggctatgggcaaggctcttaaaaaagacatgtttatcggtaaactgtacagaaagaagagggcactgccactgtgccgcctgcgagcttcaaagaagaaaccacctcctgacatgacctggagacccccggtgcacaacgcccatgggatcgagagaaatctctacgagtgcgtgtttcgcgcacatgctgctagctgcggctgcggtgatcttgttggccatatttctctactggctcagcggtatggtgctcctcctcgaccaccggcgcccggggctcccagaccacagatgagacgccagctggcccttccagcgccccccgccgatccgcagcaggctaacccagaatggcctggtggggacggtggagaccgtggcgatggaggcgccgctggaggaggggtcgccgccgacggagactacgaacccgaggaactcgacaccctgttcgacgccgtagaacaagaagagtaaggagaaggagatgggggaggcggaggtggagacgggggtacagacgcagactgagactgagacgcaaacgcagacgcaaaaaaaagatagtactgactcagtggaaccccgccaaagtgcgaaggtgcaggatatcgggggtcttgcccatggtactgtgcggcgcgggcaggtcagggtttaactatggactgcacagcgacgacctcactgtacagaaaccccttaaccagaacccccacgggggaggcatgagcacagtgactttttctctaaaagtgctctatgaccagtaccagagattcttaaacaagtggtcctaccccaacgaccagctagacctggccagatacaggggctgcaaattcaccttctacagacacgcagagacagactttgtagttcagtatgacaacgttccccccatgaaaatggatgagtttacagcccctaacactcatcccaacttgctgctacaggccaaacacagacgcaaaatccccagttttaaaaccaggccttttggtaaaaagacagtaactattaaagtggggcctcctaaactatttgaggacaagtggtacccccagtcagatctgtgcaaggtgccccttgtcagttggcgggtgaccgcagctgacttgcggtttccgttctgctcaccacaaactgacaacccttgcttcaccttccaagtattgcacgagaactattacccatgctttggaacttcctgtttagaccaacgaacaactttcactgaacaaattaacactttagaaaattggctatatggctcctgcagtcactatcaaacatttgccacagacagcagattagccccagaaaaaacaacaactccagcagggtcaaataactctcctcaatggacacaaacagactttcaagcatttaaaaaacctacagacagcaactatggctactgtacctactgtccaaaagacaaccttattgagaaaattacaaaatacagagacaaaagatttaactggctaacaacccctgagccttccaacagttgtcacataaacatgacatacagcaagggcaagtacaaagagtacgagtaccacctaggctggtactctaacatattcataggcaacctaagacacaacctagcattcaggccagcatacatagatgtaacctataaccccatagtagacaaaggcctgggaaaccacatatggtttcagtacctgacaaagcccaccactgagctaatagaagcacaggcaaaatgtcacatccaggacctgcccctatacgccatgacctttggctatgaggactatctccagagaacactaggccctttccaagacgtagagaccgtgggcataatctgctttatatgcccttacacagaaccgccctgcgttaacaaaaacgagggcaaaaagaactggggctacgtgttctatgacacacactttggcaacggcaagaccccagagggactgggccaagtacacccttactggatgcagagatggagaccagtgtcccaggtacaaaaagagactctaaacaagattagcaggaccggaccgttcagctacagagacgagcaccctagcgtgacgctgaccgcgaactacaagttctactttaactgggggggcgactctatatttccacagattattaaaaacccctgtccagacaacagcctgcgtcccggcggccgtagagagcctcgctcagtacaagtcgttagcccgctcacaatgggaccgcaatacctctttcactcctgggactggcgacgggggttctttaatccaaaaactctcaaaagaatgcttgaaaaaccagatgatgatgcagagtatccaacaggtccaaaaatccctcgatgggtacccgctctcgagcaccaagggcaagaaagcaacttcgattcggagacagagatctccgagtcctcggaagaagaagccgctcaagaagtcctccaagaaatccaggaggcgccgctacagcagcacctcatccagcagtacagagagcagcgacgcctcggaaagcaactcaaactcgtcatgctgcaactcaccaagacgcagagcaatctccacataaatcctcgcgtccttggccatgcataaataaagtgtacatgtttccccccgagaaaccccttcccatacacgggtaccacgggtgggagacggagtatcaggcctgcaaggccttcgacaggccccctagaaactacctgtcagacaaacccatctacccgtggcttccccgctcccagccagaaattaaagtgagttttaagctcggttttcaataaacaaggccgtgggaatttcacttgtcggtgtctacctcttaaggtcactaagcactccgagcgtcagcgaggagtgcgacccttccccctggtgcaacgccctcggcggccgcgcgctacgccttcggctgcgcgcggcacctcggacccccgctcgtgctgacacg

SEQ ID NO: 1576 - protein, 753 aa, Alphatorquevirus sp.
MAWWGRWRPWRWRRRWRRGRRRRRLRTRGTRHPVRRRRTRRVRRRRWGRRRWRRGYRRRLRLRRKRRRKKKIVLTQWNPAKVRRCRISGVLPMVLCGAGRSGFNYGLHSDDLTVQKPLNQNPHGGGMSTVTFSLKVLYDQYQRFLNKWSYPNDQLDLARYRGCKFTFYRHAETDFVVQYDNVPPMKMDEFTAPNTHPNLLLQAKHRRKIPSFKTRPFGKKTVTIKVGPPKLFEDKWYPQSDLCKVPLVSWRVTAADLRFPFCSPQTDNPCFTFQVLHENYYPCFGTSCLDQRTTFTEQINTLENWLYGSCSHYQTFATDSRLAPEKTTTPAGSNNSPQWTQTDFQAFKKPTDSNYGYCTYCPKDNLIEKITKYRDKRFNWLTTPEPSNSCHINMTYSKGKYKEYEYHLGWYSNIFIGNLRHNLAFRPAYIDVTYNPIVDKGLGNHIWFQYLTKPTTELIEAQAKCHIQDLPLYAMTFGYEDYLQRTLGPFQDVETVGIICFICPYTEPPCVNKNEGKKNWGYVFYDTHFGNGKTPEGLGQVHPYWMQRWRPVSQVQKETLNKISRTGPFSYRDEHPSVTLTANYKFYFNWGGDSIFPQIIKNPCPDNSLRPGGRREPRSVQVVSPLTMGPQYLFHSWDWRRGFFNPKTLKRMLEKPDDDAEYPTGPKIPRWVPALEHQGQESNFDSETEISESSEEEAAQEVLQEIQEAPLQQHLIQQYREQRRLGKQLKLVMLQLTKTQSNLHINPRVLGHA

SEQ ID NO: 1577 - protein, 157 aa, Alphatorquevirus sp.
MGKALKKDMFIGKLYRKKRALPLCRLRASKKKPPPDMTWRPPVHNAHGIERNLYECVFRAHAASCGCGDLVGHISLLAQRYGAPPRPPAPGAPRPQMRRQLALPAPPADPQQANPEWPGGDGGDRGDGGAAGGGVAADGDYEPEELDTLFDAVEQEE

SEQ ID NO: 1578 - protein, 147 aa, Alphatorquevirus sp.
MGTRSRAPRARKQLRFGDRDLRVLGRRSRSRSPPRNPGGAATAAPHPAVQRAATPRKATQTRHAATHQDAEQSPHKSSRPWPCINKVYMFPPEKPLPIHGYHGWETEYQACKAFDRPPRNYLSDKPIYPWLPRSQPEIKVSFKLGFQ

SEQ ID NO: 1579 - DNA, 3033 bp, Alphatorquevirus sp.
ctcgcgcgtgtcagaccacttcgggctcgcgggaaggggcaattcgggctcgggactggccgggctatgggcaaggctcttaaaaaagacatgtttatcggtaaactgtacagaaagaagagggcactgccactgtgccgcctgcgagcttcaaagaagaaaccacctcctgacatgacctggagacccccggtgcacaacgcccatgggatcgagagaaatctctacgagtgcgtgtttcgcgcacatgctgctagctgcggctgcggtgatcttgttggccatatttctctactggctcagcggtatggtgctcctcctcgaccaccggcgcccggggctcccagaccacagatgagacgccagctggcccttccagcgccccccgccgatccgcagcaggctaacccagaatggcctggtggggacggtggagaccgtggcgatggaggcgccgctggaggaggggtcgccgccgacggagactacgaacccgaggaactcgacgccctgttcgacgccgtagaacaagaagagtaaggagaaggagatgggggaggcggaggtggagacgggggtacagacgcagactgagactgagacgcaaacgcagacgcaaaaaaaagatagtactgactcagtggaaccccgccaaagtgcggaggtgcaggatatcgggggtcttgcccatggtactgtgcggcgcgggcaggtcagggtttaactatggactgcacagcgacgacctcactgtacagaaaccccttaaccagaacccccacgggggaggcatgagcacagtgactttttctctaaaagtgctctatgaccagtaccagagattcttaaacaagtggtcctaccccaacgaccagctagacctggccagatacaggggctgcaaattcaccttctacagacacgcagagacagactttgtagttcagtatgacaacgttccccccatgaaaatggatgagtttacagcccctaacactcatcccaacttgctgctacaggccaaacacagacgcaaaatccccagttttaaaaccaggccttttggtaaaaagacagtaactattaaagtggggcctcctaaactatttgaggacaagtggtacccccagtcagatctgtgcaaggtgccccttgtcagttggcgggtgaccgcagctgacttgcggtttccgttctgctcaccacaaactgacaacccttgcttcaccttccaagtattgcacgagaactattacccatgctttggaacttcctgtttagaccaacgaacaactttcactgaacaaattaacactttagaaaattggctatatggctcctgcagtcactatcaaacatttgccacagacagcagattagccccagaaaaaacaacaactccagcagggtcaaataactctcctcaatggacacaaacagactttcaaacatttaaaagaactacagacagcaactatggctactgtacctactgtccacaagaaaacttagttaagaaaattaaacaatacagagacagaagatttcagtggctaacaacccctgagccttccaacagttgtcacataaacatgacatacagcaagggcaagtacaaagagtacgagtaccacctaggctggtactctaacatattcataggcaacctaagacacaacctagcattcaggccagcatacatagatgtaacctataaccccatagtagacaaaggcctgggaaaccacatatggtttcagtacctgacaaagcccaccactgagctaatagaagcacaggcaaaatgtcacatccaggacctgcccctatacgccatgacctttggctatgaggactatctccagagaacactaggccctttccaagacgtagagaccgtgggcataatctgctttatatgcccttacacagaaccgccctgcgttaacaaaaacgagggcaaaaagaactggggctacgtgttctatgacacacactttggcaacggcaagaccccagagggactgggccaagtacacccttactggatgcagagatggagaccagtgtcccaggtgcaaaaagagactctaaacaagattagcaggaccggaccgttcagctacagagacgagcaccctagcgtgacgctgaccgcgaactacaagttctactttaactgggggggcgactctatatttccacagattattaaaaacccctgtccagacaacagcctgcgtcccggcggccgtagagagcctcgctcagtacaagtcgttagcccgctcacaatgggaccgcaatacctctttcactcctgggactggcgacgggggttctttaatccaaaaactctcaaaagaatgcttgaaaaaccagatgatgatgcagagtatccaacaggtccaaaaatccctcgatgggtacccgctctcgagcaccaagggcaagaaagcaacttcgattcggagacagagatctccgagtcctcggaagaagaagccgctcaagaagtcctccaagaaatccaggaggcgccgctacagcagcacctcatccagcagtacagagagcagcgacgcctcggaaagcaactcaaactcgtcatgctgcaactcaccaagacgcagagcaatctccacataaatcctcgcgtccttggccatgcataaataaagtgtacatgtttccccccgagaaaccccttcccatacacgggtaccacgggtgggagacggagtatcaggcctgcaaggccttcgacaggccccctagaaactacctgtcagacaaacccatctacccgtggcttccccgctcccagccagaaattaaagtgagttttaagctcggttttcaataaacaaggccgtgggaatttcacttgtcggtgtctacctcttaaggtcactaagcactccgagcgtcagcgaggagtgcgacccttccccctggtgcaacgccctcggcggccgcgcgctacgccttcggctgcgcgcggcacctcggacccccgctcgtgctgacacg

SEQ ID NO: 1580 - protein, 753 aa, Alphatorquevirus sp.
MAWWGRWRPWRWRRRWRRGRRRRRLRTRGTRRPVRRRRTRRVRRRRWGRRRWRRGYRRRLRLRRKRRRKKKIVLTQWNPAKVRRCRISGVLPMVLCGAGRSGFNYGLHSDDLTVQKPLNQNPHGGGMSTVTFSLKVLYDQYQRFLNKWSYPNDQLDLARYRGCKFTFYRHAETDFVVQYDNVPPMKMDEFTAPNTHPNLLLQAKHRRKIPSFKTRPFGKKTVTIKVGPPKLFEDKWYPQSDLCKVPLVSWRVTAADLRFPFCSPQTDNPCFTFQVLHENYYPCFGTSCLDQRTTFTEQINTLENWLYGSCSHYQTFATDSRLAPEKTTTPAGSNNSPQWTQTDFQTFKRTTDSNYGYCTYCPQENLVKKIKQYRDRRFQWLTTPEPSNSCHINMTYSKGKYKEYEYHLGWYSNIFIGNLRHNLAFRPAYIDVTYNPIVDKGLGNHIWFQYLTKPTTELIEAQAKCHIQDLPLYAMTFGYEDYLQRTLGPFQDVETVGIICFICPYTEPPCVNKNEGKKNWGYVFYDTHFGNGKTPEGLGQVHPYWMQRWRPVSQVQKETLNKISRTGPFSYRDEHPSVTLTANYKFYFNWGGDSIFPQIIKNPCPDNSLRPGGRREPRSVQVVSPLTMGPQYLFHSWDWRRGFFNPKTLKRMLEKPDDDAEYPTGPKIPRWVPALEHQGQESNFDSETEISESSEEEAAQEVLQEIQEAPLQQHLIQQYREQRRLGKQLKLVMLQLTKTQSNLHINPRVLGHA

SEQ ID NO: 1581 - protein, 157 aa, Alphatorquevirus sp.
MGKALKKDMFIGKLYRKKRALPLCRLRASKKKPPPDMTWRPPVHNAHGIERNLYECVFRAHAASCGCGDLVGHISLLAQRYGAPPRPPAPGAPRPQMRRQLALPAPPADPQQANPEWPGGDGGDRGDGGAAGGGVAADGDYEPEELDALFDAVEQEE

SEQ ID NO: 1582 - protein, 147 aa, Alphatorquevirus sp.; identical to SEQ ID NO: 1578

SEQ ID NO: 1583 - DNA, 3033 bp, Alphatorquevirus sp.
ctcgcgcgtgtcagaccacttcgggctcgcgggaaggggcaattcgggctcgggactggccgggctatgggcaaggctcttaaaaaagacatgtttatcggtaaactgtacagaaagaagagggcactgccactgtgccgcctgcgagcttcaaagaagaaaccacctcctgacatgacctggagacccccggtgcacaacgcccatgggatcgagagaaatctctacgagtgcgtgtttcgcgcacatgctgctagctgcggctgcggtgatcttgttggccatatttctctactggctcagcggtatggtgctcctcctcgaccaccggcgcccggggctcccagaccacagatgagacgccagctggcccttccagcgccccccgccgatccgcagcaggctaacccagaatggcctggtggggacggtggagaccgtggcgatggaggcgccgctggaggaggggtcgccgccgacggagactacgaacccgaggaactcgacgccctgttcgacgccgtagaacaagaagagtaaggagaaggagatgggggaggcggaggtggagacgggggtacagacgcagactgagactgagacgcaaacgcagacgcaaaaaaaagatagtactgactcagtggaaccccgccaaagtgcggaggtgcaggatatcgggggtcttgcccatggtactgtgcggcgcgggcaggtcagggtttaactatggactgcacagcgacgacctcactgtacagaaaccccttaaccagaacccccacgggggaggcatgagcacagtgactttttctctaaaagtgctctatgaccagtaccagagattcttaaacaagtggtcctaccccaacgaccagctagacctggccagatacaggggctgcaaattcaccttctacagacacgcagagacagactttgtagttcagtatgacaacgttccccccatgaaaatggatgagtttacagcccctaacactcatcccaacttgctgctacaggccaaacacagacgcaaaatccccagttttaaaaccaggccttttggtaaaaagacagtaactattaaagtggggcctcctaaactatttgaggacaagtggtacccccagtcagatctgtgcaaggtgccccttgtcagttggcgggtgaccgcagctgacttgcggtttccgttctgctcaccacaaactgacaacccttgcttcaccttccaagtattgcacgagaactattacccatgctttggaacttcctgtttagaccaacgaacaactttcactgaacaaattaacactttagaaaattggctatatggctcctgcagtcactatcaaacatttgccacagacagcagattagccccagaaaaaacaacaactccagcagggtcaaataactctcctcaatggacacaaacagactttcaaacatttaaaagaactacagacagcaactatggctactgtacctactgtccacaagaaaagttagttaagaaaattaaagaatacagagacagaagatttcagtggctaacaacccctgagcttaccaacacttgtcacataaacatgacatacagcaagggcaagtacaaagagtacgagtaccacctaggctggtactctaacatattcataggcaacctaagacacaacctagcattcaagccagcatacatagatgtaacctataaccccatagtagacaaaggcctgggaaaccacatatggtttcagtacctgacaaagcccaccactgagctaatagaagcacaggcaaaatgtcacatccaggacctgcccctatacgccatgacctttggctatgaggactatctccagagaacactaggccctttccaagacgtagagaccgtgggcataatctgctttatatgcccttacacagaaccgccctgcgttaacaaaaacgagggcaaaaagaactggggctacgtgttctatgacacacactttggcaacggcaagaccccagagggactgggccaagtacacccttactggatgcagagatggagaccagtgtcccaggtgcaaaaagagactctaaacaagattagcaggaccggaccgttcagctacagagacgagcaccctagcgtgacgctgaccgcgaactacaagttctactttaactgggggggcgactctatatttccacagattattaaaaacccctgtccagacaacagcctgcgtcccggcggccgtagagagcctcgctcagtacaagtcgttagcccgctcacaatgggaccgcaatacctctttcactcctgggactggcgacgggggttctttaatccaaaaactctcaaaagaatgcttgaaaaaccagatgatgatgcagagtatccaacaggtccaaaaatccctcgatgggtacccgctctcgagcaccaagggcaagaaagcaacttcgattcggagacagagatctccgagtcctcggaagaagaagccgctcaagaagtcctccaagaaatccaggaggcgccgctacagcagcacctcatccagcagtacagagagcagcgacgcctcggaaagcaactcaaactcgtcatgctgcaactcaccaagacgcagagcaatctccacataaatcctcgcgtccttggccatgcataaataaagtgtacatgtttccccccgagaaaccccttcccatacacgggtaccacgggtgggagacggagtatcaggcctgcaaggccttcgacaggccccctagaaactacctgtcagacaaacccatctacccgtggcttccccgctcccagccagaaattaaagtgagttttaagctcggttttcaataaacaaggccgtgggaatttcacttgtcggtgtctacctcttaaggtcactaagcactccgagcgtcagcgaggagtgcgacccttccccctggtgcaacgccctcggcggccgcgcgctacgccttcggctgcgcgcggcacctcggacccccgctcgtgctgacacg

SEQ ID NO: 1584 - protein, 753 aa, Alphatorquevirus sp.
MAWWGRWRPWRWRRRWRRGRRRRRLRTRGTRRPVRRRRTRRVRRRRWGRRRWRRGYRRRLRLRRKRRRKKKIVLTQWNPAKVRRCRISGVLPMVLCGAGRSGFNYGLHSDDLTVQKPLNQNPHGGGMSTVTFSLKVLYDQYQRFLNKWSYPNDQLDLARYRGCKFTFYRHAETDFVVQYDNVPPMKMDEFTAPNTHPNLLLQAKHRRKIPSFKTRPFGKKTVTIKVGPPKLFEDKWYPQSDLCKVPLVSWRVTAADLRFPFCSPQTDNPCFTFQVLHENYYPCFGTSCLDQRTTFTEQINTLENWLYGSCSHYQTFATDSRLAPEKTTTPAGSNNSPQWTQTDFQTFKRTTDSNYGYCTYCPQEKLVKKIKEYRDRRFQWLTTPELTNTCHINMTYSKGKYKEYEYHLGWYSNIFIGNLRHNLAFKPAYIDVTYNPIVDKGLGNHIWFQYLTKPTTELIEAQAKCHIQDLPLYAMTFGYEDYLQRTLGPFQDVETVGIICFICPYTEPPCVNKNEGKKNWGYVFYDTHFGNGKTPEGLGQVHPYWMQRWRPVSQVQKETLNKISRTGPFSYRDEHPSVTLTANYKFYFNWGGDSIFPQIIKNPCPDNSLRPGGRREPRSVQVVSPLTMGPQYLFHSWDWRRGFFNPKTLKRMLEKPDDDAEYPTGPKIPRWVPALEHQGQESNFDSETEISESSEEEAAQEVLQEIQEAPLQQHLIQQYREQRRLGKQLKLVMLQLTKTQSNLHINPRVLGHA

SEQ ID NO: 1585 - protein, 157 aa, Alphatorquevirus sp.; identical to SEQ ID NO: 1581

SEQ ID NO: 1586 - protein, 147 aa, Alphatorquevirus sp.; identical to SEQ ID NO: 1578

SEQ ID NO: 1587 - DNA, 3032 bp, Betatorquevirus sp.
cgggtgccgaaggtgagtgaaaccaccgtagtcaaggggcaattcgggctagctcagtctggcggaacgggcaagaaacttaaaataatactttattttacagatatgagctctatctggaagaaaccaacattctcaccgagacaacaagaaaaccactggcttggaattgtattttctactcatgatgccttctgccactgcgaagacccctggttgcatttaatgattcttcttaacaaacaaggccaagctcccaaaccagaatcagaagtaagaaatataaaatgcctccttactggaatcgatacaactactaccaaagaagaccataccgaagaagacgtggttaccggtttcgacgatggagagctggaaaaactattcgcagaagatggcaccgaagaaaatggagacgaaggaacaaggtaaaaagacgctttagaaagaaaaaactgaaaaagattgttttaaaacaatttcagccacataaaataacaaaatgtaaaattataggaaaaaaatgtctatttcaaggcagtcctctaagaagcagtaataattatattcaatactgttactcttatgtacctgaactatatcctgggggaggaggctggtctttacttgtacatagcttgggaagtttatatgaagattatcaacatttacataatgtatggacaactagcaatgctggcatgcctttagtacgctttttaggagtagaatttaagttctatcaagacttatatactgattatgttgttatatatgataactgctggcctttagtagacaccccttatacacatgctaacagctgtcctagccaaatgctacaaagaaaaaacaaaataatagtcccaagtaaaatgacacaaaatagaaaaaaaccttataaaagatgctttgtaaaacctccaacacaaatgtataaccgttggtatttccaaagagacatttgtgacacaccactaaacatgctaaccgcaactgccatctcacttacaaaaccattttgtgaccctaaagcaagaagcaataatataactgtttattgcctaaatccacatagatttagaaacccaaactttcaaaacccaccaataaccaatggttactcaccatttactgcagataatctacaaggccaccctgcaatgtacttatattcatctcatagtgtaattaacaaacgtaaagaactacaaacactcacaccactaaccaacacaaaagataacacagcaggagctactctagaacacttatacaaaaacggaggtcaaaacaacaaatttgaaaactggggaaatcccttttatagactaaacttttggggagaagaatttcatatataccaaagcaaacatggtccaacatcagacacagccaaaaagtgggcaacaagtcaagagtatacaaattccgacgcaagtatatctgacgaagtaacattaatggtaggatacaatttatatgcctgtagatacaatccagaaagagacacaggagaaggtaatatgtgttacattttaaataattcttcagccacttcattagaacctccttcaaataaaaaccttatatttgaaggatttccactatacatactactatggggttggacagactttttaaaaaagctaaagcaaaccatagacattgacaaaaactattttttagttgtcaaatcacctttttttgaagaaaagctgccatactatatttttattgacgatgattttagagatggctttgaaccctatactccacacgacaaagacaatgcacaatcttacatttcaccttacaacatgaatcactggtatcctaaatacttatttcaaacacaaagcgttgaaaaaatttgcagatcaggtcctgcctgtactagaccaaataatgacaattacttacaagcattttacaaatataaattctactttaaatggggaggctgtccaaaacaattagcaaaagcctatgatccttgtttacagtcaaaatggcccactcccgataacatcactccaggacttgaaatctcgaatcctaatgagccaccacaaacccacatctatgactgggactgggaagaagattatgttaaagaaaaagctctccaaagaattagagtatacacagaatctcctaaacaaatactcttccttacagactcgaaacaaaaccccaaaccactccaaatcaaggaaaagaaagaggagtcagaaaacgaagaggaaacgcagctactcctccagctccaccacatccgacaccagcgaaagcagctcgaactccttctccagtcaaaacagggactaataaatacacaataaaacactgtaaaattagagtaaaactatttccatctccaacaaaaaaccgtagaatgactccaaaagaaagagaactagaaaaagaggtggcaaaaatatttaaaagaccaccaagagactttatatttgactttcctacttatccttatattccacctacaccccttgcaaactttgaccttaatttcaaagaataaaggccaacatacttcacttgatggtgtctgtttattaaagtttaacttaaataagctaactccgcctccctagtatgttggcgctgtaaagggggctccgcccccttacacccccaagggggctccgcccccttacacccccaaagggggctccgcccccttacacccccaagggggctccgcccccttacacccccaagggggctccgcccccttacacccccaagggggctccgcccccttacaccccctcataaatattcaacaggaaaaccacataattagaattgccgaccacaaaccgtcatacacttccccttttttaacacacttcctcttactctcattattattcattacattaattaataatcaccgtaattcctgggtggagactaaaacctatataactaactacacttccgaatggctgagtttatgccgccagtcgtagactgcaccactttagtgactgcaggctgagcttggg

SEQ ID NO: 1588 - protein, 685 aa, Betatorquevirus sp.
MPPYWNRYNYYQRRPYRRRRGYRFRRWRAGKTIRRRWHRRKWRRRNKVKRRFRKKKLKKIVLKQFQPHKITKCKIIGKKCLFQGSPLRSSNNYIQYCYSYVPELYPGGGGWSLLVHSLGSLYEDYQHLHNVWTTSNAGMPLVRFLGVEFKFYQDLYTDYVVIYDNCWPLVDTPYTHANSCPSQMLQRKNKIIVPSKMTQNRKKPYKRCFVKPPTQMYNRWYFQRDICDTPLNMLTATAISLTKPFCDPKARSNNITVYCLNPHRFRNPNFQNPPITNGYSPFTADNLQGHPAMYLYSSHSVINKRKELQTLTPLTNTKDNTAGATLEHLYKNGGQNNKFENWGNPFYRLNFWGEEFHIYQSKHGPTSDTAKKWATSQEYTNSDASISDEVTLMVGYNLYACRYNPERDTGEGNMCYILNNSSATSLEPPSNKNLIFEGFPLYILLWGWTDFLKKLKQTIDIDKNYFLVVKSPFFEEKLPYYIFIDDDFRDGFEPYTPHDKDNAQSYISPYNMNHWYPKYLFQTQSVEKICRSGPACTRPNNDNYLQAFYKYKFYFKWGGCPKQLAKAYDPCLQSKWPTPDNITPGLEISNPNEPPQTHIYDWDWEEDYVKEKALQRIRVYTESPKQILFLTDSKQNPKPLQIKEKKEESENEEETQLLLQLHHIRHQRKQLELLLQSKQGLINTQ

SEQ ID NO: 1589 - protein, 108 aa, Betatorquevirus sp.; identical to SEQ ID NO: 777

SEQ ID NO: 1590 - DNA, 3030 bp, Alphatorquevirus sp.
ggcacctcggacccccgctcgtgctgagcagtcaaggggcaattcgggctcgggactggccgggctatgggcaaggctcttaaagcgtacgtcccccgctatgtttctcggcagggtgtggaggaaacagaaaaggaaagtgcttctgctggctgtgcgagttacacagaaaacatcttccatgagtatctggcgtccccccctcgggaatgtctcctacagggagagaaattggcttgaggccgccgaacgatcccacagttctttttgtggctgtggtgattttattcttcatattactaatttggctgcacgctttgctattcaggggcccccgccggagggtcctccccctcggccgaggccgccgctcctgagagcgctgccggcccccgaggtccgcagggagacgcgcacagagaacccgggcgcctccggtgagccatggcctggcgatggtggtggcagagacgatggcgccgccgcccgtggccccgcagacggtggagacgcctacgacgccggagacctcgacgacctgttcgccgccgtcgaagaagagcaacagtaaggaggcggaggtggaggggcagacgtgggcgacgcacatacacccgacgcgcggtcagacgcagacgcagactcagaaagagacttgtactgactcaatggagcccccagacagtgagaaactgctccatcaggggtatagtgcccatggtaatatgcggacacacaaaagggggtagaaactacgccatccacagcgaagatttcactacacagatacaacccttcgggggcagttttagcacgaccacctggtcgctgaaagtactctgggacgaacaccaaaaatttcaaaacaggtggtcctatccaaacacacagctagacctcgccaggtacaagggagtcacattctggttctacagagaccagaaaacagactatatagtacaatggagcagaaatcctccctttaaactgaacaaatacagcagccccatgtatcaccctggaatgatgatgcaggcaaaaaagaaactagttgtacctagtttccagactagacccaaaggcaaaaagagatacagagtaagaataagaccccccaacatgtttgctgacaagtggtacactcaagaggacctgtgtccggtacctcttgtgcaaattgtggtttctgcggccagcctgctacatccgttctgcccaccacaaacgaacaacccttgcatcaccttccaggttttgaaagacatatattacaattgcataggagttaactctacacagcaaccactctatgaggcacttacaaagacattatataccagccgtacatactatgaaacagtacaagtactggcacaattatcccccaacttccagccagcccttaaacccacatcagctaactcaaacgtaggaaaaacattaggagacgcagtaacagaactcaaatacaacacaggaagtttttatacaaaacagaacccagtatttggcatgtgtaagtaccaaccaacgcaagaaatcatgaagaaagccaatgagtggttctgggacaaccttatgcatgataatgacttacatgcctcatatggcaaagccaacttaaaatgcatggagtaccacacaggcatatacagctccatattcctaagtccccagagaggaatagaattcccagcagcataccaagacgtcacatacaatccaaactgtgatagagcagtaggtaacagggtctggttccaatacagtacaaaaatggacacaaacttcgatgtcaccaaatgcaaatgcgtcgtagaaaacttacccctgtgggcggccttccatggctacgcagactttatagagcaggagctcagcataagctcagaaatccacaactttggcgtagtggtgtttcaatgcccatacacctttcccccctgctacgacaaaaagacaccaagcaagggctacgtattctatgacaccacctttggtaatggaaagatgccagacggatcaggacacatacccgtatactggcagcaaagatggtggatcagactagccttccaggtacaagtcatgcacgactttgtgctaacaggcccctttagctacaaagatgacctagcaaacaccacactcacagcaaggtacaaattcagattcaaatggggcggtaatatcatccccgaacagattatcaagaacccgtgtcagagagagcagtccctcgcttcctaccccgatagacaacgtcgcgacctacaagttgttgacccatcaaccatgggcccgatctacaccttccacacatgggactggcgacgggggctttttggtgcagatgctatccagagagtgtcacaaaaaccgggagatgctctccgctttacaaaccctttcaagagacccagatatcttcccccgacagacagagaagactaccgacaagaagaagacttcgctttacaggaaaaaagacggcgcacatccacagaagaagtccaggacccggagagccccccgcaaaacgcgccgctcgtacagcagcagcagcagcagcgggagctctcagtccagctcgcggagcagcagcgactcggagtccaactccgatacatcctccaagaagtcctcaaaacgcaagcgggtctccacctaaaccccctattattaggcccgccaaaaacaaggtctatctctttgagccccccagaggcctgctcccaatagtgggcaaagaggcctgggaggacgagtacctcacctgcaagcactgggatcgccctcccagaaccaaccacctagacatgcccacctatccctggatgcccacaaacttcaaagtcagcttcaaacttggatttaaaccctaaataaaaatatcaaggccgtacactgttcacttgtcggtgtctacctctataagtcactaagcactccgagcgcagcgaggagtgcgacccttctgggtgggtgcaacgccctcggcagccgcgcgctacgccttcggctgcgcgc

SEQ ID NO: 1591 - protein, 765 aa, Alphatorquevirus sp.
MAWRWWWQRRWRRRPWPRRRWRRLRRRRPRRPVRRRRRRATVRRRRWRGRRGRRTYTRRAVRRRRRLRKRLVLTQWSPQTVRNCSIRGIVPMVICGHTKGGRNYAIHSEDFTTQIQPFGGSFSTTTWSLKVLWDEHQKFQNRWSYPNTQLDLARYKGVTFWFYRDQKTDYIVQWSRNPPFKLNKYSSPMYHPGMMMQAKKKLVVPSFQTRPKGKKRYRVRIRPPNMFADKWYTQEDLCPVPLVQIVVSAASLLHPFCPPQTNNPCITFQVLKDIYYNCIGVNSTQQPLYEALTKTLYTSRTYYETVQVLAQLSPNFQPALKPTSANSNVGKTLGDAVTELKYNTGSFYTKQNPVFGMCKYQPTQEIMKKANEWFWDNLMHDNDLHASYGKANLKCMEYHTGIYSSIFLSPQRGIEFPAAYQDVTYNPNCDRAVGNRVWFQYSTKMDTNFDVTKCKCVVENLPLWAAFHGYADFIEQELSISSEIHNFGVVVFQCPYTFPPCYDKKTPSKGYVFYDTTFGNGKMPDGSGHIPVYWQQRWWIRLAFQVQVMHDFVLTGPFSYKDDLANTTLTARYKFRFKWGGNIIPEQIIKNPCQREQSLASYPDRQRRDLQVVDPSTMGPIYTFHTWDWRRGLFGADAIQRVSQKPGDALRFTNPFKRPRYLPPTDREDYRQEEDFALQEKRRRTSTEEVQDPESPPQNAPLVQQQQQQRELSVQLAEQQRLGVQLRYILQEVLKTQAGLHLNPLLLGPPKTRSISLSPPEACSQ

SEQ ID NO: 1592 - protein, 171 aa, Alphatorquevirus sp.; identical to SEQ ID NO: 950

SEQ ID NO: 1593 - protein, 187 aa, Alphatorquevirus sp.; identical to SEQ ID NO: 951

SEQ ID NO: 1594 - DNA, 3029 bp, Alphatorquevirus sp.
cgtgtcagaccacttcgggctcgcggggcagtcaaggggcaattcgggctcgggactggccgggctatgggcaaggctcttagggtcatcgctctttaaaacatgtttctcggcaggccttacagaaagaaaaggcaagtgccactgcctggcgtgcaccatccaccgcactcacggcctagcatgagccaccactggcgagagcccatcgacaatgtctccaaccgggagaggcactggctcgagtcaatcctcagaagtcaccgagctttttgtggttgccgggatcctgtgcttcattttactaatctggttgcccgtcacaatcttcaaggcggtggtccgtcggcaggtagtcttagggatccgccgccgctgaggagggcgctgccgccaccgccgtcccccagaccgccatgtcctggtggggatggcgccgccgatggtggtccaggccgcggaggcgatggagacgaaggcgggcgcgccgcccgagacgagtacggccgagacgatatagaagacctgctcgccgctatcgaggcagacgagtaaggaggcgccgcgcggggggttggcgggggcgacgcagatacacccgacgctataccagacgactgactgtcaggcgaaagaaaaagaaactaacccttaagatctggcagccccagaatatcaggagatgtaaaataaggggtctgctgcccctcctgatatgcggacacggccgctcagctcacaactatgccatccactcggatgacaagatctcccagcaggagagtttcgggggcggactcagcaccgtcagcttttcccttaaggtactatttgaccagaaccagaggggacttaacaggtggtcgaccagcaacgaccaactagacctcgcccggtacctgggctgcacgttctggttctacagagacaaaaagactgactttatagtgcagtatgatatcagctctccatttaaactagataaaaacagcagtcccagcttccaccccttcttgctaatgaaggccaaacacaaggtgttaatccccagctttgacactaaacccaagggcagggaaaagataaaactcagaatacagccccccaagatgttcatagacaagtggtacactcaggaggacctgtgccccgttattcttgtgtcatttgcggtgagcgcagcttcctttacacatccgttctgctcaccactaacgaacaacccttgcatcaccttccaggtgttgaaagatttctattacagtgccatggggtacggcacaccagaaaccacaatgaccacaatatggaacaccctctacacaactgccacttactatcagtcccacctcactcctcagtttatcagaatgcccactaagaatcctgataacacacagaataacgatgccactacctttaacgactgggttgataaagagtttaaaacaggcaagttagtaaagtacaactttccccagtattgtcctcagatagataagttaaagaaactaagagaatactattttaaatgggaaactcaaacaataggggtagcagtccctcctacgtggaccacccccacagtaaactggtacgagtaccacataggcatgttcagccccatattcctgtcaccatacagatcagcaaaccttgaattccccagagcatatcaagatgtaacttacaatcccctcacagacaaaggggtgggcaaccgcatgtggtaccagtacaacactaagatagacacccagttcgaacccaaatcctgcaaatgtgtcctagaggacatacccctgtacgccatggcctatggatactcagattttctagaacaagagataggagagtaccaggatttagaggccaacggattcgtgtgcgtcatctgtccatacaccaagccccccatgtacaacaaacacaacccccagcaggggtacgtgttctatgactctcagtgggggaatggcaagtggacagacggaaccgggttcgtccccatatactggatgacaagatggagaatagaactacttttccaaaagaaagtactaacagatatagccatgtcaggacccttcagctaccccgatgaacttaaaaacactgtactgactgcgaaatacaggtttgactttaagtggggtggcaatctcttccaccaacagaccattagaaacccctgcaaaccagaagagacctcaaccggtagattcactcgcgaggtacaagtcgttgacccgatcaccatgggcccccgattcgtatttcactcctgggactggagaagagggttccttagtgacagagctctcaaaagaatgttcgagaaaccgcttgatactgagggatttacagcgactccaaaacgacctcgcatattccctcccacagagggacagctcgcccgagaacaaaaggagcaagaagaaagctccgattcgcaggaagaaaccagccttacctcgctcgaagaagtcccggaagagacgcagctacgagtccacctcagaaagcagctccgagagcagcgaagcatccgacaccaactcagagccatgttccagcagcttgtcaagacgcaagcgggcctacacctaaacccccttttatctacccagctataaaccaggcctacatgtttccggagagggccccaaaaccgtctcccaccgctggagactgggccacagaatacctgtgcgccaagatattcgatagaccccccaggtccatactctcagacacccccttctacccctggatgcccaagagcaccccccagttccaagtgtccttcaagcttggattcaaaccctaaataaaaatttcaaggccgtgtcacatacgcttgtcggtgtctacctctataagtcaccaagcactccgagcgtcagcgaggagtgcgaccctctctctgtggacccccttaggcagatactcaacttcttcggagccgcgcgctacgccttcggctgcgcgcggcacctcagacccccgctcgtgctgacacgctcgcg

SEQ ID NO: 1595 - protein, 739 aa, Alphatorquevirus sp.
MSWWGWRRRWWSRPRRRWRRRRARRPRRVRPRRYRRPARRYRGRRVRRRRAGGWRGRRRYTRRYTRRLTVRRKKKKLTLKIWQPQNIRRCKIRGLLPLLICGHGRSAHNYAIHSDDKISQQESFGGGLSTVSFSLKVLFDQNQRGLNRWSTSNDQLDLARYLGCTFWFYRDKKTDFIVQYDISSPFKLDKNSSPSFHPFLLMKAKHKVLIPSFDTKPKGREKIKLRIQPPKMFIDKWYTQEDLCPVILVSFAVSAASFTHPFCSPLTNNPCITFQVLKDFYYSAMGYGTPETTMTTIWNTLYTTATYYQSHLTPQFIRMPTKNPDNTQNNDATTFNDWVDKEFKTGKLVKYNFPQYCPQIDKLKKLREYYFKWETQTIGVAVPPTWTTPTVNWYEYHIGMFSPIFLSPYRSANLEFPRAYQDVTYNPLTDKGVGNRMWYQYNTKIDTQFEPKSCKCVLEDIPLYAMAYGYSDFLEQEIGEYQDLEANGFVCVICPYTKPPMYNKHNPQQGYVFYDSQWGNGKWTDGTGFVPIYWMTRWRIELLFQKKVLTDIAMSGPFSYPDELKNTVLTAKYRFDFKWGGNLFHQQTIRNPCKPEETSTGRFTREVQVVDPITMGPRFVFHSWDWRRGFLSDRALKRMFEKPLDTEGFTATPKRPRIFPPTEGQLAREQKEQEESSDSQEETSLTSLEEVPEETQLRVHLRKQLREQRSIRHQLRAMFQQLVKTQAGLHLNPLLSTQL

SEQ ID NO: 1596 - protein, 150 aa, Alphatorquevirus sp.
MFLGRPYRKKRQVPLPGVHHPPHSRPSMSHHWREPIDNVSNRERHWLESILRSHRAFCGCRDPVLHFTNLVARHNLQGGGPSAGSLRDPPPLRRALPPPPSPRPPCPGGDGAADGGPGRGGDGDEGGRAARDEYGRDDIEDLLAAIEADE

SEQ ID NO: 1597 - protein, 60 aa, Alphatorquevirus sp.
MFPERAPKPSPTAGDWATEYLCAKIFDRPPRSILSDTPFYPWMPKSTPQFQVSFKLGFKP

SEQ ID NO: 1598 - DNA, 3028 bp, Alphatorquevirus sp.
gcgtgtcagaccacttcgggctcgcgggcagtcaaggggcaattcgggctcgggactggccgggctatgggcaaggctcttagggtcatcgctctttaaaacatgtttctcggcaggccttacagaaagaaaaggcaagtgccactgcctggcgtgcaccatccaccgcactcacggcctagcatgagccaccactggcgagagcccatcgacaatgtctccaaccgggagaggcactggctcgagtcaatcctcagaagtcaccgagctttttgtggttgccgggatcctgtgcttcattttactaatctggttgcccgtcacaatcttcaaggcggtggtccgtcggcaggtagtcttagggatccgccgccgctgaggagggcgctgccgccaccgccgtcccccagaccgccatgtcctggtggggatggcgccgccgatggtggtccaggccgcggaggcgatggagacgaaggcgggcgcgccgcccgagacgagtacggccgagacgatatagaagacctgctcgccgctatcgaggcagacgagtaaggaggcgccgcgcggggggttggcgggggcgacgcagatacacccgacgctataccagacgactgactgtcaggcgaaagaaaaagaaactaacccttaagatctggcagccccagaatatcaggagatgtaaaataaggggtctgctgcccctcctgatatgcggacacggccgctcagctcacaactatgccatccactcggatgacaagatctcccagcaggagagtttcgggggcggactcagcaccgtcagcttttcccttaaggtactatttgaccagaaccagaggggacttaacaggtggtcgaccagcaacgaccaactagacctcgcccggtacctgggctgcacgttctggttctacagagacaaaaagactgactttatagtgcagtatgatatcagctctccatttaaactagataaaaacagcagtcccagcttccaccccttcttgctaatgaaggccaaacacaaggtgttaatccccagctttgacactaaacccaagggcagggaaaagataaaactcagaatacagccccccaagatgttcatagacaagtggtacactcaggaggacctgtgccccgttattcttgtgtcatttgcggtgagcgcagcttcctttacacatccgttctgctcaccactaacgaacaacccttgcatcaccttccaggtgttgaaagatttctattacagtgccatggggtacggcacaccagaaaccacaatgaccacaatatggaacaccctctacacaactgccacttactatcagtcccacctcactcctcagtttatcagaatgcccactaagaatcctgataacacacagaataacgatgccactacctttaacgactgggttgataaagagtttaaaacaggcaagttagtaaagtacaactttccccagtattgtcctcagatagataagttaaagaaactaagagaatactattttaaatgggaaactcaaacaataggggtagcagtccctcctacgtggaccacccccacagtaaactggtacgagtaccacataggcatgttcagccccatattcctgtcaccatacagatcagcaaaccttgaattccccagagcatatcaagatgtaacttacaatcccctcacagacaaaggggtgggcaaccgcatgtggtaccagtacaacactaagatagacacccagttcgaacccaaatcctgcaaatgtgtcctagaggacatacccctgtacgccatggcctatggatactcagattttctagaacaagagataggagagtaccaggatttagaggccaacggattcgtgtgcgtcatctgtccatacaccaagccccccatgtacaacaaacacaacccccagcaggggtacgtgttctatgactctcagtgggggaatggcaagtggacagacggaaccgggttcgtccccatatactggatgacaagatggagaatagaactacttttccaaaagaaagtactaacagatatagccatgtcaggacccttcagctaccccgatgaacttaaaaacactgtactgactgcgaaatacaggtttgactttaagtggggtggcaatctcttccaccaacagaccattagaaacccctgcaaaccagaagagacctcaaccggtagattcactcgcgaggtacaagtcgttgacccgatcaccatgggcccccgattcgtatttcactcctgggactggagaagagggttccttagtgacagagctctcaaaagaatgttcgagaaaccgcttgatactgagggatttacagcgactccaaaacgacctcgcatattccctcccacagagggacagctcgcccgagaacaaaaggagcaagaagaaagctccgattcgcaggaagaaaccagccttacctcgctcgaagaagtcccggaagagacgcagctacgagtccacctcagaaagcagctccgagagcagcgaagcatccgacaccaactcagagccatgttccagcagcttgtcaagacgcaagcgggcctacacctaaacccccttttatctacccagctataaaccaggcctacatgtttccggagagggccccaaaaccgtctcccaccgctggagactgggccacagaatacctgtgcgccaagatattcgatagaccccccaggtccatactctcagacacccccttctacccctggatgcccaagagcaccccccagttccaagtgtccttcaagcttggattcaaaccctaaataaaaatttcaaggccgtgtcacatacgcttgtcggtgtctacctctataagtcaccaagcactccgagcgtcagcgaggagtgcgaccctctctctgtggacccccttaggcagatactcaacttcttcggagccgcgcgctacgccttcggctgcgcgcggcacctcagacccccgctcgtgctgacacgctcgc

SEQ ID NO: 1599 - protein, 739 aa, Alphatorquevirus sp.; identical to SEQ ID NO: 1595

SEQ ID NO: 1600 - protein, 150 aa, Alphatorquevirus sp.; identical to SEQ ID NO: 1596

SEQ ID NO: 1601 - protein, 60 aa, Alphatorquevirus sp.; identical to SEQ ID NO: 1597

SEQ ID NO: 1602 - DNA, 3028 bp, Betatorquevirus sp.
cgggtgccgaaggtgagtgaaaccaccgtagtcaaggggcaattcgggctaagtcagtctggcggaacgggcaagaaactaatataatatatcttttacagatatgtccttctcattttggaaaccaacaccctatgatcacagacaacgagaaaacaactggctaaatggaatagttcatcttcacgacaacttctgtggctgtgatcaaccattccaccacctagtatggaaactagcagaaaataactccacaacaacgctctcaaaacaccattttgaccttctacaaaaatgcctcccttcaactactaccgatggaactactggagaaggccccagtaccgcagacgacgctggagaagaagaacctttagacgacggagacctagagcgcctcttcgacgaagattttggcgaagaaccacggtaagaagacgccgttataaaaaaaaacttaagaaaattagaataaatgagtggcaacctactgtaattaaaaaatgccacattaaaggaactattcctctaatacaaggaggaaaagacagacaaggctttaactatgcacaataccaagactcttacgtaccatcacataagggaggtgggggaacatggagcattatggtattttcattaggagcactatatgaagaatgggaaagactgaataatgtatggactagatcaaataacggactaccttttgctagatatttaggttgtaaatttaagttttacagacaagaatactatgactacatagtacactattctatatgctacccaatgacagacacagaagaccaacatttaaactcacacccacacagaataattcaaggaagaaaaaaaataatagttcacagatataacaaacaaatacacaaaaaaccatatgttagaaaaaaaataagaccaccagcactaatgcaatcacactggtacttccaacaagaaatatgtaacacaggcttacttttactaacaacaacaatatgcaacttaaatgattactggctagcacctaacaaccttagcaacaacataagcttctggtcaataaacacaagactttttacaaaccctaattttcaaaacacagactccacagtaggttatacccctaaagacggagtctacttatatgcttcttacaatggatcacctacaacaaacttaacatggaatgaaatggtatatttaggaaacacacaccattacgacccaggacaatcaccacatgacttaccatcatacacattagacaaaacaatagcatttaaagacaaaaaatactggggaaacccctttcactatcaaatatcaaaccaacaagttagattattcatatcaaccaaaaatccaaccacaatacaaacatcagacctaaaagaaaaaattacaaacaccacattatcagatgaacccgtatttcaagaatgtagatacaacccttacaaagataaaggctatggaaatgaagcatactttttatcaaacaccatagcaaaaaagaaagtatgggatccgccagataacaaactactatataacagtggatacccctgctggctactaccatggggatatctagactggcaactaaaactaaaacaaataaaccaaataggaattaactacaattacatatttaaaacagaccaagtacttccaaaactacctgcatacataccagtaaattactcatttgtataccctgacgaagacaaactaactataacagacaaactacatttttaccctaaaaatgattatcaattagatcaaatatcaaacatttgtaactcaggcccaggaacatatcaatttgaacacacagaaagtgtgcaagtaaatgctttttatgacttcttttttaagtggggaggatgcccagcaccaatggaagaagttaaagacccctgtaaccagccacactttcccatccccactgaaatcactgaaggacgtaaaatccaaaatccaaacacaaacaaatcagactacctatactgctttgacgaaagacgagaaacaattacaaaaactgctcaaaaaagaatatgcagagacattgaacctccaaaaactttattcacagatggaagccaactcaacgtcccaatcctcctacaacaaaaagaaaaaacaccgacgacatcgagcgaggaagaagccgaaacgccactactcaagaagctcaagctcctccagcagcacaaacgaaagctcaagcgacgactccacagactaacaaaatcacaatcagaataggaactataaataataaccttttatttcctaaagacactccaaacagaagaatgaacccctgggaagaagagcaagaaaaacaagacgcctacatatggaaaagacctagaagaacatttataaaagatcctcctttttatccgtggttaccaccagaacccaaagttaattttgacttaaagtttaaagaataaataaagaaataaagggcaacgccccattaattcaaactcggtgtctgttcctttaagtctcaacttctctaaacagcctccgcctccctaaattcgggcgccaaaagggggctccgcccccttaaacccccaagggggctccgcccccttaaacccccaagggggctccgcccccttacaccccctaataaatattcaacaggaaaaccacctaatttaaattgccgaccacaaaccgtcacttacttcccctttttgcacacacttccctttttactcattattattcattacattaattattaaacagtgtaattccggggaggagtctaaacagtatataactaactacacttccgaatggctgagtttatgccgccagacggagacgggatcactacagtgactccaggctgactaagggcgggtgccgaaggtgagtgaaaccaccgtagtcaaggggcaattcgggctctaactacacttccgaatggctgagtttatgccgccagacggagacgggatcactacagtgactccaggctgactaaggg

SEQ ID NO: 1603 - protein, 661 aa, Betatorquevirus sp.
MPPFNYYRWNYWRRPQYRRRRWRRRTFRRRRPRAPLRRRFWRRTTVRRRRYKKKLKKIRINEWQPTVIKKCHIKGTIPLIQGGKDRQGFNYAQYQDSYVPSHKGGGGTWSIMVFSLGALYEEWERLNNVWTRSNNGLPFARYLGCKFKFYRQEYYDYIVHYSICYPMTDTEDQHLNSHPHRIIQGRKKIIVHRYNKQIHKKPYVRKKIRPPALMQSHWYFQQEICNTGLLLLTTTICNLNDYWLAPNNLSNNISFWSINTRLFTNPNFQNTDSTVGYTPKDGVYLYASYNGSPTTNLTWNEMVYLGNTHHYDPGQSPHDLPSYTLDKTIAFKDKKYWGNPFHYQISNQQVRLFISTKNPTTIQTSDLKEKITNTTLSDEPVFQECRYNPYKDKGYGNEAYFLSNTIAKKKVWDPPDNKLLYNSGYPCWLLPWGYLDWQLKLKQINQIGINYNYIFKTDQVLPKLPAYIPVNYSFVYPDEDKLTITDKLHFYPKNDYQLDQISNICNSGPGTYQFEHTESVQVNAFYDFFFKWGGCPAPMEEVKDPCNQPHFPIPTEITEGRKIQNPNTNKSDYLYCFDERRETITKTAQKRICRDIEPPKTLFTDGSQLNVPILLQQKEKTPTTSSEEEAETPLLKKLKLLQQHKRKLKRRLHRLTKSQSE

SEQ ID NO: 1604 - protein, 109 aa, Betatorquevirus sp.
MSFSFWKPTPYDHRQRENNWLNGIVHLHDNFCGCDQPFHHLVWKLAENNSTTTLSKHHFDLLQKCLPSTTTDGTTGEGPSTADDAGEEEPLDDGDLERLFDEDFGEEPR

SEQ ID NO: 1605 - DNA, 3027 bp, Alphatorquevirus sp.
acgccctcggcggccgcgcgctacaccgcagtcaaggggcaattcgggctcgggactggccgggctatgggcaaggctcttagggtcatcgctcttaaaaatgttttttggcaggccttacagaaaaaagaaaagggcgctgctactgtctgagctgccagatcgaaagaaaaaaccacctggtgatatgagctggcgccccccggtacacaatgccgccggcattgataggcagttctttgaagcttgctttcgatgccacagtagttgctgcggctgcggcagttttattaatcatcttaatgtactggctgctcgctatggctttactggggggccggcgccgccaggtggtcctcggccggcgccccaggtgaggcccgcgcttcccgcgccggagcccgacccggaggccaacaaccgtgagccatggcatggaactggtggtggcaacgatggagacgccgcggctggaaacccaggcgccgccgctggagacgcctacgatggagaagacctcgacgccctgttcgccgccgtcgccgaagacgcagagtaaggagacggaggtgggggaagagacgggggcgacgcagacggtacacccgtagacgaaagagacgcattaagaccagaaactttaaaaagaaactagtactaactcagtggcacccctctgtagtaagacgctgctttatcaggggcatagtccctatccttatatgcgggcacacaaaatggaacagtaactacgccctgcatagcgaggactacacagaagagggccgctaccctcacggagggtccctctcgaccactacgtggtcactaaaggtgctgtacgacgagtacctaaaacaccacaacttctggggctacccaaacacccagctagacctggccagatacaggggctgctccttcactttctacagacacaaaaaaactgactttatagtatggtggaacagaaagcctccctttaaactaaacaagctgagctgcgcgtccttccacccgggcatgctcatgcaacagaaacacaaggtgctaatcccaagctttgacactaaacccgggggcagagctaaaattaaagtaagaataaagccccccactctgttagaggacaagtggtacactcagcaagacttgtgtccggtaaacctggcgcaacttgtggttactgcggctgactttcaacatccgttctgctcaccacaaacgaacagtccaaccacaaccttccaggtgttgaaagaaatgtattatgacaccataggcatagttgacacacaagaaagttacaattcagttaataataaaagtacatctaacacatacagtgcattcatggacacattagtaacaaagctatacacaacaggatcatactggaactcctttcacacagcagaatatctaaaccccaacgtaacagacacacacaataacaaaatatttaatgaatcatccaacacattagtagaatggctatcaggaaaaggcgacagcaaatttaacacaggcaacagcacccaatttggccacaatacttatttgcctgacaaaactaaactaacaaaagcaaaccagtgctactggacagcactcaccaaacaaaataaccaagctacacaaatagggcaagcacgcaacaaatactttgagtatcacacgggcatttacagtcccatattccttagcagacacagaagcacactaaactttgccagggcctaccaagacgttacatataacccaaactgtgacagaggagttaaaaacagggtgtggacgcaggccctaactaaggccaccacagaatttgacgaaaaacgctgcaagtgcgttctcactgacatgcctctgtgggccgctctctactgctatcataactttgtagaagaagagttaggcatctcctctgaaatctataacgcctgtatagtgtgtgtgcagtgcccttacacctttccccccatgtatgacaagaaaaacccaaacaaggggtacgtattctatgacgccctgttcggaaacggaaagaccccagacggacgcggacaaatagacgttttctggcagcagcggtggtacccccgcatggcctgccaggtacaagttatgcacgacatcaccatgaccggaccgttctcgtaccacgacgaactagtgagtacacaactgactgctaagtacaaatttgacttcatgtggggtggaaacatgatctcctcacagatcatcaagaacccctgcaaagacacagacatggacaccacctatcccagtagacagcgtcgcgacttacaaattgttgacccacactccatggggccctccttcgcgttccacacgtgggactacagacgcggactgtttggtaaagatgctatcgacagagtgtcaaaagaacaagactatgctccagagtatcctaacccatacaaaaagcctagatattttcccccaacagacaggacagagctccaagggcaagaagaagactggagtttccaggtcgaaagcgaggggtcgtcgtcagaagagagcgatcaagaagcccaagaagaggaggtactccagttccagccaggacagcaactccagcaactccacctgcagctcgcgcagcagcagcatatcgggcagcagctccgattcctgttccaacagatgctcaaaacccaggccaatttgcacctaaacccatatacatacacccagctataaacagggtattcatgtttgaaccccagggtcccaggcccataactaccagacaggggtgggaggacgaattcaccactgccagcatatggggcaggcccgtccgctccttctacacagacacccccttctaccccgaggttcccaagataccccctcaattttctgtaagtttcaaactcggctggaaataaaaatacaaggcctttcactgttcacttgtcggtgtctacctcttaaggtcactaagcactccgagcgccagcgaggagtgcgacccttccccctggtgca

SEQ ID NO: 1606 - protein, 768 aa, Alphatorquevirus sp.
MAWNWWWQRWRRRGWKPRRRRWRRLRWRRPRRPVRRRRRRRRVRRRRWGKRRGRRRRYTRRRKRRIKTRNFKKKLVLTQWHPSVVRRCFIRGIVPILICGHTKWNSNYALHSEDYTEEGRYPHGGSLSTTTWSLKVLYDEYLKHHNFWGYPNTQLDLARYRGCSFTFYRHKKTDFIVWWNRKPPFKLNKLSCASFHPGMLMQQKHKVLIPSFDTKPGGRAKIKVRIKPPTLLEDKWYTQQDLCPVNLAQLVVTAADFQHPFCSPQTNSPTTTFQVLKEMYYDTIGIVDTQESYNSVNNKSTSNTYSAFMDTLVTKLYTTGSYWNSFHTAEYLNPNVTDTHNNKIFNESSNTLVEWLSGKGDSKFNTGNSTQFGHNTYLPDKTKLTKANQCYWTALTKQNNQATQIGQARNKYFEYHTGIYSPIFLSRHRSTLNFARAYQDVTYNPNCDRGVKNRVWTQALTKATTEFDEKRCKCVLTDMPLWAALYCYHNFVEEELGISSEIYNACIVCVQCPYTFPPMYDKKNPNKGYVFYDALFGNGKTPDGRGQIDVFWQQRWYPRMACQVQVMHDITMTGPFSYHDELVSTQLTAKYKFDFMWGGNMISSQIIKNPCKDTDMDTTYPSRQRRDLQIVDPHSMGPSFAFHTWDYRRGLFGKDAIDRVSKEQDYAPEYPNPYKKPRYFPPTDRTELQGQEEDWSFQVESEGSSSEESDQEAQEEEVLQFQPGQQLQQLHLQLAQQQHIGQQLRFLFQQMLKTQANLHLNPYTYTQL

SEQ ID NO: 1607 - protein, 167 aa, Alphatorquevirus sp.
LAGLWARLLGSSLLKMFFGRPYRKKKRALLLSELPDRKKKPPGDMSWRPPVHNAAGIDRQFFEACFRCHSSCCGCGSFINHLNVLAARYGFTGGPAPPGGPRPAPQVRPALPAPEPDPEANNREPWHGTGGGNDGDAAAGNPGAAAGDAYDGEDLDALFAAVAEDAE

SEQ ID NO: 1608 - protein, 138 aa, Alphatorquevirus sp.; identical to SEQ ID NO: 1488

SEQ ID NO: 1609 - DNA, 3027 bp, Alphatorquevirus sp.
acccttccccctggtgcaacacacaccgcagtcaaggggcaattcgggctcgggactggccgggccatgggcaagactcttaaaaagctatgtttctcggtaaaatctacaggaagaaaaggaaactgcttctgcagactgtgcgtgctccacaggcgccatcttccatgagccgctgctggtgtcctcctcggggtgatgtctccacccgcgagtcccggtggtacgaggcggttcgaggaagccacgatgctttttgtggctgtggtgatcctattcttcatttttctcgtctggttgcacgttctaaccatcagggacctccgacgccccccacggacgaccgtgcgccgcagaataccccagtgagacgcctactgcctctccccagctaccccggcgagggtcccgctcctagatggcctggtggggatggaggcgccgctggtggcgaccgaagagaaggtggagatggcggcgcgcgcgccgccgaagacgagtaccagcccgaagacctagacgagcttttcggcgctatcgaacaagaacagtaaggaggaggcgaagggggaggcggaggggctaccggcgccgttacagactgagacgctatgccagacgcaggttccgacgcaaaaagatagtcctgactcagtggaacccccagactgtcagaaaatgtataataaggggcatgatgccagtactttgggccggcatgggcacggggggcagaaactacgccgtcaggtcagatgactatgtggttaacaaggggttcgggggcaccttcgccacagagaccttctccctgaaagtcctctatgaccagtttcagaggggcttcaacaggtggtcccacactaacgaggacctagacctggcccgctacaggggctgcaggtggactttttacagacacaaagacacagactttatagtgtactttacaaacaatcctcccatgaaaaccaaccagttctcggcccctctgacgacccccggcatgctcatgcgcagcaaatttaaaatcctgatccccagcttccagaccaggcccaagggtcgcaaaacagtgacagttaggatcaggccccccaaactatttcaagacaagtggtacacccagcaggacctatgttcagttcctcttgtccaactgaacgtgaccgcagctgatttcacacatccgttcggctcaccactaactgaaactccttgcgtagagttccaggtgctgggtgacttgtacaatacatgtctcaatatcgaccttcctgaatttgataaagacggtgaaccacaaaactatagtaaatctaacaaagatgacttaaaaaagttataccaagaactcttcactaaaaagatatctggccactactggcaaacatttataaccaacagtatggtgagagcccacatagacgcagacacggcaaaaaaggctcaatctactggaaccaaagcaacgtataacactgagccattccccacagtgccaactaaacaagacttcaataactggaaaaaacagttcactgacacaagagacagcctctttctcttcgccacttaccaccctgacaaaattaaagaaaccatcaaaaaaatgagagacaacaactttgctctagagacaggccccaatgatctatatggagacagcacagctcaatatgcaggcaacactcacatgctagagtactacctgggcttttacagccccatattcctgtcagatggcaggtccaacgtagaatttttcactgcctacaaagacatagtgtataaccccctgttagacaaggccgagggcaacatggtctggttccaatatcacacaaaaccagacaacaaattcagaaaaccagaatgtcactgggagatcaaagacatgcccctgtgggccctcctcaacggctactcagactacctagagactcaaatccagtggggcgacctcagcaaagaaggcaaagtccttatcagatgcccttacactaagcccccattagtagacaaaaaagatgacacagcaggcttcgtagtctataacagaaactttggcagaggcaagtggatagacggagggggctacatccccctgcacgagagggcaaagtggtatgtcatgctaagataccagacggacgtgttccatgacatagtgacctgtggaccctggcaatatagagacgataataagaacgcccagctagtggccaaataccgcttcagcttcatgtggggaggtaacactgtgcactctcaggtcatcaggaacccgtgcaaagacaaccaagtttccggaccccgtcgacagcctagagacgtacaagtcgttgacccgcagctcgtcacgccgccgtgggtcctccacagcttcgaccagagaagaggcctctttactgagacagctctcagacgtctgctcaagcaaccactacctggcgagtatgctgttacaaccctcaggacacccctcctctttctaccctcagagttccaacgagaagacggcgctgcagaaagcgtctcaggttcaccggccaaaagaccccgtctctggccagaagagagccagacggagacgatctcctcggaggaagacccggcggagacgacgagggagctcctccagcgaaagctccgagagcagcgagcactccagttccagctccagcagttcgcggtccaactcgccaagacccaggcgaatctccacgtaaaccccctgttatccttcccgcagtaaacaaagtgtacctgtttccaccagagaaacccattccaatacaggggtaccacggatggaacacagagtttgaggcctgcgatgcctttgacaggcccccgagaaagttcctcacagacacacctacctacccctggctccccgtccccaatcctgaaataaaagtgagctttaagctcggtttcagataaacaaggccgtgggagtttcactcgtcggtgtctacctcttaaggtcactaagcactccgagcgtcagcgaggagtgcg

SEQ ID NO: 1610 - protein, 779 aa, Alphatorquevirus sp.; identical to SEQ ID NO: 796

SEQ ID NO: 1611 - protein, 154 aa, Alphatorquevirus sp.; identical to SEQ ID NO: 797

SEQ ID NO: 1612 - protein, 126 aa, Alphatorquevirus sp.; identical to SEQ ID NO: 798

SEQ ID NO: 1613 - DNA, 3024 bp, Alphatorquevirus sp.
gcaacgccctcggcggccgcgcgctacgcagtcaaggggcaattcgggctcgggactggccgggctatgggcaaggctcttagggtcatcgctcttaaaaatgtttttcggcagaccttacagaaaaaagaaaagggcgctgtcactgtctggcgtgcgagctccacaggcgaaacggtctcgggacatgacctggcgccccccggtacacaatgccgccggcatcgataggcagttctttgaagcctgctttcgatgccacagtagttgctgcggctgcggcagctttattaatcatcttaatgtactggctgctcgctatggctttactggggggccggcgccgccaggtggtcctcggccggcgccccaagtgaggcccgcgcttcccgcgccggagcccgacccggaggccgacaaccgtgagccatggcgtggagctggtggtggcaacgatggaggcgccgcggctggaaacccaggcgccgccgctggagacgcctacgatggagaagacctcgacgccctgttcgccgccgtcgccgaagacgcagagtaaggagacggaggtgggggaacagacgggggcgacgcagacggtacacccgtagacgaaagagacgcattaaggccagaaagtttaaaaagaaactaatactgactcagtggcacccctctgtagttagacgctgctttatcaggggcatagtccccatcctcatatgcgggcacacaaaatggaacagtaactacgccctgcatagcgaggactacacagaagagggccgctaccctcacggagggtccctctcgaccactacgtggtcactaaaggtgctgtacgacgagcacctaaagcaccacaacttctggggctacccaaacacccagctagaccttgccaggtacaggggctgcaagtttactttttacagacacaaaaagactgactttatagtgtggtggaacagaaagcctccctttaaactaaacaaactgagctgcccgtccttccacccgggcatgctcatgcaacagaaacacaaggtgctaattcctagctttgacactaaacccgggggcagagctaaaattacagtaaaaataaagccccccactctgttagaggacaagtggtacactcagcaagacttgtgtccggtaaacctggcgcaacttgtggttactgcggctgactttcaacatccgttctgctcaccacaaacgaacactccaaccacaaccttccaggtgttgaaagatatgtattatgacaccataggcatagttgacacagaagaagcttacccatcagttaatgatacaaatacatctaagacatacaagcaatttatgcaggaattagtacaaaagctatactccacaggttcctactggaactcctttcacacagcagaatacctaaacccgaatgtcacagacactcacaacaggaaaatatttaatactgaaaacacaacactaacaagttggctcacaacaaaaggcaacaactgctttcaaaccggtaacagcacccagtttggctacaactcatacaaacctgaaaaagacaagataatatcagcaaatgaggcatactggaaagcactcacacaacgaaacgaccaggcaacaccaataggacaggctcgtgccaaagaattcgaataccacactggcatctacagccccatatttctcagcagacacagaagcacactaagctttgccagggcctaccaagacgtcacatacaacccaaactgtgacagaggagttaaaaacagggtgtgggtgcagtctctaactagagccaccacagaatttgacgagaaacgcagcaagtgcgttatcactgacctgcctctgtgggccgccctgtactgctaccacaactttgtagaagaggagctaggcatctcctcagaaatctacaacgcctgtatagtctgtgtacagtgtccttatacctttccccccatgtatgacaaaaaaaacccaaacaaagggtacgtgttctatgacgccctgtttggaaacggaaagaccccagacggacgcggacaggtggacgtgttctggcagcagcggtggtacccccgcatggcctgccaggtccaagtcatgcacgacattaccatgacgggacccttctcctaccacgacgaactagtgagtacacaactgactgccaaatacaaatttgacttcatgtggggtggaaacatgatctcctcacagatcatcaagaacccctgcaaagacacagacatggacaccacctatcccagtagacagcgtcgcgacttacaaattgttgacccacactccatggggccctccttcgcgttccacacgtgggactacagacgcggactgtttggtaaagatgctatcgacagagtgtcaaaagaacaagactatgctccagagtatcctaacccatacaaaaagcctagatattttcccccaacagacagggcagagctccaagggcaagaagaagactggactttcgagatccaaagccaggggtcgtcgtcagaagagagcgatcaagaagcccaagaagaggaggtactccagttccagccaggacagcagctccagcaactccacctgcagctcgcgcagcagcagcagatcgggcagcagctccgattcctgttccaacaaatgctcaaaacccaggccaatctgcacctaaacccatatacatacacccagctataaacagggttttcatgtttgagccccagggccccaggccaataactaccagagaggggtgggaggacgagtacacaactgccggcatatggggcaggcccgtccgctccttctacacagacacccctttctaccccgaggttcctaaaatacctcctcagtttcatgtatctttcaaactcggctggaaataaaaatgcaaggcctttcactattcacttgtcggtgtctacctcttaaggtcactaagcactccgagcgttagcgaggagtgcgacccttccccctggt

SEQ ID NO: 1614 - protein, 768 aa, Alphatorquevirus sp.
MAWSWWWQRWRRRGWKPRRRRWRRLRWRRPRRPVRRRRRRRRVRRRRWGNRRGRRRRYTRRRKRRIKARKFKKKLILTQWHPSVVRRCFIRGIVPILICGHTKWNSNYALHSEDYTEEGRYPHGGSLSTTTWSLKVLYDEHLKHHNFWGYPNTQLDLARYRGCKFTFYRHKKTDFIVWWNRKPPFKLNKLSCPSFHPGMLMQQKHKVLIPSFDTKPGGRAKITVKIKPPTLLEDKWYTQQDLCPVNLAQLVVTAADFQHPFCSPQTNTPTTTFQVLKDMYYDTIGIVDTEEAYPSVNDTNTSKTYKQFMQELVQKLYSTGSYWNSFHTAEYLNPNVTDTHNRKIFNTENTTLTSWLTTKGNNCFQTGNSTQFGYNSYKPEKDKIISANEAYWKALTQRNDQATPIGQARAKEFEYHTGIYSPIFLSRHRSTLSFARAYQDVTYNPNCDRGVKNRVWVQSLTRATTEFDEKRSKCVITDLPLWAALYCYHNFVEEELGISSEIYNACIVCVQCPYTFPPMYDKKNPNKGYVFYDALFGNGKTPDGRGQVDVFWQQRWYPRMACQVQVMHDITMTGPFSYHDELVSTQLTAKYKFDFMWGGNMISSQIIKNPCKDTDMDTTYPSRQRRDLQIVDPHSMGPSFAFHTWDYRRGLFGKDAIDRVSKEQDYAPEYPNPYKKPRYFPPTDRAELQGQEEDWTFEIQSQGSSSEESDQEAQEEEVLQFQPGQQLQQLHLQLAQQQQIGQQLRFLFQQMLKTQANLHLNPYTYTQL

SEQ ID NO: 1615 - protein, 167 aa, Alphatorquevirus sp.; identical to SEQ ID NO: 451

SEQ ID NO: 1616 - protein, 138 aa, Alphatorquevirus sp.; identical to SEQ ID NO: 452

SEQ ID NO: 1617 - DNA, 3024 bp, Alphatorquevirus sp.
gcaacgccctcggcggccgcgcgctacgcagtcaaggggcaattcgggctcgggactggccgggctatgggcaaggctcttagggtcatcgctcttaaaaatgttttttggcagaccttacagaaaaaagaaaagggcgctgtcactgtctggcgtgcgagctccacaggcgaaacggtctcgggacatgacctggcgccccccggtacacaatgccgccggcatcgataggcagttctttgaagcctgctttcgatgccacagtagttgctgcggctgcggcagctttattaatcatcttaatgtactggctgctcgctatggctttactggggggccggcgccgccaggtggtcctcggccggcgccccaagtgaggcccgcgcttcccgcgccggagcccgacccggaggccgacaaccgtgagccatggcgtggagctggtggtggcaacgatggaggcgccgcggctggaaacccaggcgccgccgctggagacgcctacgatggagaagacctcgacgccctgttcgccgccgtcgccgaagacgcagagtaaggagacggaggtgggggaacagacgggggcgacgcagacggtacacccgtagacgaaagagacgcattaaggccagaaagtttaaaaagaaactaatactgactcagtggcacccctctgtagttagacgctgctttatcaggggcatagtccccatcctcatatgcgggcacacaaaatggaacagtaactacgccctgcatagcgaggactacacagaagagggccgctaccctcacggagggtccctctcgaccactacgtggtcactaaaggtgctgtacgacgagcacctaaagcaccacaacttctggggctacccaaacacccagctagaccttgccaggtacaggggctgcaagtttactttttacagacacaaaaagactgactttatagtgtggtggaacagaaagcctccctttaaactaaacaaactgagctgcccgtccttccacccgggcatgctcatgcaacagaaacacaaggtgctaattcctagctttgacactaaacccgggggcagagctaaaattacagtaaaaataaagccccccactctgttagaggacaagtggtacactcagcaagacttgtgtccggtaaacctggcgcaacttgtggttactgcggctgactttcaacatccgttctgctcaccacaaacgaacactccaaccacaaccttccaggtgttgaaagatatgtattatgacaccataggcatagttgacacagaacaaacttacacatcagttaataatgcaaatacatctaacacatacaagcaatttatgcaggaattagtaaaaaagctatactccacaggttcctactggaactcctttcacacagcagaatacctaaacccgaatgtcacagacgttcacaacaacaaaatatttaataatggaggcacaacactaacaagttggctcacaacaaaaggcaacaacaactttcaaaccggtaacagcacccagtttggctacaactcataccaacctacagaaagcaacataaaattagcaaatgatgcatactggaaagcactcacaaaaccaaacaaccaggcaacaccaataggacaggctcgtgccaaagaattcgaataccacactggcatctacagccccatatttctcagcagacacagaagcacactaagctttgccagggcctaccaagacgtcacatacaacccaaactgtgacagaggagttaaaaacagggtgtgggtgcagtctctaactagacccaccacagaatttgacgagaaacgcagcaagtgcgttatcactgacctgcctctgtgggccgccctgtactgctaccacaactttgtagaagaggagctaggcatctcctcagaaatctacaacgcctgtatagtctgtgtacagtgtccttatacctttccccccatgtatgacaaaaaaaacccaaacaaagggtacgtgttctatgacgccctgtttggaaacggaaagaccccagacggacgcggacaggtggacgtgttctggcagcagcggtggtacccccgcatggcctgccaggtccaagtcatgcacgacattaccatgacgggacccttctcctaccacgacgaactagtgagtacacaactgactgccaaatacaaatttgacttcatgtggggtggaaacatgatctcctcacagatcatcaagaacccctgcaaagacacagacatggacaccacctatcccagtagacagcgtcgcgacttacaaattgttgacccacactccatggggccctccttcgcgttccacacgtgggactacagacgcggactgtttggtaaagatgctatcgacagagtgtcaaaagaacaagactatgctccagagtatcctaacccatacaaaaagcctagatattttcccccaacagacagggcagagctccaagggcaagaagaagactggagtttcgaggtccaaagcgaggggtcgtcgtcagaagagagcgatcaagaagcccaagaagaggaggtactccagttccagccaggacagcagctccagcaactccacctgcagctcgcgcagcagcagcagatcgggcagcagctccgattcctgttccaacaaatgctcaaaacccaggccaatctgcacctaaacccatatacatacacccagctataaacagggttttcatgtttgagccccagggccccaggccaataactaccagagaggggtgggaggacgagtacacaactgccggcatatggggcaggcccgtccgctccttctacacagacacccctttctaccccgaggttcctaaaatacctcctcagtttcatgtatctttcaaactcggctggaaataaaaatgcaaggcctttcactattcacttgtcggtgtctacctcttaaggtcactaagcactccgagcgttagcgaggagtgcgacccttccccctggt

SEQ ID NO: 1618 - protein, 768 aa, Alphatorquevirus sp.
MAWSWWWQRWRRRGWKPRRRRWRRLRWRRPRRPVRRRRRRRRVRRRRWGNRRGRRRRYTRRRKRRIKARKFKKKLILTQWHPSVVRRCFIRGIVPILICGHTKWNSNYALHSEDYTEEGRYPHGGSLSTTTWSLKVLYDEHLKHHNFWGYPNTQLDLARYRGCKFTFYRHKKTDFIVWWNRKPPFKLNKLSCPSFHPGMLMQQKHKVLIPSFDTKPGGRAKITVKIKPPTLLEDKWYTQQDLCPVNLAQLVVTAADFQHPFCSPQTNTPTTTFQVLKDMYYDTIGIVDTEQTYTSVNNANTSNTYKQFMQELVKKLYSTGSYWNSFHTAEYLNPNVTDVHNNKIFNNGGTTLTSWLTTKGNNNFQTGNSTQFGYNSYQPTESNIKLANDAYWKALTKPNNQATPIGQARAKEFEYHTGIYSPIFLSRHRSTLSFARAYQDVTYNPNCDRGVKNRVWVQSLTRPTTEFDEKRSKCVITDLPLWAALYCYHNFVEEELGISSEIYNACIVCVQCPYTFPPMYDKKNPNKGYVFYDALFGNGKTPDGRGQVDVFWQQRWYPRMACQVQVMHDITMTGPFSYHDELVSTQLTAKYKFDFMWGGNMISSQIIKNPCKDTDMDTTYPSRQRRDLQIVDPHSMGPSFAFHTWDYRRGLFGKDAIDRVSKEQDYAPEYPNPYKKPRYFPPTDRAELQGQEEDWSFEVQSEGSSSEESDQEAQEEEVLQFQPGQQLQQLHLQLAQQQQIGQQLRFLFQQMLKTQANLHLNPYTYTQL

SEQ ID NO: 1619 - protein, 167 aa, Alphatorquevirus sp.; identical to SEQ ID NO: 451

SEQ ID NO: 1620 - protein, 138 aa, Alphatorquevirus sp.
LEFRGPKRGVVVRRERSRSPRRGGTPVPARTAAPATPPAARAAAADRAAAPIPVPTNAQNPGQSAPKPIYIHPAINRVFMFEPQGPRPITTREGWEDEYTTAGIWGRPVRSFYTDTPFYPEVPKIPPQFHVSFKLGWK

SEQ ID NO: 1621 - DNA, 3023 bp, Alphatorquevirus sp.
tgcaacgccctcggcggccgcgcgctagcagtcaaggggcaattcgggctcgggactggccgggctatgggcaaggctcttagggtcatcgctcttaaaaatgttttttggcaggccttacagaaaaaagaaaagggcgctgctactgtctgagctgccagatcgaaagaaaaaaccacctggtgatatgagctggcgccccccggtacacaatgccgccggcattgataggcagttctttgaagcttgctttcgatgccacagtagttgctgcggctgcggcagttttattaatcatcttaatgtactggctgctcgctatggctttactggggggccggcgccgccaggtggtcctcggccggcgccccaggtgaggcccgcgcttcccgcgccggagcccgacccggaggccaacaaccgtgagccatggcatggaactggtggtggcaacgatggagacgccgcggctggaaacccaggcgccgccgctggagacgcctacgatggagaagacctcgacgccctgttcgccgccgtcgccgaagacgcagagtaaggagacggaggtgggggaagagacgggggcgacgcagacggtacacccgtagacgaaagagacgcattaagaccagaaactttaaaaagaaactagtactaactcagtggcacccctctgtagtaagacgctgctttatcaggggcatagtccctatccttatatgcgggcacacaaaatggaacagtaactacgccctgcatagcgaggactacacagaagagggccgctaccctcacggagggtccctctcgaccactacgtggtcactaaaggtgctgtacgacgagtacctaaaacaccacaacttctggggctacccaaacacccagctagacctggccagatacaggggctgctccttcactttctacagacacaaaaaaactgactttatagtatggtggaacagaaagcctccctttaaactaaacaagctgagctgcgcgtccttccacccgggcatgctcatgcaacagaaacacaaggtgctaatcccaagctttgacactaaacccgggggcagagctaaaattaaagtaagaataaagccccccactctgttagaggacaagtggtacactcagcaagacttgtgtccggtaaacctggcgcaacttgtggttactgcggctgactttcaacatccgttctgctcaccacaaacgaacagtccaaccacaaccttccaggtgttgaaagaaatgtattatgacaccataggcatagttgacacacaagaaagttacaattcagttaataataaaagtacatctaacacatacagtgcattcatggacacattagtaacaaagctatacacaacaggatcatactggaactcctttcacacagcagaatatctaaaccccaacgtaacagacacacacaataacaaaatatttaatgaatcatccaacacattagtagaatggctatcaggaaaaggcgacagcaaatttaacacaggcaacagcacccaatttggccacaatacttatttgcctgacaaaactaaactaacaaaagcaaaccagtgctactggacagcactcaccaaacaaaataaccaagctacacaaatagggcaagcacgcaacaaatactttgagtatcacacgggcatttacagtcccatattccttagcagacacagaagcacactaaactttgccagggcctaccaagacgttacatataacccaaactgtgacagaggagttaaaaacagggtgtggacgcaggccctaactaaggccaccacagaatttgacgaaaaacgctgcaagtgcgttctcactgacatgcctctgtgggccgctctctactgctatcataactttgtagaagaagagttaggcatctcctctgaaatctataacgcctgtatagtgtgtgtgcagtgcccttacacctttccccccatgtatgacaagaaaaacccaaacaaggggtacgtattctatgacgccctgttcggaaacggaaagaccccagacggacgcggacaaatagacgttttctggcagcagcggtggtacccccgcatggcctgccaggtacaagttatgcacgacatcaccatgaccggaccgttctcgtaccacgacgaactagtgagtacacaactgactgctaagtacaaatttgacttcatgtggggtggaaacatgatctcctcacagatcatcaagaacccctgcaaagacacagacatggacaccacctatcccagtagacagcgtcgcgacttacaaattgttgacccacactccatggggccctccttcgcgttccacacgtgggactacagacgcggactgtttggtaaagatgctatcgacagagtgtcaaaagaacaagactatgctccagagtatcctaacccatacaaaaagcctagatattttcccccaacagacaggacagagctccaagggcaagaagaagactggagtttccaggtcgaaagcgaggggtcgtcgtcagaagagagcgatcaagaagcccaagaagaggaggtactccagttccagccaggacagcaactccagcaactccacctgcagctcgcgcagcagcagcatatcgggcagcagctccgattcctgttccaacagatgctcaaaacccaggccaatttgcacctaaacccatatacatacacccagctataaacagggtattcatgtttgaaccccagggtcccaggcccataactaccagacaggggtgggaggacgaattcaccactgccagcatatggggcaggcccgtccgctccttctacacagacacccccttctaccccgaggttcccaagataccccctcaattttctgtaagtttcaaactcggctggaaataaaaatacaaggcctttcactgttcacttgtcggtgtctacctcttaaggtcactaagcactccgagcgccagcgaggagtgcgacccttccccctgg

SEQ ID NO: 1622 - protein, 768 aa, Alphatorquevirus sp.; identical to SEQ ID NO: 1606

SEQ ID NO: 1623 - protein, 167 aa, Alphatorquevirus sp.; identical to SEQ ID NO: 1607

SEQ ID NO: 1624 - protein, 138 aa, Alphatorquevirus sp.; identical to SEQ ID NO: 1488

SEQ ID NO: 1625 - DNA, 3022 bp, Betatorquevirus sp.
cgggtgccgaaggtgagtgaaaccaccgaagtcaaggggcaattcgggctagatcagtctggcggaacgggcaagaaacttaaaagtcaaggggcaattcgggctagatcagtctggcggaacgggcaagaaacttaaaaaatatacttattttacagatatgagctctatgtggaagaaaccatggtactcaccgagacaacaagaacaaaattggcttaatggtatttggcaaacccacgacaacttttgcagctgtggagacacctggctacatcttctatactgcattaacaaagattctccatttagaaaacccctaaaggatattaaaaatatacaatgcctgcttattggaaaagaagacgcaccaactacttcaaaagaagacgacgaccctggttttctacctggagagctagacgcactcttcgacgaaaatactacaaaaagagataccgaagacgccgatacaaggtaaaaaaaagaaagttttttaaaagaaaaactaaaatagttattaaacaatttgtacctaagtctatgaaacgatgcaaaattattggaactaaatgcctagtacaaggaagtccattaagatgccatcataactttattcaatactacaattctaaagtaccagaatttcatccaggaggaggaggatggagtcaaattatattctctctagactctttatatgatgactttttaaaactacaaaatgtatggactaagagcaattgtacattaccgcttgctagatatagaggttgtactatgaaattttaccaaactgattatgttgattatattgtagtttatgatacttgctggcctatggtagacacatacttatcacatgcagacgcagctcctgcatcaatgttcctaaaaaagaacaaaatttgtattccctcaagacaaactcaaactagaaagaaaccatttaaaaaagtgtttatacatccaccttcacaaatgtacaacaaatggtattttcaaaaagaaatttgtaccacacctttacttatgcttactaccactaccacatcctttactaaaccatactgcgactcaaaagctacttctaacaacattagcattaagtgtttaaatccatacatttttcaaaacctaaactttcaaacatatccacaaacatccggctactactgcaaaaaaacctccacagaagatgacgaacatagccatcctatgtacttatatgcagtaacatcaggaacaagtttatcacaagcaattaccgttaaccaaaacaatattggatccttgggtcttattccactttgcaaccctaaaacatatacagcaggaagacctatgtcaaacatgacttgggaaaacaacataaaaaactggggcaacccattttatcacgatatattagacggtgattcataccacatatatatatcactaatgactcctatagatgcttatcaattactaaaaaagacttcagacaaaacttttaacctaacaatacccacaggtccactaatctatacattaagatacaacccagaaacagacaaaggattaaaaaacaaagcatggatactatcaacatctaaaacagcaccaactacaccaccagatgatattaacctaattttagaaggatttccactatatattttattttggggatggacagactggattaaaaaaactaaaattattcaaaacttaaatagaaacggaatagtagcatttaacacagatcaatttgatatacaacttccactatacataccattagatttagacttcatagaaggctacgacccttaccaacaacatgacgaagatggtctacacagattaccatcttcagaaaatcaatctaactggtttccacaattaacttttcaagaccaaacaatagaaaaaatttgtatgtcaggtcctggctgtccaagactatctaacaaacaatatatacaagcaatggttaaatataagtttcactttacttgggggggttgtcctaaatcactagaaaaagcttgtaatccttgttcacagccaacatggaccacgcccgataacatgcatggacgacttgaaatccagaatccaaacaccaacccacttacagaactttacaagtgggactgggacggtgactatgttacaacagaagctatccaaagaatccaagcacacacaacaattgataaatcatcttttgtctcaacagccaacaaaaacacatcaaaagcagcaatacagaagaaacaagaaaagacacaagaggaggaggaaaagacactcctcaaccagctcctccagctccaacaacagcgacaacaactccagaacctcctcctcaacagaataagtacaagataaaaaactgtcgcattaaagcatacttatttccaccagaaaaaccaaaagtaagaaaactaactcgtagagaacaagaagaagaaaacttaatagcagctatatttcatagaccccctagaaaatattttggagatactcctatatatccttggattcctcctgaaccatgtgtaaactttgaattaaactacaaaaaataaacaaggccaactattttcacttgatggtgtcagtttatttaagttcaacttatataaacatccaccgcctccctaaaatttaggcgccaaaattcaaaagggggctccgcccccttacacccccaagggggctccgcccccttacacccccaagggggctccgcccccttatacccccaagggggctccgcccccttacacccccttattaatattcaacaggaaaaccacctaattagaattgccgaccacaaaccgtcacttacttctgctttttataaaacttcctcttttacttattattattcattacattaattagtaatcaccgtaaatccggggaggagcagaataactatataactaactacacttccgaatggctgagtttatgccgccagtcggagacgggatcacatcagtgactccaggctgatcttggg

SEQ ID NO: 1626 - protein, 678 aa, Betatorquevirus sp.
MPAYWKRRRTNYFKRRRRPWFSTWRARRTLRRKYYKKRYRRRRYKVKKRKFFKRKTKIVIKQFVPKSMKRCKIIGTKCLVQGSPLRCHHNFIQYYNSKVPEFHPGGGGWSQIIFSLDSLYDDFLKLQNVWTKSNCTLPLARYRGCTMKFYQTDYVDYIVVYDTCWPMVDTYLSHADAAPASMFLKKNKICIPSRQTQTRKKPFKKVFIHPPSQMYNKWYFQKEICTTPLLMLTTTTTSFTKPYCDSKATSNNISIKCLNPYIFQNLNFQTYPQTSGYYCKKTSTEDDEHSHPMYLYAVTSGTSLSQAITVNQNNIGSLGLIPLCNPKTYTAGRPMSNMTWENNIKNWGNPFYHDILDGDSYHIYISLMTPIDAYQLLKKTSDKTFNLTIPTGPLIYTLRYNPETDKGLKNKAWILSTSKTAPTTPPDDINLILEGFPLYILFWGWTDWIKKTKIIQNLNRNGIVAFNTDQFDIQLPLYIPLDLDFIEGYDPYQQHDEDGLHRLPSSENQSNWFPQLTFQDQTIEKICMSGPGCPRLSNKQYIQAMVKYKFHFTWGGCPKSLEKACNPCSQPTWTTPDNMHGRLEIQNPNTNPLTELYKWDWDGDYVTTEAIQRIQAHTTIDKSSFVSTANKNTSKAAIQKKQEKTQEEEEKTLLNQLLQLQQQRQQLQNLLLNRISTR

SEQ ID NO: 1627 - protein, 140 aa, Betatorquevirus sp.
LAERARNLKVKGQFGLDQSGGTGKKLKKYTYFTDMSSMWKKPWYSPRQQEQNWLNGIWQTHDNFCSCGDTWLHLLYCINKDSPFRKPLKDIKNIQCLLIGKEDAPTTSKEDDDPGFLPGELDALFDENTTKRDTEDADTR

SEQ ID NO: 1628 - DNA, 3021 bp, Alphatorquevirus sp.
tcggctgcgcgcggcacctcagacccccgcttcaaggggcaattcgggctcgggactggccgggctatgggcaaggctctgaaaaaagcatgtttattggcaggcattacagaaagaaaagggcgctgctactgtgtgctgtgcaaccagcaaagaaggcttgcaaactaccaatagtaatgtggaccccacctcgcaatgaccaacactaccttaactggcaatggtactcaagtgtacttagctcccacgctgctatgtgcgggtgtcccgacgttgttgctcattttaatcatcttgcttctgtgcttcgcgccccgcaaaatccacccccacccggtccccagcgaaacctgcccctccgacggctgccggctctcccggctgcgctagaggcgcccggagatagagcaccatggcctatggctggtggcgccgaaggagaagacggtggcgcaggtggagacgcagaccatggaggcgccgctggaggaccagaagacgcagacctgctagacgccgtggccgccgcagaaacgtaaggaggcgccgcagaggagggaggtggaggaggaggtacaggagatggaaaagaaagggcagacgcagaaaaaaagctaaaataataataagacaatggcaacctaactacagaaggagatgtaacatagtaggatacattcctgtactaatatgtggcgaaaatactgtcagcagaaactatgccacacactcagacgataccaactacccaggaccctttggggggggtatgactacagacaaatttactttaagaattctgtatgatgagtacaaaaggtttatgaactattggacagcatctaatgaagacctagacctttgtagatatctaggagtaaacctgtacttttttagacacccagaagtagactttatcataaaaataaataccatgcctccttttctagacacagaactaacagcccctagcatacacccaggcatgctagccttagacagaagagcaaggtggatacctagcttaaagtccagaccaggaaaaaaacactatattaaaataagagtaggggcacctaaaatgttcacagataaatggtacccccaaacagatctttgtgacatggtgcttctaactgtctatgcaaccgcagcggatatgcaatatccgttcggctcaccactaactgactctgtggttgtgaacttccaggttctgcaatccatgtatgatgaaaaaattagcatattaccagaccaaaagttagaaagagagaacctacttagtagtatagcaaattacactcccttttataataccacacaaactatagcccaattaaaaccatttatagatgcaggcaatgtaacattaggtacaacaacaacaacatggggatcatacataaacacaaccaaatttactacaacagccaccacaacctacagctatccaggcactaccacaacagtaactatgttaacttgtaatgactcctggtacagaggaacagtatataacaataaaattacagagttaccaaaaaaagcagctgagttatactcacaagcaacaaaaactttgctaggaaacaccttcacaaatgaagactacacactagaataccatggaggactgtatagctcaatttggctatcccccggcagatcttactttgaaacaccaggagcatacacagacataaaatacaacccatttacagacagaggagaaggaaacatgctatggatagactggctaagcaaaaaaaatatgaactatgacaaagtacaaagtaaatgtttaatatcagacctacctctatgggcagcagcatatggttatttagaattttgtgcaaaaagtacaggagaccaaaatatacacatgaatgccagactactaataagaagtccctttacagacccccaactaatagtacacacaaaccccacaaaaggctttgttccctactctttaaactttggaaatggtaaaatgccaggaggtagtagtaatgtgcctattagaatgagagctaaatggtatccaacattgtttcaccagcaagaagtactagaggccttagcacagtcaggcccctttgcataccactcagacattaaaaaagtatctctgggtatgaaataccgttttaagtggatctggggtggaaaccccgttcgccaacaggttgttagaaatccctgcaaagactcccactcctcgggcaatagagtccctagaagcttacaaatcgttgacccgaaatacaactcaccggaactcacattccatacctgggacttcagacgtggcctctttggccagaaagctattgagagaatgcaacaacaaccaacaactactgacattttttcagcaggccgcaagagacccaggagggacaccgaggtgtaccactccagccaagaaggggagcaaaaagaaagcttacttttccccccagtcaagctcctcagacgagtccccccgtgggaagactcgcagcaggaggaaagcgggtcgcaaagctcagaggaagagacgcagaccgtctcccagcagctcaagcagcagctgcagcaacagcgaatcctgggagtcaaactcagactcctgttcaaccaaatccaaaaaatccaacaaaatcaagatatcaaccctaccttgttaccaagggggggggatctagcatccttatttcaaatagcaccataaacatgtttggagaccccaaaccttacaacccttccagtaatgactggaaagaggaatatgaggcctgtagaatatgggacagacccccaagaggcaatctaagagacacccccttttacccctgggcccccaaagaaaaccagtaccgtgtaaactttaaacttggatttcaataaagctaggccgtgggactttcacttgtcggtgtctgcttataaaagtaaccaagcactccgagcgaagcgaggagtgcgacccttgggggctcaacgccttcggagccgcgcgctacgcct

SEQ ID NO: 1629 - protein, 769 aa, Alphatorquevirus sp.
MAYGWWRRRRRRWRRWRRRPWRRRWRTRRRRPARRRGRRRNVRRRRRGGRWRRRYRRWKRKGRRRKKAKIIIRQWQPNYRRRCNIVGYIPVLICGENTVSRNYATHSDDTNYPGPFGGGMTTDKFTLRILYDEYKRFMNYWTASNEDLDLCRYLGVNLYFFRHPEVDFIIKINTMPPFLDTELTAPSIHPGMLALDRRARWIPSLKSRPGKKHYIKIRVGAPKMFTDKWYPQTDLCDMVLLTVYATAADMQYPFGSPLTDSVVVNFQVLQSMYDEKISILPDQKLERENLLSSIANYTPFYNTTQTIAQLKPFIDAGNVTLGTTTTTWGSYINTTKFTTTATTTYSYPGTTTTVTMLTCNDSWYRGTVYNNKITELPKKAAELYSQATKTLLGNTFTNEDYTLEYHGGLYSSIWLSPGRSYFETPGAYTDIKYNPFTDRGEGNMLWIDWLSKKNMNYDKVQSKCLISDLPLWAAAYGYLEFCAKSTGDQNIHMNARLLIRSPFTDPQLIVHTNPTKGFVPYSLNFGNGKMPGGSSNVPIRMRAKWYPTLFHQQEVLEALAQSGPFAYHSDIKKVSLGMKYRFKWIWGGNPVRQQVVRNPCKDSHSSGNRVPRSLQIVDPKYNSPELTFHTWDFRRGLFGQKAIERMQQQPTTTDIFSAGRKRPRRDTEVYHSSQEGEQKESLLFPPVKLLRRVPPWEDSQQEESGSQSSEEETQTVSQQLKQQLQQQRILGVKLRLLFNQIQKIQQNQDINPTLLPRGGDLASLFQIAP

SEQ ID NO: 1630 - protein, 150 aa, Alphatorquevirus sp.
MFIGRHYRKKRALLLCAVQPAKKACKLPIVMWTPPRNDQHYLNWQWYSSVLSSHAAMCGCPDVVAHFNHLASVLRAPQNPPPPGPQRNLPLRRLPALPAALEAPGDRAPWPMAGGAEGEDGGAGGDADHGGAAGGPEDADLLDAVAAAET

SEQ ID NO: 1631 - protein, 57 aa, Alphatorquevirus sp.
MFGDPKPYNPSSNDWKEEYEACRIWDRPPRGNLRDTPFYPWAPKENQYRVNFKLGFQ

SEQ ID NO: 1632 - DNA, 3020 bp, Betatorquevirus sp.
cgggtgctgaaggtgagtgaaaccaccgaaatcaaggggcaattcgggctaggttagtctagcggaacgggcaagaaacttaatattatatatttttttacagaaatgagcaaatactacaaaccattaacaatatctaagaagcatagagaactacaatggataaacttaatggttgcagctcacgaccaatactgccaatgcaatgaatgcctaaaacatataattaccgcaattattgaaagagaaccaactttaaaatttgataaagaagactccgaaaaaattaaaaaatgccttactactggagaccatggagacgaccatggagacgacgatggagacgttcttggagacggcgatctagaaaagcttttcgaacaagacgtctttggagaaaccgcagataccgggtaaggagaatacgacataaacttaaaaatattactataaaacaatggcaaccaacaactatcaaaagactaactatcagaggtatctatcctctattttctggaactactgatagaataggctttgacaatacagcctacatagacagaatagcacctaaaaattaccctggaggaggactgtactctataactgtatttactttacaaggactatacgaactgcatacaaaatttagaaattggtggactgtatcaaactgtaacttaccattaatacgctattatggctgcactatgaaattctttaactcttcatctgtagactatgttactgtacctgtaaactgtggagaactaaaagccacagaaaaaatgtttcaatcctgtcaacctgctgtattaatgttaaacaaaagaaaaaaagttttattatgtaaaaactataaacacaggcgtagaccgtacaaaaaagcatttataaaacccccagcattactaactaacaaatggtattttcaaaaagaacttgcaaactttcctttagtaatgcttctctctgctgcaatgagtttagacagatactttttaccagcaacctctgtttcagagtctataggctttgaagctctaaacacagactttttccaactacataactggaaaccatcttcatttgtaatatacaaacctcaacctgaatggtatatactagcagtaccaaatccaacacaaacatggcaaaaaacaaagccaacacaatgggtagtactaggaaacacaaaagaccatattttaggaaatcccataggcaatgttactagaggcacaacctgggaaaacttagtagaaaaacacataaaatccaaactaaacctaggaaatccatttcatgaaacatactttagtcaagaaaacccagatatgatgtgcctacttaatgtaccattacaatcaactttagatgcagaactaaaaagactagaccctgacaaaacaggagagcagcaaactccaggacacctaatatctataacaaaaccatttacaattaactgtagatacaatccacaaccagacacaggacaaaatgtagcctttatggctaacataacaacagacacaacaacatggcacgaaccatcagatactcacatacttacaaaaggacttccattatggatgctattatggggatggcacgactacttagcaaaaacaaaagtacctatacacctagatacagactgggcaatgtgcatagtatcagattttatttcacctgaatctatgacttattatgtccccttagattggttttttttaaatggcagaagtccctacgctgaacaacatgaaataaaaccatatgaccaacaaaattggcatcctaaatggaactttcaaacacaatccacctctcacatattacaaacaggtccaggaacagcaaaattacctccactcataagtgctgaaggtcacgtccaatacaaatttcattttaaggttggaggctgccccccaaaaatggatgaagtttgcgaaccatctaaacaaccagactaccctgaacccggtaacctcatatcgtcaattttattgcagaatccagaatatcccataccatactacattaactcctttgaccaaagaagggacttgctcacagaaagagctgctaaacgcatcaaagaagacaaagaacttacagaaactgtttttaaacctacaggaacaactctcctcagtctcaaagcaacatccccccagacaacatcgacggaggactcatcgacggaggaagaaagcgaaaaggagacacagcagctcatccaccgacaccacagaaagcagcgaaaactccagcacggaatcagaaagctcctgaaactactacaaaatacacaataaaaaactgtaatataaaagtaaaactatttccagatgaaaaacctaaacctaggcgtatgaatcctaaggaattccaaacagagttagaattagctaaatggatgcacagaccaccctgtacatatattggtgataaacctttttatccatggcttgtacctgaacctgttgtaaactttgacctgaaatttaaacaataaaggccagcattatttcacttagtaaagcatgtttatttaagtttaactttaataaacggacaccgcctccctaatacgcaggcgcacagggggctccgccccctgtaacccccaggggggacacccccctttccaccccccgaaaaaccacaaaattaacatagccgaccaccaacgaacaggaaaccacaaaatttgcattgccgaccacaaactgacaggaaaaccgcaaaatttacattgccgaccacaaacgaacactcacttccctattttacaaaacttcctcttttgtatatacatattcataagattaattaatagtcaccatcatttcctaggaggagccaattacctatataactaactgcacttccgaatggctgagtttatgccgctagacgaagacaagatcagtttactgactcttggctaaccttgggcgggtgctgaaggtgagtgaaaccaccgaaatcaaggggcaattcggggg

SEQ ID NO: 1633 - protein, 677 aa, Betatorquevirus sp.
MPYYWRPWRRPWRRRWRRSWRRRSRKAFRTRRLWRNRRYRVRRIRHKLKNITIKQWQPTTIKRLTIRGIYPLFSGTTDRIGFDNTAYIDRIAPKNYPGGGLYSITVFTLQGLYELHTKFRNWWTVSNCNLPLIRYYGCTMKFFNSSSVDYVTVPVNCGELKATEKMFQSCQPAVLMLNKRKKVLLCKNYKHRRRPYKKAFIKPPALLTNKWYFQKELANFPLVMLLSAAMSLDRYFLPATSVSESIGFEALNTDFFQLHNWKPSSFVIYKPQPEWYILAVPNPTQTWQKTKPTQWVVLGNTKDHILGNPIGNVTRGTTWENLVEKHIKSKLNLGNPFHETYFSQENPDMMCLLNVPLQSTLDAELKRLDPDKTGEQQTPGHLISITKPFTINCRYNPQPDTGQNVAFMANITTDTTTWHEPSDTHILTKGLPLWMLLWGWHDYLAKTKVPIHLDTDWAMCIVSDFISPESMTYYVPLDWFFLNGRSPYAEQHEIKPYDQQNWHPKWNFQTQSTSHILQTGPGTAKLPPLISAEGHVQYKFHFKVGGCPPKMDEVCEPSKQPDYPEPGNLISSILLQNPEYPIPYYINSFDQRRDLLTERAAKRIKEDKELTETVFKPTGTTLLSLKATSPQTTSTEDSSTEEESEKETQQLIHRHHRKQRKLQHGIRKLLKLLQNTQ

SEQ ID NO: 1634 - protein, 103 aa, Betatorquevirus sp.
MSKYYKPLTISKKHRELQWINLMVAAHDQYCQCNECLKHIITAIIEREPTLKFDKEDSEKIKKCLTTGDHGDDHGDDDGDVLGDGDLEKLFEQDVFGETADTG

SEQ ID NO: 1635 - DNA, 3019 bp, Alphatorquevirus sp.
cttcggctgcgcgcggcacctcagacccccgctaaggggcaattcgggctcgggactggccgggctatgggcaaggctctgaaaaaagcatgtttattggcaggcattacagaaagaaaagggcgctgccactgtgtgctgtgcgaccagcaaagaaggcttgcaaactactaatactaatgtggaccccacctcgcaatgaccaacagtaccttaactggcaatggtactcaagtgtacttagctcccacgctgctatgtgcgggtgtcccgacgttgtcgctcattttaatgatcttgcttctgtgcttcgcgccccgcaaaatccacccccacccggtccccagcgaaacctgcccctccgacggctgccggctctcccggctgcgccagaggcgcccggagatagaccaccatggcctatggctggtggcgccgaaggagaagacggtggcgcaggtggagacgcagaccatggaggcgccgctggaggactagaagacgcagacctgctagacgccgtggccgccgcagaaacgtaaggaggcgccgcagaggagggaggtggaggaggaggtacaggagatggaaaagaaagggcaaacgcagaaaaaaagctaaaataataataagacaatggcaacctaactacagaaggagatgtaacatagtaggatacattcctgtactaatatgtggcgaaaatactgtcagcagaaactatgccacacactcagacgataccaactacccaggaccctttggggggggtatgactacagacaaatttactttaagaattctgtatgatgagtacaaaaggtttatgaactattggacagcatctaatgaagacctagacctttgtagatatctaggagtaaacctgtacttttttagacacccagaagtagactttatcataaaaataaatactatgcctccttttctagacacagaactaacagcccctagcatacacccaggcatgctagccttagacagaagagcaaggtggatacctagcttaaagtccagaccaggaaaaaaacactatattaaaataagagtaggggcacctaaaatgttcacagataaatggtacccccaaacagatctttgtgacatggtgcttctaactgtctatgcaaccgcagcggatatgcaatatccgttcggctcaccactaactgactctgtggttgtgaacttccaggttctgcaatccatgtatgatcaaaacattagcatattaccagaagaaaagtcacaaagacaaatcctacttactagtatagcaaactacattcccttttataataccacacaaactatagcccaattaaaaccatttatagatgcaggcaatgtaacatcaagtacaacagcaacaacatggggatcatacataaacacaaccaaatttactacaacagccaccacaacctacacatatccaggcactaccacaacagtaactatgttaacttgtaatgactcctggtacagaggaacagtatataacaataaaattaaagaattaccagaaaaagcagctgagttatactcaaaagcaacaaaaactttactaggaaacaccttcacaaatgaagacttcacactagaataccatggaggactgtatagctcaatttggctgtcccccggcagatcttactttgaaacaccaggagcatacacagacataaaatacaacccatttacagacagaggagaaggaaacatgctatggatagactggctaagcaaaaaaaatatgaactatgacaaagtacaaagtaaatgtttaatatcagacctacctctatgggcagcagcatatggttatttagaattttgtgcaaaaagtacaggagaccaaaatatacacatgaatgccagactactaataagaagtccctttacagacccccaactaatagtacacacaaaccccacaaaaggctttgttccctactctttaaactttggaaatggtaaaatgccaggaggtagtagtaatgtgcctattagaatgagagctaaatggtatccaacattgtttcaccagcaagaagtactagaggccttagcacagtcaggcccctttgcataccactcagacattaaaaaagtatctctgggtatgaaataccgttttaagtggatctggggtggaaaccccgttcgccaacaggtcgttagaaatccctgcaaagactcccactcctcgggcaatagagtccctagaagcttacaaatcgttgacccgaaatacaactcaccggaactcacattccatacctgggacttcagacgtggcctctttggccagaaagctattgagagaatgcaacaacaaccaacaactactgacattttttcagcaggccgcaagagacccaggagggacaccgaggtgtaccactccagccaagaaggggagcaaaaagaaagcttacttttccccccagtcaagctcctcagacgagtccccccgtgggaagactcgcagcaggaggaaagcgggtcgcaaagctcagaggaagagacgcagaccgtctcccagcagctcaagcagcagctgcagcaacagcgaatcctgggagtcaaactcagactcctgttcaaccaagtccaaaaaatccaacaaaatcaagatatcaaccctaccttgttaccaagggggggggatctagcatccttatttcaaatagcaccataaacatgtttggagaccctaaaccttacaacccttccagtaatgactggaaagaggaatatgaggcctgtagaatatgggatagacccccaagaggcaatctaagagacacccccttttacccctgggcccccaaagaaaaccagtaccgtgtaaactttaaacttggatttcaataaagctaggccgtgggactttcacttgtcggtgtctgcttataaaagtaaccaagcactccgagcgaagcgaggagtgcgacccttgggggctcaacgccttcggagccgcgcgctacgc

SEQ ID NO: 1636 - protein, 769 aa, Alphatorquevirus sp.
MAYGWWRRRRRRWRRWRRRPWRRRWRTRRRRPARRRGRRRNVRRRRRGGRWRRRYRRWKRKGKRRKKAKIIIRQWQPNYRRRCNIVGYIPVLICGENTVSRNYATHSDDTNYPGPFGGGMTTDKFTLRILYDEYKRFMNYWTASNEDLDLCRYLGVNLYFFRHPEVDFIIKINTMPPFLDTELTAPSIHPGMLALDRRARWIPSLKSRPGKKHYIKIRVGAPKMFTDKWYPQTDLCDMVLLTVYATAADMQYPFGSPLTDSVVVNFQVLQSMYDQNISILPEEKSQRQILLTSIANYIPFYNTTQTIAQLKPFIDAGNVTSSTTATTWGSYINTTKFTTTATTTYTYPGTTTTVTMLTCNDSWYRGTVYNNKIKELPEKAAELYSKATKTLLGNTFTNEDFTLEYHGGLYSSIWLSPGRSYFETPGAYTDIKYNPFTDRGEGNMLWIDWLSKKNMNYDKVQSKCLISDLPLWAAAYGYLEFCAKSTGDQNIHMNARLLIRSPFTDPQLIVHTNPTKGFVPYSLNFGNGKMPGGSSNVPIRMRAKWYPTLFHQQEVLEALAQSGPFAYHSDIKKVSLGMKYRFKWIWGGNPVRQQVVRNPCKDSHSSGNRVPRSLQIVDPKYNSPELTFHTWDFRRGLFGQKAIERMQQQPTTTDIFSAGRKRPRRDTEVYHSSQEGEQKESLLFPPVKLLRRVPPWEDSQQEESGSQSSEEETQTVSQQLKQQLQQQRILGVKLRLLFNQVQKIQQNQDINPTLLPRGGDLASLFQIAP

SEQ ID NO: 1637 - protein, 150 aa, Alphatorquevirus sp.
MFIGRHYRKKRALPLCAVRPAKKACKLLILMWTPPRNDQQYLNWQWYSSVLSSHAAMCGCPDVVAHFNDLASVLRAPQNPPPPGPQRNLPLRRLPALPAAPEAPGDRPPWPMAGGAEGEDGGAGGDADHGGAAGGLEDADLLDAVAAAET

SEQ ID NO: 1638 - protein, 57 aa, Alphatorquevirus sp.; identical to SEQ ID NO: 1631

SEQ ID NO: 1639 - DNA, 3019 bp, Alphatorquevirus sp.; identical to SEQ ID NO: 1635

SEQ ID NO: 1640 - protein, 769 aa, Alphatorquevirus sp.; identical to SEQ ID NO: 1636

SEQ ID NO: 1641 - protein, 150 aa, Alphatorquevirus sp.; identical to SEQ ID NO: 1637

SEQ ID NO: 1642 - protein, 57 aa, Alphatorquevirus sp.; identical to SEQ ID NO: 1631

SEQ ID NO: 1643 - DNA, 3019 bp, Betatorquevirus sp.
cgggtgccgaaggtgagtgaaaccaccgtagtcaaggggcaatatgggcagaattagtctggcggactgggcaacaaacttaaaatataaatttttttacagatgtccgactatgtaaaaccttcagaatatactaactatcaaaaagaaacagcatggattaacgatatacaccacgtacacgacattttctgcttttgtgacaacactgtcaaccatcttcttcaatgtcttcttatgagaggagcccaatttaacctcaccaaacaacaaagaagactactgcaaaaatgccttattactaccgaagaccaagatggcgatggagacggcgcttcttcagaaaaccagtccgcttccaaagaagaagatttcgacctaaacataggagacctagaacaactcttcgccgaaaacgacaaagatgggtaagaaaaaacttattttttaaaagaaagaaaaagaaaactcttaccctaaaacaatggcaaccagaattaattagaaaaagtcatattaaaggactatttactttatttgcttgcaatgaaggacgcttaagtaataactggccacaatacagagactcttttactcctgaatttcaacctgcgggaggtggttggggactatttgtatttaatttaggagcattatttcaagaatttcaaagagtaagaaattactggactgttagcaatattaatttacctcttgtaagatatctttactgtaccttaaagttttatagagctgataatgttgattatgttgttacatatactactagctatcctatgacagacaacgaattaagacacgcagacgctcaaccaagcagaatgttaatgaggagacacaaaataatagttcagagtagaaaacacacacatagaaaaccatacgttagaaaaagaatctatccaccaaaacaaataattaacagatggttttttcaaagacagtttgttaacaccaatctactaatgcttacagttacagcttgtgacttaacacactatgatataggatactatgatatttccaacaatattagtttaaaaacattaaactactacaaattcccaacattaaactaccaaagacaaaacacaactacaccttttcaacccaaaactggtacatacctctatggagtagacccaactaaaataaactttaataatacaacaaatcctttacaaaacataaaatatggagaccttatatttttgggacaagctacacgcagaacagcaggcataacatttcaaaacagcactaaaacaacttggacagagtatgtaaacaccaacaacagcggagaatggggaaatccatttcatgaagaatacatacatgaccaattagcaatactacaatctaatgttcaaccaacaaattttacttcaccagaaaaaaataaaggcatagaaataacaaaatttacaataatgacagaacctatgtttgaaaccattagatacaatccagacaaagacacaggaaaagacaccatgatatacttagtacctaattttcaaagctatacagaatggaaaaaaccagaaaatgagcaattaatatttcatggctttccgctatggatgctattatggggatgggtagactggcaaaaaaaattagcactagtaaatcaaatagaccaacactatatagtaattatagaaacaaaagcatttgaaccagaaagaccaaaatacatgctactagaccaagaatttttagacaacactttagaatttgcacaactagcaccagatagcccagaagaaaaaccatttttacatgatgaacaaaactggtatccaaaattctggtatcaacaaaaatccatagaaaaaatttgttctataggcccaggaacacacaaatttaaacaaagagaaagcatacaagcacatttaaaatatgacttttgttttaagtggggaggaactccatcaacactcgaaacaattgcagacccctccaagcaaatacaatatcccactccctgtgacatcacttcgagaattcaaatccaggatccaacaacagaccccagggacctcatctacaactttgatgttaggagatacgaactcacacaaaaagcaacaaaaagactcacaagaccaacagactctgaccaaccttgttcaatttttacagactacttcaacccagcaccaccacaacaagaaaaagacctactacaagcactcatcgaagcacaaacaaagaaaaaagaaaaagaggagacactcaagctcttccaacacctcagagagcgacaacagtatatccagcagcgactccacagactaataatacaaagtataaaataataaactcacactgcaaagtgtctatgtttactagtgacaataaaataaaacctagaaggtttactccacaagagtatcaatgggaactatggcaagcaaaagccttttgtagaccacctagacaatttttcggagacgccccaacatatccatggttacccccaacacctcttgtaaactttgacttaaaatacaaagaataaaatttcaacgccagcaaaaattcactctcggtgtccatttattaaagttaaaacttatataaacatccaccactctcccaaatacgcaggcgcacagggggctccgccccctgaaacccccaggggggggggggggggggggggggggggggggggggggggggggggggggggggcccctaaccccccccaaaacattaaccaacacaggaaaaccaccaaatttgcatggctaaccacaaacgttcagcggaaaccacaaaatttgcattgccgaccacaaacgattatgctaattaacttcccaaaaacactcttcaacttccctaaaaattaattaataatcaccatcactattacgtattataggaggagctacaaatatataaaagcaagtataccttcgaatggctgagtttatgctgccagacggagacgcgataacaactcgcggctaattctggg

SEQ ID NO: 1644 - protein, 686 aa, Betatorquevirus sp.; identical to SEQ ID NO: 1527

SEQ ID NO: 1645 - protein, 109 aa, Betatorquevirus sp.; identical to SEQ ID NO: 1528

SEQ ID NO: 1646 - protein, 131 aa, Betatorquevirus sp.; identical to SEQ ID NO: 1529

SEQ ID NO: 1647 - DNA, 3019 bp, Betatorquevirus sp.
cgggtgccgaaggtgagtgaaaccaccgaagtcaaggggcttatcgggctgaatcagtcttggcggaacgggcaactaacttaaatgatttaccctacagatatggcctttccatggagaccaacagcattcggacctagaggaagagaattaaaatggcttaattctgtctttgaatcccactcctgcttctgtggatgcgactctgcttacctacacttcattaccggctgcaaccactctgaatacggatttctaacagacaaagaaatactaactgcagaatgcctctccgctggtggtggaaaagacgccgtcccttcaacttctacagacaaaaatactggagacgccgtagacggcctaatacctggagaactagaagggctattccaagaaccctttacagaagaacaaggagaagacgaagggtaagaaaatacttttataaacataaaaaacagaaaaaaaaaaagattcctatatttcaatggcaaccaaagagcatagtaaaatgcaaaattaaaggaatctttgacttattatactgctcaaaaggcagagaacaatttaactttgctcaatatcaagaaagctttgtgccacacttagaacccggaggagggtcatggggactatatgtatttagcctaagtgccttatttcaagaatgggaaaaactgcataacttttggactaaaagtaacttaaaatatgacttgtgtagatataatggtgtaaaatttagattttatagacaagaccatgtagactatgttgtaaaatattcaacatgttatcccatggtagacacaatctacacacacgcagcatgccatccaaacagactattatcctcaaaccaaaaaatactagttagaagcttccacaacacaaaaagcaaaaaaccttatgttaaaaaatatataagaccaccacaattaatgaaatctaaatggttctttcaaaaagaactatctaacacaccactattactactatcagtagcctcaacaactttaaactctacatttattaatccaaaccaacaaagtacaaatataacatttaatgtactaaaccccaaagtatttcaaaaggccaactggcagtcaggcacaggaaacaattacagacctaacgcaacatattactactggggtggtgaccaacatacaccaccagaccaaaaaccacaacccaaagaagtggtgcaactaactgccactgaaaacagacaaggaacaccatcctcaaaattaactggaaatatatttttccatagatatttacattcagaatggggagtatgggtaacatcaaaagaagcccctacaacacaacaagatttttcaccactaagtcaaccattattaatacaatgtagatacaacccacaaagagacacaggactcctaaatgaggcatatatactaccaaaccacaattcagataactttaatccaccaacaggaacaaatgaacacatagacggcttcccactatggttaatgttctggggcttaactgactggtggagaaaatctaaaccaggctcacaaattgatttaaactatacattctgttttaaatcccaatttgtcacacccaaactagattactacgtaccaataaacgaaagcttcataaaaggtttgggaccatataacaatgaagaaattacaactacaaatttaaaacactggtacccaagaatattataccaaaatgaagtactaaatgacttttgtacctgtggacctaatgctccacgcccattacaaaaatcatgggaagctaaatgtgaatatgaatttctttttaagtggggaggatgccctccaaaatctcaagatgttgacgaccctacaaaaaagccacaatatcccatccccgataaaatcagcctcggaccacaaatcgaagatcctgaaacagacccaaaacttaaactctttgcatgggactttagaagggatatcattaccgcaaaagctcttaaaagaatacgagaaaaccaagacattaaagacattatgcttgaaattacagaacgatctccaaaacgaggacgaatggaccccgtcgcctaccaaaaagaacaagagccaacattataccaagcactccaacaaacaccgccgccgcaagaaatacaaacacaaccggagagactactccagtacttcagaaaccaacagcagctcctcagacagcagctaacattactggaccaaattcaacaaaacaaatacaaaaaacaactataaaatgtgtacattatactcaattgtttaaaagtactgttataaaaaacaggagactaaatgcttatgatttagaagatgaaaaatatctctgtaaaatatttcacagaccccctagacactttctgttagatcacccttattacccctggttacctaaacatcataacaaaaaaatgtacaatgataatttcaatgttaactttgacttaaactttcaagatgaataaacaaggccaacaatattcactctcggagtccgtttatataagttaaactttaataaacatccaccacactccctaaattgttggcctaaaaataaaggcctaaaaacaaaatggctgccaaaacacaaaatggcgcctaattaccataaaaattaatattataattagccggggggcaaagcccccccggacccccgggggggggggggggcccccccggacccccctggggggcaaagccccccagacccccttggggggctaagccccccaaaccccccgggggggctacgccccccctataccccccctttaaaccacaaaatttgcattgccgaccacaaacagacatatgctaattaacttctcctttctcacctaacttcctcaaaaattaattagtaatcatcgtcacacagggcgtgccttctatgctatatattcaacgacacttccgaatggctgagtttatgccgccagacgaagacggcaactgttcacagtctgcaggctgattcaggg

SEQ ID NO: 1648 - protein, 661 aa, Betatorquevirus sp.
MPLRWWWKRRRPFNFYRQKYWRRRRRPNTWRTRRAIPRTLYRRTRRRRRVRKYFYKHKKQKKKKIPIFQWQPKSIVKCKIKGIFDLLYCSKGREQFNFAQYQESFVPHLEPGGGSWGLYVFSLSALFQEWEKLHNFWTKSNLKYDLCRYNGVKFRFYRQDHVDYVVKYSTCYPMVDTIYTHAACHPNRLLSSNQKILVRSFHNTKSKKPYVKKYIRPPQLMKSKWFFQKELSNTPLLLLSVASTTLNSTFINPNQQSTNITFNVLNPKVFQKANWQSGTGNNYRPNATYYYWGGDQHTPPDQKPQPKEVVQLTATENRQGTPSSKLTGNIFFHRYLHSEWGVWVTSKEAPTTQQDFSPLSQPLLIQCRYNPQRDTGLLNEAYILPNHNSDNFNPPTGTNEHIDGFPLWLMFWGLTDWWRKSKPGSQIDLNYTFCFKSQFVTPKLDYYVPINESFIKGLGPYNNEEITTTNLKHWYPRILYQNEVLNDFCTCGPNAPRPLQKSWEAKCEYEFLFKWGGCPPKSQDVDDPTKKPQYPIPDKISLGPQIEDPETDPKLKLFAWDFRRDIITAKALKRIRENQDIKDIMLEITERSPKRGRMDPVAYQKEQEPTLYQALQQTPPPQEIQTQPERLLQYFRNQQQLLRQQLTLLDQIQQNKYKKQL

SEQ ID NO: 1649 - protein, 116 aa, Betatorquevirus sp.
MIYPTDMAFPWRPTAFGPRGRELKWLNSVFESHSCFCGCDSAYLHFITGCNHSEYGFLTDKEILTAECLSAGGGKDAVPSTSTDKNTGDAVDGLIPGELEGLFQEPFTEEQGEDEG

SEQ ID NO: 1650 - protein, 68 aa, Betatorquevirus sp.
LFKSTVIKNRRLNAYDLEDEKYLCKIFHRPPRHFLLDHPYYPWLPKHHNKKMYNDNFNVNFDLNFQDE

SEQ ID NO: 1651 - DNA, 3018 bp, Alphatorquevirus sp.
ctaagcactccgagcgtcagcgaggagtgcgtcaaggggcaattcgggctcgggactggccgggctatgggcaaggctcttaaaaagccatgtttctcggtaaactttacagaaagaaaaggaaactgctactgcaggctgtgcgtgctccacaggcgccatcttccatgagctccacctggcgagtgccccgcggcgatgtctccgcccgcgagctatgttggtaccgctcagttcgagagagccacgatgctttttgtggctgtcgtgatcctgtttttcatctttctcgtctggctgcacgttctaaccatcagggacctccgacgccccccacggacgagcgcccggcggcgtctaccccagtgaggcgcctgctgccgctgccctcctaccccggcgagggtccccaggctagatggcctggtggggatggagaaggcgctggtggcgcccgcggaggcggtggagatggcggcgcccgcgcaggcgaagaagagtaccggcccgaagacctagacgagctgttcggcgctatcgaacaagaacagtaaggagacggaggcgagggtggcggaggggctacaggcgccggtacagactaagacgcttacgtagacgcggcaggcgacgcaaaaagatagtactgactcagtggaacccccagactgtgagaaagtgctttatcagaggacttatgcctgtactgtgggcgggcatgggcacggggggccacaactacgccgtccgctcagatgactttgtagtagacagaggcttcgggggctccttcgccacagagacatttacactgaaggtcctttatgaccagtatcaaagaggcttcaacaggtggtcccacaccaacgaagaccttgacctagccagatacactggctgcaaatggaccttctatagacagcaagacacagactttatagtgtactttactaacaatccccccatgaaaaccaaccagcacacagcccctctcaccactccaggcatgctcatgagaagcaagtataaaatcctaataccaagctttaaaactagacccagaggcagaaaatctatatcagtcagaataagaccccctaagctattccaggacaagtggtatactcaacaagacctctgcccagttcctcttgtccaactgaacgtaaccgcagctgatttcacacatccgttcggctcaccactaactgacagtccttgcataagattccaggtactaggagacttgtacaactcatgtctcaatatagaccttcctcaatttgactctgacactggaaaaataaaagaagacccaccatacaacagagaaaataaaaatcagttacaaactttatacactaccttgtttaacagccgccagtcaggggtctactggcaaacattcataacaaacaccatggtaaaagcacacatagacgctaagaaagctcaaaacgccgttaataacgtacaaccaagagcagatccatcctataatgcagagccattccccaccaagccagaaaagtcaaagtttgagaattggaaaaaacaatttacagacacaagagacagtaactttctattcgccacatatcacccagacatgatacactcaaccatagcagaaatgagaaacaataactttgatctagaaacaggacccaatgacaaatatggtaatttctctagccaatacaccagaaacgcacacatgctagactactacctagggttctacagtcccatattcctgtctgatggcagatccaacacagaattctttacagcctacagggacatagtatataaccctctgttagacaaggccacaggtaacatgatatggttccagtaccacacaaagacagacaatatatacaacaaacaaacctgccactgggaaatactagatatgcccctgtgggccctctgcaacggctatgtagagtacctagagagccaaataaagtacggggacatacttacagaaggcaaagtcctaataagatgtccctacaccaagcctgcgctaacagaccccaaagactcactggcaggatacgtggtgtacaacaccaactttggaagaggcaagtggatagatggcaaaggctacatcccccttcacgagagaagcaagtggtacgtgatgctcagataccagactgacgtactccatgacatagtgacttgtggaccctggcagtacagagacgataacaaaaactctcagctcatagccaagtacagattcaagttctactggggaggtaacatggtgcattctcaggtcatcaggaacccgtgcaaagacacccaagtgtccggaccccgtcgacagcctcgcgaagtacaagtcgttgacccgcaactcatcaccccgccgtgggtcctccactcgttcgaccagagacgaggaatgtttactgagggagctatcagacgtctgctcaagcaaccaatacctggcgagtatgctcctacaccactcagggtcccgctcctctttccctcctcagagttccaacgagagggagaaggtgcagaaagcgactcatcttccccggcaaaaagaccgcgactctggcaagaagaggccagccagacggagacggagtcctcggaggggccggcggagacgacgagggagctcctccagcgaaagctcagagagcagcgagtcctcaacctccaactccagcatttcgcagtacaactcgccaagacacaagcgaacctccacataaaccccctattatactcccagccttaaacaaggtgtatctattcccccctgacaaacccactcccatacaggggtaccacgggtggaacacggagttcgaggcctgccacgccttcgacagaccacccagaagatacctctcagacacacctacctacccttggctccccatccccaatcctgaaataaaagtgagctttaagctcggtttcaaatcttacaaggccgtgggagtctcactggtcggtgtctacctcttaaggtca

SEQ ID NO: 1652 - protein, 786 aa, Alphatorquevirus sp.; identical to SEQ ID NO: 937

SEQ ID NO: 1653 - protein, 154 aa, Alphatorquevirus sp.; identical to SEQ ID NO: 938

SEQ ID NO: 1654 - protein, 143 aa, Alphatorquevirus sp.
LARRGQPDGDGVLGGAGGDDEGAPPAKAQRAASPQPPTPAFRSTTRQDTSEPPHKPPIILPALNKVYLFPPDKPTPIQGYHGWNTEFEACHAFDRPPRRYLSDTPTYPWLPIPNPEIKVSFKLGFKSYKAVGVSLVGVYLLRS

SEQ ID NO: 1655 - DNA, 3017 bp, Betatorquevirus sp.
cgggagccggaggtgagtgaaaccaccgtagtctaggggcaattcgggctagatcagtctggcggaacgggcaagaaacttaaagtattaattatttttcagatgagcacgctctacaaaccattaaatattggaattaaacaccgcaatctacaatggatgaatgtacaggttggtctgcatgatatgcactgccactgtgataaccaattaaaacacattattctacacatcattgaacaagaaccaaacatcaaatttaatttagaggaatccaaattaattcaaaaatgccttactaccgaagacgaagacgatggagacgttattggacccggagacctcgatacgcttttcgcagaagacgtttttggagaagaagacgccaatgggtaagaaaaccaaaaaaacttaaaaaaataaccataaaagaatggcaaccttcaacaattagaaaattaaatattaaaggacaatatcctctatttgcgggcacatccgaaagaataggtaatgactatacagcatatgtagatgaaatagcacctaaagatgtacccggaggaggactatattcaataactgtatttactttgcaaggactttatgaactgcatcaaaaagctagaaactggtggacatattctaattgtgacttaccattaataagataccaaggctgtactatgaaactatattatactaattcttgtgactatataactactgttgttaattgtggagaactaaaagctaatttagaaatgtttcattcaactcaaccatctgtactatacttaaacaagaaaaaaaaagttttactatgtagaaactataacaaaaaacgtaaaccttataaaaaatggtttattcatccaccagcattatttaaaaaccaatggtactttcaaaaagacttagccaaatacccactgctaatggtaatatctgcagccgctagctttgacagatactatcaatgttctacctgtatatcagaaacagtaggttttcaaagcctaaacacagacttttttgtaatacactcatggaaatacccatctacaactccatacagaccaaacagagatttttacatgtttggcatagggggtacaacaacctttgacgaagctacccccaaacaacttatactattaggagcaccatcagattatagcaaaggaacaatgataggacaaccacatagtgactggaacacacaagtaaaaaactacatgtcaaaacctactaactggggaaatccatttcacccagattggctccacgcagattcagcagaaggcttaatttgcctactaaaagtaacagaaacagaaaatttaacacaaaaacttcaatccttagacgcaaacaagacactaaaaacccaacaatttatagaaccaacaaaacccttcacagtacactgcagatacaatccacaagcagatatgggacaaaatgcaatatttgtaactagaataacaggagacaacacaccatggcataaaccaaatgacgaacacctactcacacaaggcttaccactatggatattaaactggggatggtttgattacctcagaaaaacaggtacacctcaaagactagacacagactacattcaagtcattgtatcagactatattcaaccaaaagaactaacatattatgtacctatagaccaattctttttaaatgcaaaaagtccatattcagaccacataaaaccatatgacttacaaaactggcacccaaaaataaactttcaattacaagccatttcacacatatgtaattcaggtcccttaacagtaaaactaccaaaagatgtttctgtagaagcacacttaagttataaatttcattttaagcttggaggatgcccaccatcaatggacaaagtttgcgaacctactacacaacccacctatcctcaacccggtaacttcctatcatcaattatattgcagaacccacaaacaccagtcgaatactatctcagctccttcgaccaaagacgagacctccttacacacaaagctgcaaagcgcctcaaaaaagactcagactttacagaaccttttcttaaacctgcaggaaaaagtctcctcgatgtccaaacagcatcccctcaaacaacatcgtcggaagactcatcgacggaggaagaaagcgaggaagagacacagcagcagctccacagacacaagcgaaaacaccgaaaactccagcgaggaatcctcaagctgctgaacctcctccaaaattcaaaatagttaatagtacaataaaaataaacttattcccagattctaagcaaaagaatagacgcttaacagcaagagaaaggagtgaggatgtacaagatgcaataatatggggtagatatgttagaaactatttactagaaacaccttactataaagatgtacctatcacaccaaaaattccctttgtaaattttgaccttggtttcaaacattaaagcctgcaaaatttcacagctcggtgtccatttattaaagtttaaacttatataaacatccaccacactcccaaatacgccggcgccaaagggggctccgcccccttaaaccccaagggggctccgcccccttaaacccccaggggggacaccccccttaaaaccccccaaaagccacaaaatttacatagctaaccacaaacgaacaggaaaaccacaaaatttgcattgccgaccacaaacgaacaggaaaaccacataatttgaaaccacaaaatttgcattgccgaccacaaacgaacaggaaaaccacataatttgcattgccgaccacaaaccgtcactgagttccctttttttaccaaacttccccttttaatcataaatattcattaaattaattaatactccgcctaattccggggaggagcattaaaactatataactaagtatactttcgaatggctgagtttacgccgccagacggagacagaatcacttcagtgacttcgggctgatcaaggg

SEQ ID NO: 1656 - protein, 663 aa, Betatorquevirus sp.
MPYYRRRRRWRRYWTRRPRYAFRRRRFWRRRRQWVRKPKKLKKITIKEWQPSTIRKLNIKGQYPLFAGTSERIGNDYTAYVDEIAPKDVPGGGLYSITVFTLQGLYELHQKARNWWTYSNCDLPLIRYQGCTMKLYYTNSCDYITTVVNCGELKANLEMFHSTQPSVLYLNKKKKVLLCRNYNKKRKPYKKWFIHPPALFKNQWYFQKDLAKYPLLMVISAAASFDRYYQCSTCISETVGFQSLNTDFFVIHSWKYPSTTPYRPNRDFYMFGIGGTTTFDEATPKQLILLGAPSDYSKGTMIGQPHSDWNTQVKNYMSKPTNWGNPFHPDWLHADSAEGLICLLKVTETENLTQKLQSLDANKTLKTQQFIEPTKPFTVHCRYNPQADMGQNAIFVTRITGDNTPWHKPNDEHLLTQGLPLWILNWGWFDYLRKTGTPQRLDTDYIQVIVSDYIQPKELTYYVPIDQFFLNAKSPYSDHIKPYDLQNWHPKINFQLQAISHICNSGPLTVKLPKDVSVEAHLSYKFHFKLGGCPPSMDKVCEPTTQPTYPQPGNFLSSIILQNPQTPVEYYLSSFDQRRDLLTHKAAKRLKKDSDFTEPFLKPAGKSLLDVQTASPQTTSSEDSSTEEESEEETQQQLHRHKRKHRKLQRGILKLLNLLQNSK

SEQ ID NO: 1657 - protein, 97 aa, Betatorquevirus sp.
MSTLYKPLNIGIKHRNLQWMNVQVGLHDMHCHCDNQLKHIILHIIEQEPNIKFNLEESKLIQKCLTTEDEDDGDVIGPGDLDTLFAEDVFGEEDANG

SEQ ID NO: 1658 - DNA, 3017 bp, Betatorquevirus sp.
cgggagccggaggtgagtgaaaccaccgtagtctaggggcaattcgggctagatcagtctggcggaacgggcaagaaacttaaaatattaattatttttcagatgagcaaactatacaaaccattaaatattggaattaaacaccgcaatctacaatggatgaatctacaggttggtctgcatgatatgcactgccactgcgataacccattaaaacacatcattctacacatcattgaacaagaaccagacatcaaatttaattctgaggaatccaaattaattcaaaaatgccttactaccgaagacgaagacgatggagacgttattggacccggagacctcgatacccttttcgcagaagacgtttttggagaagaagacgccaatgggtaagaaaaccaaaaaaacttaaaaaaataaccataaaagaatggcagccttcaacaattagaaaattaaatattaaaggacaatatcctctatttgcgggcacatccgacagaatatctaatgactatacagcatatgtagatgaaatagcacctaaagatgtacccggaggaggactatattcaataactgtatttactttgcaaggactttatgaactgcatcaaaaagctagaaactggtggacatattctaactgtgacttaccattaataagatacctaggctgtactatcaaactgtattatactaattcttgtgactatataactactattgttaattgtggagaactaaaagctaatttagaaatgtttcattcaactcaaccatctgtactaaacttaaacaagaaaaaaagagttttactatgtagaaactataacaaaaaacgtaaaccttataaaaaatggtttattcatccaccagcattatttaaaaaccaatggtattttcaaaaagacttagccaaatacccactactaatggtaatatcttcagccgctagctttgacagatactatcaatgttctacctgtatatcagaaacagtaggttttcaaagcataaacacagacttttttgtaatacactcatggaaatacccatctacaactccatacagaccaaacgcagaattttacatgtttggcataggaggtacaacaacctttgaccaggctacccctaaacaacttatactattaggagcaccatcagattacagcaaaggaacaatgataggagaacacgacacaacatgggacacagcagtaacgaaatacatgttaaaatctactaactggggaaatccatttcacccagattggctccacgcagattcaggagaaggcttaatttgcctactaaaagtacaacaaacagaaaatttaacaaacagacttaaaaacttaacaccaacacaaccactaaaaaaccaaggatttatcgaaccaacaaaacccttcacagtacactgcagatacaatccacaagcagatatgggacaaaattcaatatttgtaactagaataacaggagacaacacaccatggcataaaccaaatgacgaacacctactcacacaaggcttaccactatggatattaaactggggatggtttgattacctcagaaaaacaggtacacctcaaagactagacacagactacattcaagtcattgtatcagactatattcaaccaaaagaactaacatattatgtacctatagaccaattctttttaaatgcaaaaagtccatattcagaccacataaaaccatatgacttacaaaactggcacccaaaaataaactttcaattacaagccatttcacacatatgtaattcaggtcccttaacagcaaaactaccaaaagatgtttctgtagaagcacacttaagttataaatttcattttaagcttggaggatgcccaccagcaatggacaaagtttgcgaacctactagacaacccacctatcctcaacccggtaacttcctatcatcaattatattgcagaacccacaaacaccagtcgaatactatctcagctccttcgaccaaagacgagacctccttacacacaaagctgcaaagcgcctcaaaaaagactcagactttacagaaccttttcttaaacctgcaggaaaaagtctcctcgatgtccaaacagcgtcccctcaaacaacatcgtcggaggactcatcgacggaggaagaaagcgaagaagagacacagcagcagctccacagacacaagcgaaaacaccgaaaactccagcgaggaatcctcaagctgctgaacctcctccaacattcaaaatagttaatagtacaataaaagtaaacttattcccagattctaagcaaaaaaatagacgcttaacagcaaaagaaaggagtgaggatgtacaagatgctataatatggggtagatatgttaaaaactatttactagaaacaccttactataaagatgtacctatcacaccaaaaattccctttgtaaattttgaccttggtttcaaacattaaagcctgcaaaatttcacagctcggtgtccatttattaaagtttaaacttatataaacatccaccacactcccaaatacgccggcgccaaagggggctccgcccccttaaaccccaagggggctccgcccccttaaacccccaggggggacaccccccttaaaaccccccaaaagccacaaaatatacatagctaaccacaaacgaacaggaaaaccacccccccaaaagccacaaaatatacatagctaaccacaaacgaacaggaaaaccacataatttgcattgccgaccacaaacgaacaggaaaaccacataatttgcattgccgaccacaaaccgtcacttagttccctttttttaccaaacttccccttttactcataaatattcattacattaattaatactcaacgtaattccggggaggagccttaaaactatataactaagtacagtttcgaatggctgagtttacgccgccagacgtagacagaatcacttcagtgacttcaggctgatcaaggg

SEQ ID NO: 1659 - protein, 663 aa, Betatorquevirus sp.
MPYYRRRRRWRRYWTRRPRYPFRRRRFWRRRRQWVRKPKKLKKITIKEWQPSTIRKLNIKGQYPLFAGTSDRISNDYTAYVDEIAPKDVPGGGLYSITVFTLQGLYELHQKARNWWTYSNCDLPLIRYLGCTIKLYYTNSCDYITTIVNCGELKANLEMFHSTQPSVLNLNKKKRVLLCRNYNKKRKPYKKWFIHPPALFKNQWYFQKDLAKYPLLMVISSAASFDRYYQCSTCISETVGFQSINTDFFVIHSWKYPSTTPYRPNAEFYMFGIGGTTTFDQATPKQLILLGAPSDYSKGTMIGEHDTTWDTAVTKYMLKSTNWGNPFHPDWLHADSGEGLICLLKVQQTENLTNRLKNLTPTQPLKNQGFIEPTKPFTVHCRYNPQADMGQNSIFVTRITGDNTPWHKPNDEHLLTQGLPLWILNWGWFDYLRKTGTPQRLDTDYIQVIVSDYIQPKELTYYVPIDQFFLNAKSPYSDHIKPYDLQNWHPKINFQLQAISHICNSGPLTAKLPKDVSVEAHLSYKFHFKLGGCPPAMDKVCEPTRQPTYPQPGNFLSSIILQNPQTPVEYYLSSFDQRRDLLTHKAAKRLKKDSDFTEPFLKPAGKSLLDVQTASPQTTSSEDSSTEEESEEETQQQLHRHKRKHRKLQRGILKLLNLLQHSK

SEQ ID NO: 1660 - protein, 97 aa, Betatorquevirus sp.
MSKLYKPLNIGIKHRNLQWMNLQVGLHDMHCHCDNPLKHIILHIIEQEPDIKFNSEESKLIQKCLTTEDEDDGDVIGPGDLDTLFAEDVFGEEDANG

SEQ ID NO: 1661 - DNA, 3016 bp, Alphatorquevirus sp.
ggctcgcgggaggtgagtttacacaccgcagtcaaggggcaattcgggctcgggactggccgggctatgggcaaggctcttaaaaagccatgtttctcggtaaactttacagaaagaaaaggaaagtgcttctgcacactgtgccagacccaaagaaggctaggcggcttctgattatgtggcagccccccgtgcataatgtacccgggatcgagagaaactggtacgagagttgctatcgatcccatgctgctgtgtgtggctgtggcgactttgttggccatattaatcatctggcaactactctgggtcgccctgcgcgtcctcggcaccccgggggccccggcactccgcagataagaaacctgccagcgctcccggcaccccagggtgagcccggtgacagagcgccatggcctacggatggtggggccggcggcgccgctggagaagatggaggacgcggcgcagaccgtggagaaccaggagacgtagaagacgacgcgctcctcgccgctttcgacctcgtcgaagagtaaggaggcgcagggggcggtggcgcaggcggtatagaaaatggaggcgacgcaggggcagacggacgcacagaaaaaagataatcataaaacagtggcagccaaactttataagacgctgctacataataggctacctgcctctgatattctgtggcgagaacaccaccgcccagaactttgccacccactcggacgatatgatagccaaaggaccatgggggggaggcatgactactaccaagtttactctgagaatcctctacgacgagtttaccaggtttatgaacttctggactgtcagtaacgaagacctagacctgtgtagatacgtgggctgcaaactcatattctttaaacaccccacagtagactttatagtgaggataaacacacagcctccgttcctagacactaacctcaccgcggcacaaatccacccgggcataatgatgctcagcaagaaacacatactaataccctcactaaagaccaggcccagcagaaagcacagggtggtcgtcagggtgggcccacctagactttttcaagacaagtggtacccccagtcagacctgtgtgacacagttctgctttccgtgtttgcaacggcctgtgacttgcaatatccgttcggctcaccactaactgacaacccttgcgtcaacttccagatcctggggcaccagtacaaaaaccaccttagtattagttccacaaatgatgcctctaacaaaacccactatgacaacaatttatttaataaaaaagagctatacaacacattccaaacaatagctcagcttaaagacacagcattagtctcaaacactacaggaacaggaaacatgtggacccaagtgcaaaacacaacagcactctcaccaaatggctcaaatgcacttgacagcaaagacacttggtacaaaggaaacacatacaatgactctattacaaagttagcacaactaaccagagccagatttaaagctgcaacacaggcagccctgccaaactaccccacaataatgtccacagacctctatgaataccactcaggcatatactctagcatattcctagcagcaggcagaagctactttgagactccgggggcctacacagacgtcatatacaacccctttacagacaaaggcactggaaacatggtctggatagactacctaacaaaagcagactccatatacacaaagaacaaaagcaaatgtgagatatttgacctgcctctgtgggccaccttcacaggatactcagagttctgctcaaaagttacaggagacaccgccatacacctaactgccagagtagtagtgagatgcccctacactgaacccatgctcatagaccactcagaccccaacaggggctttgtaccttactcctttaactttggagagggcaagatgccaggaggctcctccaaagtgcctataagaatgagggccaaatggtacgtgaacatatttcaccagcaagagttcatggaggccatagttgagagcggaccgtttgcttacaagggcgacataaaatcagcggtactcagcatgaaatacagattccactggaaatggggcggaaaccctatatccaaacaggtcgtccggaatccctgctccacctccagcacctccgcgggccatcgaggacctcgcagcgtacaagtcgttgacccgaaacatgttaccccggaagtcacctggcactcgtgggacatcaagcgaggcatctttggcaaagcaggtattaaaagaatgcaacaagaatcagatgctctttacattcctacaggaccactcaaaagacctcgcagagacacgaacgcccaagacccagaagagcaaaacgaaagctcaggtttcagagtccagcagcgattcccctggatccactccagccaagaaacgcaaagctcgcaagaagaggtgcaagcggagggcacggtacaggaacaactcctcctccagctccgagagcagcgagtactccggttccagctccaacagctcgccagccaagtcctcaaagtccaagcagggcaaggcctacaccccctattatcttcccaagcataaacaaggcctttatgtttgagccccagggtcctaaacccatacagggctaccacgattggctagaagaatacacctgctgcaaattctgggacagacctcccagaaagctacacacagatacacccttctacccctgggcaccaaaacccctagaccaagtaagggtctcctttaaactcaacttccaataaaatttcaaggccgtgggagtttcacttgtcggtgtctgcttcttaaggtcaccaagcactccgagcgcagcgaggagtgcgaccctgggggtgggtgcaacgccctcggcggccgcgcgctacgccttcggctgcgcgcggcacctcggacccccgctcgtgctgacacgctcgcgcgtgtcagaccacttcg

SEQ ID NO: 1662 - protein, 739 aa, Alphatorquevirus sp.
MAYGWWGRRRRWRRWRTRRRPWRTRRRRRRRAPRRFRPRRRVRRRRGRWRRRYRKWRRRRGRRTHRKKIIIKQWQPNFIRRCYIIGYLPLIFCGENTTAQNFATHSDDMIAKGPWGGGMTTTKFTLRILYDEFTRFMNFWTVSNEDLDLCRYVGCKLIFFKHPTVDFIVRINTQPPFLDTNLTAAQIHPGIMMLSKKHILIPSLKTRPSRKHRVVVRVGPPRLFQDKWYPQSDLCDTVLLSVFATACDLQYPFGSPLTDNPCVNFQILGHQYKNHLSISSTNDASNKTHYDNNLFNKKELYNTFQTIAQLKDTALVSNTTGTGNMWTQVQNTTALSPNGSNALDSKDTWYKGNTYNDSITKLAQLTRARFKAATQAALPNYPTIMSTDLYEYHSGIYSSIFLAAGRSYFETPGAYTDVIYNPFTDKGTGNMVWIDYLTKADSIYTKNKSKCEIFDLPLWATFTGYSEFCSKVTGDTAIHLTARVVVRCPYTEPMLIDHSDPNRGFVPYSFNFGEGKMPGGSSKVPIRMRAKWYVNIFHQQEFMEAIVESGPFAYKGDIKSAVLSMKYRFHWKWGGNPISKQVVRNPCSTSSTSAGHRGPRSVQVVDPKHVTPEVTWHSWDIKRGIFGKAGIKRMQQESDALYIPTGPLKRPRRDTNAQDPEEQNESSGFRVQQRFPWIHSSQETQSSQEEVQAEGTVQEQLLLQLREQRVLRFQLQQLASQVLKVQAGQGLHPLLSSQA

SEQ ID NO: 1663 - protein, 149 aa, Alphatorquevirus sp.
MFLGKLYRKKRKVLLHTVPDPKKARRLLIMWQPPVHNVPGIERNWYESCYRSHAAVCGCGDFVGHINHLATTLGRPARPRHPGGPGTPQIRNLPALPAPQGEPGDRAPWPTDGGAGGAAGEDGGRGADRGEPGDVEDDALLAAFDLVEE

SEQ ID NO: 1664 - protein, 127 aa, Alphatorquevirus sp.; identical to SEQ ID NO: 688

SEQ ID NO: 1665 - DNA, 3016 bp, Alphatorquevirus sp.; identical to SEQ ID NO: 1661

SEQ ID NO: 1666 - protein, 739 aa, Alphatorquevirus sp.; identical to SEQ ID NO: 1662

SEQ ID NO: 1667 - protein, 149 aa, Alphatorquevirus sp.; identical to SEQ ID NO: 1663

SEQ ID NO: 1668 - protein, 127 aa, Alphatorquevirus sp.; identical to SEQ ID NO: 688

SEQ ID NO: 1669 - DNA, 3016 bp, Alphatorquevirus sp.
cacctcagacccgtgagtttacacaccgcagtcaaggggcaattcgggctcgggactggccgggccctgggcaaggctcttaaaaaagctatgtttctacgcagggctcacaagaaaaggaaactgctactgcaaattgtgccagctacaccgcaggcacctgccatgacctttcgtgcacccaccatccaaggtggagtccgagaccagcaatggttcgaggcctgtgttcgatcacacgccgctttctgtggctgtggcgatcccgtgcttcattttaataacgttgctagtcgctttcactatctgcctgctacctcctcgcctctggaccctaccggaggagcgccgccgcgccgcccgcagctacgccgccttccagcgctcccggcggcgccccccagcacccctgagagccagccatggcgtggtggtggtggagacggtggcgccgctggcccagacgccgctggaggatccgtcgcagacgccgagtacggaccagaagacctagacgacctgttcgccgctatcgaagcagatacacagtaaggaggcgaaggcggagagggtggcgagggcgacgtaggcgcagactgtacagacgcagatacagtataaggagaaagagaaagaaactcatactgaaacagtggcagcccgccaatgtcagaaaatgcaaaataagaggcctgtttccaatagttatctgtggacacggcaagagtgccaataactatgccctgcactcggacgacgtagtgccaatgagacaggctttcggaggggctctaagcactgtatcttttagcctaaaagtactgtatgatcagtatttaagacacctgaacagatggagcacctccaacgatgtcctagaccttgccaggtacctaggatgcaccttctggttttacagagacaaaaaaactgactacttagtacagtatgacatctctgctccctacaagctagacaaagacagcggaccctcctaccatccgggggtactcatgcaagccaaacacaaagtactagtgcccagttttgacacgcaccccaaaggaaaggctaaagtaaaaattagaattaagccccccaaactgtttatagacaagtggtactctcaagaggatctgtgtaccgttaatcttgtgacatttgtggtcagcctagcttccttctcacatccgttctgcccaccactaacgaacaacccttgtgtaaccttccaagtattaaacaacttctacaattccgttataggttcctcaattaacattgcagacgctacagtagacacagtcttcaataactttttatataacaaagcagccttctaccaacaagtactagtagactcttacattaaagaaattaaaacaaatcctgatggctctccacaagttgcaggccctaacggtaaacccacagcatcagaaatgactacatataactcctgggtaaaaaataactttaaagtaccaggaacatctgttcactacaacttttgcacatacaaacctgacactaacaagttaaaaacacttagagaatactacttccaatgggaaactgcacagtccacaaaccatatttttcatacacaacacgtaccacacgcgggcacaaaacctacaaaagactggtgggagtacagaacaggcctattttcacctatatttcttagtccatacagaaccagtcccatagacggctggttgctggcatacagagacgtatcctacaatccactaaatgacaaaggagtaggcaaccgagtatgggtacagagtctagtaaaaccagacacccagttcaccctaccctcatgtgtatttgtactagaagacaaacccctatggtgctgtttctatggctatgttgactttataaagagtgtcagagagggccaagacatagactttgaaaacattatttgcattcagtgcccttacacagagcctcctctatatgaaaagcacaaccccaacatggggtttgtagtatacgacagcaactttggcaatggcaaatggctagacggaaccgggtttgtcccggtagaataccagtgccgctggcggccctgcatagctttccagcaacaggtactcacagacattaccatgagcgggcccttcagctacaaagacgatgttaaaaacacctgcatacaggccaagtacagatttgactttaaatggggcggcaatatgctttatcagcagaccatcagaaacccatgcaaagacggacaagcaaccgattcccatagacagcctagagacgtacaagtcactgacccgcttaccatgggaccccgatacgctttccaccaatgggactggcgacgtgggtggcttagtgacaaagctctcaaaagaatgctccagaaaccgcttgattttgaactctatccagtcaatccaaagagacctagactattccctcccacagaagcaggagaaggagaggccccaaaagaaagctcattttcagaggaagaaagcgagccgtcctcgcaagaagagacgaggccggagaggctccagctcaagctccgacagcagctccgagagcagcgagagctccgagtccacctcaagcacctcttccagcagctcctcaagacacaagcggggctccacctcaacccgctgttattcaaccagcaataaacaaggtttatctgtttccagaaatgggtccaaagcccgctcctactagtggagactgggaaacagaatatcaggcctgtaaattctgggacaggcctcccagaaagttcctcaccgatacacctttctacccctggatgcctccggcacccccaaaattctctgtcagctttaaactgggcttcaaaccctgaataaacaaggccatacactgttcacttgtcggtgtctacctctataagttactaagcactccgagcgaagcgaggagtgcgacccccttacccggtagcaacttcttcggagtccggcgctacgccttcggctgcgccgga

SEQ ID NO: 1670 - protein, 752 aa, Alphatorquevirus sp.
MAWWWWRRWRRWPRRRWRIRRRRRVRTRRPRRPVRRYRSRYTVRRRRRRGWRGRRRRRLYRRRYSIRRKRKKLILKQWQPANVRKCKIRGLFPIVICGHGKSANNYALHSDDVVPMRQAFGGALSTVSFSLKVLYDQYLRHLNRWSTSNDVLDLARYLGCTFWFYRDKKTDYLVQYDISAPYKLDKDSGPSYHPGVLMQAKHKVLVPSFDTHPKGKAKVKIRIKPPKLFIDKWYSQEDLCTVNLVTFVVSLASFSHPFCPPLTNNPCVTFQVLNNFYNSVIGSSINIADATVDTVFNNFLYNKAAFYQQVLVDSYIKEIKTNPDGSPQVAGPNGKPTASEMTTYNSWVKNNFKVPGTSVHYNFCTYKPDTNKLKTLREYYFQWETAQSTNHIFHTQHVPHAGTKPTKDWWEYRTGLFSPIFLSPYRTSPIDGWLLAYRDVSYNPLNDKGVGNRVWVQSLVKPDTQFTLPSCVFVLEDKPLWCCFYGYVDFIKSVREGQDIDFENIICIQCPYTEPPLYEKHNPNMGFVVYDSNFGNGKWLDGTGFVPVEYQCRWRPCIAFQQQVLTDITMSGPFSYKDDVKNTCIQAKYRFDFKWGGNMLYQQTIRNPCKDGQATDSHRQPRDVQVTDPLTMGPRYAFHQWDWRRGWLSDKALKRMLQKPLDFELYPVNPKRPRLFPPTEAGEGEAPKESSFSEEESEPSSQEETRPERLQLKLRQQLREQRELRVHLKHLFQQLLKTQAGLHLNPLLFNQQ

SEQ ID NO: 1671 - protein, 161 aa, Alphatorquevirus sp.
LGKALKKAMFLRRAHKKRKLLLQIVPATPQAPAMTFRAPTIQGGVRDQQWFEACVRSHAAFCGCGDPVLHFNNVASRFHYLPATSSPLDPTGGAPPRRPQLRRLPALPAAPPSTPESQPWRGGGGDGGAAGPDAAGGSVADAEYGPEDLDDLFAAIEADTQ

SEQ ID NO: 1672 - protein, 60 aa, Alphatorquevirus sp.; identical to SEQ ID NO: 504

SEQ ID NO: 1673 - DNA, 3015 bp, Alphatorquevirus sp.
gctacgccttcggctgcgcgcggcacctcggtcaaggggcaattcgggctcgggactggccgggctatgggcaaggctcttaaagcgtacgtcccccactatgtttctcggcagggtgtggaggaaagagaaaaggaaagtgcttctgctggctgtgcgagctacacaggaaacatcttccatgagtatctggcgtccccccctcgggaatgtctcatacagggagagaaattggcttcaagccgtcgaaacatcccacaactccttttgtggctgtaatgattttatccttcaccttactaatttggctacgcgctttgctattcagggacccccacccgagggtggtccgcctcggccgaggccgccgctcctgagagcgctgccggcccccgaggtccgcagggagacgcacacagagaacccgggcgcctccggtgagccatggcctggcgatggtggtggcagagacgatggcgccgccgcccgtggccccgcagacggtggagacgcctacgacgccggagacctcgacgacctgttcgccgccgtcgaagaagagcaacagtaaggaggcggaggtggaggggcagacgtgggcgacgcacatacacccgacgcgcagtcagacgcagacgcaaacccagaaaaagacttgtactcactcagtggagcccccagacagtgagaaactgctctatcaggggtatagtgcccatggtaatatgcggacacacaaaagggggtagaaactatgccatccacagcgaagacttcactacacagatacaacccttcgggggcagcttcagcacgaccacctggtcgctaaaagtactctgggacgaacaccaaaaatttcagaacaggtggtcctatccaaacacacagctagaccttgccaggtacaagggagtcaccttctggttctacagagaccagaaaacagactacatagtacaatggagcagaaatcctccctttaagctaaacaaatacagcagctccatgtaccatcctggaatgatgatgcaggcaaaaaaaaaactagtagtgcctagttttcaaactagacctaaaggcaaaaagagatacagagtaagaataagaccccccaacatgtttgctgacaagtggtacactcaagaggacctgtgtccggtacctcttgtgcaaattgtggtttctgcggccagcctgctacatccgttctgcccaccacaaacgaacaacccttgcatcaccttccaggttttgaaagacatctatgacaattgcataggagttaactctgcccaagcaacaacatattcaacacttcaacaaatattatacactaactgcacatactttgaaacaacacaagtactagcccaactatctccacactttcaacctgtgttaaaagccaccaacacaacatcaaactcaaatcccaccacaacaacactaggaaactatgaaccacagctaaaaacaacaggtacatttcacacaggtaacaatccagtttttggcatgtgtaaatacaaaccaactaaggacatactagaacatgccaacaagtggttctgggacaatctaatgtatgaaaatgacttacattccggttatggcaaagcccacctacagtgtatggagtaccacacaggcatatacagctccatatttctaagtccccaaaggtcactagaattcccagcagcataccaagacgtcacctacaaccccaactgtgacagagcagcaggtaacagagtctggtttcagtacagtacaaaaatgaacacagacttcaatgcaactcaatgcaaatgcgtgttagaaaacattcccctgtgggcggccttccatggctacgcagactttatagagcaagaactgtccataagctcagaaatacgcaactttggcatagtttgctttcagtgcccctacactttccccccttgctttaacaaagaaaaaccagacaaaggctacgtgttctatgacaccacctttggtaatggaaagatgccagatggatcagggcacatacccatctactggcaacagaggtggtggatcagactagccttccaggtacaagtcatgcacgactttgtgctctgcggtccctttagctacaaagatgacctagccaacaccacacttacagccaggtacaagttcagattcaaatggggcggtaatatcatccccgaacagattatcaagaacccgtgtcacagcgaccagtccctcgcttcctaccccggtagacaacgtcgcgacgtacaagttgttgacccatcaaccatgggcccgatctacaccttccacacatgggactggcgacgggggctttttggtgcaaatgctatcaagagagtgtcagaaaaaccgggagatgctctctactttacaaaccctttcaagagacccagatatcttcccccgacagacggagaagactaccgacaagaagaagacttcgctttacaggaaaaaagacggcgcacatccacagaagaagtccaggacccggagagccccccgcaaagcgcgccgctcctacagcagcacgagcagcagcgacaactctcagtccagctcgcagagcagcagcgaatcggagtccaactccgatacatcctccaggaagtcctcaaaacgcaagcgggtctccacctaaaccccctattattaggccccccagaaacaaggtgtatctctttgaaccctccaaaggccgactcccaataatgggcagagaggcatgggaggacgaatacacctgctgcaagtactgggatcgccctcccagaaccaaccacctagacatacccacctatccctggatgcccacaaacttcaaagtcagcttcaaacttggatttaaaccctaaataaaaatttcaaggccgtacactgtccacttgtcggtgtctacctctataagtcactaagcactccgagcgtagcgaggagtgcgaccctagggggtgggtgcaacgccctcggcggccgcgc

SEQ ID NO: 1674 - protein, 767 aa, Alphatorquevirus sp.
MAWRWWWQRRWRRRPWPRRRWRRLRRRRPRRPVRRRRRRATVRRRRWRGRRGRRTYTRRAVRRRRKPRKRLVLTQWSPQTVRNCSIRGIVPMVICGHTKGGRNYAIHSEDFTTQIQPFGGSFSTTTWSLKVLWDEHQKFQNRWSYPNTQLDLARYKGVTFWFYRDQKTDYIVQWSRNPPFKLNKYSSSMYHPGMMMQAKKKLVVPSFQTRPKGKKRYRVRIRPPNMFADKWYTQEDLCPVPLVQIVVSAASLLHPFCPPQTNNPCITFQVLKDIYDNCIGVNSAQATTYSTLQQILYTNCTYFETTQVLAQLSPHFQPVLKATNTTSNSNPTTTTLGNYEPQLKTTGTFHTGNNPVFGMCKYKPTKDILEHANKWFWDNLMYENDLHSGYGKAHLQCMEYHTGIYSSIFLSPQRSLEFPAAYQDVTYNPNCDRAAGNRVWFQYSTKMNTDFNATQCKCVLENIPLWAAFHGYADFIEQELSISSEIRNFGIVCFQCPYTFPPCFNKEKPDKGYVFYDTTFGNGKMPDGSGHIPIYWQQRWWIRLAFQVQVMHDFVLCGPFSYKDDLANTTLTARYKFRFKWGGNIIPEQIIKNPCHSDQSLASYPGRQRRDVQVVDPSTMGPIYTFHTWDWRRGLFGANAIKRVSEKPGDALYFTNPFKRPRYLPPTDGEDYRQEEDFALQEKRRRTSTEEVQDPESPPQSAPLLQQHEQQRQLSVQLAEQQRIGVQLRYILQEVLKTQAGLHLNPLLLGPPETRCISLNPPKADSQ

SEQ ID NO: 1675 - protein, 185 aa, Alphatorquevirus sp.
LRAAPRSRGNSGSGLAGLWARLLKRTSPTMFLGRVWRKEKRKVLLLAVRATQETSSMSIWRPPLGNVSYRERNWLQAVETSHNSFCGCNDFILHLTNLATRFAIQGPPPEGGPPRPRPPLLRALPAPEVRRETHTENPGASGEPWPGDGGGRDDGAAARGPADGGDAYDAGDLDDLFAAVEEEQQ

SEQ ID NO: 1676 - protein, 187 aa, Alphatorquevirus sp.
MGLATGAFWCKCYQESVRKTGRCSLLYKPFQETQISSPDRRRRLPTRRRLRFTGKKTAHIHRRSPGPGEPPAKRAAPTAARAAATTLSPARRAAANRSPTPIHPPGSPQNASGSPPKPPIIRPPRNKVYLFEPSKGRLPIMGREAWEDEYTCCKYWDRPPRTNHLDIPTYPWMPTNFKVSFKLGFKP

SEQ ID NO: 1677 - DNA, 3015 bp, Alphatorquevirus sp.; identical to SEQ ID NO: 1673

SEQ ID NO: 1678 - protein, 767 aa, Alphatorquevirus sp.; identical to SEQ ID NO: 1674

SEQ ID NO: 1679 - protein, 185 aa, Alphatorquevirus sp.; identical to SEQ ID NO: 1675

SEQ ID NO: 1680 - protein, 187 aa, Alphatorquevirus sp.; identical to SEQ ID NO: 1676

SEQ ID NO: 1681 - DNA, 3014 bp, Gammatorquevirus sp.
cgggagcccgaggtgagtgaaaccaccgaggtctaggggcaattcgggctagggcagtctagcggaacgggcaagaaacttaaaacaaatattattttacagatgcaaaacttatgctcagctgacttctataaatctacaccatacaatccagacacaaaaactcaaatatggatgtcaataattgctaatggacatgacaatatctgcaactgctggcatccttttgctcatttgcttgctactatttttcctcctggccatcaagacagggatcttaccattaatcaaatacttgcaagagattacttggaagcatgccgttctggtggaaaaaacgaagaaagaactggtggggcaaagtatacagaagaccaacatacaaaagatataaaagaagaagaacaaacagaagaaactatagaagacgcccttatgttcgccgccgccgccgccgcagaaggaccagacgcaaggtaaaaaagaagctacaaaaaataactgttaaacaatggcaaccagactcaatagtaaaatgtaaaattaaaggctttgatacacttgtagctggatctgaaggtagacaaatgttttgctacacaaataaaaaatctgtttttacacagccaaaagcccctggtggtgggggatttggaattaaagtttatagccttcaatacttataccaagaatggcttaaaaaaaacaacatatggacaaaatctaatgattacaaagacttagtaagatttactggtgctactttcacattttttagaagcccaactacagactttgttgttcaatatagcagacagcctccatttatagtacaaaaagaaacatacatgaactgccacccacaagctttactacttacaaagaaccacagagttattttaagtactaaatcaaaacctaatggtaaaattaaaacaagagtaaaaattaaaccaacaaaacaaatggtaactaaatggttttttcaagatgaatttagtaaatatgacttatttcaaattcaagcagcagcagttgactttaactacccacaatggggtcctaatacatcaagcacaaacctaacattttatgcacttaacacaggcttttaccataacacaaactgggctcaacaacaaccagaaaaaaaaggttataaaccatacacaggatacagtgataatattgttagctatgaataccctaccaaacaaggaactacaacctccttcaaaacacacacagacacttatgacgaatcaataaactattcaactggtatgtttgctaaagaagtattaaatgcaataagaataaaaggaactacatcttatacacatgaaagaccaattactattgccagatacaatccagatgaagacacaggcacaggcaactctgttttttttacctcagtagtagcagacacaggctgggcagaaccaaaagacacagatctagttatacacaatgtacccttatatatagccctatttggcttttggaacacaatcataaaattaaaaggagacaaggcatacatgaaatatggaatgtttgtagttaaatcagatgcaataaaactagtaacaaacacagcacaaacttatttcccactactagactggtcctttatacaaggtaaaatgccatatgaagaatatcttttagattcagacaaaaacttttggtaccctacagcatacaaacaacaagagattttaaatgctattgtagaatgtggacagtttataccaaagtttggtaacttaccatctagttcatggcaactaaatgttaaatacacattttattttaagtggggtggcccacacatcacagatcaacttgcaaccaatcctaaagacaaagaaaaatatcccgtgcccgatacaatctttcaaacaatacaaattgctgacccacacaagcaagcatgcaaagaaatgcttagagcctgggactacagaaggggcctcattacaagctcagctcttaaaagaatgtcagaaaacatccaaactgattcatctctcgaatctgatgacacagaaacaccaaaaaagaaaaggagagtcacaggagaagtcccatcagcacaagaaaagaaccaaaagatccagaaacatctcctctcactcttcgaagaaagtacctgccaagaggaggaggacctccacaagctcatccagcaccagcagcaacagcagcacaagctcaaacaaaacatcatccacctcctcatagacctaaagaaacaacagagatacctacaacttcaatcgggaggaaactaaccagatttgcacctggccacgaatggcaaactgaacaagatgtagcagcagcatttaaaagaccccctagactctttaaagaagataaacccttttatccttggttacccaaatatgaaccccttgtaaactttcaccttaattttaagttctaggccgacactgttcacttagcggtgtatgtttatataagtttgcaccccaaaaaaattgtaaaataaaaaaaaaaaaaaaaaaataaaaaattgcaaaaattcggcgctcgcgcgcgctgcgcgcgcgcgagcgccgtcacgcgccggcgctcgcgcgccgcgcgtatgtgctaacacaccacgcacctagattggggtgcgcgcgctagcgcgcgcaccccaatgcgccccgccctcgttccgacccgcttgcgcgggtcggaccacttcgggctcgggggggggcgcgcctgcggcgcttatttactaaacagactccgagttgccattttgaccacgcccccgccgccatcttgggtgcggcagggcgggggctaaaatggcgggacccaatcattttatactttcactttccaattaaaaccagccacgtcacaacaaagaggtggagactgtaacactatataaccaactgcactgacgaatggctgagtttaccccgctagacggtgcagggaccggatcgagcgcagcgaggaggtccccggctgcccgtggg

SEQ ID NO: 1682 - protein, 660 aa, Gammatorquevirus sp.
MPFWWKKRRKNWWGKVYRRPTYKRYKRRRTNRRNYRRRPYVRRRRRRRRTRRKVKKKLQKITVKQWQPDSIVKCKIKGFDTLVAGSEGRQMFCYTNKKSVFTQPKAPGGGGFGIKVYSLQYLYQEWLKKNNIWTKSNDYKDLVRFTGATFTFFRSPTTDFVVQYSRQPPFIVQKETYMNCHPQALLLTKNHRVILSTKSKPNGKIKTRVKIKPTKQMVTKWFFQDEFSKYDLFQIQAAAVDFNYPQWGPNTSSTNLTFYALNTGFYHNTNWAQQQPEKKGYKPYTGYSDNIVSYEYPTKQGTTTSFKTHTDTYDESINYSTGMFAKEVLNAIRIKGTTSYTHERPITIARYNPDEDTGTGNSVFFTSVVADTGWAEPKDTDLVIHNVPLYIALFGFWNTIIKLKGDKAYMKYGMFVVKSDAIKLVTNTAQTYFPLLDWSFIQGKMPYEEYLLDSDKNFWYPTAYKQQEILNAIVECGQFIPKFGNLPSSSWQLNVKYTFYFKWGGPHITDQLATNPKDKEKYPVPDTIFQTIQIADPHKQACKEMLRAWDYRRGLITSSALKRMSENIQTDSSLESDDTETPKKKRRVTGEVPSAQEKNQKIQKHLLSLFEESTCQEEEDLHKLIQHQQQQQHKLKQNIIHLLIDLKKQQRYLQLQSGGN

SEQ ID NO: 1683 - protein, 125 aa, Gammatorquevirus sp.
MQNLCSADFYKSTPYNPDTKTQIWMSIIANGHDNICNCWHPFAHLLATIFPPGHQDRDLTINQILARDYLEACRSGGKNEERTGGAKYTEDQHTKDIKEEEQTEETIEDALMFAAAAAAEGPDAR

SEQ ID NO: 1684 - protein, 98 aa, Gammatorquevirus sp.
LPRGGGPPQAHPAPAATAAQAQTKHHPPPHRPKETTEIPTTSIGRKLTRFAPGHEWQTEQDVAAAFKRPPRLFKEDKPFYPWLPKYEPLVNFHLNFKF

SEQ ID NO: 1685 - DNA, 3012 bp, Alphatorquevirus sp.
cgggtgccgaaggtgagtttacacaccgcagtcaaggggcaattcgggcacgggactggccgggctatgggcaaggctcttaaaaaagctacccccaaaactatgttttttggcaggccataccgccacaagaaaaggaaactgctactgctttctgtgccgcctacacagaaagcaccttccatgagccagtggagaagacccgctcacgatgctgcgggcatcgagaggcagtggtacgaaagcgtttggcgtagccatgctgcttgctgtggttgtggcgattttattagtcatattaacaatttggcgactcgtcttggacgtcctggtgctccacaacccccggtacctcccagagcaccccaagtgagacccctcccggcattgccggcgcctgaaacatggcctggagaggacacaggcgctggcgccggtggaggaggcgccgccggccttggtggaggagacgccgccggtggagacgtcgcagacgaagacctgctagacgccgtcgatttcgcagagtaaggagaaggcgcagggggtggtcgcgcgcgtatagacgatggaaaagacgcagggggcgacgcagacgcaaaaaacttttactgactcaatggcaaccctctatggtgaggagatgccgcatagtgggctacgaccccataattatatgtggccacaacagaaccagcacaaactttagcagccacattgatgactttacttttaacaatgacgcctacggagggggaatatgcactcacaaatacactctaaggaccttatacgatgactttttactacacagaaactactggacagcttcaaacaaagacctagacctgtccagatacttaggatgcagtatcatattttttagacatcccacagtagactttatagccagaataagaaccatgcccccatttgaagacactgacgccacagccatgacactacacccaggaatgatgatgctagctaaaaagaaaatactaatccctagtcttaaaacaagaccaagcagaaaacactacattaaagtaagagtaggggcccccaagctatttgaagacaagtggtacccacaaagtcagttatgtgatgtaactttgctaaccatacaagcaaccgcagcggatctgcaatatccgttcggctcaccactaacgaacaccatatgtagcaacttccagattttagacagtaactatgatgacagcttaaccgtccttcacggcacagaaaaagcagcaaagagagaccagacatataaagacatgttggacattataacagtatacaatagcacacaaacactagcacaactcaaaggttacctaccaacagcaaacactaatcctttaacaagcaccaatgctacaacagctactattgaagtcaacaaacacaacactttaggcacaaaaactaatacctacagtaactggacttcaaagaacacacacaacaatactctatatggagggtctgcctggagaacaaaaaaagaaaattcaacacaagacaaaattgcacctgatcaaatgaaagaagcaaacaaagcatatatacaagcagcaaaagtaaacttacctaactggaatattccaacaacctataacacagtaccttacccatttgaatactacacaggcatgtttagcagcatatttttagctagcggcagatccaactgggaaataccagggtgctacatagacataagctacaacccccttacagacaaaggtataggaaacatgatatggctagatgttataacaaagtcagattccaaatatgaagaaggaaagtcaaaatgtttaatggcaaactaccccatgtggtgcatgctgtatggctaccttgactactgtgacaaagtattagaacatataaatatagactttgaatacagacttgtaataagatgtccctacactcaccccatgctaaccagagcatcagacccactgtggggctttgttccatacagtgaaaactttggcaaaggcaaaatgccaggaggaaaccctgtaccctctctgtggaacagaacacactggtacgttagtgtagcccaccagagagaggtagcagaatcaatagttcaaacaggcccctttgcatacaagagcgatgagcaaaagtctgtacttacaattaagtacaacttcagatggaaatggggaggcaatcctatattccaacaggttgttagagacccctgcaaacacccatcaggacccagtccccatcgacagcctcgtgaactacaaatcgctgacccgaaatatcaaacaccagaaatcatctggcacgcgtgggactttagacacggactctttagcaagacaggtattaaaagagtgtcacaacaaccgctttatgatgagttttctacagacaggagcaagagacccaagaaagacacaggggtccagcaaagccaagagcaagaaagagactcgcgttcccaccagcgagtcctccagccctggatcaactcctcccaggaggagcaagaagagtcgcaaagcgaccaagaagagacgtcgctcaaagaacaactccaaaaacaactcgtccagcagcgagtcctgggagacaagctcagactcgtctgtggacagatctgcaacctccaagcgggatacgggatacacccacttcttcaatcccatgtataaataaagtgtacatgtttaatccccctatgcctcctaccagtcaagactggaaggaggagtatgaggcttgtaaagcctgggatagaccccccagaaatgatcttaaaaagctgcctttttacccctggatgcctcctacacacaaggtgtgttttaagcttaactttcaataaatgttggccgtgggagtttcacttgtcggtgtctacctctataagtcactatataaagcggtgcacttccgaatggctgagttttccacgcccgtccgcagcggtggagcagcgcagcagcgaaccccgcgtcccgtggg

SEQ ID NO: 1686 - protein, 764 aa, Alphatorquevirus sp.
MAWRGHRRWRRWRRRRRPWWRRRRRWRRRRRRPARRRRFRRVRRRRRGWSRAYRRWKRRRGRRRRKKLLLTQWQPSMVRRCRIVGYDPIIICGHNRTSTNFSSHIDDFTFNNDAYGGGICTHKYTLRTLYDDFLLHRNYWTASNKDLDLSRYLGCSIIFFRHPTVDFIARIRTMPPFEDTDATAMTLHPGMMMLAKKKILIPSLKTRPSRKHYIKVRVGAPKLFEDKWYPQSQLCDVTLLTIQATAADLQYPFGSPLTNTICSNFQILDSNYDDSLTVLHGTEKAAKRDQTYKDMLDIITVYNSTQTLAQLKGYLPTANTNPLTSTNATTATIEVNKHNTLGTKTNTYSNWTSKNTHNNTLYGGSAWRTKKENSTQDKIAPDQMKEANKAYIQAAKVNLPNWNIPTTYNTVPYPFEYYTGMFSSIFLASGRSNWEIPGCYIDISYNPLTDKGIGNMIWLDVITKSDSKYEEGKSKCLMANYPMWCMLYGYLDYCDKVLEHINIDFEYRLVIRCPYTHPMLTRASDPLWGFVPYSENFGKGKMPGGNPVPSLWNRTHWYVSVAHQREVAESIVQTGPFAYKSDEQKSVLTIKYNFRWKWGGNPIFQQVVRDPCKHPSGPSPHRQPRELQIADPKYQTPEIIWHAWDFRHGLFSKTGIKRVSQQPLYDEFSTDRSKRPKKDTGVQQSQEQERDSRSHQRVLQPWINSSQEEQEESQSDQEETSLKEQLQKQLVQQRVLGDKLRLVCGQICNLQAGYGIHPLLQSHV

SEQ ID NO: 1687 - protein, 154 aa, Alphatorquevirus sp.
MGKALKKATPKTMFFGRPYRHKKRKLLLLSVPPTQKAPSMSQWRRPAHDAAGIERQWYESVWRSHAACCGCGDFISHINNLATRLGRPGAPQPPVPPRAPQVRPLPALPAPETWPGEDTGAGAGGGGAAGLGGGDAAGGDVADEDLLDAVDFAE

SEQ ID NO: 1688 - protein, 121 aa, Alphatorquevirus sp.
LDQLLPGGARRVAKRPRRDVAQRTTPKTTRPAASPGRQAQTRLWTDLQPPSGIRDTPTSSIPCINKVYMFNPPMPPTSQDWKEEYEACKAWDRPPRNDLKKLPFYPWMPPTHKVCFKLNFQ

SEQ ID NO: 1689 - DNA, 3011 bp, Alphatorquevirus sp.
ttcggcgtcggggtgagtttacacaccgcagtcaaggggcaattcgggcacgggactggccgggcttatgggcaaggctcttaaaaaatttccccgctgtgtattacagcaagacatcaaaacatgtcgtggagaccgccggcacataacgtccaggggcgcgaaggccagtggtttgcgtcgttttttcacagccacaattgcttttgcggctgtggtgaccctgttgggcatcttaatcgcattgctcctcgctttcctaacgccagaggaccccccccgcctccggagctagaccaagctctcgggccccctaacccgggagctccgccggccattttgccggccctaccgcctgctgctaacccagacgaccagcagccaccacggcgtggtggtacggccgccgaaggcgccgctggccatggagatggcgcagacgccgccgcagactatggagacgaagacctagagctactgttcgccgccgccgacgaagaccagtgagtagaaagcgccgctacaggcgcagacgcagacgaaggggcagacggacttatagggggcgacgaagaaagagacagaccctagttataaaacaatggcaaccggacgttaacagactatgcaggataacaggatggctacccctaataatttgtggcacagggaacacccaaaacaactttatagtacactcagaagatattaccccaagaggagcagcctttgggggtaaccttacccacatcacatggtgcctagaggccatatacaatgaatttctcatgcacagaaacagatggagcagatctaaccatgacctagacctctgcagatacctaggtgccacatttaaggcctacagacaccccacagtagactacataatagcctggactagaacacctccatttcaaatgacagaacttacctaccttagctgccaccccttactaatgctcttaagcaaacacagaatagtagtaaagagccaacaaacaaaaaaagggggcaaaaaatatgttaagtttcatataaaacccccaaaactaatgcttaacaaatggtactttacaaaagacttttgcaaagtacccctattcagcatgtgggcaacagcctgcgaacttcaaaacccctggctaagagaatccaccctgtctccagtagtgggattctatgccttaaaaccagacatatacacaaaccttagcatcctcccagaaaaagttaccgcctttaacacctccttttacaacatagtacacccagcaacaatacaaacctcaaccagtgaaattagatgggaatacacatacacaacactaatgaggccaatatataactcatgcacaacacttacaaactccacatatgactgggaaaactacagcacaccacaaaactacgcaaaatgctaccaatgctttaatgcaagaagagaaacaagatttgaaaaaattaaaaaagaatatcaaaaagtataccccaccttaacaacacaaacaccccaaaactactacttaacacaagaatttggcttctacagcccttactatttaacacccacaagaattagcctagactggcacacacccttccactacatcagatacaaccccatggcagacagaggcctaggaaacatgatctgggtagactggtgcagcagagaagaatctacatatgactccacacgcagcaagtgcatgctaaaagacctgccactatacatgctattctatggctatgcagactgggtaacaaagtccataggctcagaatcagcctggagagacatgagactcatggtaatatgcccatacacagagccacaactacaaatgaaaaataacaaaacacaaggatatgttatctatgcagataactttgccaacggaaacatgccctacttgcaaccacatatcccaatctcgtggtttacccgttggttcccttgcctcacacaccagcgtgaagcaatggagcgtgtggtttcctgtggaccgttcatggtcagagaccaagaccgcaacagttgggacataactttaggctacaagttcttatggagatgggggggctctcctctgcccactcaggccattgacgacccctgccagaagcccacccacgcactgcccgagcccggtacgctccctagaatcctacaagtcagtgacccgacgcaacttggaccgaaaacaatcttccacctctgggaccagaggcgtggactcattagtaaaagaagtattcaaagaatgtcagaataccaaacagatgatgaacttctatcgccaggtcgcccaaagcgtccaaagctcgacacgagaccagagggactaccagaggagcaaagaggagcctacaatttacttcgagccctccaggactcagcccaatcggaagaaagcgacgaagaagagatgccacctctcgaagaagaacaagcaccccaagaaaagacagagaaaatactcgtcaagcagctccagcagcagaaactccaccagcgagtcctcaaacgaggactccgagtcctgctcggagacgtgatgaagctgaggaggggcctacacatagaccccctccttacatagctcctccacagtatgtaccagacctactgttccctaacactcaaaaaaaacccaaattttccaaattcggatgggaaacagaggcccagcttgcatcggccttcgacaggcctatgcgcttctacccttcagaccccccaacctacccatggctaccaaaaaagccagttacccacactacctataaagtatgttttcaacttaaagccccccaataaagtttcaaggccgtgggactttcacttgtcggtgtctgcttcttaaagtcacaaagcactccgagcgccagcgaggagtgcgaccctcccccctggaacaagttcctcagagccgcgcgctacgccttcggctgcgcgcggcacttcggaccccccctccacccgaaacgcttgcgcgtttcggacc

SEQ ID NO: 1690 - protein, 605 aa, Alphatorquevirus sp.
MHRNRWSRSNHDLDLCRYLGATFKAYRHPTVDYIIAWTRTPPFQMTELTYLSCHPLLMLLSKHRIVVKSQQTKKGGKKYVKFHIKPPKLMLNKWYFTKDFCKVPLFSMWATACELQNPWLRESTLSPVVGFYALKPDIYTNLSILPEKVTAFNTSFYNIVHPATIQTSTSEIRWEYTYTTLMRPIYNSCTTLTNSTYDWENYSTPQNYAKCYQCFNARRETRFEKIKKEYQKVYPTLTTQTPQNYYLTQEFGFYSPYYLTPTRISLDWHTPFHYIRYNPMADRGLGNMIWVDWCSREESTYDSTRSKCMLKDLPLYMLFYGYADWVTKSIGSESAWRDMRLMVICPYTEPQLQMKNNKTQGYVIYADNFANGNMPYLQPHIPISWFTRWFPCLTHQREAMERVVSCGPFMVRDQDRNSWDITLGYKFLWRWGGSPLPTQAIDDPCQKPTHALPEPGTLPRILQVSDPTQLGPKTIFHLWDQRRGLISKRSIQRMSEYQTDDELLSPGRPKRPKLDTRPEGLPEEQRGAYNLLRALQDSAQSEESDEEEMPPLEEEQAPQEKTEKILVKQLQQQKLHQRVLKRGLRVLLGDVMKLRRGLHIDPLLT

SEQ ID NO: 1691 - DNA, 3011 bp, Betatorquevirus sp.
cgggtgccgaaggtgagtgaaaccaccgtagtcaaggggcaattcgggctagagcagtctggcggaatgggcaagaaactaaaaattatatgtcttttacagatgagtagacaatgtcctccaaaatacaactcaaaagaacttcaactacaatatgttaacaccctggtaaatattcacgacctaaactgcgggtgcaactctcctttggagtgtacagttttggcaatttataaccaagaaaaacatcttcaatttacaaaacaagaaaaacaaaaactacaaaaatggcttactactacagaagaaaatacttcccaagaagacgacgctattggagacggagacctagaacgacttttcgcagacgattttggagaagaaaaagatacagatacaaggtaaaaaaaaaattttcttctataagactaaaacaatggcaaccgctatatataagaaacttaaaaattaaaggaatactgccactttttataactacagatgaaagagtaactaatgactatactatgtatactaacagcacagcacaacattatgtacctggaggaggaggtttttcaatttatagatttactcttaaagccttatatgaactatttaataaaatacaaaacaaatggactcaatctaatgaagactggccatttataagatacacaggctgtgaatttaaattctacaaagcagaaaaagcagattacattattaattaccacagatgtccaccaatgctagcaaccttagacacctttcacagcactcaaccacacataatgacattaaacaaaaaacacaaaataataagatgcaaacaaaataacccatacaaaagaccatacaaaaaagttagaataaaaccaccagcattactacaaaacaattggtacttccagaaagactttgcaccagaacctttattacttttaatgtccactagtatgtctttagatagatactttttaaattcacaatctataagtacaaccatgggatttctttcactaaatgacaatgtatttgacttttacaattataaaataccgccttcaacaggttacatacccaaacaaaaaaaatacatgtggtcattatattcaccactagtagaaatacaaaaaacacaaattaaacaattaatatacttaggaaaatctaaagaatatgataaaggaaaaccaatatcccaagaaatgcccggcggcacaaactttgaaactgcctggacaaattattttagtaaaacagacaactggggaaacatttttgaaccggactacttaacacaacaccatgtagtactattctcagaaaaatcaccaaacgagttaaaaactatatataaacaagaagcaagaaagtgggagaaaggagaaaatgaaataggaccacatatacaagaaacaacacacaaactactagttaactgcagatacaatccatatgcagacacaggtggaaacgttgcatttatagtacccataacaaatcaagaacaaacacacctacatattccagatgatgacaaatacaaatcagagggctaccccttatggctatcagtatggggatttttagactatgaaagaaaacgcctaggacaaaacgtagacacagactaccaaatagtacttaaaagcccacatattacaccatcacaaacattttacattccaatagacgaaggatttacagaaggtagatcaccatacagaccagacggaacacaaccaactgtatatgaccaattacattggcatccaaaagtaactatgcaaatgcaatcaataaatgccataggtgcttgtggaccaggaactgtaaaactaccaaaacaaacatcagcagaagctcactgtacttatactttttactttaagcttggaagctgtgctccgccaatgcaaaacattgacaacccagaaaaacaacaaacttttaccaataacatgttccaaacaaattcgttacagaatccagaatatcccctacaatactacttgtacaacttcgacgaaagacgaaaaatgcttacaaaaagagctgcaaaacgaatcaaaaaaattattgactctgaaaaatctttatcaccaattacaggaaaaagccaactggaaatcccactgcagcaagaaacagacgagggggaatcgtcggaggaggaagccgaaaaagagacattactcctcctcctcaaacagcagcgactcaagcaagccaagtacaagcagcgactcctccagttaatagaacaattacaaactttagaataaaacaaactaaatgcactgtaaacttattccccccagaaactcctaaaaacaggagaatgactccaaaagaatttaaagaagagttagaagaaagtgttatatggggacatagacccagacaatttattttagatactcctttctatgactttctacccattacccctaaaatacccaaaattaactttgacttgtgttacaaagaataaaggcctgcatacttcacatctcggtgtccatttatattattttaaacttaaataaacatccaccacactcccaaatacgcaggcgcacagggggctccgccccctgtaacccccagggggggcacagccccccccttcaaccccccgaaattacaccactaaccgcaaatttgcattgcccaccacaaacggacaggaaaaccacaaaatttgcattgccgaccacaaactgacaacaaaccacaaaatttgcattgccaaccacaaaccgtcaactacttcttctttttagaaactacttcccctttacatacttattattcattacattaattaataatcaccgtaattccggggaggagcaactcagctatataactaactatacttccgaatggctgagtttatgccgccagacgtagactggataacgacagtgactccaggctgctccagggcgggtgccgaaggtgagtgaaaccaccgtagtcaaggggcaattcgggctggg

SEQ ID NO: 1692 - protein, 667 aa, Betatorquevirus sp.
MAYYYRRKYFPRRRRYWRRRPRTTFRRRFWRRKRYRYKVKKKFSSIRLKQWQPLYIRNLKIKGILPLFITTDERVTNDYTMYTNSTAQHYVPGGGGFSIYRFTLKALYELFNKIQNKWTQSNEDWPFIRYTGCEFKFYKAEKADYIINYHRCPPMLATLDTFHSTQPHIMTLNKKHKIIRCKQNNPYKRPYKKVRIKPPALLQNNWYFQKDFAPEPLLLLMSTSMSLDRYFLNSQSISTTMGFLSLNDNVFDFYNYKIPPSTGYIPKQKKYMWSLYSPLVEIQKTQIKQLIYLGKSKEYDKGKPISQEMPGGTNFETAWTNYFSKTDNWGNIFEPDYLTQHHVVLFSEKSPNELKTIYKQEARKWEKGENEIGPHIQETTHKLLVNCRYNPYADTGGNVAFIVPITNQEQTHLHIPDDDKYKSEGYPLWLSVWGFLDYERKRLGQNVDTDYQIVLKSPHITPSQTFYIPIDEGFTEGRSPYRPDGTQPTVYDQLHWHPKVTMQMQSINAIGACGPGTVKLPKQTSAEAHCTYTFYFKLGSCAPPMQNIDNPEKQQTFTNNMFQTNSLQNPEYPLQYYLYNFDERRKMLTKRAAKRIKKIIDSEKSLSPITGKSQLEIPLQQETDEGESSEEEAEKETLLLLLKQQRLKQAKYKQRLLQLIEQLQTLE

SEQ ID NO: 1693 - protein, 112 aa, Betatorquevirus sp.
MGKKLKIICLLQMSRQCPPKYNSKELQLQYVNTLVNIHDLNCGCNSPLECTVLAIYNQEKHLQFTKQEKQKLQKWLTTTEENTSQEDDAIGDGDLERLFADDFGEEKDTDTR

SEQ ID NO: 1694 - DNA, 3011 bp, Betatorquevirus sp.
cgggtgccgaaggtgagtgaaaccaccgaagtcaaggggcaattcgggctagatcagtctggcggaacgggcaagtaactaaaaaatatacttatttttacagatatgagctctatttggagaccaccgacatcatcactgagacaacaagaattaaaatggagaaatataatttttgaatcacacgacttctggtgccactgcgacgacgttgacctgcactttttaatggttatgaacaaattcaacggttgccccaaacctgaaagcgagattaaaaatataaaatgcctccttaccggtacaacttctacagacaacgccgctaccgcaccagaagaagaagaaactggtttactagatggagaactggaagagcttttcaaagaagaaaataccgaagacaaagatggaaacgacaccgaaaggtaaaaagacgttttaaaaaaaaaaaagctactaaaataactgtaaaacaatttaatcctagtcatattaacaaatgtaaaattgttggatacaaatgcttatttcaaggtagtacaaaaaatctttcaactaactatatacaatatgtaaatgctattgtaccaccattttggccgggaggaggaggatggagcttaatagtatttagcttaacatcactatttgaagactgggaacacttagaaaatatctggacacgatcaaacataggcttaccgctagtacaatataaaggctgtaaactaaaactttatcaaagctatgacacagactacgtagcaatttatgaccgatgttggcctatggtagatacagacttaacacacccagacgctgcaccctccagaatgttaataagaaaaaacaaaattataatacccagtcgaaaaactaatccaagaaaaagaccatacaaaaaagtttttattaaacccccggcacaaatgatgacacaatggtactttcaaagagatatatgtaaactgccactatttatgcttacaacaacagccgttgacttattatatcctttttgcaaccctcaatgcatgtcaaataacattactatacctgttattagtacacacatatttaaaaaccttaactttgtagaatatggaacagcaggttacagtcctaaacaaacagacaggaacgaaaatatgtggctttatgcatccctattatccaatttatcaactataaataagaaacaggaagctgaaagtttaataccactaaaaaacacaaaaaattttcaaccaggaaaacccataaacgacaactgggaagacacacccaaaaattggggaaacccattttactatgactacattacaggaatatcagaacatgacacatacacaatttatattagtacaaccactgccgccagtattaaaagtagtctatcaaatccaaaatttacagtaacaaaactatcaggaccaacagtttacttttgcagatacaacccagctaaagacaaaggagatacaaacaaaatgtatctagtaagtacacacacaccacataaagaaattacaccaccaacagatacaaacttaataattgaaggatttccactatttatacaaacatggagctggacagactgggtaaagaaagctaaactagtaccagacccagataaatacagaatattagtaatagataccaaagtattagaccctgaacttccacattatataccaatagactatgactttatagaaggatacgatccatacacaccaaacaaagaaaatccaaacgtacctcacacaccaaatatatacaacgctgcaaactggcatccaaaactactctttcagagacaaacaattgaaaaaattgccacttcaggaccagctgtacatagagaaacaaaccacaaatacattcaagcatattgtaaatatacattttattttaaatggggcggatgccctaaagccttacaaaaaccatatgaaccttgcttacagccaaaatggaccacagccaataacatctctacaagacttgaaatcacgaatcctatcacaccaccagaaacagaactatactcctgggactgggactcagactatgttaaagaaacagctatacaaagaattggcagatacacggaaattaataaaccaactttctcatcaacagcaaacaaaaacaacccacaaatcctcaaaaaagtccaagaaaaagaccaaacagcagagaaagaggaaaagacgatattcgacaagctccagctcctcagacaccagcgtctcctcctcgaactccagctacagcagtgcctcaaaaaatagtaattaaaaacagcaaagtaactgttagtctattcgaaaaaccaaaaaagaatagactaatgactccatgggaaaaacaagaagaaaaagaaatagcagctatatttttaagaccacaaagagactatatatttgactttcctacttatcctatatttcctccagctcctaaagtacctaaagttaactttgacttaatgtttaaagattaataaaacaaggccaacataaattcacttagtggagtccatttatttaagtttaaacttaaataaacatccaccgcctccctataattcgggcgccaaaattcaaagggggctccgcccccttacacccccaagggggctccgcccccttccacccccaagggggctccgcccccttacacccccaagggggctccgcccccttacagggggctccgcccccttacacccccaagggggctccgcccccttacaccccctttttaatatttaacaggaaaaccacctaatttaaattgccgaccacaaaccgtcactaacttctgctttttacatgtacttcctttttacctaattattattcattacattaattattaaacaccgtaaatccggggaggagcttacaaactatataaccaactacacttccgaatggctgagtttatgccgccagacggagactgaatcactctagtgacttcaggctgatcttggg

SEQ ID NO: 1695 - protein, 671 aa, Betatorquevirus sp.
MPPYRYNFYRQRRYRTRRRRNWFTRWRTGRAFQRRKYRRQRWKRHRKVKRRFKKKKATKITVKQFNPSHINKCKIVGYKCLFQGSTKNLSTNYIQYVNAIVPPFWPGGGGWSLIVFSLTSLFEDWEHLENIWTRSNIGLPLVQYKGCKLKLYQSYDTDYVAIYDRCWPMVDTDLTHPDAAPSRMLIRKNKIIIPSRKTNPRKRPYKKVFIKPPAQMMTQWYFQRDICKLPLFMLTTTAVDLLYPFCNPQCMSNNITIPVISTHIFKNLNFVEYGTAGYSPKQTDRNENMWLYASLLSNLSTINKKQEAESLIPLKNTKNFQPGKPINDNWEDTPKNWGNPFYYDYITGISEHDTYTIYISTTTAASIKSSLSNPKFTVTKLSGPTVYFCRYNPAKDKGDTNKMYLVSTHTPHKEITPPTDTNLIIEGFPLFIQTWSWTDWVKKAKLVPDPDKYRILVIDTKVLDPELPHYIPIDYDFIEGYDPYTPNKENPNVPHTPNIYNAANWHPKLLFQRQTIEKIATSGPAVHRETNHKYIQAYCKYTFYFKWGGCPKALQKPYEPCLQPKWTTANNISTRLEITNPITPPETELYSWDWDSDYVKETAIQRIGRYTEINKPTFSSTANKNNPQILKKVQEKDQTAEKEEKTIFDKLQLLRHQRLLLELQLQQCLKK

SEQ ID NO: 1696 - DNA, 3011 bp, Alphatorquevirus sp.
cgctacgccttcggctgcgcgcggcacctcgtcaaggggcaattcgggctcgggactggccgggctatgggcaaggctcttaaagcgtacgtcccccgctatgtttctcggcagggtgtggaggaaacagaaaaggaaagtgcttctgctggctgtgcgagctccaaagaagacatcttccatgagtatctggcgtccccccctcgggaatgtctcctacagggagagaaattggcttcaggccgtcgaaggatcccacagttctttttgtggctgtggtgattttattcttcatattactaatttagctgcacgctttgctattcaggggcccccgccggagggtggtccgcctcggccgaggccgccgctcttgagagcgctgccggcccccgaggtccgcagacagacgcgcacagagaacccgggcgcctccggtgagccatggcctggcgatggtggtggcagagacgatggcgccgccgcccgtggccccgcagacgatggagacgcctacgacgccggagacctagacgacctgttcgccgccgtcgaagaagagcaacagtaaggaggcggaggtggagggtcagacgtgggcgacgcacatacacccgacgcggggtcagacgcagacgcagactcacaaagaaacttgtactgactcagtggagcccccagacagtcagaaactgttcaataaggggtatagtacccatggtaatatgcggacacaccacagcaggtagaaactatgccatacacagcgaagacttcactacacaaataaaacccttcgggggcagtttcagcacgaccacctggtcgctgaaagtactctgggacgaacaccaaaaatttcagaacaggtggtcctatccaaacacacagctagacctcgccaggtaccggggagtcaccttctggttctacagagaccagaagacagactatatagtacaatggagcagaaatcctccctttaaactaaacaaatacagcagctccatgtaccaccctggaatgatgatgcaggcaaaaaagaaactaatagtccccagtttccagaccagacctaaaggcaaaaagagatacagagtaagaataagaccccccaacatgttcgctgacaagtggtacactcaagaagacctgtgtccggtacctcttgtgcaaattgtggtttctgcggccagcctgctacatccgttctgcccaccacaaacgaacaacccttgcatcactttccaggttttgaaagacatatatgatgaatgcataggaattaacgaaagtatgaaaactcagtatgaaactttacaaaacaaactatacacccaatgcacatactatcaaacaacacaagtactggcacaactatctcctacctttcaacctgccatgaaacctaccacttcaaacacagaccctacaaacacgacactaggaaactatgtaccagacttaaagtacaactctggcaactttcacacaggacaaaacccagtattcggcatgtgttcatacaagccaacaaaagaaataatggacaaagctaatagctggttttggcacaatctaatggtagacaaccagttacatagtagttatggcaaggcctcattaaagtgcatggagtaccacacaggcatatacagctccatattcctaagcccacaaagatctttagaattcccagcagcataccaagacgttacatacaaccctaactgtgatagagcagttggaaacgtagtttggttccagtacagcactaaaatggatacaaactttgatgaaataaaatgtaaatgtgtccttaaagatattccactgtgggcggccttcaatggctacgcagactttataatgcaagaactgagcataagtacagaaatccacaactttggcatagtgtgctttcagtgcccctacacttttcccccctgtttcaagaaagataatcccaaaaaggggtacgtgttctatgacaccacctttggtaatggaaagatgccagacggttcagggcacatacccatctactggcaacagaggtggtgggtcagactagccttccaggtccaggtcatgcacgactttgtactctgcggcccctttagctacaaagatgacctagcgaacaccacactcacagccaggtacaaatttagattcaaatggggcggtaatatcatccccgaacagattatcaagaacccgtgtcacagagagcagtccctcgcttcctaccccgatagacaacgtcgcgacctacaagttgttgacccatcaaccatgggcccgatctacaccttccacacatgggactggcgacgggggctttttggtgcagatgctatccagagaatgtcacaaaaaccgggagatgctctccgctttacaaaccctttcaaaagacccagatatcttcccccgacagctggagaagactaccgacaagaagaagacttcgttttacaagaaaaaagaaggcgcacactcacagaagaagtccaggacccggagagccccccgcaaagcgcgccgctcctacagcagcagcagcagcagcgggagctctcagtccagctcgcggagcagcagcgactcggagtccaactccgatacatcctccaagaagtcctcaaaacgcaagcgggtctccacctaaaccccctattattaggcccgccacaaacaaggtgtatctctttgagccccccaaaggcctcctcccaatagtgggcagagaggcctgggaggacgagtacgtcacctgcaagcactgggatcgccctcccagaaccaaccatctagacacccccacctatccctggatgcccaccaacttcaaagtcagcttcaaacttggatttaaaccctaaataaaaatatcaaggccgtacactgttcacttgtcggtgtctacctctataggtcactaagcactccgagcgcagcgaggagtgcgacccttctgggtgggtgcaacgccctcggcggccgcg

SEQ ID NO: 1697 - protein, 766 aa, Alphatorquevirus sp.
MAWRWWWQRRWRRRPWPRRRWRRLRRRRPRRPVRRRRRRATVRRRRWRVRRGRRTYTRRGVRRRRRLTKKLVLTQWSPQTVRNCSIRGIVPMVICGHTTAGRNYAIHSEDFTTQIKPFGGSFSTTTWSLKVLWDEHQKFQNRWSYPNTQLDLARYRGVTFWFYRDQKTDYIVQWSRNPPFKLNKYSSSMYHPGMMMQAKKKLIVPSFQTRPKGKKRYRVRIRPPNMFADKWYTQEDLCPVPLVQIVVSAASLLHPFCPPQTNNPCITFQVLKDIYDECIGINESMKTQYETLQNKLYTQCTYYQTTQVLAQLSPTFQPAMKPTTSNTDPTNTTLGNYVPDLKYNSGNFHTGQNPVFGMCSYKPTKEIMDKANSWFWHNLMVDNQLHSSYGKASLKCMEYHTGIYSSIFLSPQRSLEFPAAYQDVTYNPNCDRAVGNVVWFQYSTKMDTNFDEIKCKCVLKDIPLWAAFNGYADFIMQELSISTEIHNFGIVCFQCPYTFPPCFKKDNPKKGYVFYDTTFGNGKMPDGSGHIPIYWQQRWWVRLAFQVQVMHDFVLCGPFSYKDDLANTTLTARYKFRFKWGGNIIPEQIIKNPCHREQSLASYPDRQRRDLQVVDPSTMGPIYTFHTWDWRRGLFGADAIQRMSQKPGDALRFTNPFKRPRYLPPTAGEDYRQEEDFVLQEKRRRTLTEEVQDPESPPQSAPLLQQQQQQRELSVQLAEQQRLGVQLRYILQEVLKTQAGLHLNPLLLGPPQTRCISLSPPKASSQ

SEQ ID NO: 1698 - protein, 171 aa, Alphatorquevirus sp.; identical to SEQ ID NO: 1440

SEQ ID NO: 1699 - protein, 187 aa, Alphatorquevirus sp.; identical to SEQ ID NO: 1441

SEQ ID NO: 1700 - DNA, 3011 bp, Betatorquevirus sp.
cgggtgccgaaggtgagtgaaaccaccgtagtcaaggggcaattcgggctagagcagtctggcggaacgggcaagaaacttaaaataatatttattttacagatgagtagacaatgtcctccaaaatacaactccaaacaacttcaactacaatatgttaacacccttgtaaatgtacacgacctcaactgcggatgcgactctcctttggaatgtacagttttagccatttataaccaagaaaaacaactcaaatttacaaaacaagaaaaagaaaagcttaaacaatggcttactactacagaaaaagatactacccaagacgaagaaggttttggagacggagacctagagcgccttttcgaaggagattttggagaagacgacgataccgctacaaggtaaagaaaaaattttcttctataaaactaaaacaatggcagcctctatatataagacatttaaagataaaaggaatactgcctctgtttctaacaactgataaaagaattagtaatgactatactatgtatactaacagcatagctcaacattttgtaccaggaggaggaggattttcaatttatagatttactttaaaagccctctttgaactatttacaaaaatacaaaacaaatggacacaatctaatgaagattggccttttataagatacacaggatgcgaatttaaattctacaaatcagaaaaatgcgactacattataaactatcacagatgtccacccatgctagccacaatagacacatttcaaagcacacaaccacacataatgacacttaacaaaaaacataaaataataagatgcaaacaaaacaatccatacaaaagaccatacaaacgagtaaaaataaaaccaccagcactacttcaaaacaattggtattttcaaaaagactttgctgcagaacccttactactactaatgacatcttcaatgagtttagacagatactttttaaactccaaatcaattagcaccacaatgggatttcaatcactaaatgacaatatttttgatttttacaattataaattaccaccaacaacaggatacataccaaaaccaaaaaaatatatgtggtctttacatcaaccacaaaaccaaatacacacaacacccataaacgaactaatatatttaggaaaaagtaaagaaatggacaaaggacaaccattaaaaaactttcaatcaggagggaaaagtccagacaaaatttgggaagactacttttcaacaacacaacactggggaaatatttttgaaccttactacttaacacaagaacatgtagtgcttttttctgaaaaatcacccaatgaactaaaaacagaataccaaaaagatcaaactaaatggaaaacattaagtaacgaaataggacaacacatacaagaaacaacacatacattaatagtacaatgtagatataatccatacgcagacacaggaggaaacactgtattcatagttccgatcactcaacaagaacaaacaccattacacataccacaagacgacaaatataaaacagaaccatacccactttggctaggaacatggggtttcctagactatgaaagaaaaagaataggccaaaccatagacacagactaccaaatagttataaagtctccacacataacacccgcacaatttttttatatacccattgacgacacattcacatcaggaagatcagcatacagacctccagaaactcaacctacagtatatgatcaactacattggcatccaaaaataacaatgcaaatggacaccataaactctatagcagcatgtggccctggaactgttaaacttccagcacaaacttcagcagaatctcactgtacatatacttttcattttaagcttggaagctgtgctccgccaatgcaaaacattgacaacccagaaaaacaacaaacttttgccaataacatgttccaaacaaattcgttgcagaatccagaatatcccctacaatactacttgtacaacttcgacgaaagacgaaaaatgcttacaaaaagagctgcaaaacgaatcaaaaaaattgttgactctgaaaaatctttatcaccaattacaggacaaagccaactggaaatcccactgcagcaagaaacagaggaggggtcctcatcggaagaggaagccgaaaaagagacattactcctcctcctcaagcagcagcgactcaagcaagccaaatacaagcagcgactcctccagttaatagaacaattacaaactttagaataaaacaaactaagtttactgtaaacttatttccttctgacactcctaaaaacaggagaatgactgcaaaagaatttgcagaagagttagaggaaagtaaaatatggggccacagacccagaacttttattttagatactccatactatgactttttgcctatcacccctaaaatacccaagataaactttgacttgtgttacaaagaataaaggcctgcatacttcacttctcggagtccgtttatattattttaaacttaaataaacatccaccacactccctaatacgcaggcgtgcagggggctccgccccctgtaacccccagggggggcacagcccccccttaaaccccccgtaattactccactaaccacaaatttgcattgccaaccacaaactgacaggaaaaccacaaaatttgcattgccaaccacaaactgacaggaaaaccacaaaatttgcattgccgaccacaaaccgtctaaaacttcctcttttacatactacttccttttacattcattattattcattacattaattaatactcttcgtaattccggggaggagctaatatactatataactaactatacttccgaatggctgagtttatgccgccagacggagacaggatcacttcagtgactccaggctgctcaagggcgggtgccgaaggtgagtgaaaccaccgtagtcaaggggcaattcgggctaggg

SEQ ID NO: 1701 - protein, 667 aa, Betatorquevirus sp.
MAYYYRKRYYPRRRRFWRRRPRAPFRRRFWRRRRYRYKVKKKFSSIKLKQWQPLYIRHLKIKGILPLFLTTDKRISNDYTMYTNSIAQHFVPGGGGFSIYRFTLKALFELFTKIQNKWTQSNEDWPFIRYTGCEFKFYKSEKCDYIINYHRCPPMLATIDTFQSTQPHIMTLNKKHKIIRCKQNNPYKRPYKRVKIKPPALLQNNWYFQKDFAAEPLLLLMTSSMSLDRYFLNSKSISTTMGFQSLNDNIFDFYNYKLPPTTGYIPKPKKYMWSLHQPQNQIHTTPINELIYLGKSKEMDKGQPLKNFQSGGKSPDKIWEDYFSTTQHWGNIFEPYYLTQEHVVLFSEKSPNELKTEYQKDQTKWKTLSNEIGQHIQETTHTLIVQCRYNPYADTGGNTVFIVPITQQEQTPLHIPQDDKYKTEPYPLWLGTWGFLDYERKRIGQTIDTDYQIVIKSPHITPAQFFYIPIDDTFTSGRSAYRPPETQPTVYDQLHWHPKITMQMDTINSIAACGPGTVKLPAQTSAESHCTYTFHFKLGSCAPPMQNIDNPEKQQTFANNMFQTNSLQNPEYPLQYYLYNFDERRKMLTKRAAKRIKKIVDSEKSLSPITGQSQLEIPLQQETEEGSSSEEEAEKETLLLLLKQQRLKQAKYKQRLLQLIEQLQTLE

SEQ ID NO: 1702 - protein, 100 aa, Betatorquevirus sp.
MSRQCPPKYNSKQLQLQYVNTLVNVHDLNCGCDSPLECTVLAIYNQEKQLKFTKQEKEKLKQWLTTTEKDTTQDEEGFGDGDLERLFEGDFGEDDDTATR

SEQ ID NO: 1703 - DNA, 3010 bp, Betatorquevirus sp.
cgggtgccgaaggtgagtgaaaccaccgaagtcaaggggcttatcgggctgaatcagtcttggcggaacgggcaagaaactaaaataatttttattttacagatgagcaaactatggaaaccttcaccatacaaagataaatgcatggaattacaaatgaccaacgcttttatgcatatccacgaccttgcctgcggatgtaacgaccctctgctacacactattcagctcctgctatcaaacaaaattgattctacaattccagaatctaccaaagaaaagataaaatgcctcctttctacagaagctggattcaaccatggagaaggagataccccagaagatatcgccgacgtccttaccgcaggagatttagaagaactcttcaaagaaaatacagaagacgacgatgggtaagaaaaagaaaacatagaatatatagacgtaaaaaactaagattcttaaaactaaaacaatggcaaccaaaaaaaattttaaaatgccacataaagggatacaaaactctttttatggcaggaccttttagagcaaacaataactatgctcaataccaagactctatagtagaacaacaccttccaagtggaggaggatggagtctacaaatatttactttagatgcactatgggaagaacaccaaaaaatacacaattggtggacaaaaggaaacaaaggactgccattagcaagatactgcggatgtaaatttaaattctttagagacttaactgttgactatgctgtatcatatagcctctgttatcctatggtagacacagacttaactcatgctaacagtgcgccgggtatgatgttaattgctagacatagatttattgtaccaagtattagacaccaaccatatggaaaaagatacataaaaagaaaatttccaccaccatcacaaatgaaaaacaaatggtactttcaacaagatatttgtaaaacaggactcatattacttacaacaacagcaatagatttaaactacttctattgccctccatggagcataagtaacaatgtaaccattccatgcttaaatccacaactatttgaacacaaatatttcacacaacaatccacacaaggatacacacctaaagtaaataactactattattgttttaaagaaaatgaacacgactacaaagtaaaaaacttacattacttaggaagaccaggaccaagaggtataggatactcttatgaagaaagcaaactaaatcaaaattatacttcacaaccacaatactggggaaacatattcacaccacaagtactaaatttagacataccagtatacaaatctacagttcaaccatctgaaatatttaaaaacacaaatttagacaaaccagtatcaactatatcagaactaactagggcaacaataccatttatagaatacctaagatataatccaaacagagacacaggagaactcaatgaaatttacttattaagcatagaaacagaaggcacaggatttaatccaccaacagacaaaaacttaaaaattgatggatttccactatggctaggcttatggggatggatagattggcaaaaaaaagcccactgggtacaacacattgacagttcttacataatatgtttcaaaactaaatttactaacccacaagtcagttatattgtaccaatagaccaagcatttctaaacggtcatggaccttatgacataccacaagaagacttaacagactacactttaaaaacatggtggcctaaaatagctaatcaaatgataacaatagataatatatgccaaacaggaccaggaactcaaaaatacaaagatgttaaacaaatacaagcacattgtcattatgatttcttttttaaatggggtggttgtcctgcacaaagtgttgacttaacaaatccttgttcacagccaaaatactccgtgcccgatactctcttacggggactacaaatccagaatccaaacacagccccccaacttgaattacacgactttgacgaaaggagaaacttcattacaaaaagatgtattgaaagaatacaacaatacacagaaactgaacaaactctttcttcaattacaggaccaacagacccaccaacaaaaacagaaaggcagaaaatacaagaagccctccaaacatcgacagaggaaacacaagagaaaacgctactcgagcagctcaagctccagctcaagcagcagcaactcctcaaacgagcaatcctcaagctaatgggaccaaatatagaataaaaatgactcaatgtacaataaacttatttgacgatgaaccaaaaattaaaaatagaagaatgaccccctcagaatatgctgatgaattagtgcttgctgatatctttcgcagaccgcctagacaatatatacatgaccaccccttttatccatatgtaatttctgacccaaacaaacgatacaaagtaaactttgacttaaactacatatgtaatttctgacccaaacaaacgatacaaagtaaactttgacttaaactatccgtaggccagcaaatattcacttgtcggtgtctgtttataaaagtttcaacttaaataaacatgcttgtaactcccaaactttgcttgccttgaataattttaagggggctccgcccccttaaacccccaagggggctccgcccccttacacccccgagggggctccgccccctgtaacccccgaaaccacaaaccacaaaatttgcattgccgaccacaaactgcctattaaccacaacttccctattacaacaaccacaaaatttgcattgccgaccacaaacagtcttatgctaattaacttctcctattctcttacttcccctaaaattaattagtaaactgcatcacccagaggcgtgtcttatgtgctatatatttgatgacagttccgaatggctgagtttatgccgccggacgaagaacggatcactacagtgactccgagctgattcaggg

SEQ ID NO: 1704 - protein, 666 aa, Betatorquevirus sp.
MPPFYRSWIQPWRRRYPRRYRRRPYRRRFRRTLQRKYRRRRWVRKRKHRIYRRKKLRFLKLKQWQPKKILKCHIKGYKTLFMAGPFRANNNYAQYQDSIVEQHLPSGGGWSLQIFTLDALWEEHQKIHNWWTKGNKGLPLARYCGCKFKFFRDLTVDYAVSYSLCYPMVDTDLTHANSAPGMMLIARHRFIVPSIRHQPYGKRYIKRKFPPPSQMKNKWYFQQDICKTGLILLTTTAIDLNYFYCPPWSISNNVTIPCLNPQLFEHKYFTQQSTQGYTPKVNNYYYCFKENEHDYKVKNLHYLGRPGPRGIGYSYEESKLNQNYTSQPQYWGNIFTPQVLNLDIPVYKSTVQPSEIFKNTNLDKPVSTISELTRATIPFIEYLRYNPNRDTGELNEIYLLSIETEGTGFNPPTDKNLKIDGFPLWLGLWGWIDWQKKAHWVQHIDSSYIICFKTKFTNPQVSYIVPIDQAFLNGHGPYDIPQEDLTDYTLKTWWPKIANQMITIDNICQTGPGTQKYKDVKQIQAHCHYDFFFKWGGCPAQSVDLTNPCSQPKYSVPDTLLRGLQIQNPNTAPQLELHDFDERRNFITKRCIERIQQYTETEQTLSSITGPTDPPTKTERQKIQEALQTSTEETQEKTLLEQLKLQLKQQQLLKRAILKLMGPNIE

SEQ ID NO: 1705 - protein, 122 aa, Betatorquevirus sp.
LNQSWRNGQETKIIFILQMSKLWKPSPYKDKCMELQMTNAFMHIHDLACGCNDPLLHTIQLLLSNKIDSTIPESTKEKIKCLLSTEAGFNHGEGDTPEDIADVLTAGDLEELFKENTEDDDG

SEQ ID NO: 1706 - protein, 72 aa, Betatorquevirus sp.
MTQCTINLFDDEPKIKNRRMTPSEYADELVLADIFRRPPRQYIHDHPFYPYVISDPNKRYKVNFDLNYICNF

SEQ ID NO: 1707 - DNA, 3010 bp, Alphatorquevirus sp.
gcggcacctcggacccccgctcgtgctgacacgctggggcaattcgggctcgggactggccgggctatgggcaaggctcttaaaaaagctacccccttaactatgtttctcggcagagtttaccgccaccagaaaaggaaagtgcttctgtccctggtgcacactccacagaaaacaccttcctccatgaaccgctggtcacccccggcacacgatgcccgcggaattgagaggcagtggtatgaatgtgtttggcgcagtcacgctgcttgctgtggctgtggtgattttattagtcatattaatgatctggcgcatcgttttggacgtcctccgggttccagaccacctgctactccccagccgccggctgtgagagccctcccggcgctgccggcccctgagccatggtctggcgcagggggcgacgctggcgccggtggagatggcgccgcaagccgcggtggaggagatggagacgctggagacgtcgcagacgaagacctgctagacgccgtcgacctcgcagagtaaggagacgcaggggagggtggcggcgctcctacagacggtggaaaagacgcagggggcgacgcagacataaaaagaaacttatactgactcaatggcaacccgcggttgtcaaaaaatgcagaatagtgggctacgaccccataataatatgtggactgaacagaaccagccacaactccacaactcacgcagaggactacactacaggcaaccaggcctttggggggggactgtgcaccaccaaatacactctaagaatactgtttcaagagtacatggcccaccacaactactggacggccagcaacagagacctggagctggccaggtacttgggggcttctatcatattttttaaacaccccacagtagactttgtagccagagtaagaaccatgcctcccttcaacgacactgacatgacagccgcatccctgcacccaggaatgctcatgctagctaaaaagaaaataattattcccagtctgaaaaccagacccagcagaaaacactatgtaaagataaaaataggggcccccaaactatttgaagataagtggtactctcagagagacctctgtgacacaactcttgtggttatagaggcaacggttgcagacttgcaatatccgttcggctcaccactaacgaacagcatctgttgcaacttccagattcttaacagcaactatgacaacgccctgagcacccttataggaactcagggagacaaagacagagaccaatgctacaactttttattaaatacaattacttactacaacaccagtcaaactctagcacaacttaacaaattcttacctacaaccaacacaacccaattaagtgagtctaatgcagcacactccataaacccatccaacaaaacagaaaacacatatcaatcaacaaataaagaaatacacaacaacacactatatggaggagcagcatactacaaacacaacggaaccagtaccaccactttaccaccacataaaatgaaagaagcaaataaggcatacacagcagcagcccgaaaaatactgggcaactggaacttcactagcatgaacacaagctcatgctctgacttacaaggcctaaactactttgactactacacaggcatgtttagcagcatatttttagccagcggcaggtcaaactgggaggtaaaaggcagctacacagacattacatacaaccccctagtagacaaaggagagggcaacatgatctggatagactggatcaccaaaggtgataccatctactctgaaactaaaagcaaatgcctcctcagagacctccccatgtgggccctgtgctatggctacgcagactatgtactaaaatgcacaggcatctccagcataaaaaacgaggccagaatagttatgagatgtccctacacatacccccagctagtaaaacacagcaacgacaacttcgggtttgtagtgtacagtgacaactttggacgcggacgcatgccagggggcgaccctgtaccaagcaccagaaacagggtgcactggtacatcaccataacccaccagactgaagtgctagagtgcatctcccagaccggaccgtttgcctaccacagcgacgaacgcaaagcagtactgactataaaatacaacttcagatggaaatggggaggcaaccctgtgttccaacagattcttagagacccctgctcgggatcctccggctccggtccccgtagagtgcctcgctcaatacaagttgatgacccgaagtaccagacaccagagtacatctggcacgcgtgggacttcagacgtggactctttagccagaaaggtattaagagagtgtcagaacaaccaacagatgttgaccttcctacaggcaggggcaagagacccaagagagacacagacggcccgcaagagcaaggccaagaagaaggctcgtcttccatcagacgagtcctccagcagtggctccactccagtcaggagcagagccaagaaagcgaagaagaagcagccccgacgacgctctcgcaagagctacaaaaacaactcaagcagcagcagctcatgggaaagcagctccgagagctcagtctccaactcgcccaagtccaagcggggggacaccttcacccccttttacaatgccatgcataaataaagtgtacatgtttccccctttgacctctactccctccagcagagactggaaagaggagtacgaggcctgcagagtctgggacagacctcccagaaacgacctaagaaagccccctttctatccctggatgcctcctacgcaccatgtaagctttaagctctccttcaaataaatgttggccgtgggagtttcacttgtcggtgtctacctctataagtcactaagcactccgagcgtaagcgaggagtgcgaccctctgccctggtgcaacgccctcggcggccgcgcgctacgccttcggctgcgc

SEQ ID NO: 1708 - protein, 763 aa, Alphatorquevirus sp.
MVWRRGRRWRRWRWRRKPRWRRWRRWRRRRRRPARRRRPRRVRRRRGGWRRSYRRWKRRRGRRRHKKKLILTQWQPAVVKKCRIVGYDPIIICGLNRTSHNSTTHAEDYTTGNQAFGGGLCTTKYTLRILFQEYMAHHNYWTASNRDLELARYLGASIIFFKHPTVDFVARVRTMPPFNDTDMTAASLHPGMLMLAKKKIIIPSLKTRPSRKHYVKIKIGAPKLFEDKWYSQRDLCDTTLVVIEATVADLQYPFGSPLTNSICCNFQILNSNYDNALSTLIGTQGDKDRDQCYNFLLNTITYYNTSQTLAQLNKFLPTTNTTQLSESNAAHSINPSNKTENTYQSTNKEIHNNTLYGGAAYYKHNGTSTTTLPPHKMKEANKAYTAAARKILGNWNFTSMNTSSCSDLQGLNYFDYYTGMFSSIFLASGRSNWEVKGSYTDITYNPLVDKGEGNMIWIDWITKGDTIYSETKSKCLLRDLPMWALCYGYADYVLKCTGISSIKNEARIVMRCPYTYPQLVKHSNDNFGFVVYSDNFGRGRMPGGDPVPSTRNRVHWYITITHQTEVLECISQTGPFAYHSDERKAVLTIKYNFRWKWGGNPVFQQILRDPCSGSSGSGPRRVPRSIQVDDPKYQTPEYIWHAWDFRRGLFSQKGIKRVSEQPTDVDLPTGRGKRPKRDTDGPQEQGQEEGSSSIRRVLQQWLHSSQEQSQESEEEAAPTTLSQELQKQLKQQQLMGKQLRELSLQLAQVQAGGHLHPLLQCHA

SEQ ID NO: 1709 - protein, 166 aa, Alphatorquevirus sp.
LGQFGLGTGRAMGKALKKATPLTMFLGRVYRHQKRKVLLSLVHTPQKTPSSMNRWSPPAHDARGIERQWYECVWRSHAACCGCGDFISHINDLAHRFGRPPGSRPPATPQPPAVRALPALPAPEPWSGAGGDAGAGGDGAASRGGGDGDAGDVADEDLLDAVDLAE

SEQ ID NO: 1710 - protein, 62 aa, Alphatorquevirus sp.
MPCINKVYMFPPLTSTPSSRDWKEEYEACRVWDRPPRNDLRKPPFYPWMPPTHHVSFKLSFK

SEQ ID NO: 1711 - DNA, 3009 bp, Betatorquevirus sp.
cgggtgccgaaggtgagtgaaaccaccgtagtcaaggggcaattcgggctagagcagtctggcggaatgggcaagaaactaaaaattatattttttttacagatgagtagacaatgtcctccaaaatacaactcaaaacaacttcaactacaatatgttaacacccttgtaaatgttcacgacctaaactgcggatgcaactctcctttggaatgtacagttttaacaatttataaccaagaaaaagatcttaaatttacaaaacaagaaaagcaaaagctacaaaaatggcttactactacagaagaaaatactacccaagaagacgacgcttttggagacggagacctagaccgacttttcgcagaagattttggagaagaaaaagatacagatacaaggtaaagaaaaaattttcttctataagactaaaacagtggcaaccgctatatataagaaacttaaaaattaaaggaatactgccactatttataactacagatgaaagaataactaatgactatactatatatactaacagcctagcacaacattatgtacctggaggaggaggtttttcaatttatagatttactttaaaagctttatatgaactctttactaaaatacaaaacaaatggacccaatctaatgaagactggccatttataagatacacaggttgtgaatttaaattctacaaatcagaaaaagcagattacattattaattaccacagatgtccaccaatgctagcaaccttagaaacctttcacagcactcaaccacacataatgacattaaacaaaaaacacaaaataataagatgcaaacaaaacaacccatacaaaagaccatacaaaaaacttaaaataaaaccaccagcattactacaaaacaattggtacttccaaaaagactttgctccagaacctttattacttttaatgtcctctagcatgtctttagatagatactttctaaattcacaatctataagtacaactatgggatttctttcactaaatgacaatatatttgacttttacaattataaaataccacctacaaccggttacatacctaaacaacaaaaatacatgtggtctttatattctccacaagcagatatagaaaaaacacaaattaaacaattaatatacttaggaaaatccaaagaatatgataaaggaaaaccaatacaacaattaatgacaacacaaacaaactttgatgaggcctggacaaactattttagtaaaacagacaactggggaaacatttttgaaccagactacttaacacaacatcatgtagtattattctcagaaaaatcaccaaacgaattaaaaaatatatataaacaagatcaatcaaagtggacaaaaggaataaatgaaataggaccatatatacaagaaacaacacacaaactactagttaactgcagatacaatccatatgcagacacaggtggtaacgttacatttatagtacccataacaaatcaagaacaaacacacctacatattccagaagatgaaaaatacaaatcagaaggctaccccttatggctatcagtatggggatttttagactatgaaagaaaaagactaggacaaaacgtagacacagactaccaaatagtacttaaaagcccacatattacaccatcacaaacattttacattccaatagatgaaggatttacagaaggtagatcaccatacagaccagacggagcacaagcaactgtatatgaccaattacattggcatccaaaagtcactatgcaaatgcaatcaataaactccataggtgcttgtggaccaggaactataaaactaccaaaacaaacatcagcagaagctcactgtacttatactttttattttaagcttggaagctgtgctcctccaatgcaaaacattgacaacccagaaaaacaacaaacttttgcctataacatgttccaaacaaattcgttacagaatccagaatatcccctacaatactacttgtacaacttcgacgaaagacgaaaaatgcttacaaaaagagctgcaaaacgaatcaaaaaaattattgactctgaaaaatctttatcaccaattacaggacaaagccaactggaaatcccactgcagcaagaaacagacgaggggcaatcgtcggaggaggaagccgaaaaagagacattactcctcctcctcaaacagcagcgactcaagcaagccaagtacaagcagcgactcctccagctaatagaacagttacaaactttagaataaaacaaactaaattcactgtaaacttatttcccccagagactcctaaaaacaggagaatgactccaaaagaatttaaagaggagttagaagaaagtgctatatggggacatagaccaagacagtttattttagatactcctttctatgactttctacccattacccctaaaatacccaaaataaattttgacttgtgttacaaagaataaaggcctgcatacttcaaatctcggtgtccatttatattattttaaacttaaataaacatccaccacactccctaatacgcaggcgcacagggggctccgccccctgtaacccccaggggggggcacagcccccccttaaaccccccgaaattacaccactaaccacaaatttgcattgccgaccacaaactgacaggaaaaccacaaaatttgcattgccgaccacaaactgacaggaaaaccacaaaatttgcattgccgaccacaaaccgtcaaatacttcctctttttaaaaactacttcccctttacatacttattattcattacattaattaataatcactgtaattccggggaggagcaactaacctatataactaactatacttccgaatggctgagtttatgccgccagacggagactggaaaacaacagtgactccaggctgctcaagggcgggtgccgaaggtgagtgaaaccaccgtagtcaaggggcaattcgggcg

SEQ ID NO: 1712 - protein, 667 aa, Betatorquevirus sp.
MAYYYRRKYYPRRRRFWRRRPRPTFRRRFWRRKRYRYKVKKKFSSIRLKQWQPLYIRNLKIKGILPLFITTDERITNDYTIYTNSLAQHYVPGGGGFSIYRFTLKALYELFTKIQNKWTQSNEDWPFIRYTGCEFKFYKSEKADYIINYHRCPPMLATLETFHSTQPHIMTLNKKHKIIRCKQNNPYKRPYKKLKIKPPALLQNNWYFQKDFAPEPLLLLMSSSMSLDRYFLNSQSISTTMGFLSLNDNIFDFYNYKIPPTTGYIPKQQKYMWSLYSPQADIEKTQIKQLIYLGKSKEYDKGKPIQQLMTTQTNFDEAWTNYFSKTDNWGNIFEPDYLTQHHVVLFSEKSPNELKNIYKQDQSKWTKGINEIGPYIQETTHKLLVNCRYNPYADTGGNVTFIVPITNQEQTHLHIPEDEKYKSEGYPLWLSVWGFLDYERKRLGQNVDTDYQIVLKSPHITPSQTFYIPIDEGFTEGRSPYRPDGAQATVYDQLHWHPKVTMQMQSINSIGACGPGTIKLPKQTSAEAHCTYTFYFKLGSCAPPMQNIDNPEKQQTFAYNMFQTNSLQNPEYPLQYYLYNFDERRKMLTKRAAKRIKKIIDSEKSLSPITGQSQLEIPLQQETDEGQSSEEEAEKETLLLLLKQQRLKQAKYKQRLLQLIEQLQTLE

SEQ ID NO: 1713 - protein, 112 aa, Betatorquevirus sp.
MGKKLKIIFFLQMSRQCPPKYNSKQLQLQYVNTLVNVHDLNCGCNSPLECTVLTIYNQEKDLKFTKQEKQKLQKWLTTTEENTTQEDDAFGDGDLDRLFAEDFGEEKDTDTR

SEQ ID NO: 1714 - DNA, 3009 bp, Alphatorquevirus sp.
ctacgccttcggctgcgcgcggcacctcgagtcaaggggcaattcgggctcgggactggccgggctatgggcaaggctcttaaagcgtacgtcccccgctatgtttctcggcagggtgtggaggaaacagaaaaggaaagtgcttctgctggctgtgcgagctacacagaagacatctcccatgagtatctggcgtccccccctcgggaatgtctcctacagggagagaaattggcttcaggccgtcgaaggatcccacagttctttttgcggctgtggtgattttattcttcatcttactaatttggctgcacgctttgctcttcaggggcccccgccggagggtggtccgcctcggccgaggccgccgctcctgagagcgctgccggcccccgaggtccgcagggagacgcgcacggagaacccgggcgcctccggtgagccatggcctggcgatggtggtggcagagacgatggcgccgccgcccgtggccccgcagacggtggagacgcctacgacgccggagacctagacgacctgttcgccgccgtcgaagaagagcaacagtaaggaggcggaggtggaggggcagacgtgggcgacgcatatacacccgacgcgcggtcagacgcagacgcagacccagaaagaaacttgtactgactcagtggagcccccagacagtcagaaactgctccatcaggggtatagtgcccatggtgatatgcggacacaccacagcaggtagaaactatgccctgcacagcgaggactttaccactcagataagaccctttggaggcagcttcagcacgaccacctggtccctaaaagtgctctgggacgaacaccagaaattccaaaacaggtggtcctacccaaacacacaactggacctagccaggtacaggggggtcaccttctggttctacagagaccagaaaacagactatatagtacaatggagcagaaatcctccctttaaactaaacaaatacagcagctccatgtaccaccctggaatgatgatgcaggcaaaaaagaaactagtggtgcctagtttccagaccagacctaaaggcaaaaagagatacagagtcacaataagaccccccaacatgttcaatgacaagtggtacactcaagaggacctctgtccggtacctcttgtgcaaattgtggtttctgcggctagcctgctacatccgttctgctcaccacaaacgaacaacccttgcatcactttccaggttttgaaagacatttactcaaactgcataggagttaactcttccaacgcagacccatataaaactctacaagacacactttactcacataacacatactttcaaaccacacaagttttagcacagttatctgcagcatttcagcccgcattaaaacctgcaccagcaaataccacttcaaccagaagaacactaggcaacgcagtagctgaactaaaagcaaatggcgacttctacacaggcaacaacccagtgtttggcatgtgttcatataaacccaccaaagaaatactaacatccgcaaacaagtggttctgggacaatctgatgcatgacaatgacttacactccacatatggcaaggcaacccttagttgcatggagtaccacacaggcatttacagctccatattcctaagtcctcaaaggtccctagaattcccagcagcataccaggatgtcacatacaacccaaactgtgacagagccataggcaaccgtgtatggttccaatatagcacaaaaatggacacagagtttaatgaaaaacagtgtaaatgtgtgttaacaaacattcccttgtgggcggcctttaatggctacccagactttatagaacaagaactcagtatcagcacagagatacacaactttggcatagtatgcttccagtgcccctacacctttcccccctgctatgacaaaactaagccaaacaaaggctacgtgttctatgacactacctttggcaacggaaaaatgccagacgggtccggccacattcccgtctactggcagcagagatggtggattagactagcctttcaggtacaagtaatgcatgactttgtactcactggcccctttagctacaaagatgacctagcaaacactacactaacagccaggtacaagttcagattcaaatggggcggtaatatcatccccgaacagattatcaagaacccgtgtaagagagaacagtccctcggttcctaccccgatagacaacgtcgcgacctacaagttgttgacccatcaaccatgggcccgatctacaccttccacacatgggactggcgacgggggctttttggtacagatgctatcaagagagtgtcacaaaaaccgggagatgctctccgctttacaaaccctttcaagagacccagatatcttcccccgacagacggagaagactaccgacaagaagaagacttcgctttacaggaaaaaagacggcgcacatccacagaagaagtccaggacccggagagccccccgcaaaacgcgccgctcctacagcagcagcagcagcagcgggagctctcactccagctcgcagagcagcagcgactcggagtccaactcagattcatcctccaagaagtcctcaaaacgcaagcgggtctccacctaaaccccctattattagggccgccacaaacaaggtctatctctttgagccccccagaggcctcctcccaatagtgggaaaagaggcctgggaggacgagtacaccacctgcaagtactgggatcgccctcccagaaccaaccacctagacatgcccacctatccctggatgccccccagcatcaaagtcagctttaaacttggatttaaaccctaaataaaaatacaaggccgtacactgttcacttgtcggtgtctacctctataagtcactaagcactccgagcgcagcgaggagtgcgaccctactgggtgggtgcaacgccctcggcggccgcgcg

SEQ ID NO: 1715 - protein, 765 aa, Alphatorquevirus sp.; identical to SEQ ID NO: 58

SEQ ID NO: 1716 - protein, 171 aa, Alphatorquevirus sp.
LAGLWARLLKRTSPAMFLGRVWRKQKRKVLLLAVRATQKTSPMSIWRPPLGNVSYRERNWLQAVEGSHSSFCGCGDFILHLTNLAARFALQGPPPEGGPPRPRPPLLRALPAPEVRRETRTENPGASGEPWPGDGGGRDDGAAARGPADGGDAYDAGDLDDLFAAVEEEQQ

SEQ ID NO: 1717 - protein, 187 aa, Alphatorquevirus sp.
MGLATGAFWYRCYQESVTKTGRCSPLYKPFQETQISSPDRRRRLPTRRRLRFTGKKTAHIHRRSPGPGEPPAKRAAPTAAAAAAGALTPARRAAATRSPTQIHPPRSPQNASGSPPKPPIIRAATNKVYLFEPPRGLLPIVGKEAWEDEYTTCKYWDRPPRTNHLDMPTYPWMPPSIKVSFKLGFKP

SEQ ID NO: 1718 - DNA, 3008 bp, Betatorquevirus sp.
cgggtgccgaaggtgagtgaaaccaccgtagtcaaggggcaattcgggctagagcagtctggcggaatgggcaagaaactaaaaattatattttttttacagatgagtagacaatgtcctccaaaatacaactcaaaacaacttcaactacaatatgttaacacccttgtaaatgttcacgacctaaactgcggatgcaactctcctttggaatgtacagttttaacaatttataaccaagaaaaagatcttaaatttacaaaacaagaaaagcaaaagctacaaaaatggcttactactacagaagaaaatactacccaagaagacgacgcttttggagacggagacctagaccgacttttcgcagaagattttggagaagaaaaagatacagatacaaggtaaagaaaaaattttcttctataagactaaaacagtggcaaccgctatatataagaaacttaaaaattaaaggaatactgccactatttataactacagatgaaagaataactaatgactatactatatatactaacagcctagcacaacattatgtacctggaggaggaggtttttcaatttatagatttactttaaaagctttatatgaactctttactaaaatacaaaacaaatggacccaatctaatgaagactggccatttataagatacacaggttgtgaatttaaattctacaaatcagaaaaagcagattacattattaattaccacagatgtccaccaatgctagcaaccttagaaacctttcacagcactcaaccacacataatgacattaaacaaaaaacacaaaataataagatgcaaacaaaacaacccatacaaaagaccatacaaaaaacttaaaataaaaccaccagcattactacaaaacaattggtacttccaaaaagactttgctccagaacctttattacttttaatgtcctctagcatgtctttagatagatactttctaaattcacaatctataagtacaactatgggatttctttcactaaatgacaatatatttgacttttacaattataaaataccacctacaaccggttacatacctaaacaacaaaaatacatgtggtctttatattctccacaagcagatatagaaaaaacacaaattaaacaattaatatacttaggaaaatccaaagaatatgataaaggaaaaccaatacaacaattaatgacaacacaaacaaactttgatgaggcctggacaaactattttagtaaaacagacaactggggaaacatttttgaaccagactacttaacacaacatcatgtagtattattctcagaaaaatcaccaaacgaattaaaaaatatatataaacaagatcaatcaaagtggacaaaaggaataaatgaaataggaccatatatacaagaaacaacacacaaactactagttaactgcagatacaatccatatgcagacacaggtggtaacgttacatttatagtacccataacaaatcaagaacaaacacacctacatattccagaagatgaaaaatacaaatcagaaggctaccccttatggctatcagtatggggatttttagactatgaaagaaaaagactaggacaaaacgtagacacagactaccaaatagtacttaaaagcccacatattacaccatcacaaacattttacattccaatagatgaaggatttacagaaggtagatcaccatacagaccagacggagcacaagcaactgtatatgaccaattacattggcatccaaaagtcactatgcaaatgcaatcaataaactccataggtgcttgtggaccaggaactataaaactaccaaaacaaacatcagcagaagctcactgtacttatactttttattttaagcttggaagctgtgctcctccaatgcaaaacattgacaacccagaaaaacaacaaacttttgcctataacatgttccaaacaaattcgttacagaatccagaatatcccctacaatactacttgtacaacttcgacgaaagacgaaaaatgcttacaaaaagagctgcaaaacgaatcaaaaaaattattgactctgaaaaatctttatcaccaattacaggacaaagccaactggaaatcccactgcagcaagaaacagacgaggggcaatcgtcggaggaggaagccgaaaaagagacattactcctcctcctcaaacagcagcgactcaagcaagccaagtacaagcagcgactcctccagctaatagaacagttacaaactttagaataaaacaaactaaattcactgtaaacttatttcccccagagactcctaaaaacaggagaatgactccaaaagaatttaaagaggagttagaagaaagtgctatatggggacatagaccaagacagtttattttagatactcctttctatgactttctacccattacccctaaaatacccaaaataaattttgacttgtgttacaaagaataaaggcctgcatacttcaaatctcggtgtccatttatattattttaaacttaaataaacatccaccacactccctaatacgcaggcgcacagggggctccgccccctgtaacccccagggggggcacagcccccccttaaaccccccgaaattacaccactaaccacaaatttgcattgccgaccacaaactgacaggaaaaccacaaaatttgcattgccgaccacaaactgacaggaaaaccacaaaatttgcattgccgaccacaaaccgtcaaatacttcctctttttaaaaactacttcccctttacatacttattattcattacattaattaataatcactgtaattccggggaggagcaactaacctatataactaactatacttccgaatggctgagtttatgccgccagacggagactggaaaacaacagtgactccaggctgctcaagggcgggtgccgaaggtgagtgaaaccaccgtagtcaaggggcaattcggggg

SEQ ID NO: 1719 - protein, 667 aa, Betatorquevirus sp.; identical to SEQ ID NO: 1712

SEQ ID NO: 1720 - protein, 112 aa, Betatorquevirus sp.; identical to SEQ ID NO: 1713

SEQ ID NO: 1721 - DNA, 3008 bp, Betatorquevirus sp.; identical to SEQ ID NO: 1718

SEQ ID NO: 1722 - protein, 667 aa, Betatorquevirus sp.; identical to SEQ ID NO: 1712

SEQ ID NO: 1723 - protein, 112 aa, Betatorquevirus sp.; identical to SEQ ID NO: 1713

SEQ ID NO: 1724 - DNA, 3008 bp, Alphatorquevirus sp.
gctacgccttcggctgcgcgcggcacctcggtcaaggggcaattcgggctcgggactggccgggctatgggcaaggctcttaaagcgtacgtcccccggtatgtttctcggcagggtgtggaggaaacagaaaaggaaagtgcttctgctggctgtgcgagctacacagaaaacatcttccatgagtatctggcgtccccccctcgggaatgtctcctacagggagagaaattggcttcaggccgttgaaggatcccacagttccttttgtggctgtggtgattttattcttcatcttactaatttggctgcacgctttgctcttcaggggcccccgccggagggtggtccgcctcggccgaggccgccgctcctgagagcgctgccggcccccgaggtccgcagggagacgcgcacggagaacccgggcgcctccggtgagccatggcctggagatggtggtggcagagacgatggcgccgccgcccgtggccccgcagacggtggagacgcctacgacgccggagacctcgacgacctgttcgccgccgtcgaagaagagcaacagtaaggaggcggaggtggaggggcagacgtgggcgacgcacatacacgcgacgcgcggtcagacgcagacgcagacccagaaagagactggtactgactcagtggagcccccagacagtcagaaactgctcaataaggggcatagtgcctatggtaatatgcggacacacaaaagggggtagaaactatgccattcacagcgaggacttcactactcagatacaacccttcgggggcagttttagcacgaccacctggtcgctgaaagtactgtgggacgagcaccaaaaatttcagaacaggtggtcctatccaaacacacagctagacctcgccagatacaggggagtcaccttctggttctacagagaccaaaagacagactatatagtacaatggagcagaaatcctccctttaagctaaacaagtacagcagtgccatgtaccacccaggcatgatgatgcaggccaaaaagaaactaattgtacctagtttccagaccagacccaaagggaaaaagagatacagagtgagaataagaccccccaacatgtttgctgacaagtggtacactcaagaggacctgtgtccggtacctcttgtgcaaattgtggtttctgcggccagcctgctacatccgttctgcccaccacaaacgaacaacccttgcatcactttccaggttttgaaagatatctatgacacttgcataggagttaactctaccgaagccacaacatattcaacacttcaaaaaacattatacactaactgcacatactttgaaacaacacaagtactagcccaactatctccacactttcaacctgccttaaaagccacaaacacaaatgcaaaccctaccgcaacaacactaggaaactatgtaccagaactaaaaaccacaggcgccttttacacaggtaacaatccagtttttggcatgtgcaaatacaaaccaactaaagacatattagaccgtgccaacaagtggttctgggacaatctaatgcatgaaaatgacttacattcctcctatggcaaagccaacctacagtgtatggagtaccacacaggcatatacagttccatatttctaagtccccaaaggtcactagaattcccagcagcataccaagacgtcacctacaaccccaactgtgacagagcagcaggtaacagagtctggttccagtacagtacaaaaatgaacacagactttgatgcaactaagtgcaaatgtgtgttagaaaacattcccctgtgggcggccttccatggctacgcagactttatagagcaagaactaagcataagctcagaaatacgcaactttggcatagtttgcttccagtgcccctacactttccccccttgctttaacaaacaaaagccaaacaaaggatacgtgttctatgacaccacctttggtaatggaaagatgccagatggatcagggcacatacccatatactggcagcagagatggtggatcagactagccttccaagtacaagtaatgcacgactttgtactctgtggcccctttagctacaaagatgacctagccaacaccacacttacagcaaggtacaaatttagattcaaatggggcggtaatatcatccccgaacagattatcaagaacccgtgtcagagagaacagtccctcgcttcctaccccgatagagaacgtcgcgacctacaagttgttgacccatcgaccatgggcccgatctacaccttccacacatgggactggcgacgggggctttttggtacagatgctatccagagagtgtcacaaaaaccgggagatgctctccgctttacaaaccctttcaagagacccagatatcttcccccgacagacggagaagactaccgacaagaagaagacttcgctttacaggaaaaaagacggcgcacatccacagaagaagtccaggacccggagagccccccgcaaaacgcgccgctcctacagcagcagcagcagcagcgggagctctcagtccagctcgcggagcagcagcgactcggaatcgaactccgatacatcctccaagaagtcctcaaaacgcaagcgggtctccacctaaaccccctattattaggcccgccacaaacaaggtctatctctttgagccccccaaaggcctactccccatagtgggaaaagaggcctgggaggacgaatactgcacctgcaagcactgggatcgccctcccagaaccaaccacctagacatccccacttatccctggatgcccacaaacttcaaagtcacctttaaacttggatttaaaccctaaataaaaatacaaggccgtacactgttcacttgtcggtgtctacctctataagtcactaagcactccgagcgtagcgaggagtgcgaccctacggggtgggtgcaacgccctcggcggccgcgc

SEQ ID NO: 1725 - protein, 765 aa, Alphatorquevirus sp.
MAWRWWWQRRWRRRPWPRRRWRRLRRRRPRRPVRRRRRRATVRRRRWRGRRGRRTYTRRAVRRRRRPRKRLVLTQWSPQTVRNCSIRGIVPMVICGHTKGGRNYAIHSEDFTTQIQPFGGSFSTTTWSLKVLWDEHQKFQNRWSYPNTQLDLARYRGVTFWFYRDQKTDYIVQWSRNPPFKLNKYSSAMYHPGMMMQAKKKLIVPSFQTRPKGKKRYRVRIRPPNMFADKWYTQEDLCPVPLVQIVVSAASLLHPFCPPQTNNPCITFQVLKDIYDTCIGVNSTEATTYSTLQKTLYTNCTYFETTQVLAQLSPHFQPALKATNTNANPTATTLGNYVPELKTTGAFYTGNNPVFGMCKYKPTKDILDRANKWFWDNLMHENDLHSSYGKANLQCMEYHTGIYSSIFLSPQRSLEFPAAYQDVTYNPNCDRAAGNRVWFQYSTKMNTDFDATKCKCVLENIPLWAAFHGYADFIEQELSISSEIRNFGIVCFQCPYTFPPCFNKQKPNKGYVFYDTTFGNGKMPDGSGHIPIYWQQRWWIRLAFQVQVMHDFVLCGPFSYKDDLANTTLTARYKFRFKWGGNIIPEQIIKNPCQREQSLASYPDRERRDLQVVDPSTMGPIYTFHTWDWRRGLFGTDAIQRVSQKPGDALRFTNPFKRPRYLPPTDGEDYRQEEDFALQEKRRRTSTEEVQDPESPPQNAPLLQQQQQQRELSVQLAEQQRLGIELRYILQEVLKTQAGLHLNPLLLGPPQTRSISLSPPKAYSP

SEQ ID NO: 1726 - protein, 185 aa, Alphatorquevirus sp.
LRAAPRSRGNSGSGLAGLWARLLKRTSPGMFLGRVWRKQKRKVLLLAVRATQKTSSMSIWRPPLGNVSYRERNWLQAVEGSHSSFCGCGDFILHLTNLAARFALQGPPPEGGPPRPRPPLLRALPAPEVRRETRTENPGASGEPWPGDGGGRDDGAAARGPADGGDAYDAGDLDDLFAAVEEEQQ

SEQ ID NO: 1727 - protein, 187 aa, Alphatorquevirus sp.
MGLATGAFWYRCYPESVTKTGRCSPLYKPFQETQISSPDRRRRLPTRRRLRFTGKKTAHIHRRSPGPGEPPAKRAAPTAAAAAAGALSPARGAAATRNRTPIHPPRSPQNASGSPPKPPIIRPATNKVYLFEPPKGLLPIVGKEAWEDEYCTCKHWDRPPRTNHLDIPTYPWMPTNFKVTFKLGFKP

SEQ ID NO: 1728 - DNA, 3008 bp, Alphatorquevirus sp.
accccccccctccacccgaaacgcttgcgcgtttcggaccttcggcgtcgggggggggtcgggactggccgggccccgggcaaggctcttaaaaaatgcactttcgcagagtctcagcgaaaaggaaactgctactgctatctctgcaccctgcatcgcagacacctgccatgagcttcagagcgcccactcttaatgctggtcaacgagagcagctatggttcgagtccatcgtccgatcccatgatagttactgcgggtgtggtgacactatcactcatcttaataatattgctaggcgctttaactacctgcctcttacctcctcgcctctggacccttcctcgggcccaccgcgaggccgcccggcgatccgcgcactcccggctctgccagcggcaccctccacccccactactagccgaccatggcgtggtggggaagatggagaaggtggccgcggcgccggtggaggagatggcgccgccgccgtagaaggagactaccagcaagaagaactcgacgagctgttcgcggccttggaagacgaccaagaaagacggtaaggagacgccggcgccgtaccagacgcacctaccgacgggggtggcgacgcagacggtacataagacgcaggaggggacgcaaaaagaaactgactctaactatgtggaacccaaacatagtgaggagatgtaacataaagggagggctgcctctactgctgtgtggagagaacagggccgcatttaactatgcctaccactcagaggactacacagagcagccattcccctatggtggaggaatgagcaccactacattctcactcacggccctgtacgaccagtacacaaagcacatgaacagatggacgttctcaaacgaccagctagacctggccagatacaggggctgcaaattcaggttctacagacaccccacctgtgactttatagtacactacaacctggttcctcctctaaagatgaaccagtttacaagtcccaacacgcacccaggactactcatgctcactaaacacaagataataataccaagcttcttaacaagaccagggggtcgcagatttgtaaagataaggctgcccccccctaagctctttgaagacaagtggtacactcagcaggacttgtgcaaacaaccgttagtgactctaaccgcaaccgcagcttccttgcggtatccgttctgctcaccacaaacgaacaaccccaactgtaccttccaggtactacgcaagaattaccatccagtaataggtacttcctcaaaaaactctgaggatgtcacaccctttgaagactggctctataatactgcctcacactatcaaacctttgccactgaggcacaagtgggcagaatacctgcctttaatccagatggcactaaaaattcccaccaaagcaattggcaaaactactggtctaaaaaagaagacacatggaaaggagacaccgtataccctcacagtaccacaaatgaaatgtacaaaataccttttgatagcaactatggctttcccacatacaaaccaataaaagagtacatgttaaaaagaagagaatggagttttaaatatgaaactgacaacccagtcagtaaaaacatctggccacaacctaccacaacaaaaccaacagtagactactatgaataccacgtaggctggttcagtaatatattcataggccccaacagatacaatttacaattcaaagcagcatacgtagacaccacatacaatccactaaatgacaaaggaaaaggcaacaaaatatggttccagtaccacaccaaagtaaacacagacctcagagacagaggcatctactgcctactagaagatatgcccctgtgggccatgacctttggatacagtgactatgtaagcacacaactaggcccaaacgtggaccacgaaactcagggcctagtgtgcataatatgcccatacactgagccccccatgtatgacaagaccaagccaaacagtggctacgtagcatatgacacaaactttggaaacggaaagatgccctcaggaaggggccaggttccagtatactggcagtgcagatggaggcccatgctgtggttccagcaacaagtacttaatgacatctcaaagaccggaccttactcatacagagacgaactaaaaaactgttgcctgactgtatactacaacttcaattttaactgggggggcgacatgtattacccgcaggttattaaaaacccctgcgcagacagcggactcgttcccggtaccagtagattcactcgagaagtacaagtcgttagcccgttgtccatggggcctcaatacatcctccacctcttcgaccaaagacgcgggttctttagttcgaacgctcttaaaagaatgcaacaacaacaagaatttgatgagtcttttacagtcaaacctaagcgacccaaactttctacagccgccctcgtcgagcagcaagaaggagactcgacttcaggggaaggaaaatcgccgtcctcacaagaagaagcccaggaagaagtcctccaggcgccggagatccagctccacctccagcgaaacatcagagaacagctgctcatcaagcagcagctacaactcctgctcctccaaatattcaaaacacaagcaaatattcacctaaacccacgttttataagcccctaataacctacaacatgtttggggaaccgaatcctcaccctccaactagccaagactggcagatggagtacgaggcctgcaaaatttgggacaggcccgctagacaaaacctaaaagacacccctttctatccctggatgcctaaggctcccccccagtactctgtaacatttaagctcgggttcaaataaacaaggccgtgcactgttcacttgtcggtgtctacctcttaaggtcactaagcactccgagcgtctcggagtccggcgctacgcgctgcgcgctgcgccggacacctcgg

SEQ ID NO: 1729 - protein, 760 aa, Alphatorquevirus sp.
MAWWGRWRRWPRRRWRRWRRRRRRRLPARRTRRAVRGLGRRPRKTVRRRRRRTRRTYRRGWRRRRYIRRRRGRKKKLTLTMWNPNIVRRCNIKGGLPLLLCGENRAAFNYAYHSEDYTEQPFPYGGGMSTTTFSLTALYDQYTKHMNRWTFSNDQLDLARYRGCKFRFYRHPTCDFIVHYNLVPPLKMNQFTSPNTHPGLLMLTKHKIIIPSFLTRPGGRRFVKIRLPPPKLFEDKWYTQQDLCKQPLVTLTATAASLRYPFCSPQTNNPNCTFQVLRKNYHPVIGTSSKNSEDVTPFEDWLYNTASHYQTFATEAQVGRIPAFNPDGTKNSHQSNWQNYWSKKEDTWKGDTVYPHSTTNEMYKIPFDSNYGFPTYKPIKEYMLKRREWSFKYETDNPVSKNIWPQPTTTKPTVDYYEYHVGWFSNIFIGPNRYNLQFKAAYVDTTYNPLNDKGKGNKIWFQYHTKVNTDLRDRGIYCLLEDMPLWAMTFGYSDYVSTQLGPNVDHETQGLVCIICPYTEPPMYDKTKPNSGYVAYDTNFGNGKMPSGRGQVPVYWQCRWRPMLWFQQQVLNDISKTGPYSYRDELKNCCLTVYYNFNFNWGGDMYYPQVIKNPCADSGLVPGTSRFTREVQVVSPLSMGPQYILHLFDQRRGFFSSNALKRMQQQQEFDESFTVKPKRPKLSTAALVEQQEGDSTSGEGKSPSSQEEAQEEVLQAPEIQLHLQRNIREQLLIKQQLQLLLLQIFKTQANIHLNPRFISP

SEQ ID NO: 1730 - protein, 156 aa, Alphatorquevirus sp.
MHFRRVSAKRKLLLLSLHPASQTPAMSFRAPTLNAGQREQLWFESIVRSHDSYCGCGDTITHLNNIARRFNYLPLTSSPLDPSSGPPRGRPAIRALPALPAAPSTPTTSRPWRGGEDGEGGRGAGGGDGAAAVEGDYQQEELDELFAALEDDQERR

SEQ ID NO: 1731 - protein, 58 aa, Alphatorquevirus sp.
MFGEPNPHPPTSQDWQMEYEACKIWDRPARQNLKDTPFYPWMPKAPPQYSVTFKLGFK

SEQ ID NO: 1732 - DNA, 3007 bp, Betatorquevirus sp.
cgggtgctgaaggtgagtgaaaccaccgaaatcaaggggcaagctgaaggtgagtgaaaccaccgaaatcaaggggcaattcgggctaggttagtctagcggaacgggcaagaaacttaatattatatatttttttacagaaatgagcaaatactacaaaccattaacaatatctaagaagcatagagaactacaatggataaacttaatggttgcagctcacgaccaatactgccaatgcaatgaatgcctaaaacatataattaccgcaattattgaaagagaaccaactttaaaatttgataaagaagactccgaaaaaattaaaaaatgccttactactggagaccatggagacgaccatggagacgacgatggagacgttcttggagacggcgatctagaaaagcttttcgaacaagacgtctttggagaaaccgcagataccgggtaaggagaatacgacataaacttaaaaatattactataaaacaatggcaaccaacaactatcaaaagactaactatcagaggtatctatcctctattttctggaactactgatagaataggctttgacaatacagcctacatagacagaatagcacctaaaaattaccctggaggaggactgtactctataactgtatttactttacaaggactatacgaactgcatacaaaatttagaaattggtggactgtatcaaactgtaacttaccattaatacgctattatggctgcactatgaaattctttaactcttcatctgtagactatgttactgtacctgtaaactgtggagaactaaaagccacagaaaaaatgtttcaatcctgtcaacctgctgtattaatgttaaacaaaagaaaaaaagttttattatgtaaaaactataaacacaggcgtagaccgtacaaaaaagcatttataaaacccccagcattactaactaacaaatggtattttcaaaaagaacttgcaaactttcctttagtaatgcttctctctgctgcaatgagtttagacagatactttttaccagcaacctctgtttcagagtctataggctttgaagctctaaacacagactttttccaactacataactggaaaccatcttcatttgtaatatacaaacctcaacctgaatggtatatactagcagtaccaaatccaacacaaacatggcaaaaaacaaagccaacacaatgggtagtactaggaaacacaaaagaccatattttaggaaatcccataggcaatgttactagaggcacaacctgggaaaacttagtagaaaaacacataaaatccaaactaaacctaggaaatccatttcatgaaacatactttagtcaagaaaacccagatatgatgtgcctacttaatgtaccattacaatcaactttagatgcagaactaaaaagactagaccctgacaaaacaggagagcagcaaactccaggacacctaatatctataacaaaaccatttacaattaactgtagatacaatccacaaccagacacaggacaaaatgtagcctttatggctaacataacaacagacacaacaacatggcacgaaccatcagatactcacatacttacaaaaggacttccattatggatgctattatggggatggcacgactacttagcaaaaacaaaagtacctatacacctagatacagactgggcaatgtgcatagtatcagattttatttcacctgaatctatgacttattatgtccccttagattggttttttttaaatggcagaagtccctacgctgaacaacatgaaataaaaccatatgaccaacaaaattggcatcctaaatggaactttcaaacacaatccacctctcacatattacaaacaggtccaggaacagcaaaattacctccactcataagtgctgaaggtcacgtccaatacaaatttcattttaaggttggaggctgccccccaaaaatggatgaagtttgcgaaccatctaaacaaccagactaccctgaacccggtaacctcatatcgtcaattttattgcagaatccagaatatcccataccatactacattaactcctttgaccaaagaagggacttgctcacagaaagagctgctaaacgcatcaaagaagacaaagaacttacagaaactgtttttaaacctacaggaacaactctcctcagtctcaaagcaacatccccccagacaacatcgacggaggactcatcgacggaggaagaaagcgaaaaggagacacagcagctcatccaccgacaccacagaaagcagcgaaaactccagcacggaatcagaaagctcctgaaactactacaaaatacacaataaaaaactgtaatataaaagtaaaactatttccagatgaaaaacctaaacctaggcgtatgaatcctaaggaattccaaacagagttagaattagctaaatggatgcacagaccaccctgtacatatattggtgataaacctttttatccatggcttgtacctgaacctgttgtaaactttgacctgaaatttaaacaataaaggccagcattatttcacttagtaaagcatgtttatttaagtttaactttaataaacggacaccgcctccctaatacgcaggcgcacagggggctccgccccctgtaacccccaggggggacacccccctttccaccccccgaaaaaccacaaaattaacatagccgaccaccaacgaacaggaaaccacaaaatttgcattgccgaccacaaactgacaggaaaaccgcaaaatttacattgccgaccacaaacgaacactcacttccctattttacaaaacttcctcttttgtatatacatattcataagattaattaatagtcaccatcatttcctaggaggagccaattacctatataactaactgcacttccgaatggctgagtttatgccgctagacgaagacaagatcagtttactgactcttggctaaccttggg

SEQ ID NO: 1733 - protein, 677 aa, Betatorquevirus sp.; identical to SEQ ID NO: 1633

SEQ ID NO: 1734 - protein, 103 aa, Betatorquevirus sp.; identical to SEQ ID NO: 1634

SEQ ID NO: 1735 - DNA, 3007 bp, Alphatorquevirus sp.
acgccttcggctgcgcgcggcacctcggcagtcaaggggcaattcgggctcgggactggccgggctatgggcaaggctcttagggttttcgctcttaaaacatgtttatcggcagggcttggagaaagaaaagcaaagtgctactgcgcccggtgccaaagactaagagccaacagcctgctatgagccgctggtgtccccctactcaacatgcctcaaatcgcgaagaggactggtttcgatctttccacaccagtcaccgagctttttgtggctgcggtgatcctattctgcatatttctcatctggctgctcagcttggctaccaacccggtccgtcgccgcgtggtagtcctggggagaggatctcgccaccactaagacagctccgcgcgctcccggcagcccccaccactcctagaccaccaccatgtggtggagatggtggaagaggcgccggtggagaccgcgccgacgatggagaaggctccgccgcaggagagcagccccaagaagacgtagaagacctgctgcgcgtactagaagacgcagagtaaggagatggaggaggaggaggagagggtgggctcgcagaatatacctgcgaaagaggcgcagactaaagagacgcaaaaagattcctataactcagtggaatcctagcactgtaaagaaatgcgtggtccgcggatacatgcccctcctcatctgtggaacgggcaccaccgggaccacctacagaaactatgggtctcaccaagcagactatgtaaaatttgaccctttcggaggcgggataagcaccttacaatttagcctacaatttctatacgaggagtatcagaaacacagaaatacctggagcaggtcaaatgtagacttagaactcataagatacaaaggcgcctctataaaactgtacagacaccctgaggcagacttctttttcacatacaacagaaaacctcctttcactgacagccaactaacaggaccatacctacacccgggtaacatgatgctcaggaaaaggaaaataatagtgcctagctataagacaaaacccaaaggacgacccactaaaactgtcagaataaaaccccccacactattcacagacaagtggtacttccagaaagacttatgcaaagcaccgctgctaaccgtcggttgcagtatagggaacttgcggtttccgttctgccgaccacaaactgaaaactgttgcatatacttccaggtactaactgaaagatataacacaatgctcagcatacaatttgaacactgtagaaaaaactatgacagcctaatgtcctttatgaaaactcattggacaaatcctaaaggcacatacagcaactatagagacagaggcagagtgggcacagtgtttaatacatttagaacagaagaacacattaaagaccccccagtaacggtatgtacaaccgataaaaacacaacaccatcatcttgtaataaatgtaatgtgcctagtaaatactcctatagcagagtaaatagcctatggggagactacatatacacaaaccagatagtagatgacttttcctcaaatgctcataactactttaaagaaagatcaggatcagtagtaacagcctcaaagtatttaaaccataaaacaggactattttcctccatatttctaagtagacaaagactatcaccagactttcccgggttttactatgaggttatatacaaccccatgaatgacaaaggagtaggaaacaaagtatggatagactggtgtaccaaagaagacagcttctgggtagaaagtagccaattaaaaacagaaatagtagacttgccgctgtggatgtgttttaatggctacatagactactgcaaaaaaaaacaccacgaccaaggcctagacaaagaagtcagagtcactatcatatgtccctacacacagcccccactgaccaacagcacaaacacagacatgggtttcgtaccctttgactacaactttggagacggacgcatgccagacggacagccctacatacctatagaatacagattcaagtggtacccctgcgcctttcaccaacaaaactttatgaatgacatgacccagtgtgggccttttgcctatgacggaggcataaagtcagcggtactaaccgccaaatacaaatttacctttctctttggtggtaacccaataccacagcagacaattaaagacccctgcatgcaaccggactacgaaattcccggaggcggtggccaacctaaaagaatacaagtggagaacccgaaactgctacacgaaggctactacttccgtgcctgggacctccgacgcggcttctttggtgcgagagctctccaacgaatgcaacaacaacaaattacttctaaatttattacaggcccaccaaagcgatcaagattggaggtacccgccattgcaggagaaagctcaccttcaccgggaaaaaggtggaaaccgtggccagaatccagcgagacggagacagaccagacagaggcacaaagcgaaagcgagacgaagacgccggagttcaagcagcagctcagagagcagctcaaggaacagaagcagatcaaaaagcagctcctcagtatcgtcaagcaattagtaaagacccaacatcacctacaaggcccagttatccactagtaggcccaaaacaatatctgttccaggaacgcttgccacaagtgtggtctaagcaagactggcaaacagaatatgaagcagcgagtttctgggacaggccggctcgcacaaacctaaatgacacacccttctacccctggatgcctagacaagccccccagtacaaagtaacctttaaacttggattcaaaccctaaataaaaagcaaggccgtgggagtctcacttgtcggtgtctgcttattaaagtcaccaagcactccgagcgaagcgaggagtgcgaccctaagggtgggtgcaacgccctcggcggccgcgcgct

SEQ ID NO: 1736 - protein, 751 aa, Alphatorquevirus sp.
MWWRWWKRRRWRPRRRWRRLRRRRAAPRRRRRPAARTRRRRVRRWRRRRRGWARRIYLRKRRRLKRRKKIPITQWNPSTVKKCVVRGYMPLLICGTGTTGTTYRNYGSHQADYVKFDPFGGGISTLQFSLQFLYEEYQKHRNTWSRSNVDLELIRYKGASIKLYRHPEADFFFTYNRKPPFTDSQLTGPYLHPGNMMLRKRKIIVPSYKTKPKGRPTKTVRIKPPTLFTDKWYFQKDLCKAPLLTVGCSIGNLRFPFCRPQTENCCIYFQVLTERYNTMLSIQFEHCRKNYDSLMSFMKTHWTNPKGTYSNYRDRGRVGTVFNTFRTEEHIKDPPVTVCTTDKNTTPSSCNKCNVPSKYSYSRVNSLWGDYIYTNQIVDDFSSNAHNYFKERSGSVVTASKYLNHKTGLFSSIFLSRQRLSPDFPGFYYEVIYNPMNDKGVGNKVWIDWCTKEDSFWVESSQLKTEIVDLPLWMCFNGYIDYCKKKHHDQGLDKEVRVTIICPYTQPPLTNSTNTDMGFVPFDYNFGDGRMPDGQPYIPIEYRFKWYPCAFHQQNFMNDMTQCGPFAYDGGIKSAVLTAKYKFTFLFGGNPIPQQTIKDPCMQPDYEIPGGGGQPKRIQVENPKLLHEGYYFRAWDLRRGFFGARALQRMQQQQITSKFITGPPKRSRLEVPAIAGESSPSPGKRWKPWPESSETETDQTEAQSESETKTPEFKQQLREQLKEQKQIKKQLLSIVKQLVKTQHHLQGPVIH

SEQ ID NO: 1737 - protein, 151 aa, Alphatorquevirus sp.
MFIGRAWRKKSKVLLRPVPKTKSQQPAMSRWCPPTQHASNREEDWFRSFHTSHRAFCGCGDPILHISHLAAQLGYQPGPSPRGSPGERISPPLRQLRALPAAPTTPRPPPCGGDGGRGAGGDRADDGEGSAAGEQPQEDVEDLLRVLEDAE

SEQ ID NO: 1738 - protein, 59 aa, Alphatorquevirus sp.
LFQERLPQVWSKQDWQTEYEAASFWDRPARTNLNDTPFYPWMPRQAPQYKVTFKLGFKP

SEQ ID NO: 1739 - DNA, 3007 bp, Alphatorquevirus sp.
taaggtcactaagcactccgagcgtcagcgagcaaggggcaattcgggctcgggactggccgggctatgggcaaggctcttaaaaaggcatgtttctcggtaaactctacagaaagaaaaggaaactgctactgccagctgtgcatccttcaccggcgccatcttccatgagctcgacctggcgggtcccgcggggcgatgtcgcctcccgtgagcgtcactggtacctttcagtacgagacagccacgacgctttttgtggctgtcgtgatcctatttttcatctttctcgtctggctgcacgttttaacaatcagggacctccgccgccccccgaggacgacggcccgacgtcggctaccccagtgagacgcctcctcccgctaccctcctacccgggagagggtccccccgatagatggcctggtgggcatggaggcgccgctggtggcggccgcggagacggtggcgatgggggcgtacgcgccgcagacgaagagtaccggcccgaagacctcgacgagcttttcggcgctatcgaacaagaacagtaaggaggcgccggagggggaggcggaggggctacaggcgacggtacagactaagacgcttgcgcagacgcagatacaaacgcaaaaagatagtactgactcagtggaacccccagaccgtcaggagatgcaccataaagggtctcatgccagtactctgggcgggcatgggccaggggggccacaactatgcggtgcgctccgatgactacgtggccaaggggggtttcgggggctccttcgccacagagaccttctccctgaaggtgctctatgaccaataccagaggggctttaacaggtggacttatagcaacgaggacttagacctagccctgtactatggctgcaagtgggtcttctacagaagcccagacacagactttatagtatacttcactaacaatccccccatgaagaccaaccagttcaccgctcccctgaccactccaggcatgctcatgaggagcaaatataagatactgatacccagctttaaaaccaggcccaaggggcgcaaaacagtgactgtgagaataaaaccccccaaactgttcctgcacaagtggtacacccagcaggacctgtgcccagttccgttagtccaactgaacgtgaccgcagcggatatgcaacatccgttcggctcaccactaactgaaaacccttgcatcactttccaagttttagggaacttatacaataactgcctcaacattgacctcccccaatttacacaagatggagaacttgaaagttctccaacttatactagagaaaataaagaggacttaaaaaccctttataaagaattattctgtaagaaacacagctgtcactactggcaaaccttcatcactaactccatgatgaagtcccacatagacgctacgaaagctcagacagctaccactgactatcccaactcgtcacaaaacgtaatgtacaacaaagcagactttcctacaaagccactcaaagaaaagttctctgagtggaaaaacaaatttactgacggtagagacagtaactttctctttgccacctatcaccctgaccaagtaacaaacataattaaagaaatgagagacaataactttgccttagaaacaggccccaatgacaagtacgggtccttcaccagccagtacaccagaaacactcacctactagactactacctgggcttctacagccccatcttcctgtccccaggaaggtccaatatagaattttttacagccttcagagacatagtatacaaccctctcctagacaaagcccagggcaacatgatctggttccagtatcacactaaatttgacaataaattcaaaaaaccagaatgccactgggagatagcagatatgcccctgtgggccctctgcaacgggtacgtagagtacctcgagagtcagattaaatatggagatatactcgtagagggcaaagtcctcatgaggtgtccttacaccaagccgcccctagtagacaagaacgaccccacagccgggttcgttgtctacaacactaactttggcatgggcaagtggatagacggcggcggctacatccccctacacgagagaagcaagtggtatgtcatgctcagataccagacggacgtcctccatgacatagtaacctgtggaccgtggcagtacagagacgataacaaaaacgctcagctagtggccaagtactactttcggttcaagtggggaggaaacaccatccattcccaggttatcagaaacccgtgcccagacacccaagtttccggagcccgtcgacagcctagagaagtacaagtcgttgacccgcagctcatcacaccgccgtgggtcctccacaccttcgaccagagacgcggactctttactgaaggagctatcagacgtctactcaaacaaccaattcctggcgagtatgatcctcaaccccccccgagtcccactcctctttctaccctcagcattccagaaagaagacggcggtgccgaaagcgactccggttcaccggccaaaaaaccccggtactcgttcgaagagagccagacagagaccctctcctcggaggaggacccggcggagacgacgagggagctcctcctccgaaagctccgagagcagcgagcactccagttccagctgcagcacttcgcagtccaactcgccaagacccaggcgaacctgcacgtaaaccccctgtcatactgcccgccataaacaaggtgtttctgtttccccccgagggtcccaaacccatctcaggcagagaggcctgggcagacgagtacgccaccgcggcggcctgggacaggcccgtccgcacctaccactcagacacccccatttatccctggatgccccaacaattccgtgtaagcttcaaactcggcttccaataaaaatatactaggccgtaaactgttcacttgtcggtgtctacctct

SEQ ID NO: 1740 - protein, 847 aa, Alphatorquevirus sp.
MAWWAWRRRWWRPRRRWRWGRTRRRRRVPARRPRRAFRRYRTRTVRRRRRGRRRGYRRRYRLRRLRRRRYKRKKIVLTQWNPQTVRRCTIKGLMPVLWAGMGQGGHNYAVRSDDYVAKGGFGGSFATETFSLKVLYDQYQRGFNRWTYSNEDLDLALYYGCKWVFYRSPDTDFIVYFTNNPPMKTNQFTAPLTTPGMLMRSKYKILIPSFKTRPKGRKTVTVRIKPPKLFLHKWYTQQDLCPVPLVQLNVTAADMQHPFGSPLTENPCITFQVLGNLYNNCLNIDLPQFTQDGELESSPTYTRENKEDLKTLYKELFCKKHSCHYWQTFITNSMMKSHIDATKAQTATTDYPNSSQNVMYNKADFPTKPLKEKFSEWKNKFTDGRDSNFLFATYHPDQVTNIIKEMRDNNFALETGPNDKYGSFTSQYTRNTHLLDYYLGFYSPIFLSPGRSNIEFFTAFRDIVYNPLLDKAQGNMIWFQYHTKFDNKFKKPECHWEIADMPLWALCNGYVEYLESQIKYGDILVEGKVLMRCPYTKPPLVDKNDPTAGFVVYNTNFGMGKWIDGGGYIPLHERSKWYVMLRYQTDVLHDIVTCGPWQYRDDNKNAQLVAKYYFRFKWGGNTIHSQVIRNPCPDTQVSGARRQPREVQVVDPQLITPPWVLHTFDQRRGLFTEGAIRRLLKQPIPGEYDPQPPPSPTPLSTLSIPERRRRCRKRLRFTGQKTPVLVRREPDRDPLLGGGPGGDDEGAPPPKAPRAASTPVPAAALRSPTRQDPGEPARKPPVILPAINKVFLFPPEGPKPISGREAWADEYATAAAWDRPVRTYHSDTPIYPWMPQQFRVSFKLGFQ

SEQ ID NO: 1741 - protein, 154 aa, Alphatorquevirus sp.
MFLGKLYRKKRKLLLPAVHPSPAPSSMSSTWRVPRGDVASRERHWYLSVRDSHDAFCGCRDPIFHLSRLAARFNNQGPPPPPEDDGPTSATPVRRLLPLPSYPGEGPPDRWPGGHGGAAGGGRGDGGDGGVRAADEEYRPEDLDELFGAIEQEQ

SEQ ID NO: 1742 - DNA, 3006 bp, Alphatorquevirus sp.
cgggtgccgaaggtgagtttacacaccgaagtcaaggggcaattcgggctcgggactggccgggctatgggcaaggctctgaaaaagctatgttttttggaaggtgctggagaaagaaaaggcaactgcttctgctacctgtgcagtctccacaggcgacaccttccatgagccgctggcaaccacccgtccacaatgccctcggcattgagagacagtggtatgactccgtttggcgcagtcacgctgcttgctgtggttgtggcgatgttattggtcaccttaatgatctggcggctcgttttggacgtcctgggaaccccagacccccgggcgctcctcagccgccgccagtgaggcccctgccggccctgccggctccggagcccccggctgaccgagcgccatggcctatggctggtggaggagacgacgatggcgccgccggaggtggccgcgacggagaacatggaggacccgccgccgcagaagaagacgacttagacgcccttttcgccgccgccgaagagtaaggagacggaggggtcggtggaggagggcttataagagatggcgtagacgcagggggcgacgcaaacacaaaaagagacttgtactgactcagtggcaaccctctgttgttaaaaaatgttatatagtgggctacgaccccataatagtatgtggacgaaacagaactagcactaactacagcagccacatagatgactttacatttaacaacgaggcctacggaggaggcctctgcacccacagatacactttaaggactctatttcaagactttttactacaccacaactattggacctcctctaacaaagacctagacctgggaaggtacctaggatgcagtataatatttttcagacaccccactgtagactttatagccagaataagaaacatgcctccctttgaagacactgacgccacagcaatgacactacacccaggcatgctagtactctctaaaaagagaataatgattcccagcttaaagtctaggcctagcagaaaacactatgtaaaagtaaaagtagggcccccaaaactgtttgaagacaagtggtacccccagagcgagttatgtgatgtaacattactaactatacaggcaaccgcagcggacttgcaatatccgttcggctcaccactaacgaactcagtatgctgcaacttccaggttttagacaacaactatgacaacatactaacggtcttagagaacaccacagaggccaataacagaaataacacctatcaaaaaatacttaactttattacagtatataacaccacagaaacagcagcacaactaaacaaatttttacctaccataaatacaaacccactaacttcacaaaatgccactgaaaataccatacaagttaacaccacacaaggcacacaatcaaactcatttacaaattggcattccaaaaacccacatcaaaataccctgtatgcaggcagtacatatataactcaaccacagaaccaaaagaaaacaccaccagaacaaatgaaagaagcaaaccaagcatatataaatgcagccaaaaaaaacctaccaaactggggaataagcacaaattacacaaaaggcacagaaccatacccatttgaatactacacaggactatacagcagtatatttttaagtgcaggaagatctaactgggaactaacaggctgctacacagacattagttacaaccctctaacagacaaaggaataggtaacatgatatggctagatgtaataaccaaatcagatagtaaatacacagaaaacaaatctaaatgtttaatggccaactacccactgtgggctatgtgctatggatacctagactggtgtgataaagtactagaccacataaacgtagactcagagtacagagtatgcataagatgcccatacacacaccctatgatgaccaaggcctcagacccactgtgggggtttgtaccctacagctacaactttggaaagggcaaaatgcccggaggaaacccagtaccatctctctggatgagagtacactggtaccccacagttcttcaccaaagagaggtacttgaatgcatatcacagaccggaccgtttgcatacaaaagtgacgaaaataaagctgtactgactataaaatattcattcagatggaaatggggaggaaatcctatatttcaacaggtggtcagagacccctgcaaacatccacaaggacccagtccccatagacagcctcgtgagctacaaatcgctgacccgaagtaccagaccccacaactcatctggcacgcgtgggacttcagacgtggactatttagcaagacaggtattaaaagaatgtcagaacaaccagcttatgatgaattttctgcagacaggagcaagagacccaagaaagacacagacgtccagcacagccaagagcaaaaagaagactcgcatacccaccagcgagtcctccagccctggctccactcctcccaagaggagcaagcggagtcggaaagcgagcaagaagaagcgacgatacaagagcagctacaaaaacaactcctccagcagcgactcatgggaaacaaactccgagtcgtctgccagcagatcgccagtctccaagccgggcacggccttcatcccctactccaatgccatgtataaataaagtatacatgtttcctgatatattccctaaacctgctccttccagcaacgactggaaagaggagtatatggcctgcagatactgggacaggcctccccgctctgacctaaccaaaccccctttttacccctggatgcctcctacatacaatgtaaaatttaaccttaacttcaaataaatgttggccgtgggagtttcacttgtcggtgtctacctcttaaggtcactaagcactccatggctgagttttccacgcccgtccgcagcgagaacaccacggaggggagtccgagcgtcccgaggg

SEQ ID NO: 1743 - protein, 763 aa, Alphatorquevirus sp.
MAYGWWRRRRWRRRRWPRRRTWRTRRRRRRRLRRPFRRRRRVRRRRGRWRRAYKRWRRRRGRRKHKKRLVLTQWQPSVVKKCYIVGYDPIIVCGRNRTSTNYSSHIDDFTFNNEAYGGGLCTHRYTLRTLFQDFLLHHNYWTSSNKDLDLGRYLGCSIIFFRHPTVDFIARIRNMPPFEDTDATAMTLHPGMLVLSKKRIMIPSLKSRPSRKHYVKVKVGPPKLFEDKWYPQSELCDVTLLTIQATAADLQYPFGSPLTNSVCCNFQVLDNNYDNILTVLENTTEANNRNNTYQKILNFITVYNTTETAAQLNKFLPTINTNPLTSQNATENTIQVNTTQGTQSNSFTNWHSKNPHQNTLYAGSTYITQPQNQKKTPPEQMKEANQAYINAAKKNLPNWGISTNYTKGTEPYPFEYYTGLYSSIFLSAGRSNWELTGCYTDISYNPLTDKGIGNMIWLDVITKSDSKYTENKSKCLMANYPLWAMCYGYLDWCDKVLDHINVDSEYRVCIRCPYTHPMMTKASDPLWGFVPYSYNFGKGKMPGGNPVPSLWMRVHWYPTVLHQREVLECISQTGPFAYKSDENKAVLTIKYSFRWKWGGNPIFQQVVRDPCKHPQGPSPHRQPRELQIADPKYQTPQLIWHAWDFRRGLFSKTGIKRMSEQPAYDEFSADRSKRPKKDTDVQHSQEQKEDSHTHQRVLQPWLHSSQEEQAESESEQEEATIQEQLQKQLLQQRLMGNKLRVVCQQIASLQAGHGLHPLLQCHV

SEQ ID NO: 1744 - protein, 147 aa, Alphatorquevirus sp.
MFFGRCWRKKRQLLLLPVQSPQATPSMSRWQPPVHNALGIERQWYDSVWRSHAACCGCGDVIGHLNDLAARFGRPGNPRPPGAPQPPPVRPLPALPAPEPPADRAPWPMAGGGDDDGAAGGGRDGEHGGPAAAEEDDLDALFAAAEE

SEQ ID NO: 1745 - protein, 124 aa, Alphatorquevirus sp.
LAPLLPRGASGVGKRARRSDDTRAATKTTPPAATHGKQTPSRLPADRQSPSRARPSSPTPMPCINKVYMFPDIFPKPAPSSNDWKEEYMACRYWDRPPRSDLTKPPFYPWMPPTYNVKFNLNFK

SEQ ID NO: 1746 - DNA, 3006 bp, Alphatorquevirus sp.
ttaaggtcactaagcactccgagcgtcagcgagaaggggcaattcgggctcgggactggccgggctatgggcaaggctcttaaaaaggcatgtttctcggtaaactctacagaaagaaaaggaaactgctactgccaactgtgcatccttcaccggcgccatcttccatgagctcgacctggcgggtcccgcggggcgatgtcgcctcccgtgagcgtcactggtacctttcagtacgagacagccacgacgctttttgtggctgtcgtgatcctatttttcatctttctcgtctggctgcacgttttaacaatcagggacctccgccgccccccccaggacgacggcccgacgtcggctaccccagtgagacgcctcctcccgctaccctcctacccgggagagggtccccccgatagatggcctggtgggcatggaggcgccgctggtggcggccgcggagacggtggcgatgggggcgtacgcgccgcagacgaagagtaccggcccgaagacctcgacgagcttttcggcgctatcgaacaagaacagtaaggaggcgccggagggggaggcggaggggctacaggcgacggtacagactaagacgcttgcgcagacgcagatacaaacgcaaaaagatagtactgactcagtggaacccccagaccgtcaggagatgcaccataaagggtctcatgccagtactctgggcgggcatgggccaggggggccacaactatgcggtgcgctccgatgactacgtggccaaggggggtttcgggggctccttcgccacagagaccttctccctgaaggtgctctatgaccaataccagaggggctttaacaggtggacttatagcaacgaggacttagacctagccctgtactatggctgcaagtgggtcttctacagaagcccagacacagactttatagtatacttcactaacaatccccccatgaagaccaaccagttcaccgctcccctgaccactccaggcatgctcatgaggagcaaatataagatactgatacccagctttaaaaccaggcccaaggggcgcaaaacagtgactgtgagaataaaaccccccaaactgttcctgcacaagtggtacacccagcaggacctgtgcccagttccgttagtccaactgaacgtgaccgcagcggatatgcaacatccgttcggctcaccactaactgaaaacccttgcatcactttccaagttttagggaacttgtacaataactgcctcaacattgacctcccccaatttacacaagatggagaccttgaaacttctccaagttatactagagaaaatagagaggacttaaaaaccctttataaagaattattctgtaacaaacacagctgtcactactggcaaaccttcatcactaactccatgatgaagtcccacatagacgctaccaaagctcagacagctaccactaactatcccaactcgtcacaagacgtagtctacaacaaagcagactttcctacaaagccagtcaaagaaaagttctctgactggaaaaagaaatttactgacggtagagacagtaactttctctttgccacctatcaccctgaccaagtaagagacataattaaagaaatgagagacaataactttgccttagaaacaggccccaatgacaagtacgggtccttcaccagccagtacaccagaaacactcacctactagactactacctgggcttctacagccccatcttcctgtccccaggaaggtccaatatagaattttttacagccttcagagacatagtatacaaccctctcctagacaaagcccagggcaacatgatctggttccagtatcacactaaatttgacaataaattcaaaaaaccagaatgccactgggagatagcagatatgcccctgtgggccctctgcaacgggtacgtagagtacctcgagagtcagattaaatatggagatatactcgtagagggcaaagtcctcatgaggtgtccttacaccaagccgcccctagtagacaagaacgaccccacagccgggttcgttgtctacaacactaactttggcatgggcaagtggatagacggcggcggctacatccccctacacgagagaagcaagtggtatgtcatgctcagataccagacggacgtcctccatgacatagtaacctgtggaccgtggcagtacagagacgataacaaaaacgctcagctagtggccaagtactactttcggttcaagtggggaggaaacaccatccattcccaggttatcagaaacccgtgcccagacacccaagtttccggagcccgtcgacagcctagacaagtacaagtcgttgacccgcagctcatcacaccgccgtgggtcctccacaccttcgaccagagacgcggactctttactgaaggagctatcagacgtctgctcaaacaaccaattcctggcgagtatgatcctcaacccccccgagtcccactcctctttctaccctcagcattccagaaagaagacggcggtgccgaaagcgactccggttcaccggccaaaaaaccccggtactcgttcgaagagagccagacggagaccctctcctcggaggaggacccggcggagacgacgagggagctcctcctccgaaagctccgagagcagcgagcactccagttccagctgcagcacttcgcagtccaactcgccaagacccaggcgaacctgcacgtaaaccccctgtcatactgcccgccataaacaaggtgtttctgtttccccccgagggtcccaaacccatctcaggcagagaggcctgggcagacgagtacgccaccgcggcggcctgggacaggcccgtacgcacctaccactcagacacccccatttatccctggatgccccaacaattccgtgtaagcttcaaactcggcttccaataaaaatatactaggccgtaaactgttcacttgtcggtgtctacctc

SEQ ID NO: 1747 - protein, 786 aa, Alphatorquevirus sp.
MAWWAWRRRWWRPRRRWRWGRTRRRRRVPARRPRRAFRRYRTRTVRRRRRGRRRGYRRRYRLRRLRRRRYKRKKIVLTQWNPQTVRRCTIKGLMPVLWAGMGQGGHNYAVRSDDYVAKGGFGGSFATETFSLKVLYDQYQRGFNRWTYSNEDLDLALYYGCKWVFYRSPDTDFIVYFTNNPPMKTNQFTAPLTTPGMLMRSKYKILIPSFKTRPKGRKTVTVRIKPPKLFLHKWYTQQDLCPVPLVQLNVTAADMQHPFGSPLTENPCITFQVLGNLYNNCLNIDLPQFTQDGDLETSPSYTRENREDLKTLYKELFCNKHSCHYWQTFITNSMMKSHIDATKAQTATTNYPNSSQDVVYNKADFPTKPVKEKFSDWKKKFTDGRDSNFLFATYHPDQVRDIIKEMRDNNFALETGPNDKYGSFTSQYTRNTHLLDYYLGFYSPIFLSPGRSNIEFFTAFRDIVYNPLLDKAQGNMIWFQYHTKFDNKFKKPECHWEIADMPLWALCNGYVEYLESQIKYGDILVEGKVLMRCPYTKPPLVDKNDPTAGFVVYNTNFGMGKWIDGGGYIPLHERSKWYVMLRYQTDVLHDIVTCGPWQYRDDNKNAQLVAKYYFRFKWGGNTIHSQVIRNPCPDTQVSGARRQPRQVQVVDPQLITPPWVLHTFDQRRGLFTEGAIRRLLKQPIPGEYDPQPPRVPLLFLPSAFQKEDGGAESDSGSPAKKPRYSFEESQTETLSSEEDPAETTRELLLRKLREQRALQFQLQHFAVQLAKTQANLHVNPLSYCPP

SEQ ID NO: 1748 - DNA, 3005 bp, Alphatorquevirus sp.
ttaaggtcactaagcactccgagcgtcagcgagaaggggcaattcgggctcgggactggccgggctatgggcaaggctcttaaaaaggcatgtttctcggtaaactctacagaaagaaaaggaaactgctactgccaactgtgcatccttcaccggcgccatcttccatgagctcgacctggcgggtcccgcggggcgatgtcgcctcccgtgagcgtcactggtacctttcagtacgagacagccacgacgctttttgtggctgtcgtgatcctatttttcatctttctcgtctggctgcacgttttaacaatcagggacctccgccgccccccgaggacgacggcccgacgtcggctaccccagtgagacgcctcctcccgctaccctcctacccgggagagggtccccccgatagatggcctggtgggcatggaggcgccgctggtggcggccgcggagacggtggcgatgggggcgtacgcgccgcagacgaagagtaccggcccgaagacctcgacgagcttttcggcgctatcgaacaagaacagtaaggaggcgccggagggggaggcggaggggctacaggcgacggtacagactaagacgcttgcgcagacgcagatacaaacgcaaaaagatagtactgactcagtggaacccccagaccgtcaggagatgcaccataaagggtctcatgccagtactctgggcgggcatgggccaggggggccacaactatgcggtgcgctccgatgactacgtggccaaggggggtttcgggggctccttcgccacagagaccttctccctgaaggtgctctatgaccaataccagaggggctttaacaggtggacttatagcaacgaggacttagacctagccctgtactatggctgcaagtgggtcttctacagaagcccagacacagactttatagtatacttcactaacaatccccccatgaagaccaaccagttcaccgctcccctgaccactccaggcatgctcatgaggaacaaatataagatactgatacccagctttaaaaccaggcccaaggggcgcaaaacagtgactgtgagaataaaaccccccaaactgttcctgcacaagtggtacacccagcaggacctgtgcccagttccgttagtccaactgaacgtgaccgcagcggatatgcaacatccgttcggctcaccactaactgaaaacccttgcatcactttccaagttttagggaacttgtacaataactgcctcaacattgacctcccccaatttacacaagatggagaccttgaaacttctccaagttatactagagaaaatagagaggacttaaaaaccctttataaagaattattctgtaacaaacacagctgtcactactggcaaaccttcatcactaactccatgatgaagtcccacatagacgctaccaaagctcagtcagctaccactaactatcccaacgggccacaaaacgcagcctacaacaaagcggactttcctacaaagccagccaaagaaaacttcattagctggaaaaacaaatttactgacggtagagacagtaactttctctttgccacctatcaccctgaccaagtaagagacataattaaagaaatgagagacaataactttgccttagaaacaggccccaatgacaagtacgggtccttcaccagccagtacaccagaaacactcacctactagactactacctgggcttctacagccccatcttcctgtccccaggaaggtccaatatagaattttttacagccttcagagacatagtatacaaccctctcctagacaaagcccagggcaacatgatctggttccagtatcacactaaatttgacaataaattcaaaaaaccagaatgccactgggagatagcagatatgcccctgtgggccctctgcaacgggtacgtagagtacctcgagagtcagattaaatatggagatatactcgtagagggcaaagtcctcatgaggtgtccttacaccaagccgcccctagtagacaagaacgaccccacagccgggttcgttgtctacaacactaactttggcatgggcaagtggatagacggcggcggctacatccccctacacgagagaagcaagtggtatgtcatgctcagataccagacggacgtcctccatgacatagtaacctgtggaccgtggcagtacagagacgataacaaaaacgctcagctagtggccaagtactactttcggttcaagtggggaggaaacaccatccattcccaggttatcagaaacccgtgcccagacacccaagtttccggagcccgtcgacagcctagacaagtacaagtcgttgacccgcagctcatcacaccgccgtgggtcctccacaccttcgaccagagacgcggactctttactgaaggagctatcagacgtctgctcaaacaaccaattcctggcgagtatgatcctcaacccccccgagtcccactcctctttctaccctcagcattccagaaagaagacggcggtgccgaaagcgactccggttcaccggtcaaaagaccccggtactcgttcgaagagagccagacggaaaccctctcctcggaggaggacccggcggagacgacgagggagctcctcctccgaaagctccgagagcagcgagcactccagttccagctgcagcacttcgcagtccaactcgccaagacccaggcgaacctgcacgtaaaccccctgtcatactgcccgccataaacaaggtgtttctgtttccccccgagggtcccaaacccatctcaggcagagaggcctgggcagacgagtacgccaccgcggcggcctgggacaggcccgtacgcacctaccactcagacacccccatttatccctggatgccccaacaattccgtgtaagcttcaaactcggcttccaataaaaatatactaggccgtaaactgttcacttgtcggtgtctacctc

SEQ ID NO: 1749 - protein, 786 aa, Alphatorquevirus sp.
MAWWAWRRRWWRPRRRWRWGRTRRRRRVPARRPRRAFRRYRTRTVRRRRRGRRRGYRRRYRLRRLRRRRYKRKKIVLTQWNPQTVRRCTIKGLMPVLWAGMGQGGHNYAVRSDDYVAKGGFGGSFATETFSLKVLYDQYQRGFNRWTYSNEDLDLALYYGCKWVFYRSPDTDFIVYFTNNPPMKTNQFTAPLTTPGMLMRNKYKILIPSFKTRPKGRKTVTVRIKPPKLFLHKWYTQQDLCPVPLVQLNVTAADMQHPFGSPLTENPCITFQVLGNLYNNCLNIDLPQFTQDGDLETSPSYTRENREDLKTLYKELFCNKHSCHYWQTFITNSMMKSHIDATKAQSATTNYPNGPQNAAYNKADFPTKPAKENFISWKNKFTDGRDSNFLFATYHPDQVRDIIKEMRDNNFALETGPNDKYGSFTSQYTRNTHLLDYYLGFYSPIFLSPGRSNIEFFTAFRDIVYNPLLDKAQGNMIWFQYHTKFDNKFKKPECHWEIADMPLWALCNGYVEYLESQIKYGDILVEGKVLMRCPYTKPPLVDKNDPTAGFVVYNTNFGMGKWIDGGGYIPLHERSKWYVMLRYQTDVLHDIVTCGPWQYRDDNKNAQLVAKYYFRFKWGGNTIHSQVIRNPCPDTQVSGARRQPRQVQVVDPQLITPPWVLHTFDQRRGLFTEGAIRRLLKQPIPGEYDPQPPRVPLLFLPSAFQKEDGGAESDSGSPVKRPRYSFEESQTETLSSEEDPAETTRELLLRKLREQRALQFQLQHFAVQLAKTQANLHVNPLSYCPP

SEQ ID NO: 1750 - protein, 154 aa, Alphatorquevirus sp.
MFLGKLYRKKRKLLLPTVHPSPAPSSMSSTWRVPRGDVASRERHWYLSVRDSHDAFCGCRDPIFHLSRLAARFNNQGPPPPPEDDGPTSATPVRRLLPLPSYPGEGPPDRWPGGHGGAAGGGRGDGGDGGVRAADEEYRPEDLDELFGAIEQEQ

SEQ ID NO: 1751 - protein, 64 aa, Alphatorquevirus sp.; identical to SEQ ID NO: 732

SEQ ID NO: 1752 - DNA, 3005 bp, Betatorquevirus sp.
caggagccgaaggtgagtgaaaccaccgtagtctaggggcaatatgggctagatcagtctggcggaacgggcaagaaactaaaatactattatgtttttacagatatgagttctttatggaagaaacctacatttacaccgagatccaacgaaaaccactgggtaaacaccatctttgaaagccacgacctgttttgttcctgtgaggatccctggcttcaccttttggatgttttaaaccgtcaaggaaacgcaagaaaaccactaaaagatattaataacataaaatgcctccttaccggtacacctggtacagaaaaagaagatatccccgacgcaatagatggattaaacccaggagatttagaaaagcttttcgaaaaagatacagaaccagaagataccgccgaagatacaaggtaaagaaaaaaagatactataaaaagaaactgaaaattgctatacaacaatttaatcctaaatctatgcgtaaatgtaaaataatcggatataaatgtttaatacaaggtagccctttaagactaagttttaactatgctcaatatgctaattctcatgtaccaccatttcaacccggagggggaggatggagcttaatggtattttcactagacagtttatttgatgattatgaaaaactacagaacgtatggacatattcaaactgtaacttaccgttagtacgataccatggtgtaacatttaagttttatcaagctgaagaaatggattatgttgtattctttgatagatgctggcctatggtagatactaaacatacacatgctaactgtagtccaactgcacagtttctaaaacaaaagaaaattactattcctagcagaaaaactcaaaaaaataaaaaaccatataaaaaagtacgcatacgtcctccaaatcaaatgcaaacaaaatggtactttcaatctgacatttgtaaaacacctttagtattactagctactactgctgtatcactcacaaacccattttgtgcaccagaagcaactagcaacaacataaccattccaatgttaaacacaatgcttattcaaagaccaaactttaaaaactatccacaaactagtggatattttataaaaactggacaatttcaacatgaagactccacatttgcagcatatttatatgctattcatagaacacaagacaaagaagcacaaggtatagaactcaaaaacagcaacttaaaaaactataacccaataccactttgcaacaccaaagacatgcaactaggaaaaccagttacagaacgtgattatgaaaataacgaaaaatgttggggcaatccttttttccacatataccttgatggtgaaagttacagtttatacttttccaatatgtccccaatagacttatatgaattaaaaaacaacaataataaatcatatcacttaacccttacagatccaataattaaatactacagatataacccagacacagacaaaggagcaacaaacaaagtatatacagtaagcaattcagcagcaacatcatgggcagaaccacaaaatgaaaaccttatttttgaaggttttccactatatgttttactatggggatggccagactggcttaaaaaatcaaaattaactatagatccagacgaaaaccaaacactagttataaaaacagaccaactatttggtccaaagcaaacatactatgttcctattgacaaagattttatagaaggatttgcaccttattctccagacccacctaatcaactacttccaaacaactggtctaaaacacactggcatccaaaattagaattccaacttcaacaaatagaaaaaatatgcgcctccggtccaggatgcgctagaatgccctacaaacattatatgcaatcattttgtaaatacaaatttcacttcacatggggaggatgtccaaaaacacttgaaaatgcatgtaatccttgttttcagccaaaatgggccacaaccgatacaatccctggaggacttgaaatttcgaatccaaactgcaatccctacacccaattatacgacttcgactggaaaggagacttcgttaaaacgaaaagtattgacagaattaaacaacacacgtcagttaatccagaacttttctcaattacagaagggaaaaacattccagaaaccctcaaaaaaccgaaaacaccgacaacgaaagaagaggaagaggaattactcctccagctccagcagctccgacagtgccagctcaacctctacagcatcctcaaccaataagtaaatatgttataaaaggctgcacaattaaaaagttattgtttgaaaaagaaccaaaaaaccgaagactaactccacgagaattagaagacgaaaaaattgtagcagcaatttttaaaagacctttaagaacatttattcgcgatccccctacttatccttggcttccccctgaaccaatagtaaactttaaattaaactatgttgaataaagcaaggccaacaatattcacttgtcggtgtccatttatataagtttaactttaataaacagactccgcctcccaatcaataaggcctagaaaagtaaagggggctccgcccccttacacccccaagggggctccgcccccttacaccccccagggggctccgccccctaacacccccaagggggctacgcccccttacacccccttataaatattcaacaggaaaaccacctaatttaaattgccgaccacaaaccgtctttaacttctcctttttactgaaacttctgctttttcttattattattcatgacattaattagtaatcaccgtaattcctgggcggtacttcttatctatataactaactacacttccgaatggctgagtttatgccgccagacggagactgaatcactacagtgacttcaggctgatcttgggcaggagccgaaggtgagtgaaaccaccgtagtctaggggcaatatgggcggg

SEQ ID NO: 1753 - protein, 669 aa, Betatorquevirus sp.
MPPYRYTWYRKRRYPRRNRWIKPRRFRKAFRKRYRTRRYRRRYKVKKKRYYKKKLKIAIQQFNPKSMRKCKIIGYKCLIQGSPLRLSFNYAQYANSHVPPFQPGGGGWSLMVFSLDSLFDDYEKLQNVWTYSNCNLPLVRYHGVTFKFYQAEEMDYVVFFDRCWPMVDTKHTHANCSPTAQFLKQKKITIPSRKTQKNKKPYKKVRIRPPNQMQTKWYFQSDICKTPLVLLATTAVSLTNPFCAPEATSNNITIPMLNTMLIQRPNFKNYPQTSGYFIKTGQFQHEDSTFAAYLYAIHRTQDKEAQGIELKNSNLKNYNPIPLCNTKDMQLGKPVTERDYENNEKCWGNPFFHIYLDGESYSLYFSNMSPIDLYELKNNNNKSYHLTLTDPIIKYYRYNPDTDKGATNKVYTVSNSAATSWAEPQNENLIFEGFPLYVLLWGWPDWLKKSKLTIDPDENQTLVIKTDQLFGPKQTYYVPIDKDFIEGFAPYSPDPPNQLLPNNWSKTHWHPKLEFQLQQIEKICASGPGCARMPYKHYMQSFCKYKFHFTWGGCPKTLENACNPCFQPKWATTDTIPGGLEISNPNCNPYTQLYDFDWKGDFVKTKSIDRIKQHTSVNPELFSITEGKNIPETLKKPKTPTTKEEEEELLLQLQQLRQCQLNLYSILNQ

SEQ ID NO: 1754 - protein, 105 aa, Betatorquevirus sp.
MSSLWKKPTFTPRSNENHWVNTIFESHDLFCSCEDPWLHLLDVLNRQGNARKPLKDINNIKCLLTGTPGTEKEDIPDAIDGLNPGDLEKLFEKDTEPEDTAEDTR

SEQ ID NO: 1755 - protein, 57 aa, Betatorquevirus sp.; identical to SEQ ID NO: 1257

SEQ ID NO: 1756 - DNA, 3005 bp, Alphatorquevirus sp.
ggacccccgctcgtgctgacacgcttgcgcgtgtcagaccacttcgggctcgcgggggtcgggaaatttgctaaacagactccgagttgccattggaccaattcgggctcgggactggccgggctatgggcaaggctcttaaaaaagcatgtttctcggtaaactttacagaaagaaaaggaaactgcttctgtgctctctgcatactgcatcgaaagcacttaccctctccatgagctggtccagacccattcacaatgctattgcactggaaagaaattggtaccaggctgttattcactctcatgctgcttgctgtggctgcggtgaccctggggctcacttggctgccctggtacagcgatacaactccagcgaaatgcaacagcagcgtctactgccaccagcatctcagataaggtccccgaaccagatccgtagagcccgggccctgcccgcggctccggagcagcctccggcactgccatggcatggtggtggtggagaaggagacggcgcccgcggtggagaagacgacgctggaggagacgagcccgtgtacgaaccaggagacctagacgccctgtacgccgccgtcgaagaagagtaaggagagggagacgggggtggcgtagactatacagacgatggagacgcagggggcgacgcagacacaaacgaaaaaaactggtaatgagacagtggaaccccagtactgtgacaaaatgctttatagtgggctacctgcccattattatctgtggacagggtacctctgctatgaactatgcatcccactgcgatgacatagagtaccctggacccctgggagggggactaacctccatgaggtttactttaagaatactgtatgaccagcacaccaggggacagaacttttggacaaagagcaacgaggacctagacttagctagattcctgggatcccgatggactttttacagacacccagaagtagactttatagtaacctgggagacctcagccccttttacagactctatagtatcaggaccacaccaacacccaggcatacaaatgctcatgaaaaagaaagtactgataccaagtttcagaacgaaacccaagggtcgcagcacaataaaagttaagataaacccccctaagctcatgatagacaagtggtacccacagactgaattctgtgaggtaactctgctaacgatacatgccacagcatgtgacctgcggtttccgttctgctcaccacaaacgaacacttcctgcatacagttccttgttttgtcaggagcttacagtggttacattagcatattacctgacaaagcaaacaaaactcaactagaagcatttttaaatactaatgtcacaaacacatcaaatgtaggaaacacattagccaccccatacatgctaaaatatcctgcaccaacaaaaaaaccaggcgaaggcccactaccatacctatcaccagacagccaggatggagatcctatatacatggacctaaaggaaacaatagttaaaaataatgaggcttggtttaccaaagctaaaaaagcatggaataacctacattcacaatatggaacacccatatcacaaggcctagaataccacacaggactatttagtgctatatttttatccccagtaagactaaactcacagtttccaggcttttataacaccattaaatacaacccactaacagacaaaggagaaggaaacagaatatggtgcgacccttgcactaaagaatcatttatgtacaacccaccacagagcaaatttgttatagaaaacatacaactatgggcagcagtagcaggctacttagactactgcacaaaagccagcaaagacgaaagctttaaatacaactacagagtactcatacagtgtccatacacagttccacaactatacttagactcacagaaagacagaggttacatagtatacagcaacaactttggcatgggcaaaatgcccaatgacagctccgtaataccagtcaggtggagatgcaggtggtatccagctttgtggaaccaacagcaagtgctagaggacatattcatgtctggaccctttgcatacaaaggagaacaaccctcagccacccttaacacaaaatatgcatttaagtggctctggggtggcaaccgtatcttccaacaggttgtcaaagacccctgctcacaccagcaagaccaggcagttggtcccagtagaaagcctagagcagtacaagtctttgacccgaagtaccaagcaccagagtggacgttccacgcgtgggacctcagacgcggcctatttggcagacaagctattaagagagtgtcagcaaaaccaacagctgatgagattctgtcaacaggtccaaaacgacccagattggaagtccccgcgttcgaagaggggcaagaaaaaagcttacttttcagacaaagaaaacacctcctgtgggaagagaccacagaagaagagacagaagcccaatcagaagaggagcaggaggaggaggagcagcagcagctcctcagacgactccagcaacagcgggagttggggagaggcctcagatgcctcttccagcaactgacccgcacccaaatgggtctccacgtagacccccaattattggcccctgtataaataaagtatacatgtttcctcctgcagaacccaaacccatctcaggctatgaagcctggaaagatgagtacgaaagctgcaaaacctgggacaggccccccagaaaataccactcagacacaccttactacccctgggtccccaaacccccagaccaatttcgtgtaacctttaagcttggctttcattaaaatttctaggccgtggaactttcacttgtcggtgtctacctctataagtcaccaagcactccgagcgaagcgaggagtgcgaccctcggggtgggtgcaacgccctcggcggccgcgcgctacgccttcggctgcgcgcggcacctc

SEQ ID NO: 1757 - protein, 726 aa, Alphatorquevirus sp.
MAWWWWRRRRRPRWRRRRWRRRARVRTRRPRRPVRRRRRRVRRGRRGWRRLYRRWRRRGRRRHKRKKLVMRQWNPSTVTKCFIVGYLPIIICGQGTSAMNYASHCDDIEYPGPLGGGLTSMRFTLRILYDQHTRGQNFWTKSNEDLDLARFLGSRWTFYRHPEVDFIVTWETSAPFTDSIVSGPHQHPGIQMLMKKKVLIPSFRTKPKGRSTIKVKINPPKLMIDKWYPQTEFCEVTLLTIHATACDLRFPFCSPQTNTSCIQFLVLSGAYSGYISILPDKANKTQLEAFLNTNVTNTSNVGNTLATPYMLKYPAPTKKPGEGPLPYLSPDSQDGDPIYMDLKETIVKNNEAWFTKAKKAWNNLHSQYGTPISQGLEYHTGLFSAIFLSPVRLNSQFPGFYNTIKYNPLTDKGEGNRIWCDPCTKESFMYNPPQSKFVIENIQLWAAVAGYLDYCTKASKDESFKYNYRVLIQCPYTVPQLYLDSQKDRGYIVYSNNFGMGKMPNDSSVIPVRWRCRWYPALWNQQQVLEDIFMSGPFAYKGEQPSATLNTKYAFKWLWGGNRIFQQVVKDPCSHQQDQAVGPSRKPRAVQVFDPKYQAPEWTFHAWDLRRGLFGRQAIKRVSAKPTADEILSTGPKRPRLEVPAFEEGQEKSLLFRQRKHLLWEETTEEETEAQSEEEQEEEEQQQLLRRLQQQRELGRGLRCLFQQLTRTQMGLHVDPQLLAPV

SEQ ID NO: 1758 - protein, 153 aa, Alphatorquevirus sp.
MFLGKLYRKKRKLLLCSLHTASKALTLSMSWSRPIHNAIALERNWYQAVIHSHAACCGCGDPGAHLAALVQRYNSSEMQQQRLLPPASQIRSPNQIRRARALPAAPEQPPALPWHGGGGEGDGARGGEDDAGGDEPVYEPGDLDALYAAVEEE

SEQ ID NO: 1759 - protein, 87 aa, Alphatorquevirus sp.
MPLPATDPHPNGSPRRPPIIGPCINKVYMFPPAEPKPISGYEAWKDEYESCKTWDRPPRKYHSDTPYYPWVPKPPDQFRVTFKLGFH

SEQ ID NO: 1760 - DNA, 3003 bp, Betatorquevirus sp.
cgggtgccgaaggtgagtgaaaccaccgtagtcaaggggcaattcgggctagagcagtctggcggaacgggcaagaaacttaaaataatatttattttacagatgagtagacaatgtcctccaaaatacaactccaaacaacttcaactacaatatgttaacacccttgtaaatgtacacgacctcaactgcggatgcgactctcctttggaatgtacagttttagccatttataaccaagaaaaacaactcaaatttacaaaacaagaaaaagaaaagcttaaacaatggcttactactacagaaaaagatactacccaagacgaagaaggttttggagacggagacctagagcgccttttcgaaggagattttggagaagacgacgataccgctacaaggtaaagaaaaaattttcttctataaaactaaaacaatggcagcctctatatataagacatttaaagataaaaggaatactgcctctgtttctaacaactgataaaagaattagtaatgactatactatgtatactaacagcatagctcaacattttgtaccaggaggaggaggattttcaatttatagatttactttaaaagccctctttgaactatttacaaaaatacaaaacaaatggacacaatctaatgaagattggccttttataagatacacaggatgcgaatttaaattctacaaatcagaaaaatgcgactacattataaactatcacagatgtccacccatgctagccacaatagacacatttcaaagcacacaaccacacataatgacacttaacaaaaaacataaaataataagatgcaaacaaaacaatccatacaaaagaccatacaaacgagtaaaaataaaaccaccagcactacttcaaaacaattggtattttcaaaaagactttgctgcagaacccttactactactaatgacatcttcaatgagtttagacagatactttttaaactccaaatcaattagcaccacaatgggatttcaatcactaaatgacaatatttttgatttttacaattataaattaccaccaacaacaggatacataccaaaaccaaaaaaatatatgtggtctttacatcaaccacaaaaccaaatacacacaacacccataaacgaactaatatatttaggaaaaagtaaagaaatggacaaaggacaaccattaaaaaactttcaatcaggagggaaaagtccagacaaaatttgggaagactacttttcaacaacacaacactggggaaatatttttgaaccttactacttaacacaagaacatgtagtgcttttttctgaaaaatcacccaatgaactaaaaacagaataccaaaaagatcaaactaaatggaaaacattaagtaacgaaataggacaacacatacaagaaacaacacatacattaatagtacaatgtagatataatccatacgcagacacaggaggaaacactgtattcatagttccgatcactcaacaagaacaaacaccattacacataccacaagacgacaaatataaaacagaaccatacccactttggctaggaacatggggtttcctagactatgaaagaaaaagaataggccaaaccatagacacagactaccaaatagttataaagtctccacacataacacccgcacaatttttttatatacccattgacgacacattcacatcaggaagatcagcatacagacctccagaaactcaacctacagtatatgatcaactacattggcatccaaaaataacaatgcaaatggacaccataaactctatagcagcatgtggccctggaactgttaaacttccagcacaaacttcagcagaatctcactgtacatatacttttcattttaagcttggaagctgtgctccgccaatgcaaaacattgacaacccagaaaaacaacaaacttttgccaataacatgttccaaacaaattcgttgcagaatccagaatatcccctacaatactacttgtacaacttcgacgaaagacgaaaaatgcttacaaaaagagctgcaaaacgaatcaaaaaaattgttgactctgaaaaatctttatcaccaattacaggacaaagccaactggaaatcccactgcagcaagaaacagaggaggggtcctcatcggaagaggaagccgaaaaagagacattactcctcctcctcaagcagcagcgactcaagcaagccaaatacaagcagcgactcctccagttaatagaacaattacaaactttagaataaaacaaactaagtttactgtaaacttatttccttctgacactcctaaaaacaggagaatgactgcaaaagaatttgcagaagagttagaggaaagtaaaatatggggccacagacccagaacttttattttagatactccatactatgactttttgcctatcacccctaaaatacccaagataaactttgacttgtgttacaaagaataaaggcctgcatacttcacttctcggagtccgtttatattattttaaacttaaataaacatccaccacactccctaatacgcaggcgtgcagggggctccgccccctgtaacccccagggggggcacagcccccccttaaaccccccgtaattactccactaaccacaaatttgcattgccaaccacaaactgacaggaaaaccacaaaatttgcattgccaaccacaaactgacaggaaaaccacaaaatttgcattgccgaccacaaaccgtctaaaacttcctcttttacatactacttccttttacattcattattattcattacattaattaatactcttcgtaattccggggaggagctaatatactatataactaactatacttccgaatggctgagtttatgccgccagacggagacaggatcacttcagtgactggctgagtttatgccgccagacggagacaggatcacttcagtgactccaggctgctcaaggg

SEQ ID NO: 1761 - protein, 667 aa, Betatorquevirus sp.; identical to SEQ ID NO: 1701

SEQ ID NO: 1762 - protein, 100 aa, Betatorquevirus sp.; identical to SEQ ID NO: 1702

SEQ ID NO: 1763 - DNA, 3002 bp, Gammatorquevirus sp.
cgggagcccgaggtgagtgaaaccaccgaggtctaggggcaattcgggctagggcagtctagcggaacgggcaagaaacttaaatatgcactctttttttacagatgcaaaacataaaacctgaagacttctataagcaaagctactacaactttgacaccaaaaatcaactttggtgctcacaaataacagatgcccacgataacttttgttgttgtaatcatccttttgctcatcttttgtctacaatttttcctcttggtcacacagataggaatcttactattaatcagatactagaaagagactacaaacaatgccattctggtggaaaagaagaagaaaatggtggtggggccgccgccgctatcgcacccgcagaagacctcaaaaaagaagacgaagagtatatcgcagacgtagaactagaagaccttataaaagccacagaagacgccggtacaaggtaagaagaaaaagacaaaaaataagactaacacaatggcagccagactctattagaaaatgtaaaattattggacttggaactttaatagtaggtgcagaaggcacacaaatgaactgttattctactaacaaatatgactatataccaccaaaagtaccatacgggggtgggtttggcagtgaagcctttaccttagactacctataccaagaatttaatttccataataacttctggacagctagcaacatacaaaaagacttagtaagataccatggatgcaaatttacattttatagacacccagaaattgactttatagtttcatacaacagacagctacctgtacaaattaacaaatacacatacccagcaatacatccacaccaacaattactagaaaaacaccacagaattatactaagccaaaaaagtaaacccaatggtaaatacacagtaaaaatatttattaaaccaccaaaacaaatgttaaacaaatggttttttacacaaccattttcagaataccaactagcttacatacaaggagccgcatgcaattttagaaactcctacttaacagaaacatctcaaaacttactagtaaatatactatcaccaaacccagtattttttaaaaacaaagactgggaccaagcaagagaccaaaatcacccatatgaaccatacacagctattaaaaacaacctaacctttaaattcaaagagaaaggtcaagttaaagaaaaacaatatccaccaagtactctatcatacacccaaagcataagctatgacaatggttggtttcaaccatttatactacaagcctttgaagtagactatggaacagtagcctatgccaccataccaacagtagcaggcagatacaaccccacaaaagacaaaggagatggaaacttattttatttatcctcaaccttaaatgcaggctgggaacctcctaatgacaaacaactaaagctagaaaatgtaccactatggctagctgcatatggatttctatcatacattaaaacaataaaatcagaagaattttttaaatcacatatagttgtcatgaaaagcacagccatatactgtgctactcaaataggagcatgttcatactatgcaccgatagacatagaatacacacaaggaaaaaaaccatatgaccaggccataaatgccatagacaaagctaaatggacaccaaatgtaacatggcaacttaaaaccctaaatgccattgtagaatcaggaccattcataccacaattaaatgaacaaaaatacagtacttgggaactaaaatacaaatataaattttactttaagtggggaggacccagaaaccctgatgaacagattacagacccaacacagcttccgacgtttgatgtacccgataaactctacaaaactatacaaattaccaacccgcttaaacaagccacagaaacaatcctacatccctgggatcaaagaagaggcctcattacacaaagagcttttaaacgaatgtgcgaaaacctccaaactgatacagagtttgaaatctctacagagacaccaaagaaaaagaaaaagatccagggagcagcactccagaacccagaagaaaacttgcaagacctccaacaatgtctcctctcactctgcgaagaaaatacctaccaagaccaaacacaagacatccagcagctcatccaacaacagcagcagcagcaacaactcctcaagtacaatctggtcaagctcctcacagacctgaagaacaaacaaagacaactacaactggaagccaacatgctaaactaactagattcaaaccaggttttgaatggaccactgaagtagaactagcaaatgcatttaacagaccccctagactgtttaaagaagataccccattttatccctggcttcccaaacttacaccccttgttaactttcacttaaattttaaattctaggcctacacttttcacttagtggtgtatgtttatataagtttgcaccccaaaaaaattgtaaaactaataaaaataaaaaaaaataaaaaattgcaaaaattccgcgctcgcgcgcgctgcgcgcgcgcgagcgcggtcacgcgcccgcgctcgcgcgcggcgcgtatgtgctaacacaccacgcacctagattggggtgcgcgcgctagcgcgcgcaccccaatgcgccccgccctcgttccgacccgcttgcgcgggtcggaccccccccccccacaccccccgcggggggggcaaagcccccccccgcaccccccctacgtcacaaaccacgcccccgccgccatcttgggtgcggcagggcgggggctaaaatggcgggaaccaatcattttatactttcactatccaattaaaacatgccacgtcactagcaatgggcggagactttaaaactatataactaagtggggtggcgaatggctgagtttaccccgctagacggtgcagggaccggatcgagcgcagcgaggaggtccccggctgcccatggg

SEQ ID NO: 1764 - protein, 658 aa, Gammatorquevirus sp.
MPFWWKRRRKWWWGRRRYRTRRRPQKRRRRVYRRRRTRRPYKSHRRRRYKVRRKRQKIRLTQWQPDSIRKCKIIGLGTLIVGAEGTQMNCYSTNKYDYIPPKVPYGGGFGSEAFTLDYLYQEFNFHNNFWTASNIQKDLVRYHGCKFTFYRHPEIDFIVSYNRQLPVQINKYTYPAIHPHQQLLEKHHRIILSQKSKPNGKYTVKIFIKPPKQMLNKWFFTQPFSEYQLAYIQGAACNFRNSYLTETSQNLLVNILSPNPVFFKNKDWDQARDQNHPYEPYTAIKNNLTFKFKEKGQVKEKQYPPSTLSYTQSISYDNGWFQPFILQAFEVDYGTVAYATIPTVAGRYNPTKDKGDGNLFYLSSTLNAGWEPPNDKQLKLENVPLWLAAYGFLSYIKTIKSEEFFKSHIVVMKSTAIYCATQIGACSYYAPIDIEYTQGKKPYDQAINAIDKAKWTPNVTWQLKTLNAIVESGPFIPQLNEQKYSTWELKYKYKFYFKWGGPRNPDEQITDPTQLPTFDVPDKLYKTIQITNPLKQATETILHPWDQRRGLITQRAFKRMCENLQTDTEFEISTETPKKKKKIQGAALQNPEENLQDLQQCLLSLCEENTYQDQTQDIQQLIQQQQQQQQLLKYNLVKLLTDLKNKQRQLQLEANMLN

SEQ ID NO: 1765 - DNA, 3002 bp, Betatorquevirus sp.
cgggagccgaaggtgagtgaaaccaccgaagtctaggggcaattcgggctagatcagtctggcggaccgggcaagaaacttaaaaatatatgtattttacagatgtcctccaagaaaccaacaagaagagaattaaaccaactaatcaacgtttgctgtggcgcccacgacctcatctgcgactgcgacgaacccaccaaacacatcatccttcacctattctcccaccaggaaccctaccaagtaacaaaacaacaaaaggataatatacaaaaatgccttattactacagaagaccatggagaaccaaccgctatcgttggagacgatggtataaacgaaggagacctagaggctattttcgcagaagacaaaaatggagaagacgccgaagggtaagaagaaagcttcctaaacttaatattaaagaatggcagccacagactattagaaaatgctgcataaaaggaatgcactgtttatttttatgtacagaagatactattagtagaaactatagaatgtatgaacatagcataataccagaaagatggccaggaggaggaggattttctgtaacaaaatacagcatagatggactatatgaacaacaccaactagatagaaactggtggacaaacagtaacacaaacttaccattatgcagatacacaggatgtaaaattaaattttaccaaagctgggaagtagactatgtagtaaatactagcctaaactatccaatgttagctactcaactactataccacagttgtcaacccagctttatgatgatgaacaaacactgtatatttgtaccatcaaaaataactaaaaaaattccaaaaggctatataactaaaaaatttagaccacctaaccaaatgagtaaccgttggttctttgcaaaagatctttcaaaagtaggtttgctaatgctaaccgcatcagcagcttcctttgaccattactacatagcaacagacaaaacctcaaataactgttcttttaccacacttaacccatacttatggaaaaaacataactttatacaaccaggcattaatggatattcactatccacaactgggactgtagaaaaaagaatgttcacaaccacacaacacatctacaacgacactcaaatatcaaacctacaaccaaacacaattacatacttaggttggacaaaacaagaccaacaaggacaaactgtatcactaagtaacaaacagaactacttaacagaccacaaatactggggaaaccctttttcacatgaaattctaacaggctcacaatctgtattagtaacaactaaagattggactactatcaaacaaaacttaatagagaactttaactgtaaaatacccacaggatttttaacaacacccacagaaccattactacatgaatgcagatactctccagacagagacacaggagcaggaacaaaagtatatttaaaatctgtactaagagacgaatcaggttgggaaccaccaacaaacgaagaacttataacagagggctttccactatggttagcattatttggctttgtagactggcacaaaaaactagcagtagcaacaagcctatatacaagctacgtaattgtaattgaatccaactttataacaccacaactaccatactacatattattagaccaacactttattgaaggaaaatccagatacatgacagaacatgacacagaccaacaaactcaagcagacaaagattcctggtacccctgtgttaaataccaactagaaagcatagaaaacattgtaaaaacaggcccaggaattcctaaactaggtggaagaaaatcagtagaagctaaaatattctacaaattttattttaagtttggaggatgtccaccaaagatggacacaattaacgaccctactaaacaagagacataccccgttcccggttttcagtctacaacatattcgttacagaatccaacactccctcaagaatcctacttataccaatttgacatcaaccaagacatccttacaaagaaagctgcaaaaagaattacaagagactgggaaactcaaaaaactctattttcaactacaggacaaatggaaccagcaccatactcggaaaaagaaggagaaatctcgccgacagcctcagactcggaagaggacccggcactcctacaaatcaagctccgaaagctcaagcgacagcgactctacttggagcagcaaatccagcaactaatggaacaaccataaactttatgtgcataaaaaaagctctgcttttcgaaccaccgcataaaaaactgagaaaaatgaacaaatatgaactagaaactgaaagactgtgtgctacagcctttaaaagaccacctgtatctatgtggggggaaattccttactggccatggttaaaaactgaacccttagtaaatcaacttccaaaagttaactttgacttaaattttaaaccctaataaaatttcaaggcctacaaaattcacttagtggtgtctgtttatataagtttaaacttaaataaaccaactccgcctcccaaaattgttggcgccataagggggctccgcccccttaaacccccaagggggctccgcccccttaaaccccaaagggggctccgcccccttaaacccccaagggggctccgcccccttacaccccctaataaatattcaacaggaaaaccacataattagaattcaagggggctccgcccccttacaccccctaataaatattcaacaggaaaaccacataattagaattgccgaccacaaaccgtcagttacttccccttttagcacttacttcccttttccttcattattattcattacattaattaataatcaccgtaattccggggaggagcataaacactatataactaactacactgacgaatggctgagtttaccacgccagacggagacggcatcacttcagtgactgcaggctgatcttggg

SEQ ID NO: 1766 - protein, 664 aa, Betatorquevirus sp.
MPYYYRRPWRTNRYRWRRWYKRRRPRGYFRRRQKWRRRRRVRRKLPKLNIKEWQPQTIRKCCIKGMHCLFLCTEDTISRNYRMYEHSIIPERWPGGGGFSVTKYSIDGLYEQHQLDRNWWTNSNTNLPLCRYTGCKIKFYQSWEVDYVVNTSLNYPMLATQLLYHSCQPSFMMMNKHCIFVPSKITKKIPKGYITKKFRPPNQMSNRWFFAKDLSKVGLLMLTASAASFDHYYIATDKTSNNCSFTTLNPYLWKKHNFIQPGINGYSLSTTGTVEKRMFTTTQHIYNDTQISNLQPNTITYLGWTKQDQQGQTVSLSNKQNYLTDHKYWGNPFSHEILTGSQSVLVTTKDWTTIKQNLIENFNCKIPTGFLTTPTEPLLHECRYSPDRDTGAGTKVYLKSVLRDESGWEPPTNEELITEGFPLWLALFGFVDWHKKLAVATSLYTSYVIVIESNFITPQLPYYILLDQHFIEGKSRYMTEHDTDQQTQADKDSWYPCVKYQLESIENIVKTGPGIPKLGGRKSVEAKIFYKFYFKFGGCPPKMDTINDPTKQETYPVPGFQSTTYSLQNPTLPQESYLYQFDINQDILTKKAAKRITRDWETQKTLFSTTGQMEPAPYSEKEGEISPTASDSEEDPALLQIKLRKLKRQRLYLEQQIQQLMEQP

SEQ ID NO: 1767 - protein, 98 aa, Betatorquevirus sp.
MSSKKPTRRELNQLINVCCGAHDLICDCDEPTKHIILHLFSHQEPYQVTKQQKDNIQKCLITTEDHGEPTAIVGDDGINEGDLEAIFAEDKNGEDAEG

SEQ ID NO: 1768 - protein, 139 aa, Betatorquevirus sp.
LGNSKNSIFNYRTNGTSTILGKRRRNLADSLRLGRGPGTPTNQAPKAQATATLLGAANPATNGTTINFMCIKKALLFEPPHKKLRKMNKYELETERLCATAFKRPPVSMWGEIPYWPWLKTEPLVNQLPKVNFDLNFKP

SEQ ID NO: 1769 - DNA, 3001 bp, Betatorquevirus sp.
cgggagccggaggtgagtgaaaccaccgtagtctaggggcaattcgggctagatcagtctggcggagtctaggggcaattcgggctagatcagtctggcggaacgggcaagaaacttaaaatattttattttacagatgagtaaactctacaaacctctaaatatcagcttaaaccacaaaaacctacaatggatgaatgctcaagttgctcttcatgatatgcactgccaatgtgaccagccactaagacacatcattgtacaaataatagaaaaagaaccaaatataaaattcaacaaagaagaatctactaaaattcaaaaatgccttactactggagaagaagacgatggcgacgttcttggcgccggagacctagatacccttttcgcagaagacgtttttggagaagaagacaacgatgggtaagaaaacccaaaagaaaacttaaaaaaataactattaaacaatggcaaccaagtactattagaaaactaactgttaaaggacaataccccctttttgccggaacctcagacagaattgccaatgactatactgcttatgtagatgaaattgctccaaaagatgttccaggcgggggactatacagtattacagtatttactttacaaggattatatgaactgcatcaaaagggtagaaattggtggacacaatctaactgtgacttgcctttaattagatactcgggatgtactataaaactttactttaacccttcagcagactatataactactataattaactgtggagaacttaaagctaacttagaaatgtttcaatctacacaaccttctattttactacttaacaaaaaaaaaagagtaatgctatgtagaaactataaaagaaaacgcagaccatataaaaaatggtttatacatcctcctgcattgttatataacaaatggtattttcaaaaagaactaagtacatacccactattaatgataataactgcggccggtagctttgacagatactatcaaggagctaattcaatttcagaaacaataggattccaatctttaaacacagacttttttgtaatacatagctggaaatttccatcaacattaccatacagaccaaatgacagattttacatgtttggcataggaggtactacaacatttgacaacgccacacctgaacaattaatattactagggaatcctacagataacacaaaaggatcaatgataggaacagctacttccactaactggtcagaaaaagttacagaatatttagctaaatcaacaaactggggtaatccatttcacccttattggctacatgccgatgaaggagaaggccttatatgccttttagaagtcactgaaacaaccaccctacaacaaaaactaaaattactaactccaacaactaaattacaattacaaggctttattgaaccaacaaaaccatttacagtacattgcagatataatccacaagcagacatgggaagaaactccatatttgtaaccagaataacaggagacaacacaccatggcacaaaccaaacgatgaacacctattaacacaaggcctaccactatggctactacactggggatggctagactacttaagaaagtcaggaacaccacaaagactagatacagactacattcatgtaatagtgtcagaccacataagtccaaaagaattatcctactatgtacctatagattatgactttttaaatgcaaaaagtccttattctgatcacataaaaccctatgaccaacaaaactggcatccaaaaattaactttcaacaaaaaagcatagcacatatatgccaaagtggaccactaacaattaaattaccacaagatataagtgctactgctcactttagttataaatttcattttaagctcggaggatgcccaccagcaatggacaaagtttgtgaaccagctaaacaaccctcctatcctcaacccggtaacctcctatcatcaattatattgcagaacccacaaactccaattgaatacttcctcagctcctttgatcaaagaagggaactccttacagaaagagctgcaaagcgcctcaaaaaagaccaagagtttaaagaaactgttcttaaacctacaggacaaactctcctcgacgtacaaatgtcatcccctcaaacaacatcgtcagaggacacatcgtcggaggaagaaagcgaggaggagacacagcagcagctccacagacaccagcgaaaacacagaaaactccagcgaggaattctcaagctcctgaacctactccaacattcaaaatagttaatagcacaataaaagtaaacctattccctgaaagtaaacagaaaaatagacgccttacggctagagaaagaagtgacgatatacaagatgctaaaatatggggtagatatgtaaaaaattatttactggaatctcatttttataaagatgtacctattacacccttaattccccgtataaactttgaccttggttacaaacaataaagcctgcatactttcacacctcggtgtccatttatttaagtttaaacctatataaacatccaccacactccctaatacgcaggcgcaaaagggggctccgcccccttaaaccccaagggggctccgcccccttaaacccccaggggggataccccccttaaaaccccccaaaaaccacaacattacaatactttaccacaaacgaacaggaaaccacaaaatttgcattgccgaccacaaacgaacaggaaacccacaaaatttgcattgccgaccacaaaccgtcactaacttccctaaactacaatacttccctttttactcataaatattcattacattaattagtaatcaccatcattcctgggcggatctaaactacctatataaccaagtacactgacgaatggctgagtttacgccgccagacggagacaggatcacttcagtgactccaggctgatcttggg

SEQ ID NO: 1770 - protein, 665 aa, Betatorquevirus sp.; identical to SEQ ID NO: 357

SEQ ID NO: 1771 - protein, 111 aa, Betatorquevirus sp.; identical to SEQ ID NO: 358

SEQ ID NO: 1772 - DNA, 3001 bp, Betatorquevirus sp.; identical to SEQ ID NO: 1769

SEQ ID NO: 1773 - protein, 665 aa, Betatorquevirus sp.; identical to SEQ ID NO: 357

SEQ ID NO: 1774 - protein, 111 aa, Betatorquevirus sp.; identical to SEQ ID NO: 358

SEQ ID NO: 1775 - DNA, 3001 bp, Alphatorquevirus sp.
ccgctcgtgctgacacgctcgcgcgtgtcagaccaggggcaattcgggctcgggactggccgggctatgggcaaggctcttaaaaaagacatgtttctcggtaaactttacagaaagaaaaggacactgccactgtgcggtctgccagcagcaaagaaaaaaccacctagtgatatgagctattggaggccacccctgcacaatgtcccggggctcgaacacctctggtacgagtccgtgcatcgtggccatgctgctgtttgtggctgtgggaatcttgtacgccatcttgctgctcttgctgaaagatatggctacccgggagggcccagcgctcctggggcaccctcagtagggggcggcggtaaccctcccatccgtcgagcccgctacccggcggccgctccggatcccccggcaggtaaccagcctctgcagctgccatggcatggagatggtggaaacgaaagcggcgctggtggtggagaaaacgatggacccgagggaggtttcgaagacgacggactggacgccctcgtcgccgccctcgacgacgaagagtaaggagaaaaagacagtggaggagggggcgacgcagacgaacttataacagacgtaggagacgcttaaaaaagaaacgtaggccaaaactgactctcagactgtggcagccagacatggtcagaaaccttaaagttagtgggtacatacccataataatcagtggcttcggaacatttagtagaaactttagcagccacctactagacaaagttattaaggagccctttggagggggccacagcacaatgagattctcccttcagatactttttgaggagcacctcaggggtctcaactactggtcctactctaacacagacctagagcttgttagatacaggtactgcaaattcaccttcttcaggcacccagacacagactacattatacagtacaacagaaagaccccccttgggggcaacatactaacagcaccatcactacacccaggctccctcatgctgcaaaaatacagggtgctggttcccagctggaagacaaaacccaagggaaagggcacagtatccattaagattcccccccccaccatgctaactgacaagtggtacttttccaaagacgttgcagaccttacattgctaaacctcaacgcagtgtcagctgacctgcggtttccgttctgctcaccacaaacgaacactacttgcatcactttccaagttctctcttctgtgtacaacaagttcctctctataactgaaattaacccctcaaactcagaagagaaaattcaacagtttttaaacgctgctatgccaaataatgactctgcaaatatattaaatacttttaaatcagaaggtaactatagtcacccttctattaaagtatttaatggatcaaacaggccaacaaatgaagaatactttgcaaaaaaagacagcctatgggctgatgctatttttgtaaatacagctcaaagtttagatgacctaaaaaaaaaaattcaaaacaacattaaaaactataaaaaaaaagtagatgaaaagattacagctttatcacaaagaggcaccagtgccttttaccacttagtaggtatttatggcagcagctggctaaaccaaggtagaatgagtccagaagtactaggcctatacacagaagttatatacaacccatatactgataaaggagtgggcaacatgctatggatagaccccttaagcaaaacagacaacatatatagacccccacagagcaaatgcgttctaaaagacatgcccatgtggcaaatgtgctttggatacatagactgggtaaaaaaagacctaaatcactgggacgcccctattaactacagaatactactaagaactccctacacatttccaaaactataccatgacacacaaccagaatatggctttgtaatagtatcctacaacttcacagcaggcaaaatgccagacgggtccatgtatgtgcctattatatacagaaccaagtggtacccctacatgctaaaccaagaggcagtaatggaagacataagcagatcagggccctttgcacccaaacaagaaatgcccagcacagaactagttgcaaaatacacatttaagtggaaactcgggggcaaccccatctccgaacaggttgttaaagaccccagcacacaacccacctacgagctgcccgcagccggtacagtccctcgtagagtacaagttatcgacccgaaagtcgtcggacccaacatatcgttcaaaagctgggagatcagacgtggatactttagctcgacaagtattaaaagaatgtcagaacaacaagaaacttctgagtcttatttcccaggtccaaaaagacccagaatcgatctgcccaagtacgagccgccagaagaaagctggagtactctccaaagagaactccggccgtggacggactcggaggcggaaaaagaccaaagctcctcggaagaggaagaagagagacccctccgagagcagctgcagctccagctcaaggagcagcagcacctcagacggggaatccagtgcctgttcgaacaactcctaaaaacccagcagggagtccacgtaaatccctgcctcgcgtaggccccgagcagtggttgtttcccgagagaaagccaaagccaggtcccacgtcccaagactgggccatggagttcctggcctgcaagatatttgataggccccccagaagcaagcttacagattttcctttctatccccgctgcaaaaacaattacaatgtaacctttcagcttaactacaaataaatggcaacttcactgttctaggccgtgggagtttcacttgtcggtgtctacctctaaaggtcactaagcactccgagcgttagcgaggagtgcgacccttccccctgactcaacttcttcggagccgcgcgctacgccttcggcggcgcgcggcacctcagaccc

SEQ ID NO: 1776 - protein, 735 aa, Alphatorquevirus sp.
MAWRWWKRKRRWWWRKRWTRGRFRRRRTGRPRRRPRRRRVRRKRQWRRGRRRRTYNRRRRRLKKKRRPKLTLRLWQPDMVRNLKVSGYIPIIISGFGTFSRNFSSHLLDKVIKEPFGGGHSTMRFSLQILFEEHLRGLNYWSYSNTDLELVRYRYCKFTFFRHPDTDYIIQYNRKTPLGGNILTAPSLHPGSLMLQKYRVLVPSWKTKPKGKGTVSIKIPPPTMLTDKWYFSKDVADLTLLNLNAVSADLRFPFCSPQTNTTCITFQVLSSVYNKFLSITEINPSNSEEKIQQFLNAAMPNNDSANILNTFKSEGNYSHPSIKVFNGSNRPTNEEYFAKKDSLWADAIFVNTAQSLDDLKKKIQNNIKNYKKKVDEKITALSQRGTSAFYHLVGIYGSSWLNQGRMSPEVLGLYTEVIYNPYTDKGVGNMLWIDPLSKTDNIYRPPQSKCVLKDMPMWQMCFGYIDWVKKDLNHWDAPINYRILLRTPYTFPKLYHDTQPEYGFVIVSYNFTAGKMPDGSMYVPIIYRTKWYPYMLNQEAVMEDISRSGPFAPKQEMPSTELVAKYTFKWKLGGNPISEQVVKDPSTQPTYELPAAGTVPRRVQVIDPKVVGPNISFKSWEIRRGYFSSTSIKRMSEQQETSESYFPGPKRPRIDLPKYEPPEESWSTLQRELRPWTDSEAEKDQSSSEEEEERPLREQLQLQLKEQQHLRRGIQCLFEQLLKTQQGVHVNPCLA

SEQ ID NO: 1777 - protein, 184 aa, Alphatorquevirus sp.
LTRSRVSDQGQFGLGTGRAMGKALKKDMFLGKLYRKKRTLPLCGLPAAKKKPPSDMSYWRPPLHNVPGLEHLWYESVHRGHAAVCGCGNLVRHLAALAERYGYPGGPSAPGAPSVGGGGNPPIRRARYPAAAPDPPAGNQPLQLPWHGDGGNESGAGGGENDGPEGGFEDDGLDALVAALDDEE

SEQ ID NO: 1778 - protein, 132 aa, Alphatorquevirus sp.
LEYSPKRTPAVDGLGGGKRPKLLGRGRRETPPRAAAAPAQGAAAPQTGNPVPVRTTPKNPAGSPRKSLPRVGPEQWLFPERKPKPGPTSQDWAMEFLACKIFDRPPRSKLTDFPFYPRCKNNYNVTFQLNYK

SEQ ID NO: 1779 - DNA, 3001 bp, Alphatorquevirus sp.
ggagtgcgacccttccccctggtgcaacgcctcaaggggcaattcgggctcgggactggccgggctatgggcaaggctcttagggttatcgctcttaaatatgttttttggcaggccttacagaaaaaagaaaagggcgctgctactgtctcagctgccagatccaaagaacaaaccacctagtgatatgagctggcgccccccggtacacaatgctgccggcatcgataggcagttctttgaagcctgctatcgatgtcacagtagttgctgtggctgcggcagctttattaatcatcttaatgtactggctgctcgctatggctttactggggggccggcgccgccaggtagtcctcggccggcgccccaagtaaggcccgcgcttcccgcgccggagcccgaccctgaagccgacaaccgtcagccatggcgtggagctggtggtggcaacgatggagacgccgcggctggaaacccaggcgccgccgttggagacgcctacgatggagaagacctcgacgccctgttcgccgccgtcgccgaagacgcagagtaaggagacggaggtgggggaagagacgggggcgacgcagacggtacacccgtagacgaaagagacgcattaagcccagaaactttaaaaagaaactagtactgactcagtggcacccctctgtagtaagacgctgctttatcaggggcatagtccccatccttatatgcgggcacacaaaatggaacagtaactacgccctgcatagcgaggactacacggaagagggccgctaccctcacggagggtccctctcgaccactacgtggtcactaaaggtgctgtacgacgagtacctaaagcaccgcaacttctggggctatccaaacacccagctagacctggccagatacaggggctgcaccttcaccttttacagacacaaaaagactgactttatagtgtggtggaacagaaggcctccctttaaactaaacaagctcagctgcccgttctttcacccgggcatgctcatgcagcaaagacacaaaatactaatccctagctttgacactaaacccaatggcaaaaataaaattagagtcagaataaagccccctactctcttagaggacaagtggtacactcagcaagacttgtgtccggtaaacctggcgcaacttgtggttactgcggccgactttcaacatccgttctgctcaccacaaacgaacactccaaccacaaccttccaggtgttgaaagaaatgtattatgacactataggcatagttgacacacaagaaacttacaattcagttaataataaaagtatatctaaaacatacgatgaatttatggacgcattagtaacaaaactatacacaacaggatcatactggaactcttttcacacagcagaatatttaaaccccaacataacagacagatacaattccaaaatattcaatgacagaagcgttacattaacaacctggctatcaggaaaaggcagcgacaaatttaacacaggcaacagcacccaatttggctacaatacttatgcgcctgacaaaactaagctaatagcagcaaacgattgctactggacagcactcagcaaacaaaatgaccaagctacacaaatagggcaagcacgcgacaaacactttgagtatcacacgggcatttacagtcccatattcctcagcagacacagaagcacactaaactttgccagggcctaccaggacgttacatacaacccaaactgtgacagaggaattaaaaacagggtgtgggtacaggccctaactaaggccaccacagaatttgatgaaaaacgcagcaagtgcgttatcactgacctgcctctgtgggccgctttacactgctaccccagctttgtagaagaggagctaggcatttcctctgaaatttacaacgcctgtatagtctgtgtacagtgcccttacacctttccccccatgtatgacaagaaaaacccaaacaagggatacgtgttctatgacaccctgttcggaaacggaaagaccccagacggacgcggacagatagacgtgttctggcagcagcggtggtacccccgcatggcctgccaggtgcaagttatgcacgacatcaccataagtggacccttctcctaccacgacgaactagtgagtatacaactgactgctaagtacaaatttgacttcatgtggggtggaaacatgatctcctcacagatcatcaagaacccctgcaaagacacagacatggaaacctcctatcccagtagacagcgtcgcgacttacaaattgttgacccacactccatggggccctccttcgcgttccacacgtgggactacagacgaggactatttggtaaagatgctatcgacagagtgtcaaaagaacaagaccatgctccagagtatcctaacccatacaaaaagcctagatattttcccccaacagagagaacagagctccaagggcaagaagaagactggagtttccaggtcgaaagcgaggggtcgtcgtcagaagagagcgatcaagaagcccaagaagaggaggtactccagttccagccaggacagcaactccagcaactccacctgcagctcgcgcagcagcagcacatggggcaccagctccgattcctgttccaacaaatgctcaaaacccaagccaacctgcacctaaacccatatacatacacccagctataaacaaggtgttcatgtttgaaccccagggccccaggcctataaccaccagagaggggtgggaagacgagtacacaactgccggcgtatggggcaggcccgtgcgctccttctacacagacacccccttctaccccgaggttcccaagatgccccctcaattctctgtaagtttcaaactcggctggaaataaaaatacaaggcctttcactgttcacttgtcggtgtctacctcttaaggttactaagcactccgagcgtcagcga

SEQ ID NO: 1780 - protein, 768 aa, Alphatorquevirus sp.
MAWSWWWQRWRRRGWKPRRRRWRRLRWRRPRRPVRRRRRRRRVRRRRWGKRRGRRRRYTRRRKRRIKPRNFKKKLVLTQWHPSVVRRCFIRGIVPILICGHTKWNSNYALHSEDYTEEGRYPHGGSLSTTTWSLKVLYDEYLKHRNFWGYPNTQLDLARYRGCTFTFYRHKKTDFIVWWNRRPPFKLNKLSCPFFHPGMLMQQRHKILIPSFDTKPNGKNKIRVRIKPPTLLEDKWYTQQDLCPVNLAQLVVTAADFQHPFCSPQTNTPTTTFQVLKEMYYDTIGIVDTQETYNSVNNKSISKTYDEFMDALVTKLYTTGSYWNSFHTAEYLNPNITDRYNSKIFNDRSVTLTTWLSGKGSDKFNTGNSTQFGYNTYAPDKTKLIAANDCYWTALSKQNDQATQIGQARDKHFEYHTGIYSPIFLSRHRSTLNFARAYQDVTYNPNCDRGIKNRVWVQALTKATTEFDEKRSKCVITDLPLWAALHCYPSFVEEELGISSEIYNACIVCVQCPYTFPPMYDKKNPNKGYVFYDTLFGNGKTPDGRGQIDVFWQQRWYPRMACQVQVMHDITISGPFSYHDELVSIQLTAKYKFDFMWGGNMISSQIIKNPCKDTDMETSYPSRQRRDLQIVDPHSMGPSFAFHTWDYRRGLFGKDAIDRVSKEQDHAPEYPNPYKKPRYFPPTERTELQGQEEDWSFQVESEGSSSEESDQEAQEEEVLQFQPGQQLQQLHLQLAQQQHMGHQLRFLFQQMLKTQANLHLNPYTYTQL

SEQ ID NO: 1781 - protein, 167 aa, Alphatorquevirus sp.
LAGLWARLLGLSLLNMFFGRPYRKKKRALLLSQLPDPKNKPPSDMSWRPPVHNAAGIDRQFFEACYRCHSSCCGCGSFINHLNVLAARYGFTGGPAPPGSPRPAPQVRPALPAPEPDPEADNRQPWRGAGGGNDGDAAAGNPGAAVGDAYDGEDLDALFAAVAEDAE

SEQ ID NO: 1782 - protein, 138 aa, Alphatorquevirus sp.
LEFPGRKRGVVVRRERSRSPRRGGTPVPARTATPATPPAARAAAAHGAPAPIPVPTNAQNPSQPAPKPIYIHPAINKVFMFEPQGPRPITTREGWEDEYTTAGVWGRPVRSFYTDTPFYPEVPKMPPQFSVSFKLGWK

SEQ ID NO: 1783 - DNA, 3001 bp, Alphatorquevirus sp.
gccgcgcgctacgccttcggctgcgcgcgggtcaaggggcaattcgggctcgggactggccgggctatgggcaaggctcttaaagcgtacgtcccccggtatgtttctcggcagggtgtggaggaaacagaaaaggaaagtgcttctgctggctgtgcgagctacacagaaaacatcttccatgagtatctggcgtccccccctcgggaatgtctcctacagggagagaaattggcttcaggccgttgaaggatcccacagttccttttgtggctgtggtgattttattcttcatcttactaatttggctgcacgctttgctcttcaggggcccccgccggagggtggtccgcctcggccgaggccgccgctcctgagagcgctgccggcccccgaggtccgcagggagacgcgcacggagaacccgggcgcctccggtgagccatggcctggagatggtggtggcagagacgatggcgccgccgcccgtggccccgcagacggtggagacgcctacgacgccggagacctcgacgacctgttcgccgccgtcgaagaagagcaacagtaaggaggcggaggtggaggggcagacgtgggcgacgcacatacacgcgacgcgcggtcagacgcagacgcagacccagaaagagactggtactgactcagtggagcccccagacagtcagaaactgctcaataaggggcatagtgcctatggtaatatgcggacacacaaaagggggtagaaactatgccattcacagcgaggacttcactactcagatacaacccttcgggggcagttttagcacgaccacctggtcgctgaaagtactgtgggacgagcaccaaaaatttcagaacaggtggtcctatccaaacacacagctagacctcgccagatacaggggagtcaccttctggttctacagagaccaaaagacagactatatagtacaatggagcagaaatcctccctttaagctaaacaagtacagcagtgccatgtaccacccaggcatgatgatgcaggccaaaaagaaactaattgtacctagtttccagaccagacccaaagggaaaaagagatacagagtgagaataagaccccccaacatgtttgctgacaagtggtacactcaagaggacctgtgtccggtacctcttgtgcaaattgtggtttctgcggccagcctgctacatccgttctgcccaccacaaacgaacaacccttgcatcactttccaggttttgaaagatatctatgacacttgcataggagttaactctaccgaagccacaacatattcaacacttcaaaaaacattatacactaactgcacatactttgaaacaacacaagtactagcccaactatctccacactttcaacctgccttaaaagccacaaacacaaatgcaaaccctaccgcaacaacactaggaaactatgtaccagaactaaaaaccacaggcgccttttacacaggtaacaatccagtttttggcatgtgcaaatacaaaccaactaaagacatattagaccgtgccaacaagtggttctgggacaatctaatgcatgaaaatgacttacattcctcctatggcaaagccaacctacagtgtatggagtaccacacaggcatatacagttccatatttctaagtccccaaaggtcactagaattcccagcagcataccaagacgtcacctacaaccccaactgtgacagagcagcaggtaacagagtctggttccagtacagtacaaaaatgaacacagactttgatgcaactaagtgcaaatgtgtgttagaaaacattcccctgtgggcggccttccatggctacgcagactttatagagcaagaactaagcataagctcagaaatacgcaactttggcatagtttgcttccagtgcccctacactttccccccttgctttaacaaacaaaagccaaacaaaggatacgtgttctatgacaccacctttggtaatggaaagatgccagatggatcagggcacatacccatatactggcagcagagatggtggatcagactagccttccaagtacaagtaatgcacgactttgtactctgtggcccctttagctacaaagatgacctagccaacaccacacttacagcaaggtacaaatttagattcaaatggggcggtaatatcatccccgaacagattatcaagaacccgtgtcagagagaacagtccctcgcttcctaccccgatagagaacgtcgcgacctacaagttgttgacccatcgaccatgggcccgatctacaccttccacacatgggactggcgacgggggctttttggtacagatgctatccagagagtgtcacaaaaaccgggagatgctctccgctttacaaaccctttcaagagacccagatatcttcccccgacagacggagaagactaccgacaagaagaagacttcgctttacaggaaaaaagacggcgcacatccacagaagaagtccaggacccggagagccccccgcaaaacgcgccgctcctacagcagcagcagcagcagcgggagctctcagtccagctcgcggagcagcagcgactcggaatcgaactccgatacatcctccaagaagtcctcaaaacgcaagcgggtctccacctaaaccccctattattaggcccgccacaaacaaggtctatctctttgagccccccaaaggcctactccccatagtgggaaaagaggcctgggaggacgaatactgcacctgcaagcactgggatcgccctcccagaaccaaccacctagacatccccacttatccctggatgcccacaaacttcaaagtcacctttaaacttggatttaaaccctaaataaaaatacaaggccgtacactgttcacttgtcggtgtctacctctataagtcactaagcactccgagcgtagcgaggagtgcgaccctacggggtgggtgcaacgccctcggcg

SEQ ID NO: 1784 - protein, 765 aa, Alphatorquevirus sp.; identical to SEQ ID NO: 1725

SEQ ID NO: 1785 - protein, 171 aa, Alphatorquevirus sp.
LAGLWARLLKRTSPGMFLGRVWRKQKRKVLLLAVRATQKTSSMSIWRPPLGNVSYRERNWLQAVEGSHSSFCGCGDFILHLTNLAARFALQGPPPEGGPPRPRPPLLRALPAPEVRRETRTENPGASGEPWPGDGGGRDDGAAARGPADGGDAYDAGDLDDLFAAVEEEQQ

SEQ ID NO: 1786 - protein, 187 aa, Alphatorquevirus sp.; identical to SEQ ID NO: 1727

SEQ ID NO: 1787 - DNA, 3000 bp, Alphatorquevirus sp.
cggccgcgcgctacgccttcggctgcgcgcggcaaggggcaattcgggctcgggactggccgggctatgggcaaggctcttaaagcgtacgtcccccgctatgtttctcggcagggtgtggaggaaacagaaaaggaaagtgcttctgctggctgtgcgagctacacagaagacatcttccatgagtatctggcgtccccccctcgggaatgtctcctacagggagagaaattggcttcaggccgtcgaaggatcccacaattctttttgtggctgtggtgattttattcttcatctcactaatttggctgcacgctttgctctccaggggcccccgccggagggtggtccacctcggccgaggccgccgctcctgagagcgctgccggcccccgagatccgcagggagacgcgcacggagaacccgggcgcctccgatgagccatggcctggcgatggtggtggcagagacgatggcgccgccgcccgtggccccgcagacggtggagacgcctacgacgccggagacctcgacgacctgttcgccgccgtcgaagaagagcaacagtaaggaggcggaggtggaggggcagacgtgggcgacgcacatacacccgacgcgcggtcagacgcagacgcagacccagaaagaaacttgtactgactcagtggagcccccagacagtcagaaactgttcaataaggggcatagtgcccatggtaatatgcggacacaccagagcaggtagaaactatgcccttcacagcgaggactttaccactcagataagaccctttggaggcagcttcagcacgaccacctggtccctaaaagtgctgtgggacgaacaccagaaattccaaaacagatggtcctacccaaacacacagctggacctagccaggtacaggggggtcaccttctggttctacagagaccagaaaacagactatatagtacaatggagcagaaatcctccctttaaactaaacaaatacagcagctccatgtaccaccctggcatgatgatgcaggcaaaaaagaaactggtggtccctagtttccagaccagacctaaaggcaaaaagagatacagagtcacaataaggccccccaacatgttcaatgacaagtggtacactcaagaggacctgtgtccggtacctcttgtgcaaattgtggtttctgcggcgagcctgctacatccgttctgctcaccacaaacgaacaacccttgcatcactttccaagttttgaaagacatttactcagaatgcataggagttaactcttccaaagaaacaacatattcaattctacaaaacaagctttactcagaatgcacatactttcaaaccacacaagttttagctcagttatctccagtatttcagcccgcaaaaaaacctgtaggaggaagggtagagtcaactaccacaacactaggcaacaaggtaccagaactaaaaccaaataacgaattccatacaggcaacaacccagtgtttggcatgtgttcatataaacccaccacagagatactaaccaaagcaaacgactggttctgggagaatctcatggttagaagtgatttacattccacatatggcaaggcaacccttaaatgcatggagtaccacacaggcatttacagctccatattcctaagtccccaaaggtccctagaattcccagcagcataccaagatgtcacatacaacccaaactgtgacagagccataggcaaccgtgtatggttccaatatagcacaaaaatggacacaaactttaatgaactacagtgtaaatgtgtgttaacaaacatgcccttgtgggcggcctttaacggctacccagactttatagaacaagaactcagtatcagcacagagatacacaactttggcatagtatgtttccagtgcccctacacctttcccccctgctatgacaaaacgaacccaaacaaaggctacgtgttctatgacaccacctttgggaacggaaaaatgccagacgggtcaggccacattcccgtctactggcagcagagatggtggatcagactagcctttcaggtacaagtcatgcatgactttgtactcactggcccctttagctacaaagatgacctagcaaacaccacactcacagccaggtacaagttcagattcaaatggggcggtaatatcatccccgaacagattatcaagaacccgtgtcagagacagcagtccctcggttcctaccccgatagacaacgtcgcgacctacaagttgttgacccatcaaccatgggcccgatctacaccttccacacatgggactggcgacgggggctttttggtgcagatgctatccagagagtgtcacaaaaatcgggagatgctctccgctttacaaaccctttcaagagacccagatatcttcccccgacagacggagaagactaccgacaagaagaagacttcgctttacaggaaaaaagaaggcgcacatccacagaagaagtccaggacccggagagccccccgcaaagcgcgccgctcctacagcagcagcagcagcagcgggagctctcactccagctcgcggagcagcagcgactcggagtccaactccgattcatcctccaagaagtcctcaaaacgcaagcgggtctccacctaaaccccctattattaggcccgccacaaacaaggtctatctctttgagccccccaaaggcctcctcccaatagtgggcagagaggcctgggaggacgagtacaccacttgcaagtactgggaccgtccccccagagtgaaccacttagacatgcccagctatccctggatgcccacaaacttcaaagtcagcttcaaacttggatttaaaccctaaataaaaatttcaaggccgtacactgttcacttgtcggtgtctacctctataagtcactaagcactccgagcgcagcgaggagtgcgaccctagggggtgggtgcaacgccctcgg

SEQ ID NO: 1788 - protein, 765 aa, Alphatorquevirus sp.
MAWRWWWQRRWRRRPWPRRRWRRLRRRRPRRPVRRRRRRATVRRRRWRGRRGRRTYTRRAVRRRRRPRKKLVLTQWSPQTVRNCSIRGIVPMVICGHTRAGRNYALHSEDFTTQIRPFGGSFSTTTWSLKVLWDEHQKFQNRWSYPNTQLDLARYRGVTFWFYRDQKTDYIVQWSRNPPFKLNKYSSSMYHPGMMMQAKKKLVVPSFQTRPKGKKRYRVTIRPPNMFNDKWYTQEDLCPVPLVQIVVSAASLLHPFCSPQTNNPCITFQVLKDIYSECIGVNSSKETTYSILQNKLYSECTYFQTTQVLAQLSPVFQPAKKPVGGRVESTTTTLGNKVPELKPNNEFHTGNNPVFGMCSYKPTTEILTKANDWFWENLMVRSDLHSTYGKATLKCMEYHTGIYSSIFLSPQRSLEFPAAYQDVTYNPNCDRAIGNRVWFQYSTKMDTNFNELQCKCVLTNMPLWAAFNGYPDFIEQELSISTEIHNFGIVCFQCPYTFPPCYDKTNPNKGYVFYDTTFGNGKMPDGSGHIPVYWQQRWWIRLAFQVQVMHDFVLTGPFSYKDDLANTTLTARYKFRFKWGGNIIPEQIIKNPCQRQQSLGSYPDRQRRDLQVVDPSTMGPIYTFHTWDWRRGLFGADAIQRVSQKSGDALRFTNPFKRPRYLPPTDGEDYRQEEDFALQEKRRRTSTEEVQDPESPPQSAPLLQQQQQQRELSLQLAEQQRLGVQLRFILQEVLKTQAGLHLNPLLLGPPQTRSISLSPPKASSQ

SEQ ID NO: 1789 - protein, 182 aa, Alphatorquevirus sp.
LRAARGNSGSGLAGLWARLLKRTSPAMFLGRVWRKQKRKVLLLAVRATQKTSSMSIWRPPLGNVSYRERNWLQAVEGSHNSFCGCGDFILHLTNLAARFALQGPPPEGGPPRPRPPLLRALPAPEIRRETRTENPGASDEPWPGDGGGRDDGAAARGPADGGDAYDAGDLDDLFAAVEEEQQ

SEQ ID NO: 1790 - protein, 187 aa, Alphatorquevirus sp.; identical to SEQ ID NO: 1058

SEQ ID NO: 1791 - DNA, 3000 bp, Alphatorquevirus sp.
cgctacgccttcggctgcgcgcggcccgcagtcaaggggcaattcgggctcgggactggccgggctatgggcaaggctctgaaaaaagacatggttttcttgggtcgcccctacagaaagaaaagggcactgccactgtctggcctgccaaatcctaagaagaaaccacctatgagctggcgacctcccgtacacaatgccccgggcatcgaaagaaacctctacgaggctttctaccgcacacacgcggctagctgtggctgtggggatcttcttggccatcttactcgcctggttgatcgctatggcactccgccgcgccctgggcctcccacagacccgccacctcgcctaagggccctgcccgcgccgcctcctgctccatcccgtaaccgagacccagtatggcctggtggggatggaggagacgctggcggcgccgcccctggtggagacgccgccgccgacgaccaatacgccgcagaagaaatcgagcagcttatagccgccgccgaggaagacgtacagtaaggagaaaaacatgggggaggcggaggagacgcagacgcacttacagacgcaggcggactgtcagactcagacgcagacgcagaaaaaagttagtactgactcagtggaaccccccctatgtcaggcgctgctatataaaaggggtcatgcccgtggtaatctgtggacagaacaggtctagttttaactatgccatccactccgacgactaccagctacaggtgctacctttcggaggaggcatgagcaccataactattagcctaaaagtactatatgatgagtttaccaggcacctaaaccggtggtcgtactccaacgaccagctagacctgtgcagataccggggctgcaccctaagagtgtacagagatacctcagtagactacataatgacttttgacaccatacctcccatgaaaatgaacgaactgacggcagccaacactcacccaggcttgcttatgctacagaaatacaaaatactaatacccagctggaaaactagacccaagggcaaaaaatataaaagagtaagaatactcccccctaagatgtttgaagacaaatggtactctcagagcgacctgtgcccagttccgcttgtcagtttgcggtttaccgcagctagcttccagtatccgttctgctcaccacaaacgaacactcctattactacattccaagtattgcagccagaatacaatgaggtaataggttaccccacagggtacgacacaatagcttcctcaaaatttgaggagtggctttatggcaaatgctctcactatcaagcatttgccacagaagcccaccttagacctagaacaactacccctacaggaaagcccatagcaaatgataataccactagtacaatatggtcgagcactactacaaactacatgatacccaacgataacagctacaagaactggggaaactggtggaaatatgacttttatgccacaaaatcagacagcctttatggctactgctcctttactcccaaagaccaaaaaggacgtcaaaacattattaatataagaaatgccaactttcactacttaaccacctgggacactaataacacaaaccacattaacaccacatatgcaaacgctaagtaccagcagtatgaataccactgtggctggtactcttccatgtttatatctccacacagataccaactacaatttcccacagcatactttgactgcacatacaaccccctaaacgaccatggaaaaggcaacatgatttggttccagtatctcacaaaacctactacagaatttatagaaaaacaatgtagatatgttcttagagacattcccctgtgggccatggcccacgggtactctgactacatagactctcagctaggacccactcaagaccacgagacagtgggcctagtctgtgtcatatgtccctacactagacccagactatactcacaagaaaaacccaactacggttttgtattttatgactccctatttggccagggaaaaatgccagatggcacctcacaaataagcagattctgggcacaaagatggagagtatatctaggctttcaagaacaagtactaaacgacctcagcaaaagcggaccgtgggcatacagagacgaataccacagcaccacactgaccatgggctacacctttaaatttaactgggggggcgacatgatgtttccgcaggttgtcaaaaacccctgctcaaacacaggactggctcccggtatcgatagacagcgtcgcgaaatacaagtcattgacccgctcaccgtgggaccccaatgggttttccacccctttgacatcagacgaggactctttactccaaaagctatcaaacgagtgtctgaaaaaccaattgatgatgagccatatatcaaaattccaaaacgacctcgttttattacagcctcagagtaccaaaagcaagaaggcagttactattcaggggaaagaaaatcggagctctcggaagaagagagcgaagccgaagtccaagagacgtcggtacagacacagctcagagtccagctccgagagcagcagctcatcagcaagcagctccgagagctgtgggtccaactcgccaagacccagagcaatacgcacctaaaccccctattattttcccgagcataaataaagtgtacatgtttcccccaccacaggttaaaaggcctcccagcaccggagactgggagaccgagtatgctgcctgcaaggcctttgatagaccccctcgctcagacctatcccgtcccccctgctacccctggatgcctccaactttcaatgtaaatttcagccttaaattcaaataaatgttggccgtgggagttacactggtcggtgtctacctctataagtcaccaagcactccgagcgtcagcgaggagtgcgacccttaggggtgggtgcaacgccctcggcggccgcg

SEQ ID NO: 1792 - protein, 765 aa, Alphatorquevirus sp.
MAWWGWRRRWRRRPWWRRRRRRPIRRRRNRAAYSRRRGRRTVRRKTWGRRRRRRRTYRRRRTVRLRRRRRKKLVLTQWNPPYVRRCYIKGVMPVVICGQNRSSFNYAIHSDDYQLQVLPFGGGMSTITISLKVLYDEFTRHLNRWSYSNDQLDLCRYRGCTLRVYRDTSVDYIMTFDTIPPMKMNELTAANTHPGLLMLQKYKILIPSWKTRPKGKKYKRVRILPPKMFEDKWYSQSDLCPVPLVSLRFTAASFQYPFCSPQTNTPITTFQVLQPEYNEVIGYPTGYDTIASSKFEEWLYGKCSHYQAFATEAHLRPRTTTPTGKPIANDNTTSTIWSSTTTNYMIPNDNSYKNWGNWWKYDFYATKSDSLYGYCSFTPKDQKGRQNIINIRNANFHYLTTWDTNNTNHINTTYANAKYQQYEYHCGWYSSMFISPHRYQLQFPTAYFDCTYNPLNDHGKGNMIWFQYLTKPTTEFIEKQCRYVLRDIPLWAMAHGYSDYIDSQLGPTQDHETVGLVCVICPYTRPRLYSQEKPNYGFVFYDSLFGQGKMPDGTSQISRFWAQRWRVYLGFQEQVLNDLSKSGPWAYRDEYHSTTLTMGYTFKFNWGGDMMFPQVVKNPCSNTGLAPGIDRQRREIQVIDPLTVGPQWVFHPFDIRRGLFTPKAIKRVSEKPIDDEPYIKIPKRPRFITASEYQKQEGSYYSGERKSELSEEESEAEVQETSVQTQLRVQLREQQLISKQLRELWVQLAKTQSNTHLNPLLFSRA

SEQ ID NO: 1793 - protein, 154 aa, Alphatorquevirus sp.
MGKALKKDMVFLGRPYRKKRALPLSGLPNPKKKPPMSWRPPVHNAPGIERNLYEAFYRTHAASCGCGDLLGHLTRLVDRYGTPPRPGPPTDPPPRLRALPAPPPAPSRNRDPVWPGGDGGDAGGAAPGGDAAADDQYAAEEIEQLIAAAEEDVQ

SEQ ID NO: 1794 - protein, 56 aa, Alphatorquevirus sp.
MFPPPQVKRPPSTGDWETEYAACKAFDRPPRSDLSRPPCYPWMPPTFNVNFSLKFK

SEQ ID NO: 1795 - DNA, 2999 bp, Alphatorquevirus sp.
cccctgccggaggtgagtttacacaccgcagtcaaggggcaattcgggctcgggactggtcgggctatgggcaaggctcttaaaaaagcatgtttctcggtaaaatttacagaaagaaaaggaaagtgccactgtacggcctgccaactccaaagaaaaaaccacctactgctatgagccactggagcagacccgtccaccatgcaacggggatcgaacacctctggtaccagtctgttattaacagccattctgctagctgcggttgtggcgatcctgtacaccactttacttctcttgctcagaggtatggctttgccccaactccccgcgccccgccagtagccccaacgcccaccatccgtagagccaggcccgcgcctgccgctccggagccccgtgccctgccatggcatggggatggtggagaagaaggcgcaagtggtggtggaggcgccggttcgcccgaggcagacttcgcagacgacggattagacgccctcgtcgccgcactcgacgaagaacagtaaggaggcgcagacaatggaggagggggcgacccagacgcagactgtttaagcgaaagagacgctttaaaagacgcagacgaaaagctaagataaaaataacccagtggcagcctagctctgtaaaaagagcctttgtaataggctactttccaatggtaatatgtggtccaggaaggtggtcagagaactttaccagccacatagaggacaaggtagccataggaccctttgggggaggacacagcaccagcagatggtccctcaaagtactgtacgaagaattccagaagcaccacaacttctggacccaaagcaacaaagaactagaactagtaagatactttggcagcacgtggagattctatagacacgaagacgtagactatatagtttactacagcagaaagagtcccctaggaggaaacatactaacagcacccagcctgcaccccggagcagccatgttgagcaaacacaaaataatagtacctagctttaaaaccagaccaggaggcaaaccctccataaaagttaaagtaaagcccccaactacactaatagataagtggtactttcaacatgacatttgtgacactacactactaaacatgaacgttgtactatgcaacttgcggtttccgttctgctcaccacaaacgaacaacccttgtgtcaccttccaaatattgcatgaggtttaccacgacttcctctctataactgacagccggttacttagcacagacgcaaatgcatggaaattgtactataaacaattcttaaatgctgtctttactacagagaaatcagccaacaaactaaatacagcactaacagagggatcttttcacgccccgcaaatacaaaaagacaaaacagctttaggaaataactactttaaaactaaagacgcactatggggagacccaatattcttagcaggctcacaacaaacaggaaacccaacattagacaaactaaaagagaaaatagttgaaaatgcagacaactaccttcaaaaagtaaaacaagagttttcacaaaccactttagcaaccacaatgcacggcatgttcacacactggacaggcatgtacagcccagcctttttagactataacagaataagtccagaaattcccggtgtatacaaagacataatctataaccccctaacagacagaggcataggtaacgcagtatggatagactactgcagcaaaaaaggaacaaattacgaccccaaagccagcaaatgccacatagcagacctaccgctgtggatggcagtttttggtatagtagactggctaaaaaaagacactggaaactggggcatacctgcctggtccagaataattattaaatgcccctacacttacccgaaactattagacagcacaaatgaatcaataggctttgtacccataggctacaactttgccagaggcagaatgcccgacggctcacactacatacccatacaaatgagacacaagtggtaccccaacctactaaatcaacaggcagtactagaagacttaagtgaaagcgggccctttgcctacagagagaaaacaaactctgccaacataaacgtaaaatacaaattcaggttccattttgggggcaaccctgtgtccgaacagattgttgcagacccatgcaaacaacccacctttgaaatgcccggaaccagtacactccctcctcgactacaagtcacggacccgaaactcctcggcccgcactacacattccacagctgggacaaaagacgtgactactatagcagacgagctattaaaagaatgtcagaacaacaagaaacttctgagtttttattctcaggcccaaaaaaacccagagtcgatctggacgcagtgcagcctgtcgaaaaagactcttcaccgaaacaaagaaaacagagaccctgggaaacgagcgagagcgaggaagagacagaagccctctcggaagaagaagagacgggctcggtccaccagcagctcaagcagcagctcagggagcaaaagcagctcagacagggaatccagtgcctcttcgagcagctaataaaaacccagcagggagtccacctagatccttccctcttgtaggccccaggcagtggctgtttcccgaaagaaagccagcccctgcccctagctctggagactgggccacagagtacctagcagctagagtgtttgatagacccccaagaagcaaccttaaagatacaccctactacccctacataaaaaaccagtacaatgtgtattttgacctcacattcgaataaagtgcagcttcaaacttgcaaggccgtgggagtttcactggtcggtgtctacctctaaaggtcactaagcactccgagcgtcagcgaggagtgcgacccttccccctgactcaacttcttcggagccgcgcgctacgccttcggctgcgcgcggcacctcagac

SEQ ID NO: 1796 - protein, 746 aa, Alphatorquevirus sp.
MAWGWWRRRRKWWWRRRFARGRLRRRRIRRPRRRTRRRTVRRRRQWRRGRPRRRLFKRKRRFKRRRRKAKIKITQWQPSSVKRAFVIGYFPMVICGPGRWSENFTSHIEDKVAIGPFGGGHSTSRWSLKVLYEEFQKHHNFWTQSNKELELVRYFGSTWRFYRHEDVDYIVYYSRKSPLGGNILTAPSLHPGAAMLSKHKIIVPSFKTRPGGKPSIKVKVKPPTTLIDKWYFQHDICDTTLLNMNVVLCNLRFPFCSPQTNNPCVTFQILHEVYHDFLSITDSRLLSTDANAWKLYYKQFLNAVFTTEKSANKLNTALTEGSFHAPQIQKDKTALGNNYFKTKDALWGDPIFLAGSQQTGNPTLDKLKEKIVENADNYLQKVKQEFSQTTLATTMHGMFTHWTGMYSPAFLDYNRISPEIPGVYKDIIYNPLTDRGIGNAVWIDYCSKKGTNYDPKASKCHIADLPLWMAVFGIVDWLKKDTGNWGIPAWSRIIIKCPYTYPKLLDSTNESIGFVPIGYNFARGRMPDGSHYIPIQMRHKWYPNLLNQQAVLEDLSESGPFAYREKTNSANINVKYKFRFHFGGNPVSEQIVADPCKQPTFEMPGTSTLPPRLQVTDPKLLGPHYTFHSWDKRRDYYSRRAIKRMSEQQETSEFLFSGPKKPRVDLDAVQPVEKDSSPKQRKQRPWETSESEEETEALSEEEETGSVHQQLKQQLREQKQLRQGIQCLFEQLIKTQQGVHLDPSLL

SEQ ID NO: 1797 - protein, 146 aa, Alphatorquevirus sp.
MFLGKIYRKKRKVPLYGLPTPKKKPPTAMSHWSRPVHHATGIEHLWYQSVINSHSASCGCGDPVHHFTSLAQRYGFAPTPRAPPVAPTPTIRRARPAPAAPEPRALPWHGDGGEEGASGGGGAGSPEADFADDGLDALVAALDEEQ

SEQ ID NO: 1798 - protein, 123 aa, Alphatorquevirus sp.
LGNERERGRDRSPLGRRRDGLGPPAAQAAAQGAKAAQTGNPVPLRAANKNPAGSPPRSFPLVGPRQWLFPERKPAPAPSSGDWATEYLAARVFDRPPRSNLKDTPYYPYIKNQYNVYFDLTFE

SEQ ID NO: 1799 - DNA, 2999 bp, Alphatorquevirus sp.
gcggccgcgcgctacgccttcggctgcgcgcggaaggggcaattcgggctcgggactggccgggctatgggcaaggctcttaaagcgtacgtcccccgctatgtttctcggcagggtgtggaggaaacagaaaaggaaagtgcttctgctggctgtgcgagctacacagaagacatcttccatgagtatctggcgtccccccctcgggaatgtctcctacagggagagaaattggcttcaggccgtcgaaagatcccacaattctttttgtggctgtggtgattttattcttcatctcactaatttggctgcacgctttgctcttcaggggcccccgccggagggtggtccacctcggccgaggccgccgctcctgagagcgctgccggcccccgagatccgcagggagacgcgcacggagaacccgggcgcctccgatgagccatggcctggcgatggtggtggcagagacgatggcgccgccgcccgtggccccgcagacggtggagacgcctacgacgccggagacctcgacgacctgttcgccgccgtcgaagaagagcaacagtaaggaggcggaggtggaggggcagacgtgggcgacgcacatacacccgacgcgcggtcagacgcagacgcagacccagaaagaaacttgtactgactcagtggagcccccagacagtcagaaactgttcaataaggggcatagtgcccatggtaatatgcggacacaccagagcaggtagaaactatgcccttcacagcgaggactttaccactcagataagaccctttggaggcagcttcagcacgaccacctggtccctaaaagtgctgtgggacgaacaccagaaattccaaaacagatggtcctacccaaacacacagctggacctagccaggtacaggggggtcaccttctggttctacagagaccagaaaacagactatatagtacaatggagcagaaatcctccctttaaactaaacaaatacagcagctccatgtaccaccctggcatgatgatgcaggcaaaaaagaaactggtggtccctagtttccagaccagacctaaaggcaaaaagagatacagagtcacaataaggccccccaacatgttcaatgacaagtggtacactcaagaggacctgtgtccggtacctcttgtgcaaattgtggtttctgcggcgagcctgctacatccgttctgctcaccacaaacgaacaacccttgcatcactttccaagttttgaaagacatttactcagaatgcataggagttaactcttccaaagaaacaacatattcaattctacaaaacaagctttactcagaatgcacatactttcaaaccacacaagttttagctcagttatctccagcatttcagcccgcaaaaaaacctgtatcaaacagcgaagacgcaatcaccacaacactaggcagcaaagtaacagagctaaaaccaagtggctccttccacacaggcaataacccagtgtttggcatgtgttcatataaacctagcaaagagatactagagaaagcaaacaactggttctgggaaaatcttatggtacaaaatgatttacattccacatatggcaaggcaaaccttaaatgcatggagtaccacacaggcatttacagctccatattcctaagtccccaaaggtccctagaattcccagcagcataccaagatgtcacatacaacccaaactgtgacagagccataggcaaccgtgtatggttccaatatagcacaaaaatggacacaaactttaatgaactacagtgtaaatgtgtgttaacaaacatgcccttgtgggcggcctttaacggctacccagactttatagaacaagaactcagtatcagcacagagatacacaactttggcatagtatgtttccagtgcccctacacctttcccccctgctatgacaaaacgaacccaaacaaaggctacgtgttctatgacaccacctttgggaacggaaaaatgccagacgggtcaggccacattcccgtctactggcagcagagatggtggatcagactagcctttcaggtacaagtcatgcatgactttgtactcactggcccctttagctacaaagatgacctagcaaacaccacactcacagccaggtacaagttcagattcaaatggggcggtaatatcatccccgaacagattatcaagaacccgtgtcagagacagcagtccctcggttcctaccccgatagacaacgtcgcgacctacaagttgttgacccatcaaccatgggcccgatctacaccttccacacatgggactggcgacgggggctttttggtgcagatgctatccagagagtgtcacaaaaatcgggagatgctctccgctttacaaaccctttcaagagacccagatatcttcccccgacagacggagaagactaccgacaagaagaagacttcgctttacaggaaaaaagaaggcgcacatccacagaagaagtccaggacccggagagccccccgcaaagcgcgccgctcctacagcagcagcagcagcagcgggagctctcactccagctcgcggagcagcagcgactcggagtccaactccgattcatcctccaagaagtcctcaaaacgcaagcgggtctccacctaaaccccctattattaggcccgccacaaacaaggtctatctctttgagccccccaaaggcctcctcccaatagtgggcagagaggcctgggaggacgagtacaccacttgcaagtactgggaccgtccccccagagtgaaccacttagacatgcccagctatccctggatgcccacaaacttcaaagtcagcttcaaacttggatttaaaccctaaataaaaatttcaaggccgtacactgttcacttgtcggtgtctacctctataagtcactaagcactccgagcgcagcgaggagtgcgaccctagggggtgggtgcaacgccctcg

SEQ ID NO: 1800 - protein, 765 aa, Alphatorquevirus sp.
MAWRWWWQRRWRRRPWPRRRWRRLRRRRPRRPVRRRRRRATVRRRRWRGRRGRRTYTRRAVRRRRRPRKKLVLTQWSPQTVRNCSIRGIVPMVICGHTRAGRNYALHSEDFTTQIRPFGGSFSTTTWSLKVLWDEHQKFQNRWSYPNTQLDLARYRGVTFWFYRDQKTDYIVQWSRNPPFKLNKYSSSMYHPGMMMQAKKKLVVPSFQTRPKGKKRYRVTIRPPNMFNDKWYTQEDLCPVPLVQIVVSAASLLHPFCSPQTNNPCITFQVLKDIYSECIGVNSSKETTYSILQNKLYSECTYFQTTQVLAQLSPAFQPAKKPVSNSEDAITTTLGSKVTELKPSGSFHTGNNPVFGMCSYKPSKEILEKANNWFWENLMVQNDLHSTYGKANLKCMEYHTGIYSSIFLSPQRSLEFPAAYQDVTYNPNCDRAIGNRVWFQYSTKMDTNFNELQCKCVLTNMPLWAAFNGYPDFIEQELSISTEIHNFGIVCFQCPYTFPPCYDKTNPNKGYVFYDTTFGNGKMPDGSGHIPVYWQQRWWIRLAFQVQVMHDFVLTGPFSYKDDLANTTLTARYKFRFKWGGNIIPEQIIKNPCQRQQSLGSYPDRQRRDLQVVDPSTMGPIYTFHTWDWRRGLFGADAIQRVSQKSGDALRFTNPFKRPRYLPPTDGEDYRQEEDFALQEKRRRTSTEEVQDPESPPQSAPLLQQQQQQRELSLQLAEQQRLGVQLRFILQEVLKTQAGLHLNPLLLGPPQTRSISLSPPKASSQ

SEQ ID NO: 1801 - protein, 171 aa, Alphatorquevirus sp.; identical to SEQ ID NO: 997

SEQ ID NO: 1802 - protein, 187 aa, Alphatorquevirus sp.; identical to SEQ ID NO: 1058

SEQ ID NO: 1803 - DNA, 2999 bp, Alphatorquevirus sp.
cggcgctacgcgcttcgcgctgcgccggacatcaaggggcaattcgggctcgggactggccgggccccgggcaaggctcttaaaaaatgcactttcgcagaatttcagagaaaaggaaactgctactgctacctgtgcactctgcatcgcagacacctgccatgagcttcagggcgcccactctaaatgccggtcaacgagagcagctatggttcgagtccatcgtccgatcccatgatagttactgcgggtgtggtaacactgtcgctcattttaataatattgctactcgctttaactacctgcctcttacctcttcgcctctggacccttcctcgggaccgccacaacgccgcccggcgctccgcgcactcccggctctgccagcggcaccctccacccccactactagccaaccatggcgtggtggggcagatggagaaggtggccgcggcgccggtggaggagatggcggcgccgccgtagaaggagactaccagcaagaagaactcgaagagctgttcgcggccttggaagacgaccaagaaagacggtaaggaaacgccggcgccgtcccagacgcacctaccgacgggggtggcgacgcagacggtacataagacgcaggaggggacgcaaaaagaaactgactctcactatgtggaaccctaacatagttaggagatgtaacataaagggagggctgcctctactgatgtgtggagagaacagagccgcatttaactatgcctaccactcagaagactacacagagcagccattcccctatggtggaggaatgagcaccaccacattctcactcagagccctgtacgaccagtacacaaagcacatgaacagatggacgttctcaaacgaccagctagacctggccagatacaggggctgcaaattcaggttctacagacaccccacctgtgactttatagtacactacaacctggttcctcctctaaagatgaaccagttcacaagtcccaacacgcacccaggactactgatgctcactaaacacaagataataatacccagcttcttaacaagaccagggggtcgcagattcataaagataagactgcccccccctaaactctttgaagacaagtggtacactcagcaggacttgtgcaaacaaccgttagtaactctaaccgcaaccgcagcttccttgcggtatccattctgctcaccacaaacgaacaaccccaactgtaccttccaggtactacgcaagaattaccacaaagtcataggcacttcctcaaaaaactctgaggatgttacaccctttgaagactggctctataatactgcctcacactatcaaacctttgccactgaggcacaagtgggcagaatacctttctttaatccagatggctccaaaaaccaacaagcagaagcatggcaaaacaaatggtctaaaaaatcagaaacatggacaggaacaagcacatatccccacacgtcaacacagcaaatgtacaaaatcccttatgacagtaactatggctttccaacttacaaaccaatgaaagactacatgttagaaagaagagcatggagcttcaaatatcaaacagacaatccagtcagtaaaaagatatggccacaacctaccacaacaaaaccaacagtagagtactatgaataccacgcaggctggttcagtaacatattcataggccccaacagatacaatttacaatttcagacagcatatgtagacaccacatacaatccactaaatgacaaaggaaaaggtaacaaaatatggttccagtaccacagcaaagtaaacacagacctcagagacagaggcatctactgcctactagaagacatgcccctatgggccatgacctttggatacagtgactatgtcagcacacagctaggcccaaacgtggaccacgagactcaaggcctggtgtgcataatatgcccatacactgagccccccatgtatgacaagactaacccaaacagtggctacataacatatgacacaaactttggaaatggaaaaatgccctcaggaaggggccaggttccagtatactggcaatgcagatggaggcccatgctgtggttccagcagcaagtacttaatgacatctcaaagagcggaccgtacgcatacagagacgaactgaaaaactgttgcctgacgacatactataacttcatttttaactgggggggcgacatgtattacccgcaggtcattaaaaacccctgcgcagacagcggactcgttcccggtaccagtagattctctcgagaagtacaagtcgttagcccgttgtccatggggcctcagtacatcctccacctcttcgaccaaagacgcgggttctttagttcgaacgctcttaaaagaatgcaacaacaacaagaatttgatgagtcttttacagtcaaacctaagcgacccaaactttctacagccgccctcgtcgagcaacaagaaggagactcgacttcagcagaaagaaaatcgccgaccccacaagaagaagcccaggaagaagtccaccagacgccggagatccagctccacctccagcgaaacatcagagaacagctgtacatcaagcagcagctccaactcctgctcctccaaatattcaaaacacaagcaaatattcacatgaacccacgttttataagcccataataacctacaacatgtttggggaacccaatcctcaccctccaactagccaagactggcaaatggagtacgaggcctgcaaaatttgggacaggcccgctagacaaaacctaaaagacacccctttctatccctggatgcctaagcctcccccccaatactctgtaacatttaagcttgggttcaaataaacaaggccgtgcactgttcacttgtcggtgtctacctcttaaggtcaccaagcactccgagcgtcagcgaggagtgcgacccttcctcaaggggcaactccctcgaagtc

SEQ ID NO: 1804 - protein, 760 aa, Alphatorquevirus sp.; identical to SEQ ID NO: 1325

SEQ ID NO: 1805 - protein, 156 aa, Alphatorquevirus sp.; identical to SEQ ID NO: 1326

SEQ ID NO: 1806 - protein, 58 aa, Alphatorquevirus sp.; identical to SEQ ID NO: 524

SEQ ID NO: 1807 - DNA, 2999 bp, Betatorquevirus sp.
cgggagccgaaggtgagtgaaaccaccgtagtctaggggcaattgccgaaggtgagtgaaaccaccgtagtctaggggcaattcgggctagttcagtctagcggaacgggcaacaaactgaaaacatctttttttcttacagatgtcaagttcttactacaaaaaaacaaaatatacatcaagagaacaagaaacagcatggcttaacattgttattgctactcatgatatgttttgcttttgcgatacaccttggaatcatcttttacaaggcgtgttacaaagaggatcaacctttaaattggatgcaaaaagcattagattaatgcaaaaatgccttatttctacaaccgacgctggtaccgacccagaacaacctacaacttcaaaagacgataccgcaaacgctggtttagaccttttagatggagaactagaagaactcttcgcaaaaaaagaagaagaccaagggtaagaaaaagaactttttttaaaaaaaagaaactaaaaaaattaaaactatttcaatggcaaccagagcttattagacactgtaaaattaaaggactatttactatgtttcaaggagctagagaacgttggtcaaacaactatatacagtacagagactcttttactcctgaattttttcccggaggcggaggttggggaatatttgtatttaatttaggagcactgtttgatgaatttctaagaattagaaactggtggacattttcaaatattaatttgcctttagtacgatacttaaaatgtaatgtaaagttttatagagatgattttgttgactatattgtaacatataacagaaacttccccatgacagactctgctctacaccatgcaaatgctcaacctagcagaatgctttcacaaaaacataaaattatagttcagagtagagcacacgcacaaaacaagaaaccatacgtacgcagacgcataaatcctcccagacagttaattaacaaatggttttttcaaagagaaatggtaaacacaaacttaataatgtttacagcctcagcagcatcactatcagactttgacgttagttatcaaaaaacaacaaacaacattacactaataaccttaaatccaaaaatgtttccacacattaactatgacacacataacacaaacggctggcaacctaaatctaatctttatttttatggcacaaacagcccaaccgttgatacaaacgcactaaaccccatagaacacgttaaatactcagaactcatttacctaggtgaagcaaatgcactaagaacaggagagccacttggacaaaaaaagagtcaaagagaagtaacacaattctttgccaacaaacaaaactggggaaatatttttcacgaaaaatacttaaaccacgaatggcatatacttactagcaatgtacaacatactaactggaatataacagatacaacaaacaaacaaatagaatcaactaaattcaacttaatgatagaacctatttacattaaagtaagatataacccagatagagacacaggagaaaacacaaaagtatactttgttcccaattttcaacaattaacagaatggaaagaacctgaaaatgaagacttaaagttttcaggctttccactatggatgttactatggggatggccagactggcaaaaaaaattgtcccttataaaccaaatagatgaacactatattttaattgtagaaagtccatactttgaacctaaacaaagcaaatacatgtttttagatgtagactttattgaaaataaaaaactataccccgaacacggagataacgatacagatgctaaaccactattaacagatcaattatcatggcatccaaaatttaaataccaacaaaaatctgtagatgctatttgtatgtgtggacctggggcccctaaataccctaatttaaaaagtgtacaagctcatatgggatactctttttcatttaagtggggaggcagccctagttccatggaaacaattgcaaacccagcaaaacaacccagctatcccgtccccggtaacctcccacaaggacttcaaatccaggatccaacatacgacccctcaaactacatctacacttgggataccagaagagaattccttacacaaaaagctgttaaaagacttacagaagaccaaacaacttacacacctgttttaccaattacagaatcctacatcaatccaaacccacgagaagcaacatcaaaagacatcttggaagcactcatccaagcacagacaacggaagaagagaaagagagaaaagtacagctctaccagcagctccgagagcagcaacaagtactccacaacagactcagacagttaatactgtcaaatataaaataataaaccaaaaatgtaacatttctttgtttggagatgaacctcctaaaaaaaataggagatttactcctaaagagtttcaagatgaattacttttagcacgtatatttcatagacgccctagaacattcttttatgataagcctacctatgactggttaccccccactcctttagtaaactttgatcttggatttaaacaataaaatttcaaggccagcaaatattcactctcggtgtctctttattaaagtttaaacttaaacaaacatccactgcctccctaatacgcaggcgcacaagggggctccgcccccttaaacccccagggggggcaagccccccctaacccccccagtaaccacaaaatttgcattgccgaccacaaactgacaggaaaaccacaaaatttgcattgccaaccacaaacggctacatgcaaattaacttccacatttttcacctacttccctaaaaattaattagtaatcaccgtcacaaagggaggagtcacttacctatataactaactacacttccgaatggctgagtttatgccgctagacggagggagcatcagtcactgactgcgacctgaacttggg

SEQ ID NO: 1808 - protein, 687 aa, Betatorquevirus sp.
MPYFYNRRWYRPRTTYNFKRRYRKRWFRPFRWRTRRTLRKKRRRPRVRKRTFFKKKKLKKLKLFQWQPELIRHCKIKGLFTMFQGARERWSNNYIQYRDSFTPEFFPGGGGWGIFVFNLGALFDEFLRIRNWWTFSNINLPLVRYLKCNVKFYRDDFVDYIVTYNRNFPMTDSALHHANAQPSRMLSQKHKIIVQSRAHAQNKKPYVRRRINPPRQLINKWFFQREMVNTNLIMFTASAASLSDFDVSYQKTTNNITLITLNPKMFPHINYDTHNTNGWQPKSNLYFYGTNSPTVDTNALNPIEHVKYSELIYLGEANALRTGEPLGQKKSQREVTQFFANKQNWGNIFHEKYLNHEWHILTSNVQHTNWNITDTTNKQIESTKFNLMIEPIYIKVRYNPDRDTGENTKVYFVPNFQQLTEWKEPENEDLKFSGFPLWMLLWGWPDWQKKLSLINQIDEHYILIVESPYFEPKQSKYMFLDVDFIENKKLYPEHGDNDTDAKPLLTDQLSWHPKFKYQQKSVDAICMCGPGAPKYPNLKSVQAHMGYSFSFKWGGSPSSMETIANPAKQPSYPVPGNLPQGLQIQDPTYDPSNYIYTWDTRREFLTQKAVKRLTEDQTTYTPVLPITESYINPNPREATSKDILEALIQAQTTEEEKERKVQLYQQLREQQQVLHNRLRQLILSNIK

SEQ ID NO: 1809 - protein, 110 aa, Betatorquevirus sp.
MSSSYYKKTKYTSREQETAWLNIVIATHDMFCFCDTPWNHLLQGVLQRGSTFKLDAKSIRLMQKCLISTTDAGTDPEQPTTSKDDTANAGLDLLDGELEELFAKKEEDQG

SEQ ID NO: 1810 - protein, 59 aa, Betatorquevirus sp.
LFGDEPPKKNRRFTPKEFQDELLLARIFHRRPRTFFYDKPTYDWLPPTPLVNFDLGFKQ

SEQ ID NO: 1811 - DNA, 2998 bp, Alphatorquevirus sp.
tcagacccccgctcgtgctgacacgctgcagtcaaggggcaattcgggctcgggactggccgggctatgggcaaggctcttagggtcatcgctctttaaaacatgtttctcggcaggccttacagaaagaagaggcaagtgccactgcctggcgtgcaccatccaccgcacccacggcctagcatgagccaccactggcgagagcccatcgacaatgtctccaaccgggagaggcactggctcgaaagcgttctcagaagccaccgagctttttgtggttgccgggatcctgtgcttcattttactaatctggttgcacgtcacaatcttcagggcggtggtccctcggcaggtaatcttagggatccgccgccgctgaggagggcgctgccgccaccgccgtcacccagaccgccatgtcctggtggggatggcgccgccgatggtggtggaaaccacggaggcgatggagacgcaggagggcgcgccgcccgagacgagtacggccgagacgatatagaagacctgctcgccgctatcgaggcagacgagtaaggaggcgccgcgcggggggctggcgtgggcgacgtagatactcccgacgctatagcagacgactgactgtcaggcgaaagaaaaagaaactaacccttaagatctggcagccacaaaatatcaggaaatgtaaaataagaggtctcctgcccctcctgatatgcggacacgggcgctcagctcacaactatgccatccactcggatgacaagaccccccagcaggagagtttcgggggcgggctcagcaccgtcagcttctctcttaaagtactatttgaccagaaccagaggggacttaacaggtggtcgaccagcaacgaccagctggacctcgcccgatacctgggctgcacgttctggttctacagggacaaaaagactgactttatagtgcagtatgatatcagctctccatttaaactagataaaaacagcagtcccagctaccaccccttccttctaatgaaggctaaacacaaggtgcttatccccagctttgacactaaacccaagggcaggaaaaagataaaactcagaatacagccccccaaaatgttcatagacaagtggtacactcaggaggacctgtgccccgttattcttgtgtcatttgcggtgagcgcagcttcctttacacatccgttctgctcaccactaacgaacaacccttgcatcaccttccaggtgttgaaagaattctattacagtgccatggggtacggcacaccagaaaccacaatgaccacaatatggaacaccctctacgcaactgccacttactatcagtcccacctcactcctcagtttattagaatgcccaccaaaaatcctgataatacagagaacacacaagcccaaaactttaatcagtgggttgataatacatttaaaacaggcaagttagtcaagtacaactatcctcaatataacccagacatagacaagttaaaacaactaagaaagtactactttgaatgggaaactaagacaactggggtggcagtacctcctacatggaccacccccacaataaattggtacgagtaccacataggcatgttcagccccattttcttatcaccctatagatcagcaaacctcgaattccccagagcatatcaagatgtaacttacaatcccctcacagacaagggggtgggcaaccgcatgtggtttcaatacaacactaagatagacacccagttcgaacccagatcctgtaaatgtgtcctagaggacatgcccctgtacgccatggcctatggatactcagattttctagaacaagagataggagagtaccaggatctagaggccaacggattcgtgtgcgtcatctgtccatacaccaagccccccatgtacaacaagcacaacccccaacaggggtacgtgttctatgactctcagtggggcaatggcaagtggatagacggaaccgggtttgtccccatatactggatgacaagatggagaatagaactgcttttccaaaagaaagtactcacagatatagccatgtcaggacccttcagctaccccgatgaacttaaaaacactgtactgactgccaaatacagatttgactttaagtggggtggcaatctcttccaccaacagaccattagaaacccctgcaaaccagaagagacctcaaccggtagattcactcgcgaggtacaagtcgttgacccgatcaccatgggcccccggttcgtgtttcactcctgggactggagacgagggttccttagtgacagagctctcaagagaatgtttgaaaaaccgctcgatactgagggatttacagcaactccaaaacgacctcgcatattccctcccacagagggacagctcgcccgagagcaaaaggagcaagaagaaagctccgattcgcaggaagaaagcagccttacctcgctcgaagaagtcccgcaagagacgcagctacgagtccacctcagaaagcagctccgagagcagcgaagcatccgacaccaactcagaaccatgttccagcaacttgtcaagacgcaagcgggcctacacctaaacccccttttatctacccagctataaaccaggcctacatgtttccagagagggccccgaaaccgtctcccagcgctggagactgggccacagaatacctatgcgccaagatattcgatagacccccgaggtccatactctcagacacccccttctacccctggatgcccaggagcaccccccagttccaagtgtccttcaagcttggattcaaaccctaaataaaaatttcaaggccgtgtcacatacgcttgtcggtgtctacctctataggtcaccaagcactccgagcgtcagcgaggagtgcgaccctctctctgtgggcccccctaggcagatactcaacttcttcggagccgcgcgctacgccttcggctgcgcgcggcacc

SEQ ID NO: 1812 - protein, 739 aa, Alphatorquevirus sp.
MSWWGWRRRWWWKPRRRWRRRRARRPRRVRPRRYRRPARRYRGRRVRRRRAGGWRGRRRYSRRYSRRLTVRRKKKKLTLKIWQPQNIRKCKIRGLLPLLICGHGRSAHNYAIHSDDKTPQQESFGGGLSTVSFSLKVLFDQNQRGLNRWSTSNDQLDLARYLGCTFWFYRDKKTDFIVQYDISSPFKLDKNSSPSYHPFLLMKAKHKVLIPSFDTKPKGRKKIKLRIQPPKMFIDKWYTQEDLCPVILVSFAVSAASFTHPFCSPLTNNPCITFQVLKEFYYSAMGYGTPETTMTTIWNTLYATATYYQSHLTPQFIRMPTKNPDNTENTQAQNFNQWVDNTFKTGKLVKYNYPQYNPDIDKLKQLRKYYFEWETKTTGVAVPPTWTTPTINWYEYHIGMFSPIFLSPYRSANLEFPRAYQDVTYNPLTDKGVGNRMWFQYNTKIDTQFEPRSCKCVLEDMPLYAMAYGYSDFLEQEIGEYQDLEANGFVCVICPYTKPPMYNKHNPQQGYVFYDSQWGNGKWIDGTGFVPIYWMTRWRIELLFQKKVLTDIAMSGPFSYPDELKNTVLTAKYRFDFKWGGNLFHQQTIRNPCKPEETSTGRFTREVQVVDPITMGPRFVFHSWDWRRGFLSDRALKRMFEKPLDTEGFTATPKRPRIFPPTEGQLAREQKEQEESSDSQEESSLTSLEEVPQETQLRVHLRKQLREQRSIRHQLRTMFQQLVKTQAGLHLNPLLSTQL

SEQ ID NO: 1813 - protein, 150 aa, Alphatorquevirus sp.
MFLGRPYRKKRQVPLPGVHHPPHPRPSMSHHWREPIDNVSNRERHWLESVLRSHRAFCGCRDPVLHFTNLVARHNLQGGGPSAGNLRDPPPLRRALPPPPSPRPPCPGGDGAADGGGNHGGDGDAGGRAARDEYGRDDIEDLLAAIEADE

SEQ ID NO: 1814 - protein, 60 aa, Alphatorquevirus sp.
MFPERAPKPSPSAGDWATEYLCAKIFDRPPRSILSDTPFYPWMPRSTPQFQVSFKLGFKP

SEQ ID NO: 1815 - DNA, 2998 bp, Betatorquevirus sp.
cgggagccggaggtgagtgaaaccaccgtagtctaggggcaattcgggctagatcagtctggcggagtctaggggcaattcgggctagatcagtctggcggaacgggcaagaaacttaaagtattaattatttttcagatgagcacactctacaaaccattaaatattggaattaaacaccgcaatctacaatggatgaatgtacaggttggtctgcatgatatgcactgccactgtgataaccaattaaaacacattattctacacatcattgaacaagaaccaaacatcaaatttaatttagaggaatccaaattaattcaaaaatgccttactaccgaagacgaagacgatggagacgttattggacccggagacctcgatacgcttttcgcagaagacgtttttggagaagaagacgccaatgggtaagaaaaccaaaaaaacttaaaaaaataaccataaaagaatggcaaccatcaacaattagaaaattaaatattaaaggacaatatcctctatttgcgggcacatccgaaagaataggtaatgactatacagcatatgtagatgaaatagcacctaaagatgtacccggaggaggactatattcaataactgtatttactttgcaaggactttatgaactgcatcaaaaagctagaaactggtggacatattctaattgtgacttaccattaataagataccaaggctgtactatgaaactgtattatactaattcttgtgactatataactactattgttaattgtggagaactaaaagctaatttagaaatgtttcattcaactcaaccatctgtactatacttaaacaagaaaaaaaaagttttactatgtagaaactataacaaaaaacgtaaaccttataaaaaatggtttattcatccaccagcattatttaaaaaccagtggtactttcaaaaagacttagccaaatacccactgctaatggtaatatctgcagccgctagctttgacagatactatcaatgttctacctgtatatcagaaacagtaggttttcaaagcctaaacacagacttttttgtaatacactcatggaaatacccatctacaactccatatagaccaaacaaagacttttacatgtttggcatagggggtacaacaacctttgacgcagctacccccaaacaacttatactattaggagcaccatcagattatagcaaaggaacaatgataggaccatcacaaaataactggcaatcacaagtaacacaatacatggcaaaacctactaactggggaaatccatttcacccagattggctccacgcagattcaacagaaggcttaatttgcctactaaaagtacaagaaacagaaaatttaacaaacaaacttcaatccttagacccatcaaagcccctaaaagaccaacaatttatagaaccaacaaaacccttcacagtacactgcagatacaatccacaagcagatatgggacaaaatgcaatatttgtaactagaataacaggagacaacacaccatggcataaaccaaatgacgaacacctactcacacaaggcttaccactatggatattaaactggggatggtttgattacctcagaaaaacaggtacacctcaaagactagacacagactacattcaagtcattgtatcagactatattcaaccaaaagaactaacatattatgtacctatagaccaattctttttaaatgcaaaaagtccatattcagaccacataaaaccatatgacttacaaaactggcacccaaaaataaactttcaattacaatccatttcacacatatgtaattcaggtcccttaacagtaaaactaccaaaagatgtttctgtagaagcacacttaagttataaatttcattttaagcttggaggatgcccaccatcaatggacaaagtttgcgaacctactacacaacccacctatcctcaacccggtaacttcctatcatcaattatattgcagaacccacaaacaccagtcgaatactatctcagctccttcgaccaaagacgagacctccttacacacaaagctgcaaagcgcctcaaaaaagactcagactttacagaaccttttcttaaacctgcaggaaaaagtctcctcgatgtccaaacagcatcccctcaaacaacatcgtcggaggactcatcgacggaggaagaaagcgaggaagagacacagcagcagctccacagacacaagcgaaaacaccgaaaactccagcgaggaatcctcaagctgctgaacctcctccaaaattgaaaatagttaatagtacaataaaaataaacttattcccagattctaagcaaaagaatagacgcttaacagcaagagaaaggagtgaggatgtacaagatgcaataatatggggtagatatgttagaaactatttactagaaacaccttactataaagatgtacctatcacaccaaaaattccctttgtaaattttgaccttggtttcaaacattaaagcctgcaaaatttcacagctcggtgtccatttattaaagtttaaacttatataaacatccaccacactcccaaatacgccggcgccaaagggggctccgcccccttaaaccccaagggggctccgcccccttaaacccccaggggggacaccccccttaaaaccccccaaaagccacaaaatttacatagctaaccacaaacgaacaggaaaaccacaaaatttgcattgccgaccacaaacgaacaggaaaaccacataatttgcattgccgaccacaaaccgtcactgagttccctttttttaccaaacttccccttttactcataaatattcattaaattaattaatactccgcctaattccggggaggagcattaaaactatataactaagtatagtttcgaatggctgagtttacgccgccagacggagacagaatcacttcagtgacttcggactgatcaaggg

SEQ ID NO: 1816 - protein, 661 aa, Betatorquevirus sp.
MPYYRRRRRWRRYWTRRPRYAFRRRRFWRRRRQWVRKPKKLKKITIKEWQPSTIRKLNIKGQYPLFAGTSERIGNDYTAYVDEIAPKDVPGGGLYSITVFTLQGLYELHQKARNWWTYSNCDLPLIRYQGCTMKLYYTNSCDYITTIVNCGELKANLEMFHSTQPSVLYLNKKKKVLLCRNYNKKRKPYKKWFIHPPALFKNQWYFQKDLAKYPLLMVISAAASFDRYYQCSTCISETVGFQSLNTDFFVIHSWKYPSTTPYRPNKDFYMFGIGGTTTFDAATPKQLILLGAPSDYSKGTMIGPSQNNWQSQVTQYMAKPTNWGNPFHPDWLHADSTEGLICLLKVQETENLTNKLQSLDPSKPLKDQQFIEPTKPFTVHCRYNPQADMGQNAIFVTRITGDNTPWHKPNDEHLLTQGLPLWILNWGWFDYLRKTGTPQRLDTDYIQVIVSDYIQPKELTYYVPIDQFFLNAKSPYSDHIKPYDLQNWHPKINFQLQSISHICNSGPLTVKLPKDVSVEAHLSYKFHFKLGGCPPSMDKVCEPTTQPTYPQPGNFLSSIILQNPQTPVEYYLSSFDQRRDLLTHKAAKRLKKDSDFTEPFLKPAGKSLLDVQTASPQTTSSEDSSTEEESEEETQQQLHRHKRKHRKLQRGILKLLNLLQN

SEQ ID NO: 1817 - protein, 97 aa, Betatorquevirus sp.; identical to SEQ ID NO: 1657

SEQ ID NO: 1818 - protein, 72 aa, Betatorquevirus sp.
LKIVNSTIKINLFPDSKQKNRRLTARERSEDVQDAIIWGRYVRNYLLETPYYKDVPITPKIPFVNFDLGFKH

SEQ ID NO: 1819 - DNA, 2998 bp, Betatorquevirus sp.
cgggagccggaggtgagtgaaaccaccgtagtctaggggcaattcgggctagatcagtctggcggagtctaggggcaattcgggctagatcagtctggcggaacgggcaagaaacttaaagtattaattatttttcagatgagcacactctacaaaccattaaatattggaattaaacaccgcaatctacaatggatgaatgtacaggttggtctgcatgatatgcactgccactgtgataaccaattaaaacacattattctacacatcattgaacaagaaccaaacatcaaatttaatttagaggaatccaaattaattcaaaaatgccttactaccgaagacgaagacgatggagacgttattggacccggagacctcgatacgcttttcgcagaagacgtttttggagaagaagacgccaatgggtaagaaaaccaaaaaaacttaaaaaaataaccataaaagaatggcaaccatcaacaattagaaaattaaatattaaaggacaatatcctctatttgcgggcacatccgaaagaataggtaatgactatacagcatatgtagatgaaatagcacctaaagatgtacccggaggaggactatattcaataactgtatttactttgcaaggactttatgaactgcatcaaaaagctagaaactggtggacatattctaattgtgacttaccattaataagataccaaggctgtactatgaaactgtattatactaattcttgtgactatataactactattgttaattgtggagaactaaaagctaatttagaaatgtttcattcaactcaaccatctgtactatacttaaacaagaaaaaaaaagttttactatgtagaaactataacaaaaaacgtaaaccttataaaaaatggtttattcatccaccagcattatttaaaaaccagtggtactttcaaaaagacttagccaaatacccactgctaatggtaatatctgcagccgctagctttgacagatactatcaatgttctacctgtatatcagaaacagtaggttttcaaagcctaaacacagacttttttgtaatacactcatggaaatacccatctacaactccatacagaccaaacaaagacttttacatgtttggcatagggggtacaacaacctttgacgcagctacccccaaacaacttatactattaggagcaccatcagattatagcaaaggaacaatgataggaccaacaggcaataactggcaatcacatgtaacacaatacatggcaaaacctactaactggggaaatccatttcacccagattggctccacgcagattcatcagaaggcttaatttgcctactaaaagtacaagaaacagaaaatttaacaaacaaacttcaatccttagacccatcaaagaccctaaaagagcaacaatttatagaaccaacaaaacccttcacagtacactgcagatacaatccacaagcagatatgggacaaaatgcaatatttgtaactagaataacaggagacaacacaccatggcataaaccaaatgacgaacacctactcacacaaggcttaccactatggatattaaactggggatggtttgattacctcagaaaaacaggtacacctcaaagactagacacagactacattcaagtcattgtatcagactatattcaaccaaaagaactaacatattatgtacctatagaccaattctttttaaatgcaaaaagtccatattcagaccacataaaaccatatgacttacaaaactggcacccaaaaataaactttcaattacaatccatttcacacatatgtaattcaggtcccttaacagtaaaactaccaaaagatgtttctgtagaagcacacttaagttataaatttcattttaagcttggaggatgcccaccatcaatggacaaagtttgcgaacctactacacaacccacctatcctcaacccggtaacttcctatcatcaattatattgcagaacccacaaacaccagtcgaatactatctcagctccttcgaccaaagacgagacctccttacacacaaagctgcaaagcgcctcaaaaaagactcagactttacagaaccttttcttaaacctgcaggaaaaagtctcctcgatgtccaaacagcatcccctcaaacaacatcgtcggaggactcatcgacggaggaagaaagcgaggaagagacacagcagcagctccacagacacaagcgaaaacaccgaaaactccagcgaggaatcctcaagctgctgaacctcctccaaaattcaaaatagttaatagtacaataaaaataaacttattcccagattctaagcaaaagaatagacgcttaacagcaaaagaaaggagtgaggatgtacaagatgcaataatatggggtagatatgttagaaactatttactagaaacaccttactataaagatgtacctatcacaccaaaaattccctttgtaaattttgaccttggtttcaaacattaaagcctgcaaaatttcacagctcggtgtccatttattaaagtttaaacttatataaacatccaccacactcccaaatacgccggcgccaaagggggctccgcccccttaaaccccaagggggctccgcccccttaaacccccaggggggacaccccccttaaaaccccccaaaagccacaaaatttacatagctaaccacaaacgaacaggaaaaccacaaaatttgcattgccgaccacaaacgaacaggaaaaccacataatttgcattgccgaccacaaaccgtcactgagttccctttttttaccaaacttccccttttactcataaatattcattaaattaattaatactccgcctaattccggggaggagcattaaaactatataactaagtatagtttcgaatggctgagtttacgccgccagacggagacagaatcacttcagtgacttcggactgatcaaggg

SEQ ID NO: 1820 - protein, 663 aa, Betatorquevirus sp.
MPYYRRRRRWRRYWTRRPRYAFRRRRFWRRRRQWVRKPKKLKKITIKEWQPSTIRKLNIKGQYPLFAGTSERIGNDYTAYVDEIAPKDVPGGGLYSITVFTLQGLYELHQKARNWWTYSNCDLPLIRYQGCTMKLYYTNSCDYITTIVNCGELKANLEMFHSTQPSVLYLNKKKKVLLCRNYNKKRKPYKKWFIHPPALFKNQWYFQKDLAKYPLLMVISAAASFDRYYQCSTCISETVGFQSLNTDFFVIHSWKYPSTTPYRPNKDFYMFGIGGTTTFDAATPKQLILLGAPSDYSKGTMIGPTGNNWQSHVTQYMAKPTNWGNPFHPDWLHADSSEGLICLLKVQETENLTNKLQSLDPSKTLKEQQFIEPTKPFTVHCRYNPQADMGQNAIFVTRITGDNTPWHKPNDEHLLTQGLPLWILNWGWFDYLRKTGTPQRLDTDYIQVIVSDYIQPKELTYYVPIDQFFLNAKSPYSDHIKPYDLQNWHPKINFQLQSISHICNSGPLTVKLPKDVSVEAHLSYKFHFKLGGCPPSMDKVCEPTTQPTYPQPGNFLSSIILQNPQTPVEYYLSSFDQRRDLLTHKAAKRLKKDSDFTEPFLKPAGKSLLDVQTASPQTTSSEDSSTEEESEEETQQQLHRHKRKHRKLQRGILKLLNLLQNSK

SEQ ID NO: 1821 - protein, 97 aa, Betatorquevirus sp.; identical to SEQ ID NO: 1657

SEQ ID NO: 1822 - DNA, 2998 bp, Betatorquevirus sp.; identical to SEQ ID NO: 1819

SEQ ID NO: 1823 - protein, 663 aa, Betatorquevirus sp.; identical to SEQ ID NO: 1820

SEQ ID NO: 1824 - protein, 97 aa, Betatorquevirus sp.; identical to SEQ ID NO: 1657

SEQ ID NO: 1825 - DNA, 2998 bp, Betatorquevirus sp.
cgggagccggaggtgagtgaaaccaccgtagtctaggggcaattcgggctagatcagtctggcggagtctaggggcaattcgggctagatcagtctggcggaacgggcaagaaacttaaagtattaattatttttcagatgagcacactctacaaaccattaaatattggaattaaacaccgcaatctacaatggatgaatgtacaggttggtctgcatgatatgcactgccactgtgataaccaattaaaacacattattctacacatcattgaacaagaaccaaacatcaaatttaatttagaggaatccaaattaattcaaaaatgccttactaccgaagacgaagacgatggagacgttattggacccggagacctcgatacgcttttcgcagaagacgtttttggagaagaagacgccaatgggtaagaaaaccaaaaaaacttaaaaaaataaccataaaagaatggcaaccatcaacaattagaaaattaaatattaaaggacaatatcctctatttgcgggcacatccgaaagaataggtaatgactatacagcatatgtagatgaaatagcacctaaagatgtacccggaggaggactatattcaataactgtatttactttgcaaggactttatgaactgcatcaaaaagctagaaactggtggacatattctaattgtgacttaccattaataagataccaaggctgtactatgaaactgtattatactaattcttgtgactatataactactattgttaattgtggagaactaaaagctaatttagaaatgtttcattcaactcaaccatctgtactatacttaaacaagaaaaaaaaagttttactatgtagaaactataacaaaaaacgtaaaccttataaaaaatggtttattcatccaccagcattatttaaaaaccagtggtactttcaaaaagacttagccaaatacccactgctaatggtaatatctgcagccgctagctttgacagatactatcaatgttctacctgtatatcagaaacagtaggttttcaaagcctaaacacagacttttttgtaatacactcatggaaatacccatctacaactccatacagaccaaacaaagacttttacatgtttggcatagggggtacaacaacctttgacgcagctacccccaaacaacttatactattaggagcaccatcagattatagcaaaggaacaatgataggaccatcacacaataactggcaatcacaagtaacacaatacatggcaaaacctactaactggggaaatccatttcacccagattggctccacgcagattcaacagaaggcttaatttgcctactaaaagtacaagaaacagaaaatttaacaaacaaacttcaatccttagacccatcaaagcccctaaaagaccaacaatttatagaaccaacaaaacccttcacagtacactgcagatacaatccacaagcagatatgggacaaaatgcaatatttgtaactagaataacaggagacaacacaccatggcataaaccaaatgacgaacacctactcacacaaggcttaccactatggatattaaactggggatggtttgattacctcagaaaaacaggtacacctcaaagactagacacagactacattcaagtcattgtatcagactatattcaaccaaaagaactaacatattatgtacctatagaccaattctttttaaatgcaaaaagtccatattcagaccacataaaaccatatgacttacaaaactggcacccaaaaataaactttcaattacaatccatttcacacatatgtaattcaggtcccttaacagtaaaactaccaaaagatgtttctgtagaagcacacttaagttataaatttcattttaagcttggaggatgcccaccatcaatggacaaagtttgcgaacctactacacaacccacctatcctcaacccggtaacttcctatcatcaattatattgcagaacccacaaacaccagtcgaatactatctcagctccttcgaccaaagacgagacctccttacacacaaagctgcaaagcgcctcaaaaaagactcagactttacagaaccttttcttaaacctgcaggaaaaagtctcctcgatgtccaaacagcatcccctcaaacaacatcgtcggaggactcatcgacggaggaagaaagcgaggaagagacacagcagcagctccacagacacaagcgaaaacaccgaaaactccagcgaggaatcctcaagctgctgaacctcctccaaaattcaaaatagttaatagtacaataaaaataaacttattcccagattctaagcaaaagaatagacgcttaacagcaagagaaaggagtgaggatgtacaagatgcaataatatggggtagatatgttagaaactatttactagaaacaccttactataaagatgtacctatcacaccaaaaattccctttgtaaattttgaccttggtttcaaacattaaagcctgcaaaatttcacagctcggtgtccatttattaaagtttaaacttatataaacatccaccacactcccaaatacgccggcgccaaagggggctccgcccccttaaaccccaagggggctccgcccccttaaacccccaggggggacaccccccttaaaaccccccaaaagccacaaaatttacatagctaaccacaaacgaacaggaaaaccacaaaatttgcattgccgaccacaaacgaacaggaaaaccacataatttgcattgccgaccacaaaccgtcactgagttccctttttttaccaaacttccccttttactcataaatattcattaaattaattaatactccgcctaattccggggaggagcattaaaactatataactaagtatagtttcgaatggctgagtttacgccgccagacggagacagaatcacttcagtgacttcgggctgatcaaggg

SEQ ID NO: 1826 - protein, 663 aa, Betatorquevirus sp.
MPYYRRRRRWRRYWTRRPRYAFRRRRFWRRRRQWVRKPKKLKKITIKEWQPSTIRKLNIKGQYPLFAGTSERIGNDYTAYVDEIAPKDVPGGGLYSITVFTLQGLYELHQKARNWWTYSNCDLPLIRYQGCTMKLYYTNSCDYITTIVNCGELKANLEMFHSTQPSVLYLNKKKKVLLCRNYNKKRKPYKKWFIHPPALFKNQWYFQKDLAKYPLLMVISAAASFDRYYQCSTCISETVGFQSLNTDFFVIHSWKYPSTTPYRPNKDFYMFGIGGTTTFDAATPKQLILLGAPSDYSKGTMIGPSHNNWQSQVTQYMAKPTNWGNPFHPDWLHADSTEGLICLLKVQETENLTNKLQSLDPSKPLKDQQFIEPTKPFTVHCRYNPQADMGQNAIFVTRITGDNTPWHKPNDEHLLTQGLPLWILNWGWFDYLRKTGTPQRLDTDYIQVIVSDYIQPKELTYYVPIDQFFLNAKSPYSDHIKPYDLQNWHPKINFQLQSISHICNSGPLTVKLPKDVSVEAHLSYKFHFKLGGCPPSMDKVCEPTTQPTYPQPGNFLSSIILQNPQTPVEYYLSSFDQRRDLLTHKAAKRLKKDSDFTEPFLKPAGKSLLDVQTASPQTTSSEDSSTEEESEEETQQQLHRHKRKHRKLQRGILKLLNLLQNSK

SEQ ID NO: 1827 - protein, 97 aa, Betatorquevirus sp.; identical to SEQ ID NO: 1657

SEQ ID NO: 1828 - DNA, 2998 bp, Alphatorquevirus sp.
cgcgctacgccttcggctgcgcgcggcgcagtcaaggggcaattcgggctcgggactggccgggctatgggcaaggctctgaaaaaagacatggttttcttgggtcgcccctacagaaagaaaagggcactgccactgtctggcctgccaaatcctaagaagaaaccacctatgagctggcgacctcccgtacacaatgccccgggcatcgaaagaaacctctacgaggctttctaccgcacacacgcggctagctgtggctgtggggatcttcttggccatcttactcgcctggttgatcgctatggcactccgccgcgccctgggcctcccacagacccgccacctcgcctaagggccctgcccgcgccgcctcctgctccatcccgtaaccgagacccagtatggcctggtggggatggaggagacgctggcggcgccgcccctggtggagacgccgccgccgacgaccaatacgccgcagaagaaatcgagcagcttatagccgccgccgaggaagacgtacagtaaggagaaaaacatgggggaggcggaggagacgcagacgcacttacagacgcaggcggactgtcagactcagacgcagacgcagaaaaaagttagtactgactcagtggaaccccccctatgtcaggcgctgctatataaaaggggtcatgcccgtggtaatctgtggacagaacaggtctagttttaactatgccatccactccgacgactaccagctacaggtgctacctttcggaggaggcatgagcaccataactattagcctaaaagtactatatgatgagtttaccaggcacctaaaccggtggtcgtactccaacgaccagctagacctgtgcagataccggggctgcaccctaagagtgtacagagatacctcagtagactacataatgacttttgacaccatacctcccatgaaaatgaacgaactgacggcagccaacactcacccaggcttgcttatgctacagaaatacaaaatactaatacccagctggaaaactagacccaagggcaaaaaatataaaagagtaagaatactcccccctaagatgtttgaagacaaatggtactctcagagcgacctgtgcccagttccgcttgtcagtttgcggtttaccgcagctagcttccagtatccgttctgctcaccacaaacgaacactcctattactacattccaagtattgcagccagaatacaatgaggtaataggttaccccacagggtacgacacaatagcttcctcaaaatttgaggagtggctttatggcaaatgctctcactatcaagcatttgccacagaagcccaccttagacctagaacaactacccctacaggaaagcccatagcaaatgataataccactagtacaatatggtcgagcactactacaaactacatgatacccaacgataacagctacaagaactggggaaactggtggaaatatgacttttatgccacaaaatcagacagcctttatggctactgctcctttactcccaaagaccaaaaaggacgtcaaaacattattaatataagaaatgccaactttcactacttaaccacctgggacactaataacacaaaccacattaacaccacatatgcaaacgctaagtaccagcagtatgaataccactgtggctggtactcttccatgtttatatctccacacagataccaactacaatttcccacagcatactttgactgcacatacaaccccctaaacgaccatggaaaaggcaacatgatttggttccagtatctcacaaaacctactacagaatttatagaaaaacaatgtagatatgttcttagagacattcccctgtgggccatggcccacgggtactctgactacatagactctcagctaggacccactcaagaccacgagacagtgggcctagtctgtgtcatatgtccctacactagacccagactatactcacaagaaaaacccaactacggttttgtattttatgactccctatttggccagggaaaaatgccagatggcacctcacaaataagcagattctgggcacaaagatggagagtatatctaggctttcaagaacaagtactaaacgacctcagcaaaagcggaccgtgggcatacagagacgaataccacagcaccacactgaccatgggctacacctttaaatttaactgggggggcgacatgatgtttccgcaggttgtcaaaaacccctgctcaaacacaggactggctcccggtatcgatagacagcgtcgcgaaatacaagtcattgacccgctcaccgtgggaccccaatgggttttccacccctttgacatcagacgaggactctttactccaaaagctatcaaacgagtgtctgaaaaaccaattgatgatgagccatatatcaaaattccaaaacgacctcgttttattacagcctcagagtaccaaaagcaagaaggcagttactattcaggggaaagaaaatcggagctctcggaagaagagagcgaagccgaagtccaagagacgtcggtacagacacagctcagagtccagctccgagagcagcagctcatcagcaagcagctccgagagctgtgggtccaactcgccaagacccagagcaatacgcacctaaaccccctattattttcccgagcataaataaagtgtacatgtttcccccaccacaggttaaaaggcctcccagcaccggagactgggagaccgagtatgctgcctgcaaggcctttgatagaccccctcgctcagacctatcccgtcccccctgctacccctggatgcctccaactttcaatgtaaatttcagccttaaattcaaataaatgttggccgtgggagttacactggtcggtgtctacctctataagtcaccaagcactccgagcgtcagcgaggagtgcgacccttaggggtgggtgcaacgccctcggcggccg

SEQ ID NO: 1829 - protein, 765 aa, Alphatorquevirus sp.; identical to SEQ ID NO: 1792

SEQ ID NO: 1830 - protein, 154 aa, Alphatorquevirus sp.; identical to SEQ ID NO: 1793

SEQ ID NO: 1831 - protein, 56 aa, Alphatorquevirus sp.; identical to SEQ ID NO: 1794

SEQ ID NO: 1832 - DNA, 2997 bp, Gammatorquevirus sp.
cgggagcccgaggtgagtgaaaccaccgaggtctaggggcaattcgggctagggcagtctagcggaacgggcaagaaacttaaaatatgttttttttttagatgtccagattcttcaacaaaacttcatacaacaaagaaaccctaaatcaactatggatgagcattatagcagatgcacatgatatatgctgtaaatgtgaatgtccatttgctcaccttttagatagtatatttcctgaagggcacaaagacagagaattaactgtacaacaaattattgaaagagattttacatcatgccattttggtggtacagaagaagaaagccatggtttggtaggtggttcagaaagaagagaaccacatggaaacgcagaaaaccaagaagaaaattatatagaagacgaagaactagaagaactcgtggccgccgcagaagacgccactacaaggtaagaagaaaacaaaaaaaaataactgttaaacaatggcaacctgaaagcataaagaaatgtaaaattaaaggacttggacctttagttataggagctgaaggatgccaatacagatgttttactgtatataaatatgagtggaccaaccccaaaacagcagggggtggaggatttggctgtgaactatttacactgcaacacctatacaatgagtacaaagctagaaacaatatttggacagcctctaacctctacaaagactttggcagatacacaggctgtcaatttactttttacagacatgaacatacagactttatcattacctatgatttaaatccacctttcactataaacaaatatacctacatgatgctacatccaatcaacctactacaaagcagacacaaaaaaatattactaagcaaagacacaaaaccaaatggcagattaacaaaaaaattaaaaataaggccaccaaaactaatgtccactaaatggttttttcaagaagaattagcaaagtatggcttagtaaccatagcagctacagcatgtaattttagatttccatggatgggctgctgcaatgaaaacctaataattacaatagactacttacaacctggattttataaacactcagaatgggcacaagcatccacagcagcatataaccccttaggccactcaggaggtaaacaaatgtctactgagttattttactattactatgatgatagaggagcagataaatcttggcaaatgcaaccatttaaaacaggaaacccctacttggcatcactaaactatgaaacaggatggtttaactcaaaggtacttagagcttacttagtttcaacgaaaccaggcaaacaagaggcaatgtcaattacaccctgtggcactgttagatacaacccaatattagacacaggagaaaaaaacaaagtatatgtggtatctacattactttataattggcaagttcccaaagatgatgatttaataatagaaggatatccactatggatggtatttcatggctttacctcctttctaaaacaagtaaaatctaaaacaacaccatttacaggcagcatgatagttgtacaatcacctgccctatatagagtaagaggtgaagatcccactaacttctatccaattatagacagatcttttataaagggcaaaggtaccaactacactgacccaattaaatttccaggaaatgcatggtatccatccatattctcacagagagattctatatctcaaatagttaattgtggcccatatataccaaaatacaatgaaactaaagaaagtacctggcaactaaactacttttataaattttattttaagtggggtggcagccatccaccagatcaaccagcagaaaacccacaaacaaaagctacctatgacatacccgataaaatgcaacaagcacttgaaattgctgacccaattaagcaacaataccactcagtccttaaaccctgggacttcaggcgaggagaaattacaaaaaaggcttttaaaagaatgttcgaacacctcgaagttactgactctatatcaacagattcaagcgactgctcctcaccaaagaaaaagagaaaagcaccactcctccaagacccaaaagaagaaaacaagaagatccaagcatgtctcctctcactctgcgaagagcctacatgcccagaccaaaaggaagaaaacctacacctcctcatccagcagcagcacaagcagcaacagcaaatcaagtacaacctcctccaactcatctcagacctaaaagcaaagcagagaacacttctacacaacacagggctactaaactaacaagatttaaacaaggatttgaatgggaaacagaagttcaacttgcacatgcttttaaaagacccccaagactatttaaagaagacactcccttttatccatggttaccaaaatttacacctcttgtaaactttcaccttaactttaaaggctaggcctacactgttcacttagtggtgtatgtttaataaagtttcacccccaaaaaaattgtaaaataaaaaaaaaaaaaaaaaaataaaaaattgcaaaaattcggcgctcgcgcgcgctgcgcgcgcgcgagcgccgtcacgcgccggcgctcgcgcgccgcgcgtatgtgctaacacaccacgcacctagattggggtgcgcgcgctagcgcgcgcaccccaatgcgccccgccctcgttccgacccgcttgcgcgggtcggaccacttcgggctcgggggggggcgcgcctgcggcgcttatttactaaacagactccgagtcgccatttgggcgggggctaaaatggcgggacccaatcattttatactttcactttccaattaaaacttgccacgtcacaacaaaggggtggagactttaaaactatataactaagtggggtggcgaatggctgagtttaccccgctagacggtgcagggaccggatcgagcgcagcgaggaggtccccggctgcccgtggg

SEQ ID NO: 1833 - protein, 672 aa, Gammatorquevirus sp.
MPFWWYRRRKPWFGRWFRKKRTTWKRRKPRRKLYRRRRTRRTRGRRRRRHYKVRRKQKKITVKQWQPESIKKCKIKGLGPLVIGAEGCQYRCFTVYKYEWTNPKTAGGGGFGCELFTLQHLYNEYKARNNIWTASNLYKDFGRYTGCQFTFYRHEHTDFIITYDLNPPFTINKYTYMMLHPINLLQSRHKKILLSKDTKPNGRLTKKLKIRPPKLMSTKWFFQEELAKYGLVTIAATACNFRFPWMGCCNENLIITIDYLQPGFYKHSEWAQASTAAYNPLGHSGGKQMSTELFYYYYDDRGADKSWQMQPFKTGNPYLASLNYETGWFNSKVLRAYLVSTKPGKQEAMSITPCGTVRYNPILDTGEKNKVYVVSTLLYNWQVPKDDDLIIEGYPLWMVFHGFTSFLKQVKSKTTPFTGSMIVVQSPALYRVRGEDPTNFYPIIDRSFIKGKGTNYTDPIKFPGNAWYPSIFSQRDSISQIVNCGPYIPKYNETKESTWQLNYFYKFYFKWGGSHPPDQPAENPQTKATYDIPDKMQQALEIADPIKQQYHSVLKPWDFRRGEITKKAFKRMFEHLEVTDSISTDSSDCSSPKKKRKAPLLQDPKEENKKIQACLLSLCEEPTCPDQKEENLHLLIQQQHKQQQQIKYNLLQLISDLKAKQRTLLHNTGLLN

SEQ ID NO: 1834 - protein, 118 aa, Gammatorquevirus sp.
MSRFFNKTSYNKETLNQLWMSIIADAHDICCKCECPFAHLLDSIFPEGHKDRELTVQQIIERDFTSCHFGGTEEESHGLVGGSERREPHGNAENQEENYIEDEELEELVAAAEDATTR

SEQ ID NO: 1835 - protein, 136 aa, Gammatorquevirus sp.
LLLTKEKEKSTTPPRPKRRKQEDPSMSPLTLRRAYMPRPKGRKPTPPHPAAAQAATANQVQPPPTHLRPKSKAENTSTQHRATKLTRFKQGFEWETEVQLAHAFKRPPRLFKEDTPFYPWLPKFTPLVNFHLNFKG

SEQ ID NO: 1836 - DNA, 2997 bp, Alphatorquevirus sp.
cgggtgccggaggtgagtttacacaccgcagtcaaggggcaattcgggctcgggactggccgggctatgggcaaggctcttaaaaaagacatgtttctcggtaaactctacagaaagaagagggcactgccactgtgccgcctgcgagcttcaaagaagaaaccacctcctgacatgacctggagacccccggtgcacaacgcccatggtatcgagagaaatctctacgagtgcgtataccgcgcacacgctgctagctgtggctgcggtgatcttgttggccatatttctctactggctcagcggtatggtgctcctccaagaccgccggcgcccggggctcccagaccacatatgagacgccagctggcccttccagcgccccccgccgatccgcagcaggctaacccagaatggcctggtggggacggtggagaccgtggcgatggaggcgccgctggaggaggggtcgccgccgacggagactacgaacccgaggagctcgacgccctgttcgacgccgtagaacaagaagagtaaggagaaggagatgggggaggcggaggtggagacgggggtacagacgcagactgagactgagacgcaaacgcagacgcagaaaaaagatagtactgactcagtggaaccccgccaaagtgcggaggtgcaggatatcgggggtcctgcctatgatcctgtgcggcgcgggcagggcagggttcaactatggactgcacagcgacgacctaaccgtacagaaaccccttaaccagaacccccacgggggaggcatgagcacagtgactttctctctaaaagtgctctatgaccagtaccagagattcttaaacaagtggtcttaccccaacgaccagctagacctggccagatacaagggctgcaaattcaccttctacagacacccagacacagactttatagttcagtatgacaacgttccccccatgaaaatggatgagtttacagcccctaacactcatcccaacttgctgctacaagccaaacacagacgcaaaatccccagttttaaaaccaggccttttggtaaaaagacagtcactattaaagtggggcctcctaaactttttgaagacaagtggtacccccagtcagatctgtgcaaggtgccccttgtcagttggcgggtgaccgcagctgacttgcggtttccgttctgctcaccacaaactgacaacccttgcttcaccttccaagtattgcacgagaactattacccgtgctttggaacttcctgtttagaccaacggacaagttacactacagaaattaacaatttagaaagttggctatatggctcctgcagtcactatcaaacatttgccacagacactagattagccccagaaaaaacaacgcagccatcagggtcaactaacacacctaactggacacaatcagattttcaaaaatttaaaaaaagtacagacagcaactatggctactgtacctactgtccagaaagagaccttattacaaaaattaaaaattacagaaaaaaaagatttggctggctaacaacccctgacacagccaacacttgtcacataaacatgacatacagcaagggcaagtacgaagagtacgagtaccacctaggctggtactccaacatatttataggcaacctgagacacaacctagcattcaggccagcatacatagatgtaacctataatcccatagtagacaaaggcctgggaaaccacatatggtttcagtacctgacaaagcccaccactgagctagtagaagcccaggcaaagtgccacatccaggacctgcccctgtacgccatgacctttgggtacgaggactacctccagagaacactaggccctttccaggatgtagagaccgtgggcataatctgctttatatgcccttacacagaaccgccctgcattaacaaaaacgagggcaaaaagacctggggctacgtgttctatgacacacactttggcaacggcaagaccccagagggactgggccaagtgcacccttattggatgcagagatggagaccagtgtcccaggtgcaaaaagagactctaaacaagattagcaggaccggaccgttcagctacagagacgagcaccctagcgtgacgctgaccgcgaactacaagttctactttaactgggggggcgactctatatttccacagattattaaaaacccctgtccagacaacagcctgcgtcccggcggccatagacagcctcgctcagtacaagtcgttagcccgctcacaatgggaccacaatacctgttccactcctgggactggagacgggggttctttaatccaaaaactctcaaaagaatgcttgaaaaaccagatgatgatacagagtattcaacaggtccaaaaatccctcgatgggtacccgctctcgagcaccaagggcaagaaagcaacttcgattcggagacagagatctccgagtcctcggaagaagaagccgctcaagaagtcctccaaaaaatccaggaggcgccgctacagcagcacctcatccagcagtaccgagagcagcgacgcctcggaaagcaactcaaactcgtcatgctgcaactcaccaagacgcagagcaatctccacataaatccccgcgtccttggccatgcataaataaagtgtacatgtttccccccgagaaaccccttcccatacacgggtaccacgggtgggagacggagtatcaggcctgcaaggccttcgacaggccccctagaaactacctgtcagacaaacccatctacccctggcttccccgctcccagccagaaattaaagtgaattttaagctcggttttcaataaacaaggccgtgggaatttcacttgtcggtgtctacctcttaagtataagtagctgcacttccgaatggctgagttttccacgcccgtccgcagcgagaacaccacggaggggagtccgagcgtcccgaggg

SEQ ID NO: 1837 - protein, 753 aa, Alphatorquevirus sp.
MAWWGRWRPWRWRRRWRRGRRRRRLRTRGARRPVRRRRTRRVRRRRWGRRRWRRGYRRRLRLRRKRRRRKKIVLTQWNPAKVRRCRISGVLPMILCGAGRAGFNYGLHSDDLTVQKPLNQNPHGGGMSTVTFSLKVLYDQYQRFLNKWSYPNDQLDLARYKGCKFTFYRHPDTDFIVQYDNVPPMKMDEFTAPNTHPNLLLQAKHRRKIPSFKTRPFGKKTVTIKVGPPKLFEDKWYPQSDLCKVPLVSWRVTAADLRFPFCSPQTDNPCFTFQVLHENYYPCFGTSCLDQRTSYTTEINNLESWLYGSCSHYQTFATDTRLAPEKTTQPSGSTNTPNWTQSDFQKFKKSTDSNYGYCTYCPERDLITKIKNYRKKRFGWLTTPDTANTCHINMTYSKGKYEEYEYHLGWYSNIFIGNLRHNLAFRPAYIDVTYNPIVDKGLGNHIWFQYLTKPTTELVEAQAKCHIQDLPLYAMTFGYEDYLQRTLGPFQDVETVGIICFICPYTEPPCINKNEGKKTWGYVFYDTHFGNGKTPEGLGQVHPYWMQRWRPVSQVQKETLNKISRTGPFSYRDEHPSVTLTANYKFYFNWGGDSIFPQIIKNPCPDNSLRPGGHRQPRSVQVVSPLTMGPQYLFHSWDWRRGFFNPKTLKRMLEKPDDDTEYSTGPKIPRWVPALEHQGQESNFDSETEISESSEEEAAQEVLQKIQEAPLQQHLIQQYREQRRLGKQLKLVMLQLTKTQSNLHINPRVLGHA

SEQ ID NO: 1838 - protein, 157 aa, Alphatorquevirus sp.
MGKALKKDMFLGKLYRKKRALPLCRLRASKKKPPPDMTWRPPVHNAHGIERNLYECVYRAHAASCGCGDLVGHISLLAQRYGAPPRPPAPGAPRPHMRRQLALPAPPADPQQANPEWPGGDGGDRGDGGAAGGGVAADGDYEPEELDALFDAVEQEE

SEQ ID NO: 1839 - protein, 147 aa, Alphatorquevirus sp.
MGTRSRAPRARKQLRFGDRDLRVLGRRSRSRSPPKNPGGAATAAPHPAVPRAATPRKATQTRHAATHQDAEQSPHKSPRPWPCINKVYMFPPEKPLPIHGYHGWETEYQACKAFDRPPRNYLSDKPIYPWLPRSQPEIKVNFKLGFQ

SEQ ID NO: 1840 - DNA, 2996 bp, Alphatorquevirus sp.
ggccgcgcgctacgccttcggctgcgcgcggccaaggggcaattcgggctcgggactggccgggctatgggcaaggctcttagggttttcgctcttaaaacatgtttatcggcagggcttggagaaagaaaagcaaagtgctactgcgcccggtgccaaagactaagagccaacagcctgctatgagccgctggtgtccccctactcaacatgcctcaaatcgcgaagaggactggtttcgatctttccacaccagtcaccgagctttttgtggctgcggtgatcctattctgcatatttctcatctggctgctcagcttggctaccaacccggtccgtcgccgcgtggtagtcctggggagaggatctcgccaccactaagacagctccgcgcgctcccggcagcccccaccactcctagaccaccaccatgtggtggagatggtggaagaggcgccggtggagaccgcgccgacgatggagaaggctccgccgcaggagagcagccccaagaagacgtagaagacctgctgcgcgtactagaagacgcagagtaaggagatggaggaggaggaggagagggtgggctcgcagaatatacctgcgaaagaggcgcagactaaagagacgcaaaaagattcctataactcagtggaatcctagcactgtaaagaaatgcgtggtccgcggatacatgcccctcctcatctgtggaacgggcaccaccgggaccacctacagaaactatgggtctcaccaagcagactatgtaaaatttgaccctttcggaggcgggataagcaccttacaatttagcctacaatttctatacgaggagtatcagaaacacagaaatacctggagcaggtcaaatgtagacttagaactcataagatacaaaggcgcctctataaaactgtacagacaccctgaggcagacttctttttcacatacaacagaaaacctcctttcactgacagccaactaacaggaccatacctacacccgggtaacatgatgctcaggaaaaggaaaataatagtgcctagctataagacaaaacccaaaggacgacccactaaaactgtcagaataaaaccccccacactattcacagacaagtggtacttccagaaagacttatgcaaagcaccgctgctaaccgtcggttgcagtatagggaacttgcggtttccgttctgccgaccacaaactgaaaactgttgcatatacttccaggtactaactgaaagatataacacaatgctcagcatacaatttgaacactgtagaaaaaactatgacagcctaatgtcctttatgaaaactcattggacaaatcctaaaggcacatacagcaactatagagacagaggcagagtgggcacagtgtttaatacatttagaacagaagaacacattaaagaccccccagtaacggtatgtacaaccgataaaaacacaacaccatcatcttgtaataaatgtaatgtgcctagtaaatactcctatagcagagtaaatagcctatggggagactacatatacacaaaccagatagtagatgacttttcctcaaatgctcataactactttaaagaaagatcaggatcagtagtaacagcctcaaagtatttaaaccataaaacaggactattttcctccatatttctaagtagacaaagactatcaccagactttcccgggttttactatgaggttatatacaaccccatgaatgacaaaggagtaggaaacaaagtatggatagactggtgtaccaaagaagacagcttctgggtagaaagtagccaattaaaaacagaaatagtagacttgccgctgtggatgtgttttaatggctacatagactactgcaaaaaaaaacaccacgaccaaggcctagacaaagaagtcagagtcactatcatatgtccctacacacagcccccactgaccaacagcacaaacacagacatgggtttcgtaccctttgactacaactttggagacggacgcatgccagacggacagccctacatacctatagaatacagattcaagtggtacccctgcgcctttcaccaacaaaactttatgaatgacatgacccagtgtgggccttttgcctatgacggaggcataaagtcagcggtactaaccgccaaatacaaatttacctttctctttggtggtaacccaataccacagcagacaattaaagacccctgcatgcaaccggactacgaaattcccggaggcggtggccaacctaaaagaatacaagtggagaacccgaaactgctacacgaaggctactacttccgtgcctgggacctccgacgcggcttctttggtgcgagagctctccaacgaatgcaacaacaacaaattacttctaaatttattacaggcccaccaaagcgatcaagattggaggtacccgccattgcaggagaaagctcaccttcaccgggaaaaaggtggaaaccgtggccagaatccagcgagacggagacagaccagacagaggcacaaagcgaaagcgagacgaagacgccggagttcaagcagcagctcagagagcagctcaaggaacagaagcagatcaaaaagcagctcctcagtatcgtcaagcaattagtaaagacccaacatcacctacaaggcccagttatccactagtaggcccaaaacaatatctgttccaggaacgcttgccacaagtgtggtctaagcaagactggcaaacagaatatgaagcagcgagtttctgggacaggccggctcgcacaaacctaaatgacacacccttctacccctggatgcctagacaagccccccagtacaaagtaacctttaaacttggattcaaaccctaaataaaaagcaaggccgtgggagtctcacttgtcggtgtctgcttattaaagtcaccaagcactccgagcgaagcgaggagtgcgaccctaagggtgggtgcaacgccctcggc

SEQ ID NO: 1841 - protein, 751 aa, Alphatorquevirus sp.; identical to SEQ ID NO: 1736

SEQ ID NO: 1842 - protein, 151 aa, Alphatorquevirus sp.; identical to SEQ ID NO: 1737

SEQ ID NO: 1843 - protein, 59 aa, Alphatorquevirus sp.; identical to SEQ ID NO: 1738

SEQ ID NO: 1844 - DNA, 2996 bp, Alphatorquevirus sp.
cggcgctacgcgcttcgcgctgcgccggacatctcggggcaattcgggctcgggactggccgggccccgggcaaggctcttaaaaaatgcactttcgcagagtgcaagcgaaaaggaaactgctactgcaagctgtgcgagcttcaccgaaggcacctgccatgagcttcgtgacacccactattaatgcctcagtccgggagcagcaatggttcgagtccatccttagatcccaccactcgttctgtggctgtggtgatcccgtgcttcattttactaaccttgctactcgctttaactatctgcctgctacctcttcgcctctggaccctcccggcccagcgccgcgaggccgcccggcgctccgccgtctcccggcactcccttcagcccccgcgaccccctctagagatccagtatggcctactggttccgagggtggggctggaggccgaggcgccggtggagaaggtggcgccgccgtcgaaggagactaccgagaagaagagttagacgagctgttcgcggccttggaagaagacgcaaaccaagggtaaggaggcgccgcagacgccgcagacgtgtctacaaacgggggtggagacgcaggaggtacataagacgtgggcgacgcaaaaagaaactggtactgactcaatggaacccagcagtagttaagaggtgcaacattaagggcggacttccaataatcatatgcggagagcccagggcagcctttaactatggctaccacatggaggactacactcctcaacctttcccctttggagggggaatgagcacagtgactttctctctgaaagccttgtatgaccagtacctcaaacaccaaaacaggtggactttctcaaacgaccagctagacctggccagatacaggggctgtaaactaaggttctacagaagccccgtatgtgactttatagtacactacaacctagtacctccactaaaaatgaaccagtttacaagtcccaacacgcacccgggactactcatgctcagcaaacacaagattataattcccagctttcaaacaagacctgggggcagacgctttgttaaaataagacttaatccccccaaactatttgaagacaagtggtacactcagcaagacctctgcaaagttccgctcgttagtattacagcaactgcagctgacttgcggtatccgttctgctcaccacaaacgaacaacccttgcaccaccttccaggtgctgcgcaagaactataacacagttataggaacttccgtaaaagaccaagagtctacacaagactttgaaaattggctttataacacagactcacactatcaaacatttgccacagaagctcaactaggcagaatttctgcatttaaccctgatggcaccacaaacaccaacaaagttaaatggcaaaattactggagtaataaacaggagcaatggaccggaaaccaacaatacccacagactactacacaaatgtacaaaattccatatgacagtaactttggcttcccaacatacagagcacagaaaacatacattttagaaagaagacaatcaaactttaagtatgaagtaaataatccagtaagcaaaaaggtatggccacaaccaactacaacagcacccaatatagactactatgaataccactgtgggtggttcagtaacatatttataggccccaacagatataacctacaatttcaaacagcatacgtagacacaacatacaacccactaatggacaaaggcaaaggcaacaaaatatggttccaatacctgtctaaaagaggcacagactataatgacaaacagtgctactgcaccctagaagacatgcccctctgggcaatgtgctttggatactcagactatgtagagactcaactaggaccaaatgtagaccatgaaacagcaggccttataattataatatgcccatacactcaaccacctatgtatgacaaaaccaggcctaactggggatacgtagcctatgacaccaattttggaaatggaaaaatgccctccggaacaggccaagtcccagtttactggcaatgcagatggagacccatgctatggttccaacaacaagtactaaatgacatctcaaagactggaccgtacgcctacagagacgaatataaaaatgtacaactaactctgtactacaactttatttttaactgggggggcgacatgtattacccacaggtcgttaaaaacccctgtggagactccggaatcgttcccggttccggtagattcactcgagaagtacaagtcgttagcccgctttccatgggaccggcctacatcttccactacttcgacagcagaaggggcttctttagtgaaaaagctcttaaaagaatgcaacaacaacaagaatttgatgaatcttttacattcaaacctaagagacccaaactttctacaacagccacagaaatcctgcagctcgaagaagactcgtgttcaggggaaggaaaatcgccactacagcaagaagagaaagaagcagaagtcctccaaacgccacaagtacagctccagctccagcggaacatccaggagcagctcgcaatcaagcagcagctccaattcctcctgctccagctcctcaaaacccaatccaatttgcatttaaacccacaatttttaagcccttcataaaatatgacatgtttggggacccccttcctcaccccccaacagcccaagactgggccacagaatatgagtgctgtaaggcctttaacagaccacctagaaccaacctaaaagacacccccttctacccctgggtccctaaacctaaacctcaattccgtgtatcttttaaacttggttttcaataaacaaggccgtgggagtttcacttgtcggtgtcaacctcttaaggtcactaagcactccgagcgtaagcgaggagtgcgaccctcccccctggggcaactccctcgaagtc

SEQ ID NO: 1845 - protein, 760 aa, Alphatorquevirus sp.
MAYWFRGWGWRPRRRWRRWRRRRRRLPRRRVRRAVRGLGRRRKPRVRRRRRRRRRVYKRGWRRRRYIRRGRRKKKLVLTQWNPAVVKRCNIKGGLPIIICGEPRAAFNYGYHMEDYTPQPFPFGGGMSTVTFSLKALYDQYLKHQNRWTFSNDQLDLARYRGCKLRFYRSPVCDFIVHYNLVPPLKMNQFTSPNTHPGLLMLSKHKIIIPSFQTRPGGRRFVKIRLNPPKLFEDKWYTQQDLCKVPLVSITATAADLRYPFCSPQTNNPCTTFQVLRKNYNTVIGTSVKDQESTQDFENWLYNTDSHYQTFATEAQLGRISAFNPDGTTNTNKVKWQNYWSNKQEQWTGNQQYPQTTTQMYKIPYDSNFGFPTYRAQKTYILERRQSNFKYEVNNPVSKKVWPQPTTTAPNIDYYEYHCGWFSNIFIGPNRYNLQFQTAYVDTTYNPLMDKGKGNKIWFQYLSKRGTDYNDKQCYCTLEDMPLWAMCFGYSDYVETQLGPNVDHETAGLIIIICPYTQPPMYDKTRPNWGYVAYDTNFGNGKMPSGTGQVPVYWQCRWRPMLWFQQQVLNDISKTGPYAYRDEYKNVQLTLYYNFIFNWGGDMYYPQVVKNPCGDSGIVPGSGRFTREVQVVSPLSMGPAYIFHYFDSRRGFFSEKALKRMQQQQEFDESFTFKPKRPKLSTTATEILQLEEDSCSGEGKSPLQQEEKEAEVLQTPQVQLQLQRNIQEQLAIKQQLQFLLLQLLKTQSNLHLNPQFLSPS

SEQ ID NO: 1846 - protein, 156 aa, Alphatorquevirus sp.
MHFRRVQAKRKLLLQAVRASPKAPAMSFVTPTINASVREQQWFESILRSHHSFCGCGDPVLHFTNLATRFNYLPATSSPLDPPGPAPRGRPALRRLPALPSAPATPSRDPVWPTGSEGGAGGRGAGGEGGAAVEGDYREEELDELFAALEEDANQG

SEQ ID NO: 1847 - protein, 58 aa, Alphatorquevirus sp.; identical to SEQ ID NO: 197

SEQ ID NO: 1848 - DNA, 2996 bp, Alphatorquevirus sp.
acgccttcggctgcgccggacacctcagaccccaaggggcaattcgggctcgggactggccgggccctgggcaaggctcttaaaaaagctatgtttctacgcagggctcacaagaaaaggaaactgctactgcaaattgtgccagctacaccgcaggcacctgccatgacctttcgtgcacccaccatccaaggtggagtccgagaccagcaatggttcgaggcctgtgttcgatcacacgccgctttctgtggctgtggcgatcccgtgcttcattttaataacgttgctagtcgctttcactatctgcctgctacctcctcgcctctggaccctaccggaggagcgccgccgcgccgcccgcagctacgccgccttccagcgctcccggcggcgccccccagcacccctgagagccagccatggcgtggtggtggtggagacggtggcgccgctggcccagacgccgctggaggatccgtcgcagacgccgagtacggaccagaagacctagacgacctgttcgccgctatcgaagcagatacacagtaaggaggcgaaggcggagagggtggcgagggcgacgtaggcgcagactgtacagacgcagatacagtataaggagaaagagaaagaaactcatactgaaacagtggcagcccgccaatgtcagaaaatgcaaaataagaggcctgtttccaatagttatctgtggacacggcaagagtgccaataactatgccctgcactcggacgacgtagtgccaatgagacaggctttcggaggggctctaagcactgtatcttttagcctaaaagtactgtatgatcagtatttaagacacctgaacagatggagcacctccaacgatgtcctagaccttgccaggtacctaggatgcaccttctggttttacagagacaaaaaaactgactacttagtacagtatgacatctctgctccctacaagctagacaaagacagcggaccctcctaccatccgggggtactcatgcaagccaaacacaaagtactagtgcccagttttgacacgcaccccaaaggaaaggctaaagtaaaaattagaattaagccccccaaactgtttatagacaagtggtactctcaagaggatctgtgtaccgttaatcttgtgacatttgtggtcagcctagcttccttctcacatccgttctgcccaccactaacgaacaacccttgtgtaaccttccaagtattaaacaacttctacaattccgttataggttcctcaattaacattgcagacgctacagtagacacagtcttcaataactttttatataacaaagcagccttctaccaacaagtactagtagactcttacattaaagaaattaaaacaaatcctgatggctctccacaagttgcaggccctaacggtaaacccacagcatcagaaatgactacatataactcctgggtaaaaaataactttaaagtaccaggaacatctgttcactacaacttttgcacatacaaacctgacactaacaagttaaaaacacttagagaatactacttccaatgggaaactgcacagtccacaaaccatatttttcatacacaacacgtaccacacgcgggcacaaaacctacaaaagactggtgggagtacagaacaggcctattttcacctatatttcttagtccatacagaaccagtcccatagacggctggttgctggcatacagagacgtatcctacaatccactaaatgacaaaggagtaggcaaccgagtatgggtacagagtctagtaaaaccagacacccagttcaccctaccctcatgtgtatttgtactagaagacaaacccctatggtgctgtttctatggctatgttgactttataaagagtgtcagagagggccaagacatagactttgaaaacattatttgcattcagtgcccttacacagagcctcctctatatgaaaagcacaaccccaacatggggtttgtagtatacgacagcaactttggcaatggcaaatggctagacggaaccgggtttgtcccggtagaataccagtgccgctggcggccctgcatagctttccagcaacaggtactcacagacattaccatgagcgggcccttcagctacaaagacgatgttaaaaacacctgcatacaggccaagtacagatttgactttaaatggggcggcaatatgctttatcagcagaccatcagaaacccatgcaaagacggacaagcaaccgattcccatagacagcctagagacgtacaagtcactgacccgcttaccatgggaccccgatacgctttccaccaatgggactggcgacgtgggtggcttagtgacaaagctctcaaaagaatgctccagaaaccgcttgattttgaactctatccagtcaatccaaagagacctagactattccctcccacagaagcaggagaaggagaggccccaaaagaaagctcattttcagaggaagaaagcgagccgtcctcgcaagaagagacgaggccggagaggctccagctcaagctccgacagcagctccgagagcagcgagagctccgagtccacctcaagcacctcttccagcagctcctcaagacacaagcggggctccacctcaacccgctgttattcaaccagcaataaacaaggtttatctgtttccagaaatgggtccaaagcccgctcctactagtggagactgggaaacagaatatcaggcctgtaaattctgggacaggcctcccagaaagttcctcaccgatacacctttctacccctggatgcctccggcacccccaaaattctctgtcagctttaaactgggcttcaaaccctgaataaacaaggccatacactgttcacttgtcggtgtctacctctataagttactaagcactccgagcgaagcgaggagtgcgacccccttacccggtagcaacttcttcggagtccggcgct

SEQ ID NO: 1849 - protein, 752 aa, Alphatorquevirus sp.; identical to SEQ ID NO: 1670

SEQ ID NO: 1850 - protein, 161 aa, Alphatorquevirus sp.; identical to SEQ ID NO: 1671

SEQ ID NO: 1851 - protein, 60 aa, Alphatorquevirus sp.; identical to SEQ ID NO: 504

SEQ ID NO: 1852 - DNA, 2995 bp, Alphatorquevirus sp.
actaagcactccgtgagtttacacaccgcagtcaaggggcaattcgggctcgggactggccgggccatgggcaaggctcttaaaaagctatgtttctcggtaaaatctacaggaagaaaaggaaactgcttctgcagactgtgcgtgctccacaggcgccatcttccatgagccgctgctggtgtcctcctcggggtgatgtctccacccgcgagtcccggtggtacgagtcggttcgagcatgccacgatgctttttgtggctgtggcgatcctgttcttcatttttctcgtctggttgcacgttctaaccatcagggacctccgacgccccccacggacgaccgtgcgccacagaataccccagtgagacgcctgctgcctctccccagctaccccggcgagggtcccgctcctagatggcctggtggggatggaagcgccgctggtggcgaccgaagagaaggtggagatggcggcgcgcgcgccgccgaagacgagtaccaccccgaagacctcgacgagcttttcggcgctatcgaacaagaacagtaaggaggaggcgaagggggaggcggaggggctaccggcgccgttacagactgagacgctatgccagacgcaggttccgacgcaaaaagatagtactgactcagtggaacccccagactgtcagaaaatgtataataaggggcatgatgccagtactctgggccggcatgggcacggggggcagaaactacgccgtcaggtcagatgactacgtggtgaacagggggttcgggggctccttcgccacagagaccttctccctcaaggtactctatgaccagtttcagaggggcttcaacaggtggtctcacactaacgaggacctagacctggcccgctacaggggctgcaggtggactttttacagacacaaagacacagactttatagtgtactttacaaacaatcctcccatgaaaaccaaccagttctcggcccccctaacgacccccggcatgctcatgcgcagcagatttaaaatcctgatccccagctttcagaccagacccaagggtcgcaaaacagtgacagttaggatcaggccccccaaactatttcaagacaagtggtacacccagcaggacctgtgttcagttcctcttgtccaactgaacgtgaccgcagctgatttcacacatccgttcggctcaccactaactgaaactccttgcgtagagttccaggtgctgggtgacttgtacaatacatgtctcaatatcgaccttcctcaatttactgcagacggggaaccacaaaattatactaaacctaacaaagacaacttaaaagagttatacaaagaactcttcactaaaaagatatctggccactactggcaaacatttataaccaacagtatggtaagagcccacatagacgcagacaaagcaaaacgagctgaaactaatgccacctcaccaacctataacactgagccattccccacaaacccacctaaacaagatttcaatacatggaaaaacaagttcactgacacaagagatagcctctttctgttcgccacttatcacccagacaaaattgcaagtacaataaaaaccatgagagacaacaactttgcactagagacaggccccaatgatttatatggagacagcacagcacaatatgcaggaaacacacacatgctagactactacctcggcttttacagccccatattcctgtcagatggcagatccaacatagaattttttactgcctacagagacatagtatacaacccactactagacaaagcagagggcaacatggtctggttccaatatcacactaaagcagacaacaagttcaaaaaaccagagtgtcactgggagatcagagacatgcccctatgggccctcctcaacggatacagtgactacctagagactcaaatccagtggggcgacctcagcaaagaaggcaaagtcctcatcagatgcccttacactaagcccccattagtggacaagaaagatgacacagcaggcttcgttgtctataacagaaactttggcagaggcaagtggatagacggagggggctacatccccctgcacgagagggcaaagtggtatgtcatgctcagataccagacggacgtgttccatgacatagtgacctgtgggccctggcagtacagagacgataacaaaaacgcccagctagtagccaagtaccgcttcagcttcatgtggggaggtaacactgtgcactctcagatcatcaggaacccgtgcaaagacaaccaagtttccggaccccgtcgacagcctagggacgtacaagtcgttgacccgcagctcgtcacgccgccgtgggtcctccacagcttcgaccaaagaagaggcctttttactgcaacagctctcagacgtctgctcaagcaaccactacctggcgagtatgctgttacatccctcaggacacccctcctctttctaccctcagagttccaacgagaagacggcgctgcagaaagcgtctcaggttcaccgtccaaaagaccccgcctctggccagaagagagccagacggagacgatctcctcggaggaggacccggcggagacgacgagggagctcctccagcgaaagctccgagagcagcgagcactccagttgcagctccagcagttcgcggtccaactcgccaagacccaggcgaatctccacgtaaaccccctattatctttcccgcagtaaacaaagtgtacctgtttccaccaaaaaagcctactccgatacaggggtaccacggatggaacacagagttcgaggcctgcaacgccttcgacagacctcccagaaagtacataacagacacacctacctacccctggctccccgtccccaatcctgaaataaaggtgagctttaagctcggtttccactaaacaaggccgtgggagtttcactcgtcggtgtctacctctaaaggtc

SEQ ID NO: 1853 - protein, 779 aa, Alphatorquevirus sp.
MAWWGWKRRWWRPKRRWRWRRARRRRRVPPRRPRRAFRRYRTRTVRRRRRGRRRGYRRRYRLRRYARRRFRRKKIVLTQWNPQTVRKCIIRGMMPVLWAGMGTGGRNYAVRSDDYVVNRGFGGSFATETFSLKVLYDQFQRGFNRWSHTNEDLDLARYRGCRWTFYRHKDTDFIVYFTNNPPMKTNQFSAPLTTPGMLMRSRFKILIPSFQTRPKGRKTVTVRIRPPKLFQDKWYTQQDLCSVPLVQLNVTAADFTHPFGSPLTETPCVEFQVLGDLYNTCLNIDLPQFTADGEPQNYTKPNKDNLKELYKELFTKKISGHYWQTFITNSMVRAHIDADKAKRAETNATSPTYNTEPFPTNPPKQDFNTWKNKFTDTRDSLFLFATYHPDKIASTIKTMRDNNFALETGPNDLYGDSTAQYAGNTHMLDYYLGFYSPIFLSDGRSNIEFFTAYRDIVYNPLLDKAEGNMVWFQYHTKADNKFKKPECHWEIRDMPLWALLNGYSDYLETQIQWGDLSKEGKVLIRCPYTKPPLVDKKDDTAGFVVYNRNFGRGKWIDGGGYIPLHERAKWYVMLRYQTDVFHDIVTCGPWQYRDDNKNAQLVAKYRFSFMWGGNTVHSQIIRNPCKDNQVSGPRRQPRDVQVVDPQLVTPPWVLHSFDQRRGLFTATALRRLLKQPLPGEYAVTSLRTPLLFLPSEFQREDGAAESVSGSPSKRPRLWPEESQTETISSEEDPAETTRELLQRKLREQRALQLQLQQFAVQLAKTQANLHVNPLLSFPQ

SEQ ID NO: 1854 - protein, 154 aa, Alphatorquevirus sp.
MFLGKIYRKKRKLLLQTVRAPQAPSSMSRCWCPPRGDVSTRESRWYESVRACHDAFCGCGDPVLHFSRLVARSNHQGPPTPPTDDRAPQNTPVRRLLPLPSYPGEGPAPRWPGGDGSAAGGDRREGGDGGARAAEDEYHPEDLDELFGAIEQEQ

SEQ ID NO: 1855 - protein, 126 aa, Alphatorquevirus sp.
LARREPDGDDLLGGGPGGDDEGAPPAKAPRAASTPVAAPAVRGPTRQDPGESPRKPPIIFPAVNKVYLFPPKKPTPIQGYHGWNTEFEACNAFDRPPRKYITDTPTYPWLPVPNPEIKVSFKLGFH

SEQ ID NO: 1856 - DNA, 2995 bp, Betatorquevirus sp.
cgggagccgaaggtgagtgaaaccaccgtagtctaggggcaattcgggctagatcagtctggcggaacgggcaagaaactaaaataaattattttttacagatatgagctctgtttggaagaaacccacatcatcaccgagacaacaagaactcgcttggagaaacctcatctttcaatctcacgaccaattttgccactgtgaagatgttgaccttcattttattttactaatgaacaaattcggaaacactccaaaaccagaatccgacgttagaaacatcaaatggcttattactggcaaaccagaagaagaaaaagaagatacaaccgaaaaagacgaccctggatttctagatggagaattagaaatacttttcaaagaaacaagtggagaagaaaaacaagacgccgccgcaagtacaaggtaaagaacatttatagacttaaaaaaaagaaagctattgttgttaaacaatttcaaccatatactacacaaaaatgtaaagttgtaggctttaaatgtttgtttcaaggctcacctctaagagcaaacaataactattttcaatatgtatatagctatattccagagaatcaaccaggaggtggaggatggggactatgtgtgtttagcttagactctttatttgaagactattcacacttagaaaatatatggactaaaagcaatgcaggactaccacttattagatacagaggctgtaagtttacattttatcaagcagaagacacagattatattgttacatatgacaattgctggcccatggtagatacaccacataaacatgcagacagtgcaccttttagaatgctaatgaaacatcacaaaataaccattcctagtagacaaacaaaaagactaagaaaaccctacaaaacaaaatacattagaccaccttcacaaatgcaaacaaaatggtactttcaaaaagacatttgcaaaactccactagtaatgttaactgtaacatcatgctcactaaaatacccatttacagctccagaagcaaaaagcaacaacattactttcagtatactaaacccatacctttttaaaaacagcaatttccaacattttgacacatcaggatacttttgtaagtacgcaaatccagacaacacagaacctctatacttatacgcatctacatcagacaaaattacatttgaaaaattaaatactgataaaaacatatttcttgtagcactagcaaatacaaaagaccacactgcaggacataatcttagaactacaaatgaaactaagctacaacaaagcctaggcaatccttttcacgaagactatacatcaggagatatgtttatatacatttcaaaaatgacaccattagaaacattaaaaaaaatactagaaaatcaggacccaccaacaaccaaaaaaagcataactttaacaggcaacatactatacaaagtaagatataacccaagcaaagacgacggaagtacaaataaagcctacgttgtaaacaatgaattaggaggcttaatagtaccaccaaataatccaaattttataatagaaggctttccacttcacacaatgctttggggatggacagactttattagaaaactaggagaagcaattcactttgatcaaaactactttgtaaccatagaaactaaagtaacagacaatgacaaactaccatatttaataccagtagacgaaacatttacacacggattaaacccatatagcccaattcacgcagacccagaccaccaaatacctatagatacatacaatgctaaaaactggtatccaagacatgaatatcaaaaagttgtaattaatactatttgtatgagtggacctgcgtgtccaagagctccatggaatcattatttacaagctaactgtaaatataaattttactttactctggggggatgtcctaaatgtttagaaaaaatatataatccttgttcacagcctaaatggcccactcccgataacctccttggaagatatgaagtccaggatcctaacaaacacccagcaacagaactatactcctgggactggaaaaaagactatgttacagaatcagctttacaaagaattagaaaatacacagacattgatcaaaaaattttctcaatttcagaaagcaaaaaccaaccagtactcctcgaaaaaccacaagaaaaagacgagcagaaagaggaggagaaggagctccagctccagctccaacacatcaagttccgacgcctcatgctccagctccaactccaacaattaaaatcaaaaacagtttaattaaagttaaactgtttgaagaaccaccaaaaaacagaagaatgactgcatgggaaaaagaacaagaaaaacaagacgcggctatatggaaaagacctcaaagagactttatatttgaccttcctttttatcctggcataccacctaccccactagtaaactttgacttaaaatacaaatatgaataaacaaggccaacataaattcacttagtggtgtccatttatttaagtaaaacttatataaacatccaccgcctccctaaaactcgggcgccaaaattcaaaaagggggctccgcccccttatacccccaagggggctccgcccccttacacccccaagggggctccgcccccttacacccccaccgcccccttacacccccaagggggctccgcccccttacacccccaagggggctctgcccccttacaccccctaatacatattcaacaggaaaaccacctaatttaaattgccgaccacaaaccgtttttaacttcccctttttacaacacttccccatttactaattattattcattatattaattagtactccttgtaattccggggaggagctaacaaactatataactaaccatacttccgaatggctgagtttatgccgccagacggagactgaagcagtttactgacttcaggctgatcttggg

SEQ ID NO: 1857 - protein, 676 aa, Betatorquevirus sp.
MAYYWQTRRRKRRYNRKRRPWISRWRIRNTFQRNKWRRKTRRRRKYKVKNIYRLKKKKAIVVKQFQPYTTQKCKVVGFKCLFQGSPLRANNNYFQYVYSYIPENQPGGGGWGLCVFSLDSLFEDYSHLENIWTKSNAGLPLIRYRGCKFTFYQAEDTDYIVTYDNCWPMVDTPHKHADSAPFRMLMKHHKITIPSRQTKRLRKPYKTKYIRPPSQMQTKWYFQKDICKTPLVMLTVTSCSLKYPFTAPEAKSNNITFSILNPYLFKNSNFQHFDTSGYFCKYANPDNTEPLYLYASTSDKITFEKLNTDKNIFLVALANTKDHTAGHNLRTTNETKLQQSLGNPFHEDYTSGDMFIYISKMTPLETLKKILENQDPPTTKKSITLTGNILYKVRYNPSKDDGSTNKAYVVNNELGGLIVPPNNPNFIIEGFPLHTMLWGWTDFIRKLGEAIHFDQNYFVTIETKVTDNDKLPYLIPVDETFTHGLNPYSPIHADPDHQIPIDTYNAKNWYPRHEYQKVVINTICMSGPACPRAPWNHYLQANCKYKFYFTLGGCPKCLEKIYNPCSQPKWPTPDNLLGRYEVQDPNKHPATELYSWDWKKDYVTESALQRIRKYTDIDQKIFSISESKNQPVLLEKPQEKDEQKEEEKELQLQLQHIKFRRLMLQLQLQQLKSKTV

SEQ ID NO: 1858 - DNA, 2994 bp, Betatorquevirus sp.
cgggagccgaaggtgagtgaaaccaccgcagtctaggggcaattcgggctagttcagtatggcggaacgggcaagaaacttaaaatattttgttttttttagatgagcaaatactataaaccaattcaactaagcttaaaacaccgcgacctgaattggattaacacacaagtagcaattcatgatcttcactgccaatgtgacaaccctctaaaacatatcattattggaataattgaaagagagccttctttaaagttcaacaaagaagaatcagctaaaattctaaaatgccttactactaccgacgaagatggagacgccgtagacgcccttggagacggagatttagaggcccttttcgcccaagacgtttttggacaagaagatacagggtaagacgatttaaaagaaaattacctaaaatacctataaaacaatggcaacccagtactataaaaaaactaactgtaaaaggacaatacccactattcagtggtacaacagaaagaattggtaatgataatactgcttatattgaccaaattgctcctcatgactttccttcaggaggactatacagtataactgtatttaccttagctggactatacgaactacatgaaaaagctagaaattggtggacaacaagtaattgtaatttaccattaataagatttatgggggctaccataaaattgtatgcatctactaatgttgactatgtaactgtacctgtaaactgtggggaacttaaagctaatgaatcactctttcaatcaacacagccatcaattcttaccttaaaccacagaaagaaaatattactatgcaaaaacacaacacacacaaagagaccatacaaaaaaattagaattaaaccaccagcactattatttaacaaatggtatttccaaaaagaattagctaactatccactagctatgatactaacatctgccgccagttttgacagatactacctaccttcatcagcagtaacagaaacaataggatttaaatccttaaacacaaaattttttcaacaacataactttaaacagaaacaaccagtagaaccctattcacctaaaccacacacatacatatttgctattggaggtacagttacaatagatactgccaaaagagaaaaccttattttacttggaaacactctagattatcaactaggatcccaaataggtcaaatgccggtaaccaaacccgaaagctggcaaaaacaagttgaccagtacttcgaaaaaagaactaactggggaaaccctttcaaacccacatattttgactttgacccagacgctggattaatattcttatacacaataaaggctggagaaacacttaaagacaaacttaaaggcctaagtagtggctttattaaagaccagggctttttagcaccaagtatgccattttacatagactgcagatacaatccacaagcagacatgaagcacaatgccacatttgtaacaagaataacagaaggcacacaaacatgggaaaaaccaaaagacacacacttatacactgaaggactacccttatgggacttactatggggatggagagactttctattaaaatctggatcaccacaacacctagacacagactatatacaagtaattatatctgatcacatatcgccaaaagaatatgactattacgtgccaattgatggatttatgttagctggaaaaagcccatattcagaccacattaaaccatatgaccaagacaactggcacccaaaagtaaactttcaattacaaagtgtagcacacattcttcaatcaggcccagcaacagctaaactaccagacaaacaaagtgcagaagcacacatgacctatcgctttcattttaaggttggaggatgcccaccaaaaatggacaatgtatgcaacccaaaaacacaaccagactaccctcaacccggtaacatcgtatcatcaattttattacagaatccagaatacccaatccaatactacctcaactcatttgatgaaagaaggggaatgctcacagagagagctgcaaaaagaatcaaaaaagacacggagactaaagaaactttttttaaacctacaggacaaactctcatgtccctcagaccagcatcccctcaaacaacatcgacagaggactcatcggaggaggaagaaaacgaaaaagagacacagaaaatcatctccagacaccaccgaaagcagcgaaacctccagcgacgaatcatggagctcctccaattaacacaaaatatgtaataaaacaatgtcgagttaaagtaaacttgtttgaaccagaaaaacctaaaaatagacttctaaatgcacaagaaagagaaacagacttatggttagctaaaatatttaagagaccatgtactcattatactcatgatatacctttttacccatggcttccccctactcctaaagtacccaaagttaattttgacttaaaatttactgaataaaggcctgcattatttcacttagtggtgtccatttatttaagtctcaactaatataaaccaacaccgcctccctacattgctggcctagcagggggctccgccccctgcaacccccaggggggacacccccctaaaaccccccgataaaccacaaaatttgcattgccgaccacaaacgaatagaaaaccacaaaatttgcattgccaaccacaaacgaacaggaaaccacaaaatttgcattgccgaccacaaacgaatatgctaattaaacttcctttttttacaccatacttccttaaacataaattagtaaacagcgtcacactaggcggagctaccacactataaatttaacaacacattcgaatggctggtcacactaggcggagctaccacactataaatttaacaacacattcgaatggctgagtttatgccgccagacggagacaggatcacgcagtgactccgggctgaacttggg

SEQ ID NO: 1859 - protein, 668 aa, Betatorquevirus sp.
MPYYYRRRWRRRRRPWRRRFRGPFRPRRFWTRRYRVRRFKRKLPKIPIKQWQPSTIKKLTVKGQYPLFSGTTERIGNDNTAYIDQIAPHDFPSGGLYSITVFTLAGLYELHEKARNWWTTSNCNLPLIRFMGATIKLYASTNVDYVTVPVNCGELKANESLFQSTQPSILTLNHRKKILLCKNTTHTKRPYKKIRIKPPALLFNKWYFQKELANYPLAMILTSAASFDRYYLPSSAVTETIGFKSLNTKFFQQHNFKQKQPVEPYSPKPHTYIFAIGGTVTIDTAKRENLILLGNTLDYQLGSQIGQMPVTKPESWQKQVDQYFEKRTNWGNPFKPTYFDFDPDAGLIFLYTIKAGETLKDKLKGLSSGFIKDQGFLAPSMPFYIDCRYNPQADMKHNATFVTRITEGTQTWEKPKDTHLYTEGLPLWDLLWGWRDFLLKSGSPQHLDTDYIQVIISDHISPKEYDYYVPIDGFMLAGKSPYSDHIKPYDQDNWHPKVNFQLQSVAHILQSGPATAKLPDKQSAEAHMTYRFHFKVGGCPPKMDNVCNPKTQPDYPQPGNIVSSILLQNPEYPIQYYLNSFDERRGMLTERAAKRIKKDTETKETFFKPTGQTLMSLRPASPQTTSTEDSSEEEENEKETQKIISRHHRKQRNLQRRIMELLQLTQNM

SEQ ID NO: 1860 - protein, 98 aa, Betatorquevirus sp.; identical to SEQ ID NO: 975

SEQ ID NO: 1861 - protein, 61 aa, Betatorquevirus sp.; identical to SEQ ID NO: 976

SEQ ID NO: 1862 - DNA, 2994 bp, Alphatorquevirus sp.
tccggcgctacgcgcttcgcgctgcgccggaccaaggggcaattcgggctcgggactggccgggctatgggcaaggctcttaaaaatgcacttttctaggtgcagtagaaagaaaaggacactgtcactgttaccactgcaccattcacagaaaactaggccatctgtgaaaggtatgtggagacccccgactcgaaatgcatttactattcaacgtgactggttctacagttgctttcactcccacgcttctatgtgtggctgtgctgattttattagtcatttcaatcatatcgctgctatgctcggccgtccggaagaccagaaccctcctccgccacccggggctctgagacccctacccgctctcccggcctcctccgagacacccggtgatcgagcaccatggcctatgggtggtggtggaggcaacggaggcgcccgtggaggaggagaagatggcgccgctggagacgtcgccggagaccccgcagacgccgacctcgtcgccgctatcgacgccgcagaacagtaaggagacgcggcagggggaggtggactaggagatatagacgatggcgccgcaagggcaaacgaagaggcaaaaaaaagattatcataaaacagtggcagcccaactacactcgcagatgcaacatagtgggctacatgcctctcctaatctgtggggaaaatactgttgctacaaactatgccactcactcagacgacagctactaccccggaccctttggggggggaatgactacagacaaatttactctaagaatactgtatgatgagtacaagaggtttatgaactactggaccgcctcaaacgaggacctagacctctgtagatacctaggagctactctatatgtgtttagacacccagaagtagactttatactaattataaacacctcccctccatttctagacacagaaataacagggcccagcatacacccaggcatgatggccctcaacaaaagagccaggtggatacctagcttaaaaaacagaccaggcagaaagcactatgtaaagattaaagtaggagccccccgaatgttcacagataagtggtacccccagacagacctctgtgacatgacactcctaacgatttttgccagtgcggcggatatgcaatatccgttcggctcaccactaactgacactatagttgtgtcattccaagttctgcaatccatgtacaacgactgcctaagtgtacttcctgaaaattttgcagacagaacaggcaaaggcgcccagctatatgaaaaaataattaatcatttaccctactacaacaccacacaaacacaagcacaatttaaaagatttgtagaaaacagtgcagcaaccaacggtgacaatatatgggcaaactacataaatactagtaagttctcaacaacgcaagaaccaaacaatgatacaaacataggaggcccttacaccggttattcagactcatggtacaaaggcacagtatacaatgacaaaattaaaaaaatacctgaaaaagcaagtaaattatactacgaccaaaccaaaaaacttattggcattacatttacaggatccacacacagactacactactgtggaggcctatattcttccgtatggctatcagcaggtagatcctactttgaaaccaaaggcccatacacagacatcacttacaaccccttttcagacagaggagagggtaatatgctatggatagactggctaactaaaaatgactcagcttactcaaaaacaagtagcaagtgcctcatagaacacttgcccctgtgggccgcagtatacggatacaaagaatactgcagcaaagtcacaggagacacaaacatagaacacaactgtagatgtgttataagaagcccctacacagtaccacagctattagaccacaacaatcccctcagaggttacgtgccttatagcataaactttggaaatggtaaaatgccaggcggtagcagcctagtacccattagaatgagagccaagtggtaccccactcttttccaccaaaaagaagtactagaggccatagcgcaggcgggcccctttgcataccactcagacattaaaaaagtgtccctgggcataaagtacagatttaagtgggtatggggtggcaaccccgtgtcccaacaggttgttaaaaacccctgcaagaccacccaaggttcctcgggcaatagagtgcctcgatcaatacaagtcgttgacccgcggtacaacgcgccagagctcaccatacacgcgtgggacttcagacatgggttctttggcagaaaagctattaagagaatgcaagaacaaccaatacctcatgacactttttcagcagggttcaaacgcagtcgccgagacacagaagcactccaatccagtcaagaagagcaacaaaaagaaaacttacttttcccagtccagcagctcaagcgagtccccccgtgggagacctcgcaagagagccaaagcgaggaagaaaactcgcaaaaacaggagaccctctcccagcaactcagagaccagctgcacaagcagcggctcatgggagagcaactccgatcgctcctctaccaaatgcagagggtccaacaaaatcaacacataaaccctatgttattgccaaagggtctggcattaacttctatttctcacaatgtaatatagatatgtttggtgaccccaaaccctacaagccctcctccaatgactggaaggaggagtacgaagccgcaaagtactgggacagaccccccagacacgacctgagaagcacccccttctacccctgggcccccacccccaaaccatacaatgtcaactttgccctcaactacaaataaacggtggccgtgggagtttcacttgtcggtgtctacctcttaaggtcactaagcactccgagcgtaagcgaggagtgcgaccctctaccaaggggcaactccctcgaag

SEQ ID NO: 1863 - protein, 767 aa, Alphatorquevirus sp.
MAYGWWWRQRRRPWRRRRWRRWRRRRRPRRRRPRRRYRRRRTVRRRGRGRWTRRYRRWRRKGKRRGKKKIIIKQWQPNYTRRCNIVGYMPLLICGENTVATNYATHSDDSYYPGPFGGGMTTDKFTLRILYDEYKRFMNYWTASNEDLDLCRYLGATLYVFRHPEVDFILIINTSPPFLDTEITGPSIHPGMMALNKRARWIPSLKNRPGRKHYVKIKVGAPRMFTDKWYPQTDLCDMTLLTIFASAADMQYPFGSPLTDTIVVSFQVLQSMYNDCLSVLPENFADRTGKGAQLYEKIINHLPYYNTTQTQAQFKRFVENSAATNGDNIWANYINTSKFSTTQEPNNDTNIGGPYTGYSDSWYKGTVYNDKIKKIPEKASKLYYDQTKKLIGITFTGSTHRLHYCGGLYSSVWLSAGRSYFETKGPYTDITYNPFSDRGEGNMLWIDWLTKNDSAYSKTSSKCLIEHLPLWAAVYGYKEYCSKVTGDTNIEHNCRCVIRSPYTVPQLLDHNNPLRGYVPYSINFGNGKMPGGSSLVPIRMRAKWYPTLFHQKEVLEAIAQAGPFAYHSDIKKVSLGIKYRFKWVWGGNPVSQQVVKNPCKTTQGSSGNRVPRSIQVVDPRYNAPELTIHAWDFRHGFFGRKAIKRMQEQPIPHDTFSAGFKRSRRDTEALQSSQEEQQKENLLFPVQQLKRVPPWETSQESQSEEENSQKQETLSQQLRDQLHKQRLMGEQLRSLLYQMQRVQQNQHINPMLLPKGLALTSISHNVI

SEQ ID NO: 1864 - protein, 159 aa, Alphatorquevirus sp.
LAGLWARLLKMHFSRCSRKKRTLSLLPLHHSQKTRPSVKGMWRPPTRNAFTIQRDWFYSCFHSHASMCGCADFISHFNHIAAMLGRPEDQNPPPPPGALRPLPALPASSETPGDRAPWPMGGGGGNGGARGGGEDGAAGDVAGDPADADLVAAIDAAEQ

SEQ ID NO: 1865 - protein, 57 aa, Alphatorquevirus sp.; identical to SEQ ID NO: 287

SEQ ID NO: 1866 - DNA, 2994 bp, Betatorquevirus sp.
cgggtgccgaaggtgagtgaaaccaccgtagtcaaggggcaattcgggctagagccgaaggtgagtgaaaccaccgtagtctaggggcaattcgggctagatcagtatggcggaacgggcaagaaacttaaatatattttattttacagatatgagctctgtttggaagaaacccacatcatcaccacgacaacaagaactagcttggagaaaccttatcttccaatctcacgatcaattttgccactgtgaagatgtcgatctccattttatactattaatgaacaaatttggaaactcaccaaaacctgaatctgaagttagaaacatcaaatggcttattactggcaaaccagaagaagaaaaagaagatacactcgaaaaagacgaccctggttttctagatggagagttagaaatacttttcaaagaaacaaatggagaagaaaaagaagaacccgccgcaagtacaaggtaaagaacacttatagacttaaaaaaaaaaaagctattattgttaaacaatttcaaccttatactatacaaaaatgtaaagtaataggatttaaatgtttatttcaaggctcacctctgagagccaataacaactactttcaatatgtatacagctatattccagaaaatcaaccaggaggaggaggttggggactatgtgtatttagcctagactctctatttgaagattactcacacttagaaaatatatggactaaaagcaacgcaggtttacctctaattagataccgaggctgcaaatttactttttatcaatctgaagacacagactacatagtaacatatgacaactgctggcctatggtggatacaccacacaaacatgcagacagtgcaccatttagaatgctaatgaaacatcataaaataactatacctagcagaaacacacaaaaaagaagaaaaccatacaaaacaaaatttattagaccaccatcacaaatgcaaacaaaatggtactttcagaaagacatctgtaaaacaccacttgtaatgctcaccataacttcatgctcactaaaatatccatttacagcaccagaagcacaaagtaacaacatttctattagcatactaaacccatacctatttaaaaacagcaatttccaacatttcgatgcatcaggatacttttgcaaatacgcaaatccaaacaacacagaacctttatacttatacgcaagcacagaagatacattaacatatgagaaattaaaaaacaataaccacctaatagcattagctaacacaaaagaccacacacccggacacccactaattactagcacaaacaacaacgactctaaaacatggggaaacccatttcatgaagactacacaaacggagacatgcacatttacatttccaaaatgacaccacatgaaacatatttaaaaataaaacaagacaaagatccaacagacgtaaccaaaagaagcattacattaactggtagcatactttatacagtaagatacaaccctacaaaagacgacggaaacagcaacaaagcttacatagtaaataatgaacttggaggtctaattcaacctccaaataatccaaactttacaattgaaggttttccactacacacaatgctgtggggttggacagactttttaagaaaactaggagaagctatacattttgatcaaaactactttgttacaatagaaacaaaacatgtcaacaatgataaactaccatacctaattccagtagacgaaacttttagacacggactaaatccttacagtccaattcatacagatgttgaacatcaaatacctatagatgaatacaataaaaaaaactggtaccctagacacgaataccaaaaagtgactataaacaatatctgtatgtctggacctgcgtgtccaagaccaccatggaaacattatatgcaagctgtttgtaaatacaaattttactttactttggggggatgtccaaaatcattagaaaaaatttataatccttgttcacagcctaaatggcccacacccgataacatcactggaagatatgaaatccaggatcctaacacacacccagcaaccgaactatactcctgggactggaaaaaagactatgttacagaatcagctttacaaagaattagaaaacacacagaaattgatccaaaaattttctcaattccagaaagcaaaaacatgccagtcctcctccaaaaaccgcaagaaaaagaccagcagaaagaggaggagaaagaactcgagctccagctgcagcacatcaagttcagacgagtcctcctgcagctccaactccaacaattaaaataacaaaaagcaaatttaaaattagcctatttgacgaacctaaaaagaacagacgaatgaatgcgtgggaacaagcacaagaaaaagaagacgcagcaatttggctgcgcccacaaagacactttatttttgaccctcctacctatccatggtgtcctcctgaaccatatgtaaactttgaattaaaatacaaatatgaataataaaggccaacattaattcacttaatggtgtccatttatttaagttcatactttaataaacatccaccgcctccctatcactagggcgccaaaattcaaaagggggctccgcccccttaaacccccaagggggctccgcccccttcaaccccaaagggggctccgcccccttcaacccccaagggggctccgcccccttacacccccttattaatattcaacaggaaaaccacataattagaattgccgaccacaaaccgtcactcacttcttctttttacattacttccctttttactcattattattcattacattaattaataatcaccgtaattccggggaggagacattcaactatataaccaagtacacttccgaatggctgagtttatgccgccagacggagacgggagcagttcactgactccaggctgaccaaggg

SEQ ID NO: 1867 - protein, 671 aa, Betatorquevirus sp.
MAYYWQTRRRKRRYTRKRRPWFSRWRVRNTFQRNKWRRKRRTRRKYKVKNTYRLKKKKAIIVKQFQPYTIQKCKVIGFKCLFQGSPLRANNNYFQYVYSYIPENQPGGGGWGLCVFSLDSLFEDYSHLENIWTKSNAGLPLIRYRGCKFTFYQSEDTDYIVTYDNCWPMVDTPHKHADSAPFRMLMKHHKITIPSRNTQKRRKPYKTKFIRPPSQMQTKWYFQKDICKTPLVMLTITSCSLKYPFTAPEAQSNNISISILNPYLFKNSNFQHFDASGYFCKYANPNNTEPLYLYASTEDTLTYEKLKNNNHLIALANTKDHTPGHPLITSTNNNDSKTWGNPFHEDYTNGDMHIYISKMTPHETYLKIKQDKDPTDVTKRSITLTGSILYTVRYNPTKDDGNSNKAYIVNNELGGLIQPPNNPNFTIEGFPLHTMLWGWTDFLRKLGEAIHFDQNYFVTIETKHVNNDKLPYLIPVDETFRHGLNPYSPIHTDVEHQIPIDEYNKKNWYPRHEYQKVTINNICMSGPACPRPPWKHYMQAVCKYKFYFTLGGCPKSLEKIYNPCSQPKWPTPDNITGRYEIQDPNTHPATELYSWDWKKDYVTESALQRIRKHTEIDPKIFSIPESKNMPVLLQKPQEKDQQKEEEKELELQLQHIKFRRVLLQLQLQQLK

SEQ ID NO: 1868 - DNA, 2993 bp, Alphatorquevirus sp.
cgggtgccggaggtgagtttacacaccgcagtcaaggggcaattcgggctcgggactggtcgggctatgggcaaggctcttaaaaaagcatgtttctcggtaaaatttacagaaagaaaaggaaagtgccactgtacggcctgccaactccaaagaaaaaaccacctactgctatgagccactggagcagacccgtccaccatgcaacggggatcgaacacctctggtaccagtctgttattaacagccattctgctagctgcggttgtggcgatcctgtacaccactttacttctcttgctcagaggtatggctttgccccaactccccgcgccccgccagtagccccaacgcccaccatccgtagagccaggcccgcgcctgccgctccggagccccgtgccctgccatggcatggggatggtggagaagaaggcgcaagtggtggtggaggcgccggttcgcccgaggcagacttcgcagacgacggattagacgccctcgtcgccgcactcgacgaagaacagtaaggaggcgcagacaatggaggagggggcgacccagacgcagactgtttaagcgaaagagacgctttaaaagacgcagacgaaaagctaagataaaaataacccagtggcagcctagctctgtaaaaagagcctttataataggctactttccaatggtaatatgtggtccaggaaggtggtcagagaactttaccagccacatagaggacaaggtagccataggaccctttgggggaggacacagcaccagcagatggtccctcaaagtactgtacgaagaattccagaagcaccacaacttctggacccaaagcaacaaagaactagaactagtaagatactttggcagcacgtggagattctatagacacgaagacgtagactatatagtttactacagcagaaagagtcccctaggaggaaacatactaacagcacccagcctgcaccccggagcagccatgttgagcaaacacaaaataatagtacctagctttaaaaccagaccaggaggcaaaccctccataaaagttaaagtaaagcccccaactacactaatagataagtggtactttcaacatgacatttgtgacactacactactaaacatgaacgttgtactatgcaacttgcggtttccgttctgctcaccacaaacgaacaacccttgtgtcaccttccaaatattgcatgaggtttaccacgacttcctctctataactgacagccggttacttagcacagacgcaaatgcatggaaaacgtactatagacaattcttagatgctgtctttactacagacagatcagccaacaaactaaatacagcactaacagagggatcttttcacgccccgcaaatacaaaaagacaaaacagctttaggaaataagtactttaaaactaaagacgcactatggggagacccaatattcttagcagactcacaagaaacaggaaactcaacattagagaaactaaaacagaaaatagttcaaaatgcaaacaactaccttgaaaaagtaaaacaagagttttcacaaaccactttagcaaccacaatgcacggcatgttcacacactggacaggcatgtacagcccagcctttttagactataacagaataagtccagaaattcccggtgtatacaaagacataatctataaccccctaacagacagaggcataggtaacgcagtatggatagactactgcagcaaaaaaggaacaggttacgaccccaaagccagcaaatgctacatagcagacctaccactgtggatggcagtttttggtatagtagactggctaaaaaaagacactggaaactggggcatacctgcctggtccagaataattattaaatgcccctacacttacccgcaactaatagacagcacagatgaatcaataggctttgtacccataggctacaactttgccagaggcagaatgcccgacggctcaaactacatacccatacaaatgagacacaagtggtaccccaacctactaaatcaacaggcagtactagaagacttaagtgaaagcgggccctttgcctacagagagaaaacaaactctgccaacataaacgtaaaatacaaattcaggttccattttgggggcaaccctgtgtccgaacagattgttgcagacccatgcaaacaacccacctttgaaatgcccggaaccagtacactccctcctcgactacaagtcacggacccgaaactcctcggcccgcactacacattccacagctgggacaaaagacgtgactactatagcagacgaactattaaaagaatgtcagaacaacaagaaacttctgagtttttattctcaggcccaaaaaaacccagagtcgatctggacgcagtgcagcctgtcgaaaaagactcttcaccccaacaaagaaaacagagaccctgggaaacgagcgagagcgaggaagagacagaagccctctcggaagaagaagagacgggctcggtccaccagcagctcaagcagcagctcagggagcaaaagcagctcagacagggaatccagtgcctcttcgagcagctaataaaaacccagcagggagtccacctagatccttccctcttgtaggccccaggcagtggctgtttcccgaaagaaagccagcccctgcccctagctctggagactgggccacagagtacctagcagctagagtgtttgatagacccccaagaagcaaccttaaagatacaccctactacccctacataaaaaaccagtacaatgtgtattttgacctcacattcgaataaagtgcagcttcaaacttgcaaggccgtgggagtttcactggtcggtgtctacctctaaaggtcactaagcactccgagcgtcagcgaggagtgcgacccttccccctgactcgtccgcagcggcagcaccacggagggtgatccccgcgtcccgaggg

SEQ ID NO: 1869 - protein, 746 aa, Alphatorquevirus sp.
MAWGWWRRRRKWWWRRRFARGRLRRRRIRRPRRRTRRRTVRRRRQWRRGRPRRRLFKRKRRFKRRRRKAKIKITQWQPSSVKRAFIIGYFPMVICGPGRWSENFTSHIEDKVAIGPFGGGHSTSRWSLKVLYEEFQKHHNFWTQSNKELELVRYFGSTWRFYRHEDVDYIVYYSRKSPLGGNILTAPSLHPGAAMLSKHKIIVPSFKTRPGGKPSIKVKVKPPTTLIDKWYFQHDICDTTLLNMNVVLCNLRFPFCSPQTNNPCVTFQILHEVYHDFLSITDSRLLSTDANAWKTYYRQFLDAVFTTDRSANKLNTALTEGSFHAPQIQKDKTALGNKYFKTKDALWGDPIFLADSQETGNSTLEKLKQKIVQNANNYLEKVKQEFSQTTLATTMHGMFTHWTGMYSPAFLDYNRISPEIPGVYKDIIYNPLTDRGIGNAVWIDYCSKKGTGYDPKASKCYIADLPLWMAVFGIVDWLKKDTGNWGIPAWSRIIIKCPYTYPQLIDSTDESIGFVPIGYNFARGRMPDGSNYIPIQMRHKWYPNLLNQQAVLEDLSESGPFAYREKTNSANINVKYKFRFHFGGNPVSEQIVADPCKQPTFEMPGTSTLPPRLQVTDPKLLGPHYTFHSWDKRRDYYSRRTIKRMSEQQETSEFLFSGPKKPRVDLDAVQPVEKDSSPQQRKQRPWETSESEEETEALSEEEETGSVHQQLKQQLREQKQLRQGIQCLFEQLIKTQQGVHLDPSLL

SEQ ID NO: 1870 - protein, 146 aa, Alphatorquevirus sp.; identical to SEQ ID NO: 1797

SEQ ID NO: 1871 - protein, 123 aa, Alphatorquevirus sp.; identical to SEQ ID NO: 1798

SEQ ID NO: 1872 - DNA, 2993 bp, Alphatorquevirus sp.
gccggacatctcgtgagtttacacaccgcagtcaaggggcaattcgggctcgggactggccgggccctgggcaaggctcttaaaaatgcacttttctaaaataagcagaaagaaaaggaaactgctactgcaaactgtgccgcttgcagagatcgaacggactaccatgagctggtccagacccgtccaaaatgtttcaattctcaaacaaaactggttcgaatcctgcctcagatcacacgcatgcttctgtggctgtaataatcctattattcattttaataacattgctactcgctttaactatttgcctactgccaatccgcctgtgggaccctcccaaccgcccacacgcccgccgtcccgcttgagaccccttcccgctctccccgcgcctcccgctgatccacaagcaccatgggctggggctggtggctcaagcggtggaggagaagaaagaaaccagcgtgaaagaagtggagaacgcgcagatggagaagatttcgacgcagaagacctaaacgcacttatggccgccgtcgaagaagacgaacagtaaggaggcgccgcggtagacgactgaggaggagggggtggactaggagacggtacataagacgcagacgcaaaaagaaaaagctagtactgacccagtggaacccccaggacgttaggagatgcacaataaggggcataataccccttatcatgtgcggtgcaaacactgccagttttaattatggcatgcacagcgatgacagcaccccccagccagagaagttcgggggaggcatgagcacagtaacattcagtttatttgtactatatgaccagtacaccagacacctaaacaggtggtcgtacccaaacgaccagctagacctagccagatacagaggctgcaaatttaaattctacagagacacctcaacagactttatagtcacctatgacattaatccacccatgaaaaacacagaactaagcagccctaacacacacccaggcatgcttatgcagcaaaaaagaaaggtactcgtccctagctgggacacgtatcccagaggcagaaaatatgtcctagttaagataccaccccccaaactgtttgaagaccactggtacactcagccagacttgtgcaaagttcctcttgtaactttgcggtcaactgccgctgacctcaaacatccgttctgctcaccacaaacgaacaacccttgcaccaccttccaggtgttgcgcagccagtataacaatatgataggcttcccctttaactataacccatcagacgaaactcaaacacaaaagttacaaacatttgaaaaatggctatattcatctagcacacactatcagacatttgccactgaagctaaccttagacccagacagtacaatgcagacggaactcaaaataaggactacagcaagttacaatccacctggacaactactatatatgcaaaaaaaacaaatagcaactttggctacacatcatacaacttttcaggagaggagggctataagtatgtaacacaaattagacagtggtactggacacaactaacatcctggacacaaacagtccctcacataaacagcaccttttccaatgccattcacccagagtttgaataccacgcgggctggtactcaaacatatttataggccccaacagatttaatatacagtttagagcagcctacatggatgtcacctacaacccaataaatgacaaaggccacctgaacaaagtatggttccagtacagcacaaaacccaccacagactttgtagaaaagcaggccaaatgtttactgcaaaacctgcctttgtggagcatgctgttcggctactcagagtatgtagaaagtcagctaggcccctttcaggaccacgaaacagtaggcctagtaatagtacagtgcccatacacagtaccccccatgtatgacaaagacaatccagacatggggttcgtgttctatgacacacactttggcaacggaaagctaggcaacggactgggccaggtacccagatactggcagcagagatggtaccccatcttaaagagacagaaacaagtcatgaatgacatctgcaagacgggaccatttgcgtacagagacgagagactgcaagctgacttgactgcaggatactcatttaagtttaactggggtggtgacttaatctaccaccaggttgtcaaaaacccatgcgactcaggaggactggtgccttccgactccagtagattcaagcgggacgtacaagttgttagcccgctcaccatgggacccagactcatcttccactcgttcgaccaaagacgggggctctttactgacagagctatcaaaagaatgtacgatgaacagattaatgttccagactttacagaacagcctaaaatcccccgacttttccccccagtcgagctcaaagaaagggaagaaaaagactcagattcggagacagagacgatcagcagctcccaagaaaaagaagcgaaaaggcaagaggcgctaccagtccagcagcagctccgactccaactgcgagaacaacagcgactccgagtccacttgcagcacctcttcctccaactccagaaaaccaaagcaaatttacatttaaacccactatcttttcagcaagagataagctagacatgtttggtaacattatagatagaaagcctacctcccaggactgggagacaaagtacatagcctgtagaatatttgacaggccccccagacagcaactcacagaccctcctttctatccttggatgcctaagcctaaacctgcatgccgtgtaacctttaagcttggctttcaataaacaaggccgtgggagtttcacttctcggtgtctacctctataagtcactaagctctccgagcgaagcgaggagagcgaccctaaaccaaggggcaactccctcgaagtccggcgctacgcgcttcgcgctgc

SEQ ID NO: 1873 - protein, 700 aa, Alphatorquevirus sp.
LRRRGWTRRRYIRRRRKKKKLVLTQWNPQDVRRCTIRGIIPLIMCGANTASFNYGMHSDDSTPQPEKFGGGMSTVTFSLFVLYDQYTRHLNRWSYPNDQLDLARYRGCKFKFYRDTSTDFIVTYDINPPMKNTELSSPNTHPGMLMQQKRKVLVPSWDTYPRGRKYVLVKIPPPKLFEDHWYTQPDLCKVPLVTLRSTAADLKHPFCSPQTNNPCTTFQVLRSQYNNMIGFPFNYNPSDETQTQKLQTFEKWLYSSSTHYQTFATEANLRPRQYNADGTQNKDYSKLQSTWTTTIYAKKTNSNFGYTSYNFSGEEGYKYVTQIRQWYWTQLTSWTQTVPHINSTFSNAIHPEFEYHAGWYSNIFIGPNRFNIQFRAAYMDVTYNPINDKGHLNKVWFQYSTKPTTDFVEKQAKCLLQNLPLWSMLFGYSEYVESQLGPFQDHETVGLVIVQCPYTVPPMYDKDNPDMGFVFYDTHFGNGKLGNGLGQVPRYWQQRWYPILKRQKQVMNDICKTGPFAYRDERLQADLTAGYSFKFNWGGDLIYHQVVKNPCDSGGLVPSDSSRFKRDVQVVSPLTMGPRLIFHSFDQRRGLFTDRAIKRMYDEQINVPDFTEQPKIPRLFPPVELKEREEKDSDSETETISSSQEKEAKRQEALPVQQQLRLQLREQQRLRVHLQHLFLQLQKTKANLHLNPLSFQQEIS

SEQ ID NO: 1874 - DNA, 2993 bp, Betatorquevirus sp.
cgggtgccgaaggtgagtgaaaccaccgaagtcaaggggcaattcgggctagatcagtctggcggaacgggcaagaaacttaaaacaaatttatattttacaggtatgacatctatttggaagaaacctttatacagtccgaaacaacaagaattaaaatggcttaaccttatgtgggaaagccatgatcaaatgtgcagctgccaagatccacctcttcacttgatgattttaattaacaaagattctaacgcaccaaaaccagaagcagatattcgaaacctaaaatgcctccttaccggtatggatactactaccaaagaagatatagaaaacgaagaccctatcttttgcgaaggagaactagaaagactcttcgcagaagatggagaagaaaaagatacaaaagaagacgaaaggtaaactttaaattttttaaaaagtttaataagaaattaaagactattaaagtaaaacaatggcaaccaaagcaaattattaaatgtaaaattaaaggaactaaatgcctaatacaaggctctccattacggagctcaaacaactttatacaatatgtatactcttatatacctgaatttcaacccgggggaggaggatggactttaatcatacacagtttagaaactctttatgaagactaccaacatttacaaaatatatggaccacaagcaacgcaggaatgccattagccagatatataggctgtaaaatgcgattttatcaaagcccagaaacagactacgttgttacatacgacaactgctggccaatggtagacacacctttaagccatgcagacgcagcaccaggatttatgttacaaaagaaaaacaaaataattattccctcaacattaaacaaaaaaaaaagaaaaccatacaaacaagtctggattagaccaccagcgcaaatgtataaccattggtacttcactaaagatatatgcaaaacaccattagtactcataactgctacaacttgcagcttaaacaatccttttgctaaaccagaagcacaaagcaataatatctcactaaaatgcttaaatgtaagactttttcaaaatacaaactttcaacacccaccagaaacaacatactactctccaaaaacaacagacacattacctacaaaaaacatttacttatactcaagtcacttagattacaacgaagcaaaagttaccaacttacatccactaggaaatacaaaagaaatgaaaataggagctccttacaccaatatacaaacagaagcagacataaaactctcaaacctaggaaacccatttgaaaaaagtaactttatatcagacgaaatgtacctatactactcaacaaaaaattttacagaaatgtataagctaaaaggttgcaatgacacattaaacaaaataccagatattttacctgtagagtctaaaacagtaataacagtaagatacaacccagacaaagataccggaaaagacaacaaagtatacttagtaaaaaattttgagaaccaaggttggaaagaaccaacagacgaaaacctaattattgaaggctttccattatactatgcattatggggatggctagactggcaaaaaaaactaaaaaaagcagttagaatttttaatgactacactttagtaatacaaacaaaaatgttcgatgttgaattaccatactacgtactattagatcaagattttatagacgggtatgaaccttatggagatttacatcaaccacctatacaaccatcatactacagcacacaaaattggtttccaaaaacaacattccaagaacaatcaattcaaaaaatttgtgacaccggtccatttacacctaaaacaccttggaaccactacttacaaattagatatcaatattgtttttactttaaatggggaggatgtccaaaagagttaaaaaaagcatatgacccttgcttacagccaaaatggcccactcccgataacatctcaccagcaactgaaatctcgaatccttcaacctctccatcaactatcctctactcatgggattggaaagaagactacattaaaaagaaagctattaaacgaattgcagaccacacaccaattaatgaaaatatactctccattacagaatcaaactacaacccaaaacccctacaaaagaaaagaaaaacagaaacatcggagagcgaagaagagaaggaagaggaggagctcctccagcagctcctcaagctcaagaagcaacgaaagcacctccaacagctcctccaattaacaggtataaaataaaagactgcaaattcaaagtagaactttttcctactacaaaaccatttaaaaacagaaaatttactcctgaggaatgggaagacgaaaaattcttagcatcatggatgaaaagaccccaaagacactttttctatgaccctcctacctatccctggttaccaccagaacccctagtaaactttgatgtaaactttaaagaataaaggccaacaaaattcacttgatggagtccgtttctttaatataaacttaataaacatccaccacactcccaaaattgttggcgccaaagggggctccgcccccttacacccccaagggggctccgcccccttacacccccaagggggctccgcccccttacacccccaagggggctccgcccccttacacccccaggggctccgcccccttacacccccaagggggctccgcccccttacaccccctaattaatattcaacaggaaaaccacctaatttaaattgccgaccacaaactgtcactaacttccctttttaccaacacttccctttttactacttattattcatgacattaattattaaacaccgtaattcctgggaggagtcaataaactatataaccaactacacttccgaatggctgagtttatgccgccagacggagactgaatcactctagtgacttcaggctgatcttggg

SEQ ID NO: 1875 - protein, 672 aa, Betatorquevirus sp.
MPPYRYGYYYQRRYRKRRPYLLRRRTRKTLRRRWRRKRYKRRRKVNFKFFKKFNKKLKTIKVKQWQPKQIIKCKIKGTKCLIQGSPLRSSNNFIQYVYSYIPEFQPGGGGWTLIIHSLETLYEDYQHLQNIWTTSNAGMPLARYIGCKMRFYQSPETDYVVTYDNCWPMVDTPLSHADAAPGFMLQKKNKIIIPSTLNKKKRKPYKQVWIRPPAQMYNHWYFTKDICKTPLVLITATTCSLNNPFAKPEAQSNNISLKCLNVRLFQNTNFQHPPETTYYSPKTTDTLPTKNIYLYSSHLDYNEAKVTNLHPLGNTKEMKIGAPYTNIQTEADIKLSNLGNPFEKSNFISDEMYLYYSTKNFTEMYKLKGCNDTLNKIPDILPVESKTVITVRYNPDKDTGKDNKVYLVKNFENQGWKEPTDENLIIEGFPLYYALWGWLDWQKKLKKAVRIFNDYTLVIQTKMFDVELPYYVLLDQDFIDGYEPYGDLHQPPIQPSYYSTQNWFPKTTFQEQSIQKICDTGPFTPKTPWNHYLQIRYQYCFYFKWGGCPKELKKAYDPCLQPKWPTPDNISPATEISNPSTSPSTILYSWDWKEDYIKKKAIKRIADHTPINENILSITESNYNPKPLQKKRKTETSESEEEKEEEELLQQLLKLKKQRKHLQQLLQLTGIK

SEQ ID NO: 1876 - protein, 105 aa, Betatorquevirus sp.
MTSIWKKPLYSPKQQELKWLNLMWESHDQMCSCQDPPLHLMILINKDSNAPKPEADIRNLKCLLTGMDTTTKEDIENEDPIFCEGELERLFAEDGEEKDTKEDER

SEQ ID NO: 1877 - DNA, 2993 bp, Alphatorquevirus sp.
gccttcggctgcgcgcggcacctcagacccctcaaggggcaattcgggctcgggactggccgggccccgggcaaggctcttaaaaagcatgtttctcggtaaactgtacagaaagaaaaggaaagtgccactgcaagctctgccagtaccaccgcctaaacggactagcatgagctgggtacaaccggtatctaacgtccatgttcgacaacaacaatggttcgagtccaccgttagaagccacgacgctttctgtggctgtggtgattccgtgcttcattttactaaccttgctactcgctttaaccgtctgcatgctgccccttcgcctctggatccgccctacccccctcccccgaggcgggcgcgtgtgagaggcctgccggccctccccgctcctgagaacccaccggcgccatggcctggcgctggtggagacgccgctggaaacccagaaggcggcccgcgtggacaaagtaccggagacgccgctggagacgatttcgaccccgcagacctagaagatctactcgccgccgtggaagaagacgaacagtaaggaggcgccgcattaggcgactgaggcggaggagggggtggactaggagacggtacttgagacgcagaaagagacgaaagctagtactgactcaatggaaccccagcactgttagacgctgcaatatcaggggcataataccccttatcatgtgcggggcaaacactgccagttttaactatggcatgcacagcgacgacagcactcctcagccagagacatttgggggcggcatgagcacagtgacttttagcctatatgtactgtatgaccagttcaccagacacatgaacaggtggtcgtaccccaacgaccagctagacctcgccagatacaaaggctgctcttttaaaatgtacagacaccccacaactgactttatactgacttatgacaacaatccccccatgaaaaacactatatacagctctcctaacacgcacccaggcatcctcatgcaacagaaacacagagtactaatacccagctggctcacctttcctaaaggcagaaaatatgtaaaggttaaaatacctccacctaagttatttgaagaccactggtacactcagcctgacttatgcaaagtaccgctcgttactctgcggtcaaccgcagctgacttcagacatccgttctgctcaccacaaacgaacaacccttgcaccaccttccaggtgttgcgagacaagtacaacgaagttattggacttccttttgcaaacactggctctaatccaactgttactcaacaaattaagtcctttgagacttggctatatgaatccagcacacactatcaaacatttcaaacagagcaaatgtttagaccaaaacaatacaatgcagatggctcacagtggaacgaataccaacaaatgctttctgactggactacaaaaatttaccacagaaaaacagacagtaactatggatattcctcctatgactttagtaacaatgcaggaggctaccagtatgctacaaagatgagacaacactactggacacaactaacaacactcacaagcagagtaccacacataaactctacctttgctgatgctaccactccagaatatgaataccacacaggctggttttcaccagtatttataggcccaaacagacacaacatacaatttagaacagcatacatggatgttacatacaaccctctaaatgacaaaggtcaatttaacagagtatggttccaatacagcactaaacctacaacacagtttaaccctatgcaatgcaaatgtgtattacaaaacatcccactgtggtcagctttatttggctacagtgaatatgtagaaagccaactaggcccctttcaagaccatgaaacagtaggcctagtagtagtacaatgcccctacacagtgccatcactatatgacaaagacagaaaagacatgggctacatattctatgacacaaactttggcaatggaaaactgggcaatggcagcggccaggtgcccagatactggcaacagagatggtaccccatactcaaaagacaaaaacaagtaatgaatgacatctgcaagactggacctttcagctacagagacgaactgcttcaggtggacttggcagcctcttacaccttcagatttaactgggggggcgacttactctaccaccaggtcatcaaaaacccgtgcgactcctcaggactggcacccaccgactccggtagattcaagcgggacgtacaagttgttagcccgctcaccatgggtcccagactcctcttccactcgtttgaccaaagacgggggttctttactgaaagagctatcaaacgaatgcatgatgaacaaattgatgttccagactttacacagcagcctaaaatcccccgcattttcccaccagtcgagctccaagaccaaagagaacaagcagaagaagactcgcgttcggaagcgctctcgctcacctcctcccaagaaaaagaagcagaagcccaagaaagtctaccgatacagcagcagctcagaaaacaactcagacagcaacagcagttgcgagtccacttgcagcacctcttcctccaactccaaaaaacaaaagcccatttacatttaaacccactatttttcccccaagagaacatgtagacatgttcggtaactactatgatagaaagccaacagcctcagactggcaaactgaatatgagtgctgtagggcctttgatagaccccctagaagcaaccttaaagacagccccttctacccctggatgccaaaacagtctcagtttcgtgtaaccttcaaacttggcttctaataaaatttgctaggccgtgcaactttcacttgtcggtgtctacctctaaaggtcactaagctctccgagcgcagcgaggagagcgacccttccccctgactcaacttcttcggagccgcgcgctac

SEQ ID NO: 1878 - protein, 758 aa, Alphatorquevirus sp.
MAWRWWRRRWKPRRRPAWTKYRRRRWRRFRPRRPRRSTRRRGRRRTVRRRRIRRLRRRRGWTRRRYLRRRKRRKLVLTQWNPSTVRRCNIRGIIPLIMCGANTASFNYGMHSDDSTPQPETFGGGMSTVTFSLYVLYDQFTRHMNRWSYPNDQLDLARYKGCSFKMYRHPTTDFILTYDNNPPMKNTIYSSPNTHPGILMQQKHRVLIPSWLTFPKGRKYVKVKIPPPKLFEDHWYTQPDLCKVPLVTLRSTAADFRHPFCSPQTNNPCTTFQVLRDKYNEVIGLPFANTGSNPTVTQQIKSFETWLYESSTHYQTFQTEQMFRPKQYNADGSQWNEYQQMLSDWTTKIYHRKTDSNYGYSSYDFSNNAGGYQYATKMRQHYWTQLTTLTSRVPHINSTFADATTPEYEYHTGWFSPVFIGPNRHNIQFRTAYMDVTYNPLNDKGQFNRVWFQYSTKPTTQFNPMQCKCVLQNIPLWSALFGYSEYVESQLGPFQDHETVGLVVVQCPYTVPSLYDKDRKDMGYIFYDTNFGNGKLGNGSGQVPRYWQQRWYPILKRQKQVMNDICKTGPFSYRDELLQVDLAASYTFRFNWGGDLLYHQVIKNPCDSSGLAPTDSGRFKRDVQVVSPLTMGPRLLFHSFDQRRGFFTERAIKRMHDEQIDVPDFTQQPKIPRIFPPVELQDQREQAEEDSRSEALSLTSSQEKEAEAQESLPIQQQLRKQLRQQQQLRVHLQHLFLQLQKTKAHLHLNPLFFPQENM

SEQ ID NO: 1879 - protein, 167 aa, Alphatorquevirus sp.
LAGPRARLLKSMFLGKLYRKKRKVPLQALPVPPPKRTSMSWVQPVSNVHVRQQQWFESTVRSHDAFCGCGDSVLHFTNLATRFNRLHAAPSPLDPPYPPPPRRARVRGLPALPAPENPPAPWPGAGGDAAGNPEGGPRGQSTGDAAGDDFDPADLEDLLAAVEEDEQ

SEQ ID NO: 1880 - protein, 56 aa, Alphatorquevirus sp.; identical to SEQ ID NO: 225

SEQ ID NO: 1881 - DNA, 2992 bp, Alphatorquevirus sp.
ttgcgcgtttcggaccttcggcggcgggggggcaaggggcaattcgggctcgggactggccgggctatgggcaaggctcttaaaaagatgcgtttctctaatatcacccgcagaaagaaaaggaaactgtcactgctacctgtgcacccttcacagaaaacacctaccatgagctttgtagaacccttactgagcagcaaccacagagagatagcatactaccatggctgtgttcagatgcacaaggccttctgtggctgcgacaactttcttacccacctgcagcgcataacaacatacatttctgctaaccaacacactccacccaccacaccctcaaacaccctccgtagagcccgggccctgcccgcggctccggagccaactccatggcgtggtcctggtggtggcagaggaggcgccgaaggtggccgtggagaaagagaaggtggagaagactacgcacaagaagacctagacgcactgttcgacgccgtcgcaagagatacagagtaaggagacggaggtggcggggaaggagacgtgggcgacgcacataccttagacgcagacttaaaaagagaaagagacgaaaaaaactaagactgactcagtggaaccctagcacaattaggggatgtacaattaaaggtatggcccccctaataatatgcggccacaccatggcaggcaataactttgccatccgaatggaagactacatatctcagataagaccgttcggagggtccttcagtaccaccacctggagcctaaaagtactgtgggacgaacacaccagattccacaacacctggagctacccaaacactcaactagatctagcaaggtttaaaggagtaaccttctacttctacagagacaaagacacagactttataataacttatagctccgtaccaccctttaagatagacaaatactcctcagccatgctacacccaggcatgcttatgcagagaaaaaagaagatattattacctagctttacaaccagaccaaggggcagaaaaaaagttaaagtacacataaaacctcctgtattatttgaagacaaatggtacacccagcaggacctgtgcgacgttaatcttttgtcacttgcggtttctgcggcttcctttagacatccgttctgcccaccacaaactgaaaacatttgcataaccttccaggttttgaaagacttctattacacacaaatgtcagttacaccagatgctacaggccaaactaaagacttagctatattcgatgaacacttatttaaaaatccacaattttatcaaactgttcacacacagggaataattaacaaaacacaaagaactgctcaattttcaacctcaaataatacactagcaaataaaacagacataagccaatacttagaccaaccaacatcaacaaacctaggaaaaacattatccacaggtaacaactcaatatatggctttgcatcatacaacccagatatacaaaaacttcactcaattcaagactggttttggaaacaagaaactaacgaaaacaatttagttaccggctcctatcaaatacctactaacaaatcagtaagctaccatctaggaaaatacagccccatattcttaagctcatttagaactaacctacaatttataactgcatacacagatattacatacaatccactaaatgacaaaggtaaaggaaaccatatttgggtacagtatgtaactaaaccagatacaatttttaatgaaagacaatgcaaatgccacatacaagacataccactatggtctgcatttcatggatacattgactttgtacaaagcgaactaggcatacaagaagaaatactaaacattgccattatagtagttatatgcccatacacaaaacctaaactactacacgacccaccaaatcaaatgcaaggctttgtattctatgacacacaatttggagatggtaaaatgccagagggcacaggcctagtacccatctactaccaaaacagatggtatcctagaataaagttccaaagtcaggtagtgcatgactttatactaacaggccccttcagctacaaagatgaccttaagagcacagtactaacagtagaatacaagttcaaattcttatggggtggcaatatgattcccgaacaggttatcagaaacccttgtaaaacagaaggacacgatctccctcacaccagtagactccatcgcgacttacaagttgttgacccacagaccgtgggcccccaatgggcgctccacacctgggactggcgacgtggactctttggttcagaggctatcaaaagagtgtctgaacaacaaatacatgatgaactgtattacccaccttcaaagaaacctcgattcctccctccaatatcaggcctccaagagcaagaaagagactacagttcggaggaggaaaaagaccactcctcctcagaagaggagacggacccaaagaaaaaagagcaaatacagcagcagcgactccacctccagttccaagagcagcagcgactcggacaccaactccgactcatcttcagagagctgcagaaaacccaagcgggtctccacataaatcctatgttatcaaaccgtctataaataaagtgtacctttttcctcccgaggggcctaaacccatctctggctacagagactgggaagaagaattcacgtgctgtaagtactgggatagacctagtagaattaaccacacagaccctcctttctacccctggatgcccaaatacaatgtaagcttcaaacttggctggaaataaaattgcaaggccgtgcactattcacttgtcggtgtctacctctataagtcactaagcactccgagcgtagcgaggagtgcgaccctcccccccggtagcaacttcttcggagtccggcgctacgccttcggctgcgccggacacctcagaccccccctccacccgaaacgc

SEQ ID NO: 1882 - protein, 750 aa, Alphatorquevirus sp.
MAWSWWWQRRRRRWPWRKRRWRRLRTRRPRRTVRRRRKRYRVRRRRWRGRRRGRRTYLRRRLKKRKRRKKLRLTQWNPSTIRGCTIKGMAPLIICGHTMAGNNFAIRMEDYISQIRPFGGSFSTTTWSLKVLWDEHTRFHNTWSYPNTQLDLARFKGVTFYFYRDKDTDFIITYSSVPPFKIDKYSSAMLHPGMLMQRKKKILLPSFTTRPRGRKKVKVHIKPPVLFEDKWYTQQDLCDVNLLSLAVSAASFRHPFCPPQTENICITFQVLKDFYYTQMSVTPDATGQTKDLAIFDEHLFKNPQFYQTVHTQGIINKTQRTAQFSTSNNTLANKTDISQYLDQPTSTNLGKTLSTGNNSIYGFASYNPDIQKLHSIQDWFWKQETNENNLVTGSYQIPTNKSVSYHLGKYSPIFLSSFRTNLQFITAYTDITYNPLNDKGKGNHIWVQYVTKPDTIFNERQCKCHIQDIPLWSAFHGYIDFVQSELGIQEEILNIAIIVVICPYTKPKLLHDPPNQMQGFVFYDTQFGDGKMPEGTGLVPIYYQNRWYPRIKFQSQVVHDFILTGPFSYKDDLKSTVLTVEYKFKFLWGGNMIPEQVIRNPCKTEGHDLPHTSRLHRDLQVVDPQTVGPQWALHTWDWRRGLFGSEAIKRVSEQQIHDELYYPPSKKPRFLPPISGLQEQERDYSSEEEKDHSSSEEETDPKKKEQIQQQRLHLQFQEQQRLGHQLRLIFRELQKTQAGLHINPMLSNRL

SEQ ID NO: 1883 - protein, 171 aa, Alphatorquevirus sp.
LRVSDLRRRGGKGQFGLGTGRAMGKALKKMRFSNITRRKKRKLSLLPVHPSQKTPTMSFVEPLLSSNHREIAYYHGCVQMHKAFCGCDNFLTHLQRITTYISANQHTPPTTPSNTLRRARALPAAPEPTPWRGPGGGRGGAEGGRGEREGGEDYAQEDLDALFDAVARDTE

SEQ ID NO: 1884 - DNA, 2991 bp, Alphatorquevirus sp.
gcggccgcgcgctacgccttcggctgcgcgcggaaggggcaattcgggctcgggactggccgggctatgggcaaggctcttaaaaaagacatggttttcttgggtcgcccctacagaaagaaaaggacactgctactgtctggcctgccagatccaaagaataaaccacctatgagctggcgtcctcccgtccacaatgccccgggcatcgagagaaacctctacgaggcagtctatcgcacacactcggctagctgtggctgtggggatctgcttggccatcttactcgcctggttgatcggtatggcactccgccgcgccctgggcctcccacagacccgccacctcgcctgagagccctgcctgcgccgcctcctgctccatcccgtaaccgggacccagtatggcctggtggggatggaggagacgctggcggcgccgcccctggtggagacgccgccgccgacgaccagtacgccgcagaagaaatcgagcagcttatggccgccgccgaggaagacgcacagtaaggagaaaaacatgggggaggcggaggagacgcagacgcacttacagacgcaggcggactgtcagactcagacgcagacgcagaaaaaagttagtactgactcagtggaaccccccctatgtcagacgctgctatataaaaggggtcatgcccgtggtaatctgtggacagcacaggtctagttttaactatgccatccactccgacgactaccagctacaggtgctacctttcggaggaggcatgagcaccataactatcagcctaaaagtactatatgatgagtttaccaggcacctaaacaggtggtcgtactccaacgaccagctagacctgtgcagataccggggctgcaccctaagagtgtacagagatacctcagtagactacataatgacttttgacaccatacctcccatgaaaatgaacgaactgacggcacccaacactcacccaggcttgcttatgctacagaaatacaaaatactaatacccagctggaaaactagacccaagggcaaaaaatataaaagagtaagaatactcccccctaagatgtttgaagacaaatggtactctcagagcgacctgtgcccagttccgcttgtcagtttgcggtttaccgcagctagcttccagtatccgttctgctcaccacaaacgaacactcctattactacattccaagtattacagccagagtacaatgaagtaataggttaccccacagggtacagcacaacagcttcctcaaaatttgaggagtggctttatggcaaatgctctcactatcaagcatttgccacagaagcccaccttagacctagaacagctacccctacaggaacccccataacaaatgaaactgtcaactctacaacatggtcaagcactgatactacttacacaatacccaacgataactcctacagaaactggggaaactggtggaaatatgacttttatgccacaaaatcagacagcctttatggctactgctcctttactcccaaagacaaaaaaggacgtgataacattattaatataagaaatagcaacttttactacttaaccacctgggacaatagtaacacaaaccacattaacaccacatatgcaaacgctaagtaccaggagtatgaatatcactgtggctggtactcttccatgttcatatctccacacagataccaactacagtttcccacagcatactttgactgcacatacaaccccctaaacgaccatggaaaaggcaacattatttggttccagtatctcacaaaacctactacacaatttatagaaaaacaatgtagatatgttcttaaagacattcccctgtgggccatggcccacgggtactctgactacatagactctcagctaggacccactcaagaccacgagacagtgggcctagtctgtgtcatatgtccctacactagacccagactatactcacaagataagcccgactatggttttgtattttatgactccctatttggccagggaaaaatgccagatggcacctcacaaataagcagattctgggcacaaagatggagagtatatctaggctttcaagaacaagtactaaacgacctcagcaacaccggaccatgggcatacagagacgaataccacagcaccacactaaccatgggctacacctttaaatttaactgggggggcgacatgatgtttccgcaggttgtcaaaaacccctgctcaaacacaggactggcacccggtaccgatagacagcgtcgcgaaatacaagtcattgacccgctcaccgtgggaccccaatgggttttccacccctttgacatcagacggggactctttactccaaaagctatcaaacgagtgtctgaaaaaccaattgatgatcagccatatatcaaacttccaaaacgacctcgtttcattacagcctcagagttccaagggcaagaaggcagttactattcaggggaaggaaaatcggagctctcggaagaagagagcgaagccgaagtccaagagacgtcggtacagacacagctcagagtccagctccgagagcagcagctcatcggcaagcagctccgagagctgtgggtccaactcgccaagacccagagcaatacgcacttaaaccccctattattttcccgagcataaataaagtgtacatgtttcccccaccacaagttaagaggcctcccagctcaggagactgggaaaccgagtatgctgcctgcaaggcctttgatagaccccctcgctcagacctgtcccgtcccccctgctacccctggatgcctgcaactttcaatgtaaacttcagccttaaattcaaataaatgttggccgtgggagttacgctggtcggtgtctacctctataagtcaccaagcactccgagcgtcagcgaggagtgcgacccttgtgggtgggtgcaacgccctcg

SEQ ID NO: 1885 - protein, 765 aa, Alphatorquevirus sp.
MAWWGWRRRWRRRPWWRRRRRRPVRRRRNRAAYGRRRGRRTVRRKTWGRRRRRRRTYRRRRTVRLRRRRRKKLVLTQWNPPYVRRCYIKGVMPVVICGQHRSSFNYAIHSDDYQLQVLPFGGGMSTITISLKVLYDEFTRHLNRWSYSNDQLDLCRYRGCTLRVYRDTSVDYIMTFDTIPPMKMNELTAPNTHPGLLMLQKYKILIPSWKTRPKGKKYKRVRILPPKMFEDKWYSQSDLCPVPLVSLRFTAASFQYPFCSPQTNTPITTFQVLQPEYNEVIGYPTGYSTTASSKFEEWLYGKCSHYQAFATEAHLRPRTATPTGTPITNETVNSTTWSSTDTTYTIPNDNSYRNWGNWWKYDFYATKSDSLYGYCSFTPKDKKGRDNIINIRNSNFYYLTTWDNSNTNHINTTYANAKYQEYEYHCGWYSSMFISPHRYQLQFPTAYFDCTYNPLNDHGKGNIIWFQYLTKPTTQFIEKQCRYVLKDIPLWAMAHGYSDYIDSQLGPTQDHETVGLVCVICPYTRPRLYSQDKPDYGFVFYDSLFGQGKMPDGTSQISRFWAQRWRVYLGFQEQVLNDLSNTGPWAYRDEYHSTTLTMGYTFKFNWGGDMMFPQVVKNPCSNTGLAPGTDRQRREIQVIDPLTVGPQWVFHPFDIRRGLFTPKAIKRVSEKPIDDQPYIKLPKRPRFITASEFQGQEGSYYSGEGKSELSEEESEAEVQETSVQTQLRVQLREQQLIGKQLRELWVQLAKTQSNTHLNPLLFSRA

SEQ ID NO: 1886 - protein, 154 aa, Alphatorquevirus sp.
MGKALKKDMVFLGRPYRKKRTLLLSGLPDPKNKPPMSWRPPVHNAPGIERNLYEAVYRTHSASCGCGDLLGHLTRLVDRYGTPPRPGPPTDPPPRLRALPAPPPAPSRNRDPVWPGGDGGDAGGAAPGGDAAADDQYAAEEIEQLMAAAEEDAQ

SEQ ID NO: 1887 - protein, 56 aa, Alphatorquevirus sp.
MFPPPQVKRPPSSGDWETEYAACKAFDRPPRSDLSRPPCYPWMPATFNVNFSLKFK

SEQ ID NO: 1888 - DNA, 2990 bp, Alphatorquevirus sp.
cttcggagtccggcgctactacacaccggagtcaaggggcaattcgggctcgggactggccgggctatgggcaacgctcttaaaaatgcacttttctaggatatccagaaagaaaaggctactgctactgcaaacagtgccagctccacagaaaactctcaaacttttaaaaggtatgtggagtcctcccactgacgatgaacgtgtccgcgagcgaaaatggttcctcgcaactgtttactctcactctgctttctgtggctgcgatgatcctgtcggtcacctgtgtcgcttggctactctctctaaccgtccggagaacccgggaccctccgggggacgtcgtgctccttcgatcggggtcctacccgctctcccggctgctaccgagcagcccggtgatcgagcaccatggcctatgggtggtggaggagacgccgcaggaggtggaagagatggaggagaaggcccaggtggagacgcccatggaggacccgcagacgcagacctgctagacgccgtggacgccgcagaacagtaaggagacgcaggcgcgggaggtggaggaggcgttatagaaagtggaggagaaagggcagacgcaggagaaaaaagaaacttataataagacaatggcagccaaactacaccagaaaatgcaacatagtaggctacatgccagtaatcatgtgtggagagaacactttaataagaaactatgccacacacgcagacgactgctactatccaggaccctttgggggcggcatggccacccagaaattcacactcagaatcctgtacgatgactacaaaaggtttatgaactactggacgtcctcaaacgaggacctagacctgtgtagatacaggggagtcaccctatacttcttcagacacccagaagtagactttataataattataaacaccacacctccgttcacagacacagagatcacaggacctagcatacatccgggcatgatggccctaaacaaaagagccaggttcattcccagcctaaagactagacctggcagaaggcacatagttaaaattagagtgggggcccccaaattgtacgaagacaagtggtacccccagtcagaactctgtgacatgcccctcctaaccgtctacgcgaccgcagcagatatgcaatatccgttcggctcaccactaactgacactcctgttgtaagcttccaagtattgcgcagcatgtacaacgacgcccttagcatacttccctctaactttgaaaatgaacacagtgcaggccgacaactgtacaaaaaaatatctgaatatttaccatactacaacacaacagaaacaatagcacagctaaagagatatatagaaaatactgaaaaaaattcaacaacgcccaatccatggcaatcaaagtatgttaacactactgcctttaccactgcacttactgttactacaacagtaccatacaccacattttcagacacctggtacaggggcacagcatacaaaaacgccatcactgaagtgccactgaaggcagcaacactatatgaaaaccaaacaaaaaacctgctgtctacaacatttacaggagggtccccgtacctagaataccatggaggcctgtacagctccatatggctatcagcaggccgatcctactttgaaacaaagggagcatacacagacatctgctacaacccctacacagacagaggagaaggcaacatggtgtggatagactggctatcaaagacagactccatttatgacaagagccgcagcaaatgccttatagaaaagctacccctatgggcagcagtatacgggtacgcagaatactgtgccaagagcaccggagactcaaacatagacatgaacgccagagtagtaataaggtgcccctacaccaccccccagatgatagacaccagcaacgaactgaggggcttcatagtatacagctttaactttggcaggggcaaaatgcccggaggcagcagcgaggtacccataagaatgagagccaagtggtacccctgtctctttcaccaaaaagaggttctagaagccatagggcagtcgggccccttcgcctaccactgtgaccaaaagaaagcagtgctaggcctaaaatacaggtttcactggatatggggcggaaaccccgtgtttccacaggttgttagaaacccctgcaaagacacacacggttcctcgggccctagaaagcctcgctcagtacaaatcattgacccgaagtacaacacaccagagctcacaatccacgcgtgggatttcagacgtggcttctttggcccaaaagctattaagagaatgcaacaacaaccaacagatgctgaacttattccaccaggccgcaagaggagcaggcgagacaccgaagccctccaaagcagccaagaaaagcaaaaagaaagcttacttttcaaacagctccagctccagcgacgagtacccccgtgggaaagctcgcaggcctcgcagacagaggcagagagcgaaaaagagcaagagggaaccctctcccagcagctccgagagcagcttcaccagcaaaagctcctcggcaagcagctcagggaaatgttcctacaagtccacaaaatccaacaaaatcaacacgtcaaccctatcttattgccaagggatcaggctttaatgtgctggtctcagattcagtaattaacatgtttggagaccctaaaccctacaaaccctccagcaacgactggaaagaagagttcgaggccgctaaatattgggacaggccccccagatctaaccttagagacaaccccttttatccctgggcccccccaaacaatccctacaaagtaaacttcaaactaggcttccaataaagctaggccgtgggagtttcacttgtcggtgtctgcttcttaaagtcgccaagcactccgagcgtaagcgaggagtgcgaccctcccccccggtagcaactt

SEQ ID NO: 1889 - protein, 765 aa, Alphatorquevirus sp.
MAYGWWRRRRRRWKRWRRRPRWRRPWRTRRRRPARRRGRRRTVRRRRRGRWRRRYRKWRRKGRRRRKKKLIIRQWQPNYTRKCNIVGYMPVIMCGENTLIRNYATHADDCYYPGPFGGGMATQKFTLRILYDDYKRFMNYWTSSNEDLDLCRYRGVTLYFFRHPEVDFIIIINTTPPFTDTEITGPSIHPGMMALNKRARFIPSLKTRPGRRHIVKIRVGAPKLYEDKWYPQSELCDMPLLTVYATAADMQYPFGSPLTDTPVVSFQVLRSMYNDALSILPSNFENEHSAGRQLYKKISEYLPYYNTTETIAQLKRYIENTEKNSTTPNPWQSKYVNTTAFTTALTVTTTVPYTTFSDTWYRGTAYKNAITEVPLKAATLYENQTKNLLSTTFTGGSPYLEYHGGLYSSIWLSAGRSYFETKGAYTDICYNPYTDRGEGNMVWIDWLSKTDSIYDKSRSKCLIEKLPLWAAVYGYAEYCAKSTGDSNIDMNARVVIRCPYTTPQMIDTSNELRGFIVYSFNFGRGKMPGGSSEVPIRMRAKWYPCLFHQKEVLEAIGQSGPFAYHCDQKKAVLGLKYRFHWIWGGNPVFPQVVRNPCKDTHGSSGPRKPRSVQIIDPKYNTPELTIHAWDFRRGFFGPKAIKRMQQQPTDAELIPPGRKRSRRDTEALQSSQEKQKESLLFKQLQLQRRVPPWESSQASQTEAESEKEQEGTLSQQLREQLHQQKLLGKQLREMFLQVHKIQQNQHVNPILLPRDQALMCWSQIQ

SEQ ID NO: 1890 - protein, 161 aa, Alphatorquevirus sp.; identical to SEQ ID NO: 1274

SEQ ID NO: 1891 - protein, 65 aa, Alphatorquevirus sp.
LVSDSVINMFGDPKPYKPSSNDWKEEFEAAKYWDRPPRSNLRDNPFYPWAPPNNPYKVNFKLGFQ

SEQ ID NO: 1892 - DNA, 2989 bp, Alphatorquevirus sp.
ttgcgcgtttcggaccttcggcgtcgggggggcaaggggcaattcgggctcgggactggccgggctatgggcaaggctcttaaaaagatgcgtttttctaatatcgcccgcagaaagaaaaggaaactgtcactgctacctgtgcaccctccacaggagacacctaccatgagctttgtagaacccttaattaacagccaccacagagaaatagcatactaccatggctgtgttcaaatgcacaaagcattttgtggctgcgacaactttctcacccacctgcagcgcataacaacactcctctctgctaaccaacacaccccacccagcacaccttcaaacaccctccgtagagcccgggccctgcccgcggctccggagcctcttccatggcgtggtcctggtggtggcagaggagacgccgaaggaggccgtggaccaggagaaggtggagaagactacgcacaagaagatctagacgccctattcgacgccgtcgcaagagatacagagtaaggagacggaggcggtggggcaggagacgtgggcgacgcacatactttagacgcagacttaaaaagagaaagagacgaaaaaagctcagactgactcagtggaaccctagcacaataagaggatgcacaattaaaggaatggctcctttaataatatgtggccacaccatgtcagggaataactttgccattcgaatggaggactatgtttctcaaattaaaccattcggagggtcttttagcaccacaacctggagccttaaagtactttgggacgaacacaccaggttccacaacacctggagctacccaaacacccagctagacctagcaaggtataaaggagtaaacttttacttttacagagacaaagacacagactttatagtaacatacagctcagtgccaccatttaaaatagacaaatactcttcagccatgctgcacccaggcatgctaatgcagagaaagaaaaagatattaatacccagctttacaaccagaccaaggggccgaaaaaaagttaaagtgcatataaaacctcctgttttatttgaagacaaatggtacacccagcaggacctgtgcgacgttaatcttttgtcacttgcggtttctgcggcttcctttagacatccgttctgcccaccacaaactgacaacatttgcataaccttccaagtgttgaaagacttctactatgaacaaatgtcagttacaccagatacacaaaaccaagaaaaagacaaaactatattagagaaattatatacaaatccagagtactatcaaactgtccacacaacaggcattatcaacaaaacccaaaaatcagcacaaatgcaaacatcaaagaacacactaggtgaacaatcctttattggcaattacttaaatccaccatcatcatccttaggtaaccaaacattagcaaccggtaacaactctatttatggctttccatcttacaacccaataaaagagaaaatgcaacaaattgctaactggttttggcagcaagaaactaacaaacaaaatgtagttacaggctcatattcaatgcctacaaattcagcagtaagctaccacctaggaaagtatagcccaatctttttaagctcttacagaacaaacctacaatttagaacagcatacacagatgtcacatacaatccactaaatgacaaaggtaaaggaaaccaaatatgggtacagtatgtaactaaaccagatactaaattcaatgccacacaatgcaaatgtcacatagtagatatacccctgtgggcagcattccatggctacatagactttgtacaaagtgaattaggcatacaagaagaaatattaaacattgccataatagtagttatatgtccatacacaaaacctaaactactacacgacccaccaaatgaaaaccaaggctttgtattctatgacacacaatttggagatggtaaaatgccagacggctcaggcctagtaccaatatactaccaaaacagatggtatccaagaattaagtttcagagtcaagtagtacatgactttatactaacaggccccttcagctacaaagatgaccttaaaagcgcagtactaacagtagagtacaagtttaaattcttatggggtggcaatatgattcccgaacaggttatcagaaacccatgtaaaacagaaggacacgatctccctcacaccagtagattccatcgcgacttacaagttgttgacccgcacaccgtgggtccccaatgggcgctccacacctgggactggcgacgtggactctttggtacagaagctatcaaaagagtgtcagaacaacaagtacatgatgagttatattacccaccttcaaaaaaacctagattcttccctccaatatcaggcctacaagagcaagaaggagactacagttcgcaggaagaaaaagaccagtcctcgacagaagaggagacggacccaaagaaaaaagagcaaatacagcagcgacgactccacctccagttccaagagcagcagcgactcggaaaccaactccgactcatcttcagagagctccagaaaacccaagcgggtctccacataaatcctatgttatcaaaccggctataaataaagtatacctttttcctcccgaggggcctaaacccatctctggctacagagactgggaagaagagttcacctgctgtaagtactgggacaggcctagtagaattaaccacacagacccccctttctacccctggatgcccaaatacaatgtaaccttcaaacttggctggaaataaacttacaaggccgtacactgttcacttgtcggtgtctacctctataagtcactaagcactccgagcgcagcgaggagtgcgaccctcccccccggtagcaacttcttcggagtccggcgctacgccttcggctgcgccggacacctcagaccccccctccacccgaaacgc

SEQ ID NO: 1893 - protein, 749 aa, Alphatorquevirus sp.
MAWSWWWQRRRRRRPWTRRRWRRLRTRRSRRPIRRRRKRYRVRRRRRWGRRRGRRTYFRRRLKKRKRRKKLRLTQWNPSTIRGCTIKGMAPLIICGHTMSGNNFAIRMEDYVSQIKPFGGSFSTTTWSLKVLWDEHTRFHNTWSYPNTQLDLARYKGVNFYFYRDKDTDFIVTYSSVPPFKIDKYSSAMLHPGMLMQRKKKILIPSFTTRPRGRKKVKVHIKPPVLFEDKWYTQQDLCDVNLLSLAVSAASFRHPFCPPQTDNICITFQVLKDFYYEQMSVTPDTQNQEKDKTILEKLYTNPEYYQTVHTTGIINKTQKSAQMQTSKNTLGEQSFIGNYLNPPSSSLGNQTLATGNNSIYGFPSYNPIKEKMQQIANWFWQQETNKQNVVTGSYSMPTNSAVSYHLGKYSPIFLSSYRTNLQFRTAYTDVTYNPLNDKGKGNQIWVQYVTKPDTKFNATQCKCHIVDIPLWAAFHGYIDFVQSELGIQEEILNIAIIVVICPYTKPKLLHDPPNENQGFVFYDTQFGDGKMPDGSGLVPIYYQNRWYPRIKFQSQVVHDFILTGPFSYKDDLKSAVLTVEYKFKFLWGGNMIPEQVIRNPCKTEGHDLPHTSRFHRDLQVVDPHTVGPQWALHTWDWRRGLFGTEAIKRVSEQQVHDELYYPPSKKPRFFPPISGLQEQEGDYSSQEEKDQSSTEEETDPKKKEQIQQRRLHLQFQEQQRLGNQLRLIFRELQKTQAGLHINPMLSNRL

SEQ ID NO: 1894 - protein, 171 aa, Alphatorquevirus sp.
LRVSDLRRRGGKGQFGLGTGRAMGKALKKMRFSNIARRKKRKLSLLPVHPPQETPTMSFVEPLINSHHREIAYYHGCVQMHKAFCGCDNFLTHLQRITTLLSANQHTPPSTPSNTLRRARALPAAPEPLPWRGPGGGRGDAEGGRGPGEGGEDYAQEDLDALFDAVARDTE

SEQ ID NO: 1895 - DNA, 2987 bp, Alphatorquevirus sp.
cgggtgccggaggtgagtttacacaccgcagtcaaggggcaattcgggctcgggactggccgggctatgggcaaggctcttaaaaagatgcgtttctctaatatcacccgcagaaagaaaaggaaactgtcactgctacctgtgcaccctacacaggagacacttaccatgagctttgtagaacccttaattagcagcaaccacagagagatagcatactaccatggctgcgttcaaatgcacaaagccttctgtggctgcgacaactttcttacccacctgcaacgcataacaacatacatttctgctaaccaacacactccacctagcacaccttcaaacaccctccgtagagcccgggccctgcccgcggctccggagcctcttccatggcgtggtcctggtggtggcagaggagacgccgaaggaggccgtggaccaggagaaggtggagaagactacgcacaagaagacctagacgccctgttcgacgccgtcgcaagagatacagagtaaggaggccaaggcggtggggcaggagacgtgggcgacgcacataccttagacgcagacttaaaaagagaaagagacgaaaaaagctcagactcactcagtggaaccctagcacaatcagaggatgtacaattaagggaatggctcctttaataatatgtggccacaccatgtcaggaaacaactttgccattcgaatggaagactatgtttctcagattagaccattcggaggctcttttagcaccacaacctggagccttaaagtactttgggacgaacacaccagattccacaacacctggagttacccaaacacccaactagacctagcaaggtttaaaggagtaaacttttacttctacagagacaaagacacagactttatagtaacatacagctcagttccaccttttaaaatagacaggtactcatcagccatgctgcacccaggcatgctaatgcagagaaaaaaaaagatattaatacccagctttacaaccagaccaagaggccgaaaaaaaattaaagtacatataaaaccacctgtattatttgaagacaaatggtacacccagcaggacctgtgcgacgttaatcttttgtcacttgcggtttctgcggcttcctttagacatccgttctgcccaccacaaactgacaacatttgcataaccttccaagtgttgaaagacttctactatcaacaaatgtcagttacaccagatgaaacaaaccaaacaaaggacagcactatattagacacattatatacaaatgcagagtactatcaaactgttcacacaacaggcattatcaacaaaacacaaagatcagccaaaatgcaaggatcaaacaacacactaggtgaccaaccctttattaaaaattatttaaacccaccatcatcatccttagctaaccaaacattagcaactgataataactcaatttatggttttccatcttacaacccaataaaagataaaatgaaagagatagctgcctggttttgggctcaagaaactaacacagaaaatgttgttacaggctcatattcaatgcctactaattcagcagtaagctaccacctaggaaagtacagcccaattttcctaagttcatacagaacaaatctacaatttagaacagcatacacagatgtcacatacaatccactaaatgacagaggtaaaggaaaccagatatgggttcaatatgtaactaaaccagatactaaatttaatgctacacaatgcaaatgtcacttagtagacatacccctgtgggcagcattccatggctacatagactttgtgcaaagtgaattaggcatacaagaagaaatacttaacattgccataatagtagttatatgtccatatacaaaacctaaactactacacgacccaccaaatgaaaaccaaggctttgtattctatgacacacaatttggagatggtaaaatgccagatggctcaggcctagtaccaatatactaccaaaacagatggtatcctagaataaagtttcaaagtcaggtactgcatgactttatactaacaggccccttcagctacaaagatgatcttaaaagcacagtactaacagtagaatacaagtttaaattcttatggggtggcaatatgattcccgaacaggttatcagaaacccttgtaaaacagaaggacacgatctccctcacaccagtagactccatcgcgacttacaagttgttgacccaaacaccgtgggcccccaatgggcgctccacacctgggactggcgacgtggactctttggtacagaggctatcaaaagagtgtcagaacaacaagtacatgatgagttgtattacccaccttcaaagaaacctagattcttccctccaatatcaggcctccaagagcaagaaagagactacagttcacaggaggaaaaagaccactcctcgtcagaagaggagaaggacccaaagaaaaaagagcaaatacagcagcgacgactccacctccagttccaagagcagcagcgactcggaaaccaactcagactcatcttcagggagctgcagaaaacccaagcgggtctccacataaatcctatgttatcaaaccggctgtaaataaagtgtacctattccctcccgaggggcctaaacccatctctggctacagagactgggaagaagagttcacctgctgtaagtactgggacaggcctagtagaattaaccacacagacctccctttttacccctggatgcccaaatacaatgtaaccttcaaacttggctggaaataaaattacaaggccgtacactgttcacttgtcggtgtctacctctataagtcactaagcactccgagcgcagcgaggagtgcgaccctcccccccggtagcaacttcttcggagtccggcgctacgtccgcagcggcagcaccacggagggtgatccccgcgtcccgaggg

SEQ ID NO: 1896 - protein, 749 aa, Alphatorquevirus sp.
MAWSWWWQRRRRRRPWTRRRWRRLRTRRPRRPVRRRRKRYRVRRPRRWGRRRGRRTYLRRRLKKRKRRKKLRLTQWNPSTIRGCTIKGMAPLIICGHTMSGNNFAIRMEDYVSQIRPFGGSFSTTTWSLKVLWDEHTRFHNTWSYPNTQLDLARFKGVNFYFYRDKDTDFIVTYSSVPPFKIDRYSSAMLHPGMLMQRKKKILIPSFTTRPRGRKKIKVHIKPPVLFEDKWYTQQDLCDVNLLSLAVSAASFRHPFCPPQTDNICITFQVLKDFYYQQMSVTPDETNQTKDSTILDTLYTNAEYYQTVHTTGIINKTQRSAKMQGSNNTLGDQPFIKNYLNPPSSSLANQTLATDNNSIYGFPSYNPIKDKMKEIAAWFWAQETNTENVVTGSYSMPTNSAVSYHLGKYSPIFLSSYRTNLQFRTAYTDVTYNPLNDRGKGNQIWVQYVTKPDTKFNATQCKCHLVDIPLWAAFHGYIDFVQSELGIQEEILNIAIIVVICPYTKPKLLHDPPNENQGFVFYDTQFGDGKMPDGSGLVPIYYQNRWYPRIKFQSQVLHDFILTGPFSYKDDLKSTVLTVEYKFKFLWGGNMIPEQVIRNPCKTEGHDLPHTSRLHRDLQVVDPNTVGPQWALHTWDWRRGLFGTEAIKRVSEQQVHDELYYPPSKKPRFFPPISGLQEQERDYSSQEEKDHSSSEEEKDPKKKEQIQQRRLHLQFQEQQRLGNQLRLIFRELQKTQAGLHINPMLSNRL

SEQ ID NO: 1897 - protein, 149 aa, Alphatorquevirus sp.
MGKALKKMRFSNITRRKKRKLSLLPVHPTQETLTMSFVEPLISSNHREIAYYHGCVQMHKAFCGCDNFLTHLQRITTYISANQHTPPSTPSNTLRRARALPAAPEPLPWRGPGGGRGDAEGGRGPGEGGEDYAQEDLDALFDAVARDTE

SEQ ID NO: 1898 - DNA, 2987 bp, Alphatorquevirus sp.
gcgcgctacgccttcggctgcgcgcggcaagtcaaggggcaattcgggctcgggactggccgggctatgggcaaggctcttaatgcgatcgcttttaaaaagaaatgtttattggcagggcttacagaaagaaaaggaaagtgccactgcctggcctgccagctacaccgcagaaacagcctagcatgagctggtccagacccgtgcacgatgccagaggaattgagcgtaactggtatgaatccacctaccgagctcacgctgcttgttgcgggtgcggaaattttattcatcatattaacaatttggctactcgctacggctttgctcctggcgccccgccacctggtggtccaaggccgaggccgccagtaccagtagacggctctagacccgcgctgccatggcgtggtggtggcgaacacggtggagatggcgccaacccagaaggcgatggagacggtggcgcagacgcaggagactaccgcgcagaagagctagaagagctgttcgccgccgtcgaaggagaccagtaaggaggcgccggtgggggaggcgtagatatagacgggggtacagacgcaggacttggctcagacgcagacgaagacgtacccgacgcaaactagtactgactcagtggcagccccagactcgcagaaaatgtaacataataggctacctccccatactgtggtgcgggtacctaaggagtgccaataactacgcctaccactctgacgattgcactaaacagcctgacccctttggaggggctcttagcactacctcctttgacctaaaagtgctatttgaccagcaccagcgaggtctcaataaatggacgttccctaacgaccagctagacctagccagatacaggggctgcgaactcactttttacaggactaaagccacagactttattggggtttatgacattacagctccttacaagttagacaagtacagctgccccagctaccaccctggaaaaatgatgtttcaaaaaaagaaaatactaattcctagctatgacactaaccctaagggtcctcagaaaattaaggttaagatccctccccctaaactgttcgttgacaagtggtatacgcaagaggacctgtgcgacgttaatcttatgtcacttgcggtttctgcggcttcctttacacatccgttcggctcaccactaacgaacaacccttgtgtaaccttccaggtgcttgactcaatatactatgctgtaataggctttagtgcaccagaacagaaaagacaagaagttttagacactttatactcacaaaatgcttactggtccagccacttaactccatactttcttgctggccttaaaaaaccctttccacagaatgaatcactctttacagtaccagcaggctctgctaccgacagtcttatgacaggcacaggaacaactaccaacaaaaacaactcaataactatagcaggagacagtaactataactggtacccctataatgtatcacattttaaagcccaggtacataaaataagaaaacaatactttttatgggaaacagaggaagccccacaagctacatctacactaggaaaacaccacacgtggacaaaacccaccacagaccactacgaataccacctgggcctctttagtcctatattcataggcccaactagaagtaacaagatatttgccacagcataccaagatgtaacttacaaccccctaaacgacaagggagtgggcaaccacatatggtttcagtataactcaaaaatagatactaatatagcacaacagggctgctactgccaccttgaaaacatacccctgtgggcaggcttttatggctactctgactttgtagatcaagaactaggcccctttgtagacggagagaccgtaggctttgtgtgctgtatatgtccatacacagaacccccaatgttcagaaaagacaatccaggccagggctacgtgttttatgaccagttctttggcaatggcaagtggattgacggacgtggacacatagaaccatactggctgtgcaggtggagaccagaaatgctgttccagcacatggtaatgagagacatagtacagactggaccgtttagctacaaagacgaaagcaaaaactgtgtacttaccatgaaatacaaatttaaatttacctggggcggcaatatggtctcccaacagacaatcagaaacccctgcaagacggacgcaccctccagtaccggtagacagcctagagagttacaaattgttgacccgcagtccatgggtcccaaatgggtattccacgcctgggactggagacgtggcttccttaatgacacagctctcaaacgcttgcgagaaaaaccactcgattatgaagagtatagcaaaaagccaaaaagacctagacttttccctgttacagagaggggcaaagagttccagcagcaaggagaaggctccgattcggaggaagaaaaatacccgtcatttacagaagagcaaacgaaggagaacatacagcagcacctccagctccagctccgaaagcaacagcgactcggagagcagctccgactcctgcagaaccacctgctcaaaacgcaagcgggtctccacctaaaccccctattatttatccagcagtaaacaaggtacttctatttgagcccagtgggcccagacctctaaccaccgcagaggactggcgcactgagtaccagtgttgcaagcactgggacaggccccctcgcaaatttcacacagatactcctttctatccctgggcccctaaacctcatccttaccaagttagctttaaaataggcttttctcaataaacaaggcattttactgttcacttgtcggtgtcaacctctataagtcactaagcactccgagcgaagcgaggagtgcgacccttccacggcgcgccccctactgccctggtgcaacgccctcggcggcc

SEQ ID NO: 1899 - protein, 754 aa, Alphatorquevirus sp.
MAWWWRTRWRWRQPRRRWRRWRRRRRLPRRRARRAVRRRRRRPVRRRRWGRRRYRRGYRRRTWLRRRRRRTRRKLVLTQWQPQTRRKCNIIGYLPILWCGYLRSANNYAYHSDDCTKQPDPFGGALSTTSFDLKVLFDQHQRGLNKWTFPNDQLDLARYRGCELTFYRTKATDFIGVYDITAPYKLDKYSCPSYHPGKMMFQKKKILIPSYDTNPKGPQKIKVKIPPPKLFVDKWYTQEDLCDVNLMSLAVSAASFTHPFGSPLTNNPCVTFQVLDSIYYAVIGFSAPEQKRQEVLDTLYSQNAYWSSHLTPYFLAGLKKPFPQNESLFTVPAGSATDSLMTGTGTTTNKNNSITIAGDSNYNWYPYNVSHFKAQVHKIRKQYFLWETEEAPQATSTLGKHHTWTKPTTDHYEYHLGLFSPIFIGPTRSNKIFATAYQDVTYNPLNDKGVGNHIWFQYNSKIDTNIAQQGCYCHLENIPLWAGFYGYSDFVDQELGPFVDGETVGFVCCICPYTEPPMFRKDNPGQGYVFYDQFFGNGKWIDGRGHIEPYWLCRWRPEMLFQHMVMRDIVQTGPFSYKDESKNCVLTMKYKFKFTWGGNMVSQQTIRNPCKTDAPSSTGRQPRELQIVDPQSMGPKWVFHAWDWRRGFLNDTALKRLREKPLDYEEYSKKPKRPRLFPVTERGKEFQQQGEGSDSEEEKYPSFTEEQTKENIQQHLQLQLRKQQRLGEQLRLLQNHLLKTQAGLHLNPLLFIQQ

SEQ ID NO: 1900 - protein, 143 aa, Alphatorquevirus sp.; identical to SEQ ID NO: 972

SEQ ID NO: 1901 - DNA, 2987 bp, Alphatorquevirus sp.
gcgcgctacgccttcggctgcgcgcggcaagtcaaggggcaattcgggctcgggactggccgggctatgggcaaggctcttaatgcgatcgcttttaaaaagaaatgtttattggcagggcttacagaaagaaaaggaaagtgccactgcctggcctgccagctacaccgcagaaacagcctagcatgagctggtccagacccgtgcacgatgccagaggaattgagcgtaactggtatgaatccacctaccgagctcacgctgcttgttgcgggtgcggaaattttattcatcatattaacaatttggctactcgctacggctttgctcctggcgccccgccacctggtggtccaaggccgaggccgccagtaccagtagacggctctagacccgcgctgccatggcgtggtggtggcgaacacggtggagatggcgccaacccagaaggcgatggagacggtggcgcagacgcaggagactaccgcgcagaagagctagaagagctgttcgccgccgtcgaaggagaccagtaaggaggcgccggtgggggaggcgtagatatagacgggggtacagacgcaggacttggctcagacgcagacgaagacgtacccgacgcaaactagtactgactcagtggcagccccagactcgcagaaaatgtaacataataggctacctccccatactgtggtgcgggtacctaaggagtgccaataactacgcctaccactctgacgattgcactaaacagcctgacccctttggaggggctcttagcactacctcctttgacctaaaagtgctatttgaccagcaccagcgaggtctcaataaatggacgttccctaacgaccagctagacctagccagatacaggggctgcgaactcactttttacaggactaaagccacagactttattggggtttatgacattacagctccttacaagttagacaagtacagctgccccagctaccaccctggaaaaatgatgtttcaaaaaaagaaaatactaattcctagctatgacactaaccctaagggtcctcagaaaattaaggttaagatccctccccctaaactgttcgttgacaagtggtatacgcaagaggacctgtgcgacgttaatcttatgtcacttgcggtttctgcggcttcctttacacatccgttcggctcaccactaacgaacaacccttgtgtaaccttccaggtgcttgactcaatatactatgctgtaataggctttagtgcaccagaacagaaaagacaagaagttttagacactttatactcacaaaatgcttactggtccagccacttaactccatactttcttgctggccttaaaaaaccctttccacagaatgaatcactctttacagtaccagcaggctctgctaccgacagtcttatgacaggcacaggaacaactaccaacaaaaacaactcaataactatagcaggagacagtaactataactggtacccctataatgtatcacattttaaagcccaggtacataaaataagaaaacaatactttttatgggaaacagaggaagccccacaagctacatctacactaggaaaacaccacgcgtggacaaaacccaccacagaccactacgaataccacctgggcctctttagtcctatattcataggcccaactagaagtaacaagatatttgccacagcataccaagatgtaacttacaaccccctaaacgacaagggagtgggcaaccacatatggtttcagtataactcaaaaatagatactaatatagcacaacagggctgctactgccaccttgaaaacatacccctgtgggcaggcttttatggctactctgactttgtagatcaagaactaggcccctttgtagacggagagaccgtaggctttgtgtgctgtatatgtccatacacagaacccccaatgttcagaaaagacaatccaggccagggctacgtgttttatgaccagttctttggcaatggcaagtggattgacggacgtggacacatagaaccatactggctgtgcaggtggagaccagaaatgctgttccagcacatggtaatgagagacatagtacagactggaccgtttagctacaaagacgaaagcaaaaactgtgtacttaccatgaaatacaaatttaaatttacctggggcggcaatatggtctcccaacagacaatcagaaacccctgcaagacggacgcaccctccagtaccggtagacagcctagagagttacaaattgttgacccgcagtccatgggtcccaaatgggtattccacgcctgggactggagacgtggcttccttaatgacacagctctcaaacgcttgcgagaaaaaccactcgattatgaagagtatagcaaaaagccaaaaagacctagacttttccctgttacagagaggggcaaagagttccagcagcaaggagaaggctccgattcggaggaagaaaaatacccgtcatttacagaagagcaaacgaaggagaacatacagcagcacctccagctccagctccgaaagcaacagcgactcggagagcagctccgactcctgcagaaccacctgctcaaaacgcaagcgggtctccacctaaaccccctattatttatccagcagtaaacaaggtacttctatttgagcccagtgggcccagacctctaaccaccgcagaggactggcgcactgagtaccagtgttgcaagcactgggacaggccccctcgcaaatttcacacagatactcctttctatccctgggcccctaaacctcatccttaccaagttagctttaaaataggcttttctcaataaacaaggcattttactgttcacttgtcggtgtcaacctctataagtcactaagcactccgagcgaagcgaggagtgcgacccttccacggcgcgccccctactgccctggtgcaacgccctcggcggcc

SEQ ID NO: 1902 - protein, 754 aa, Alphatorquevirus sp.
MAWWWRTRWRWRQPRRRWRRWRRRRRLPRRRARRAVRRRRRRPVRRRRWGRRRYRRGYRRRTWLRRRRRRTRRKLVLTQWQPQTRRKCNIIGYLPILWCGYLRSANNYAYHSDDCTKQPDPFGGALSTTSFDLKVLFDQHQRGLNKWTFPNDQLDLARYRGCELTFYRTKATDFIGVYDITAPYKLDKYSCPSYHPGKMMFQKKKILIPSYDTNPKGPQKIKVKIPPPKLFVDKWYTQEDLCDVNLMSLAVSAASFTHPFGSPLTNNPCVTFQVLDSIYYAVIGFSAPEQKRQEVLDTLYSQNAYWSSHLTPYFLAGLKKPFPQNESLFTVPAGSATDSLMTGTGTTTNKNNSITIAGDSNYNWYPYNVSHFKAQVHKIRKQYFLWETEEAPQATSTLGKHHAWTKPTTDHYEYHLGLFSPIFIGPTRSNKIFATAYQDVTYNPLNDKGVGNHIWFQYNSKIDTNIAQQGCYCHLENIPLWAGFYGYSDFVDQELGPFVDGETVGFVCCICPYTEPPMFRKDNPGQGYVFYDQFFGNGKWIDGRGHIEPYWLCRWRPEMLFQHMVMRDIVQTGPFSYKDESKNCVLTMKYKFKFTWGGNMVSQQTIRNPCKTDAPSSTGRQPRELQIVDPQSMGPKWVFHAWDWRRGFLNDTALKRLREKPLDYEEYSKKPKRPRLFPVTERGKEFQQQGEGSDSEEEKYPSFTEEQTKENIQQHLQLQLRKQQRLGEQLRLLQNHLLKTQAGLHLNPLLFIQQ

SEQ ID NO: 1903 - protein, 143 aa, Alphatorquevirus sp.; identical to SEQ ID NO: 972

SEQ ID NO: 1904 - DNA, 2987 bp, Alphatorquevirus sp.
acgccttcggctgcgcgcggcacctcagacccccaggggcaattcgggctcgggactggccgggctatgggcaaggctcttaaaaaagcatgtttctcggcaggcattggagaaagaaaagggcactgctactgttaccggtgccagctaaaccgaaagcactttctcgacagatgagctggagcagacccgtacacgatgagcgcggaatacagcgcaactggttcgagggggtcattcgcacccactctgcttgctgtggttgtggcaatgcttgtactcatctatctgctctggcccagaggtatgggtacccttccctaccttcgcataccccgcgacccggcacctcgacacctgtgagcaccccggagcagatccgtagagcccgggccctgcccgcggctccggaccaccctccagccctgccatggcatggggatggtggaagagacggcggcgcggctggttccgacgtcggtggacccgtggcagagttcgcagaagatggcctcgacggacttatcgccgccctcgacgacgaacagtaaggaggcgcagacggaggaggagggggagacgaaaattcagacggtacagacttaaaagacgctaccgcagacgtaaaaagacccaaaaaattaaactaacacaatggcaacccgccaagacaaaacgctgctttatgataggatactttcctactgttattcagggacaaggacggtggtcagaaaactttaccagtcacatagaggataaggtagccaagggaccctttgggggcggacacagcaccagcaggtggtctctaaaagtactgtacgaggaaaaccagagacaccacaacttctggacatccagtaacaacgacctggagctggccaggttctttggcagctcctggaggttctacagacacgacacacaagactacatagtaacctggaacaggagggctcccctgggaggcaacatactgacagctcctaacatgcacccgggaatagccatgctaagcaaacacaagatagtggtccccagtaaactgaccagacccaggggcagaaaatacattaaaattaatataaaaccccccactacattcatagacaagtggtacttccagaaagacatatgcgaccttacattgctaaacatgaacgttgtaacatgtgacctgcggtttccgttctgctcaccacaaactgacaacatttgtgtaaccttccaggtgcttgcaccaatctataacgagttcctctctataaccgcaaaagaactaaccgaaacggggtggaaaaactactataaaaaatttttagagacagccatccctttaaacaaagaaagaaaagcaaacatattaaacacatttttaacagagggatcatacagacgaccacaagtagacaaatataaaaaaccagcaggagacaacaattactatctaccaaaagatgcacaatggggagatccaattcacattattaacagagatgaaactgctacaaatcaaacaccacaaacaagaacagagctaattgacaaaatacaaaaaaatgcagaaaatgtattacttaaagtaaaccaagaattacaggaataccaagcaacacaagcacaacacggtctattcacacactggacaggcatatacggacctccatttctagactataacagaataagtccagaaattagaggactatacaaagacataatatacaaccccttaatagacaaaggagtaggcaaccatgtatgggtagactactgcagtaaagcaactgctgagtactcagaaacacaaagcaaatgccacatagcagacctacctttatggtgtgcactatttggatatgcagactgggtaaaaaaagacacaggcaactggggcatagtagactgggccagagtacttataatatgtccttacacttttccaaaactatatgacagcgcaaatcctaacacaggctttgtagtaatagggtataactttgccagaggagctatgcccgacggaagcaaatacgttccaatagctatgagacacaaatggtaccctactatgttaaaccaacaacaagtactagaagacattagtttatctggaccatttgcaaacagagacaaagtacctagtgtccaactgactgccaagtacaagttccgatggcattttggtggcaatcctgtttccgaacagattattaaagacccgtgccaacagcccaccttccaaatgcccggaaccggtacactccctcgcagaatacaagtggcggacccgaaatacctcgggccccagtacaccttccactcgtgggactacagacgtgacttctttaacagaaagactattaaaagaatgtcagaacaaccagaaacttttgagtctatattctcaggcgcaaaaaaaccaagggtggacctcgacaaaatccagctgcaagaagacaactattcccaagagcaaagaaaacagaaaccgtgggaagacagcgagacccagacagagagcgaagtcccatcacaagaagagacgcaaaacctacagcagcagctccaacagcagctccgagaacaaaagcagctcagacagggaatcaactgcctcttcgagcagctgataaaaacccaacagggagtccatatagatccttcccttgtataggcccaaaagccttacttttcccagagagagcacccagaacctactctaagggagactgggaaacagagtatcaggcctgcagagcgtttgacagacctgctagaagcaacctaacagacatacccttttacccttaccttccaccaccccccgaaaaattctatgtaacctttaagcttggctttaaataaacaaggccgtgggagtttcacttgtcggtgtctgcttataaaggttactaagcactccgagcgaagcgaggagtgcgaccccctgccctgggcccacttcttcggagccgcgcgct

SEQ ID NO: 1905 - protein, 749 aa, Alphatorquevirus sp.
MAWGWWKRRRRGWFRRRWTRGRVRRRWPRRTYRRPRRRTVRRRRRRRRGRRKFRRYRLKRRYRRRKKTQKIKLTQWQPAKTKRCFMIGYFPTVIQGQGRWSENFTSHIEDKVAKGPFGGGHSTSRWSLKVLYEENQRHHNFWTSSNNDLELARFFGSSWRFYRHDTQDYIVTWNRRAPLGGNILTAPNMHPGIAMLSKHKIVVPSKLTRPRGRKYIKINIKPPTTFIDKWYFQKDICDLTLLNMNVVTCDLRFPFCSPQTDNICVTFQVLAPIYNEFLSITAKELTETGWKNYYKKFLETAIPLNKERKANILNTFLTEGSYRRPQVDKYKKPAGDNNYYLPKDAQWGDPIHIINRDETATNQTPQTRTELIDKIQKNAENVLLKVNQELQEYQATQAQHGLFTHWTGIYGPPFLDYNRISPEIRGLYKDIIYNPLIDKGVGNHVWVDYCSKATAEYSETQSKCHIADLPLWCALFGYADWVKKDTGNWGIVDWARVLIICPYTFPKLYDSANPNTGFVVIGYNFARGAMPDGSKYVPIAMRHKWYPTMLNQQQVLEDISLSGPFANRDKVPSVQLTAKYKFRWHFGGNPVSEQIIKDPCQQPTFQMPGTGTLPRRIQVADPKYLGPQYTFHSWDYRRDFFNRKTIKRMSEQPETFESIFSGAKKPRVDLDKIQLQEDNYSQEQRKQKPWEDSETQTESEVPSQEETQNLQQQLQQQLREQKQLRQGINCLFEQLIKTQQGVHIDPSLV

SEQ ID NO: 1906 - protein, 153 aa, Alphatorquevirus sp.
MFLGRHWRKKRALLLLPVPAKPKALSRQMSWSRPVHDERGIQRNWFEGVIRTHSACCGCGNACTHLSALAQRYGYPSLPSHTPRPGTSTPVSTPEQIRRARALPAAPDHPPALPWHGDGGRDGGAAGSDVGGPVAEFAEDGLDGLIAALDDEQ

SEQ ID NO: 1907 - protein, 84 aa, Alphatorquevirus sp.
LPLRAADKNPTGSPYRSFPCIGPKALLFPERAPRTYSKGDWETEYQACRAFDRPARSNLTDIPFYPYLPPPPEKFYVTFKLGFK

SEQ ID NO: 1908 - DNA, 2986 bp, Alphatorquevirus sp.
ggacctgcggcctcgggggggcacaccgcagtctaggggcaattcgggcacgggtctggccgggctatgggcaagactcttaaaaaactccctcgctgtgttctccgccaggacatcaagtcatgccgtggcgaccgccggtgcataacatcccgggcagggaaaaccagtggtttgcaaacgtttttcactcgcatgcagctttttgcggctgcggtgacgctgtcgggcatcttaatagcattgctcctcgctttcctaacgccggtcctccgagaccacctccagggctagaccagcccaacctgggagggccggaaggtcccggaggtccccccagagccctaccagctctgccggccccggcagagcctgagccggcaccacgccgtggtggtggggaagatggaggcggcgccgctggggccgccgccgccggagaccatggaggctacgaagaagaagatctagaagatcttttcgccgcggccaccgaagacgatatgtgagtaggcggtggcgccgccgcaatttcaggcgcagacgcagacggggcagacgcagggggcgacgaaagagacacaagcccacccttgtactcagacagtggcaacctgacgtagtcagaccctgcaaaataacaggatggatgcccctaattatttgtgggtcaggaagcacccagttcaactttataacccacatggatgactttcctcccatggggcacacctacgggggcaacttcaccaaccttaccttctccttagaagcagtatatgaacagtttatgtaccacagaaacaggtggagctcctctaaccatgacctggacctggccaggtaccagggaaccaccctaaaactctacagacacgaatacctagactacataatcagctacaacagaacaggcccttttcagatcagtgacatgacctacctgagcactcaccctgccttcatgctgctgcaaaaacacaggatagtagtgcccagctttaagaccaaaccacacgggcgcaggtccataaaagttagaataaagcccccaaaactcatgctaaacaagtggtacttcaccaaagacatatgcagcatgggcctcttccagctacaagccacagcatgcaccttaaacaacccctggctcagagacaccacaaaaagcccagtcataggcttcagagtacttaagaacagcatatacactaacctcagcaacctacctgagcatgacggtaccagacaagccattagaaaaagactacacccagacagtcttacaggctcacttccaaaccaaaaaggttgggagattagctacacaaaactaatggctccaatatattaccaagccaacagaaacagcacatacaactggctaaactaccaacaaaactattctagtacttacaatacatttacaaccaaaatgaatgagaatctatgcctcatacaaaaagaatacacttaccactaccccaacaatgtcaccatagacgtaataactaaaaacaccctaacacatgactggggcatatacagtccctactggctaactccaacaagaattagcctagactgggaaacaccctggacatatgttagatacaacccactagcagacaaaggcataggcaatgttgtatacacacagtggtgctcagaacagagctccaaagtagaccaaaagaagagcaagtgcataatgagagacctgccactgtgggtcatattctatggctacatagactgggtagttaaatccacaggcgtcagcagcgcagtcactgacatgagagtagccatcataagcccctacaccgagccggcacttatagggtcaacaccagacgtaggcttcattccagtaagtgacaccttttgcaacggagacatgccgtttcttgctccatacatccctgtgggctggtggatcaagtggtaccccatgattgcacaccaaaaggaagtgtttgaggcaatagttaactgtggaccgtttgtcccacgagaccagacaaaaccctcttgggaaattaccatgggttacaaaatgaactggaaatggggcggctctcccctgccttcacaggcaatcgacgacccttgtcagaagcccacccatgaactacccgatcccgatagacaccctcgcatgctacaagtctcagacccgacaaaactcggaccgaagacagtgttccacaagtgggactggagacgtgggatgcttagcaaaagaagtattaaaagagtccaagaagactcaagcgatgatgaatatgttgcaggacctttgcaaagaaaaagacacaagatggataccagagcagcaggactgcaaaccccagaaaaagaaagttacactttactccaagccctccaagactcggcagaagagaccctctcgaaccaagaacaagcaccccaagaaaaagaggtacaggaagaagcgctcctggagcagctccagctccagaaacagcaccagcgagtcctcaaacgaggcctcaaactcctcctgggagacgtcctccgactccgccgaggagtccactgggatcccctcctgtcataattcagggtccctctatcccagacctgcttttccctaacacacaaaaaaaaaagaaattttccaactacgactggtcagtagagtacgagctggccaaatggatggatcgtcctttgcggcacttcccatccgacctccctcactacccctggctaccaaaaaagccacctacccctcctacatgtagagtaagtttcaaattaaagctggattcctaactttcaaggccgtgggtgtttcacttcatcggtgtctacctctataagtcactaagcactccgagcgaagcgaggagtgcgacccccctgcccggtagcaacttcctcggggtccggcgctacgccttcggctgcgctggacgcctcggaccccccccctcgacccgaatcgctcgcgcgattc

SEQ ID NO: 1909 - protein, 644 aa, Alphatorquevirus sp.
MPLIICGSGSTQFNFITHMDDFPPMGHTYGGNFTNLTFSLEAVYEQFMYHRNRWSSSNHDLDLARYQGTTLKLYRHEYLDYIISYNRTGPFQISDMTYLSTHPAFMLLQKHRIVVPSFKTKPHGRRSIKVRIKPPKLMLNKWYFTKDICSMGLFQLQATACTLNNPWLRDTTKSPVIGFRVLKNSIYTNLSNLPEHDGTRQAIRKRLHPDSLTGSLPNQKGWEISYTKLMAPIYYQANRNSTYNWLNYQQNYSSTYNTFTTKMNENLCLIQKEYTYHYPNNVTIDVITKNTLTHDWGIYSPYWLTPTRISLDWETPWTYVRYNPLADKGIGNVVYTQWCSEQSSKVDQKKSKCIMRDLPLWVIFYGYIDWVVKSTGVSSAVTDMRVAIISPYTEPALIGSTPDVGFIPVSDTFCNGDMPFLAPYIPVGWWIKWYPMIAHQKEVFEAIVNCGPFVPRDQTKPSWEITMGYKMNWKWGGSPLPSQAIDDPCQKPTHELPDPDRHPRMLQVSDPTKLGPKTVFHKWDWRRGMLSKRSIKRVQEDSSDDEYVAGPLQRKRHKMDTRAAGLQTPEKESYTLLQALQDSAEETLSNQEQAPQEKEVQEEALLEQLQLQKQHQRVLKRGLKLLLGDVLRLRRGVHWDPLLS

SEQ ID NO: 1910 - DNA, 2986 bp, Alphatorquevirus sp.
ccgcgcgctacgccttcggctgcgcgcggcaccaaggggcaattcgggctcgggactggccgggctatgggcaaggctcttagggtcttcattcttaaaatgtttcttggcagggtttaccgccaaaagaaaaggaaagtgctactgctacctgtgccaactccaaagaaaaaactacctatgaatcggtggtcccccccggcacacgatgcccgtggaattgagaggcagtggtatgagtgtgtttggcgcagccacgctgcttgctgtggctgtggtgattttattaatcatattaatgatctggcggctcgttttggacgtcctgtcggtaccagaccacctgcgactccccagccaccgtcagtgagatccgtgcccgcgctgcctgcccctgaggcatggcctggcgacggggcagacggtggcgccggtggagacgccgccggaggccgtggtggaggagacgcaggcgctggagacgtcgcagacgaagacctgctagacgccgtcgatttcgcagagtaaggagacgaaggggagggtggtcgcgcgcgtacagacgatggaggagacggagagggcgacacagacacaaaaagagacttgtattgactcagtggcagccctctatagttaaaaaatgttacatagtgggctttgaccccataataatatgtggactgaacaggacttcttttaactctacctcacacgctgacgaccacacctttaacaaccaggcctttggagggggactgtgcaccaccaggtacactttaagaatcctgtaccaagactggctagcccaccacaactactggacagccagtaacaaagacttagacctagcaaggtacacaggatgcacaataatattctttaaacaccccacagtagactttgtagccagaataagaaccatgcccccctttgacgatacagacgctacagccatgaccttacacccaggaatgctaatgctatctaaaaagagaataataatacccagcttaaaaaccagacccagcaaaaagcattttgttagagtaagagtaggggcccccaaactctttgaagacaagtggtacccacagagtgacctctgtgatgttcctcttctaactgtccatgcaaccgcagcggatctgcaatatccgttcggctcaccactaacgaactccatatgctgcaacttccaggttttagacagtaactatgacaacatcttaaccgtccttgagggcacccctgaagctaacacaagaaactcaacttatgagagccttctaaatattgtaacaatttataatactactcaaacagcagcacagctatctaaatttatgccactaacaaacacaaacccactaacaaaacaaaatgcagccacaacaaccataaaagttcacagtacatcttcaacatatggaaacttatttagccactggtcttcaactaatccccacaataactcactgtatggaggctcagtatatcaaacaaaatcagacattaataacccaaacaaaagaatgaaagaagcaaatgcagcatactttatagcagcaaaacaaaacctaccaaattggagaccaccagaaacaacataccctgcaaagccatatccatttgaatactacacaggcctatacagcagcatatttttatcaccaggtagatctaactgggaagtacctggatactacacagacataagctacaacccccttatagacaaaggcataggaaacatgatttggatggaccccataacaaaatctaacagcagatatgatgaagtaaaatctaaatgccttatagcagactatccactgtggtgcatggtatatggttatgttgactactgtgaaaaagtgttaagccacacaacagtaatgtcagaatacagaatagttatcagaagcccctacacatggccactaatgacaaaagcctcagatgacaaatggggctttgtaccatacagtgaaaattttggaaaaggcagactaccaggaggcaacccagtaccctctctgtggagcagagtgcactggtaccccacagtataccaccagactgaagtactcgagtgcatagcacagactggaccctttgcatatcacagtgacgaacgcaaagtatcactgactataaaatacaaatttagatggaaatggggtggaaaccctatatttcaacagatggtcagagacccctgtaaacaccaagacggtactgcgccccgtagaaaacctcgtgacctacaagtcgctgacccgaaatatcaagtcccgcaagcagtctggcacgcatgggacttcagacatggactgtttagccagacgggtattaaaagaatgtcagaacaactcccaaatgatgactttcctacagagcgctacaagaggcccaggaaagacaccaccgtcagagaagaaggcctcacgcaaaaagaagaatcatctttcagacaccgagtcctccagccctgggtccagtcctcccaggaggaggaaacggagtcgcaaagcgaccaagaagagacgagcctacaagaacagctcaaaaaacaactcctccagcagcgactcatgggagacaaactcagagtcctctgcagacaactcaccagtctccaagccgggcacggcctacacccattatttcaacagggcctataaataaagtgtacttgtttcccccagagggtcccaaacccatagagggctaccatgcatggctagatgagtaccaaacctgtaagcactgggataggcctcctagaaagtttcatacagacacccctttctacccctgggctcccatagaaccaaaacctgtgcgtgtaacttttaagctgggcttcaaataaacaaggccgtgcactgttcacttgtcggtgtctacctctataagtcactaagcactccgagcgctagcgaggagtgcgaccctaccccctgggcccacttcttcggag

SEQ ID NO: 1911 - protein, 761 aa, Alphatorquevirus sp.
MAWRRGRRWRRWRRRRRPWWRRRRRWRRRRRRPARRRRFRRVRRRRGGWSRAYRRWRRRRGRHRHKKRLVLTQWQPSIVKKCYIVGFDPIIICGLNRTSFNSTSHADDHTFNNQAFGGGLCTTRYTLRILYQDWLAHHNYWTASNKDLDLARYTGCTIIFFKHPTVDFVARIRTMPPFDDTDATAMTLHPGMLMLSKKRIIIPSLKTRPSKKHFVRVRVGAPKLFEDKWYPQSDLCDVPLLTVHATAADLQYPFGSPLTNSICCNFQVLDSNYDNILTVLEGTPEANTRNSTYESLLNIVTIYNTTQTAAQLSKFMPLTNTNPLTKQNAATTTIKVHSTSSTYGNLFSHWSSTNPHNNSLYGGSVYQTKSDINNPNKRMKEANAAYFIAAKQNLPNWRPPETTYPAKPYPFEYYTGLYSSIFLSPGRSNWEVPGYYTDISYNPLIDKGIGNMIWMDPITKSNSRYDEVKSKCLIADYPLWCMVYGYVDYCEKVLSHTTVMSEYRIVIRSPYTWPLMTKASDDKWGFVPYSENFGKGRLPGGNPVPSLWSRVHWYPTVYHQTEVLECIAQTGPFAYHSDERKVSLTIKYKFRWKWGGNPIFQQMVRDPCKHQDGTAPRRKPRDLQVADPKYQVPQAVWHAWDFRHGLFSQTGIKRMSEQLPNDDFPTERYKRPRKDTTVREEGLTQKEESSFRHRVLQPWVQSSQEEETESQSDQEETSLQEQLKKQLLQQRLMGDKLRVLCRQLTSLQAGHGLHPLFQQGL

SEQ ID NO: 1912 - protein, 153 aa, Alphatorquevirus sp.
MGKALRVFILKMFLGRVYRQKKRKVLLLPVPTPKKKLPMNRWSPPAHDARGIERQWYECVWRSHAACCGCGDFINHINDLAARFGRPVGTRPPATPQPPSVRSVPALPAPEAWPGDGADGGAGGDAAGGRGGGDAGAGDVADEDLLDAVDFAE

SEQ ID NO: 1913 - protein, 127 aa, Alphatorquevirus sp.
LGPVLPGGGNGVAKRPRRDEPTRTAQKTTPPAATHGRQTQSPLQTTHQSPSRARPTPIISTGPINKVYLFPPEGPKPIEGYHAWLDEYQTCKHWDRPPRKFHTDTPFYPWAPIEPKPVRVTFKLGFK

SEQ ID NO: 1914 - DNA, 2986 bp, Betatorquevirus sp.
cgggtgccgaaggtgagtgaaaccaccgtagtcaaggggcaattcgggctagatcagtctggcggaacgggcaagaaacttaaaaatattattttttacagatatgtcatctatttggagaaaaccaacatcctcactgagacagaacgaattaaactgggtgaatgctgtaaaccacattcatgacttcttctgccactgtgacgaacccgatctacattacttaactattttaaacaagcactctggatataccaaacctgtttctgatattcgcaacataaaatgcctgcttactggtaccgccggcgcttccgaaaacccagataccaaagacgaaaacgatggccttactcctggagatttagaaaaactcttcgcagaagatacacaaccagaagaaaatacagacgacaccgcaaggtaaagtttaaaaaactttttaaaaaaagaactaaaattatcttaaaacaatttaatcctaaaagcataagaaactgtaaaattattggctccaaatgtctactacaaggaagtcctttaagatgtcaccataattatattcaatatgccgaatccaaaatacctccattttatcctggaggtggaggctggagcctacttgtatttagcttagactctttatttgaagaccatgaaaagcttcaaaacatatggactaccagtaacgccgcattacctttagtaagatacttaggatgtacttttaaattttatcaatgtaatgacttagactactttgtaacatacgatacttgctggcctatggtagatacacctcacacacacgcagacagctcaccacaagcaatgtttcttaaaaaaagaaaaatatgtgtacctagcagacaaacacagaaaagaagaaaaccatataaaaaagtaacaattaaacctccatcacaaatgttaactaaatggtattttcaacgtgatatttgtaaaacaccactgcttatgttaacaacaacaggcatttctttaactaactctcaatgtgcaccagaagctaagagcaataacataactattactgtactaaacccattaatatttaacaacttaaactttcaaacatttccaaaaacaacaggatacttttgtaaaatatatagccaacatgaagatgcaatgtaccccatgtacttatgggtcagcttaacagaaatgcaacaacatacaccaaaacaaacattaactgttgacacaacaaacaaaccatcaaaatatcaattaattccactaataaacacactagactatacaacaggtacatacataaaagctaattgggaagacaaaatgacaaactggggcaacccatttcatgacacttatacagcagaacacgtacctatttatatttccacaatgacatcctacaatgcaaaaactattgaagatggttcaaatcacatttcatacacactaacattattagcacaaccaataacttacaatgtaagatacaatccagaaacagacaaaggaaacaaaaatattgtatacatgcttagcacttcaaaacaaaattatttaaaccctccagaagacaaaaacttaatttttgaaggctttcccctacctatactactatggggatggtcagactggataaaaaaagcaaaatttatgcaagatccagatcaaaacggtattataggcataattacagaccaatttgacataaacttacctatatatattcctatagacaaagactttttacaaggttttgaaccatacacaccagaaccagaacacggaagtccacatgatttaacaccatacagtaaatcacactggtatccaaaattacaatttcaagaccaatcaatagaaaaaatttgcacatcacaaccaggaagtcctagaatgccttacaatcattatatgcaagtgtactgcagatacaaatttagatttaaatggggaggctgtcctaaacaattagaaaaagtatataatccgtgttcacagtcaatttggaccactcccgataacatccatggaagacctgaaattcagaatccaatcacctcaccctcaacagaactctggtcatgggactggaaagatgactatgttacacaagaagctattgacagaatccaaagccacacagaaattaatcaatcaactattgtatccacagacaacaaaacccaaccaaaagcaatctacaaaacaaaagaaaaagaagcatgtacgaaagaggaggagaacctactcaagcagctcaacaacatcatccaacagcgacaattcctcgaacaactcctctgcaacagaataagtacataataaaaaactctccaattactgtacaactatttccaccagaaaacaaaaaccgacttatgaccccatgggaacaacaagaagaaaaagaacttgcagcaatatttttaagaccccaaagacaatacatttttgataagccttactacccatactttccacctactcctaaagtacctaaaataaactttgacttaatttttaaagaataaaatttcaaggccaacataaattcactgagtggtgtcagtttatttaagtttaacttatacaaacatccaccgcctccctaaaattcgggcgccaaaatttaaaaagggggctccgcccccttacacccccaagggggctccgcccccttacacccccaagggggctccgcccccttacacccccaccaagggggctccgcccccttacaccccctaataaatattcaacaggaaaaccacataattagaattgccgaccacaaaccgtcacttacttctcctttttacattacttcccttttacctacttattattcatgacattaattaataatcactgtaattccggggaggagctaacaaactatataagcaactacacttccgaatggctgagtttatgccgccagacggagacgggatcactttagtgactccaggctgatcttggg

SEQ ID NO: 1915 - protein, 679 aa, Betatorquevirus sp.
MPAYWYRRRFRKPRYQRRKRWPYSWRFRKTLRRRYTTRRKYRRHRKVKFKKLFKKRTKIILKQFNPKSIRNCKIIGSKCLLQGSPLRCHHNYIQYAESKIPPFYPGGGGWSLLVFSLDSLFEDHEKLQNIWTTSNAALPLVRYLGCTFKFYQCNDLDYFVTYDTCWPMVDTPHTHADSSPQAMFLKKRKICVPSRQTQKRRKPYKKVTIKPPSQMLTKWYFQRDICKTPLLMLTTTGISLTNSQCAPEAKSNNITITVLNPLIFNNLNFQTFPKTTGYFCKIYSQHEDAMYPMYLWVSLTEMQQHTPKQTLTVDTTNKPSKYQLIPLINTLDYTTGTYIKANWEDKMTNWGNPFHDTYTAEHVPIYISTMTSYNAKTIEDGSNHISYTLTLLAQPITYNVRYNPETDKGNKNIVYMLSTSKQNYLNPPEDKNLIFEGFPLPILLWGWSDWIKKAKFMQDPDQNGIIGIITDQFDINLPIYIPIDKDFLQGFEPYTPEPEHGSPHDLTPYSKSHWYPKLQFQDQSIEKICTSQPGSPRMPYNHYMQVYCRYKFRFKWGGCPKQLEKVYNPCSQSIWTTPDNIHGRPEIQNPITSPSTELWSWDWKDDYVTQEAIDRIQSHTEINQSTIVSTDNKTQPKAIYKTKEKEACTKEEENLLKQLNNIIQQRQFLEQLLCNRIST

SEQ ID NO: 1916 - protein, 122 aa, Betatorquevirus sp.
LAERARNLKILFFTDMSSIWRKPTSSLRQNELNWVNAVNHIHDFFCHCDEPDLHYLTILNKHSGYTKPVSDIRNIKCLLTGTAGASENPDTKDENDGLTPGDLEKLFAEDTQPEENTDDTAR

SEQ ID NO: 1917 - protein, 102 aa, Betatorquevirus sp.
MYERGGEPTQAAQQHHPTATIPRTTPLQQNKYIIKNSPITVQLFPPENKNRLMTPWEQQEEKELAAIFLRPQRQYIFDKPYYPYFPPTPKVPKINFDLIFKE

SEQ ID NO: 1918 - DNA, 2985 bp, Betatorquevirus sp.
cgggtgccgaaggtgagtgcaaccaccgtagtcaaggggcaattcgggctagcgaagtctggcggaacgggcaagacacttataactattttattttacagatgtcaaaactacttactcctaaaatatcaccaaaaaataaaaaattagattggattaaccatattgcttctactcacaacctaatttgtggatgcccagaacccctacaacacaccgtggaagaaataataaatcaagaaccaactattaaaattccctgcaaaaaatgccttggttctggcccagaagatactacaccaggagaagacggctttggcgtcggagacctagaggctttattcgcaggagactttggagacgaaaaagacacagaaaatacccggtaagaagaaaactgccttttttaagactaaaacaatggcaacctcgctttattaacaaacttaaaataactgtgactgtaccgctatttgctacaacaaaccaaagactaaaccataatggaactttatacttagatgaaatagctcctcacaatgtacccagtcttggaggttttactataaatgtttttactttaaactctctatataacctatttttacaaggaagagcctggtggagccactctaacaatgacaaacctcttataagattcacaggcaccaaaataatactatacagaccagaaagctcagactacatatttaaatactttaactgttatcctatgtcagttagcatggaagcttacaactcaacacaaccaacatttatgcaactaagtaaaaaccatttaataatgagatgtaaaaaacataactatattaaaaaaccttaccacaaaattaaggtacatcctccagcacaattaacaaacaaatggttctttcaaaaagacctagcaaacacacctttgttaatgacattttgctctgctatgtccttagacagatactatatggcaagcaactctcaatcaacaacaacaggctttaaaggattaaatgcaacctacattaaatatcataactttacacaacaaaccacatcaggataccatccaatgaactcactttacttctgggcagttcaacaatcaacaactaaacctcaaatagaaaatatacaagtacaaaacttaatttacttaggaaacacacaaaacatgcaaccaggtactaccataaaagatgtttctacatcagacacatgggatgaaaaaaaacaaaaatacaaatctagctggggctattggggaaatcccttcatccctttttacttagtaggcccttggtttatactatacaccaaaacacatttatctgacgtgttagaccaaatgaatttaccaactacaacaataagcgagttaaacaaattacaagaaaaatatcactttaaacaatttacagagcctttaataaaagactacagatacaacccctttgcagactcaggcccaaacaacaaaatatacctagtagacttaaatagtcaggaagacaattgggatcctccacaagacaaaagccaacaaaatgataacctaccactgtggctaggcttatggggcttctcagactttcaaaaactaaacaaagtagattttgacacaaaaagattaattgttatacaaacaagccacatatggccacaagataaatacataatcccaatagatatggacttcctaaatggaaattcaccatttagaggcagaggagaggttaccgcctcagataaattacagtggcatccaaaaggcgcctttcaattacaatcaataacttctatatgtcaaactggacccggtactataaaattaccaccaaatgtatcagcagaagctcacgcaaaattaactttttattttaagcttggaggctgcgcgcaacccattaaatttattgaaaaaccctcagaccaaccagactttcccatcccccgtactgagtctggatcatgttcgttacagagtccagaaaccgcaattgaaaactacttttactcatttgactggagacgtgacttccttaccaaagcagctacagacagaattcaaaaagactcaggatctgaaatccttactttgccacctacaggaatccactgcctcaatgcaagaccacccaaagaaacaacacagacggggacggaggagacagaggaaaaagaagcggcgacactactccgactcttcaacctcctcaaggacaagcaacacagctaccgacagcgaatcctccaactaatgctttcagaataataggttgtaaaaataaagttacattatttgactgtaaaactaaacacaaaaaccgtagaataacagggcctgactttcaaacagaacttgaattggcagcctggatgcatagaccccccagatattatcatgatgataaacctttttacccttggttaccccctactcctattgtacctgttgtaaactttgaccttaactacaaacaataaaggccagcattaattcacttagtggtgtccatttatataagtttaacttaaataaaccaactccgcctccctaatacgcaggcgtagcggggggggggggccccccccgcccccccccgggggggggggggggggggggggggggggggggggggggggggggctgcaacccccaggggggggacaccccccctacccccccccgacagccacaaaatttgcattgccaaccacaaactgacaggaaaccacaaaatttgcattgccgaccacaaactgacaggaaaccacaaaatttgcattgccgaccacaaactgaattattataattaacttccctaaaatacactaatctcctcctactaattaattattaaccaacgtaaaattacactttcctgggaggagtctattaactataaaactaactacacttccgaatggctgagtttatgccgccagacggaggcgcgataggaactatcagcgactgagcaaggg

SEQ ID NO: 1919 - protein, 670 aa, Betatorquevirus sp.
LQKMPWFWPRRYYTRRRRLWRRRPRGFIRRRLWRRKRHRKYPVRRKLPFLRLKQWQPRFINKLKITVTVPLFATTNQRLNHNGTLYLDEIAPHNVPSLGGFTINVFTLNSLYNLFLQGRAWWSHSNNDKPLIRFTGTKIILYRPESSDYIFKYFNCYPMSVSMEAYNSTQPTFMQLSKNHLIMRCKKHNYIKKPYHKIKVHPPAQLTNKWFFQKDLANTPLLMTFCSAMSLDRYYMASNSQSTTTGFKGLNATYIKYHNFTQQTTSGYHPMNSLYFWAVQQSTTKPQIENIQVQNLIYLGNTQNMQPGTTIKDVSTSDTWDEKKQKYKSSWGYWGNPFIPFYLVGPWFILYTKTHLSDVLDQMNLPTTTISELNKLQEKYHFKQFTEPLIKDYRYNPFADSGPNNKIYLVDLNSQEDNWDPPQDKSQQNDNLPLWLGLWGFSDFQKLNKVDFDTKRLIVIQTSHIWPQDKYIIPIDMDFLNGNSPFRGRGEVTASDKLQWHPKGAFQLQSITSICQTGPGTIKLPPNVSAEAHAKLTFYFKLGGCAQPIKFIEKPSDQPDFPIPRTESGSCSLQSPETAIENYFYSFDWRRDFLTKAATDRIQKDSGSEILTLPPTGIHCLNARPPKETTQTGTEETEEKEAATLLRLFNLLKDKQHSYRQRILQLMLSE

SEQ ID NO: 1920 - protein, 95 aa, Betatorquevirus sp.
MSKLLTPKISPKNKKLDWINHIASTHNLICGCPEPLQHTVEEIINQEPTIKIPCKKCLGSGPEDTTPGEDGFGVGDLEALFAGDFGDEKDTENTR

SEQ ID NO: 1921 - protein, 122 aa, Betatorquevirus sp.
LPQCKTTQRNNTDGDGGDRGKRSGDTTPTLQPPQGQATQLPTANPPTNAFRIIGCKNKVTLFDCKTKHKNRRITGPDFQTELELAAWMHRPPRYYHDDKPFYPWLPPTPIVPVVNFDLNYKQ

SEQ ID NO: 1922 - DNA, 2984 bp, Alphatorquevirus sp.
ctcgcgcgattcggacctgcgcacaccgcagtctaggggcaattcgggcacgggtctggccgggctatgggcaagattcttaaaaagtttccccgctgtgtcctacgccaggacacaaaaacatgccgtggagaccgccggcgcacgacgtccagggcagagagaaccagttctttgcgggatgttttcacattcatgctgctttctgcgggtgcggtgaccttgttggccatcttactagcattgctgctcgctttcctgctgccggaccccccgctccgccgggcctgagacctccgagaccccctgccccggccggcccgggcggtccccccggctaccttcccgctctcccggctccggcaccggagccgcctaacccagcaccacgccgtggtggtggggaacatggcgccgccgcgggtggcgccgccgatgggggagaagaagaggccgccgcgtacggcgaggaagaactagaagagcttttccgcgccgccgccgaggacgatatgtaagtaggagatggcgccggccttacaggcgcagacggaggaaggggcgacggagacgcagacgcagacggactcacaaacccaccctagtaatgagacagtggcaaccggacgttgttaggacctgctacatcacagggtggatgcccctcatcatctgtggccaaggacagacccagtttaactttattatgcacatggacgatatcaccccccggggagcctcctacggaggcaacctcactaacataacatggaccctagagggcctgtgggaacagttccagtaccacagaaacaggtggtcgcgcagcaaccacgacctggacctagccaggtacatattcaccacccttaagttttacagacacgacagtgtagactacatagtcagctacaccagaacaggaccttttcaaatggggcacctcactcacctcagcactcaccctcttctaatgctactctcaaaacaccacgtagtagtgcccagcctaaagaccaaacctgcgggcagaaagtacaaaaaaatcagaatcaagcccccaaaactaatgttaaacaagtggtacttcaccaaagacatctgtgacctgggcctctttcaactatgggccacgggagcagagctcagaaacccctggttaagatcaggcacacagagcccctgcataggcttctctgtactcaacaactcccactacaccaacctcagcaaccttccagagcaccaaagtgttagagaacaaattcaaaaatcatttcatccatcatcattagaaacagacacaaacaaaaacctctggcaatacacatacacaggcctcatgtcaaagtactaccacaaaggcaaccaaaacagcacatatgacttccaaaattacagtaacaatactaattacacaaaaacacacgaaaaatggtcagaggacaaaaaagcaagactaaaaaaactacaagaacagtgggaaaaagtgtacccacaactaaccatacaaaagcccacagacacaacactcctacaagactttggcatatacagccccttctacctcacacccgtcagaattagcctagactggcgtaccacctatacacacgtcaggtacaacccactcacagacaagggcataggcaacagagtgtacctacagtggtgttcagagactagctgcaaatacagctccacaaagagcaagtgccccatagtagacatgccactattcatagccttctatggctacatagactggtgcattaaatgcacaggcaactctggcctcgtaaaagacgccagaatcatggtcaggtgtccctacaccgagccccaactagtgggggccacagaagacgtgggcttctgcctcctcagtaataccttcatgaacggagacatgcccgtgctggccccctatatcccaatttcctggttcgttaagtggtaccccatgattgcacaccaaaaggaaaccgttgaggccatagtttcctgtggaccgttcatgcccagagatcaggaagccaagagttgggacataaccatgggttacagatcctgtttcaaatggggcgggtcgcctctgcccacacaggccatcgacgacccctgccagaagcccacgcaccctcttcccgaccccgatagacaccctcgcctcctacaagtgtcagacccgacaaagctcggccccaagaccatattccacagatgggacatgcgacgtggacagtttagcaaaagaagtattgagagaatgtcagaatacacagagtatgatgaatattttgaaacaggtctgccatcaaaaagaaaaaagttcgacacgccggcagaaggactccaaggagagcaaagaaaagcctacgatttactccaagccctcgaggcgagccaagaagggtcggggtcagaagaccaagaacaagcacccccacaagagacggagacgcagcaactcctccagcagctccagctccagaaacaccaccagcgagtcctcagacagggcctcaaacacctcctcggggacgtcctccgactccgacgcggagtccactgggaccccctccttacatagagccgcccccgttcattcccgatcttctttttccttctactaacaaaaaaaaaaaattctccaaattcgactgggaaacggaggctcaactagggcagatattcaggcgtcctatgcgcttctatccctcagacaaccctcactacccgtggttaccccccgagcgagatatccccaaaatatgtaaggtaaacttccaaataaagcttgcagagtaacacattcgaggccctcctctgttcacttagcggtgtctacctcttaaggtcaccaagcactccgagcgcaagcgaggagtgcgaccctctgccctggggcaacttcctcggggtccggcgctacgcgcttcgcgctgcgtcggacgcctcggaccccccctcgacccgaatcg

SEQ ID NO: 1923 - protein, 661 aa, Alphatorquevirus sp.
MRQWQPDVVRTCYITGWMPLIICGQGQTQFNFIMHMDDITPRGASYGGNLTNITWTLEGLWEQFQYHRNRWSRSNHDLDLARYIFTTLKFYRHDSVDYIVSYTRTGPFQMGHLTHLSTHPLLMLLSKHHVVVPSLKTKPAGRKYKKIRIKPPKLMLNKWYFTKDICDLGLFQLWATGAELRNPWLRSGTQSPCIGFSVLNNSHYTNLSNLPEHQSVREQIQKSFHPSSLETDTNKNLWQYTYTGLMSKYYHKGNQNSTYDFQNYSNNTNYTKTHEKWSEDKKARLKKLQEQWEKVYPQLTIQKPTDTTLLQDFGIYSPFYLTPVRISLDWRTTYTHVRYNPLTDKGIGNRVYLQWCSETSCKYSSTKSKCPIVDMPLFIAFYGYIDWCIKCTGNSGLVKDARIMVRCPYTEPQLVGATEDVGFCLLSNTFMNGDMPVLAPYIPISWFVKWYPMIAHQKETVEAIVSCGPFMPRDQEAKSWDITMGYRSCFKWGGSPLPTQAIDDPCQKPTHPLPDPDRHPRLLQVSDPTKLGPKTIFHRWDMRRGQFSKRSIERMSEYTEYDEYFETGLPSKRKKFDTPAEGLQGEQRKAYDLLQALEASQEGSGSEDQEQAPPQETETQQLLQQLQLQKHHQRVLRQGLKHLLGDVLRLRRGVHWDPLLT

SEQ ID NO: 1924 - DNA, 2984 bp, Alphatorquevirus sp.
tcgggactggccgggccccgggcaaggctcttaaaaaatgcactttcgcagagtctcaacgaaaaggaaactgctactgctatctctgcaccctgcatcgcagacacctgccatgagcttcagggcgcccactgttaatgctggtcaacgagagcagctatggttcgagtccatcgtccgatcccatgatagttactgcgggtgtggtgacactgtcgctcattttaataatattgctactcgctttaattacctgcctcttacctcctcgcctctggacccttcctcgggcccgccgcgaggccgcccgacgatccgcgcactcccggctctgccagcggcaccctccacccccactactagccgaccatggcgtggtggggcagatggagaaggtggccgcggcgccggtggaggagatggcggcgccgccgtagaaggagactaccagcaagaagaactcgacgagctgttcgcggccttggaagacgaccaagaaagacggtaaggagacgccggcgccgtcccagacgcacctaccgacgggggtggcgacgcagacggtacataagacgcaggaggggacgcaaaaagaaactcactctgactatgtggaaccctaacatagttaggagatgtaacataaaaggagggctgcctctactgctgtgtggagagaacagagccgcatttaactatgcctaccactcagaggactacacagagcagccattcccctatggtggaggaatgagcaccaccacattctcactcagagccctgtacgaccagtacacaaagcacatgaacagatggacgttctcaaacgaccagctagacctggccagatacaggggctgcaaattcagattctacagacaccccacctgtgactttatagtacactacaacctggttcctcctctaaagatgaaccagttcacaagtcccaacacgcacccaggactactcatgctcactaaacacaaaataataataccaagcttcttaacaagaccagggggtcgcagatttgtaaagataaggctgcccccccctaagctctttgaagacaagtggtacacccagcaggacttgtgcaaacaaccgttagtgactctaaccgcaaccgcagcttccttgcggtatccgttctgctcaccacaaacgaacaaccccaactgtaccttccaggtactgcgcaagaattaccacaaagtcataggcacttcctcaaaaaactctgaggacgtacagccctttgaagactggctatataacacagcttcacactatcaaacatttgccaccgaggcacaagtaggtagaatacctagctttaatcctgacggatccaaaaaccaatatgcagacaaatggcaacaatgttggtctaaaaaaggagaagcatggaaaggagacaccacatatccacacacgaccacaactgaaatgtacaaaatcccttatgacagcaactatggcttccccacatacaaccctataaagaactacatgctagaaagacgcgcctggtcatttaaatatgaaactgacaatccagtcagtaaaaagatctggccacagcccactaccacaaaaccaacaatagactactatgaataccacgccggctggttcagtaacatattcataggacccaacagatacaatttacaatttcagacagcatatgtagacaccacatacaatccacttaatgacaaaggaaagggcaacaagatgtggttccagtaccactccaaagtaaacacagacctcagagacagaggcatatactgcctactagaagacatgcccctgtgggccatgacctttggatacagtgactatgttagcacacagctaggcccaaacgtagaccacgagactcaaggcctggtgtgcataatctgtccttacactgagccccccatgtatgacaagactaacccaaacagtggctacatagcatacgacacaaactttggaaatggaaagatgccctcaggaaggggccaggttccagtatactggcaatgcagatggaggcccatgctgtggttccagcaacaagtactgaatgacatctcaaagagcggaccgtacgcatacagagacgaactgaaaaactgttgcctgactctatactacaactttatttttaactgggggggcgacatgtattacccgcaggtcattaaaaacccctgcgcagacagcggactcgttcccggtaccagtagattcactcgagaagtacaagtcgttagcccgttgtccatggggcctcaatacatcctccacctcttcgaccaaagacgcgggttctttagttcgaacgctcttaaaagaatgcaacaacaacaagaatttgatgagtcttttacagtcaaacctaagcgacccaaactttctacagccgccctcgtcgagcagcaagaaggagactccacttcacgggaaggaaaatcgccgtcctcacaagaagaagcccaggaagaagtccaccagacggcggagatccagctccacctccagcgaaacatcagagaacagctgctcatcaagcagcagctccaactcctcctcctgcaaatattcaaaacacaagcaaatattcacctaaacccacgtttcataagcccataataacctacaacatgtttggggaacctaatcctcaccctccaactagccaagactggcagatggagtacgaggcctgcaaaatttgggacaggcccgctagacaaaacctaaaagacacccctttctatccctggatgcctaagcctcccccccagtaccatgtaacatttaagctcgggttcaaataaacaaggccgtgcactgttcacttgtcggtgtctacctcttaaggtcaccaagcactccgagcgtcagcgaggagtgcgacccttcctcaaggggcaactccctcgaagtccggcgctacgcgcttcgcgctgcgccggacatct

SEQ ID NO: 1925 - protein, 760 aa, Alphatorquevirus sp.
MAWWGRWRRWPRRRWRRWRRRRRRRLPARRTRRAVRGLGRRPRKTVRRRRRRPRRTYRRGWRRRRYIRRRRGRKKKLTLTMWNPNIVRRCNIKGGLPLLLCGENRAAFNYAYHSEDYTEQPFPYGGGMSTTTFSLRALYDQYTKHMNRWTFSNDQLDLARYRGCKFRFYRHPTCDFIVHYNLVPPLKMNQFTSPNTHPGLLMLTKHKIIIPSFLTRPGGRRFVKIRLPPPKLFEDKWYTQQDLCKQPLVTLTATAASLRYPFCSPQTNNPNCTFQVLRKNYHKVIGTSSKNSEDVQPFEDWLYNTASHYQTFATEAQVGRIPSFNPDGSKNQYADKWQQCWSKKGEAWKGDTTYPHTTTTEMYKIPYDSNYGFPTYNPIKNYMLERRAWSFKYETDNPVSKKIWPQPTTTKPTIDYYEYHAGWFSNIFIGPNRYNLQFQTAYVDTTYNPLNDKGKGNKMWFQYHSKVNTDLRDRGIYCLLEDMPLWAMTFGYSDYVSTQLGPNVDHETQGLVCIICPYTEPPMYDKTNPNSGYIAYDTNFGNGKMPSGRGQVPVYWQCRWRPMLWFQQQVLNDISKSGPYAYRDELKNCCLTLYYNFIFNWGGDMYYPQVIKNPCADSGLVPGTSRFTREVQVVSPLSMGPQYILHLFDQRRGFFSSNALKRMQQQQEFDESFTVKPKRPKLSTAALVEQQEGDSTSREGKSPSSQEEAQEEVHQTAEIQLHLQRNIREQLLIKQQLQLLLLQIFKTQANIHLNPRFISP

SEQ ID NO: 1926 - protein, 156 aa, Alphatorquevirus sp.
MHFRRVSTKRKLLLLSLHPASQTPAMSFRAPTVNAGQREQLWFESIVRSHDSYCGCGDTVAHFNNIATRFNYLPLTSSPLDPSSGPPRGRPTIRALPALPAAPSTPTTSRPWRGGADGEGGRGAGGGDGGAAVEGDYQQEELDELFAALEDDQERR

SEQ ID NO: 1927 - protein, 58 aa, Alphatorquevirus sp.
MFGEPNPHPPTSQDWQMEYEACKIWDRPARQNLKDTPFYPWMPKPPPQYHVTFKLGFK

SEQ ID NO: 1928 - DNA, 2982 bp, Alphatorquevirus sp.
cttgggggctcaacgccttcggagccgcgggtcaaggggcaattcgggctcgggactggccgggctatgggcaaggctctgaaaaaagcatgtttattggcaggcattacagaaagaaaagggcgctgctactgtgtgctgtgcaaccagcaaagaaggcttgcaaactaccaatagtaatgtggaccccacctcgcaatgaccaacactaccttaactggcaatggtactcaagtgtacttagctcccacgctgctatgtgcgggtgtcccgacgttgttgctcattttaatcatcttgcttctgtgcttcgcgccccgcaaaatccacccccacccggtccccagcgaaacctgcccctccgacggctgccggctctcccggctgcgctagaggcgcccggagatagagcaccatggcctatggctggtggcgccgaaggagaagacggtggcgcaggtggagacgcagaccatggaggcgccgctggaggaccagaagacgcagacctgctagacgccgtggccgccgcagaaacgtaaggaggcgccgcagaggagggaggtggaggaggaggtacaggagatggaaaagaaagggcagacgcagaaaaaaagctaaaataataataagacaatggcaacctaactacagaaggagatgtaacatagtaggatacattcctgtactaatatgtggcgaaaatactgtcagcagaaactatgccacacactcagacgataccaactacccaggaccctttggggggggtatgactacagacaaatttactttaagaattctgtatgatgagtacaaaaggtttatgaactattggacagcatctaatgaagacctagacctttgtagatatctaggagtaaacctgtacttttttagacacccagaagtagactttatcataaaaataaataccatgcctccttttctagacacagaactaacagcccctagcatacacccaggcatgctagccttagacagaagagcaaggtggatacctagcttaaagtccagaccaggaaaaaaacactatattaaaataagagtaggggcacctaaaatgttcacagataaatggtacccccaaacagatctttgtgacatggtgcttctaactgtctatgcaaccgcagcggatatgcaatatccgttcggctcaccactaactgactctgtggttgtgaacttccaggttctgcaatccatgtatgatgaaaaaattagcatattaccagaccaaaagttagaaagagagaacctacttagtagtatagcaaattacactcccttttataataccacacaaactatagcccaattaaaaccatttatagatgcaggcaatgtaacattaggtacaacaacaacaacatggggatcatacataaacacaaccaaatttactacaacagccaccacaacctacagctatccaggcactaccacaacagtaactatgttaacttgtaatgactcctggtacagaggaacagtatataacaataaaattacagagttaccaaaaaaagcagctgagttatactcacaagcaacaaaaactttgctaggaaacaccttcacaaatgaagactacacactagaataccatggaggactgtatagctcaatttggctatcccccggcagatcttactttgaaacaccaggagcatacacagacataaaatacaacccatttacagacagaggagaaggaaacatgctatggatagactggctaagcaaaaaaaatatgaactatgacaaagtacaaagtaaatgtttaatatcagacctacctctatgggcagcagcatatggttatttagaattttgtgcaaaaagtacaggagaccaaaatatacacatgaatgccagactactaataagaagtccctttacagacccccaactaatagtacacacaaaccccacaaaaggctttgttccctactctttaaactttggaaatggtaaaatgccaggaggtagtagtaatgtgcctattagaatgagagctaaatggtatccaacattgtttcaccagcaagaagtactagaggccttagcacagtcaggcccctttgcataccactcagacattaaaaaagtatctctgggtatgaaataccgttttaagtggatctggggtggaaaccccgttcgccaacaggttgttagaaatccctgcaaagactcccactcctcgggcaatagagtccctagaagcttacaaatcgttgacccgaaatacaactcaccggaactcacattccatacctgggacttcagacgtggcctctttggccagaaagctattgagagaatgcaacaacaaccaacaactactgacattttttcagcaggccgcaagagacccaggagggacaccgaggtgtaccactccagccaagaaggggagcaaaaagaaagcttacttttccccccagtcaagctcctcagacgagtccccccgtgggaagactcgcagcaggaggaaagcgggtcgcaaagctcagaggaagagacgcagaccgtctcccagcagctcaagcagcagctgcagcaacagcgaatcctgggagtcaaactcagactcctgttcaaccaaatccaaaaaatccaacaaaatcaagatatcaaccctaccttgttaccaagggggggggatctagcatccttatttcaaatagcaccataaacatgtttggagaccccaaaccttacaacccttccagtaatgactggaaagaggaatatgaggcctgtagaatatgggacagacccccaagaggcaatctaagagacacccccttttacccctgggcccccaaagaaaaccagtaccgtgtaaactttaaacttggatttcaataaagctaggccgtgggactttcacttgtcggtgtctgcttataaaagtaaccaagcactccgagcgaagcgaggagtgcgacc

SEQ ID NO: 1929 - protein, 769 aa, Alphatorquevirus sp.; identical to SEQ ID NO: 1629

SEQ ID NO: 1930 - protein, 150 aa, Alphatorquevirus sp.; identical to SEQ ID NO: 1630

SEQ ID NO: 1931 - protein, 57 aa, Alphatorquevirus sp.; identical to SEQ ID NO: 1631

SEQ ID NO: 1932 - DNA, 2982 bp, Betatorquevirus sp.
caggtgccgaaggtgagtgaaaccaccgtagtcaaggggcaatatgggctaggtcagtcttggcggaccgggcaagaaacttaaaaatataacctttcttacaggtatgtcatctatctggaagaaaccaacaactactccgagacaactagaactaggatggctgaacttattccaccaagcacacgaccaattctgccaatgtgaagaccctgaccttcactatttaatggtaattaacaaattttccaacttcaaaaagccagaatctgaaattatcaacataaaatgcctccttaccggaaaacctactggaacaactactactaccgaagaagaaaaagatatccatatcgacgaaggagacttagaaagccttttcgaaaaagatttcgaagaagaacctactggagaaaacagcgaaaggtaaagaaatttaaacttaaaaaacttaaaaaactaactcttaaagtttttcaaccaaagactataagactattaaaaattaaaggatttaaatgcctatttcaaggaagcataaaaagagctaacaataactatatacaatatatatatgatactgtaaatgataaaagaccaggcggaggggcatggagtttacaagtatttagccttgcaagcttatatgaagaatggcaacacttacttaacatttggactgttagtaatgctggactgccactaatacgctttatgggagctagatttaaattttatcaaagtgcagaaaatgactatgttgttaaatatgataattgttggcctatggtagatacaccatacacacatgcagacagtgcaccatcaagaatgataagagcacaacataaaataactgtaccaagtagaaaaacaaaacttagaaaaaaaccatacaaaaaagtatttgttagaccaccatcacaaatgacaaacaactggtactttcaaagagatatatgcaaaacaccactaacaatgcttacaaccacagccgttgatcttagattcccatttgctcccccagaagctttaagtaacaatgtaactttatatacacttaatacatttcaatttaaaaacacaaactttcaacaacctgaagctaccggttactactacaaaatggaaggcacacaaaaatactacttatatgcagcaccaagagaccacgaaaccaactggggatcactaattcctttaacaaacacaaaagacaatcaaccaggaaaacaacttagtctattaatacaaaacaataacaatgaccaaaataaaatgagcaactggggaaacccatttcaccacttatatgactatgaaaactttaagttttactttttaacaaaaaatccaacagaaataaaatatgcagatttaaccaaaaagttacatgaagacattactgaattttcaagttacatatactaccaaataagatacaatccagaaaaagacacaggacaagataataaagtatatttaatttctaatctacatgacacaaaatgggaagaaccttcaaacgaaaatttaatttttgatggttttccactaactatattactatggggatggacagactggcaaaaaaaactaaaacaagtatctaacatagataaccaatacatagtagttatacaaaccaaattcttttcagaaaacctaaaatactacgtacttattgataaagattttatagatggatttgaacctttctcaccacatgacgaacaagacaaattacctattacaccagctaatcaacaacattggtatccaaaacacttatttcaacaacaatccataaacacactatgtctatcaggccaagcatgtccaagacctccttggaaccattatctacaagcgttttgtacatacacattttactttaaattaggaggctgtccaaaacaactagaaaaagcttatgatccttgtttacagtcaaaatggcccacagccgataacatccctgcaagatatcaaattacgaatcctgaaaccccaccagaaacagaactgtactcctgggactgggatgaagactttgttaaaaagacagctttacaacgaattacagaatacacaccaacttatgaaacaatattcctttctacaggaagcaaatcagatcccatcgcactcaaaaaagtccaagaaaaccaagcccaagaagaagaggaggagaaagaactattcctccagctccagcagctcagacaccgacgaaagctcctacaactccaactaaaagaattatcattaaaaagtgtacaaagatagtagaactattcccaaaacctataaaacaaaacagaagatttaccaaagatgaaagagagacagaaagacaagtagctatagcattttgtaggccacaaagatcatttttctatgatccacctatttacccttggttaccaccggaaccaaaagttccaaaagttaactttaaactaaattacaattctaacgaataaaaattacaaggccaactattttcacttgtcggtgtccatttatttaagtttaacttatataaacatccaccactctcccaacagtgttggcgccaaaagggggctccgcccccttacacccccaagggggctccgcccccttacacccccaagggggctccgcccccttacacccccaaagggggctccgcccccttacacccccaagggggctccgcccccttacacccccaagggggctccgcccccttacacccccttataaatattcaacaggaaaaccacctaattagaattgccgaccacaaacggtcactaacttctcttttttaacatacttcctttttttctaattattattcattacattaattattaaaccgcgtaattccggggaggagactataaactatataaccaactacactttcgaatggctgagtttatgccgccagacggagactgtgttacacagtaacaacaggctgacctaggg

SEQ ID NO: 1933 - protein, 666 aa, Betatorquevirus sp.
MPPYRKTYWNNYYYRRRKRYPYRRRRLRKPFRKRFRRRTYWRKQRKVKKFKLKKLKKLTLKVFQPKTIRLLKIKGFKCLFQGSIKRANNNYIQYIYDTVNDKRPGGGAWSLQVFSLASLYEEWQHLLNIWTVSNAGLPLIRFMGARFKFYQSAENDYVVKYDNCWPMVDTPYTHADSAPSRMIRAQHKITVPSRKTKLRKKPYKKVFVRPPSQMTNNWYFQRDICKTPLTMLTTTAVDLRFPFAPPEALSNNVTLYTLNTFQFKNTNFQQPEATGYYYKMEGTQKYYLYAAPRDHETNWGSLIPLTNTKDNQPGKQLSLLIQNNNNDQNKMSNWGNPFHHLYDYENFKFYFLTKNPTEIKYADLTKKLHEDITEFSSYIYYQIRYNPEKDTGQDNKVYLISNLHDTKWEEPSNENLIFDGFPLTILLWGWTDWQKKLKQVSNIDNQYIVVIQTKFFSENLKYYVLIDKDFIDGFEPFSPHDEQDKLPITPANQQHWYPKHLFQQQSINTLCLSGQACPRPPWNHYLQAFCTYTFYFKLGGCPKQLEKAYDPCLQSKWPTADNIPARYQITNPETPPETELYSWDWDEDFVKKTALQRITEYTPTYETIFLSTGSKSDPIALKKVQENQAQEEEEEKELFLQLQQLRHRRKLLQLQLKELSLKSVQR

SEQ ID NO: 1934 - protein, 107 aa, Betatorquevirus sp.
MSSIWKKPTTTPRQLELGWLNLFHQAHDQFCQCEDPDLHYLMVINKFSNFKKPESEIINIKCLLTGKPTGTTTTTEEEKDIHIDEGDLESLFEKDFEEEPTGENSER

SEQ ID NO: 1935 - DNA, 2982 bp, Alphatorquevirus sp.
cgcgtttcggaccttcggcgtcgggggggagtcaaggggcaattcgggctcgggactggccgggccctgggcaaggctcttaaaaaatgcgctttcgcagggttgctgagaaaaggaaagtgcttctgcaaactgtgcgagctccaaagaaggctaggcggcttctaggtatgtggcagccccccgtgatcaatgtccccggcattgaaagaaactggtacgagagctgttatcgatcccatgctgctgtttgcggctgtggcgactttgttggccatcttaatcatctggcaactactctgggtcgccctccgcgtcctcagcccccaggcggaccccgcacgccgcagataagaaacctgccggcgctcccggcgccccagggcgagcccggtgacagagcgccatggcgtggggtttctggggccgacgccgccggtggagacggtggagagcgcggcgcagacggtggagaccccgcagacgtaggagacgacgccctactcgccgctttcgagctcgtcgaagagtaaggaggcgcggggggcggtggcgcagacgctacagaaaatggcgacggggcagacgcagacggactcacagaaaaaagatagtgataaaacagtggcaaccaaactttattagacgctgctacattatagggtacctacctttaatattctgtggcgaaaacacaagcgcccagaactatgccactcactcagacgacatgataagcaaaggaccgtacggggggggcatgactaccacaaaattcactctgagaatactgtacgacgagtttaccaggtttatgaacttttggactgtcagtaacgaagacctagacctgtgtagatacgtgggctgcaaactcatattttttaaacaccccacggtggactttatagtacagataaacactcagcctcctttcttagacacgcacctcaccgcggccagcattcacccaggcatcatgatgctcagcaagagacacatactaataccctcactaaagacccggccaagcagaaaacacagggtggtcgtcagggtgggcgccccaagactttttcaagacaagtggtacccccagtcagacctgtgtgacacagttctgctttctatattcgcaaccgcctgtgacttgcaatatccgttcggctcaccactaactgacaacccttgcgtcaacttccagattttggggccccagtacaaaaaacaccttagtattagctccactatggatgccagtaacaaagaccactatgataaaaacttgtttaatcaaactgcgctatacaatacttttcaaaccatagctcaacttaaagaaacgggacaaacttcaaaaataactccaaattggagtcaggtgcaaaacttaactgcactcaatgcatcaggttcaaatgcaactgaaagcagagacacttggtacaaaggcaatacatacaattccactattacacagttagcagaaaaaaccagacgaagatttaaagctgcaacacaagcagcactaccaaactaccccacaataatgtccacagacttatatgaataccactcaggcatatactccagcatatttctatcagctggcaggagctactttgaaaccaccggggcctactgtgacattatatacaaccctttcacagacaaaggcacagggaacataatctggatagactacctcacaaaagaagacaccatctttgtaaaaaacaaaagcaaatgcgaaatacaagacatgcccctgtgggcggcctgcacgggatacacagagttttgtgcaaagtatacaggcgactctgccattatctacaatgccagagtcctcataagatgcccgtacactgagcccatgctaatagaccactcagacccaaacaaaggctttgtaccctactcctttaactttggcaacggaaagatgccaggaggcagctctaacgtgcccataagaatgagagccaagtggtacgtaaacatataccaccaaaaagaagttcttgaagctatagtgcaaagcggaccgtttgggtacaagggcgacataaaatcagctgtactgtctatgaaatacagatttcactggaagtggggtggaaaccctatatccaaacaggtcgtcaggaatccctgctccaactccagctcctccgcgtcccatagaggacctcgcagcgtacaagcagttgacccgaaatacaatacgccagaggtcacgtggcactcgtgggacatcagacgaggcatctttggcaaagcaggtattaaaagaatgcaacaagaatcagatgctctttacattcctccaggaccactcaagagacctcgcagggacaccaacgcccaagacccagaagagcaaaacgaaagctcaggtttcagagtccagcagcgactcccgtgggtccactccagccaagagacgcaaagctcccaagaagagacggaggcgcaggggtcgctacaagaccaactactcctccagctccgagagcagcgagtcctccgactccagctccagcaactcgcaacccaagtcctcaaagtccaagcagggcacggcatacaccccctattatcttcccaagcgtaaacaaagcctttatgtttgagcccaagggtcctaaacccatacaaggctacaacgattggctagaggagtacacctgctgcaaacactgggacagacctcccagaaagctacacacagacatacccttctacccctgggcaccaaaaccccaagaccaagtcagggtaacctttaaactcaactttcaataaaaattctaggccgtgggagtttcacttgtcggtgtctgcttcttaaggttgccaagcactccgagcgccagcgaggagtgcgaccccccctccggtagcaacgccttcggagccgcgcgctacgccttcggctgcgcgcggcacctcagaccccccctccacccgaaacgcttg

SEQ ID NO: 1936 - protein, 736 aa, Alphatorquevirus sp.
MAWGFWGRRRRWRRWRARRRRWRPRRRRRRRPTRRFRARRRVRRRGGRWRRRYRKWRRGRRRRTHRKKIVIKQWQPNFIRRCYIIGYLPLIFCGENTSAQNYATHSDDMISKGPYGGGMTTTKFTLRILYDEFTRFMNFWTVSNEDLDLCRYVGCKLIFFKHPTVDFIVQINTQPPFLDTHLTAASIHPGIMMLSKRHILIPSLKTRPSRKHRVVVRVGAPRLFQDKWYPQSDLCDTVLLSIFATACDLQYPFGSPLTDNPCVNFQILGPQYKKHLSISSTMDASNKDHYDKNLFNQTALYNTFQTIAQLKETGQTSKITPNWSQVQNLTALNASGSNATESRDTWYKGNTYNSTITQLAEKTRRRFKAATQAALPNYPTIMSTDLYEYHSGIYSSIFLSAGRSYFETTGAYCDIIYNPFTDKGTGNIIWIDYLTKEDTIFVKNKSKCEIQDMPLWAACTGYTEFCAKYTGDSAIIYNARVLIRCPYTEPMLIDHSDPNKGFVPYSFNFGNGKMPGGSSNVPIRMRAKWYVNIYHQKEVLEAIVQSGPFGYKGDIKSAVLSMKYRFHWKWGGNPISKQVVRNPCSNSSSSASHRGPRSVQAVDPKYNTPEVTWHSWDIRRGIFGKAGIKRMQQESDALYIPPGPLKRPRRDTNAQDPEEQNESSGFRVQQRLPWVHSSQETQSSQEETEAQGSLQDQLLLQLREQRVLRLQLQQLATQVLKVQAGHGIHPLLSSQA

SEQ ID NO: 1937 - protein, 148 aa, Alphatorquevirus sp.; identical to SEQ ID NO: 1187

SEQ ID NO: 1938 - protein, 59 aa, Alphatorquevirus sp.; identical to SEQ ID NO: 1188

SEQ ID NO: 1939 - DNA, 2981 bp, Alphatorquevirus sp.
acgccttcggctgcgcgcggcacctcagcagtcaaggggcaattcgggctcgggactggccgggctatgggcaaggctcttagggtattcattcttaaaatgtttatcggcagggcctaccgccacaagaaaaggaaagtgctactgtcctcactgcgagctccacaggcgtctcgcagggctatgagttggagacccccggtacacgatgcggccggcatcgagcgcagttggtacgaagcctgttacagagcccacgctggagcttgtggctgtggcaattttattatgcaccttaatcttctggctgggcgttatggttttactccgggttcagcaccaccaggtggtcctcctccgggcaccccgcagataaggagagccagacctagtcccgccgcgcccgagcagcctcaagccctaccatggcatggggatggtggaaacggtggcgcaggtggcccgccagacgctggaggagacgccgtcgccggcgccccgtacggagaacaagagctcgccgacctgctcgacgctatagaagacgacgaacagtaagaaccaggcggaggcggtgggggcgcaaacggtacagacggggctggagacgaaggacttatgtaaggaaggggcgacacagaaaaaagaaaaaaagactaatactgagacagtggcaaccagccaccagacgcagatgcactatcactgggtacctgcccatagtgttctgcggccacactaagggcaataaaaactatgcactacactctgacgactacaccccccaaggacagccatttggaggggctttaagcactacctcattctctttaaaagtactatatgaccaacatcagagaggactgaacaagtggtctttccctaatgaccagctagacctcgccagatacagaggctgcaaattttacttttacagaacaaaacagacggactgggtgggccagtatgacatagcagaaccctacaagctagacaaatatagctgccccaactatcacccgggaaacatgattaaggcaaagcacaaatttttaattccaagctatgacactaaccccaggggcagacaaaaaattatagttaaaatcccccccccagacctctttgtagacaagtggtacactcaagaggatctgtgtaccgttaatcttgtgtcacttgcggtttctgcggcttcctttctccacccattcggctcaccacaaactgacaacccttgctacaccttccaggtgttgaaagacttctactataaggcaataggcttttcctcttctacagaaaaccaacagtcagtattagacacattatactcacaaaactcatactgggaatctaacctaactccttactatgtactacatgcaaaaaaaggcagtaacacaggagagaatttaacaaccgatcagccaaccagaaatgattttgtagctaacaaaagcacaaactacaactggtacacctacaaagctagctcacataaacagaaactacatagcatgagacaagcctactttaaacagcttactaacgaagggccccaacaaacaacctctaaggacggctatgcatcacagtggactactcccacaacagactgttatgaatatcacttaggcatgtttagcccaatatttctagcaccagacagacccgtgccacgctttccttgcgcctaccaagatgttacttacaacccactaatggacaaagggattggcaaccacgtgtggtttcagtacaacacaaaggcagatacccagcttatagtcacaggagggtcctgcaaagcacacatagaaaacatacccctgtgggcagccttctatggctacagtgactttatagagtcagagttaggtccctttgtagatgcagaaacggtgggcctcatctgtacaatctgcccttacacaaaaccccccatgtacaacaaaagcaatccctccatgggctacgtgttctatgacagaaactttggtgacggcaaatggactgacggacggggtaaaatagagccctactggcaagtcaggtggagaccagaaatgcttttccaagagactgtaatggcagacatagtacaaacagggccctttagctacaaagacgaacttaaaaacagcacactagtgtgcaagtacaaattctattttacctggggaggtaacatgatgtttcaacagacaatcaaaaacccgtggaagacggacggacaacctaccgactccagtagacaccctagaggaatacaagtggcggacccgcaacaagtgggaccccgctgggtgttccactcctttgactggcgaaggggctatcttagcgagaaagctctcaaacgcctgcaagaaaaacctcttgactatgacgaatattttacacaaccgaaaagacctagaatctttcctccaacagaatcagcagagggagagttccgagagcccgaaaaaggctcgtattcagaggaagaaaagtcgcaagcctctgccgaagagcagacggaggaggcgacagtactcctcctcaagcgacgactcagagagcaacagcagctccagcagcaactccaattcctcacccgagaaatcttcaaaacgcaagcgggtctccacctaaaccctatgttattaaaccagcggtaaaccaggtgtacctgtttccagagagggccccaaaaccccctcctagcagccaagactggcagcacgagtacgaggcttgcgccgcctgggacaggcctcccagatacaacctatcctctcctcctttttaccccagctgcccttctaaattctgtgtaaaatttagccttggcttcaaataaatggcaacttcactgtacaaggccgtgggagtttcactggtcggtgtctacctataaaggtcactaagcactccgagcgtcagcgaggagtgcgacccttccccctaactcaacttcttcggagccgcgcgct

SEQ ID NO: 1940 - protein, 746 aa, Alphatorquevirus sp.
MAWGWWKRWRRWPARRWRRRRRRRPVRRTRARRPARRYRRRRTVRTRRRRWGRKRYRRGWRRRTYVRKGRHRKKKKRLILRQWQPATRRRCTITGYLPIVFCGHTKGNKNYALHSDDYTPQGQPFGGALSTTSFSLKVLYDQHQRGLNKWSFPNDQLDLARYRGCKFYFYRTKQTDWVGQYDIAEPYKLDKYSCPNYHPGNMIKAKHKFLIPSYDTNPRGRQKIIVKIPPPDLFVDKWYTQEDLCTVNLVSLAVSAASFLHPFGSPQTDNPCYTFQVLKDFYYKAIGFSSSTENQQSVLDTLYSQNSYWESNLTPYYVLHAKKGSNTGENLTTDQPTRNDFVANKSTNYNWYTYKASSHKQKLHSMRQAYFKQLTNEGPQQTTSKDGYASQWTTPTTDCYEYHLGMFSPIFLAPDRPVPRFPCAYQDVTYNPLMDKGIGNHVWFQYNTKADTQLIVTGGSCKAHIENIPLWAAFYGYSDFIESELGPFVDAETVGLICTICPYTKPPMYNKSNPSMGYVFYDRNFGDGKWTDGRGKIEPYWQVRWRPEMLFQETVMADIVQTGPFSYKDELKNSTLVCKYKFYFTWGGNMMFQQTIKNPWKTDGQPTDSSRHPRGIQVADPQQVGPRWVFHSFDWRRGYLSEKALKRLQEKPLDYDEYFTQPKRPRIFPPTESAEGEFREPEKGSYSEEEKSQASAEEQTEEATVLLLKRRLREQQQLQQQLQFLTREIFKTQAGLHLNPMLLNQR

SEQ ID NO: 1941 - protein, 163 aa, Alphatorquevirus sp.
MGKALRVFILKMFIGRAYRHKKRKVLLSSLRAPQASRRAMSWRPPVHDAAGIERSWYEACYRAHAGACGCGNFIMHLNLLAGRYGFTPGSAPPGGPPPGTPQIRRARPSPAAPEQPQALPWHGDGGNGGAGGPPDAGGDAVAGAPYGEQELADLLDAIEDDEQ

SEQ ID NO: 1942 - protein, 56 aa, Alphatorquevirus sp.
LFPERAPKPPPSSQDWQHEYEACAAWDRPPRYNLSSPPFYPSCPSKFCVKFSLGFK

SEQ ID NO: 1943 - DNA, 2980 bp, Alphatorquevirus sp.
cgctacgccttcggctgcgcgcggcacgcagtcaaggggcaattcgggctcgggactggccgggctatgggcaaggctcttaaaaaagacatgtttctcggtaaactctacagaaagaagagggcactgccactgtgctgcctgcgagcttcaaagaagaaaccacctcctgacatgacctggagacccccggtgcacaacgcccatgggatcgagagaaatctctacgagtgcatgttccgcgcacatgctgctagctgtggctgcggtgatcttgttggccatatttctctactggctcagcggtatggtgctcctcctcgaccgccggcgcccggggctcccagaccacagatgagacgccagctggcccttccagcgccccccgccgatccacagcaggctaacccagaatggcctggtggggacggtggagaccgtggcgatggaggcgccgctggaggaggggtcgccgccgacggagactacgaacccgaggagctcgacgccctcttcgacgccgtagaacaagaagagtaaggagaaggagatgggggaggcggaggtttagacgggggtacagacgcagactgagactgagacgcaaacgcagacgcagaaaaaagatagtacttactcagtggaaccccgccaaagtgcgtaggtgcagaatatcgggggtcctgcctatgttactctgtggcgcgggcaggtcagggtttaactatggactgcacagcgacgacctaactgtacagaaaccccttaaccaaaacccccacggaggaggcatgagcacagtgactttctctctaaaagtgctctatgaccagtaccagagattcttaaacaagtggtcttaccccaacgaccagctagacctggccagatacaaaggctgcaaattcaccttctacagacacccagagacagactttgtagttcagtatgacaacgttccccccatgaaaatggatgagttcacagcccctaacactcatcccagcttgctgctacaggccaaacacagacgcaaaatccccagttttaaaactaggccttttggtaaaaagacagtcactattaaagtagggcctcctaaactttttgaggacaagtggtacccccagtcagatctgtgcaaggtgccccttgtcagttggcgggtgaccgcagctgacttgcggtttccgttctgctcaccacaaactgacaacccttgcttcaccttccaagtattgcacgagaactattacccgtgctttggaacttcctgtttagaccaacggacaacttacactacagaaattaataatttagaaacctggctatatggctcctgcagccactatcaaacatttgccacagacagcagattagccccagaaaaattaacagatccatcagggaaaactaactcgcctgattggaaacaaacagattttcaatcatttaaaaagcaaacagacagcaactatgggtactgcacatactgccctacttcgtcaatagtaccaaaaataaaaaactacagaaaaaagaggtttcagtggctaacaacccctgaccctaacaacacccatcacataaacatgacatacaccaagggcaagtacgaagaatacgagtaccacctaggctggtactctaacatttttataggcaacctcagacacaacctagcattcaaggcagcgtacatagatgtaacctataaccccatagtagacaaaggcctgggaaaccacatatggtttcagtacctgacaaagcccaccactgagctagtagaagcccaagcaaagtgccacatccaggacctgcccctgtacgccatgacctttggctatgaggacttcctccagagaacattaggccctttccaggacgtagagaccgtgggcataatctgcttcatatgcccttacacagaaccgccctgcgttaacaaaaacgagggcaaaaagaactggggctacgtgttctatgacacacactttggcaacggcaagaccccagagggactgggccaagtgcacccttactggatgcagagatggagaccagtgtcccaggtgcaaaaagagactctaaacaagattagcaggaccggaccgttcagctacagagacgagcaccctagcgtgacgctgaccgcgaactacaaattctactttaactgggggggcgactctatatttccacagattattaaaaacccctgtccagacaacagcctgcgtcccggcggccatagagagcctcgctcagtacaagtcgttagcccgctcacaatgggaccacaatacctctttcactcctgggactggcgacgggggttctttaatccaaaaactctcaaaagaatgcttgaaaaaccagatgatgatgcacagtatccaacaggtccaaaaatccctcgatggatacccgctctcgagcaccaagggcaagaaagcaacttcgattcggagacagagatctccgagtcctcggaagaagaagccgctcaagaagtcctccaagaaatccaggaggcgccgctacagcagcacctcatccagcagtaccgagagcagcgacgcctcggaaagcaactcaaactcgtcatgctgcaactcaccaagacgcagagcaatctgcacataaatccccgcgtccttggccatgcataaataaagtgtacatgttcccccccgagaaaccccttcccatacacgggtaccacgggtgggagacggagtatcaggcctgcaaggcctttgacagaccccctagaaactacctgtcagacaaacccatttacccctggcttccccgctgccaaccagaaattaaagtgagttttaagctcggttttcaataaacaaggccgtgggaatttcacttgtcggtgtctacctcttaaagtcactaagcactccgagcgtcagcgaggagtgcgacccttccccctggtgcaacgccctcggcggccgcg

SEQ ID NO: 1944 - protein, 753 aa, Alphatorquevirus sp.
MAWWGRWRPWRWRRRWRRGRRRRRLRTRGARRPLRRRRTRRVRRRRWGRRRFRRGYRRRLRLRRKRRRRKKIVLTQWNPAKVRRCRISGVLPMLLCGAGRSGFNYGLHSDDLTVQKPLNQNPHGGGMSTVTFSLKVLYDQYQRFLNKWSYPNDQLDLARYKGCKFTFYRHPETDFVVQYDNVPPMKMDEFTAPNTHPSLLLQAKHRRKIPSFKTRPFGKKTVTIKVGPPKLFEDKWYPQSDLCKVPLVSWRVTAADLRFPFCSPQTDNPCFTFQVLHENYYPCFGTSCLDQRTTYTTEINNLETWLYGSCSHYQTFATDSRLAPEKLTDPSGKTNSPDWKQTDFQSFKKQTDSNYGYCTYCPTSSIVPKIKNYRKKRFQWLTTPDPNNTHHINMTYTKGKYEEYEYHLGWYSNIFIGNLRHNLAFKAAYIDVTYNPIVDKGLGNHIWFQYLTKPTTELVEAQAKCHIQDLPLYAMTFGYEDFLQRTLGPFQDVETVGIICFICPYTEPPCVNKNEGKKNWGYVFYDTHFGNGKTPEGLGQVHPYWMQRWRPVSQVQKETLNKISRTGPFSYRDEHPSVTLTANYKFYFNWGGDSIFPQIIKNPCPDNSLRPGGHREPRSVQVVSPLTMGPQYLFHSWDWRRGFFNPKTLKRMLEKPDDDAQYPTGPKIPRWIPALEHQGQESNFDSETEISESSEEEAAQEVLQEIQEAPLQQHLIQQYREQRRLGKQLKLVMLQLTKTQSNLHINPRVLGHA

SEQ ID NO: 1945 - protein, 157 aa, Alphatorquevirus sp.
MGKALKKDMFLGKLYRKKRALPLCCLRASKKKPPPDMTWRPPVHNAHGIERNLYECMFRAHAASCGCGDLVGHISLLAQRYGAPPRPPAPGAPRPQMRRQLALPAPPADPQQANPEWPGGDGGDRGDGGAAGGGVAADGDYEPEELDALFDAVEQEE

SEQ ID NO: 1946 - protein, 147 aa, Alphatorquevirus sp.
MDTRSRAPRARKQLRFGDRDLRVLGRRSRSRSPPRNPGGAATAAPHPAVPRAATPRKATQTRHAATHQDAEQSAHKSPRPWPCINKVYMFPPEKPLPIHGYHGWETEYQACKAFDRPPRNYLSDKPIYPWLPRCQPEIKVSFKLGFQ

SEQ ID NO: 1947 - DNA, 2980 bp, Betatorquevirus sp.
cgggtgccgaaggtgagtgcaaccaccgtagtcaaggggcaattcgggctagcgaagtctggcggaacgggcaagacacttataactattttattttacagatgtcaaaactacttactcctaaaatatcaccaaaaaataaaaaattagattggattaaccatattgcttctactcacaacctaatttgtggatgcccagaacccctacaacacaccgtggaagaaataataaatcaagaaccaactattaaaattccctgcaaaaaatgccttggttctggcccagaagatactacaccaggagaagacggctttggcgtcggagacctagaggctttattcgcaggagactttggagacgaaaaagacacagaaaatacccggtaagaagaaaactgccttttttaagactaaaacaatggcaacctcgctttattaacaaacttaaaataactgtgactgtaccgctatttgctacaacaaaccaaagactaaaccataatggaactttatacttagatgaaatagctcctcacaatgtacccagtcttggaggttttactataaatgtttttactttaaactctctatataacctatttttacaaggaagagcctggtggagccactctaacaatgacaaacctcttataagattcacaggcaccaaaataatactatacagaccagaaagctcagactacatatttaaatactttaactgttatcctatgtcagttagcatggaagcttacaactcaacacaaccaacatttatgcaactaagtaaaaaccatttaataatgagatgtaaaaaacataactatattaaaaaaccttaccacaaaattaaggtacatcctccagcacaattaacaaacaaatggttctttcaaaaagacctagcaaacacacctttgttaatgacattttgctctgctatgtccttagacagatactatatggcaagcaactctcaatcaacaacaacaggctttaaaggattaaatgcaacctacattaaatatcataactttacacaacaaaccacatcaggataccatccaatgaactcactttacttctgggcagttcaacaatcaacaactaaacctcaaatagaaaatatacaagtacaaaacttaatttacttaggaaacacacaaaacatgcaaccaggtactaccataaaagatgtttctacatcagacacatgggatgaaaaaaaacaaaaatacaaatctagctggggctattggggaaatcccttcatccctttttacttagtaggcccttggtttatactatacaccaaaacacatttatctgacgtgttagaccaaatgaatttaccaactacaacaataagcgagttaaacaaattacaagaaaaatatcactttaaacaatttacagagcctttaataaaagactacagatacaacccctttgcagactcaggcccaaacaacaaaatatacctagtagacttaaatagtcaggaagacaattgggatcctccacaagacaaaagccaacaaaatgataacctaccactgtggctaggcttatggggcttctcagactttcaaaaactaaacaaagtagattttgacacaaaaagattaattgttatacaaacaagccacatatggccacaagataaatacataatcccaatagatatggacttcctaaatggaaattcaccatttagaggcagaggagaggttaccgcctcagataaattacagtggcatccaaaaggcgcctttcaattacaatcaataacttctatatgtcaaactggacccggtactataaaattaccaccaaatgtatcagcagaagctcacgcaaaattaactttttattttaagcttggaggctgcgcgcaacccattaaatttattgaaaaaccctcagaccaaccagactttcccatcccccgtactgagtctggatcatgttcgttacagagtccagaaaccgcaattgaaaactacttttactcatttgactggagacgtgacttccttaccaaagcagctacagacagaattcaaaaagactcaggatctgaaatccttactttgccacctacaggaatccactgcctcaatgcaagaccacccaaagaaacaacacagacggggacggaggagacagaggaaaaagaagcggcgacactactccgactcttcaacctcctcaaggacaagcaacacagctaccgacagcgaatcctccaactaatgctttcagaataataggttgtaaaaataaagttacattatttgactgtaaaactaaacacaaaaaccgtagaataacagggcctgactttcaaacagaacttgaattggcagcctggatgcatagaccccccagatattatcatgatgataaacctttttacccttggttaccccctactcctattgtacctgttgtaaactttgaccttaactacaaacaataaaggccagcattaattcacttagtggtgtccatttatataagtttaacttaaataaaccaactccgcctccctaatacgcaggcgtagcagggggctccgccccctgcaacccccagggggggacaccccccctaccccccccccgacagccacaaaatttgcattgccaaccacaaactgacaggaaaccacaaaatttgcattgccgaccacaaactgacaggaaaccacaaaatttgcattgccgaccacaaactgaattattataattaacttccctaaaatacactaatctcctcctactaattaattattaaccaacgtaaaattacactttcctgggaggagtctattaactataaaactaactacacttccgaatggctgagtttatgccgccagacggagtaactataaaactaactacacttccgaatggctgagtttatgccgccagacggaggcgcgataggaactatcagcgactgagcaaggg

SEQ ID NO: 1948 - protein, 670 aa, Betatorquevirus sp.; identical to SEQ ID NO: 1919

SEQ ID NO: 1949 - protein, 95 aa, Betatorquevirus sp.; identical to SEQ ID NO: 1920

SEQ ID NO: 1950 - protein, 122 aa, Betatorquevirus sp.; identical to SEQ ID NO: 1921

SEQ ID NO: 1951 - DNA, 2979 bp, Alphatorquevirus sp.
aatcgctcgcgcgattcggaacacaccgcagtctaggggcaattcgggcacgggtctggccgggctatgggcaagattcttaaaaagtttccccgctgtgtcctacgccaggacacaaaaacatgccgtggagaccgccggcgcacgacgtccagggcagagagaaccagttctttgcgggatgttttcacattcatgctgctttctgcgggtgcggtgaccttgttggccatcttactagcattgctgctcgctttcctgctgccggaccccccgctccgccgggcctgagacctccgagaccccctgccccggccggcccgggcggtccccccggctaccttcccgctctcccggctccggcaccggagccgcctaacccagcaccacgccgtggtggtggggaacatggcgccgccgcgggtggcgccgccgatgggggagaagaagaggccgccgcgtacggcgaggaagaactagaagagcttttccgcgccgccgccgaggacgatatgtaagtaggagatggcgccggccttacaggcgcagacggaggaaggggcgacggagacgcagacgcagacggactcacaaacccaccctagtaatgagacagtggcaaccggacgttgttaggacctgctacatcacagggtggatgcccctcatcatctgtggccaaggacagacccagtttaactttatcatgcacatggacgatatcaccccccggggagcctcctacggaggcaacctcactaacataacatggaccctagagggcctgtgggaacagttccagtaccacagaaacaggtggtcgcgcagcaaccacgacctggacctagccaggtacatattcaccacccttaagttttacagacacgacagtgtagactacatagtcagctacaccagaacaggaccttttcaaatggggcacctcactcacctcagcactcaccctcttctaatgctactctcaaaacaccacgtagtagtgcccagcctaaagaccaaacctacgggcagaaagtacaaaaaaatcagaatcaagcccccaaaactaatgttaaacaagtggtacttcaccaaagacatctgtgacctgggcctctttcaactatgggccacgggagcagagctcaaaaacccctggttaagatcaggcacacagagcccctgcataggcttctctgtactcaacaactcccactacaccaacctcagcaaccttccagagcaccaaagtgttagagaacaaattcaagaatcatttcatccaccatcattagaaacagacacaaacaaaaacctctggcaatacacatacacaggcctcatgtcaaagtactaccacaaaggcaaccaaaacagcacatatgacttcgaaaattacagtaacaatactaattacaaaaaaacacacgaaaaatggttagaggagaaagcagcaagactaaaaaaactacaagaacagtggcaaaaagtgtacccacaactaaccatacaaaagcccacagacacaacactcctacaagactttggcatatacagccccttctacctcacacccgtcagaattagcctagactggcgtaccacctatacacacgtcaggtacaacccactcacagacaagggcataggcaacagagtgtacctacagtggtgttcagagactagctgcaaatacagctccacaaagagcaagtgccccatagtagacatgccactattcatagccttctatggctacatagactggtgcattaaatgcacaggcaactctggcctcgtaaaagacgccagaatcatggtcaggtgtccctacaccgagccccaactagtgggggccacagaagacgtgggcttctgcctcctcagtaataccttcatgaacggagacatgcccgtgctggccccctatatcccaatttcctggttcgttaagtggtaccccatgattgcacaccaaaaggaaaccgttgaggccatagtttcctgtggaccgttcatgcccagagatcaggaagccaagagttgggacataaccatgggttacagatcctgtttcaaatggggcgggtcgcctctgcccacacaggccatcgacgacccctgccagaagcccacgcaccctcttcccgaccccgatagacaccctcgcctcctacaagtgtcagacccgacaaagctcggccccaagaccatattccacagatgggacatgcgacgtggacagtttagcaaaagaagtattgagagaatgtcagaatacacagagtatgatgaatattttgaaacaggtctgccatcaaaaagaaaaaagttcgacacgccggcagaaggactccaaggagagcaaagaaaagcctacgatttactccaagccctcgaggcgagccaagaagggtcggggtcagaagaccaagaacaagcacccccacaagagacggagacgcagcaactcctccagcagctccagctccagaaacaccaccagcgagtcctcagacagggcctcaaacacctcctcggggacgtcctccgactccgacgcggagtccactgggaccccctccttacatagagccgcccccgttcattcccgatcttctttttccttctactaacaaaaaaaaaaaattctccaaattcgactgggaaacggaggctcaactagggcagatattcaggcgtcctatgcgcttctatccctcagacaaccctcactacccgtggttaccccccgagcgagatatccccaaaatatgtaaggtaaacttccaaataaagcttgcagagtaacacattcgaggccctcctctgttcacttagcggtgtctacctcttaaggtcaccaagcactccgagcgcaagcgaggagtgcgaccctctgccctggggcaacttcctcggggtccggcgctacgcgcttcgcgctgcgccggacgcctcggaccccccctcgacccg

SEQ ID NO: 1952 - protein, 661 aa, Alphatorquevirus sp.
MRQWQPDVVRTCYITGWMPLIICGQGQTQFNFIMHMDDITPRGASYGGNLTNITWTLEGLWEQFQYHRNRWSRSNHDLDLARYIFTTLKFYRHDSVDYIVSYTRTGPFQMGHLTHLSTHPLLMLLSKHHVVVPSLKTKPTGRKYKKIRIKPPKLMLNKWYFTKDICDLGLFQLWATGAELKNPWLRSGTQSPCIGFSVLNNSHYTNLSNLPEHQSVREQIQESFHPPSLETDTNKNLWQYTYTGLMSKYYHKGNQNSTYDFENYSNNTNYKKTHEKWLEEKAARLKKLQEQWQKVYPQLTIQKPTDTTLLQDFGIYSPFYLTPVRISLDWRTTYTHVRYNPLTDKGIGNRVYLQWCSETSCKYSSTKSKCPIVDMPLFIAFYGYIDWCIKCTGNSGLVKDARIMVRCPYTEPQLVGATEDVGFCLLSNTFMNGDMPVLAPYIPISWFVKWYPMIAHQKETVEAIVSCGPFMPRDQEAKSWDITMGYRSCFKWGGSPLPTQAIDDPCQKPTHPLPDPDRHPRLLQVSDPTKLGPKTIFHRWDMRRGQFSKRSIERMSEYTEYDEYFETGLPSKRKKFDTPAEGLQGEQRKAYDLLQALEASQEGSGSEDQEQAPPQETETQQLLQQLQLQKHHQRVLRQGLKHLLGDVLRLRRGVHWDPLLT

SEQ ID NO: 1953 - DNA, 2978 bp, Alphatorquevirus sp.
tcagcgaggagtgcgacccttccccctgactccaaggggcaattcgggctcgggactggccgggctatgggcaaggctcttagggtcttcattcttaatatgtttctcggcagggtgtaccgccgcaagaaagggaaagtgccactgctggctctgcagactctacagaagacacctcccatgagtcactggcgaccccctctgagaaatgtcccctacagggagagatgttggcttgaggcctgtctcagagcccacgattgtttttgcggctgtcctagtcctgttattcatttctctagtctggttgcacgttttaatctacaaggaggcccgccgccagaggatgactccccgcagggcgcgccggtcctgagggccctgccggccccgagcccccgcaggcagacccgcaccgaaaacccctccggtgagccatggcctactcctactggtggcgccgccggaggtggccgtggagaggcagatggaggcgctggaggcgccgcagacgagtaccgcgccgaagacctcgacgacctcttcgccgctatcgaaggagaccagtaaggagaaagcgtcggtgggggaggcgagggcgacggcgccggtaccttagacgatacagacgcagactgactgtcagacgaaagagaaacaaactcagactgagcgtatggcagccccagaatatcagatactgtgccataaaaggcctctttcccatcctcatctgcgggcacggaaagagcgccggcaactatgccatccactcggatgactatgtgacgagcagattctctttcgggggtggtctcagcaccacctcatactctctaaagctgctattcgaccagaacctcaggggactgaacaggtggaccgctagcaacgaccagctagacctagccaggtacatgggggccgtgttctggttctacagagaccagaaaacagactacatagtccagtatgacatctcagagcccttcaagatagacaaagacagctcaccttcctaccacccgggcatactcatgagatccaaacacaaggtactggtgcctagctaccagacctggccaaagggacgctctaaagtaaaactcaagataaagccccccaagatgttcgttgacaagtggtatacacaagaggatctctgtaacgttactcttgtgtcacttgtggtcagcctagcttcctttcaacatccgttctgccgaccactaactgacaacccttgcgtcagtttccaagttctgcaaaatttctacaacaatgtaataggctactcctcaccagacacattaattgacaatgtctttacctctattttatacagtaaggcctcttactggcaaagccacctcactccctcctttgtcaaaaaaattaacaacaaccccgatggctcatccataaatcagtcagtagctaacatgccaaacatgtcaaactacaaccagtgggtctccaatacaacccgaggaagcggcttttacaactcaaatgtaaacgtccactacaattactgccagtacaaccctgatcctacgcaactcaaaaccctcagacaatactactttttctgggagacatacccagcagctgctaacaccactactacatcacacgtccccataaccaccactaaacccacaaaagactgctgggagtacagattaggcctgtacagtcccatctttctcagtccactcagaagcagcaacatagagtggcccttcgcatacagggacatagtgtacaatccactcatggacaagggggtaggtaacatgatgtggttccagtacaacacaaaaccagacactcagttctcccccacttcatgcagagcagtgttagaggacaaacccctgtggtccatggcctacgggtatgcagactttctgctctccatcctaggggagcacgacgacgtagacttccacggcctagtatgtataatatgcccgtacaccaaaccgcccctctatgacaaatcaaatccaaaaatgggctatgtattctatgatgccaagtttggcaacggaaaatggatagacgggaccgggttcatcccggtagagttccagagcaggtggaagccagaactggccttccagaaagacgtactgactgacctagccatgtcaggccccttctcctacagcgacgaccttaaaaacaccaccattcaggccaaatacaaattcaaattcaaatggggcggcaatctctcttaccaccagacaatcagaaacccgtgcacctcggacggacagacgcccagtaccagtagacagtctagagagatacaaatcgttgacccgctcaccatgggaccccgatacgtattccactcgtgggactggcgacgtgggtggcttaatgacagaactatcaaacgcttgtttgaaaaaccagtcgattttgaggaatatccaaaatctccaaagagacctagaattttcccacctacagagcagctccaagaagacccgcaagagcaagaaagagactcctcttccacggaagaaagtctccctacatcgtcacaagagacgcccccagcccacctactcagagtacacctcagaaagcagctccgacaacagcgagacctccgagtccaactcagagccctgttcgcccaagtcctcaaaacgcaagcgggcctacacataaaccccctcttattggccccgcagtaaacaaagtatacctgttcccagagagggcccctaaaccccagcctaccatggaagactgggccacagagtaccaggccgccggggccttcgatagaccccctagaagtaacctgtcagactcccccttctatccctggatgccaaaaaacaccaaattctctgtaacctttaaactcgggtggaaaccctgaataaaatgcaaggccgtgtactgttcacttatcggtgtctacctcttaaggtcactaagcactccgagcg

SEQ ID NO: 1954 - protein, 759 aa, Alphatorquevirus sp.
MAYSYWWRRRRWPWRGRWRRWRRRRRVPRRRPRRPLRRYRRRPVRRKRRWGRRGRRRRYLRRYRRRLTVRRKRNKLRLSVWQPQNIRYCAIKGLFPILICGHGKSAGNYAIHSDDYVTSRFSFGGGLSTTSYSLKLLFDQNLRGLNRWTASNDQLDLARYMGAVFWFYRDQKTDYIVQYDISEPFKIDKDSSPSYHPGILMRSKHKVLVPSYQTWPKGRSKVKLKIKPPKMFVDKWYTQEDLCNVTLVSLVVSLASFQHPFCRPLTDNPCVSFQVLQNFYNNVIGYSSPDTLIDNVFTSILYSKASYWQSHLTPSFVKKINNNPDGSSINQSVANMPNMSNYNQWVSNTTRGSGFYNSNVNVHYNYCQYNPDPTQLKTLRQYYFFWETYPAAANTTTTSHVPITTTKPTKDCWEYRLGLYSPIFLSPLRSSNIEWPFAYRDIVYNPLMDKGVGNMMWFQYNTKPDTQFSPTSCRAVLEDKPLWSMAYGYADFLLSILGEHDDVDFHGLVCIICPYTKPPLYDKSNPKMGYVFYDAKFGNGKWIDGTGFIPVEFQSRWKPELAFQKDVLTDLAMSGPFSYSDDLKNTTIQAKYKFKFKWGGNLSYHQTIRNPCTSDGQTPSTSRQSREIQIVDPLTMGPRYVFHSWDWRRGWLNDRTIKRLFEKPVDFEEYPKSPKRPRIFPPTEQLQEDPQEQERDSSSTEESLPTSSQETPPAHLLRVHLRKQLRQQRDLRVQLRALFAQVLKTQAGLHINPLLLAPQ

SEQ ID NO: 1955 - protein, 167 aa, Alphatorquevirus sp.
MGKALRVFILNMFLGRVYRRKKGKVPLLALQTLQKTPPMSHWRPPLRNVPYRERCWLEACLRAHDCFCGCPSPVIHFSSLVARFNLQGGPPPEDDSPQGAPVLRALPAPSPRRQTRTENPSGEPWPTPTGGAAGGGRGEADGGAGGAADEYRAEDLDDLFAAIEGDQ

SEQ ID NO: 1956 - protein, 59 aa, Alphatorquevirus sp.; identical to SEQ ID NO: 1470

SEQ ID NO: 1957 - DNA, 2978 bp, Alphatorquevirus sp.
gtgtcagaccacttcgggctacacaccgcagtctaggggcaattcgggcacgggtctggccgggctatgggcaagactcttaaaaaatttcctcgctctgtactccgccaggacaccaagtcatgccgtggtctccgccgagacataatatcagaacaagagaagatctctgggtgcaatcggttatttactcacatgacactttttgtggctgtgatagtgttcttcagcatcttactagcctcctgggtggcctacaaccagctccacctagagacccagcaccccctgccatacggagcctgccggcactgccgccagctccgcaaccccctgaagaaccacggcgtggtggagatacagacgaaggccgtggagaagatggaggagacgccgctggggcctacgaaccaggagacctagaagaacttttcgccgccgccgaggaagacgatatgtgagtagagggcggcgccgccgatacaggcgcagacggagacgggggcgacgcagaaggggacacagacgcaggcacagaaagacgctcattgtcaggcagtggcaaccagacgttattaaaagatgctttattactgggtggctacccctaattatctgtggaaacggacacacccaatttaactttataactcatatggacgacattccacccaaaaatgcgtcctatggaggcaactttacaaatgttacctttaaccttgcctgcttctatgaagaattcatgcatcacagaaacagatggtcagcctccaaccatgacctagaactggtcagatacctcagaaccagcctaaaactctacagacacgagtcagtagactatgtagttagctacaccaccacaggcccattcgaaacaaatgaattgtcctacatgctcactcaccctctagccatgcttctcagcaaaaaacatgtagttgtacccagcctaaagacaaaaccacacggcagaaagtacaaaaagataacaatcaaacccccaaaactaatgctaaacaaatggtactttgccaaagacttctgccacataggcctctttcagctctgggccacaggcctagaactaagaaacccatggctcaggtcaggcacaaacagcccagttataggattctatgtccttaaaaatcaggtttatcaaaacaaatacagcaacctaaacacaacagaagcttacacttcaagaaaaagtgcatatgatgaactaacaaaacatagctctgatacaaagtggtacaattggcagtatacatacaacaaaataatgaaacctatttactatgcagctgccaatgaacaaaactcaaattttaaaacccaaacatataattggaaaaattacaaacaaaacttccaagcagtaaaaactaaatgggaaaaaacttgtaaagacgcctatgaattagtatcagaagaatacaaacaaatatacagcacaactgtcacatatccaccaccatgggaacccttgacacaaaacacaggcagacagtacctagaacatgactgtggcatatacagcccatactttctaacaccacaaatatacactcctgaatggcacacagcctggtcctacattagatacaatcccctaacagacaaaggcataggcaacagaatatgtgtgcagtactgcagcgaggccagcagtgactacaacccagtaaaaagcaagtgcatgctacaagacatgcccttgtggatgatgctgtatggctatgcagactatgtagtaaagagcacaggcatacagtcagcctggacagacatgagagtggccattaggagcccctacacagacccaaaactcataggcagctcagaaaacacaatgttcatacccataggcatagaattcatgaacggagacatgccagacaagaggccctacattccgttaaagtggtggttcaagtggtaccccatgattacacaccaaaaaaccgcacttgaggcaatagtttcctgcagcccgttcatgcccagagatcaggaacaagccagttgggacataactgtaggttacaaagcaaccttcttatggggcgggtcccccttacctccacagcccatcgacgacccctgccaaaaatccacacacgaacttcccgaccccgatagaaaccctccaagaatacaaatctcagacccgcagcacctcggaccggcgacgctgttccactcgtgggacctcagacgtggattcattaatacaaaaagtattaaaagagtgtcagaacacctcgactctaatgaatatttttcaacaggcgtcgtgtccaaaaaaccccgattcgacacaccccaccacgggcagctatcaaaccaagaagaagacgccttacatatcctcagacaactccagaaagagcaagaagagaccacctccgaagaagaacaagcactccaaaaagaagaggagcaaaaagaaaagctcctacagcagctccgagtccagcgacagcaccagcgagtcctcaggcagggaatcaaacacctcatgggagacgtcctccgactcagacagggagtccactggaacccaatcctataatacttccagcagaaccaataccagacctcctattccccaatactggtaaaaaaaaaaaattttcgcccttcgattggcagtgcgagcaggagcttgcgactttaatgaaacgacctatgcgtttctatccctcagacagcccgttctacccatggctaccccccaagcgagatatcccaaaaatatgtaaagtaaacttcaaaataaatttcagtgaataaatctcgaggccccgggagtttcacttagcggtgtctacctctaaaggtcactaagcactccgagcgcaagcgaggagtgcgaccccctgcccggtagcaacttcctcggggtccggcgctacgccttcggctgcgccggacgcctcggacccccgctcgtgctgacacgctcgcgc

SEQ ID NO: 1958 - protein, 641 aa, Alphatorquevirus sp.
MDDIPPKNASYGGNFTNVTFNLACFYEEFMHHRNRWSASNHDLELVRYLRTSLKLYRHESVDYVVSYTTTGPFETNELSYMLTHPLAMLLSKKHVVVPSLKTKPHGRKYKKITIKPPKLMLNKWYFAKDFCHIGLFQLWATGLELRNPWLRSGTNSPVIGFYVLKNQVYQNKYSNLNTTEAYTSRKSAYDELTKHSSDTKWYNWQYTYNKIMKPIYYAAANEQNSNFKTQTYNWKNYKQNFQAVKTKWEKTCKDAYELVSEEYKQIYSTTVTYPPPWEPLTQNTGRQYLEHDCGIYSPYFLTPQIYTPEWHTAWSYIRYNPLTDKGIGNRICVQYCSEASSDYNPVKSKCMLQDMPLWMMLYGYADYVVKSTGIQSAWTDMRVAIRSPYTDPKLIGSSENTMFIPIGIEFMNGDMPDKRPYIPLKWWFKWYPMITHQKTALEAIVSCSPFMPRDQEQASWDITVGYKATFLWGGSPLPPQPIDDPCQKSTHELPDPDRNPPRIQISDPQHLGPATLFHSWDLRRGFINTKSIKRVSEHLDSNEYFSTGVVSKKPRFDTPHHGQLSNQEEDALHILRQLQKEQEETTSEEEQALQKEEEQKEKLLQQLRVQRQHQRVLRQGIKHLMGDVLRLRQGVHWNPIL

SEQ ID NO: 1959 - DNA, 2978 bp, Betatorquevirus sp.
cgggtgccgaaggtgagtgaaaccaccgtagtcaaggggcaattcgggctagctcagtctggcggaacgggcaagaaacttaaaattaaatttattttacagatatgagctctatttggaagaaaccaacattttcagtgagacaacaagaaaaccactggattggaattattttcagcacccatgactccttctgccactgcgaagacccctggctacatttactgattcttctaaacaaacaaggaaaagctccaaaacctgaatccgacgttcgcaatataaaatgcctccttactggaatagatacaactactaccaaagaagaccatacagaagaagacgtcgttaccggtttcgacgatggagaactggaaaaactattcgcagaaaatggcacagacgaaaatggagacgaaggaacaaggtaaagaaacgctttaaaaagagaaaacttaaaaaaattattttaaaacagtttcaaccacacaaaataactaaatgtaaaattattggaaaaaaatgtttatttcaaggtagtcctttaagaagtagtaataattatatacaatactgttattcatatgtacctgaactgtatcccggtggtggcggatggtcattacttgtacatagcttaggaagtatgtatgaagactatcaacatttaaataatgtatggacatcaagtaatgcaggaatgcctcttgtacgatacatgggagtagaatttaagttttatcaagatttgtatacagactatgttgttatctgggataattgctggccattagttgacactccatacacacatgctaacagctgtcctagccaaatgcttcaaagaaaaaacaaaataatagtgcctagcaaactaactcaaaatagaaaaagaccatacaaaagatgctttgtaacacctccaacgcaaatgcttaaccgttggtatttccaaagagatatttgtgacaccccactagcaatgataaccgcaacagccgttagtcttacaaaaccattctgtgacccaaaagcgaaaagtaacaatataactattaactgcctaaacccacacagatttagaaacccaaactttcaaaacccaccaataaccacaggatacagtccatttacagcagacaacctttcaaaccatccaaaaatgtacctatatgcctcccatacattaatacaatacaaaaaagagttactaacattaacacctttatgtaatacaaaagataacagacctggagcagtactatcaaatttactacacgaggaaagttctaataaatttgaaaactggggaaatccttttcattccatttacttttcctcagatgaaacacatatctaccaatcacaacacggaccaacatcaaacgaagtaacaaaaaactggaaacaatataaaaatgataatgataatataggcagtgaagttacactaatggtaggtcacaacctttatgcttgtagatacaatccagaaaaagacacaggtgaaggaaacatgtgttacttactaaacaattcttcagccgctagtctagaacctccatcaaacaaaaacctaatatttgaaggttttccactatacatactactatggggatggacagactttataaaaaaactaaagcaaacaatagacattgacaaaaactactttttagtaataaaaacaccattttttgaagaaaaactaccatactatatacctatagatgatgactttagagatggatttgaaccctacactccacacgacactaacaatgcacaaaattacatatctccatacaacatgaaccactggtatccaaaactactatttcaatatcaaagtattgaaaaaatttgcagatcagggccagcatgcgccagacctacaaacgaaaactacttacaagcattttacaaatacaaattttactttaaatggggtggatgtccaaaacaactagcaaaagcatatgatccttgtttacagtcaaagtggcccactcccgataacatcactccaggacttgaaatctcgaatcctaacgaaccacctcaaacccacatctatgactgggactgggaagaagactacattaaagaaaaagctttacaaagaattagagtacacacagaatctcctaaacaaatactcttccttacagactcaaaacagaaccccaaaccactgcaaatcaaagaaacgaaagaggagacagaaaacgaagaggaaacgcaactactcctccagctccaccgaatccgacaccagcgaaagcagctcgaactccttctccagtcaaaacacggacaaataactacaccataaaaaattgtaatattagagttaaactctttcctagccctaaaaagaatagaagaatgaccccaaaggaaagagaactagaaaaagaagtagcaagtatttttaaaagaccacaaagagaatttatatttgacacacctatatacccttacataccaccagcaccccttgctaactttgacttaaatttcaaagaataaaggccaacatacttcacttagtggtgtctgtttatttaagtttaacctaaataagctgtctccgcctccctaatatgttggcgccataaagggggctccgcccccttacacccccaagggggctccgcccccttacacccccattacacccccaagggggctccgcccccttacacccccaagggggctccgccccctaacaccccctaataaatattcaacaggaaaaccacctaatttacattgccgaccacaaaccgtcttatacttcccttttttatactcacttccgcttttccttattattattcattacattaattagtaaacagcgtaaatccggggagtggtaactaaactatataagtaactacacttccgaatggctgagtttatgccgccagtcgtagactgcaccacttcagtgactgcaggctgagcttggg

SEQ ID NO: 1960 - protein, 682 aa, Betatorquevirus sp.
MPPYWNRYNYYQRRPYRRRRRYRFRRWRTGKTIRRKWHRRKWRRRNKVKKRFKKRKLKKIILKQFQPHKITKCKIIGKKCLFQGSPLRSSNNYIQYCYSYVPELYPGGGGWSLLVHSLGSMYEDYQHLNNVWTSSNAGMPLVRYMGVEFKFYQDLYTDYVVIWDNCWPLVDTPYTHANSCPSQMLQRKNKIIVPSKLTQNRKRPYKRCFVTPPTQMLNRWYFQRDICDTPLAMITATAVSLTKPFCDPKAKSNNITINCLNPHRFRNPNFQNPPITTGYSPFTADNLSNHPKMYLYASHTLIQYKKELLTLTPLCNTKDNRPGAVLSNLLHEESSNKFENWGNPFHSIYFSSDETHIYQSQHGPTSNEVTKNWKQYKNDNDNIGSEVTLMVGHNLYACRYNPEKDTGEGNMCYLLNNSSAASLEPPSNKNLIFEGFPLYILLWGWTDFIKKLKQTIDIDKNYFLVIKTPFFEEKLPYYIPIDDDFRDGFEPYTPHDTNNAQNYISPYNMNHWYPKLLFQYQSIEKICRSGPACARPTNENYLQAFYKYKFYFKWGGCPKQLAKAYDPCLQSKWPTPDNITPGLEISNPNEPPQTHIYDWDWEEDYIKEKALQRIRVHTESPKQILFLTDSKQNPKPLQIKETKEETENEEETQLLLQLHRIRHQRKQLELLLQSKHGQITTP

SEQ ID NO: 1961 - protein, 108 aa, Betatorquevirus sp.
MSSIWKKPTFSVRQQENHWIGIIFSTHDSFCHCEDPWLHLLILLNKQGKAPKPESDVRNIKCLLTGIDTTTTKEDHTEEDVVTGFDDGELEKLFAENGTDENGDEGTR

SEQ ID NO: 1962 - DNA, 2978 bp, Betatorquevirus sp.
cgggtgccgaaggtgagtgaaaccaccgtagtcaaggggcaattcgggctagctcagtctggcggaacgggcaagaaacttaaaattaaatttattttacagatatgagctctatttggaagaaaccaacattttcagtgagacaacaagaaaaccactggattggaattattttcagcacccatgactccttctgccactgcgaagacccctggctacatttactgattcttctaaacaaacaaggaaaagctccaaaacctgaatccgacgttcgcaatataaaatgcctccttactggaatagatacaactactaccaaagaagaccatacagaagaagacgtcgttaccggtttcgacgatggagaactggaaaaactattcgcagaaaatggcacagacgaaaatggagacgaaggaacaaggtaaagaaacgctttaaaaagagaaaacttaaaaaaattattttaaaacagtttcaaccacacaaaataactaaatgtaaaattattggaaaaaaatgtttatttcaaggtagtcctttaagaagtagtaataattatatacaatactgttattcatatgtacctgaactgtatcccggtggtggcggatggtcattacttgtacatagcttaggaagtatgtatgaagactatcaacatttaaataatgtatggacatcaagtaatgcaggaatgcctcttgtacgatacatgggagtagaatttaagttttatcaagatttgtatacagactatgttgttatctgggataattgctggccattagttgacactccatacacacatgctaacagctgtcctagccaaatgcttcaaagaaaaaacaaaataatagtgcctagcaaactaactcaaaatagaaaaagaccatacaaaagatgctttgtaacacctccaacgcaaatgcttaaccgttggtatttccaaagagatatttgtgacaccccactagcaatgataaccgcaacagccgttagtcttacaaaaccattctgtgacccaaaagcgaaaagtaacaatataactattaactgcctaaacccacacagatttagaaacccaaactttcaaaacccaccaataaccacaggatacagtccatttacagcagacaacctttcaaaccatccaaaaatgtacctatatgcctcccatacattaatacaatacaaaaaagagttactaacattaacacctttatgtaatacaaaagataacagacctggagcagtactatcaaatttactacacgaggaaagttctaataaatttgaaaactggggaaatccttttcattccatttacttttcctcagatgaaacacatatctaccaatcacaatacggaccaacatcagtcgaagtaacacaaaactggaaaaaatataaaagtgatagtgataatataggcagtgaagttacactaatggtaggtcacaacctttatgcttgtagatacaatccagaaaaagacacaggtgaaggaaacatgtgttacttactaaacaattcttcagccgctagtctagaacctccatcaaacaaaaacctaatatttgaaggttttccactatacatactactatggggatggacagactttataaaaaaactaaagcaaacaatagacattgacaaaaactactttttagtaataaaaacaccattttttgaagaaaaactaccatactatatacctatagatgatgactttagagatggatttgaaccctacactccacacgacactaacaatgcacaaaattacatatctccatacaacatgaaccactggtatccaaaactactatttcaatatcaaagtattgaaaaaatttgcagatcagggccagcatgcgccagacctacaaacgaaaactacttacaagcattttacaaatacaaattttactttaaatggggtggatgtccaaaacaactagcaaaagcatatgatccttgtttacagtcaaagtggcccactcccgataacatcactccaggacttgaaatctcgaatcctaacgaaccacctcaaacccacatctatgactgggactgggaagaagactacattaaagaaaaagctttacaaagaattagagtacacacagaatctcctaaacaaatactcttccttacagactcaaaacagaaccccaaaccactgcaaatcaaagaaacgaaagaggagacagaaaacgaagaggaaacgcaactactcctccagctccaccgaatccgacaccagcgaaagcagctcgaactccttctccagtcaaaacacggacaaataactacaccataaaaaattgtaatattagagttaaactctttcctagccctaaaaagaatagaagaatgaccccaaaggaaagagaactagaaaaagaagtagcaagtatttttaaaagaccacaaagagaatttatatttgacacacctatatacccttacataccaccagcaccccttgctaactttgacttaaatttcaaagaataaaggccaacatacttcacttagtggtgtctgtttatttaagtttaacctaaataagctgtctccgcctccctaatatgttggcgccataaagggggctccgcccccttacacccccaagggggctccgcccccttacacccccattacacccccaagggggctccgcccccttacacccccaagggggctccgccccctaacaccccctaataaatattcaacaggaaaaccacctaatttacattgccgaccacaaaccgtcttatacttcccttttttatactcacttccgcttttccttattattattcattacattaattagtaaacagcgtaaatccggggagtggtaactaaactatataagtaactacacttccgaatggctgagtttatgccgccagtcgtagactgcaccacttcagtgactgcaggctgagcttggg

SEQ ID NO: 1963 - protein, 682 aa, Betatorquevirus sp.
MPPYWNRYNYYQRRPYRRRRRYRFRRWRTGKTIRRKWHRRKWRRRNKVKKRFKKRKLKKIILKQFQPHKITKCKIIGKKCLFQGSPLRSSNNYIQYCYSYVPELYPGGGGWSLLVHSLGSMYEDYQHLNNVWTSSNAGMPLVRYMGVEFKFYQDLYTDYVVIWDNCWPLVDTPYTHANSCPSQMLQRKNKIIVPSKLTQNRKRPYKRCFVTPPTQMLNRWYFQRDICDTPLAMITATAVSLTKPFCDPKAKSNNITINCLNPHRFRNPNFQNPPITTGYSPFTADNLSNHPKMYLYASHTLIQYKKELLTLTPLCNTKDNRPGAVLSNLLHEESSNKFENWGNPFHSIYFSSDETHIYQSQYGPTSVEVTQNWKKYKSDSDNIGSEVTLMVGHNLYACRYNPEKDTGEGNMCYLLNNSSAASLEPPSNKNLIFEGFPLYILLWGWTDFIKKLKQTIDIDKNYFLVIKTPFFEEKLPYYIPIDDDFRDGFEPYTPHDTNNAQNYISPYNMNHWYPKLLFQYQSIEKICRSGPACARPTNENYLQAFYKYKFYFKWGGCPKQLAKAYDPCLQSKWPTPDNITPGLEISNPNEPPQTHIYDWDWEEDYIKEKALQRIRVHTESPKQILFLTDSKQNPKPLQIKETKEETENEEETQLLLQLHRIRHQRKQLELLLQSKHGQITTP

SEQ ID NO: 1964 - protein, 108 aa, Betatorquevirus sp.; identical to SEQ ID NO: 1961

SEQ ID NO: 1965 - DNA, 2978 bp, Betatorquevirus sp.
cgggtgccgaaggtgagtgaaaccaccgaagtcaaggggcttatcgggctgaatcagtcttggcggaacgggcaactaacttaaatgatttaccctacagatatggcctttccatggagaccaacagcattcggacctagaggaagagaattaaaatggcttaattctgtctttgaatcccactcctgcttctgtggatgcgactctgcttacctacacttcattaccggctgcaaccactctgaatacggatttctaacagacaaagaaatactaactgcagaatgcctctccgctggtggtggaaaagacgccgtcccttcaacttctacagacaaaaatactggagacgccgtagacggcctaatacctggagaactagaagggctattccaagaaccctttacagaagaacaaggagaagacgaagggtaagaaaatacttttataaacataaaaaacagaaaaaaaaaaagattcctatatttcaatggcaaccaaagagcatagtaaaatgcaaaattaaaggaatctttgacttattatactgctcaaaaggcagagaacaatttaactttgctcaatatcaagaaagctttgtgccacacttagaacccggaggagggtcatggggactatatgtatttagcctaagtgccttatttcaagaatgggaaaaactgcataacttttggactaaaagtaacttaaaatatgacttgtgtagatataatggtgtaaaatttagattttatagacaagaccatgtagactatgttgtaaaatattcaacatgttatcccatggtagacacaatctacacacacgcagcatgccatccaaacagactattatcctcaaaccaaaaaatactagttagaagcttccacaacacaaaaagcaaaaaaccttatgttaaaaaatatataagaccaccacaattaatgaaatctaaatggttctttcaaaaagaactatctaacacaccactattactactatcagtagcctcaacaactttaaactctacatttattaatccaaaccaacaaagtacaaatataacatttaatgtactaaaccccaaagtatttcaaaaggccaactggcagtcaggcacaggaaacaattacagacctaacgcaacatattactactggggtggtgaccaacatacaccaccagaccaaaaaccacaacccaaagaagtggtgcaactaactgccactgaaaacagacaaggaacaccatcctcaaaattaactggaaatatatttttccatagatatttacattcagaatggggagtatgggtaacatcaaaagaagcccctacaacacaacaagatttttcaccactaagtcaaccattattaatacaatgtagatacaacccacaaagagacacaggactcctaaatgaggcatatatactaccaaaccacaattcagataactttaatccaccaacaggaacaaatgaacacatagacggcttcccactatggttaatgttctggggcttaactgactggtggagaaaatctaaaccaggctcacaaattgatttaaactatacattctgttttaaatcccaatttgtcacacccaaactagattactacgtaccaataaacgaaagcttcataaaaggtttgggaccatataacaatgaagaaattacaactacaaatttaaaacactggtacccaagaatattataccaaaatgaagtactaaatgacttttgtacctgtggacctaatgctccacgcccattacaaaaatcatgggaagctaaatgtgaatatgaatttctttttaagtggggaggatgccctccaaaatctcaagatgttgacgaccctacaaaaaagccacaatatcccatccccgataaaatcagcctcggaccacaaatcgaagatcctgaaacagacccaaaacttaaactctttgcatgggactttagaagggatatcattaccgcaaaagctcttaaaagaatacgagaaaaccaagacattaaagacattatgcttgaaattacagaacgatctccaaaacgaggacgaatggaccccgtcgcctaccaaaaagaacaagagccaacattataccaagcactccaacaaacaccgccgccgcaagaaatacaaacacaaccggagagactactccagtacttcagaaaccaacagcagctcctcagacagcagctaacattactggaccaaattcaacaaaacaaatacaaaaaacaactataaaatgtgtacattatactcaattgtttaaaagtactgttataaaaaacaggagactaaatgcttatgatttagaagatgaaaaatatctctgtaaaatatttcacagaccccctagacactttctgttagatcacccttattacccctggttacctaaacatcataacaaaaaaatgtacaatgataatttcaatgttaactttgacttaaactttcaagatgaataaacaaggccaacaatattcactctcggagtccgtttatataagttaaactttaataaacatccaccacactccctaaattgttggcctaaaaataaaggcctaaaaacaaaatggctgccaaaacacaaaatggcgcctaattaccataaaaattaatattataattagccggggggcaaagcccccccggccccccgccccccagacccccttggggggctaagccccccaaaccccccggggggggctacgccccccctataccccccctttaaaccacaaaatttgcattgccgaccacaaacagacatatgctaattaacttctcctttctcacctaacttcctcaaaaattaattagtaatcatcgtcacacagggcgtgccttctatgctatatattcaacgacacttccgaatggctgagtttatgccgccagacgaagacggcaactgttcacagtctgcaggctgattcaggg

SEQ ID NO: 1966 - protein, 661 aa, Betatorquevirus sp.; identical to SEQ ID NO: 1648

SEQ ID NO: 1967 - protein, 116 aa, Betatorquevirus sp.; identical to SEQ ID NO: 1649

SEQ ID NO: 1968 - protein, 68 aa, Betatorquevirus sp.; identical to SEQ ID NO: 1650

SEQ ID NO: 1969 - DNA, 2978 bp, Alphatorquevirus sp.
cgccttcggctgcgcgcggcacctcagaccctcaaggggcaattcgggctcgggactggccgggctatgggcaaggctcttagggttatcgctcttaaaatgccgtttcttggcaggctttggagaaagaaaaggaaagtgcttctgcaaactctgccagctgcaccgagccaaccacctatgagctctgtgtggaggccacccgtgcacaatgtccccggcattgaaaaaaactggtatgaatcctgctggcgtagccatgcatctatgtgcggttgtggcgattttattaatcatcttaatactctggcaaatagtcttggtcgtcctcccgttggcggatttccaccgggacaggggccgtctagagtgagagccctaccggctcctccggcccctgacagcccggagcccacccggaggcgccacactcgtaccgagaacccaacatggcgtggtggggattctggagaagacgccgtcgctggcccaagcgccgctggaggtggcgccgacgacgaagaagacctagaccaaggagacgtcgccgagctgctcgagctgctagacgacccagagtaaggagaaggcggtggaggggcgggtggagacgaaggacatacataagacggacgagacgcaggaaacgccgaaaaaaatttaaactcactcagtggcacccagccacagtaaagagatgtacaataaggggctacattccccttataatatgtggaactggcagcactggaacctcctacctaaactatgccagccacatgtatgacaataaaagactagacccctacggaggaggggtcagcactatgatgtttacactgcaaggactctttgaggagtaccagagacacagaaacaagtggtctacctcaaatgtagacctagaactggtcaggtaccacggctgcagcatgaaactgtaccgctcacccacagcagactttatctttcagtacaacagaaaggccccatttaatgacactcagctaacatgcccagccatgcagccctgcgtacagctaaacacaaaaggcaaaaaaataattttaaaaagctttgccactaaacccaagggaaggggctcagtgactgttaaaatacccccccctacactgtttcaggaccgttggtactttcaaaaggacttgagaaatgtaccgttggtaaccacaaaggccatagccgcaaacctgcggtttccgttctgcccaccacaaactgacaactgttgcatattcttccaggtgctacatccgttttttaataatatacttagcataaccccacaatatcttccaactaactatgaggctctaaagaagcacttatcacaacactttactattagagagcaaccacaaaagggaggcaccacaggagtatactttaacacctttaaaacagaggaacacatatttgaaccaaactggacaaaatacaaagaagcatccggaaattttaacacagcacaaaacaaaaagtactcaaacatttccagcttatggggagacaatgtgtacacagcagacatagtaaaggcatttgaagagaatgccacaaccatgtacgaggcacgcaaacacaccacattccaagagagcaaatatctgtcccacaaaacaggcatattcagtcctatactactgtcacagcagagacttagcccagactaccccggcatgtactggactgttacttacaatccatttaatgacaaaggcataggaaacaaagtatggatagactggtgcaccaaaaatgactctcagtacagagaaacagcaggcagaattcccatactagacattcccctgtacgcggccttactaggttatagagactattgttccaaatactaccacgacagaggcctacacaaagaagtaagagtaacaattcaatgcccctacactgaccctccgctgtataacaaggacaacacggacatggggtacgtcccctacgactttaactttggagacggaaaaatgcccgacggtgcaggatacatacccgaggaatacagattcaaatggtacatctgcatgtttcaccagcaaggctggatgaatgacatagtgcagtgcggcccctttgcatacaacttaaaagaaaaaaacgtggcattagtatgcaaatacaaatttaatttttcttttgggggcaatcctatcgttacacagacgcttaaagaccccagcacacaaccagactaccccatacctggctccggtcagttccctactagactacaagttacggacccgaaactcctcaatgaaggctatatcttccgacggtgggatatcagacgtggcttctatggcgaaaaaagtcttaaaagaatgcaacaaaaaccaacaaatgctgacttacttacaggaccttcaaaaaaaccaaggttcgaggtccccgccgcggcgcaagaagaagactcaacttcaggggaaacaaaattggtaccctggtacgagtccagtgtcacggaaacagagacagaagcagaagcccaagaagaaacgcaagagacacacctccacgagcagctcaagcagcaactcctccaacaaagaaaactccagcgacacctcagattcttcttcgagcaactagtaaaaacccaacatcacctgcacgtacctttatacccacagtaggccccaaagcactgctattcccagagaggcttccacaaccacacagcaaaggtgactggcagacagaatacgaggcctgtgctgcctttgacagaccaccccgtacagaccttacacgcccccccttttatccctggatgcccagacaattcactgttaacttttccatgggctttcaataaacaaggccgtgggagtttcacttgtcggtgtctgcttattaaggtcaccaagcactccgagcgtaagcgaggagtgcgaccctagtagggtactcaacttcttcggagccgcgcgcta

SEQ ID NO: 1970 - protein, 742 aa, Alphatorquevirus sp.
MAWWGFWRRRRRWPKRRWRWRRRRRRPRPRRRRRAARAARRPRVRRRRWRGGWRRRTYIRRTRRRKRRKKFKLTQWHPATVKRCTIRGYIPLIICGTGSTGTSYLNYASHMYDNKRLDPYGGGVSTMMFTLQGLFEEYQRHRNKWSTSNVDLELVRYHGCSMKLYRSPTADFIFQYNRKAPFNDTQLTCPAMQPCVQLNTKGKKIILKSFATKPKGRGSVTVKIPPPTLFQDRWYFQKDLRNVPLVTTKAIAANLRFPFCPPQTDNCCIFFQVLHPFFNNILSITPQYLPTNYEALKKHLSQHFTIREQPQKGGTTGVYFNTFKTEEHIFEPNWTKYKEASGNFNTAQNKKYSNISSLWGDNVYTADIVKAFEENATTMYEARKHTTFQESKYLSHKTGIFSPILLSQQRLSPDYPGMYWTVTYNPFNDKGIGNKVWIDWCTKNDSQYRETAGRIPILDIPLYAALLGYRDYCSKYYHDRGLHKEVRVTIQCPYTDPPLYNKDNTDMGYVPYDFNFGDGKMPDGAGYIPEEYRFKWYICMFHQQGWMNDIVQCGPFAYNLKEKNVALVCKYKFNFSFGGNPIVTQTLKDPSTQPDYPIPGSGQFPTRLQVTDPKLLNEGYIFRRWDIRRGFYGEKSLKRMQQKPTNADLLTGPSKKPRFEVPAAAQEEDSTSGETKLVPWYESSVTETETEAEAQEETQETHLHEQLKQQLLQQRKLQRHLRFFFEQLVKTQHHLHVPLYPQ

SEQ ID NO: 1971 - protein, 190 aa, Alphatorquevirus sp.
LRAAPQTLKGQFGLGTGRAMGKALRVIALKMPFLGRLWRKKRKVLLQTLPAAPSQPPMSSVWRPPVHNVPGIEKNWYESCWRSHASMCGCGDFINHLNTLANSLGRPPVGGFPPGQGPSRVRALPAPPAPDSPEPTRRRHTRTENPTWRGGDSGEDAVAGPSAAGGGADDEEDLDQGDVAELLELLDDPE

SEQ ID NO: 1972 - DNA, 2978 bp, Betatorquevirus sp.
cgggagccggaggtgagtgaaaccaccgtagtctaggggcaattcgggctagatcagtctggcggaacgggcaagaaacttaatatgtactttattttttagatgagcaaactgtacaaacctttaacaattggaattaaacaccgaaatctacaatggatgaatttacaagtaggcctgcatgatatgcactgccactgcgataacccactaaaacacattatactacatattattgaacaagaaccttctattcgattcaacaaagaagaatctaaccttattcaaaaatgccttactacacaagaagaagaagacgatggagacgttattggaccaggagacttagatacccttttcgcagaagacgtttttggagaagacgccgaaactgggtaagcaaacgaaaaaagaaactaaaaaaaataactatacaacaatggcaaccctcaactattagaaaactctatattaaaggacaatacccactatttgcgggaacatcagacagaatagcaaatgattatacagcctatgtagatgaaatagcccctaaagatgttcccggtggaggactttattcaataactgtatttactttacaaggactttatgaactacatcaaaaagccagaaactggtggactcaaagtaactgtgaattaccattaataagatatatgggttgtactttaaaattgtatttaaatagttcatgtgattatataacaactattgttaactgtggagaactaaaagctaacttagaaatgtttcactcaacccaaccaagtgtattactgttaaacaaaagaaaaaaagtaatgctttgtagaaactataaaagaaaacgtagagcttacaaaaaatggtttgtacatccaccagccttattagaaaacaaatggtattttcaaaaagaattagctaaatacccattattcatggtaataacctctgccgctagcttcgaaagatactatcaatgctcaacctgtatatcagaaactgtaggatttcaatcacttaacacagacttttttgtaatacactcatggaaatacccatcaacaacaccatacagaccaaactcagaattttacatgtttggaataggaggtccaacaacatttgacacagcaacacctcaacaattaatactactaggtgctccatcagactataacaaaggaaccatgataggcaaagcgaccaccaccacatgggagactgcagtaaccaaatacatgcaaaaatcaacgaactggggaaacccatttcacccagattggctacacgcagactcagcggaaggcctaatatgcttactacacgtacaaaccacagaaaacctcacagaaaaactaaaaaaattaaaccctacacaaactttaaaagagcaaggctttatagaaccaacaaagccattcacaatacactgcagatacaacccacaagcagatatgggacaaaacgctatttttgttacaagaatagcaggagacaacacaccttggcataaaccaaatgatgaacacttaataacacaaggtttaccactatggatactacactggggttggctagactacttaagaaaaactggcacaccacaaagactagacacagactacatacatgtaattgtatcagattacattcaaccaaaggagttaacttactacgtaccagtagaccaattctttttaaatggaaaaagtccctacgcagatcatattaagccatatgatttacaaaactggcaaccaaaaataaactttcaactacaagctatagcacatatatgcaactcaggtcccctaacagtaaaactaccaaaagacatttctgtagaagcacacttaacttataaatttcattttaagcttggaggatgcccaccagcaatggacaaagtttgtgaaccttctagacaacccacctatccccaacccggtaacttcctatcatcaattatattgcagaacccacaaacaccaatcgaatactttctcagctccttcgaccaaagacgagacctccttacacacaaagctgcaaagcgcctcaaaaaagactcagactttacagaaccttttcttaaacctgcaggaaaaagtctcctcgatgtccaaacaacatccccccaaacaacatcgtcggaggactcatcgacggaggaagaaagcgaagaagagacacagcagcagctccagcgacaccaccgaaaacaccgaaaactccagcggggaatactcaagctcttaaacctcctccaacattcaaaatagttaatagcacaataaaagttaatctctttcccgacacaaaacaaaagaatagacgcttaacagcaaaagaaagaagtgatgatatacaagatgctaaaatatggggcagatatgttaaaaactatttactagaaactcacttctataaagatgtacctattacacctttagtaccctctgtaaactttaaccttggttacaaacaataaagcctgcatactttcactcctcggtgtccatttattaaactttaaacttatataaacatccaccacactccctaatacgcaggcgcaaaagggggctccgcccgctccgcccccttaaaccccaagggggctccgcccccttaaacccccagggggggtaccccccttaaaaccccccataaaccacaatatttgcatggctaaccacaaacgaacacaaaaccacaaaattagcattgccaaccacaaacgaacaggaaaaccacaaaatttgcattgccgaccacaaaccgtcaaatacttcccctttttatttaacttccttttttacttataaatattcattacattaattaataatcaccgtaattccggggaggagactaataactataaaactaactacacttccgaatggctgagtttatgccgccagacggagacgggatcactacagtgactccaggctgatcttggg

SEQ ID NO: 1973 - protein, 666 aa, Betatorquevirus sp.
MPYYTRRRRRWRRYWTRRLRYPFRRRRFWRRRRNWVSKRKKKLKKITIQQWQPSTIRKLYIKGQYPLFAGTSDRIANDYTAYVDEIAPKDVPGGGLYSITVFTLQGLYELHQKARNWWTQSNCELPLIRYMGCTLKLYLNSSCDYITTIVNCGELKANLEMFHSTQPSVLLLNKRKKVMLCRNYKRKRRAYKKWFVHPPALLENKWYFQKELAKYPLFMVITSAASFERYYQCSTCISETVGFQSLNTDFFVIHSWKYPSTTPYRPNSEFYMFGIGGPTTFDTATPQQLILLGAPSDYNKGTMIGKATTTTWETAVTKYMQKSTNWGNPFHPDWLHADSAEGLICLLHVQTTENLTEKLKKLNPTQTLKEQGFIEPTKPFTIHCRYNPQADMGQNAIFVTRIAGDNTPWHKPNDEHLITQGLPLWILHWGWLDYLRKTGTPQRLDTDYIHVIVSDYIQPKELTYYVPVDQFFLNGKSPYADHIKPYDLQNWQPKINFQLQAIAHICNSGPLTVKLPKDISVEAHLTYKFHFKLGGCPPAMDKVCEPSRQPTYPQPGNFLSSIILQNPQTPIEYFLSSFDQRRDLLTHKAAKRLKKDSDFTEPFLKPAGKSLLDVQTTSPQTTSSEDSSTEEESEEETQQQLQRHHRKHRKLQRGILKLLNLLQHSK

SEQ ID NO: 1974 - protein, 98 aa, Betatorquevirus sp.
MSKLYKPLTIGIKHRNLQWMNLQVGLHDMHCHCDNPLKHIILHIIEQEPSIRFNKEESNLIQKCLTTQEEEDDGDVIGPGDLDTLFAEDVFGEDAETG

SEQ ID NO: 1975 - DNA, 2977 bp, Betatorquevirus sp.
cgggagccgaaggtgagtgaaaccaccgtagtctaggggcaattcgggctagatcagtctagcggaacgggcaagaaactaaatataattttattttttaggtatgagttctatctggaaacaaccaacatcatcactgagacagaaagaattagcatggagaaacattatgtttcaaacccatgatacctggtgccactgcgaaggtatcatgggtttgaaacataatgtttctccatgctaatttgtatgaataaattcagcggattccaaaaaccagaaattgacataaggaatatacaatgcctccttaccggtcctactggcaaagaagatactggcaaagacgaagaaacagacgcggctggttttctaaatggagagctagaagatttattcaaagaagaagataccaaagaagaagaagacgtagaccctacaaggtaaaaaaacgaaaacttaaactaaaaaagactaaactaattttgaaacaattccaaccacagactattaacagatgtaaaattgttggttataaatgtttgtttcaaggtagcccagacagatctagcaaaaattatattcaatatatatacagtattgtacctcctttttggccgggagggggaggttggagcttgcttgtatttagccttgaaagcctttttgaagactataaccatttacaaaatatatggactagaagtaatgctggactaccacttgttagatttttaggatctcgttttaaattttatcaatcagcagacacagactatattgtatcttatgacagatgctggcccatggtagacacacaacacacacacgcagactcctgtccttctcgaatgatacaaaaaagacataaaatagtcattccatcactaaaaactaaacgcagacgtagaccatacaaatcaaaatttataaaaccacctactcaaatgcaaaacaaatggtactttcaaagagacatttgtaaaataccattattaatgttaacaagtactgcagtagacttaagatatcctttttgtgcacctgaagcaaaaagcaactgtataaccattagatgcttaagcacctttctttttcaaaatcctgactttgcccactatccacaaactacaggatactggccaaaaaaaggaaacaaaaatgaaaaactatatctatatgcatccccagaaagaaaaccaaccttttcacaaagtgacataaaaaatttaatacctttatttaatactaaaaattaccaaccaggtacacctataggacacacaagttatgcagacaatgaacagcattggggaaaccctttttactatgcctacattaatgattctaaaacagattcaacatatttcttatatttatcaaaagaccatagttccacaataaaaacacagaattatgagccaagaaacttaactttcactgaagtaacaggcccaacaatatatgacgttagatacaatccagaaaaagacactggagaaaaaaataaaatatacttagtaagcaatggctctactgaaactatagcaccaccagaaaacccaaattattactttgacggctttccattatatatactactatggagctggacagactggataaaaaaactaaaagacacaccagacatagacaaataccaaatattagttatagatactgatcaatttgacactactctaccacattacataccaatagacatagactttactgaaggttttgatccatacacaccaaataaagacaacccacaagtaccacatcatccaaacatttataactcactcaattggcacccaaaactactattccaacagcaaatgatagaaaaaatatgtagaagtggacctgcatgtactagaccagactataatcactatttacaagcatactgtaaatatgagttctactttaaatggggtggctgcccaaaacaattacaaaaagcatatgatccttgcttacagtccaaatggaccacagccgataacttgtctacaagacttgaaattacgaatcctcaaagaccaccagaactcgaactatactcctttgactgggaaaaagactatgttgaacaaaaagctattgaacgaatacaatactacacagaaattgatgaaacaaatatctcatctacaggaaacaagagcaacccaccacccctcaaaaaaatccaagaaaaagacacatcagcggaaaaagaagagaaaacactgtacaagcagctctgccagctcagacagcgaagactcctcctcgagctccagctccagcaactaacaaatacacaataaaaaactgtacaataaaagttaaactcttcgaagacaaaaaaccaaaaaatagactattcacaccatgggaagctcaagaagaaaaagaaatatcacaaatatttcttagaccccaaagaaaatatttctatgactttcctacctatcctatctttccaccaacccctaaaataccaaaagttaactttgacttaatgtttaaagaataaaaaataaaggccgacaaatttcacttagtggtgtcagtttatttaagttaaaactttaataaacatccgtcacctccctatcaatagggcgccaaaattcaaagggggctccgccccctttaacccccaagggggctccgccccctacaacccccaagggggctccgccccctacaacccccaagggggctccgcccccttacacccccttattaatattcaacaggaaaaccacctaattagaattgccgaccacaaaccgtcacttacttccccattataacaaacttccttttttacttataaatatttataacattaattagtaatctccgtaaatccggggaggtgcttataaactatataactaactacacttccgaatggctgagtttatgccgctagacggagactgaaacacgacagtgtcttcaggctgatcttggg

SEQ ID NO: 1976 - protein, 672 aa, Betatorquevirus sp.
MPPYRSYWQRRYWQRRRNRRGWFSKWRARRFIQRRRYQRRRRRRPYKVKKRKLKLKKTKLILKQFQPQTINRCKIVGYKCLFQGSPDRSSKNYIQYIYSIVPPFWPGGGGWSLLVFSLESLFEDYNHLQNIWTRSNAGLPLVRFLGSRFKFYQSADTDYIVSYDRCWPMVDTQHTHADSCPSRMIQKRHKIVIPSLKTKRRRRPYKSKFIKPPTQMQNKWYFQRDICKIPLLMLTSTAVDLRYPFCAPEAKSNCITIRCLSTFLFQNPDFAHYPQTTGYWPKKGNKNEKLYLYASPERKPTFSQSDIKNLIPLFNTKNYQPGTPIGHTSYADNEQHWGNPFYYAYINDSKTDSTYFLYLSKDHSSTIKTQNYEPRNLTFTEVTGPTIYDVRYNPEKDTGEKNKIYLVSNGSTETIAPPENPNYYFDGFPLYILLWSWTDWIKKLKDTPDIDKYQILVIDTDQFDTTLPHYIPIDIDFTEGFDPYTPNKDNPQVPHHPNIYNSLNWHPKLLFQQQMIEKICRSGPACTRPDYNHYLQAYCKYEFYFKWGGCPKQLQKAYDPCLQSKWTTADNLSTRLEITNPQRPPELELYSFDWEKDYVEQKAIERIQYYTEIDETNISSTGNKSNPPPLKKIQEKDTSAEKEEKTLYKQLCQLRQRRLLLELQLQQLTNTQ

SEQ ID NO: 1977 - DNA, 2976 bp, Betatorquevirus sp.
cgggtgccgaaggtgagtgaaaccaccgtagtcaaggggcaattcgggctatgtcagtctagcggaacgggcaagaaacttaaaataatatactttattacagaatgtcaacaagaattattccagctaaatcaactttaagacaaaacaacttaaaatgtatgaatatgatggtacatgctcatgatatgatctgcgattgtccaactcctctgcaacatctggtagttcttatttttcaacaagaaccagaactcgacttcaaaccaattgaaaaagatttaattagaaaatgcctttctggagaacataccgtacctaccgctaccgaccacgcagacgatggcgtagaagaaggtttattagacgcccttttcaaagaagactttggagaagaagacactaccgggtaagacgcagaaaacttaagaaaattaaaataactcaatggcaacctaaatatattaaaaaacttaaaatagtgggaacacatccactatttataactacttctgaaagactaacaaataactttccttgttatatggaaacaactgctccacacctgtacccaggaggaggaggattctctataaataactttactttgaatgctttatatgaaaaccatttaattttaaagaactggtggactaaaagtaatgacaatatgcctttaatacgttttatgggtgtaacactgtacttatatagaactaatgaatttgactatctgtttcaatacaataacacatacccaatgacagcacaattactaacatacacaagcatgcacccacaagcaatgttactacacaaaaacacattaaaaattacatgcaaaaaacataacagaaacaaaaaaccatacaaaaaaataaaaatacatccaccatcacaaatgtacaatagatggtactttcagaaagacatagctcacgtacccttattacaaacactttgcacagctacatcgttagaccgcatgtttcaacactcaacctcaataagctcaacagttggctttacatcacttgacatacgagggatgaaaaaccacaattacacaaaacaaggcacacaaggatacgttgcattacctaactcacttctttttggagtaagaaggagacaaaattctataacttctattaatttagttgacttaatttatatgggtaacccagaagactacacagacggtacaacaataggaaacatacctagtagtgcatatatacatcaaaaagaaaaaacaaatataggaaaacaaataaaaacaatgcaaatgaacaataactactggggaaacccatttaatgatgaatttcatagactaggtgctctaattaccactaacaaaacatgggatgatattataaaagaatatgataacccaaatacaacagctacaacaaaacttaaagcagattggttccaatttaaagaaaactttacatttgaatgcagatacaacccctttgctgacaaagcaaaaggaaacaaactatatttagttaaactaaaagatgcacaacatgacatagattgggactttccagaagcaaatacattatacacagacttaccaatatggctaatgatatttggctacttagactttatgagaaaatgtggacaatacactcaaatagacacaaactacttagcagtaatatattcaacatatatatttcccaaagaattccattactttgtaccactagataaagactttttagaaggtagaagtccatatgaagaaggagaattcataatagcttcagactacagaaactggcaccctaaagttagatttcaagcgcaaacaataaacatgttaggctccacaggaccaggcataattaaactaccaccgcaaatatcagctgaagctcatatgcgctacatatttcactttaagcttggaggacaaccaccaccaatggcaacactcacagaccctgatgaccaacctaagtacactactcccgataacatcatccaacaaccttcgttacagagtccaacaacaccattcgaatacatcctgtacaactttgatgaaagacgagggcaaattactaaagcagctgcagaacgaatcaaaaaacaccaaaaaactgaaacatctattctcccaattacagaaacagcttttgcctgtccaatcaaaggttccaaagaaatacagacaccggactcatcggacgaggaaaaagaagaaatgtcgctcgaggagcagctcaagctccagcgaaagcagcaaaaactactcagactcagaatcaaccaactcctccagcacctaacaaaattagaataactcattgtactgtaaatgttgatttatttggtgataaaaaacccataaatagacgctttaccccctcagaatatgaacaagaagtagcagaagcaaaaatatggtgtagagctcctagagattttatctttgataaacccacatatccatgggtacctcaactttctccctacactgtaaactttgacttaaacgcgccgcaataaaatacaaggcttgcattgattcactctcggtgtccatttatataagtttaactttaataaacatccaccacactccctaatacgcaagcgcagtagggggctccgccccctaaaacccccagggggggcaaagcccccccctataacccccctcataaatattcaacaggaaaaccacataattagaatggctcaccacaaaccgtctaaaagttcctcttttacctttacttcctcatttactcataaatattcaacacattacttagtaatcaccatcatatcctgggaggacccttaaaactatataaccaacaatacttccgaatggctgagtttatgccgctagacgaagacgggatcacgcagtgactaccggctgacattgggcgggtgccgaaggtgagtgaaaccaccgtagtcaaggggcaattcgggcttggg

SEQ ID NO: 1978 - protein, 677 aa, Betatorquevirus sp.
MPFWRTYRTYRYRPRRRWRRRRFIRRPFQRRLWRRRHYRVRRRKLKKIKITQWQPKYIKKLKIVGTHPLFITTSERLTNNFPCYMETTAPHLYPGGGGFSINNFTLNALYENHLILKNWWTKSNDNMPLIRFMGVTLYLYRTNEFDYLFQYNNTYPMTAQLLTYTSMHPQAMLLHKNTLKITCKKHNRNKKPYKKIKIHPPSQMYNRWYFQKDIAHVPLLQTLCTATSLDRMFQHSTSISSTVGFTSLDIRGMKNHNYTKQGTQGYVALPNSLLFGVRRRQNSITSINLVDLIYMGNPEDYTDGTTIGNIPSSAYIHQKEKTNIGKQIKTMQMNNNYWGNPFNDEFHRLGALITTNKTWDDIIKEYDNPNTTATTKLKADWFQFKENFTFECRYNPFADKAKGNKLYLVKLKDAQHDIDWDFPEANTLYTDLPIWLMIFGYLDFMRKCGQYTQIDTNYLAVIYSTYIFPKEFHYFVPLDKDFLEGRSPYEEGEFIIASDYRNWHPKVRFQAQTINMLGSTGPGIIKLPPQISAEAHMRYIFHFKLGGQPPPMATLTDPDDQPKYTTPDNIIQQPSLQSPTTPFEYILYNFDERRGQITKAAAERIKKHQKTETSILPITETAFACPIKGSKEIQTPDSSDEEKEEMSLEEQLKLQRKQQKLLRLRINQLLQHLTKLE

SEQ ID NO: 1979 - protein, 102 aa, Betatorquevirus sp.
MSTRIIPAKSTLRQNNLKCMNMMVHAHDMICDCPTPLQHLVVLIFQQEPELDFKPIEKDLIRKCLSGEHTVPTATDHADDGVEEGLLDALFKEDFGEEDTTG

SEQ ID NO: 1980 - protein, 122 aa, Betatorquevirus sp.
LSNQRFQRNTDTGLIGRGKRRNVARGAAQAPAKAAKTTQTQNQPTPPAPNKIRITHCTVNVDLFGDKKPINRRFTPSEYEQEVAEAKIWCRAPRDFIFDKPTYPWVPQLSPYTVNFDLNAPQ

SEQ ID NO: 1981 - DNA, 2975 bp, Alphatorquevirus sp.
cgccttcggctgcgcgcggcacctcaggcagtcaaggggcaattcgggctcgggactggccgggctatgggcaaggctcttagggtcatcgctctttaaaacatgtttctcggcaggccttacagaaagaagaggcaagtgccactgcctggcgtgcaccatccaccgcacccacggcctagcatgagccaccactggcgagagcccatcgacaatgtctccaaccgggagaggcactggctcgaaagcgttctcagaagccaccgagctttttgtggttgccgggatcctgtgcttcattttactaatctggttgcacgtcacaatcttcagggcggtggtccctcggcaggtaatcttagggatccgccgccgctgaggagggcgctgccgccaccgccgtcacccagaccgccatgtcctggtggggatggcgccgccgatggtggtggaaaccacggaggcgatggagacgcaggagggcgcgccgcccgagacgagtacggccgagacgatatagaagacctgctcgccgctatcgaggcagacgagtaaggaggcgccgcgcggggggctggcgtgggcgacgtagatactcccgacgctatagcagacgactgactgtcaggcgaaagaaaaagaaactaacccttaagatctggcagccacaaaatatcaggaaatgtaaaataagaggtctcctgcccctcctgatatgcggacacgggcgctcagctcacaactatgccatccactcggatgacaagaccccccagcaggagagtttcgggggcgggctcagcaccgtcagcttctctcttaaagtactatttgaccagaaccagaggggacttaacaggtggtcgaccagcaacgaccagctggacctcgcccgatacctgggctgcacgttctggttctacagggacaaaaagactgactttatagtgcagtatgatatcagctctccatttaaactagataaaaacagcagtcccagctaccaccccttccttctaatgaaggctaaacacaaggtgcttatccccagctttgacactaaacccaagggcagggaaaagataaaactcagaatacagccccccaaaatgttcatagacaagtggtacactcaggaggacctgtgccccgttattcttgtgtcatttgcggtgagcgcagcttcctttacacatccgttctgctcaccactaacgaacaacccttgcatcaccttccaggtgttgaaagaattctattacagtgccatggggtacggcacaccagaaaccacaatgaccacaatatggaacaccctctacgcaactgccacttactatcagtcccacctcactcctcagtttattagaatgcccaccaaaaatcctgataatacagagaacacacaagcccaaaactttaatcagtgggttgataatacatttaaaacaggcaagttagtcaagtacaactatcctcaatataacccagacatagacaagttaaaacaactaagacagtactactttgaatgggaaactaagacaactggggtggcagtacctcctacatggaccacccccacaataaattggtacgagtaccacataggcatgttcagccccattttcttatcaccctatagatcagcaaacctcgaattccccagagcatatcaagatgtaacttacaatcccctcacagacaagggggtgggcaaccgcatgtggtttcaatacaacactaagatagacacccagttcgaacccagatcctgtaaatgtgtcctagaggacatgcccctgtacgccatggcctatggatactcagattttctagaacaagagataggagagtaccaggatctagaggccaacggattcgtgtgcgtcatctgtccatacaccaagccccccatgtacaacaagcacaacccccaacaggggtacgtgttctatgactctcagtggggcaatggcaagtggatagacggaaccgggtttgtccccatatactggatgacaagatggagaatagaactgcttttccaaaagaaagtactcacagatatagccatgtcaggacccttcagctaccccgatgaacttaaaaacactgtactgactgccaaatacagatttgactttaagtggggtggcaatctcttccaccaacagaccattagaaacccctgcaaaccagaagagacctcaaccggtagattcactcgcgaggtacaagtcgttgacccgatcaccatgggcccccggttcgtgtttcactcctgggactggagacgagggttccttagtgacagagctctcaagagaatgtttgaaaaaccgctcgatactgagggatttacagcaactccaaaacgacctcgcatattccctcccacagagggacagctcgcccgagagcaaaaggagcaagaagaaagctccgattcgcaggaagaaagcagccttacctcgctcgaagaagtcccgcaagagacgcagctacgagtccacctcagaaagcagctccgagagcagcgaagcatccgacaccaactcagaaccatgttccagcaacttgtcaagacgcaagcgggcctacacctaaacccccttttatctacccagctataaaccaggcctacatgtttccagagagggccccgaaaccgtctcccagcgctggagactgggccacagaatacctatgcgccaagatattcgatagacccccgaggtccatactctcagacacccccttctacccctggatgcccaggagcaccccccagttccaagtgtccttcaagcttggattcaaaccctaaataaaaatttcaaggccgtgtcacatacgcttgtcggtgtctacctctataggtcaccaagcactccgagcgtcagcgaggagtgcgaccctctctctgtgggcccccctaggcagatactcaacttcttcggagccgcgcgcta

SEQ ID NO: 1982 - protein, 739 aa, Alphatorquevirus sp.
MSWWGWRRRWWWKPRRRWRRRRARRPRRVRPRRYRRPARRYRGRRVRRRRAGGWRGRRRYSRRYSRRLTVRRKKKKLTLKIWQPQNIRKCKIRGLLPLLICGHGRSAHNYAIHSDDKTPQQESFGGGLSTVSFSLKVLFDQNQRGLNRWSTSNDQLDLARYLGCTFWFYRDKKTDFIVQYDISSPFKLDKNSSPSYHPFLLMKAKHKVLIPSFDTKPKGREKIKLRIQPPKMFIDKWYTQEDLCPVILVSFAVSAASFTHPFCSPLTNNPCITFQVLKEFYYSAMGYGTPETTMTTIWNTLYATATYYQSHLTPQFIRMPTKNPDNTENTQAQNFNQWVDNTFKTGKLVKYNYPQYNPDIDKLKQLRQYYFEWETKTTGVAVPPTWTTPTINWYEYHIGMFSPIFLSPYRSANLEFPRAYQDVTYNPLTDKGVGNRMWFQYNTKIDTQFEPRSCKCVLEDMPLYAMAYGYSDFLEQEIGEYQDLEANGFVCVICPYTKPPMYNKHNPQQGYVFYDSQWGNGKWIDGTGFVPIYWMTRWRIELLFQKKVLTDIAMSGPFSYPDELKNTVLTAKYRFDFKWGGNLFHQQTIRNPCKPEETSTGRFTREVQVVDPITMGPRFVFHSWDWRRGFLSDRALKRMFEKPLDTEGFTATPKRPRIFPPTEGQLAREQKEQEESSDSQEESSLTSLEEVPQETQLRVHLRKQLREQRSIRHQLRTMFQQLVKTQAGLHLNPLLSTQL

SEQ ID NO: 1983 - protein, 150 aa, Alphatorquevirus sp.; identical to SEQ ID NO: 1813

SEQ ID NO: 1984 - protein, 60 aa, Alphatorquevirus sp.; identical to SEQ ID NO: 1814

SEQ ID NO: 1985 - DNA, 2975 bp, Alphatorquevirus sp.
agtccggtgctacgcgcttcgcgctgcgccggaaaggggcaattcgggctcgggactggccgggctatgggcaaggctcttaaaaagctatgtttctcggtaggtactggagaaagaaaaggaaagtgcttctgcaagctctgtcaactccagcgaaaaaacctgatatgagtgcgtgggtccctcctatagataatgttaccgagcgtgagaggagctggctcaacggcatttttcagtctcacagagctttttgtgggtgcaatgatcctatctatcatcttagcactctggctgctcgctttaatatgcagtcagggccgtcgccgggtggtgatcctaggccgccgcgaccgccactgagacgcctgccagcgctccctgctcctcagaactcccctaacaacagcaaccggaggtcatggcctggtggggatggtggcgccgccggtggccccgaaggagatggaggcgctggaggacccgccgtcgcagacgactaccagccagaagacctagacgacctgttcgccgctatcgaaggagaagagtaaggaggcgccgcggctgggggcggtatgggcgacgcaggcgcagactgtacaaacgcagatacagggtcagacgcaagagaaaaaagctaataattaaacaatggcagccagctaacataagacgctgccgcatcaggggtcttttacccatagttatctgtggacacggacgcagtgccagaaactatgccctgcactctgatgacactgtacctcagagacagaacttcggaggggctctaagcaccacctccttcagcctcaaagtactgtatgatcagcacctgaggttcctaaacaggtggtcttctagcaacgacgtactagaccttgccagatacctaggctgtagatttaccttttacagagacaaaaagactgactacattgtacagtatgatatcagtgctccctacaaactagacaaagacagcagtcccagctaccatccaggcatgctcatgcagaccagacacaaaatactagtacccagctttgacaccagacccaaggggcgtgctaaaatctccattagactacccccacctaaaatgttcatagacaagtggtattcacaagaggacctctgtaccgttaatcttgtgtcacttgtggtcagcccagcttcctttctacatccgttctgcccaccactaactgacaatccttgcatcaccttccaagtgttgaaagaattctattaccccattataggctactctagcagccccgaaaaagtaaaagatgtctttgagaacacattatacaaacatccatactactaccagcaaatactcacagactcttttatcagagaaatacaatataacccagatggcaccgaaataaaaaactccataactttaggcaccacaacagtacctgacatgaccgcatataatacctgggtcaagacaaaatttaaacaaaaaaatgtaaatgtacactttaactactgcacatacaaaccagacaaagagaaactagaaactctaagaaaatactacttctactgggagacagtaactacaaacaaatgtgtaactgtaaatatgatagccccctcacaaaactggtgggaatacaaaataggcctcttcagtcctatatttttaagcccctttagaaccagcagtttagacttcccaactgcctacagagacgtgtcatacaatcccctcaatgacaagggggtgggcaacatgatgtggtaccagtacaacaccaaggcagacacccaatttgtagcctcttcctgtaaagttgtactacaagacaaacccctctggtgcatggcctatggttactcagactttgttgagagcaccataggagaataccaagacacacaactaaatggctttgtctgtgtcatctgtccctacacagtaccccccatgtacaacaaagacaacccccagatggggtacgtattctatgacagttcatttggtaatggcaaatggatagacggaaccgggtttgtcccactagaaatgcagagcagatggcgaccagaactcctgttccaacagcaagtacttactgacattagcatgagtggaccgttcagctacaaagacgatgtaaagaacactaccattaccatgaagtacagatttgactttaaatggggtggcaatatgctctatcagcagacaatcagaaacccgtgccggggcgacggacagccttccgactcccatagagacactagatcagtacaaatcgttgacccgcttaccatgggtccccgatacgccttccatcagtgggactggagacgcgggtggcttagtgacaaagctctcaaaagaatgttacagaaaccgcttgattttgaagcgtatacaaaacctgcaaagagacctagactattcccccctacagacgagcaacatacagacggaaggccaagagacgcctccacttcggaggaagaaagcatccttacctttcaagaagagagcccgccgaaccaagagatacaagtccacctccgaaagcagctcctcgagcagcgagcactccgacagcagctcaagctcatgttccagcaactcctcaaaacccaggcgggcatccaactcaacccattattattcaaccaagcataaatcaggtgctaatgtttccagaaagaggtccaaaacccgctcctagcacaggagactgggagacagagtacatggcctgtaaattctgggacaggcctcctagaaagtacctcacagatacccccttctacccctggatgccccctgcacctcctaagttctctgtaagcttcaaacttggctttaaaccctaaataaacaaggccatacactgttcacttgtcggtgtctacctcttaaggtcactaagcactccgagcgtaagcgaggagtgcgaccctctaccaaggggcaactccctcga

SEQ ID NO: 1986 - protein, 749 aa, Alphatorquevirus sp.
MAWWGWWRRRWPRRRWRRWRTRRRRRLPARRPRRPVRRYRRRRVRRRRGWGRYGRRRRRLYKRRYRVRRKRKKLIIKQWQPANIRRCRIRGLLPIVICGHGRSARNYALHSDDTVPQRQNFGGALSTTSFSLKVLYDQHLRFLNRWSSSNDVLDLARYLGCRFTFYRDKKTDYIVQYDISAPYKLDKDSSPSYHPGMLMQTRHKILVPSFDTRPKGRAKISIRLPPPKMFIDKWYSQEDLCTVNLVSLVVSPASFLHPFCPPLTDNPCITFQVLKEFYYPIIGYSSSPEKVKDVFENTLYKHPYYYQQILTDSFIREIQYNPDGTEIKNSITLGTTTVPDMTAYNTWVKTKFKQKNVNVHFNYCTYKPDKEKLETLRKYYFYWETVTTNKCVTVNMIAPSQNWWEYKIGLFSPIFLSPFRTSSLDFPTAYRDVSYNPLNDKGVGNMMWYQYNTKADTQFVASSCKVVLQDKPLWCMAYGYSDFVESTIGEYQDTQLNGFVCVICPYTVPPMYNKDNPQMGYVFYDSSFGNGKWIDGTGFVPLEMQSRWRPELLFQQQVLTDISMSGPFSYKDDVKNTTITMKYRFDFKWGGNMLYQQTIRNPCRGDGQPSDSHRDTRSVQIVDPLTMGPRYAFHQWDWRRGWLSDKALKRMLQKPLDFEAYTKPAKRPRLFPPTDEQHTDGRPRDASTSEEESILTFQEESPPNQEIQVHLRKQLLEQRALRQQLKLMFQQLLKTQAGIQLNPLLFNQA

SEQ ID NO: 1987 - protein, 154 aa, Alphatorquevirus sp.
MFLGRYWRKKRKVLLQALSTPAKKPDMSAWVPPIDNVTERERSWLNGIFQSHRAFCGCNDPIYHLSTLAARFNMQSGPSPGGDPRPPRPPLRRLPALPAPQNSPNNSNRRSWPGGDGGAAGGPEGDGGAGGPAVADDYQPEDLDDLFAAIEGEE

SEQ ID NO: 1988 - protein, 60 aa, Alphatorquevirus sp.
MFPERGPKPAPSTGDWETEYMACKFWDRPPRKYLTDTPFYPWMPPAPPKFSVSFKLGFKP

SEQ ID NO: 1989 - DNA, 2975 bp, Alphatorquevirus sp.
tcgggactggccgggctatgggcaaggctcttaaaaaagcatgtttctcggcaggcattggagaaagaaaagggcactgctactgctaccagtgccagctaaaccgaaagcactttctcgacagatgagctggagcagacccgtgcacgatgagcgcggaatacagcgcaactggttcgagggggtcattcgcacccacgctgcttgctgtggctgtggtaacgctagtactcatctggctgctctggccgagaggtacgggtacccttccctaccttcgcataccccgcgacccggcacctcgacacctgtgagcaccccagaacagatccgtagagcccgggccctgcccgcggctccggaccaccacccccctgccctgccatggcatggggatggtggaagagacggcggcgcggctggttccgacggcggtggacccgtggcagaattcgcagaagatggcctagacggacttatcgccgccctcgacgacgaacagtaaggaggcgcagacggaggaggagggggagacgaaaattcagacgctacagatttaagagacgctaccgtagacgtaaaaagacccaaaaaattaaactgacacaatggcaaccagctaagataaaacgctgctttatgatagggtactttcctacaattattcaaggacaaggacggtggtcagacaactttactagtcacatagaagacaaagttagcagaggaccctttgggggcgggcacagcaccagcaggtggtctctaaaagtactctacgaagaaaaccagagacaccacaacttctggacagccagtaacagcgacctagagcttgccagattctttggcagctcctggaggttttacagacatgacacacaagactacatagtgacctggaacaggaaggctcccttgggaggcaacatactgacagcccctaacatgcacccgggaattgccatgctcagcaaacacaaggtggtggttccaagtaaactgaccagacccaagggcaaaaaatacataaaggtgaacataaaaccccccactacatttatagataagtggtactttcagaaagacatatgtgacctcacattgctaaacttgaacgttgtatcatgtgacctgcggtttccgttctgctcaccacaaactgacaacgtttgtgtcaccttccaggtgcttgcaccactgtataacgacttcctctctataaccgcacaagaactaacaaaggagaactggaaaaattactataaaaagtttttacaaaaagctatgccatccacaaaacaaagaaaagcaaacattttaaacactttcttaacagagggatcatttagaaaaccacaagtagacaagtatagaaaacccctaacagacgagcaatactactcacctaaagatgcacagtggggagatcccattcatataatattatcagatgaaactgttgcaaaccaaaaaccacaaagtttggaacaaataattgaaaaaattcaacaaaatgcagacaacgttcttaaaaaagttaatcaagaactagctgaatatgaaacaacacttgcaaatcatggtttatttacacactggacaggcatatatggacctccctttttagactacaacagaataagtccagaaattaaaggcctgtataaagatataatatacaatcctctaatagacaaaggagtaggaaaccacgtatgggtagactactgcagtaaagcagacaacatatactcagaaactcaaagcaaatgtcacatagcagacttacctctgtggtgtgccctgtttggatacgcagactgggtaaaaaaagacacaggaaactggggtatagtagactgggctagagtacttataatatgtccttacacctatcccaaactatatgacagcagcaacccaaacgcaggctttatagttttcagttctaactttgccatgggacgaatgcctgacggtagcaaatacgtacctatagcaatgagacacaagtggtaccccacaatgcttaaccaacagccagtgctagaagacattagtgagtctggaccgtttgcaaacagagacaaaacacccagcgtccaactgactgccaagtacaagttccgatggcattttggtggcaatcctgtttccgaacaggttattaaagacccgtgccaacagcccaccttccaaatgcccggaaccggtacactccctcgcagaatacaagtggcggacccgaaatacctcgggccccagtacaccttccactcgtgggactacagacgtgacttctttaacagaaagactattaagagaatgtcagaacaaccagaaacttttgagtctatattctcaggcccaaaaaaaccaagggtggacctcgacaaaatccaactgcaagaaggcaactattcccaagaccaaagaaaacagaaaccatgggaagacagcgagacccagacagagagcgaagtcccatcagaagaagagacgcagaacctacagcagcagctccaacagcagctccgagaacaaaagcagctcagacagggaatcaactgcctcttcgagcagctgataaaaacccagcagggagtccatatagatccctcccttgtataggcccaaaagccttacttttcccagagagagcacccataacctactctaagggagactgggaaacagagtatcaggcctgcagagcgtttgacagaccccctagaagcaacctgtcagactcaccctactatccttactttccacccccccccgaaaaattctatgtaacctttaagcttggcttcaaataaacaaggccgtgggactttcacttgtcggtgtctacttataaaagtcactaagcactccgagcgaagcgaggagtgcgaccccctgccctgggcccacttcttcggagccgcgcgctacgccttcggctgcgcgcggcacctcagaccccc

SEQ ID NO: 1990 - protein, 749 aa, Alphatorquevirus sp.
MAWGWWKRRRRGWFRRRWTRGRIRRRWPRRTYRRPRRRTVRRRRRRRRGRRKFRRYRFKRRYRRRKKTQKIKLTQWQPAKIKRCFMIGYFPTIIQGQGRWSDNFTSHIEDKVSRGPFGGGHSTSRWSLKVLYEENQRHHNFWTASNSDLELARFFGSSWRFYRHDTQDYIVTWNRKAPLGGNILTAPNMHPGIAMLSKHKVVVPSKLTRPKGKKYIKVNIKPPTTFIDKWYFQKDICDLTLLNLNVVSCDLRFPFCSPQTDNVCVTFQVLAPLYNDFLSITAQELTKENWKNYYKKFLQKAMPSTKQRKANILNTFLTEGSFRKPQVDKYRKPLTDEQYYSPKDAQWGDPIHIILSDETVANQKPQSLEQIIEKIQQNADNVLKKVNQELAEYETTLANHGLFTHWTGIYGPPFLDYNRISPEIKGLYKDIIYNPLIDKGVGNHVWVDYCSKADNIYSETQSKCHIADLPLWCALFGYADWVKKDTGNWGIVDWARVLIICPYTYPKLYDSSNPNAGFIVFSSNFAMGRMPDGSKYVPIAMRHKWYPTMLNQQPVLEDISESGPFANRDKTPSVQLTAKYKFRWHFGGNPVSEQVIKDPCQQPTFQMPGTGTLPRRIQVADPKYLGPQYTFHSWDYRRDFFNRKTIKRMSEQPETFESIFSGPKKPRVDLDKIQLQEGNYSQDQRKQKPWEDSETQTESEVPSEEETQNLQQQLQQQLREQKQLRQGINCLFEQLIKTQQGVHIDPSLV

SEQ ID NO: 1991 - protein, 154 aa, Alphatorquevirus sp.
MFLGRHWRKKRALLLLPVPAKPKALSRQMSWSRPVHDERGIQRNWFEGVIRTHAACCGCGNASTHLAALAERYGYPSLPSHTPRPGTSTPVSTPEQIRRARALPAAPDHHPPALPWHGDGGRDGGAAGSDGGGPVAEFAEDGLDGLIAALDDEQ

SEQ ID NO: 1992 - protein, 124 aa, Alphatorquevirus sp.
MGRQRDPDRERSPIRRRDAEPTAAAPTAAPRTKAAQTGNQLPLRAADKNPAGSPYRSLPCIGPKALLFPERAPITYSKGDWETEYQACRAFDRPPRSNLSDSPYYPYFPPPPEKFYVTFKLGFK

SEQ ID NO: 1993 - DNA, 2975 bp, Alphatorquevirus sp.
cgccttcggctgcgcgcggcacctcaggcagtcaaggggcaattcgggctcgggactggccgggctatgggcaaggctcttagggtcatcgctctttaaaacatgtttctcggcaggccttacagaaagaagaggcaagtgccactgcctggcgtgcaccatccaccgcacccacggcctagcatgagccaccactggcgagagcccatcgacaatgtctccaaccgggagaggcactggctcgaaagcgttctcagaagccaccgagctttttgtggttgccgggatcctgtgcttcattttactaatctggttgcacgtcacaatcttcagggcggtggtccctcggcaggtaatcttagggatccgccgccgctgaggagggcgctgccgccaccgccgtcacccagaccgccatgtcctggtggggatggcgccgccgatggtggtggaaaccacggaggcgatggagacgcaggagggcgcgccgcccgagacgagtacggccgagacgatatagaagacctgctcgccgctatcgaggcagacgagtaaggaggcgccgcgcggggggctggcgtgggcgacgtagatactcccgacgctatagcagacgactgactgtcaggcgaaagaaaaagaaactaacccttaagatctggcagccacaaaatatcaggaaatgtaaaataagaggtctcctgcccctcctgatatgcggacacgggcgctcagctcacaactatgccatccactcggatgacaagaccccccagcaggagagtttcgggggcgggctcagcaccgtcagcttctctcttaaagtactatttgaccagaaccagaggggacttaacaggtggtcgaccagcaacgaccagctggacctcgcccgatacctgggctgcacgttctggttctacagggacaaaaagactgactttatagtgcagtatgatatcagctctccatttaaactagataaaaacagcagtcccagctaccaccccttccttctaatgaaggctaaacacaaggtgcttatccccagctttgacactaaacccaagggcaggaaaaagataaaactcagaatacagccccccaaaatgttcatagacaagtggtacactcaggaggacctgtgccccgttattcttgtgtcatttgcggtgagcgcagcttcctttacacatccgttctgctcaccactaacgaacaacccttgcatcaccttccaggtgttgaaagaattctattacagtgccatggggtacggcacaccagaaaccacaatgaccacaatatggaacaccctctacgcaactgccacttactatcagtcccacctcactcctcagtttattagaatgcccaccaaaaatcctgataatacagagaacacacaagcccaaaactttaatcagtgggttgataatacatttaaaacaggcaagttagtcaagtacaactatcctcaatataacccagacatagacaagttaaaacaactaagaaagtactactttgaatgggaaactaagacaactggggtggcagtacctcctacatggaccacccccacaataaattggtacgagtaccacataggcatgttcagccccattttcttatcaccctatagatcagcaaacctcgaattccccagagcatatcaagatgtaacttacaatcccctcacagacaagggggtgggcaaccgcatgtggtttcaatacaacactaagatagacacccagttcgaacccagatcctgtaaatgtgtcctagaggacatgcccctgtacgccatggcctatggatactcagattttctagaacaagagataggagagtaccaggatctagaggccaacggattcgtgtgcgtcatctgtccatacaccaagccccccatgtacaacaagcacaacccccaacaggggtacgtgttctatgactctcagtggggcaatggcaagtggatagacggaaccgggtttgtccccatatactggatgacaagatggagaatagaactgcttttccaaaagaaagtactcacagatatagccatgtcaggacccttcagctaccccgatgaacttaaaaacactgtactgactgccaaatacagatttgactttaagtggggtggcaatctcttccaccaacagaccattagaaacccctgcaaaccagaagagacctcaaccggtagattcactcgcgaggtacaagtcgttgacccgatcaccatgggcccccggttcgtgtttcactcctgggactggagacgagggttccttagtgacagagctctcaagagaatgtttgaaaaaccgctcgatactgagggatttacagcaactccaaaacgacctcgcatattccctcccacagagggacagctcgcccgagagcaaaaggagcaagaagaaagctccgattcgcaggaagaaagcagccttacctcgctcgaagaagtcccgcaagagacgcagctacgagtccacctcagaaagcagctccgagagcagcgaagcatccgacaccaactcagaaccatgttccagcaacttgtcaagacgcaagcgggcctacacctaaacccccttttatctacccagctataaaccaggcctacatgtttccagagagggccccgaaaccgtctcccagcgctggagactgggccacagaatacctatgcgccaagatattcgatagacccccgaggtccatactctcagacacccccttctacccctggatgcccaggagcaccccccagttccaagtgtccttcaagcttggattcaaaccctaaataaaaatttcaaggccgtgtcacatacgcttgtcggtgtctacctctataggtcaccaagcactccgagcgtcagcgaggagtgcgaccctctctctgtgggcccccctaggcagatactcaacttcttcggagccgcgcgcta

SEQ ID NO: 1994 - protein, 739 aa, Alphatorquevirus sp.; identical to SEQ ID NO: 1812

SEQ ID NO: 1995 - protein, 150 aa, Alphatorquevirus sp.; identical to SEQ ID NO: 1813

SEQ ID NO: 1996 - protein, 60 aa, Alphatorquevirus sp.; identical to SEQ ID NO: 1814

SEQ ID NO: 1997 - DNA, 2975 bp, Betatorquevirus sp.
cgggtgccgaaggtgagtgaaaccaccgtagtcaaggggcaattcgggctatgtcagtctagcggaacgggcaagaaacttaaaataatatactttattacagaatgtcaacaagaattattccagctaaatcaactttaagacaaaacaacttaaaatgtatgaatatgatggtacatgctcatgatatgatctgcgattgtccaactcctctgcaacatctggtagttcttatttttcaacaagaaccagaactcgacttcaaaccaattgaaaaagatttaattagaaaatgcctttctggagaacataccgtacctaccgctaccgaccacgcagacgatggcgtagaagaaggtttattagacgcccttttcaaagaagactttggagaagaagacactaccgggtaagacgcagaaaacttaagaaaattaaaataactcaatggcaacctaaatatattaaaaaacttaaaatagtgggaacacatccactatttataactacttctgaaagactaacaaataactttccttgttatatggaaacaactgctccacacctgtacccaggaggaggaggattctctataaataactttactttgaatgctttatatgaaaaccatttaattttaaagaactggtggactaaaagtaatgacaatatgcctttaatacgttttatgggtgtaacactgtacttatatagaactaatgaatttgactatctgtttcaatacaataacacatacccaatgacagcacaattactaacatacacaagcatgcacccacaagcaatgttactacacaaaaacacattaaaaattacatgcaaaaaacataacagaaacaaaaaaccatacaaaaaaataaaaatacatccaccatcacaaatgtacaatagatggtactttcagaaagacatagctcacgtacccttattacaaacactttgcacagctacatcgttagaccgcatgtttcaacactcaacctcaataagctcaacagttggctttacatcacttgacatacgagggatgaaaaaccacaattacacaaaacaaggcacacaaggatacgttgcattacctaactcacttctttttggagtaagaaggagacaaaattctataacttctattaatttagttgacttaatttatatgggtaacccagaagactacacagacggtacaacaataggaaacatacctagtagtgcatatatacatcaaaaagaaaaaacaaatataggaaaacaaataaaaacaatgcaaatgaacaataactactggggaaacccatttaatgatgaatttcatagactaggtgctctaattaccactaacaaaacatgggatgatattataaaagaatatgataacccaaatacaacagctacaacaaaacttaaagcagattggttccaatttaaagaaaactttacatttgaatgcagatacaacccctttgctgacaaagcaaaaggaaacaaactatatttagttaaactaaaagatgcacaacatgacatagattgggactttccagaagcaaatacattatacacagacttaccaatatggctaatgatatttggctacttagactttatgagaaaatgtggacaatacactcaaatagacacaaactacttagcagtaatatattcaacatatatatttcccaaagaattccattactttgtaccactagataaagactttttagaaggtagaagtccatatgaagaaggagaattcataatagcttcagactacagaaactggcaccctaaagttagatttcaagcgcaaacaataaacatgttaggctccacaggaccaggcataattaaactaccaccgcaaatatcagctgaagctcatatgcgctacatatttcactttaagcttggaggacaaccaccaccaatggcaacactcacagaccctgatgaccaacctaagtacactactcccgataacatcatccaacaaccttcgttacagagtccaacaacaccattcgaatacatcctgtacaactttgatgaaagacgagggcaaattactaaagcagctgcagaacgaatcaaaaaacaccaaaaaactgaaacatctattctcccaattacagaaacagcttttgcctgtccaatcaaaggttccaaagaaatacagacaccggactcatcggacgaggaaaaagaagaaatgtcgctcgaggagcagctcaagctccagcgaaagcagcaaaaactactcagactcagaatcaaccaactcctccagcacctaacaaaattagaataactcattgtactgtaaatgttgatttatttggtgataaaaaacccataaatagacgctttaccccctcagaatatgaacaagaagtagcagaagcaaaaatatggtgtagagctcctagagattttatctttgataaacccacatatccatgggtacctcaactttctccctacactgtaaactttgacttaaacgcgccgcaataaaatacaaggcttgcattgattcactctcggtgtccatttatataagtttaactttaataaacatccaccacactccctaatacgcaagcgcagtagggggctccgccccctaaaacccccagggggggcaaagccccccctataacccccctcataaatattcaacaggaaaaccacataattagaatggctcaccacaaaccgtctaaaagttcctcttttacctttacttcctcatttactcataaatattcaacacattacttagtaatcaccatcatatcctgggaggacccttaaaactatataaccaacaatacttccgaatggctgagtttatgccgctagacgaagacgggatcacgcagtgactaccggctgacattgggcgggtgccgaaggtgagtgaaaccaccgtagtcaaggggcaattcgggcttggg

SEQ ID NO: 1998 - protein, 677 aa, Betatorquevirus sp.; identical to SEQ ID NO: 1978

SEQ ID NO: 1999 - protein, 102 aa, Betatorquevirus sp.; identical to SEQ ID NO: 1979

SEQ ID NO: 2000 - protein, 122 aa, Betatorquevirus sp.; identical to SEQ ID NO: 1980

SEQ ID NO: 2001 - DNA, 2975 bp, Betatorquevirus sp.
cgggtgccgaaggtgagtgaaaccaccgaagtcaaggggcaattcgggctagatcagtctggcggaacgggcaagaaacttaaaatattttattttacagatatgagtactcgctggattacacctaaaacatctctaaaacaacaaaaactacaatggattaatttactttgccacgaccatgatattttctgtggatgctcatcaccattagaacacacagctgcattaatttttgaacaagaacctgacctgcgcttcagaccaccagaaaaagatcttatacaaaaatgccttactactcaagatactacagaaggagatggagaccaagacgcttttggagaaggagatttagaagaccttttcaaagaagattggagaccaagacgcttttggagaaggagatttagaagaccttttcaaagaagattttggagaagaagatactcggtaaggagaaaaaaacttaaaaaactaagactagctcaatggcaacctcataccataaaaaaatgtagaattattggatactatccacttgctataagcacaagagacagattatctgaaaaccttaattgttatctagactcttttgcgccgcatttaatacattctggaggaggtttttcaatatgtaactggtctttatatgccttatacagagaaaatattgaaatgagaaactggtggacaacaggaaatgataatttacctttatgtagatatttaggatgtaaaattactttatatagacaagcagaagtagactatatgtttgcatacagaaattcttttcctatgacagcatcaatacacacataccaaagtacaaacccacaagtaatgctactaaacaacagaacaagaaaaatgccatgcaaaaaacataacagaaacaaaaaaccatacaaaaaactatttataagacctccatcacaactacaaaacaaatggtacatgcaacatgacatagctcaaacaccacttttacaaacatttaccacattatgctcttttgacagaatgtaccaaaactcatcctcaatttcaaatacaataggatttacaggtttagacacaaatggatttaaaaatcactactttaaaacaaacggaacccgtccatacgcaccaatacatgatcaattactaatagcaataccccaaggcccagcaacaaataatatatcaaaagtatccatattagaatgcataattttaggaaacataactgattacacacccggaacaataattaatgcatgtgaagacaccgtaacttcaactatacaacctgctccaacatcaccgcaatcaaaaaaactatacaacgcatacacaaaactacaacactggggaaaccctttctttgcagactattttcatggagacattattatggcaatgtcaaacaaaacaatcaatgacttaataacccactttaacacaaaagtaaccttggacgacaaatttacaataaaaacacaaaaatacatagaatacagatacaacccatttgcagacaaaggagaaggaaacaaattatatttagtacctattaacactcaactacattcagacgattggtctccaccaacagacaaagaagttttatgcgaaaatctaccaattaatattatgttatggggatacttagattttcaaagaaaatgtagagaatataatgacatagatacaacatgtttatgtgtaatacaaacaaaatatataacacctaataatggaccaaaatttatagttccattagatgatgatgtactatatggaaactccccttactattcagaaggccatagaacaaccagtgacgcccaaaactggcatcccaaagttagattccaaacacgagccctaaataacatagcatgtacaagtatagctacagctaaactaccacgtgataccagtgttgaatgtcacatgaaatattgtttttactttaagtttggaggagaaataccaccaatgtcaattaccaaaaacccagaagaccaaccaaaatttcctattcccaataacctcctacaacaaccttcgttacagagtccaacgaccccatttgaatacttcctctacaaatttgaccaacgcagaggaatgctcacaaaatcagctattgaaagaattacaaaaaaccaaaaacctgaaacagatattttatcaattgcagacccatcaacttggtgcccaacaacactccaacaagaaaaagaaacatcggaggactcaacctcggaagaagagcaaacatcatcgacggaggagagactccagcagcagcgaagaaagcaaaagcacctcagaaaactcatcaacagacttctcctccgactaacaacattagaataaaaaaatgtactgtacaagttaaactattcccagaacccccaaaaaataggagaatgacaccccaagaatatgaggatgagatacaaacagcaaaaatatggggtagagttcctagagattttatttttgaccatccaacatatccatatgtacccactgttcctaaatactctgtaaacttcgacttaaacgcgccgcaataaactcaaggccaacaattttcacactcggtgtctacctctttaagtaaaaaccttaataaacatccaccacactccctaatacacaggcccacagggggctccgccccctgtaacccccagggggggatacccccccttaacccccccaaaaaccacaaaatttgcattgcctaccacaaacgaacaggaaaccacaaaatttgcattgccgaccacaaaccgacttatgctaattaacttctgcaaaacacactaacttccctaaaaattaattattaatcagcatcacaataggaggagcctaacaactatataacgaagtatacttccgaatggctgagtttatgccgccagacggagacgggatcacttcagtgactccaggctgatcttggg

SEQ ID NO: 2002 - protein, 757 aa, Betatorquevirus sp.
MSTRWITPKTSLKQQKLQWINLLCHDHDIFCGCSSPLEHTAALIFEQEPDLRFRPPEKDLIQKCLTTQDTTEGDGDQDAFGEGDLEDLFKEDWRPRRFWRRRFRRPFQRRFWRRRYSVRRKKLKKLRLAQWQPHTIKKCRIIGYYPLAISTRDRLSENLNCYLDSFAPHLIHSGGGFSICNWSLYALYRENIEMRNWWTTGNDNLPLCRYLGCKITLYRQAEVDYMFAYRNSFPMTASIHTYQSTNPQVMLLNNRTRKMPCKKHNRNKKPYKKLFIRPPSQLQNKWYMQHDIAQTPLLQTFTTLCSFDRMYQNSSSISNTIGFTGLDTNGFKNHYFKTNGTRPYAPIHDQLLIAIPQGPATNNISKVSILECIILGNITDYTPGTIINACEDTVTSTIQPAPTSPQSKKLYNAYTKLQHWGNPFFADYFHGDIIMAMSNKTINDLITHFNTKVTLDDKFTIKTQKYIEYRYNPFADKGEGNKLYLVPINTQLHSDDWSPPTDKEVLCENLPINIMLWGYLDFQRKCREYNDIDTTCLCVIQTKYITPNNGPKFIVPLDDDVLYGNSPYYSEGHRTTSDAQNWHPKVRFQTRALNNIACTSIATAKLPRDTSVECHMKYCFYFKFGGEIPPMSITKNPEDQPKFPIPNNLLQQPSLQSPTTPFEYFLYKFDQRRGMLTKSAIERITKNQKPETDILSIADPSTWCPTTLQQEKETSEDSTSEEEQTSSTEERLQQQRRKQKHLRKLINRLLLRLTTLE

SEQ ID NO: 2003 - DNA, 2975 bp, Alphatorquevirus sp.
acgcttgcgcgtttcggaccttcggcgtcagtcaaggggcaattcgggctcgggactggccgggccctgggcaaggctcttaaaaaatgcgctttcgcagggttgctgagaaaaggaaagtgcttctgcaaactgtgcgagctccaaagaaggctaggcggcttctaggtatgtggcagccccccgtgatcaatgtccccggcattgaaagaaactggtacgagagctgttatcgatcccatgctgctgtttgcggctgtggcgactttgttggccatcttaatcatctggcaactactctgggtcgccctccgcgtcctcagcccccaggcggaccccgcacgccgcagataagaaacctgccggcgctcccggcgccccagggcgagcccggtgacagagcgccatggcgtggggtttctggggccgacgccgccggtggagacggtggagagcgcggcgcagacggtggagaccccgcagacgtaggagacgacgccctactcgccgctttcgagctcgtcgaagagtaaggaggcgcggggggcggtggcgcagacgctacagaaaatggcgacggggcagacgcagacggactcacagaaaaaagatagtgataaaacagtggcaaccaaactttattagacgctgctacattatagggtacctacctttaatattctgtggcgaaaacacaagcgcccagaactatgccactcactcagacgacatgataagcaaaggaccgtacggggggggcatgactaccacaaaattcactctgagaatactgtacgacgagtttaccaggtttatgaacttttggactgtcagtaacgaagacctagacctgtgtagatacgtgggctgcaaactcatattttttaaacaccccacggtggactttatagtacagataaacactcagcctcctttcttagacacgcacctcaccgcggccagcattcacccaggcatcatgatgctcagcaagagacacatactaataccctcactaaagacccggccaagcagaaaacacagggtggtcgtcagggtgggcgccccaagactttttcaagacaagtggtacccccagtcagacctgtgtgacacagttctgctttctatattcgcaaccgcctgtgacttgcaatatccgttcggctcaccactaactgacaacccttgcgtaaacttccagattttggggccccagtacaaaaaacaccttagtattagctccactatggatgccagtaacaaagaccactatgataaaaacttgtttaatcaaactgcgctatacaatacttttcaaaccatagctcaacttaaagaaacgggacaaacttcaagcataactccaagttggaatgacgtgcaaaactcaactccactcgattcattaggttcaaatgcacttcaaagcagagacacttggtacaaaggcaatacatacaagacaaatattacacagttagcagaaaaaaccagacaaagatttagaggtgcaacacaagcagcactaccaaactaccccacaataatgtccacagacttatatgaataccactcaggcatatactccagcatatttctatcagctggcaggagctactttgaaaccaccggggcctactgtgacattatatacaaccctttcacagacaaaggcacagggaacataatctggatagactacctcacaaaagaagacaccatctttgtaaaaaacaaaagcaaatgcgaaatacaagacatgcccctgtgggcggcctgcacgggatacacagagttttgtgcaaagtatacaggcgactctgccattatctacaatgccagagtcctcataagatgcccgtacactgagcccatgctaatagaccactcagacccaaacaaaggctttgtaccctactcctttaactttggcaacggaaagatgccaggaggcagctctaacgtgcccataagaatgagagccaagtggtacgtaaacatataccaccaaaaagaagttcttgaagctatagtgcaaagcggaccgtttgggtacaagggcgacataaaatcagctgtactgtctatgaaatacagatttcactggaagtggggtggaaaccctatatccaaacaggtcgtcaggaatccctgctccaactccagctcctccgcgtcccatagaggacctcgcagcgtacaagcagttgacccgaaatacaatacgccagaggtcacgtggcactcgtgggacatcagacgaggcatctttggcaaagcaggtattaaaagaatgcaacaagaatcagatgctctttacattcctccaggaccactcaagagacctcgcagggacaccaacgcccaagacccagaagagcaaaacgaaagctcaggtttcagagtccagcagcgactcccgtgggtccactccagccaagagacgcaaagctcccaagaagagacggaggcgcaggggtcgctacaagaccaactactcctccagctccgagagcagcgagtcctccgactccagctccagcaactcgcaacccaagtcctcaaagtccaagcagggcacggcatacaccccctattatcttcccaagcgtaaacaaagcctttatgtttgagcccaagggtcctaaacccatacaaggctacaacgattggctagaggagtacacctgctgcaaacactgggacagacctcccagaaagctacacacagacatacccttctacccctgggcaccaaaaccccaagaccaagtcagggtaacctttaaactcaactttcaataaaaattctaggccgtgggagtttcacttgtcggtgtctgcttcttaaggttgccaagcactccgagcgccagcgaggagtgcgaccccccctccggtagcaacgccttcggagccgcgcgctacgccttcggctgcgcgcggcacctcagaccccccctccacccgaa

SEQ ID NO: 2004 - protein, 736 aa, Alphatorquevirus sp.
MAWGFWGRRRRWRRWRARRRRWRPRRRRRRRPTRRFRARRRVRRRGGRWRRRYRKWRRGRRRRTHRKKIVIKQWQPNFIRRCYIIGYLPLIFCGENTSAQNYATHSDDMISKGPYGGGMTTTKFTLRILYDEFTRFMNFWTVSNEDLDLCRYVGCKLIFFKHPTVDFIVQINTQPPFLDTHLTAASIHPGIMMLSKRHILIPSLKTRPSRKHRVVVRVGAPRLFQDKWYPQSDLCDTVLLSIFATACDLQYPFGSPLTDNPCVNFQILGPQYKKHLSISSTMDASNKDHYDKNLFNQTALYNTFQTIAQLKETGQTSSITPSWNDVQNSTPLDSLGSNALQSRDTWYKGNTYKTNITQLAEKTRQRFRGATQAALPNYPTIMSTDLYEYHSGIYSSIFLSAGRSYFETTGAYCDIIYNPFTDKGTGNIIWIDYLTKEDTIFVKNKSKCEIQDMPLWAACTGYTEFCAKYTGDSAIIYNARVLIRCPYTEPMLIDHSDPNKGFVPYSFNFGNGKMPGGSSNVPIRMRAKWYVNIYHQKEVLEAIVQSGPFGYKGDIKSAVLSMKYRFHWKWGGNPISKQVVRNPCSNSSSSASHRGPRSVQAVDPKYNTPEVTWHSWDIRRGIFGKAGIKRMQQESDALYIPPGPLKRPRRDTNAQDPEEQNESSGFRVQQRLPWVHSSQETQSSQEETEAQGSLQDQLLLQLREQRVLRLQLQQLATQVLKVQAGHGIHPLLSSQA

SEQ ID NO: 2005 - protein, 148 aa, Alphatorquevirus sp.; identical to SEQ ID NO: 1187

SEQ ID NO: 2006 - protein, 59 aa, Alphatorquevirus sp.; identical to SEQ ID NO: 1188

SEQ ID NO: 2007 - DNA, 2974 bp, Gammatorquevirus sp.
cgggagcccgaggtgagtgcaaccaccgaggtctaggggcaactcgggctagggcagtctagcggaacgggcaagaaactaaaaactatgcttctttttcagatgaacaatcttacaattattgacttttacaaaaaaactaaatacaatcctgaaacattaaaccaaatatggatgtcacagctggcagactcccatgacatctggtgtgactgcaacggtccttttgctcatttgcttgcttctatttttcctcctggtcatcaagaccgtgatctcacaattaatcaaatacttaaaagagactacaaaaaatgcctttctggtggagacgcagaagaaagcgctggtggggccgctggtaccgcaagccataccataaaaccagaaagcgaagagcctttagaaaacccagaagaaggaaatatagaagatttactcgccgcagccgaagacgcagaaagaaggtaagaagaaaaaaacctacattaactgttagacagtggcaacctgactccattgtactgtgtaaaattaagggcttcgaagccatactatggggagcacaaggatcacaatacttatcagccactcaaaacatgtttgaatttacaagaagcaaataccctgggggaggaggttttgcagcacaaacttactccttaaaatttttatatgatcaatggttacttagaaacaacatatggacaaaaacaaatcaacataaagacttatgtagatttttaaaaacatactttacattttatagacaccaagatgtagactttgttataatgtacaacagacagcccccatttaatatagacaaaactacaaacatgaactttcacccatacatgttattacaacaaaaaaataaaattgttttaccaagttactctaccaatcctagaggtaaatctaaaaagactagaaaaataaaaccaccaaaacaaatgctttctaaatggttttttactgagcaattctgtaactatgacttactacttatagttgctgcagcagcatctttaaaatatcctagaataggctgctgtaatgaaaacagaacaatgactctatactgtctaaatacaaaattttactcagaaaccaactgggcacaaactgtaaagtatccagactactacaaaccatacagtaccataagtgaaagcttatacttttggtcaggttcacttacaaaacccacaaaatacaatccaacaattgaaattaaaaaatctacacctgcacctggtgacttaacattctactacaactccattaataaagacataggctacttcaccagtaaggtactaaaagcatataaaattacagtaggacaagaaggttctgttactaaacctttaccactagtactaggaagatacaatccatcagtagatgatggcaaaggaaatgttgtatttctacaaaacattctaagtggccactgggctatacctccaaagacagatgattggaaaatagaaaatgttccactatggttagccttctggggttactggagctttttagaacaaaaatacaccaaaagcatatttacaacacatatgtttgtagtaaaaagtaaatacatagaaacatcacaaacagaactagaacaaacatactgggcatttctagatcccgaatggatagatggtaaaaatgcatttgactcacctattacttacacagaacaaaaactgtggtaccctacttgtgaatctcaaataaaaaccattaatgccatatgcagtacaggaccttatgtaccaaagttagacaatcaacttaaaagtacatgggaacttgcagctcattattcatttcactttaaatgggggggtcctcaggtacaagatcaaccagttgatgatccaacaaaaaaaggacactatgatgtgcccgatacaatcaaagaggcagtacaagtcattgatccctcaaaaaacattgcagccacaatgttccaccagtgggactacagacacggttgcattacatcaacagctattaaaagaatgcaaagcaacctcccaactgattcatctctcgaatctgattcagacacagagccaccacacaaaaggaggagggtcacacctctcctacacaacccagaagaaaaaacgaaaaagatccacaaatgtctcctctcactctgcgaagaagatacctgccaagaagaggaaacggaccagaacctcctccagctcatccagcagcaaagacaccagcagcagcagctcaagcacaacctcctaactttaatcaaagacatcaaggcaaaacagagattactacaacttcaaacgggtgtactagaataacactcacaagatttaaagctggttttgaacaagaaactgaaaaagaattagcacaagcatttaaaagaccacctagattgtttaaagaagacaaacccttttacccatggttaccacaacctgtaccccttgtaaattttcaccttaattacaaattctaggcctacaaatttcacttagtggtgtatgtttatataagttttacccccaaaaaaataataaaattgtaaaaaaaaaaaaaaaataaaaaattgtaaaaattcggcgctcgcgcgcgctgcgcgcgcggccatatgctaattagttccccttttacacagtaaaaaggggaagtgggggggcagagcccccccacaccccccgcgggggggggcagagccccccccgcaccccccctacgtcacaaaccacgcccccgccgccatcttgggtgcggcagggcggggactaaaatggcgggagccaattattttatacttacactttccaataaaaacctgccacatcacagcaaaggggtggagacttctaaactatataactaagtgatgtgacgaatggctgagtttaccccgctagacggtgcagggaccggatcgagcgcagcgaggaggtccccggctgcccatggg

SEQ ID NO: 2008 - protein, 675 aa, Gammatorquevirus sp.
MPFWWRRRRKRWWGRWYRKPYHKTRKRRAFRKPRRRKYRRFTRRSRRRRKKVRRKKPTLTVRQWQPDSIVLCKIKGFEAILWGAQGSQYLSATQNMFEFTRSKYPGGGGFAAQTYSLKFLYDQWLLRNNIWTKTNQHKDLCRFLKTYFTFYRHQDVDFVIMYNRQPPFNIDKTTNMNFHPYMLLQQKNKIVLPSYSTNPRGKSKKTRKIKPPKQMLSKWFFTEQFCNYDLLLIVAAAASLKYPRIGCCNENRTMTLYCLNTKFYSETNWAQTVKYPDYYKPYSTISESLYFWSGSLTKPTKYNPTIEIKKSTPAPGDLTFYYNSINKDIGYFTSKVLKAYKITVGQEGSVTKPLPLVLGRYNPSVDDGKGNVVFLQNILSGHWAIPPKTDDWKIENVPLWLAFWGYWSFLEQKYTKSIFTTHMFVVKSKYIETSQTELEQTYWAFLDPEWIDGKNAFDSPITYTEQKLWYPTCESQIKTINAICSTGPYVPKLDNQLKSTWELAAHYSFHFKWGGPQVQDQPVDDPTKKGHYDVPDTIKEAVQVIDPSKNIAATMFHQWDYRHGCITSTAIKRMQSNLPTDSSLESDSDTEPPHKRRRVTPLLHNPEEKTKKIHKCLLSLCEEDTCQEEETDQNLLQLIQQQRHQQQQLKHNLLTLIKDIKAKQRLLQLQTGVLE

SEQ ID NO: 2009 - protein, 127 aa, Gammatorquevirus sp.
MLLFQMNNLTIIDFYKKTKYNPETLNQIWMSQLADSHDIWCDCNGPFAHLLASIFPPGHQDRDLTINQILKRDYKKCLSGGDAEESAGGAAGTASHTIKPESEEPLENPEEGNIEDLLAAAEDAERR

SEQ ID NO: 2010 - protein, 114 aa, Gammatorquevirus sp.
MSPLTLRRRYLPRRGNGPEPPPAHPAAKTPAAAAQAQPPNFNQRHQGKTEITTTSNGCTRITLTRFKAGFEQETEKELAQAFKRPPRLFKEDKPFYPWLPQPVPLVNFHLNYKF

SEQ ID NO: 2011 - DNA, 2973 bp, Alphatorquevirus sp.
tcttcggagccgcggggggggggggggggggtcaaggggcaattcgggctcgggactggccgggccccgggcaaggctcttaaaaagcatgtttctcggtaaactgtacagaaagaaaaggaaagtgccactgcaagctctgccagtaccaccgcctaaacggactagcatgagctgggtacaaccggtatctaacgcccatgttcgagaacaacaatggttcgagtccaccgttagaagccacgacgctttctgtggctgtggtgattccgtgcttcattttactaaccttgctactcgctttaaccgtctgcatgctgccccctcgcctctggatccgccctacccccctcccccgaggcgggcgcgtgtgagaggcctgccggccctccccgctcctgaaaacccaccggcgccatggcctggcgctggtggagacgccgctggaaacccagaaggcggcccgcgtggacaaagtaccggagacgccgctggagacgatttcgaccccgcagacctagaagatctactcgccgccgtggaagaagacgaacagtaaggaggcgccgcgttaggcgactgaggcggaggagggggtggactaggagacggtacttgagacgcagaaagaaacgaaagctagtactgactcaatggaaccccagcactgtcagacgctgcaatatcaggggcataataccccttatcatgtgcggggcaaacactgccagttttaactatggcatgcacagcgacgacagcactcctcagccagagaaatttgggggcggcatgagcacagtgacttttagcctatatgtactgtatgaccagttcaccagacacatgaacaggtggtcgtaccccaacgaccagctagacctcgccagatacaaaggctgctcttttaaaatgtacagacaccccacaactgactttatactgacttatgacaacaatccccccatgaaaaacactatatacagctctcctaacacacacccaggcatcctcatgcaacagaaacacagagtactaatacccagctggctcacctttcctaaaggcagaaaatatgtaaaggttaaaatacctccacctaagttatttgaagaccactggtacactcagcctgacttatgcaaagtaccgctcgttactctgcggtcaaccgcagctgacttcagacatccgttctgctcaccacaaacgaacaacccttgcaccaccttccaggtgttgcgagacaagtacaacgaagttattggacttccttttgcaaacactggctctaatacaactgttactcaacaaattacctcctttgagacttggctatatgaatccagcacacactatcaaacatttcaaacagagcaaatgtttagaccaaaacaatacaatgcagatggctcacagtggaaccaataccaacaaatgctttctcagtggactacaaaaatttacaacagaaaaacagacagtaactatggatattcctcctataactttagtaacaatgcaggaggctaccagtatgctacacaaatgagacaacactactggacacaactaacaacactcacaagcacagtaccacacataaactctacctttgctaatgctaccactccagaatatgaataccacacaggctggttttcaccagtatttataggcccaaacagacacaacatacaatttagaacagcatacatggatgttacatacaaccctctaaatgacaaaggtctatttaacagagtatggttccaatacagcactaaacctacaacagagtttaaccctatgcaatgcaaatgtgtagtagaaaacatcccactgtggtcagctttatttggctacagtgaatatgtagaaagccaactaggcccctttcaagaccatgaaacagtaggcctagtagtagtacaatgcccctacacagtgccatcactatatgacaaagacagaaaagacatgggctacatattttatgacacaaactttggcaatggaaaactagtcaatggcagcggccaggtgcccagatactggcaacagagatggtaccccatactcaaaagacaaaaacaagtaatgaatgacatctgcaagactggacctttcagctacagagacgaactgcttcaggtggacttggcagcctcttacaccttcaaatttaactgggggggcgacttactctaccaccaggtcatcaaaaacccgtgcgactcctcaggactggcacccaccgactccggtagattcaagcgggacgtacaagttgttagcccgctcaccatgggtcccagactcctcttccactcgtttgaccaaagacgggggttctttactgaaagagctatcaaacgaatgcatgatgaacaaattaatgttccagactttacacagcagcctaaaatcccccgcattttcccaccagtcgagctccaagaccaaagagaacaagcagaagaagactcgcgttcggaggcgctctcgctcacctcctcccaagaaaaagaagcagaagcccaagaaagtctaccgatacagcagcagctcagaaaacaactcagacagcaacagcagttgcgagtccacttgcagcacctcttcctccaactccaaaaaacaaaagcccatttacatttaaacccactatttttcccccaagagaacatgtagacatgttcggtaactactatgatagaaagccaacagcctcagactggaaaactgaatatgagtgctgtagggcctttgatagaccccctagaagcaaccttaaagacagccccttctacccctggatgccaaaacagcctcagtttcgtgtaaccttcaaacttggcttctaataaaatttgctaggccgtgcaactttcacttgtcggtgtctacctctaaaggtcactaagctctccgagcgcagcgaggagagcgacccttccccctgactcaact

SEQ ID NO: 2012 - protein, 758 aa, Alphatorquevirus sp.
MAWRWWRRRWKPRRRPAWTKYRRRRWRRFRPRRPRRSTRRRGRRRTVRRRRVRRLRRRRGWTRRRYLRRRKKRKLVLTQWNPSTVRRCNIRGIIPLIMCGANTASFNYGMHSDDSTPQPEKFGGGMSTVTFSLYVLYDQFTRHMNRWSYPNDQLDLARYKGCSFKMYRHPTTDFILTYDNNPPMKNTIYSSPNTHPGILMQQKHRVLIPSWLTFPKGRKYVKVKIPPPKLFEDHWYTQPDLCKVPLVTLRSTAADFRHPFCSPQTNNPCTTFQVLRDKYNEVIGLPFANTGSNTTVTQQITSFETWLYESSTHYQTFQTEQMFRPKQYNADGSQWNQYQQMLSQWTTKIYNRKTDSNYGYSSYNFSNNAGGYQYATQMRQHYWTQLTTLTSTVPHINSTFANATTPEYEYHTGWFSPVFIGPNRHNIQFRTAYMDVTYNPLNDKGLFNRVWFQYSTKPTTEFNPMQCKCVVENIPLWSALFGYSEYVESQLGPFQDHETVGLVVVQCPYTVPSLYDKDRKDMGYIFYDTNFGNGKLVNGSGQVPRYWQQRWYPILKRQKQVMNDICKTGPFSYRDELLQVDLAASYTFKFNWGGDLLYHQVIKNPCDSSGLAPTDSGRFKRDVQVVSPLTMGPRLLFHSFDQRRGFFTERAIKRMHDEQINVPDFTQQPKIPRIFPPVELQDQREQAEEDSRSEALSLTSSQEKEAEAQESLPIQQQLRKQLRQQQQLRVHLQHLFLQLQKTKAHLHLNPLFFPQENM

SEQ ID NO: 2013 - protein, 167 aa, Alphatorquevirus sp.; identical to SEQ ID NO: 1491

SEQ ID NO: 2014 - protein, 56 aa, Alphatorquevirus sp.; identical to SEQ ID NO: 1492

SEQ ID NO: 2015 - DNA, 2973 bp, Betatorquevirus sp.
cgggagccgaaggtgagtgaaaccaccgaagtctaggggcaattcgggctagatcagtctggcggaacgggcaagaaacttaaaatattttttattcacagatatgttctcatcatggaagacacccacatcatcaaagagacaacaagaactacagtggattggaataattaactcaactcacgaccaaatttgccactgcgacgacccaactcttcatttgctttactgcctcaacaaattctccggatttcaaaaaccagaaattgatattaataacataaaatgcctccttatcggcaatcctactacttcaaaagaaacttctacaacaatagaagacgccggtttagaagaaggggagttagaaaaccttttcgcagaagatactggagaatacaaagaaaacgaaaacccagatacaaggtaaacaaatttaaattttataaaagaaaagcaaaaaaaataacacttaaacaatttcaaccaagaactattaacaaatgtaaatgtattggatataaatgcttatttcaaggtagtcccttaagagctatgaacaactttgtacaatatgtttattcaattatacctgaaaaacaaccaggaggagggggatggagcattcaagtactcagcttagactcaatatttgaggactatgaacatttacaatgcatatggactaaaggaaacgcaggactgcctcttgttagatacatgggttgcaaatttacattataccaatctgcagaaacagactatgtattttcttatgataactgctggccaatggttgatactatacacacccacgcagactccgcaccatttagaatgctacaaaaaagaaacaaaattgttgttccctcaatgaatacaaaaaaaagacgcaaaccatacaaaaaagtttttgtaaaaccaccaccacaaatgacaaacaaatggtactttcagaaagacatatgtaaaacacctctagtaatgtttactgccactgcagtatctctcggaaacccatttgcagaccctagagctaaaagcaacaatgtaactatacactgtataaacccatacctttttcaaaacccagactttcaacattggggaacacaaggatactcacctaaaatggcagataatacaacaccattatacctatatgcatcacaaatagacaacttaacctaccagaacttaaaagaccataaagataccattatagcactaacaaatacaaaagaccatacacctggaataccacttacaaatagtcaaacagacatatcaaaactagcaggaaacccctttcacgaagactacacatcaggagatatgtttgtttacatttcaaaaataacaccacaagaaatgcaagattacttaaaaaacaccaaagaaccaccaaaagcaaagcaaagtataactcttgctggtgatattatttatacatttagatacaacccagacaacgacgatggttccactaataaacaatatatagtaagcacagcatcaggaaacaaaataaaaccaccagaaaacgaaaactttatattatcaggctttccattcccatacatgttatggggatggacagactggataaaaaaactaggagaaacaccacaatttgacacaaacaaactacttatactagaaacaaaagcatttgatgataaaactataccactgtttatacctattgacttaacatttattcatgaatataacccatatgaacccatagaaaacaaaacacacaacataagtgcatacaatgcaaaaaactggtttccaagatatgaatatcaaaaaaaaaccataaatgacatatgcttagcaggacctgcgtgtccaagaccaccatgggatcactatttacaagctatatgtaaatataccatgtattttaaatgggggggttgtcctaaatctttacaaaaagcttataatccctgtttacagtctaaatggcccactcccgataacctctatggaagacctgcggtgcagaatcctaacatcttcccacaaacagaactgtactcctgggactgggaaaatgattatgttacaaaagcagctattgacagaatccgaagatttacagaaattgatccaaaaatgttctcaattacagaaatcaaaaacaacccaccggcgatccaaaaaaagaaaacaacagaagacgaagaagaggagaagaagctcaagctccagctccacaagctccgattcaacaaagtcctcctgcagctccaactccaacagcaattaaaatcactaaaagcaaaataaaagttaatatgtttgaagacccaaaacccaaaaatcgtagaatgactccctgggaaaaagaacaagaaaagcaagacgctgccatttggaaaagaccacaaagagactttattttagatatacctttttaccctggcattcccccaactccgcttgtaaactttgacttaaaatacaaatatgaataaacaaggccaacaataattcacttagtggtgtccatttatttaagtttaacttatataaacatccaccgcctccctataatttgggcgccaaaattcaaaagggggctccgcccccttacacccccaagggggctccgcaagggggctccgcccccttacacccccaagggggctccgcccccttacacccccaagggggccacgcccccttcaacccccaagggggctccgccccctaacacccccttataaatattcaacaggaaaaccacctaatttaaattgccgaccacaaaccgtcgtttacttccccttttaacactacttcctcaaattctcattattattcattacattcattagtaaacaccgtaattccggggaggagactattcactatataactaactacacttccgaatggctgagtttatgccgccagacggaggctgtatcacttcagtgactacagactgatcttggg

SEQ ID NO: 2016 - protein, 671 aa, Betatorquevirus sp.
MPPYRQSYYFKRNFYNNRRRRFRRRGVRKPFRRRYWRIQRKRKPRYKVNKFKFYKRKAKKITLKQFQPRTINKCKCIGYKCLFQGSPLRAMNNFVQYVYSIIPEKQPGGGGWSIQVLSLDSIFEDYEHLQCIWTKGNAGLPLVRYMGCKFTLYQSAETDYVFSYDNCWPMVDTIHTHADSAPFRMLQKRNKIVVPSMNTKKRRKPYKKVFVKPPPQMTNKWYFQKDICKTPLVMFTATAVSLGNPFADPRAKSNNVTIHCINPYLFQNPDFQHWGTQGYSPKMADNTTPLYLYASQIDNLTYQNLKDHKDTIIALTNTKDHTPGIPLTNSQTDISKLAGNPFHEDYTSGDMFVYISKITPQEMQDYLKNTKEPPKAKQSITLAGDIIYTFRYNPDNDDGSTNKQYIVSTASGNKIKPPENENFILSGFPFPYMLWGWTDWIKKLGETPQFDTNKLLILETKAFDDKTIPLFIPIDLTFIHEYNPYEPIENKTHNISAYNAKNWFPRYEYQKKTINDICLAGPACPRPPWDHYLQAICKYTMYFKWGGCPKSLQKAYNPCLQSKWPTPDNLYGRPAVQNPNIFPQTELYSWDWENDYVTKAAIDRIRRFTEIDPKMFSITEIKNNPPAIQKKKTTEDEEEEKKLKLQLHKLRFNKVLLQLQLQQQLKSLKAK

SEQ ID NO: 2017 - protein, 123 aa, Betatorquevirus sp.
LAERARNLKYFLFTDMFSSWKTPTSSKRQQELQWIGIINSTHDQICHCDDPTLHLLYCLNKFSGFQKPEIDINNIKCLLIGNPTTSKETSTTIEDAGLEEGELENLFAEDTGEYKENENPDTR

SEQ ID NO: 2018 - protein, 59 aa, Betatorquevirus sp.
MFEDPKPKNRRMTPWEKEQEKQDAAIWKRPQRDFILDIPFYPGIPPTPLVNFDLKYKYE

SEQ ID NO: 2019 - DNA, 2973 bp, Alphatorquevirus sp.
tcttcggagccgcgcgctacgccttcggctgtcaaggggcaattcgggctcgggactggccgggccccgggcaaggctcttaaaaagcatgtttctcggtaaactgtacagaaagaaaaggaaagtgccactgcaagctctgccagtaccaccgcctaaacggactagcatgagctgggtacaaccggtatctaacgcccatgttcgagaacaacaatggttcgagtccaccgttagaagccacgacgctttctgtggctgtggtgattccgtgcttcattttactaaccttgctactcgctttaaccgtctgcatgctgccccctcgcctctggatccgccctacccccctcccccgaggcgggcgcgtgtgagaggcctgccggccctccccgctcctgaaaacccaccggcgccatggcctggcgctggtggagacgccgctggaaacccagaaggcggcccgcgtggacaaagtaccggagacgccgctggagacgatttcgaccccgcagacctagaagatctactcgccgccgtggaagaagacgaacagtaaggaggcgccgcgttaggcgactgaggcggaggagggggtggactaggagacggtacttgagacgcagaaagagacgaaagctagtactgactcaatggaaccccagcactgtcagacgctgcaatatcaggggcataataccccttatcatgtgcggggcaaacactgccagttttaactatggcatgcacagcgacgacagcactcctcagccagagaaatttgggggcggcatgagcacagtgacttttagcctatatgtactgtatgaccagttcaccagacacatgaacaggtggtcgtaccccaacgaccagctagacctcgccagatacaaaggctgctcttttaaaatgtacagacaccccacaactgactttatactgacttatgacaacaatccccccatgaaaaacactatatacagctctcctaacacacacccaggcatcctcatgcaacagaaacacagagtactaatacccagctggctcacctttcctaaaggcagaaaatatgtaaaggttaaaatacctccacctaagttatttgaagaccactggtacactcagcctgacttatgcaaagtaccgctcgttactctgcggtcaaccgcagctgacttcagacatccgttctgctcaccacaaacgaacaacccttgcaccaccttccaggtgttgcgagacaagtacaacgaagttattggacttccttttgcaaacactggctctaatacaactgttactcaacaaattacctcctttgagacttggctatatgaatccagcacacactatcaaacatttcaaacagagcaaatgtttagaccaaaacaatacaatgcagatggctcacagtggaaccaataccaacaaatgctttctcagtggactacaaaaatttacaacagaaaaacagacagtaactatggatattcctcctataactttagtaacaatgcaggaggctaccagtatgctacacaaatgagacaacactactggacacaactaacaacactcacaagcacagtaccacacataaactctacctttgctaatgctaccactccagaatatgaataccacacaggctggttttcaccagtatttataggcccaaacagacacaacatacaatttagaacagcatacatggatgttacatacaaccctctaaatgacaaaggtcaatttaacagagtatggttccaatacagcactaaacctacaacagagtttaaccctatgcaatgcaaatgtgtagtagaaaacatcccactgtggtcagctttatttggctacagtgaatatgtagaaagccaactaggcccctttcaagaccatgaaacagtaggcctagtagtagtacaatgcccctacacagtgccatcactatatgacaaagacagaaaagacatgggctacatattttatgacacaaactttggcaatggaaaactaggcaatggcagcggccaggtgcccacatactggcaacagagatggtaccccatactcaaaagacaaaaacaagtaatgaatgacatctgcaagactggacctttcagctacagagacgaactgcttcaggtggacttggcagcctcttacaccttcaaatttaactgggggggcgacttactctaccaccaggtcatcaaaaacccgtgcgactcctcaggactggcacccaccgactccggtagattcaagcgggacgtacaagttgttagcccgctcaccatgggtcccagactcctcttccactcgtttgaccaaagacgggggttctttactgaaagagctatcaaacgaatgcatgatgaacaaattaatgttccagactttacacagcagcctaaaatcccccgcattttcccaccagtcgagctccaagaccaaagagaacaagcagaagaagactcgcgttcggaggcgctctcgctcacctcctcccaagaaaaagaagcagaagcccaagaaagtctaccgatacagcagcagctcagaaaacaactcagacagcaacagcagttgcgagtccacttgcagcacctcttcctccaactccaaaaaacaaaagcccatttacatttaaacccactatttttcccccaagagaacatgtagacatgttcggtaactactatgatagaaagccaacagcctcagactggaaaactgaatatgagtgctgtagggcctttgatagaccccctagaagcaaccttaaagacagccccttctacccctggatgccaaaacagtctcagtttcgtgtaaccttcaaacttggcttctaataaaatttgctaggccgtgcaactttcacttgtcggtgtctacctctaaaggtcactaagctctccgagcgcagcgaggagagcgacccttccccctgactcaact

SEQ ID NO: 2020 - protein, 758 aa, Alphatorquevirus sp.
MAWRWWRRRWKPRRRPAWTKYRRRRWRRFRPRRPRRSTRRRGRRRTVRRRRVRRLRRRRGWTRRRYLRRRKRRKLVLTQWNPSTVRRCNIRGIIPLIMCGANTASFNYGMHSDDSTPQPEKFGGGMSTVTFSLYVLYDQFTRHMNRWSYPNDQLDLARYKGCSFKMYRHPTTDFILTYDNNPPMKNTIYSSPNTHPGILMQQKHRVLIPSWLTFPKGRKYVKVKIPPPKLFEDHWYTQPDLCKVPLVTLRSTAADFRHPFCSPQTNNPCTTFQVLRDKYNEVIGLPFANTGSNTTVTQQITSFETWLYESSTHYQTFQTEQMFRPKQYNADGSQWNQYQQMLSQWTTKIYNRKTDSNYGYSSYNFSNNAGGYQYATQMRQHYWTQLTTLTSTVPHINSTFANATTPEYEYHTGWFSPVFIGPNRHNIQFRTAYMDVTYNPLNDKGQFNRVWFQYSTKPTTEFNPMQCKCVVENIPLWSALFGYSEYVESQLGPFQDHETVGLVVVQCPYTVPSLYDKDRKDMGYIFYDTNFGNGKLGNGSGQVPTYWQQRWYPILKRQKQVMNDICKTGPFSYRDELLQVDLAASYTFKFNWGGDLLYHQVIKNPCDSSGLAPTDSGRFKRDVQVVSPLTMGPRLLFHSFDQRRGFFTERAIKRMHDEQINVPDFTQQPKIPRIFPPVELQDQREQAEEDSRSEALSLTSSQEKEAEAQESLPIQQQLRKQLRQQQQLRVHLQHLFLQLQKTKAHLHLNPLFFPQENM

SEQ ID NO: 2021 - protein, 176 aa, Alphatorquevirus sp.
LSRGNSGSGLAGPRARLLKSMFLGKLYRKKRKVPLQALPVPPPKRTSMSWVQPVSNAHVREQQWFESTVRSHDAFCGCGDSVLHFTNLATRFNRLHAAPSPLDPPYPPPPRRARVRGLPALPAPENPPAPWPGAGGDAAGNPEGGPRGQSTGDAAGDDFDPADLEDLLAAVEEDEQ

SEQ ID NO: 2022 - protein, 56 aa, Alphatorquevirus sp.; identical to SEQ ID NO: 1044

SEQ ID NO: 2023 - DNA, 2972 bp, Betatorquevirus sp.
cgggtgccgaaggtgagtgaaaccaccgtagtcaaggggcaattcgggctagagcagtctggcggaatgggcaagaaactaaaaattatattttttttacagatgagtagacaatgtcctccaaaatacaactcaaaacaacttcaactacaatatgttaacacccttgtaaatgttcacgacctaaactgcggatgcaactctcctttggaatgtacagttttaacaatttataaccaagaaaaagatcttaaatttacaaaacaagaaaagcaaaagctacaaaaatggcttactactacagaagaaaatactacccaagaagacgacgcttttggagacggagacctagaccgacttttcgcagaagattttggagaagaaaaagatacagatacaaggtaaagaaaaaattttcttctataagactaaaacagtggcaaccgctatatataagaaacttaaaaattaaaggaatactgccactatttataactacagatgaaagaataactaatgactatactatatatactaacagcctagcacaacattatgtacctggaggaggaggtttttcaatttatagatttactttaaaagctttatatgaactctttactaaaatacaaaacaaatggacccaatctaatgaagactggccatttataagatacacaggttgtgaatttaaattctacaaatcagaaaaagcagattacattattaattaccacagatgtccaccaatgctagcaaccttagaaacctttcacagcactcaaccacacataatgacattaaacaaaaaacacaaaataataagatgcaaacaaaacaacccatacaaaagaccatacaaaaaacttaaaataaaaccaccagcattactacaaaacaattggtacttccaaaaagactttgctccagaacctttattacttttaatgtcctctagcatgtctttagatagatactttctaaattcacaatctataagtacaactatgggatttctttcactaaatgacaatatatttgacttttacaattataaaataccacctacaaccggttacatacctaaacaacaaaaatacatgtggtctttatattctccacaagcagatatagaaaaaacacaaattaaacaattaatatacttaggaaaatccaaagaatatgataaaggaaaaccaatacaacaattaatgacaacacaaacaaactttgatgaggcctggacaaactattttagtaaaacagacaactggggaaacatttttgaaccagactacttaacacaacatcatgtagtattattctcagaaaaatcaccaaacgaattaaaaaatatatataaacaagatcaatcaaagtggacaaaaggaataaatgaaataggaccatatatacaagaaacaacacacaaactactagttaactgcagatacaatccatatgcagacacaggtggtaacgttacatttatagtacccataacaaatcaagaacaaacacacctacatattccagaagatgaaaaatacaaatcagaaggctaccccttatggctatcagtatggggatttttagactatgaaagaaaaagactaggacaaaacgtagacacagactaccaaatagtacttaaaagcccacatattacaccatcacaaacattttacattccaatagatgaaggatttacagaaggtagatcaccatacagaccagacggagcacaagcaactgtatatgaccaattacattggcatccaaaagtcactatgcaaatgcaatcaataaactccataggtgcttgtggaccaggaactataaaactaccaaaacaaacatcagcagaagctcactgtacttatactttttattttaagcttggaagctgtgctcctccaatgcaaaacattgacaacccagaaaaacaacaaacttttgcctataacatgttccaaacaaattcgttacagaatccagaatatcccctacaatactacttgtacaacttcgacgaaagacgaaaaatgcttacaaaaagagctgcaaaacgaatcaaaaaaattattgactctgaaaaatctttatcaccaattacaggacaaagccaactggaaatcccactgcagcaagaaacagacgaggggcaatcgtcggaggaggaagccgaaaaagagacattactcctcctcctcaaacagcagcgactcaagcaagccaagtacaagcagcgactcctccagctaatagaacagttacaaactttagaataaaacaaactaaattcactgtaaacttatttcccccagagactcctaaaaacaggagaatgactccaaaagaatttaaagaggagttagaagaaagtgctatatggggacatagaccaagacagtttattttagatactcctttctatgactttctacccattacccctaaaatacccaaaataaattttgacttgtgttacaaagaataaaggcctgcatacttcaaatctcggtgtccatttatattattttaaacttaaataaacatccaccacactccctaatacgcaggcgcacagggggctccgccccctgtaacccccagggggggcacagcccccccttaaaccccccgaaattacaccactaaccacaaatttgcattgccgaccacaaactgacaggaaaaccacaaaatttgcattgccgaccacaaaccgtcaaatacttcctctttttaaaaactacttcccctttacatacttattattcattacattaattaataatcactgtaattccggggaggagcaactaacctatataactaactatacttccgaatggctgagtttatgccgccagacggagactggaaaacaacagtgactccaggctgctcaagggcgggtgccgaaggtgagtgaaaccaccgtagtcaaggggcaattcgggctaggg

SEQ ID NO: 2024 - protein, 667 aa, Betatorquevirus sp.; identical to SEQ ID NO: 1712

SEQ ID NO: 2025 - protein, 112 aa, Betatorquevirus sp.; identical to SEQ ID NO: 1713

SEQ ID NO: 2026 - DNA, 2971 bp, Betatorquevirus sp.
cgggtgccgaaggtgagtgaaaccaccgtagtcaaggggcaattcgggctaagtcagtctggcggaacgggcaagaaactaatataatatatcttttacagatatgtccttctcattttggaaaccaacaccctatgatcacagacaacgagaaaacaactggctaaatggaatagttcatcttcacgacaacttctgtggctgtgatcaaccattccaccacctagtatggaaactagcagaaaataactccacaacaacgctctcaaaacaccattttgaccttctacaaaaatgcctcccttcaactactaccgatggaactactggagaaggccccagtaccgcagacgacgctggagaagaagaacctttagacgacggagacctagagcgcctcttcgacgaagattttggcgaagaaccacggtaagaagacgccgttataaaaaaaaacttaagaaaattagaataaatgagtggcaacctactgtaattaaaaaatgccacattaaaggaactattcctctaatacaaggaggaaaagacagacaaggctttaactatgcacaataccaagactcttacgtaccatcacataagggaggtgggggaacatggagcattatggtattttcattaggagcactatatgaagaatgggaaagactgaataatgtatggactagatcaaataacggactaccttttgctagatatttaggttgtaaatttaagttttacagacaagaatactatgactacatagtacactattctatatgctacccaatgacagacacagaagaccaacatttaaactcacacccacacagaataattcaaggaagaaaaaaaataatagttcacagatataacaaacaaatacacaaaaaaccatatgttagaaaaaaaataagaccaccagcactaatgcaatcacactggtacttccaacaagaaatatgtaacacaggcttacttttactaacaacaacaatatgcaacttaaatgattactggctagcacctaacaaccttagcaacaacataagcttctggtcaataaacacaagactttttacaaaccctaattttcaaaacacagactccacagtaggttatacccctaaagacggagtctacttatatgcttcttacaatggatcacctacaacaaacttaacatggaatgaaatggtatatttaggaaacacacaccattacgacccaggacaatcaccacatgacttaccatcatacacattagacaaaacaatagcatttaaagacaaaaaatactggggaaacccctttcactatcaaatatcaaaccaacaagttagattattcatatcaaccaaaaatccaaccacaatacaaacatcagacctaaaagaaaaaattacaaacaccacattatcagatgaacccgtatttcaagaatgtagatacaacccttacaaagataaaggctatggaaatgaagcatactttttatcaaacaccatagcaaaaaagaaagtatgggatccgccagataacaaactactatataacagtggatacccctgctggctactaccatggggatatctagactggcaactaaaactaaaacaaataaaccaaataggaattaactacaattacatatttaaaacagaccaagtacttccaaaactacctgcatacataccagtaaattactcatttgtataccctgacgaagacaaactaactataacagacaaactacatttttaccctaaaaatgattatcaattagatcaaatatcaaacatttgtaactcaggcccaggaacatatcaatttgaacacacagaaagtgtgcaagtaaatgctttttatgacttcttttttaagtggggaggatgcccagcaccaatggaagaagttaaagacccctgtaaccagccacactttcccatccccactgaaatcactgaaggacgtaaaatccaaaatccaaacacaaacaaatcagactacctatactgctttgacgaaagacgagaaacaattacaaaaactgctcaaaaaagaatatgcagagacattgaacctccaaaaactttattcacagatggaagccaactcaacgtcccaatcctcctacaacaaaaagaaaaaacaccgacgacatcgagcgaggaagaagccgaaacgccactactcaagaagctcaagctcctccagcagcacaaacgaaagctcaagcgacgactccacagactaacaaaatcacaatcagaataggaactataaataataaccttttatttcctaaagacactccaaacagaagaatgaacccctgggaagaagagcaagaaaaacaagacgcctacatatggaaaagacctagaagaacatttataaaagatcctcctttttatccgtggttaccaccagaacccaaagttaattttgacttaaagtttaaagaataaataaagaaataaagggcaacgccccattaattcaaactcggtgtctgttcctttaagtctcaacttctctaaacagcctccgcctccctaaattcgggcgccaaaagggggctccgcccccttaaacccccaagggggctccgcccccttaaacccccaagggggctccgcccccttacaccccctaataaatattcaacaggaaaaggggctccgcccccttaaacccccaagggggctccgcccccttacaccccctaataaatattcaacaggaaaaccacctaatttaaattgccgaccacaaaccgtcacttacttcccctttttgcacacacttccctttttactcattattattcattacattaattattaaacagtgtaattccggggaggagtctaaacagtatataactaactacacttccgaatggctgagtttatgccgccagacggagacgggatcactacagtgactccaggctgactaaggg

SEQ ID NO: 2027 - protein, 661 aa, Betatorquevirus sp.; identical to SEQ ID NO: 1603

SEQ ID NO: 2028 - protein, 109 aa, Betatorquevirus sp.; identical to SEQ ID NO: 1604

SEQ ID NO: 2029 - DNA, 2970 bp, Betatorquevirus sp.
cgggtgccgaaggtgagtgaaaccaccgtagtcaaggggcaattcgggctaggtcagtctagcggaacgggcaagattcttaaaacgatattatttttcagaatgtccacaagactaataccaacaaaaccatctttaagacaaaaaaacttaagatggatgaatatgctggtacatgtgcatgacttattctgcgactgcaacgctcctcttcaacacaccagtatacttattcaccaacaagaaccacaacttgattacctaccaattgaaaaggatattataaaaagatgccttactggagaaactactactggaggcgccgccgcagaccccgaaggcgatggattagacgcaggtacactagaagaccttttcagagaagactttggagacgaagacgccaaagggtaagaaaaagaaaactaaaaagactaattgttaaagaatggcagccacattatataaaaagactaaaaatagtgggactgcatcctataataatgactacttcagcaagaattgctaacaacttaacttgttatattgaaagtacagcaccggctttatatccatcagggggaggattttcaattaataactttactttagaaggactgtataaacagcacttgatactaaagaactggtggactgtaggaaatgataatatgcctttaataagatacttaggatgtgatatatacctatatagaagtacaaatttagactacttattccaatacagaaatgcctatcccatgacagcaacacttctcacttataccagcacacaaccacaagcaatgctactgcataaacatacaataaaaatggcatgcaaacaacacaacagaaacaaaaaaccatacaaaaaacttcacattccacctccatcacaaatgctaaataaatggtatttccaaaaagacatagcagaaataccgttattacaaacaattgccactgcaacatcatttgaccgcatgtttcaaaatagtaaaagcgttaataccaccgttggctttacaagtttagacatactaggctttagaaaccacgattactcaaaactctcaaccaccggatacgtggcactcccaaatcaactactttttggtataactacaggaacatataacttaagagcaataaaaatgacagaaatgatatacctaggaaaccctgaagatgacacagaaggaacccgaatagggcaaataccccagacagaatataccagatatagcgaacttactacaacaatagcaaaacaattaaaagcaatgagattaaacaataaacactggggaaaccccttcacagttacatttcacagaacaggtagactcttaacaacaaacaaaacatgggatgaacttatagccgaatataacaaaacaggtaccggtgacaaattagtagaaacatggtttacatttaaagaacacacatttttagactgcagatacaatccatatgcagaccaaggtattggaaacaaactgtacctaatagacataaaagacaaaacacatgacacagactgggatatcccagcaacaggaacattatacaaagacttaccaatatggttaatggtatggggatacttagactttcacagaaaatgcggagaatactcacaaatagatacaaactacttagctgtaatatatacaacttacatatttccaaaagacagacattactttgtaccactagaccaagactttcttaacggaagaagtccataccaaccagaagaacacataacaccatccgattcacaaaactggcatccaaaagttagatttcaagtacaaacaataaatgacattgcagcctcaggaccagccacagtaaaactaccacctgaaacatcagtagaaagccacataagatattcctttcgtttcaagattggaggagaaccaccaccgatgtcaacacttacagaccctgataaacaacctaaatacaacattcccaataacctcctacaaacaccttcgttacagaatccaacaacaccctttgagtacctcctctggagatttgatgaaagacgagggcaacttactaaaaaagctacagaaagaatcacgaaatacaaagaaactgaaacacctattttcacaattacagagccagcttttgcctgtccaacaacatcgacccaccaagaaacacagacaccagaaacatcggactcggaaaacgaagaaacgacgatccaggagcagctcctcaagcagcgaaagcagcaaaaactcctccgacggggaatacagcagctcctcaaccgattagcaacattagaatagaaaaatgtaaatttaaagtacaattgtttccaactcccactccaaacaggagaatgacacagtgggaatgggaacaagaattagaggactctcgaatatggtttagagttcctagacaatttattaaagataaacctacctacccatgggtgccccaacaaagtaaatatatggtaaactttgatctaaatccccctcaataaatacaaggccaacaaattttacttgtcggtgtccatttattatagcttaacttatataaacatccaccactctcccaaatacgcaggcgcagtagggggctccgccccctacaacccccagggggggcaaagcccccccctacaacccccctaataaatattcaacaggaaaaccacataattagaatggctcaccacaaacggcttcttacttccccttttttacactacttcctctttaacttataaatattcattacattaattaatactcaccgtaattccggggcggggacacttaactatataacaaagtacacattcgaatggctgagtttacgccgccagacggagacgggatcacttcagtgactccaggctgaccttgggcgggtgccgaaggtgagtgaaaccaccgtagtcaaggggcaattcggggg

SEQ ID NO: 2030 - protein, 678 aa, Betatorquevirus sp.
MPYWRNYYWRRRRRPRRRWIRRRYTRRPFQRRLWRRRRQRVRKRKLKRLIVKEWQPHYIKRLKIVGLHPIIMTTSARIANNLTCYIESTAPALYPSGGGFSINNFTLEGLYKQHLILKNWWTVGNDNMPLIRYLGCDIYLYRSTNLDYLFQYRNAYPMTATLLTYTSTQPQAMLLHKHTIKMACKQHNRNKKPYKKLHIPPPSQMLNKWYFQKDIAEIPLLQTIATATSFDRMFQNSKSVNTTVGFTSLDILGFRNHDYSKLSTTGYVALPNQLLFGITTGTYNLRAIKMTEMIYLGNPEDDTEGTRIGQIPQTEYTRYSELTTTIAKQLKAMRLNNKHWGNPFTVTFHRTGRLLTTNKTWDELIAEYNKTGTGDKLVETWFTFKEHTFLDCRYNPYADQGIGNKLYLIDIKDKTHDTDWDIPATGTLYKDLPIWLMVWGYLDFHRKCGEYSQIDTNYLAVIYTTYIFPKDRHYFVPLDQDFLNGRSPYQPEEHITPSDSQNWHPKVRFQVQTINDIAASGPATVKLPPETSVESHIRYSFRFKIGGEPPPMSTLTDPDKQPKYNIPNNLLQTPSLQNPTTPFEYLLWRFDERRGQLTKKATERITKYKETETPIFTITEPAFACPTTSTHQETQTPETSDSENEETTIQEQLLKQRKQQKLLRRGIQQLLNRLATLE

SEQ ID NO: 2031 - protein, 103 aa, Betatorquevirus sp.
MSTRLIPTKPSLRQKNLRWMNMLVHVHDLFCDCNAPLQHTSILIHQQEPQLDYLPIEKDIIKRCLTGETTTGGAAADPEGDGLDAGTLEDLFREDFGDEDAKG

SEQ ID NO: 2032 - protein, 122 aa, Betatorquevirus sp.
LSNNIDPPRNTDTRNIGLGKRRNDDPGAAPQAAKAAKTPPTGNTAAPQPISNIRIEKCKFKVQLFPTPTPNRRMTQWEWEQELEDSRIWFRVPRQFIKDKPTYPWVPQQSKYMVNFDLNPPQ

SEQ ID NO: 2033 - DNA, 2969 bp, Betatorquevirus sp.
cgggtgccgaaggtgagtgaaaccaccgtagtcaaggggcaattcgggctaggtcagtctagcggaacgggcaagattcttaaaacgatattatttttcagaatgtccacaagactaataccaacaaaaccatctttaagacaaaaaaacttaagatggatgaatatgctggtacatgtgcatgacttattctgcgactgcaacgctcctcttcaacacaccagtatacttattcaccaacaagaaccacaacttgattacctaccaattgaaaaggatattataaaaagatgccttactggagaaactactactggaggcgccgccgcagaccccgaaggcgatggattagacgcaggtacactagaagaccttttcagagaagactttggagacgaagacgccaaagggtaagaaaaagaaaactaaaaagactaattgttaaagaatggcagccacattatataaaaagactaaaaatagtgggactgcatcctataataatgactacttcagcaagaattgctaacaacttaacttgttatattgaaagtacagcaccggctttatatccatcagggggaggattttcaattaataactttactttagaaggactgtataaacagcacttgatactaaagaactggtggactgtaggaaatgataatatgcctttaataagatacttaggatgtgatatatacctatatagaagtacaaatttagactacttattccaatacagaaatgcctatcccatgacagcaacacttctcacttataccagcacacaaccacaagcaatgctactgcataaacatacaataaaaatggcatgcaaacaacacaacagaaacaaaaaaccatacaaaaaacttcacattccacctccatcacaaatgctaaataaatggtatttccaaaaagacatagcagaaataccgttattacaaacaattgccactgcaacatcatttgaccgcatgtttcaaaatagtaaaagcgttaataccaccgttggctttacaagtttagacatactaggctttagaaaccacgattactcaaaactctcaaccaccggatacgtggcactcccaaatcaactactttttggtataactacaggaacatataacttaagagcaataaaaatgacagaaatgatatacctaggaaaccctgaagatgacacagaaggaacccgaatagggcaaataccccagacagaatataccagatatagcgaacttactacaacaatagcaaaacaattaaaagcaatgagattaaacaataaacactggggaaaccccttcacagttacatttcacagaacaggtagactcttaacaacaaacaaaacatgggatgaacttatagccgaatataacaaaacaggtaccggtgacaaattagtagaaacatggtttacatttaaagaacacacatttttagactgcagatacaatccatatgcagaccaaggtattggaaacaaactgtacctaatagacataaaagacaaaacacatgacacagactgggatatcccagcaacaggaacattatacaaagacttaccaatatggttaatggtatggggatacttagactttcacagaaaatgcggagaatactcacaaatagatacaaactacttagctgtaatatatacaacttacatatttccaaaagacagacattactttgtaccactagaccaagactttcttaacggaagaagtccataccaaccagaagaacacataacaccatccgattcacaaaactggcatccaaaagttagatttcaagtacaaacaataaatgacattgcagcctcaggaccagccacagtaaaactaccacctgaaacatcagtagaaagccacataagatattcctttcgtttcaagattggaggagaaccaccaccgatgtcaacacttacagaccctgataaacaacctaaatacaacattcccaataacctcctacaaacaccttcgttacagaatccaacaacaccctttgagtacctcctctggagatttgatgaaagacgagggcaacttactaaaaaagctacagaaagaatcacgaaatacaaagaaactgaaacacctattttcacaattacagagccagcttttgcctgtccaacaacatcgacccaccaagaaacacagacaccagaaacatcggactcggaaaacgaagaaacgacgatccaggagcagctcctcaagcagcgaaagcagcaaaaactcctccgacggggaatacagcagctcctcaaccgattagcaacattagaatagaaaaatgtaaatttaaagtacaattgtttccaactcccactccaaacaggagaatgacacagtgggaatgggaacaagaattagaggactctcgaatatggtttagagttcctagacaatttattaaagataaacctacctacccatgggtgccccaacaaagtaaatatatggtaaactttgatctaaatccccctcaataaatacaaggccaacaaattttacttgtcggtgtccatttattatagcttaacttatataaacatccaccactctcccaaatacgcaggcgcagtagggggctccgccccctacaacccccagggggggcaaagccccccctacaacccccctaataaatattcaacaggaaaaccacataattagaatggctcaccacaaacggcttcttacttccccttttttacactacttcctctttaacttataaatattcattacattaattaatactcaccgtaattccggggcggggacacttaactatataacaaagtacacattcgaatggctgagtttacgccgccagacggagacgggatcacttcagtgactccaggctgaccttgggcgggtgccgaaggtgagtgaaaccaccgtagtcaaggggcaattcggggg

SEQ ID NO: 2034 - protein, 678 aa, Betatorquevirus sp.; identical to SEQ ID NO: 2030

SEQ ID NO: 2035 - protein, 103 aa, Betatorquevirus sp.; identical to SEQ ID NO: 2031

SEQ ID NO: 2036 - protein, 122 aa, Betatorquevirus sp.; identical to SEQ ID NO: 2032

SEQ ID NO: 2037 - DNA, 2969 bp, Alphatorquevirus sp.
cccgaaacgcttgcgcgtttcggaccttcggcgtcggggcaattcgggctcgggactggccgggccccgggcaaggctcttaaaaaatgcgctttcgcagggttgcggagaaaaggaaagtgtttctgcaaactgtgcgagctgcagagaaggctaggcggcttctaggtatgtggcagccctccgtgcataatgttcccggcatcgagagaaactggtacgagagttgttacagatcgcatgctgctatctgtggctgtggcgactttgttggtcatcttaatcatctggcaactactctgggtcgtcctccacgtcctgggcccccaggcggaccccgcacgcctcaaataagaaacctgccagcgctcccggcgcccgagggcgagcccggtgatagagcgccatggcgtggggcttctggggccgacgccgccggtggagacggtggagaccgcggcgcagacggtggagaccccgcagacgtaggagacgacgccctgctcgccgctttcgagctcgtcgaagagtaaggaggcgcggggggcggtggcgcagacggtacagaaaatggcgacgacgcaggggcaaacggactcacagaaaaaagataatcataaaacagtggcaaccaaactttatcagacgctgctacataataggctacatgcctctaatattctgtggcgaaaatacctccgcccagaactatgccactcactctgacgatatgataagcaaaggaccgtacggggggggcatgactaccaccaaattcactctgagaatactgtacgacgagtataccaggtttctgaacttttggactgtcagtaacgaagacctagacctgtgtagatacgtgggcgccaaactgatattttttaagcaccccacggtagactttatagtacagataaacactcaacctccgtttttagacacgcagctcaccgcagcaagcatacacccgggcatcatgatgctcagcaagagacacatcctaataccctcactaaagaccaggcccagcagaaagcacagggtggtcgtcagggtcggcccacctagactgtttcaagacaagtggtacccccagtcagacctgtgcgacacagttctgctttccatatttgcaaccgcctgcgacttgcaatatccgttcggctcaccactaactgacaacccttgcgtcaacttccagattttggggccccagtacaaaaaacaccttagtattagctctactatggatactactaacgaagcacactataatgagaatctttttaataaaacagagctatacaacacctttcaaaccatagctcagcttaaagaaactggacaaactataaacggaacagtaaattggaattccgtacaaaacacaacaccacttgacgaaacaggcaccaatgcaaaacacagcaaagacacttggtacaaaggaaacacatacaacgacaaaataaaagacttagcagaaaaaacaagaaaaaggtttcaagctgcaacaaaggcagcactgccaaactaccccacattaatgtccactaacctctatgagtatcactcaggtatatactccagcatatatttatcagctggtagaagctactttgaaacaacaggggcctactctgacattatatacaaccccttcacagacaaaggcacaggcaacattatctggatagactacctaacaaaagaagacactatttttgtaaaaaacaaaagcaaatgtgagatacaggacatgcccttgtgggctgcatgcacaggatacacagagttctgtgctaagtacacaggagactctgccataatatacaatgccagaatagttataagatgcccatacacagaacctatgctaacagaccactcagacccaaacaaaggctttgttccctactcatttaactttggcaacggaaaaatgccaggaggcagctccaacgtacccataagaatgagggccaagtggtacgtaaacatgttccaccaaagagaagtactagaagccatagtacagagcggaccgtttggctacaagggcgacataaaatcagcagtactgagcatgaaatacagatttcactggaaatggggcggaaaccctatatccaaacaggtcgtcaggaatccctgctccaactccagctcctccgcggcccatagaggacctcgcagcgtacaagcagttgacccgaaatacgttaccccggaggttacgtggcactcgtgggacatcagacgaggactctttggcaaagcaggtattaaaagaatgcaacaagaatcagatgctctttaccttcctccaggaccactcaagaggcctcgcagagacaccaacgcccaagacccagaagagcaaaacgaaagctcaggtttcagagtccagcagcgactcccctgggtccactccagccaagagacgcaaagctcacaagaagagacgcaaccggaggggtcgatacaagaccaactactcctccagctccgagagcagcgagtcctccgattccagctccaacaactcgcaacccaagtcctcaaagtccaagccgggcaagggctacaccccctattatcttcccaagcataaacaaagcctttatgtttgaacccaaccgtcccaaacttatacagggctaccacgattggctagaagagtacacttgctgcaaacactgggacagacctcccagaaagctacacacagacatacccttttacccctgggcaccaaaaccccaagaccaagtaaaggtctccttcaaacttaacttccaataaaatttcaaggccgtgggagtttcacttgtcggtgtctgcttcttaaggtcgccaagcactccgagcgccagcgaggagtgcgacccccccccctgtagcaacgccttcggagccgcgcgctacgccttcggctgcgcgcggcacctcagaccccccctcca

SEQ ID NO: 2038 - protein, 736 aa, Alphatorquevirus sp.
MAWGFWGRRRRWRRWRPRRRRWRPRRRRRRRPARRFRARRRVRRRGGRWRRRYRKWRRRRGKRTHRKKIIIKQWQPNFIRRCYIIGYMPLIFCGENTSAQNYATHSDDMISKGPYGGGMTTTKFTLRILYDEYTRFLNFWTVSNEDLDLCRYVGAKLIFFKHPTVDFIVQINTQPPFLDTQLTAASIHPGIMMLSKRHILIPSLKTRPSRKHRVVVRVGPPRLFQDKWYPQSDLCDTVLLSIFATACDLQYPFGSPLTDNPCVNFQILGPQYKKHLSISSTMDTTNEAHYNENLFNKTELYNTFQTIAQLKETGQTINGTVNWNSVQNTTPLDETGTNAKHSKDTWYKGNTYNDKIKDLAEKTRKRFQAATKAALPNYPTLMSTNLYEYHSGIYSSIYLSAGRSYFETTGAYSDIIYNPFTDKGTGNIIWIDYLTKEDTIFVKNKSKCEIQDMPLWAACTGYTEFCAKYTGDSAIIYNARIVIRCPYTEPMLTDHSDPNKGFVPYSFNFGNGKMPGGSSNVPIRMRAKWYVNMFHQREVLEAIVQSGPFGYKGDIKSAVLSMKYRFHWKWGGNPISKQVVRNPCSNSSSSAAHRGPRSVQAVDPKYVTPEVTWHSWDIRRGLFGKAGIKRMQQESDALYLPPGPLKRPRRDTNAQDPEEQNESSGFRVQQRLPWVHSSQETQSSQEETQPEGSIQDQLLLQLREQRVLRFQLQQLATQVLKVQAGQGLHPLLSSQA

SEQ ID NO: 2039 - protein, 148 aa, Alphatorquevirus sp.
MRFRRVAEKRKVFLQTVRAAEKARRLLGMWQPSVHNVPGIERNWYESCYRSHAAICGCGDFVGHLNHLATTLGRPPRPGPPGGPRTPQIRNLPALPAPEGEPGDRAPWRGASGADAAGGDGGDRGADGGDPADVGDDALLAAFELVEE

SEQ ID NO: 2040 - protein, 127 aa, Alphatorquevirus sp.
LGPLQPRDAKLTRRDATGGVDTRPTTPPAPRAASPPIPAPTTRNPSPQSPSRARATPPIIFPSINKAFMFEPNRPKLIQGYHDWLEEYTCCKHWDRPPRKLHTDIPFYPWAPKPQDQVKVSFKLNFQ

SEQ ID NO: 2041 - DNA, 2968 bp, Alphatorquevirus sp.
tccggcgctacgcgcttcgcgctgcgccggaccaaggggcaattcgggctcgggactggccgggccctgggcaaggctcttaaaaatgcacttttctaaaataagcagaaagaaaaggaaactgctactgcaaactgtgccgcttgcagagatcgaacggactaccatgagctggtccagacccgtccaaaatgtttctattctcgaacaaaactggttcaaatcctgcctcaaatcacacgcatgcttctgtggctgtaataatcctattattcattttaataacattgctactcgctttaactatttgcctactgccaatccgcctgtgggaccctcccaaccgcccacacgcccgccgtcccgcttgagaccccttcccgctctccccgcgcctcccgctgatccacaagcaccatggcctggggctggtggctcaagcggtggaggagaagaaagaaaccagcgtggaagaagtggagaacgcgcagatggagaagatttcgacgcagaagacctaaacgcacttatggccgccgtcgaagaagacgaacagtaaggaggcgccgcggtagacgactgaggaggagggggtggactaggagacggtacataagacgcagacgcaaaaagaaaaagctagtactgacccagtggaacccccaggacgttaggagatgcacaataaggggcataataccccttatcatgtgcggtgcaaacactgccagttttaattatggcatgcacagcgatgacagcaccccccagccagagaagttcgggggaggcatgagcacagtaacattcagtttatttgtactatatgaccagtacaccagacacctaaacaggtggtcgtacccaaacgaccagctagacctagccagatacagaggctgcaaatttaaattctacagagacacctcaacagactttatagtcacctatgacattaatccacccatgaaaaacacagaactaagcagccctaacacacacccaggcatgcttatgcagcaaaaaagaaaggtactcgtccctagctgggacacgtatcccagaggcagaaaatatgtcctagttaagataccaccccccaaactgtttgaagaccactggtacactcagccagacttgtgcaaagttcctcttgtaactttgcggtcaactgccgctgacctcaaacatccgttctgctcaccacaaacgaacaacccttgcaccaccttccaggtgttgcgcaaccagtataacagtatgataggcttcccctttaactataacccatcaaacgacactcaaacacaacagttaaaaacatttgaaaaatggctatattcatctagcacacactatcagacatttgccactgaagctaaccttagacccagacagtacaatgcagacggaactcaaaataacgactacagcagcttacaaaccacgtggacaactactatatatgcaaaaaaaacagatagcaactttggctacacatcatacaacttttcaggagaaactggctatcagtatgtaacaaaaattagacagtggtactggacacaactaacatcctggacacaaacagtccctcacataaacagcacctttgccaatgccattcacccagagtttgaataccacgcgggctggtactcaaacatatttataggccccaacagatttaatatacagtttagagcagcctacatggatgtcacctacaacccaataaatgacaaaggccacctgaacaaagtatggttccagtacagcacaaaacccaccacagactttgtagaaaaccaggccaaatgtttactgcaaaacctgcctttgtggagcatgctgttcggctactcagagtatgtagaaagtcagctaggcccctttcaggaccacgaaacagtaggcctagtaatagtacagtgcccatacacagtaccccccatgtatgacaaagacaatccaaacatggggttcgtgttctatgacacacactttggcaacggaaagctaggcaacggactgggccaggtacccagatactggcagcagagatggtaccccatcttaaagagacagaaacaagtcatgaatgacatttgcaagacgggaccatttgcgtacagagacgagagactgcaagttgacttgactgcaggatactcatttaagtttaactggggtggtgacttaatctaccaccaggttgtcaaaaacccatgcgactcaggaggactggtgccttccgactccagtagattcaagcgggacgtacaagttgttagcccgctcaccatgggacccagactcatcttccactcgttcgaccaaagacgggggctctttactgacagagctatcaaaagaatgtacaatgaacagattaatgttccagactttacagaacagcctaaaatcccccgacttttccccccagtcgagctcaaagaaagggaagaaaaagactcagattcggagacagagacgatcagcagctcccaagaaaaagaagcgaaaaggcaagaggcgctaccagtccagcagcagctccgactccaactgcgagaacaacagcgactccgagtccacttgcagcacctcttcctccaactccagaaaaccaaagcaaatttacatttaaacccactatcttttcagcaagagataagctagacatgtttggtaacattatagatagaaagcctacctcccaggactgggagacagagtacatagcctgtagaatatttgacaggccccccagacagcaactcacagaccctcctttctatccttggatgcctaagcctaaacctgcatgccgtgtaacctttaagcttggctttcaataaacaaggccgtgggagtttcacttctcggtgtctacctctataagtcactaagctctccgagcgaagcgaggagagcgaccctaaaccaaggggcaactccctcgaag

SEQ ID NO: 2042 - protein, 754 aa, Alphatorquevirus sp.
MAWGWWLKRWRRRKKPAWKKWRTRRWRRFRRRRPKRTYGRRRRRRTVRRRRGRRLRRRGWTRRRYIRRRRKKKKLVLTQWNPQDVRRCTIRGIIPLIMCGANTASFNYGMHSDDSTPQPEKFGGGMSTVTFSLFVLYDQYTRHLNRWSYPNDQLDLARYRGCKFKFYRDTSTDFIVTYDINPPMKNTELSSPNTHPGMLMQQKRKVLVPSWDTYPRGRKYVLVKIPPPKLFEDHWYTQPDLCKVPLVTLRSTAADLKHPFCSPQTNNPCTTFQVLRNQYNSMIGFPFNYNPSNDTQTQQLKTFEKWLYSSSTHYQTFATEANLRPRQYNADGTQNNDYSSLQTTWTTTIYAKKTDSNFGYTSYNFSGETGYQYVTKIRQWYWTQLTSWTQTVPHINSTFANAIHPEFEYHAGWYSNIFIGPNRFNIQFRAAYMDVTYNPINDKGHLNKVWFQYSTKPTTDFVENQAKCLLQNLPLWSMLFGYSEYVESQLGPFQDHETVGLVIVQCPYTVPPMYDKDNPNMGFVFYDTHFGNGKLGNGLGQVPRYWQQRWYPILKRQKQVMNDICKTGPFAYRDERLQVDLTAGYSFKFNWGGDLIYHQVVKNPCDSGGLVPSDSSRFKRDVQVVSPLTMGPRLIFHSFDQRRGLFTDRAIKRMYNEQINVPDFTEQPKIPRLFPPVELKEREEKDSDSETETISSSQEKEAKRQEALPVQQQLRLQLREQQRLRVHLQHLFLQLQKTKANLHLNPLSFQQEIS

SEQ ID NO: 2043 - protein, 167 aa, Alphatorquevirus sp.
LAGPWARLLKMHFSKISRKKRKLLLQTVPLAEIERTTMSWSRPVQNVSILEQNWFKSCLKSHACFCGCNNPIIHFNNIATRFNYLPTANPPVGPSQPPTRPPSRLRPLPALPAPPADPQAPWPGAGGSSGGGEERNQRGRSGERADGEDFDAEDLNALMAAVEEDEQ

SEQ ID NO: 2044 - protein, 58 aa, Alphatorquevirus sp.; identical to SEQ ID NO: 724

SEQ ID NO: 2045 - DNA, 2968 bp, Alphatorquevirus sp.
tacgccttcggctgcgcgcggcacctcagaccccaggggcaattcgggctcgggactggccgggctatgggcaaggctcttaaaaaagacatgtttctcggtaaactttacagaaagaaaaggacactgccactgtgcggtctgccagcagcaaagaaaaaaccacctagtgatatgagctattggaggccacccctgcacaatgtcccggggctcgaacacctctggtacgagtccgtgcatcgtggccatgctgctgtttgtggctgtgggaatcttgtacgccatcttgctgctcttgctgaaagatatggctacccgggagggcccagcgctcctggggcaccctcagtagggggcggcggtaaccctcccatccgtcgagcccgctacccggcggccgctccggatcccccggcaggtaaccagcctctgcagctgccatggcatggagatggtggaaacgaaagcggcgctggtggtggagaaaacgatggacccgagggaggtttcgaagacgacggactggacgccctcgtcgccgccctcgacgacgaagagtaaggagaaaaagacagtggaggagggggcgacgcagacgaacttataacagacgtaggagacgcttaaaaaagaaacgtaggccaaaactgactctcagactgtggcagccagacatggtcagaaaccttaaagttagtgggtacatacccataataatcagtggcttcggaacatttagtagaaactttagcagccacctactagacaaagttattaaggagccctttggagggggccacagcacaatgagattctcccttcagatactttttgaggagcacctcaggggtctcaactactggtcctactctaacacagacctagagcttgttagatacaggtactgcaaattcaccttcttcaggcacccagacacagactacattatacagtacaacagaaagaccccccttgggggcaacatactaacagcaccatcactacacccaggctccctcatgctgcaaaaatacagggtgctggttcccagctggaagacaaaacccaagggaaagggcacagtatccattaagattcccccccccaccatgctaactgacaagtggtacttttccaaagacgttgcagaccttacattgctaaacctcaacgcagtgtcagctgacctgcggtttccgttctgctcaccacaaacgaacactacttgcatcactttccaagttctctcttctgtgtacaacaagttcctctctataactgaaattaacccctcaaactcagaagagaaaattcaacagtttttaaacgctgctatgccaaataatgactctgcaaatatattaaatacttttaaatcagaaggtaactatagtcacccttctattaaagtatttaatggatcaaacaggccaacaaatgaagaatactttgcaaaaaaagacagcctatgggctgatgctatttttgtaaatacagctcaaagtttagatgacctaaaaaaaaaaattcaaaacaacattaaaaactataaaaaaaaagtagatgaaaagattacagctttatcacaaagaggcaccagtgccttttaccacttagtaggtatttatggcagcagctggctaaaccaaggtagaatgagtccagaagtactaggcctatacacagaagttatatacaacccatatactgataaaggagtgggcaacatgctatggatagaccccttaagcaaaacagacaacatatatagacccccacagagcaaatgcgttctaaaagacatgcccatgtggcaaatgtgctttggatacatagactgggtaaaaaaagacctaaatcactgggacgcccctattaactacagaatactactaagaactccctacacatttccaaaactataccatgacacacaaccagaatatggctttgtaatagtatcctacaacttcacagcaggcaaaatgccagacgggtccatgtatgtgcctattatatacagaaccaagtggtacccctacatgctaaaccaagaggcagtaatggaagacataagcagatcagggccctttgcacccaaacaagaaatgcccagcacagaactagttgcaaaatacacatttaagtggaaactcgggggcaaccccatctccgaacaggttgttaaagaccccagcacacaacccacctacgagctgcccgcagccggtacagtccctcgtagagtacaagttatcgacccgaaagtcgtcggacccaacatatcgttcaaaagctgggagatcagacgtggatactttagctcgacaagtattaaaagaatgtcagaacaacaagaaacttctgagtcttatttcccaggtccaaaaagacccagaatcgatctgcccaagtacgagccgccagaagaaagctggagtactctccaaagagaactccggccgtggacggactcggaggcggaaaaagaccaaagctcctcggaagaggaagaagagagacccctccgagagcagctgcagctccagctcaaggagcagcagcacctcagacggggaatccagtgcctgttcgaacaactcctaaaaacccagcagggagtccacgtaaatccctgcctcgcgtaggccccgagcagtggttgtttcccgagagaaagccaaagccaggtcccacgtcccaagactgggccatggagttcctggcctgcaagatatttgataggccccccagaagcaagcttacagattttcctttctatccccgctgcaaaaacaattacaatgtaacctttcagcttaactacaaataaatggcaacttcactgttctaggccgtgggagtttcacttgtcggtgtctacctctaaaggtcactaagcactccgagcgttagcgaggagtgcgacccttccccctgactcaacttcttcggagccgcgcgc

SEQ ID NO: 2046 - protein, 735 aa, Alphatorquevirus sp.; identical to SEQ ID NO: 1776

SEQ ID NO: 2047 - protein, 165 aa, Alphatorquevirus sp.
MGKALKKDMFLGKLYRKKRTLPLCGLPAAKKKPPSDMSYWRPPLHNVPGLEHLWYESVHRGHAAVCGCGNLVRHLAALAERYGYPGGPSAPGAPSVGGGGNPPIRRARYPAAAPDPPAGNQPLQLPWHGDGGNESGAGGGENDGPEGGFEDDGLDALVAALDDEE

SEQ ID NO: 2048 - protein, 132 aa, Alphatorquevirus sp.; identical to SEQ ID NO: 1778

SEQ ID NO: 2049 - DNA, 2967 bp, Alphatorquevirus sp.
ctactgccggaggtgagtttacacaccgcagtcaaggggcaattcgggctcgggactggtcgggctatgggcaaggctcttaaaaaagcatgtttctcggtaaaatttacagaaagaaaaggaaagtgccactgtacggcctgccaactccaaagaaaaaaccacctactgctatgagccactggagcagacccgtccaccatgcaacggggatcgaacacctctggtaccagtctgttattaacagccattctgctagctgcggttgtggcgatcctgtacaccactttacttctcttgctcagaggtatggctttgccccaactccccgcgccccgccagtagccccaacgcccaccatccgtagagccaggcccgcgcctgccgctccggagccccgtgccctgccatggcatggggatggtggagaagaaggcgcaagtggtggtggaggcgccggttcgcccgaggcagacttcgcagacgacggattagacgccctcgtcgccgcactcgacgaagaacagtaaggaggcgcagacaatggaggagggggcgacccagacgcagactgtttaagcgaaagagacgctttaaaagacgcagacgaaaagctaagataaaaataacccagtggcagcctagctctgtaaaaagagcctttataataggctactttccaatggtaatatgtggtccaggaaggtggtcagagaactttaccagccacatagaggacaaggtagccataggaccctttgggggaggacacagcaccagcagatggtccctcaaagtactgtacgaagaattccagaagcaccacaacttctggacccaaagcaacaaagaactagaactagtaagatactttggcagcacgtggagattctatagacacgaagacgtagactatatagtttactacagcagaaagagtcccctaggaggaaacatactaacagcacccagcctgcaccccggagcagccatgttgagcaaacacaaaataatagtacctagctttaaaaccagaccaggaggcaaaccctccataaaagttaaagtaaagcccccaactacactaatagataagtggtactttcaacatgacatttgtgacactacactactaaacatgaacgttgtactatgcaacttgcggtttccgttctgctcaccacaaacgaacaacccttgtgtcaccttccaaatattgcatgaggtttaccacgacttcctctctataactgacagccggttacttagcacagacgcagatgcatggaaatcgtactataaacaattcttaaatgctgtctttactacagagaaatcagccaacaaactaaatacagcactaacagagggatcttttcacgccccgcaaatacaaaaagacaaaacagctttaggaaataactactttaaaactaaagacgcactatggggagacccaatattcttagcaggctcacaacaaacaggaaacccaacattagacaaactaaaagagaaaatagttgaaaatgcagacaactaccttcaaaaagtaaaacaagagttttcacaaaccactttagcaaccacaatgcacggcatgttcacacactggacaggcatgtacagcccagcctttttagactataacagaataagtccagaaattcccggtgtatacaaagacataatctataaccccctaacagacagaggcataggtaacgcagtatggatagactactgcagcaaaaaaggaacaaattacgaccccaaagccagcaaatgccacatagcagacctaccgctgtggatggcagtttttggtatagtagactggctaaaaaaagacactggaaactggggcatacctgcctggtccagaataattattaaatgcccctacacttacccgagactagtagacagcacaaatgaatcaataggctttgtacccataggctacaactttgccagaggcagaatgcccgacggctcacactacatacccatacaaatgagacacaagtggtaccccaacctactaaatcaacaggcagtactagaagacttaagtgaaagcgggccctttgcctacagagagaaaacaaactctgccaacataaacgtaaaatacaaattcaggttccattttgggggcaaccctgtgtccgaacagattgttgcagacccatgcaaacaacccacctttgaaatgcccggaaccagtacactccctcctcgactacaagtcacggacccgaaactcctcggcccgcactacacattccacagctgggacaaaagacgtgactactatagcagacgagctattaaaagaatgtcagaacaacaagaaacttctgagtttttattctcaggcccaaaaaaacccagagtcgatctggacgcagtgcagcctgtcgaaaaagactcttcaccgaaacaaagaaaacagagaccctgggaaacgagcgagagcgaggaagagacagaagccctctcggaagaagaagagacgggctcggtccaccagcagctcaagcagcagctcagggagcaaaagcagctcagacagggaatccagtgcctcttcgagcagctaataaaaacccagcagggagtccacctagatccttccctcttgtaggccccaggcagtggctgtttcccgaaagaaagccagcccctgcccctagctctggagactgggccacagagtacctagcagctagagtgtttgatagacccccaagaagcaaccttaaagatacaccctactacccctacataaaaaaccagtacaatgtgtattttgacctcacattcgaataaagtgcagcttcaaacttgcaaggccgtgggagtttcactggtcggtgtctacctctaaaggtcactaagcactccgagcgtcagcgaggagtgcgacccttccccctgactcaacttcttcggagccgcgcg

SEQ ID NO: 2050 - protein, 746 aa, Alphatorquevirus sp.
MAWGWWRRRRKWWWRRRFARGRLRRRRIRRPRRRTRRRTVRRRRQWRRGRPRRRLFKRKRRFKRRRRKAKIKITQWQPSSVKRAFIIGYFPMVICGPGRWSENFTSHIEDKVAIGPFGGGHSTSRWSLKVLYEEFQKHHNFWTQSNKELELVRYFGSTWRFYRHEDVDYIVYYSRKSPLGGNILTAPSLHPGAAMLSKHKIIVPSFKTRPGGKPSIKVKVKPPTTLIDKWYFQHDICDTTLLNMNVVLCNLRFPFCSPQTNNPCVTFQILHEVYHDFLSITDSRLLSTDADAWKSYYKQFLNAVFTTEKSANKLNTALTEGSFHAPQIQKDKTALGNNYFKTKDALWGDPIFLAGSQQTGNPTLDKLKEKIVENADNYLQKVKQEFSQTTLATTMHGMFTHWTGMYSPAFLDYNRISPEIPGVYKDIIYNPLTDRGIGNAVWIDYCSKKGTNYDPKASKCHIADLPLWMAVFGIVDWLKKDTGNWGIPAWSRIIIKCPYTYPRLVDSTNESIGFVPIGYNFARGRMPDGSHYIPIQMRHKWYPNLLNQQAVLEDLSESGPFAYREKTNSANINVKYKFRFHFGGNPVSEQIVADPCKQPTFEMPGTSTLPPRLQVTDPKLLGPHYTFHSWDKRRDYYSRRAIKRMSEQQETSEFLFSGPKKPRVDLDAVQPVEKDSSPKQRKQRPWETSESEEETEALSEEEETGSVHQQLKQQLREQKQLRQGIQCLFEQLIKTQQGVHLDPSLL

SEQ ID NO: 2051 - protein, 146 aa, Alphatorquevirus sp.; identical to SEQ ID NO: 1797

SEQ ID NO: 2052 - protein, 123 aa, Alphatorquevirus sp.; identical to SEQ ID NO: 1798

SEQ ID NO: 2053 - DNA, 2967 bp, Betatorquevirus sp.
cgggtgccggaggtgagtgaaaccaccgtagtcaaggggcaattcgggctagctcagtctggcggaacgggcaagaaatttaaaataacatttattttacagatatgagctctatctggaagaaacctacattctcagtgagacaacaagaaaaccattggcttggaattgttttcagcactcatgacagcttctgccactgtgaagacccctggttacatttgatgattcttctaaacaaacaaggaaaagctccaaaacctgaatccgacgttcgcaatataaaatgcctccttactggaatagatacaactactaccaaagaagaccatacagaagaagacgtcgttaccggtttcgacgatggagagctggaaaaactattcgcagaaaatggcacagacgaaaatggagacgaaggaacaaggtaaaaagacgctttagaaagaaaaaactaaaaaaaattgttctaaagcaatttcaaccacataaaataactaaatgtaaaatagtaggcaaaaaatgtttatttcaaggtagtcctttaagatctagtaataactacatacagtactgttattcatatgtacctgaattatatcctggtggtggagggtggtctttacttgtacatagcttaggaagtatgtatgaagactatcaacatttaaacaatatatggacaacaagtaatgcaggaatgcctcttgtaagatacatgggagtggaatttaagttttatcaagatttgtatacagactatgttgtaatctgggataattgctggccattggttgacaccccatacacacatgctaacagttgtcctagccaaatgcttcaaagaaaaaacaaaataatagtgcccagcaaactaacacaaaatagaaaaaaaccatacaaaagatgctttgtaacacctccaacacaaatgcttaaccgttggtatttccaaagagacatttgtgacacaccattagcaatgataaccgcaacagcagttagtcttacaaaaccattttgtgacccaaaagcaaaaagtaacaatataactattaactgcctgaacccacacagatttagaaaccctaactttcaaaacccgccaataacaacaggatacagtccatttacagcagacaatttaagagaccatccacaaatgtacttatacggttcacacacagtaatacaatacaaaaaagacttactaacattaacacctttatgtaataccaaagacaacagagctggagcagtattatcatctttactaaacaaaaaagaaacaaataaattcgaaaactggggaaatcctttcaattccatttacttttcctcagaagaaacacatatttaccaatcacaatacggcccaacatctgagcaagtaacagaaacctggaaatcatatgaaagggacgacagcactataggcagtgaagttacattaatggtaggtcacaacctgtatgcttgtagatacaatccagaaaaagacacaggagaaggaaacatgtgttacttactaaacaattcctcagcagctagcctagaacctccagcaaacaaaaacctagtttttgaaggtttcccactatacatactactatggggatggacagactttataaagaaactaaagcaaacaattgacattgacaaaaactactttttagtaataaaaaccccattttttgaagaaaaactaccatactatatacctatagatgatgactttagagatggatttgaaccctacactccacacgacactaacaatgcacaggcctacatttctccatacaacatgaaccactggtatccaaaactactatttcaatatcaaagtattgaaaaaatttgtagatctgggccagcatgccctagaccaacaaacgacaactacttacaagcattttacaaatacaaatttcactttaaatggggtggatgtcctaaacaactagcaaaagcatatgatccttgtttacagtcaaaatggcccactcccgataacatcactccaggacttgaaatctcgaatcctaatgaaccaccacaaacccacatctatgactgggactgggaagaagactacattaaagaaaaagctttgcaaagaattagaatacacacagagtctcctaaacaaatactcttccttacagactcaaaacagaaccccaaaccactgcaaatcaaagaagcgaaagaggagacagaaaacgaagaggaaacgcaactactcctccagctccaccgaatccgacaccagcaaaagcagctcgaactccttctccagtcaaaatacggacaaataactacaccataaaacaatgtagaattaaagttaaactatttcctagcccaaaaaagaatagaagaatgacaccaaaggaaagagaactagaaaaagaaatagcaactatttttaaaagaccacaaagagactttatatttgatacacctatatacccttacataccaccagcaccccttgctaactttgacctaaattttaaagaataaaggccaacatacttcacttaatggtgtctgtttatttaagtttaacctaaataagctgtctccgcctcccaagtatgttggcgccataaagggggctccgcccccttacacccccaagggggctccgcccccttacacccccaagggggctccgcccccttacacccccaagggggctccgcccccttacaccccctaataaatattcaacaggaaaaccacctcatttaaattgccgaccacaaaccgtcttatacttcccctttttacaaacacttcccttttttctcattattattcattacattaattagtaaactgcgtaaatccggggagtggcaactaaactatataactaacaacacttccgaatggctgagtttatgccgccagtcgtagactgcaccacttcagtgactgcaggctgagcttggg

SEQ ID NO: 2054 - protein, 682 aa, Betatorquevirus sp.
MPPYWNRYNYYQRRPYRRRRRYRFRRWRAGKTIRRKWHRRKWRRRNKVKRRFRKKKLKKIVLKQFQPHKITKCKIVGKKCLFQGSPLRSSNNYIQYCYSYVPELYPGGGGWSLLVHSLGSMYEDYQHLNNIWTTSNAGMPLVRYMGVEFKFYQDLYTDYVVIWDNCWPLVDTPYTHANSCPSQMLQRKNKIIVPSKLTQNRKKPYKRCFVTPPTQMLNRWYFQRDICDTPLAMITATAVSLTKPFCDPKAKSNNITINCLNPHRFRNPNFQNPPITTGYSPFTADNLRDHPQMYLYGSHTVIQYKKDLLTLTPLCNTKDNRAGAVLSSLLNKKETNKFENWGNPFNSIYFSSEETHIYQSQYGPTSEQVTETWKSYERDDSTIGSEVTLMVGHNLYACRYNPEKDTGEGNMCYLLNNSSAASLEPPANKNLVFEGFPLYILLWGWTDFIKKLKQTIDIDKNYFLVIKTPFFEEKLPYYIPIDDDFRDGFEPYTPHDTNNAQAYISPYNMNHWYPKLLFQYQSIEKICRSGPACPRPTNDNYLQAFYKYKFHFKWGGCPKQLAKAYDPCLQSKWPTPDNITPGLEISNPNEPPQTHIYDWDWEEDYIKEKALQRIRIHTESPKQILFLTDSKQNPKPLQIKEAKEETENEEETQLLLQLHRIRHQQKQLELLLQSKYGQITTP

SEQ ID NO: 2055 - protein, 108 aa, Betatorquevirus sp.; identical to SEQ ID NO: 3

SEQ ID NO: 2056 - DNA, 2967 bp, Betatorquevirus sp.
cgggtgccgaaggtgagtgaaaccaccgtagtcaaggggcaattcgggctagctcagtctggcggaacgggcaagaaacttaaaataacatttattttacagatatgagctctatctggaagaaacctacattttcagtgagacaacaagaaaaccattggctcggaattgttttcagcactcatgacagcttttgccactgtgaggatccttggttacatattatgattcttctaaacaaacaaggaaaagctccaaaacctgaatccgaagttcgtaatataaaatgcctccttactggaatagatacaactactaccgaagaagaccatacaaaagaagacgttattaccggtttcgacgatggagagctggaaaaactattcgcagaaaatggcacagacgaaaatggagacgaaggaacaaggtaaaaagacgctttagaaagaaaaaacttaaaaaaattgttctaaagcaatttcaacctcataaaataactaaatgtaaaataattggcaaaaaatgtttatttcaaggtagtcctttaagatctagtaataactacatacagtactgttattcatatgtacctgaattatatcctggtggtggagggtggtctttacttgtacatagcttaggaagtatgtatgaagactatcaacatttaaataatgtatggacaacaagtaatgcaggaatgcctcttgtaagatacatgggagtagaatttaaattctatcaagacttgtatacagactatgttgttatctgggataattgctggccattggttgacaccccatacacacatgctaacagttgtcctagccaaatgcttcaaagaaaaaacaaaataatagtgcccagcaaactaacacaaaatagaaaaaaaccatacaaaagatgctttgtaacacctccaacacaaatgcttaaccgttggtatttccaaaaagacatttgtgacacacctttagcaatgataaccgcaacagcagttagtcttacaaaaccattttgtgacccaaaagcaaaaagtaacaacataactattaactgtctaaacccacacagatttagaaatcctaactttcaaaacccaccaataaaaacaggatacagtccatttacagcagacaatctacaaaaccatccaaaaatgtacttatatggttcacacacaataatagaaaaaaagaaagatttactaacattaacacctttatgtaataccaaagacaacagagctggagcaaccttatcacatttactaacacaagataacgcaaataaatttgaaaactggggaaatccttttaactccatttacttttcctcagacgaaacacatatttaccaatcacaatacagcccaatatcagatgaagtaacaaccacatggaaaagctatacaaataaggatggaaatctaggtagtgaagttacattaatggtaggtcacaacctctatgcctgtagatacaatccagaaaaagacacaggagaaggaaacatgtgttacttactaaacaattcctcagcagctagcctagaacctccatcaaacaaaaacctaatttttgaaggttttccattatacatactactatggggatggacagactttataaaaaaactaaagcaaacaattgacattgacaaaaactacttcttagtaataaaaaccccattttttgaagaaaaactaccatactatatacctatagatgatgactttagagatggatttgaaccctacactccacacgacactaacaatgcacaggcctacatttctccatacaacatgaaccactggtatccaaaactattatttcaatatcaaagtattgaaaaaatttgtagatctggtccagcatgcgctagaccaacaaacgacaactacttacaagcattctacaaatacaaattttactttaaatggggtggatgtcctaaacaactagcaaaagcatatgatccttgtttacagtcaaaatggcccactcccgataacatcactccaggacttgaaatctcgaatcctaatgaaccaccacaaacccacatctatgagtgggactgggaagaagactacattaaagaaaaagctttacaaagaattagaacatacacagagtctcctaaacaaatactcttccttacagactcaaaacagaatcccaaaccactgcaaatcaaagaagcgaaagaggagacagaaaacgaagaggaaacgcaactactcctccagctccaccgaatccgacaccagcgaaagcagctcgaactccttctccagtcaaaatacggacaaataactacacaataaaacaatgtaaaattaaagttaaactatttcctagcccaaaaaagaacagaagaatgacaccaaaggaaagagaactagaaaaagaaatagcaactatttttaaaagaccacaaagacagtttatatttgatacacctatatacccttacataccaccaacaccccttgctaactttgacctaaatttcaaagaataaatgccaacatacttcacttaatggtgtctgtttatttaagtttaacctaaataagctgtctccgcctcccaactatgttggcgccataaagggggctccgcccccttacacccccaagggggctccgcccccttacacccccaagggggctccgcccccttacacccccaagggggctccgcccccttacaccccctaataaatattcaacaggaaaaccacctcatttaaattgccgaccacaaaccgtcttatacttcccctttttaaaaacacttcccttttttctaattattattcattaaattaattagtaaactgcgtaaatccggggagtggcatctaaactatataactaacaacacttccgaatggctgagtttatgccgccagtcgtagactgcaccacttcagtgactgcaggctgagcttggg

SEQ ID NO: 2057 - protein, 682 aa, Betatorquevirus sp.
MPPYWNRYNYYRRRPYKRRRYYRFRRWRAGKTIRRKWHRRKWRRRNKVKRRFRKKKLKKIVLKQFQPHKITKCKIIGKKCLFQGSPLRSSNNYIQYCYSYVPELYPGGGGWSLLVHSLGSMYEDYQHLNNVWTTSNAGMPLVRYMGVEFKFYQDLYTDYVVIWDNCWPLVDTPYTHANSCPSQMLQRKNKIIVPSKLTQNRKKPYKRCFVTPPTQMLNRWYFQKDICDTPLAMITATAVSLTKPFCDPKAKSNNITINCLNPHRFRNPNFQNPPIKTGYSPFTADNLQNHPKMYLYGSHTIIEKKKDLLTLTPLCNTKDNRAGATLSHLLTQDNANKFENWGNPFNSIYFSSDETHIYQSQYSPISDEVTTTWKSYTNKDGNLGSEVTLMVGHNLYACRYNPEKDTGEGNMCYLLNNSSAASLEPPSNKNLIFEGFPLYILLWGWTDFIKKLKQTIDIDKNYFLVIKTPFFEEKLPYYIPIDDDFRDGFEPYTPHDTNNAQAYISPYNMNHWYPKLLFQYQSIEKICRSGPACARPTNDNYLQAFYKYKFYFKWGGCPKQLAKAYDPCLQSKWPTPDNITPGLEISNPNEPPQTHIYEWDWEEDYIKEKALQRIRTYTESPKQILFLTDSKQNPKPLQIKEAKEETENEEETQLLLQLHRIRHQRKQLELLLQSKYGQITTQ

SEQ ID NO: 2058 - protein, 108 aa, Betatorquevirus sp.
MSSIWKKPTFSVRQQENHWLGIVFSTHDSFCHCEDPWLHIMILLNKQGKAPKPESEVRNIKCLLTGIDTTTTEEDHTKEDVITGFDDGELEKLFAENGTDENGDEGTR

SEQ ID NO: 2059 - DNA, 2966 bp, Alphatorquevirus sp.
ttaaggtcactaagcactccgagcgttagcgacaaggggcaattcgggctcgggactggccgggctatgggcaaggctcttagggttatcgctctaaaaaatgttttttggcaggccttacagaaaaaagaaaaggccgctgctactgtctgagctgccagatcgaaagaaaaaaccacctggtgatatgacctggcgccccccggtacacaatgctgccggcattgataggcagttctttgaagcctgctttcgatgccacaatagttgctgcggctgcggcagctttattaatcatcttaatgtactggctgctcgctatggctttactggggggccggcgccgccaggtggtcctcggccggcgccccaagtgaggcccgcgcttcccgcgccggagcccgacccgcaggccgacaaccgtgaaccatggcgtggagctggtggtggcaacgatggaggcgccgcggctggaaacccaggcgccgccgctggagacgcctacgatggagaagacctcgacgccctgttcgccgccgtcgccgaagacgcagagtaaggagacggaggtgggggaagagacgggggcgacgcagacggtacacccgtagacgaaagagacgcattaagcacagaaactttaaaaaaaaactagtactgactcagtggcacccctctgtagtaagacgctgctttatcaggggcatagttcccatcctcatatgcgggcacacaaaatggaacagtaactacgccctgcatagcgaggactacacagaagagggccgctaccctcacggagggtccctctcgaccactacgtggtcactaaaggtgctgtacgacgagtacctgaagcaccgcaacttctggggctacccaaacacccagctagaccttgccagatacaggggctgcactttctacttttacagacacaaaaagactgactttatagtgtggtggaacagaaaacctccctttaaactaaacaagctcagctgcccgtccttccacccgggcatgctcatgcaacagaaacacaaggtgctaatccctagctttgacactaaacccgggggcaaaactaaaattagagtcagaataaagccccctactctgttagaggacaagtggtacactcagcaagacttgtgtccggtaaacctggcgcaacttgtggttactgcggctgactttcaacatccgttctgctcaccacaaacgaacacttcaaccacaaccttccaggtattgaaagaaatgtattatgacaccataggcatagttaacacagaagaaacttacaattcagttaataataaaagtacaactaaatcatacgcagaatttattaaaattttacaagacaagttatactcaacaggttcctactggaactcctttcacacagcagaatacttaaaccctaatgtcacagacacgtttaacaacaaaatatttagtacgaactcatcactagcaacttggctaagcaccaaaggcaacaacggctttcaaactggtaacagcacccaatttggctacaactcctacaaaccagacaaaagcaacatacagttagcaaaccaagcatactggaacgcactaacaaaaccaaacgaccaggcaacacaaataggacaagcccgtgccaaagaatttgaataccacactggcatctacagccccatattcctcagcagacacagaagcacactaaactttgccagggcctaccaggacgtcacatacaacccaaactgtgacagaggagttaaaaacagggtgtgggtgcagtcccttaccaaggccaccacagaatttgacgagaaacgcagcaagtgcgttattactgacctgcctctgtgggccgctctgtactgttaccacaactttgtagaggaagagctaggcatctcctctgaaatctacaacgcctgtatagtctgtgtacagtgcccttacacctttccccccatgtatgacaagaaaaacccaaataaggggtacgtgttctatgactccctgtttggaaacggaaagaccccagacggacgcggacaggtggacgtgttctggcagcagcggtggtacccccgcatggcctgccaggtacaagttatgcacgacatcaccaagacgggacccttctcctaccacgacgaactagtgagtacacaactgaccgctaaatacaaatttgacttcatgtggggtggaaacatgatctcctcacagatcatcaagaacccctgcaaagatacagacatggacaccacctatcccagtagacagcgtcgcgacttacaaattgttgacccacactccatggggccctccttcgcgttccacacgtgggactacagacgaggactgtttggtaaagatgctatcgaaagagtgtcaaaagaacaagactatgctccagagtatcctaacccatacaaaaagcctagatattttcccccaacagacagggcagagctccaagggcaagaagaagactggagtttccaggtcgaaagcgaggggtcgtcgtcagaagagagcgatcaagaagcccaagaagaggaggtactccagttccagccaggacagcagctccagcaactccacctgcagctcgcgcagcagcagcacatcgggcagcagctccaattcctgttccagcaaatgctcaaaacccaggccaatctgcacttaaacccatatacatacacccagctataaacagggtgttcatgtttgaaccccagggccccaggcccataactaccagagaggggtgggaggacgagtacagcactgccggcatatggggccggcccgttcgctccttctacacagacacccctttctaccccgaggttccaaaaatacctcctcagtttcatgtatcttttaaactcggctggaaataaaaatgcaaggcctttcactgttcacttgtcggtgtctacctc

SEQ ID NO: 2060 - protein, 767 aa, Alphatorquevirus sp.
MAWSWWWQRWRRRGWKPRRRRWRRLRWRRPRRPVRRRRRRRRVRRRRWGKRRGRRRRYTRRRKRRIKHRNFKKKLVLTQWHPSVVRRCFIRGIVPILICGHTKWNSNYALHSEDYTEEGRYPHGGSLSTTTWSLKVLYDEYLKHRNFWGYPNTQLDLARYRGCTFYFYRHKKTDFIVWWNRKPPFKLNKLSCPSFHPGMLMQQKHKVLIPSFDTKPGGKTKIRVRIKPPTLLEDKWYTQQDLCPVNLAQLVVTAADFQHPFCSPQTNTSTTTFQVLKEMYYDTIGIVNTEETYNSVNNKSTTKSYAEFIKILQDKLYSTGSYWNSFHTAEYLNPNVTDTFNNKIFSTNSSLATWLSTKGNNGFQTGNSTQFGYNSYKPDKSNIQLANQAYWNALTKPNDQATQIGQARAKEFEYHTGIYSPIFLSRHRSTLNFARAYQDVTYNPNCDRGVKNRVWVQSLTKATTEFDEKRSKCVITDLPLWAALYCYHNFVEEELGISSEIYNACIVCVQCPYTFPPMYDKKNPNKGYVFYDSLFGNGKTPDGRGQVDVFWQQRWYPRMACQVQVMHDITKTGPFSYHDELVSTQLTAKYKFDFMWGGNMISSQIIKNPCKDTDMDTTYPSRQRRDLQIVDPHSMGPSFAFHTWDYRRGLFGKDAIERVSKEQDYAPEYPNPYKKPRYFPPTDRAELQGQEEDWSFQVESEGSSSEESDQEAQEEEVLQFQPGQQLQQLHLQLAQQQHIGQQLQFLFQQMLKTQANLHLNPYTYTQL

SEQ ID NO: 2061 - protein, 152 aa, Alphatorquevirus sp.
MFFGRPYRKKKRPLLLSELPDRKKKPPGDMTWRPPVHNAAGIDRQFFEACFRCHNSCCGCGSFINHLNVLAARYGFTGGPAPPGGPRPAPQVRPALPAPEPDPQADNREPWRGAGGGNDGGAAAGNPGAAAGDAYDGEDLDALFAAVAEDAE

SEQ ID NO: 2062 - protein, 138 aa, Alphatorquevirus sp.
LEFPGRKRGVVVRRERSRSPRRGGTPVPARTAAPATPPAARAAAAHRAAAPIPVPANAQNPGQSALKPIYIHPAINRVFMFEPQGPRPITTREGWEDEYSTAGIWGRPVRSFYTDTPFYPEVPKIPPQFHVSFKLGWK

SEQ ID NO: 2063 - DNA, 2966 bp, Betatorquevirus sp.
cgggtgctgaaggtgagtgaaaccaccgaaatcaaggggcaattcgggctagtccagtctagcggaacgggcaagtaacttaattttattttacagatgtcagattattataaaaaactaacaattggaccacgacatgcacaactaaactggaccaacgctattgttaccctgcacgacctacaatgccagtgtaatgatcctctatgccacacaattgaaaccataataaatcaagaaaaatctttaaaattttcaaaaggattatctgaaaaaattaaaccatgccttactactggagaggatggcgtcgcagacgtcgtagaagattttggagacgacgaactagagcgccttttcgcagaagaaggtactggagaaacagatacagggtaagaaaacttcgtactaaacctaaaaaattacctataaaacaatggcaaccaacaaaaatgcggaggctaaccgtaactggaaaatacccactttttgagggaacctccgaaagaattggaaataacaatactcaaagcatagacacaattgctccttacttatttccatctggaggactattttcaataactgtttttactttgaaaggactatatgaacttcacttaaaagctagaaattggtggtctatttctaactgtaacttgccattgataaaatacagaggatgtaaaataactttgtatagaaatgttgatgttgactttgtaactgtatatactagatgtggttcactaacagctacagaagaactgtatagatcttgccaacctagtttattgctattaaacaaacacaaaaaagtactaacatgcaaaaaaaacaataacaaacgcaaaataagtaaaactataaaaataccaccaccagcactcatgcaaaacaaatggtactttcaaaaggactttgcaaattatccacttgtaatgctgttatcagccgcactaagcttagacagatattacagttcagcaaactctatttccagtacaataggctttgctagcataaacacaacaatatttcaatacagtgactttaaatcacctaatttaacacaaccatacaaaccaaacgaccaatactggttaggaacatggacaaatcaaacaattactaactttaacgacgtacaactacaacacttaatactactaggaaacacaaacgattatcaacccggagaaccaatggggaacacaaaaacaacctatgctttatactttacacaaaaaactaaatggggaaacccattttatgcaccttactttgaacctgaaccacaaaaaatttttatgattagtgatttaaacaaattaaaaaatgcagaaccaactaccaaaataaacactttagggtgcactctactaccaccagaaaaaacacttctaacaatctgcagatataacccacaaaacgacagatcagcacataatgcattatatgcaagccctgtaacaacagccagaactaaatggggcgccacaacaaagccagaactaaatacagaaggcctaccactatggttactaacatttgggtttcacgactggctattaaaatcagaaaaagttcaaagattagatcttgattatgtttatgttataatttcagaatacataacacctaaaatggaacattatgtacctgtagaccctaactttacacaaggtagaagtccctttgaaataacagatcacatgagaccaccagacgtaggatactggtttccaaaaacaagctaccaacatactgtattttctgaaattataaacactggaccaggaactgtaaaactaccacctcgaatttcagtagaagcaagcatgagatacaaattttacttcactctggggggctgtccacctccaatggacaatgtttgtgatccacaggcccaaccggactttcctcaacccggtaacatcatatcgccaactttattgcaggatccagaataccccattgaatactacttgcaagcctttgacgagcgaaggggactccttacaaaaaaggctgcaaaacgaatcaaaaaagactatgaaactgaacaagctattttgtcatctacaggacaaactgcaatggacgtccaactcaaaaccccggagacaacatcgtcagaagactcatcggaggaggaaaaagagccgcaaacactgcagttccagctccagcgacacaagcgaaagcaacggaaactccgactcagaatcctccagttgctaaaactagccaaagatttataataaaacatagtacaataacagtaaacttatttgatcctcctccacacaaaaacaggcgaattacaggcccagactttgaaactgaactacagttagcaaaatggatgaaaagaccacctagatattttcatgatgataaacctttttacccgtggttaccccctgaacctcttgtaaaccaagaacattttgtaaattttaaactaaactttactgaataaaggccagcattaattcactctcggtgtccatttatatagtttaaacttaaataaacagcctccgcctccctaatacgcaggcgcactgggggctccgcccccaaacccccaagggggctccgcccccttaaacccccaggggggacacccccctttaccccccgaaaaccactaaatttgcattgccgaccacaaactgaacaggaaaccacaaaatttgcattgccgaccacaaaccgtcaaacacttccttattttaccttacttctgcttttacttataaatattcatgaaatttgttagtaatcaacatcatatcctgggaggagacaacacactataaaagtaactacacagacgaatggctgagtttatgccgctagacggaggacgcatcagtcactgactgcggactggacttgggcgggtgctgaaggtgagtgaaaccaccgaaatcaaggggcaattcgggcttggg

SEQ ID NO: 2064 - protein, 660 aa, Betatorquevirus sp.
MPYYWRGWRRRRRRRFWRRRTRAPFRRRRYWRNRYRVRKLRTKPKKLPIKQWQPTKMRRLTVTGKYPLFEGTSERIGNNNTQSIDTIAPYLFPSGGLFSITVFTLKGLYELHLKARNWWSISNCNLPLIKYRGCKITLYRNVDVDFVTVYTRCGSLTATEELYRSCQPSLLLLNKHKKVLTCKKNNNKRKISKTIKIPPPALMQNKWYFQKDFANYPLVMLLSAALSLDRYYSSANSISSTIGFASINTTIFQYSDFKSPNLTQPYKPNDQYWLGTWTNQTITNFNDVQLQHLILLGNTNDYQPGEPMGNTKTTYALYFTQKTKWGNPFYAPYFEPEPQKIFMISDLNKLKNAEPTTKINTLGCTLLPPEKTLLTICRYNPQNDRSAHNALYASPVTTARTKWGATTKPELNTEGLPLWLLTFGFHDWLLKSEKVQRLDLDYVYVIISEYITPKMEHYVPVDPNFTQGRSPFEITDHMRPPDVGYWFPKTSYQHTVFSEIINTGPGTVKLPPRISVEASMRYKFYFTLGGCPPPMDNVCDPQAQPDFPQPGNIISPTLLQDPEYPIEYYLQAFDERRGLLTKKAAKRIKKDYETEQAILSSTGQTAMDVQLKTPETTSSEDSSEEEKEPQTLQFQLQRHKRKQRKLRLRILQLLKLAKDL

SEQ ID NO: 2065 - protein, 99 aa, Betatorquevirus sp.
MSDYYKKLTIGPRHAQLNWTNAIVTLHDLQCQCNDPLCHTIETIINQEKSLKFSKGLSEKIKPCLTTGEDGVADVVEDFGDDELERLFAEEGTGETDTG

SEQ ID NO: 2066 - DNA, 2966 bp, Betatorquevirus sp.
cgggtgccgaaggtgagtgaaaccaccgtagtcaaggggcttatcgggctgaagcagtcttggcggaacgggcaagaaacttaaaatatacttttattttacagaatgtcttctatgtatacacctacagaacaaagtggtagatacctgacacaacaatggattaacagcgtgttatccattcatgatactttttgtcagtgtaaaaagccacttgttcacctactaaaaggaattaaagaaacaacaataggattaacagaagaagaaaaaaaacttactgaaaaatgccttacggccgttactaccgaagatactaccgaccgagatggaccagacccagaagatattttagatggcgtagacctagaggctttcttcgccggagacattacagaagaagaagataccgggtaaggaaaaaacttaaatatttacctttaagagaatggcaacctaagactattagaaactgtagcattaaaggaactaaatgcctatttatggcaggccaacaaagattctggaataactatggacaatatcaaaaaagcatagtaccagaacactggccagggggaggaggatgtagtatacttgtatttagcttaactgctctatatgaagaatatgaaaacctaagaaacaaatggactacatctaacaaaggactgcctttagtaagatatagaggatgtactttaaaattttaccgtgacgactggatagactatgttgtgactgtacagacttgctttccaatgactgctacagaggacatgtacctaagcttacaaccatatataatgctacaaaacacacataagataatagtacctgctaaaaagactttaccaaacagaaaaccctatataaaaagacgctttggaccaccaaaactcatgacaaacaaatggtactttcaacaagatatttgcagaactaacttactgttaatttctacatcagcctgttcgttaaaccaccccttcctgtctccaactgcggttagcaactgtgtcacaattcttgcattagatgccaacctctttaagaacaaaggttggcaacatcctgaatcaaccacaggctatcaacctaataataacctaaacttatttggccttataaatggacacatatcagaacaacaaataaaatttggagacctagtatttttaggcaacccaaaagacaaaacaccaggcagacccagaaacgcaacaggtaccaatcaagcttttaaaccagaagattggggaaacccattttatccaacatacataacattaacccaaacagtttacaaaactaacaaaacattaaaagaaatagaacaagttaatacaactaagaaaattaaagactcagaatacaacacatggtttacaaaaacagaagctcctcttttaataagatgcagatactgtccagacaatgacgatggcacaggtaacatagcatacctactatctaactatagaaacgacggaggaattaatcctccaggagaccctcacacaaaagtagagggatatcctctatggttactactatggagctggacagactggataaaaaaactagcagaaatacaccatgtagacacctcatactttttagtagtacaaacagataaaattgacccaaaaatgccatactatatattctgggacgaatccttaacagaaggaaaaggcccctatggaatagaaacagaattaatttcactttcagacaatgccaactggtacccaaaactaagatttcaagtagaaaacataaacaacatactaatgtcaggacctgcagctccaaaaacacaaagcaaaagcatagaagcccacatgtactataatttcaaatttaaatggggaggctgtccagcaccaatgcaagaaatttatgatccttgttcacagacaaaatatcccatccccaattcgctcgtacaaggacctgagatcacgcatccagaaacatcaaaatttacagaaatctatgactttgacgaacgccgacagacccttactaaaaaagcagcaaaaagacttgctgaaagccattgtacttcactcacaggaaagaaacccaaaagatgcctatcagatgtactaccgtacgaagaatccacagagtcacagagctcacaagaggcgtcatccgaggaagaagagaaagcacagacagcagacatcctcaagcagtaccagtactacaagcgaaagctccacagacgattaaaaaagacccaataccgctaacagtatctatgtttcaccaagatgaaaagccaaacagaagaatgagaccagacgaatatgaaactgaactgtggttagcaaaactttttaaaagaccacctaatacctttattaaagatttacctttttacccatatgttccacaccatcccctaaataataaatggagtgtaaattttgaccttaacttcaatcaataaaggccagcattaattcactctcggtgtccatttatttaagtattaacttatataaacagcctccgcctccctaatacgcaggcgccaaaatggcgcctgctaacaaaatggccgccacaaatttaaaatggcggcaaattaacatacccttatttaaatatttaaatatttaaataaggggggggggggggggggggggggggggggggggggggggggggggggggggggcccccccccccccccccccccccccccccccccccccccccccccccccccccctaaccccccccgaaaaccattaaaaaaggcgccaaaaaaaaacacgcccactaatacatattcatacatactttaaacagaccaatcacatactactacgtacacttcctgggctggccttaccaatgcatataactaactgcacttccgaatggctgagtttatgccgccagacggaggtgaatacacaccgaaggaggattcagctgcttcaggg

SEQ ID NO: 2067 - protein, 658 aa, Betatorquevirus sp.
MPYGRYYRRYYRPRWTRPRRYFRWRRPRGFLRRRHYRRRRYRVRKKLKYLPLREWQPKTIRNCSIKGTKCLFMAGQQRFWNNYGQYQKSIVPEHWPGGGGCSILVFSLTALYEEYENLRNKWTTSNKGLPLVRYRGCTLKFYRDDWIDYVVTVQTCFPMTATEDMYLSLQPYIMLQNTHKIIVPAKKTLPNRKPYIKRRFGPPKLMTNKWYFQQDICRTNLLLISTSACSLNHPFLSPTAVSNCVTILALDANLFKNKGWQHPESTTGYQPNNNLNLFGLINGHISEQQIKFGDLVFLGNPKDKTPGRPRNATGTNQAFKPEDWGNPFYPTYITLTQTVYKTNKTLKEIEQVNTTKKIKDSEYNTWFTKTEAPLLIRCRYCPDNDDGTGNIAYLLSNYRNDGGINPPGDPHTKVEGYPLWLLLWSWTDWIKKLAEIHHVDTSYFLVVQTDKIDPKMPYYIFWDESLTEGKGPYGIETELISLSDNANWYPKLRFQVENINNILMSGPAAPKTQSKSIEAHMYYNFKFKWGGCPAPMQEIYDPCSQTKYPIPNSLVQGPEITHPETSKFTEIYDFDERRQTLTKKAAKRLAESHCTSLTGKKPKRCLSDVLPYEESTESQSSQEASSEEEEKAQTADILKQYQYYKRKLHRRLKKTQYR

SEQ ID NO: 2068 - protein, 103 aa, Betatorquevirus sp.
MSSMYTPTEQSGRYLTQQWINSVLSIHDTFCQCKKPLVHLLKGIKETTIGLTEEEKKLTEKCLTAVTTEDTTDRDGPDPEDILDGVDLEAFFAGDITEEEDTG

SEQ ID NO: 2069 - protein, 132 aa, Betatorquevirus sp.
LYFTHRKETQKMPIRCTTVRRIHRVTELTRGVIRGRRESTDSRHPQAVPVLQAKAPQTIKKDPIPLTVSMFHQDEKPNRRMRPDEYETELWLAKLFKRPPNTFIKDLPFYPYVPHHPLNNKWSVNFDLNFNQ

SEQ ID NO: 2070 - DNA, 2966 bp, Betatorquevirus sp.
cgggtgctgaaggtgagtgaaaccaccgaaatcaaggggcaattcgggctagtccagtctagcggaacgggcaagtaacttaattttattttacagatgtcagattattataaaaaactaacaattggaccacgacatgcacaactaaactggaccaacgctattgttaccctgcacgacctacaatgccagtgtaatgatcctctatgccacacaattgaaaccataataaatcaagaaaaatctttaaaattttcaaaaggattatctgaaaaaattaaaccatgccttactactggagaggatggcgtcgcagacgtcgtagaagattttggagacgacgaactagagcgccttttcgcagaagaaggtactggagaaacagatacagggtaagaaaacttcgtactaaacctaaaaaattacctataaaacaatggcaaccaacaaaaatgcggaggctaaccgtaactggaaaatacccactttttgagggaacctccgaaagaattggaaataacaatactcaaagcatagacacaattgctccttacttatttccatctggaggactattttcaataactgtttttactttgaaaggactatatgaacttcacttaaaagctagaaattggtggtctatttctaactgtaacttgccattgataaaatacagaggatgtaaaataactttgtatagaaatgttgatgttgactttgtaactgtatatactagatgtggttcactaacagctacagaagaactgtatagatcttgccaacctagtttattgctattaaacaaacacaaaaaagtactaacatgcaaaaaaaacaataacaaacgcaaaataagtaaaactataaaaataccaccaccagcactcatgcaaaacaaatggtactttcaaaaggactttgcaaattatccacttgtaatgctgttatcagccgcactaagcttagacagatattacagttcagcaaactctatttccagtacaataggctttgctagcataaacacaacaatatttcaatacagtgactttaaatcacctaatttaacacaaccatacaaaccaaacgaccaatactggttaggaacatggacaaatcaaacaattactaactttaacgaggtacaactacaacacttaatactactaggaaacacaaacgattatcaacccggagaaccaatggggaacacaaaaacaacctatgctttatactttacacaaaaaactaaatggggaaacccattttatgcaccttactttgaacctgaaccacaaaaaatttttatgattagtgatttaaacaaattaaaaaatgcagaaccaactaccaaaataaacactttagggtgcactctactaccaccagaaaaaacacttctaacaatctgcagatataacccacaaaacgacagatcagcacataatgcattatatgcaagccctgtaacaacagccagaactaaatggggcgccacaacaaagccagaactaaatacagaaggcctaccactatggttactaacatttgggtttcacgactggctattaaaatcagaaaaagttcaaagattagatcttgattatgtttatgttataatttcagaatacataacacctaaaatggaacattatgtacctgtagaccctaactttacacaaggtagaagtccctttgaaataacagatcacatgagaccaccagacgtaggatactggtttccaaaaacaagctaccaacatactgtattttctgaaattataaacactggaccaggaactgtaaaactaccacctcgaatttcagtagaagcaagcatgagatacaaattttacttcactctggggggctgtccacctccaatggacaatgtttgtgatccacaggcccaaccggactttcctcaacccggtaacatcatatcgccaactttattgcaggatccagaataccccattgaatactacttgcaagcctttgacgagcgaaggggactccttacaaaaaaggctgcaaaacgaatcaaaaaagactatgaaactgaacaagctattttgtcatctacaggacaaactgcaatggacgtccaactcaaaaccccggagacaacatcgtcagaagactcatcggaggaggaaaaagagccgcaaacactgcagttccagctccagcgacacaagcgaaagcaacggaaactccgactcagaatcctccagttgctaaaactagccaaagatttataataaaacatagtacaataacagtaaacttatttgatcctcctccacacaaaaacaggcgaattacaggcccagactttgaaactgaactacagttagcaaaatggatgaaaagaccacctagatattttcatgatgataaacctttttacccgtggttaccccctgaacctcttgtaaaccaagaacattttgtaaattttaaactaaactttactgaataaaggccagcattaattcactctcggtgtccatttatatagtttaaacttaaataaacagcctccgcctccctaatacgcaggcgcactgggggctccgcccccaaacccccaagggggctccgcccccttaaacccccaggggggacacccccctttaccccccgaaaaccactaaatttgcattgccgaccacaaactgaacaggaaaccacaaaatttgcattgccgaccacaaaccgtcaaacacttccttattttaccttacttctgcttttacttataaatattcatgaaatttgttagtaatcaacatcatatcctgggaggagacaacacactataaaagtaactacacagacgaatggctgagtttatgccgctagacggaggacgcatcagtcactgactgcggactggacttgggcgggtgctgaaggtgagtgaaaccaccgaaatcaaggggcaattcgggcttggg

SEQ ID NO: 2071 - protein, 660 aa, Betatorquevirus sp.
MPYYWRGWRRRRRRRFWRRRTRAPFRRRRYWRNRYRVRKLRTKPKKLPIKQWQPTKMRRLTVTGKYPLFEGTSERIGNNNTQSIDTIAPYLFPSGGLFSITVFTLKGLYELHLKARNWWSISNCNLPLIKYRGCKITLYRNVDVDFVTVYTRCGSLTATEELYRSCQPSLLLLNKHKKVLTCKKNNNKRKISKTIKIPPPALMQNKWYFQKDFANYPLVMLLSAALSLDRYYSSANSISSTIGFASINTTIFQYSDFKSPNLTQPYKPNDQYWLGTWTNQTITNFNEVQLQHLILLGNTNDYQPGEPMGNTKTTYALYFTQKTKWGNPFYAPYFEPEPQKIFMISDLNKLKNAEPTTKINTLGCTLLPPEKTLLTICRYNPQNDRSAHNALYASPVTTARTKWGATTKPELNTEGLPLWLLTFGFHDWLLKSEKVQRLDLDYVYVIISEYITPKMEHYVPVDPNFTQGRSPFEITDHMRPPDVGYWFPKTSYQHTVFSEIINTGPGTVKLPPRISVEASMRYKFYFTLGGCPPPMDNVCDPQAQPDFPQPGNIISPTLLQDPEYPIEYYLQAFDERRGLLTKKAAKRIKKDYETEQAILSSTGQTAMDVQLKTPETTSSEDSSEEEKEPQTLQFQLQRHKRKQRKLRLRILQLLKLAKDL

SEQ ID NO: 2072 - protein, 99 aa, Betatorquevirus sp.; identical to SEQ ID NO: 2065

SEQ ID NO: 2073 - DNA, 2966 bp, Alphatorquevirus sp.
tcttaaggtcactaagcactccgagcgtcagtcaaggggcaattcgggctcgggactggccgggctatgggcaaggctcttagggtcatcgctcttaaaaatgttttttggcaggccttacagaaaaaagaaaagggcgctgctactgtctcagctgccagatccaaagaagaaactacctggtgatatgacctggcgcccccccggtacacaatgctgccggcatcgataggcagttctttgaagcctgctttagatgccacagtagttgctgcggctgcggcagctttattaatcatcttaacgtactggctgctcgctatggctttactgggggggccggcgccgccaggtggtcctgggccggcgccccaagtgagacccgcgcttccagcgcctgagcccgacccggaggccgagaaccgtgagccatggcgtggagctggtggtggcaacgatggaggcgccgccgctggaaacccaggcgccgccgctggagacgcctacgacggagaagacctagacgccctcttcgccgccgtcgccgaggacgcagagtaaggaggcggaggtggggcaggagacgggggcgacgcagacggtacgccaccagacgaaagagacgcaccaagggtcgcaactttagaaaaaaactagtactgactcagtggcacccctctagcataaggcgctgcttaattaagggcatagtccccctggtaatatgcggacacaccaggtggaactgcaactacgccctccatagcgaggactataccgaggagggtcgcttcgcccacggggggtccctcagcaccactacgtggtcgctaaaggtgctgtacgacgaattcttaaagcaccacaacttttggggctaccccaacaaccagctagacctggccaggtacaagggggccaaattcaccttctacagacacaaaaagactgactttatagtattctttaacagaaggcctccctttaagctaaacaaatacagctgcgcctcttaccaccctggcatgctcatgcagcagaaacacaaggtgctaatacccagctacgacactaaaccaaaggggaggccaaaaataactgttagaataaagccccccactctgttagaagacaagtggtacactcagcaggacctgtgcgacgttaacctgttgcaacttgtggttactgcggctgactttcaacatccgttctgctcaccacaaacgaacactccaaccacaacgttccaagtgttgaaagacatttattacaacactatgagcatctctgatcccctagaaaactacaataatgttaataagcccactgagtctaaatcatttaacgagtactcaaaggaactagaagaaattttatataccaggggctcctactggaactcttttcactccatggagtaccttaacccaaccacatcagataaacacgagaataaaatatttgccaatagaggcacagatctaacaaattggctgtcaaaaagaggcggcaataactttcaaactggagacagcacccagtttggccacaacagctacaaacccgatattaccaaaataaaaaaagccagaaaagcctactgggatgccctaaaccaaccaaatgacctggctactaacataggacaggcaaaggcagagagattcgagtaccacctaggctggtactctccgatactactaagcagacacagaagcaacttaaactttgccagggcctaccaagacgtcacttacaaccctaactgtgacagaggtgtaaaaaacaaagtgtgggttcagtcgctgactaaacccaccacagagttcgatgaaaagagatgcaagtgtgtggtagagaacctgcccctgtgggcggctttgtactgctaccacaactttgtagaagaggagctaggcatctcctctgaaatctacaactcctgcatagtagtagtgcagtgtccttatacctttcctcctctttatgacaaaaagctacccaacaaggggtacatattctatgacaccctgtttggcaacggcaaaatgcccgacggacgcggacaggtagacgtgttccggcagcagcggtggtacccccgcatggccgcacagactcaggtgatgcatgacatcaccatgacaggccccttctcctaccacgacgagctagtaagcacacaactgactgccaagtacacctttgactttatgtggggcggcaatatgatctccacacagatcatcaagaacccctgcaaagacagtggactggaacccgcctatcccggtagacagcgtcgcgacttacaaattgttgacccacactccatgggcccgcaattctcgttccacaactgggactacagacggggcctatttggcaaagacgctatcgacagagtgtcaaaagaaccaagagatgctccagagtatcctaacccatacaaaaggcctagatatgttcctcccacagaccgcgcagaccaagagcaagaaaaagacttcaatttccaggaagaaagcggggcgtcctcgtcagaagagagcgatcaagaagtcctgcaagagacgcaagtactcaagttccagccagagcagcagcagcaactccacctgcagctcgcgcagcagcagcgactcggagagcaactccgattcctactccaccagatgttcaaaacccaagccaatctgcacctaaacccatatacatacacccagctataaacagagtgtttatgtttgaaccccagggccccaggcccataactactagacaggggtgggaggacgagtacacaactgccggcatatggggcaggcccgtccgctccttctacacagacacccctttctaccccgaggttcccaaaataccccctcaattctctgtaagtttcaaactcggctggaaataaaaatacaaggcctttcactgttcacttgtcggtgtctacc

SEQ ID NO: 2074 - protein, 767 aa, Alphatorquevirus sp.
MAWSWWWQRWRRRRWKPRRRRWRRLRRRRPRRPLRRRRRGRRVRRRRWGRRRGRRRRYATRRKRRTKGRNFRKKLVLTQWHPSSIRRCLIKGIVPLVICGHTRWNCNYALHSEDYTEEGRFAHGGSLSTTTWSLKVLYDEFLKHHNFWGYPNNQLDLARYKGAKFTFYRHKKTDFIVFFNRRPPFKLNKYSCASYHPGMLMQQKHKVLIPSYDTKPKGRPKITVRIKPPTLLEDKWYTQQDLCDVNLLQLVVTAADFQHPFCSPQTNTPTTTFQVLKDIYYNTMSISDPLENYNNVNKPTESKSFNEYSKELEEILYTRGSYWNSFHSMEYLNPTTSDKHENKIFANRGTDLTNWLSKRGGNNFQTGDSTQFGHNSYKPDITKIKKARKAYWDALNQPNDLATNIGQAKAERFEYHLGWYSPILLSRHRSNLNFARAYQDVTYNPNCDRGVKNKVWVQSLTKPTTEFDEKRCKCVVENLPLWAALYCYHNFVEEELGISSEIYNSCIVVVQCPYTFPPLYDKKLPNKGYIFYDTLFGNGKMPDGRGQVDVFRQQRWYPRMAAQTQVMHDITMTGPFSYHDELVSTQLTAKYTFDFMWGGNMISTQIIKNPCKDSGLEPAYPGRQRRDLQIVDPHSMGPQFSFHNWDYRRGLFGKDAIDRVSKEPRDAPEYPNPYKRPRYVPPTDRADQEQEKDFNFQEESGASSSEESDQEVLQETQVLKFQPEQQQQLHLQLAQQQRLGEQLRFLLHQMFKTQANLHLNPYTYTQL

SEQ ID NO: 2075 - DNA, 2965 bp, Betatorquevirus sp.
cgggagccgaaggtgagtgaaaccaccgtagtctaggggcaattcgggctagatcagtctagcggaacgggcaagaaactaaatataattttgttttttaggtatgagttctatctggaaacaaccaacatcatcactgagacagaaagagttagcatggagaaacattatgttccaaacccatgatacctggtgccactgcgataatgtcgaccttcacatgctgatttgtatgaataaatttagcggattccaaaaaccagaaattgacatcagaaacatacaatgcctccttaccggtcctactggcaaagaagatactggcaaagacgaagaaacagacgcggctggttttctaaatggagagctagaagacttattcaaagaagaagataccaaagaagaagaagacgtagaccctacaaggtaaaaaaaagaaaatttaaactaaaaaagactaagctaatactgaaacaatttcaaccacagactattaacagatgtaaaattgttggttataaatgtttgtttcaaggtagcccagacagatctagcaaaaattatattcaatatatatacagtgttgtacctcctttttggccgggagggggaggttggagcttgcttgtatttagcctagaaagcctttttgaagactataaccatttacaaaatatatggactagaagtaatgctggactaccacttgttagatttctaggatctcgttttaaattttatcaatcagcagacacagactatattgtatcttatgacagatgctggcccatggtagacacacaacacacacacgcagactcctgtccttctagaatgatacaaaaaaaacataaaatagtaattccatcactaaaaactaaacgcagacgtagaccatacaaatcaaaatttattaaacctcctactcaaatgcaaaacaaatggtactttcaaagagacatatgtaaaataccactattaatgttaacaagtactgctgtagacttaagatatcctttttgtgcacctgaagctaaaagcaactgcattactattagatgcttaagcacttttctttttcaaaatcctaactttgcccattatccacaaactacaggatattggccaaaaaaaacaaacaataatgaaaagttatatttatatgcatcccaaaacagaatagcaacttttaaagaccaagacatcaaaaacttaatacctttatttaatacaagaaattaccaaccaggtacaagtatgggaagcgcaggttatgaagacaatgaaaaatattggggaaaccctttttactatgcctacattaatgatactaaaacagagccaacatactacttatatttatcaaaataccatagttccacaataagatcagaaaattataaaccagaaaaattaactttcactgaagttacaggaccaacaatatatgacgttagatacaatccagaaaaagacactagagaaaaaaataaaatatacttagtaagcactggttctgttgacactatagcaccaccagaaaatcctaattattactttgacggctttccattatatatattactatggagctggacagactggataaaaaaacttaaagacacaccagatatagacaaataccaaatattaattatagatacagatcaatttgatactactctaccacactacttaccaatagacatagacttcactgaaggttttgatccttacacaccaaataaagacaacccacaagtaccacatcatccaaacatttataactcactcaattggcacccaaaactactattccaacaacaaatgatagaaaaaatatgtagaagtggacctgcatgtactagaccagactataatcactatctccaagcatactgtaaatatgaattctactttaaatggggtggctgcccaaaacaattacaaaaagcatatgatccttgcttacagtccaaatggaccacagccgataacttgtctacaagacttgaaattacgaatcctcaaagaccaccagaactcgaactatactcctttgactgggaaaaagactatgttgaacaaaaagctattgaacgaatacaatactacacagaaattgatgaaacaaatatctcatctacaggaaacaagagcaacccaccacccctcaaaaaaatccaagaaaaagacacatcagcggaaaaagaagagaaaacactgtacaagcagctctgccagctcagacagcgacgactcctcctcgagctgcacctccagcaactaacaaatacacaataaaaaactgtacaataaaagttaaactattcgaagacaaaaaaccaaaaaatagactattcacaccatgggaagctcaagaagaaaaagaaatatcacaaatatttcttagaccccaaagaaaatttttctatgactttcctacttatcctatctttccaccaacccctaaagtaccaaaagttaactttgacttaatgtttaaagattaaaaaataaaggccgacaaatttcacttagtggtgtcagtttatttaagttaaaactttaataaacatccgttacctccctatcaatagggcgccaaaatttaaatggggctccgccccctttaacccccaagggggctccgccccctacaacccccaagggggctccgccccctacaacccccaagggggctacgcccccttaccttacacccccttattaatattcaacaggaaaaccacctaattagaattgccgaccacaaaccgtcacttacttccctattttaacaaacttccttttttacttataaatattcataacattaattagtaatctccgtaaatccggggaggtgcttataaactatataactaactacacttccgaatggctgagtttatgccgctagacggagactgaaacacaacagtgtcttcaggctgatcttggg

SEQ ID NO: 2076 - protein, 672 aa, Betatorquevirus sp.
MPPYRSYWQRRYWQRRRNRRGWFSKWRARRLIQRRRYQRRRRRRPYKVKKRKFKLKKTKLILKQFQPQTINRCKIVGYKCLFQGSPDRSSKNYIQYIYSVVPPFWPGGGGWSLLVFSLESLFEDYNHLQNIWTRSNAGLPLVRFLGSRFKFYQSADTDYIVSYDRCWPMVDTQHTHADSCPSRMIQKKHKIVIPSLKTKRRRRPYKSKFIKPPTQMQNKWYFQRDICKIPLLMLTSTAVDLRYPFCAPEAKSNCITIRCLSTFLFQNPNFAHYPQTTGYWPKKTNNNEKLYLYASQNRIATFKDQDIKNLIPLFNTRNYQPGTSMGSAGYEDNEKYWGNPFYYAYINDTKTEPTYYLYLSKYHSSTIRSENYKPEKLTFTEVTGPTIYDVRYNPEKDTREKNKIYLVSTGSVDTIAPPENPNYYFDGFPLYILLWSWTDWIKKLKDTPDIDKYQILIIDTDQFDTTLPHYLPIDIDFTEGFDPYTPNKDNPQVPHHPNIYNSLNWHPKLLFQQQMIEKICRSGPACTRPDYNHYLQAYCKYEFYFKWGGCPKQLQKAYDPCLQSKWTTADNLSTRLEITNPQRPPELELYSFDWEKDYVEQKAIERIQYYTEIDETNISSTGNKSNPPPLKKIQEKDTSAEKEEKTLYKQLCQLRQRRLLLELHLQQLTNTQ

SEQ ID NO: 2077 - DNA, 2965 bp, Alphatorquevirus sp.
cgaatcgctcgcgcgattcggcacaccgcagtctaggggcaattcgggcacgggtctggccgggctatgggcaagactcttaaaaaactccctcgctgtgttctccgccaggacatcaagtcatgccgtggcgaccgccggtgcataacatcccgggcagggaaaaccagtggtttgcaaacgtttttcactcgcatgcagctttttgcggctgcggtgacgctgtcgggcatcttaatagcattgctcctcgctttcctaacgccggtcctccgagaccacctccagggctagaccagcccaacctgggagggccggaaggtcccggaggtccccccagagccctaccagctctgccggccccggcagagcctgagccggcaccacgccgtggtggtggggaagatggaggcggcgccgctggggccgccgccgccggagaccatggaggctacgaagaagaagatctagaagatcttttcgccgcggccaccgaagacgatatgtgagtaggcggtggcgccgccgcaatttcaggcgcagacgcagacggggcagacgcagggggcgacgaaagagacacaagcccacccttgtactcagacagtggcaacctgacgtagtcagaccctgcaaaataacaggatggatgcccctaattatttgtgggtcaggaagcacccagttcaactttataacccacatggatgactttcctcccatggggcacacctacggaggcaacttcaccaaccttaccttctccttagaagcagtatatgaacagtttatgtaccacagaaacaggtggagctcctctaaccatgacctggacctggccaggtaccagggaaccaccctaaaactctacagacacgaatacctagactacataatcagctacaacagaacaggcccttttcagatcagtgacatgacctacctgagcactcaccctgccttcatgctgctgcaaaaacacaggatagtagtgcccagctttaagaccaaaccacacgggcgcaggtccataaaagttagaataaagcccccaaaactcatgctaaacaagtggtacttcaccaaagacatatgcagcatgggcctcttccagctacaagccacagcatgcaccttaaacaacccctggctcagagacagcacaaaaagcccagtcataggcttcagagtacttaagaacagcatatacactaacctcagcaacctacctgagcatgacggttccagaaaagccattaaaaacagactacacccagagagtcttacaggctcagttccaaaccaaaaaggttgggagattagctacacaaaactaatggctccaatatattaccaagccaacagaagcagcacatacaactggctaaactaccaacaaaactattctactacttacaacacatttaaacacaaaatgaatgaaaatctacagctcatacaaaaagaatacaattaccactaccccaacaataccaccacagacttaatagataaaaacaccctaacacatgactggggcatatacagtccctactggctaactccaacaagaattagcctagactgggaaacaccctggacatatgttagatacaacccactagcagacaaaggcataggcaatgttgtatacgcacagtggtgctcagaacagagctgcaaagtagaccaaaagaagagcaagtgcataatgagagacctgccactgtgggtcatattctatggctacatagactgggtagttaaatccacaggcgtcagcagcgcagtcactgacatgagagtagccatcataagcccctacaccgagccggcacttatagggtcaacaccagacgtaggcttcattccagtaagtgacaccttttgcaacggagacatgccgtttcttgctccatacatccctgtgggctggtggattaagtggtaccccatgattgcacaccaaaaggaagtgtttgaggcaatagttaactgtggaccgtttgtcccacgagaccagacaaaaccctcttgggaaattaccatgggttacaaaatgaactggaaatggggcggctctcccctgccttcacaggcaatcgacgacccttgtcagaagcccacccatgaactacccgatcccgatagacaccctcgcatgctacaagtctcagacccgacaaaactcggaccgaagacagtgttccacaagtgggactggagacgtgggatgcttagcaaaagaagtattaaaagagtccaagaagactcaagcgatgatgaatatgttgcaggacctttgcaaagaaaaagacacaagatggataccagagcagcaggactgcaaaccccagaaaaagaaagttacactttactccaagccctccaagactcggcagaagagaccctctcgaaccaagaacaagcaccccaagaaaaagaggtacaggaagaagcgctcctggagcagctccagctccagaaacagcaccagcgagtcctcaaacgaggcctcaaactcctcctgggagacgtcctccgactccgccgaggagtccactgggatcccctcctgtcataattcagggtccctctatcccagacctgcttttccctaacacacaaaaaaaaaagaaattttccaactacgactggtcagtagagtacgagctggccaaatggatggatcgtcctttgcggcacttcccatccgacctccctcactacccctggctaccaaaaaagccacctacccctcctacatgtagagtaagtttcaaattaaagctggattcctaactttcaaggccgtgggtgtttcacttcatcggtgtctacctctataagtcactaagcactccgagcgaagcgaggagtgcgacccccctgcccggtagcaacttcctcggggtccggcgctacgccttcggctgcgccagacgcctcggaccccccctcgacc

SEQ ID NO: 2078 - protein, 644 aa, Alphatorquevirus sp.
MPLIICGSGSTQFNFITHMDDFPPMGHTYGGNFTNLTFSLEAVYEQFMYHRNRWSSSNHDLDLARYQGTTLKLYRHEYLDYIISYNRTGPFQISDMTYLSTHPAFMLLQKHRIVVPSFKTKPHGRRSIKVRIKPPKLMLNKWYFTKDICSMGLFQLQATACTLNNPWLRDSTKSPVIGFRVLKNSIYTNLSNLPEHDGSRKAIKNRLHPESLTGSVPNQKGWEISYTKLMAPIYYQANRSSTYNWLNYQQNYSTTYNTFKHKMNENLQLIQKEYNYHYPNNTTTDLIDKNTLTHDWGIYSPYWLTPTRISLDWETPWTYVRYNPLADKGIGNVVYAQWCSEQSCKVDQKKSKCIMRDLPLWVIFYGYIDWVVKSTGVSSAVTDMRVAIISPYTEPALIGSTPDVGFIPVSDTFCNGDMPFLAPYIPVGWWIKWYPMIAHQKEVFEAIVNCGPFVPRDQTKPSWEITMGYKMNWKWGGSPLPSQAIDDPCQKPTHELPDPDRHPRMLQVSDPTKLGPKTVFHKWDWRRGMLSKRSIKRVQEDSSDDEYVAGPLQRKRHKMDTRAAGLQTPEKESYTLLQALQDSAEETLSNQEQAPQEKEVQEEALLEQLQLQKQHQRVLKRGLKLLLGDVLRLRRGVHWDPLLS

SEQ ID NO: 2079 - DNA, 2965 bp, Alphatorquevirus sp.
ggtcactaagcactccgagcgttagcgagagtcaaggggcaattcgggctcgggactggccgggctatgggcaaggctcttaaagcttatcactctaaaaaatgtttcttggcaggccttacaggaaaaagaaaaggacgctgtcactgtctggcgtgccagctccaccggctaaacggtctcgggagatgacctggcgccccccggttcacaatgccgccggcattgataggcagttttttgaagcctgctttcgatgccacgctggttgctgtgggtgcggcagttttattaatcatcttaatgtactggctgctcgctatggctttactggggggccggcgccgccaggtggtcctgggccgcgtgcgcaagtgaggcccgcgcttccagcgccggagcccgacccccacgccgagaaccgtgagccatggcgtggagctggtggtggcaacgatggagacggcgccgctggaaacccaggaggcgccgctggagacgcctacgatggagaagacctagacgcgctgttcgccgccgtcgccgaggacgcagagtaaggaggcggaggtgggcgcgtagacgggggcgacgcagacgatacgctaccagacgaaagagacgtatcaggggtcgccgctatagaaagaaactagtactaactcagtggcaccccagtactatgagacgctgtctaataaagggcatagttccaatggtgatatgcggccacaccagatggaactacaactacgccctccacagcgaggactacaccgaggagggccgctaccctcacggagggtccctcagcaccactacgtggtcccttaaggttctctatgacgaataccttaaacaccgcaacctctggggctatcccaacaatcagctagaccttgccaggtacaaaggtgccaggttcaccttctacagacacaaaaagactgactttatagtgtactttaacagaaagcctccctttaaacttaacaaatacagctgcccttcctatcaccccggcatgcttatgcagcagagacacaagatactaatacccagctacgacaccaaacccaagggcaggccaaaaataactgttagaataaagccccccactctgttagaggacaagtggtacacccagcaggacctgtgtaacgttaacctgttgcaacttgtggtttctgcggctgactttcaacatccgttctgctcaccacaaacgaacactccaaccacaaccttccaggtgttgaaagacatatattatgacaccatgagcatatctgaccctacagacagctacagtagtgttaataatttaactgaaacaaacactttttccaacttttcaaccaagttagaaaatattttatacacacgggcgtcctactggaactcgttccacgccacagagtacgtaaacccaaacattatttacaaagatggacagaaactttttacaaaaaatacagagttaacaaattggatgacacaaactaaccaaacaggttttttaactaaaaacaacacttcatttggtaataatagttatagaccaaataaagacaagataacaacagcaagaaacatttactggaatgccctagtgggcaccaacgacctggccactaacataggccaggccagagcagaacggtttgagtaccacctaggctggtactcacctatatttctcagcagacacagaagcaacctgaactttgccagggcctaccaagacgttacatacaacccaaactgtgacaggggagttaaaaatagagtgtggattcagtctctcactaaacccaccacagagtttgacgagaaaaggtgcaagtgcgttgtagaaaacctgcctctgtggagcgccctgtactgctaccaggactttgtagaagaagagctaggtacatcttcggagatactcaactcatgcttactggtagtgcagtgcccgtacacttctccacccatgtatgacaaaaaactacctaacaagggattcgtattctacgactccctgtttggagacggcaaaatgtctgacggacgcggacaggtagacattttctggcaacagcgatggtaccctcgcttagccactcagatgcaagtaatgcatgacattaccaaaaccggacccttttcctaccgagacgacctagtatcaacacaactgactgcaaagtacacctttgactttatgtggggcggtaatatgatctccacacagatcatcaagaacccctgcaaagacagtggactggaacccgcctaccccagtagactccgtcgcgacttacaaattgttgacccatactccatgggcccccagttctcattccacaactgggactacagacatggtctatttggccaagacgctatcgacagagtgtcaaaacaaccaaaagatgctgcagactatcctaacccatacaaaaggcctagatattttccacccacagaccaagccgttcaagagcaagaagaagacttcaatttcctcaaaacagcaccgtcgtcctcagaagagagcgatcaagaagtcctcgaaaaaacgcaagtactccagttccagccagagcagcacaagcaactccacctgcagctcgcagagcagcagcgaatgggagaccaactcagattcctactccaacaaatgttcaaaacccaagccaatctgcacctaaacccatatacatacacccagctataaacaaagtgttcatgttccccccagagggtcccaggcctatcacaacccgggagggatgggaagacgagtactgcaccgccaaacactggggcagacccgtccgttcgtactacacggacatccccttctatccagaggttcctaaagtaccccctcaattctctgtaactttcaaactcggctggaaataaaaatacaaggcctttcactgttcacttgtcggtgtctacctcttaa

SEQ ID NO: 2080 - protein, 765 aa, Alphatorquevirus sp.
MAWSWWWQRWRRRRWKPRRRRWRRLRWRRPRRAVRRRRRGRRVRRRRWARRRGRRRRYATRRKRRIRGRRYRKKLVLTQWHPSTMRRCLIKGIVPMVICGHTRWNYNYALHSEDYTEEGRYPHGGSLSTTTWSLKVLYDEYLKHRNLWGYPNNQLDLARYKGARFTFYRHKKTDFIVYFNRKPPFKLNKYSCPSYHPGMLMQQRHKILIPSYDTKPKGRPKITVRIKPPTLLEDKWYTQQDLCNVNLLQLVVSAADFQHPFCSPQTNTPTTTFQVLKDIYYDTMSISDPTDSYSSVNNLTETNTFSNFSTKLENILYTRASYWNSFHATEYVNPNIIYKDGQKLFTKNTELTNWMTQTNQTGFLTKNNTSFGNNSYRPNKDKITTARNIYWNALVGTNDLATNIGQARAERFEYHLGWYSPIFLSRHRSNLNFARAYQDVTYNPNCDRGVKNRVWIQSLTKPTTEFDEKRCKCVVENLPLWSALYCYQDFVEEELGTSSEILNSCLLVVQCPYTSPPMYDKKLPNKGFVFYDSLFGDGKMSDGRGQVDIFWQQRWYPRLATQMQVMHDITKTGPFSYRDDLVSTQLTAKYTFDFMWGGNMISTQIIKNPCKDSGLEPAYPSRLRRDLQIVDPYSMGPQFSFHNWDYRHGLFGQDAIDRVSKQPKDAADYPNPYKRPRYFPPTDQAVQEQEEDFNFLKTAPSSSEESDQEVLEKTQVLQFQPEQHKQLHLQLAEQQRMGDQLRFLLQQMFKTQANLHLNPYTYTQL

SEQ ID NO: 2081 - protein, 152 aa, Alphatorquevirus sp.; identical to SEQ ID NO: 146

SEQ ID NO: 2082 - protein, 59 aa, Alphatorquevirus sp.; identical to SEQ ID NO: 147

SEQ ID NO: 2083 - DNA, 2965 bp, Betatorquevirus sp.
cgggagccggaggtgagtgaaaccaccgtagtctaggggcaattcgggctagatcagtctggcggaacgggcaagaaacttaatatattttattttacagatgagtaaactctacaaacctctaaatatcagcttaaaccacaaaaacttacaatggatgaatgctcaagtcgctcttcatgatatgcactgccaatgtgacgagccattaagacacatcattctacaaatcatagaaaaagaaccaactataaaatttaacaaagaagaatctattaaaattcaaaaatgccttactactggagaagaagacgatggcgacgtacttggcgccggagacctagatacccttttcgcagaagacgtttttggagaagaagacaacgatgggtaagaaaacccaaaagaaaacttaaaaaaataactattaaacaatggcaaccaagtactattagaaaactaactgttaaaggacaataccccctttttgccggaacctcagacagaattgccaatgactatactgcttatgtagatgaaattgctccaaaagatgttccaggcgggggactatacagtattacagtattcactttacaaggattatatgaactgcaccaaaagggtagaaattggtggacacaatctaactgtgacttgcctttaattagatattcaggatgtactataaaactttactttaacccttcagcagactatataactactataattaactgtggagaacttaaagctaatttagaaatgtttcaatctacacaaccttctgttttactacttaacaaaaaaaaaagagtaatgctatgtagaaactataaaagaaaacgcagaccatataaaaaatggtttatacaacctcctgcaatgttatataacaaatggtattttcaaaaagaactaagtacatacccactattaatgttaataactgctgccggtagctttgacagatactatcaaggagctaactcaatttcagaaacaataggattccaatctttaaacacagacttttttgttatacacagctggaaatttccatcaacattaccatacagaccaaatgatagattttatatgtttggcataggaggtactacaacatttgacgaagccacacctcaacaattaatattactaggaaatcctacagataacacaaaaggattaactataggaacagctactgccagtgactggcaacaaaaagttacacaatatttagctaaatccacaaactggggtaatccatttcaccctaattggctacatgccgatgaaggagaaggccttatatgccttttagaagtaactggaacaatgacactagaacaaaaactaaaatcactaaccccaacagcaactttaaaatcacaacactttattgaaccaacaaaaccatttacagtacattgcagatataatccacaagcagacatgggtagaaactccatatttgtaaccagaataacaggagacaacacaccttggcacaaaccaagcgatgaacacctattaacacaaggcctaccactatggctactacactggggatggctagactacttaagaaaatcaggaacaccacaaagactagatacagactacattcatgtaatagtatcagaccacataagtcccaaagaattatcctactatgtacctatagattatgactttttaaatggaaaaagtccttattctgaccatataaaaccctatgaccaacaaaactggcatccaaaaattaactttcaacaaaaaagcatagcacatatatgccaaagtggaccactaacaattaaattaccacaagatattagtgctactgctcactttagttataaatttcattttaagctcggaggctgcccaccagcaatggacaaagtttgtgaaccagctaaacaaccctcctatcctcaacccggtaacctcctatcgtcaattatattgcagaacccacaaactccaattgaatacttcctcagctcctttgatcaaagaagggaactccttacagaaagagctgcaaagcgcctcaaaaaagaccaagaatttaaagaaactgttcttaaacctacaggacaaactctcctcgacgtccaaatgtcatcccctcaaacaacatcgtcagaagacacatcgtcggaggaagaaagcgaggaggagacacagcagcagctccacagacaccagcgaaaacacagaaaactccagcgaggaattctcaagctcctgaacctactccaacattcaaaataattaatagcacaataaaagtaaacctttttcctgaaactaaacaaaaaaatagacgccttacggcaaaagagagaagtgacgatatacaagatgctaaaatatggggtagatatgtaaaaaattatttactggaaactcatttttataaagatgtacctattacacccttaattccccgtatcaactttgaccttggttacaaacaataaagcctgcatactttcacacctcggtgtccatttatttaagtttaaacctatataaacatccaccacactccctaatacgcaggcgcaaaagggggctccgcccccttaaaccccaagggggctccgcccccttaaacccccaggggggataccccccttaaaaccccccaaaaaccacaacattacaataatttaccacaaacgaacaggaaaccacaaaatttgcatggccgaccacaaacgaacaggaaacccacaaaatttgcattgccgaccacaaaccgtcactaacttccctaaactacaatacttccccttttactcataaatattcattgcattaattagtaatcaccgtaattcctgggcgtatctaaactacctatataaccaagtacactgacgaatggctgagtttacgccgccagacggagacaggatcacttcagtgactccaggctgatcttggg

SEQ ID NO: 2084 - protein, 665 aa, Betatorquevirus sp.
MPYYWRRRRWRRTWRRRPRYPFRRRRFWRRRQRWVRKPKRKLKKITIKQWQPSTIRKLTVKGQYPLFAGTSDRIANDYTAYVDEIAPKDVPGGGLYSITVFTLQGLYELHQKGRNWWTQSNCDLPLIRYSGCTIKLYFNPSADYITTIINCGELKANLEMFQSTQPSVLLLNKKKRVMLCRNYKRKRRPYKKWFIQPPAMLYNKWYFQKELSTYPLLMLITAAGSFDRYYQGANSISETIGFQSLNTDFFVIHSWKFPSTLPYRPNDRFYMFGIGGTTTFDEATPQQLILLGNPTDNTKGLTIGTATASDWQQKVTQYLAKSTNWGNPFHPNWLHADEGEGLICLLEVTGTMTLEQKLKSLTPTATLKSQHFIEPTKPFTVHCRYNPQADMGRNSIFVTRITGDNTPWHKPSDEHLLTQGLPLWLLHWGWLDYLRKSGTPQRLDTDYIHVIVSDHISPKELSYYVPIDYDFLNGKSPYSDHIKPYDQQNWHPKINFQQKSIAHICQSGPLTIKLPQDISATAHFSYKFHFKLGGCPPAMDKVCEPAKQPSYPQPGNLLSSIILQNPQTPIEYFLSSFDQRRELLTERAAKRLKKDQEFKETVLKPTGQTLLDVQMSSPQTTSSEDTSSEEESEEETQQQLHRHQRKHRKLQRGILKLLNLLQHSK

(The sequence listing continues in the following parts.)
